United States Patent Application Publication US 2014/0004565 A1 - sequence listing, part 89

SEQ ID NO: 2198121 - RNA, 19 nt, Artificial Sequence
  Description of Artificial Sequence: Synthetic oligonucleotide
cacugaacagacaccgagu

SEQ ID NO: 2198122 - RNA, 19 nt, Artificial Sequence
  Description of Artificial Sequence: Synthetic oligonucleotide
gccugggcugcuugggagg

SEQ ID NO: 2198123 - RNA, 19 nt, Artificial Sequence
  Description of Artificial Sequence: Synthetic oligonucleotide
ggauagggcgggaucagca

SEQ ID NO: 2198124 - RNA, 19 nt, Artificial Sequence
  Description of Artificial Sequence: Synthetic oligonucleotide
cuugggacuggcagaucaa

SEQ ID NO: 2198125 - RNA, 19 nt, Artificial Sequence
  Description of Artificial Sequence: Synthetic oligonucleotide
gacaccggugcuacaucuc

SEQ ID NO: 2198126 - RNA, 19 nt, Artificial Sequence
  Description of Artificial Sequence: Synthetic oligonucleotide
ccaugaaaacuugcccucc

SEQ ID NO: 2198127 - RNA, 19 nt, Artificial Sequence
  Description of Artificial Sequence: Synthetic oligonucleotide
cuugggauagaaacuucuu

SEQ ID NO: 2198128 - RNA, 19 nt, Artificial Sequence
  Description of Artificial Sequence: Synthetic oligonucleotide
aggucccaacagcacccug

SEQ ID NO: 2198129 - RNA, 19 nt, Artificial Sequence
  Description of Artificial Sequence: Synthetic oligonucleotide
cucuuuggcugacagcccu

SEQ ID NO: 2198130 - RNA, 19 nt, Artificial Sequence
  Description of Artificial Sequence: Synthetic oligonucleotide
guagauccugaacccaaau

SEQ ID NO: 2198131 - RNA, 19 nt, Artificial Sequence
  Description of Artificial Sequence: Synthetic oligonucleotide
cccugagcacccauuuccc

SEQ ID NO: 2198132 - RNA, 19 nt, Artificial Sequence
  Description of Artificial Sequence: Synthetic oligonucleotide
gguguguggcuccagggcu

SEQ ID NO: 2198133 - RNA, 19 nt, Artificial Sequence
  Description of Artificial Sequence: Synthetic oligonucleotide
cuggcagaucaaaccaucu

SEQ ID NO: 2198134 - RNA, 19 nt, Artificial Sequence
  Description of Artificial Sequence: Synthetic oligonucleotide
gacccugguucacaggcau

SEQ ID NO: 2198135 - RNA, 19 nt, Artificial Sequence
  Description of Artificial Sequence: Synthetic oligonucleotide
caccggugcuacaucucuc

SEQ ID NO: 2198136 - RNA, 19 nt, Artificial Sequence
  Description of Artificial Sequence: Synthetic oligonucleotide
ccaaggauagggcgggauc

SEQ ID NO: 2198137 - RNA, 19 nt, Artificial Sequence
  Description of Artificial Sequence: Synthetic oligonucleotide
augucacgaaugauuugaa

SEQ ID NO: 2198138 - RNA, 19 nt, Artificial Sequence
  Description of Artificial Sequence: Synthetic oligonucleotide
aggggcgguuggccauccc

SEQ ID NO: 2198139 - RNA, 19 nt, Artificial Sequence
  Description of Artificial Sequence: Synthetic oligonucleotide
aggcacucucaaugacacu

SEQ ID NO: 2198140 - RNA, 19 nt, Artificial Sequence
  Description of Artificial Sequence: Synthetic oligonucleotide
ccaggcacucucaaugaca

SEQ ID NO: 2198141 - RNA, 19 nt, Artificial Sequence
  Description of Artificial Sequence: Synthetic oligonucleotide
cacaaaucccagggugguc

SEQ ID NO: 2198142 - RNA, 19 nt, Artificial Sequence
  Description of Artificial Sequence: Synthetic oligonucleotide
uacuuucccugagcaccca

SEQ ID NO: 2198143 - RNA, 19 nt, Artificial Sequence
  Description of Artificial Sequence: Synthetic oligonucleotide
cugucccuggccuuagcua

SEQ ID NO: 2198144 - RNA, 19 nt, Artificial Sequence
  Description of Artificial Sequence: Synthetic oligonucleotide
ggcacucucaaugacacuu

SEQ ID NO: 2198145 - RNA, 19 nt, Artificial Sequence
  Description of Artificial Sequence: Synthetic oligonucleotide
agucaacuugggacuggca

SEQ ID NO: 2198146 - RNA, 19 nt, Artificial Sequence
  Description of Artificial Sequence: Synthetic oligonucleotide
ccacccauggccugagguc

SEQ ID NO: 2198147 - RNA, 19 nt, Artificial Sequence
  Description of Artificial Sequence: Synthetic oligonucleotide
gacgcaggucaguaagcau

SEQ ID NO: 2198148 - RNA, 19 nt, Artificial Sequence
  Description of Artificial Sequence: Synthetic oligonucleotide
gguccugaaggacaccggu

SEQ ID NO: 2198149 - RNA, 19 nt, Artificial Sequence
  Description of Artificial Sequence: Synthetic oligonucleotide
gcagaucaaaccaucucua

SEQ ID NO: 2198150 - RNA, 19 nt, Artificial Sequence
  Description of Artificial Sequence: Synthetic oligonucleotide
cucugccuccucccaccgc

SEQ ID NO: 2198151 - RNA, 19 nt, Artificial Sequence
  Description of Artificial Sequence: Synthetic oligonucleotide
cggugcuacaucucucccc

SEQ ID NO: 2198152 - RNA, 19 nt, Artificial Sequence
  Description of Artificial Sequence: Synthetic oligonucleotide
cgggaucagcacaaauccc

SEQ ID NO: 2198153 - RNA, 19 nt, Artificial Sequence
  Description of Artificial Sequence: Synthetic oligonucleotide
gacuggcagaucaaaccau

SEQ ID NO: 2198154 - RNA, 19 nt, Artificial Sequence
  Description of Artificial Sequence: Synthetic oligonucleotide
cuccucccaccgcuagcag

SEQ ID NO: 2198155 - RNA, 19 nt, Artificial Sequence
  Description of Artificial Sequence: Synthetic oligonucleotide
cagggaaacaagcccuccu

SEQ ID NO: 2198156 - RNA, 19 nt, Artificial Sequence
  Description of Artificial Sequence: Synthetic oligonucleotide
cagugggguaggcaugaaa

SEQ ID NO: 2198157 - RNA, 19 nt, Artificial Sequence
  Description of Artificial Sequence: Synthetic oligonucleotide
guguguggcuccagggcuc

SEQ ID NO: 2198158 - RNA, 19 nt, Artificial Sequence
  Description of Artificial Sequence: Synthetic oligonucleotide
cuaaggaaagagggugcua

SEQ ID NO: 2198159 - RNA, 19 nt, Artificial Sequence
  Description of Artificial Sequence: Synthetic oligonucleotide
gccaggcacucucaaugac

SEQ ID NO: 2198160 - RNA, 19 nt, Artificial Sequence
  Description of Artificial Sequence: Synthetic oligonucleotide
gccuuagcuaugccaccug

SEQ ID NO: 2198161 - RNA, 19 nt, Artificial Sequence
  Description of Artificial Sequence: Synthetic oligonucleotide
agacaccgagugcccugcu

SEQ ID NO: 2198162 - RNA, 19 nt, Artificial Sequence
  Description of Artificial Sequence: Synthetic oligonucleotide
guagucccuggagccagca

SEQ ID NO: 2198163 - RNA, 19 nt, Artificial Sequence
  Description of Artificial Sequence: Synthetic oligonucleotide
gcagaggggcgguuggcca

SEQ ID NO: 2198164 - RNA, 19 nt, Artificial Sequence
  Description of Artificial Sequence: Synthetic oligonucleotide
ggacaccggugcuacaucu

SEQ ID NO: 2198165 - RNA, 19 nt, Artificial Sequence
  Description of Artificial Sequence: Synthetic oligonucleotide
agcagggaccuuggccaug

SEQ ID NO: 2198166 - RNA, 19 nt, Artificial Sequence
  Description of Artificial Sequence: Synthetic oligonucleotide
gggccaugauggcucugcc

SEQ ID NO: 2198167 - RNA, 19 nt, Artificial Sequence
  Description of Artificial Sequence: Synthetic oligonucleotide
gcuaugccaccugugaacu

SEQ ID NO: 2198168 - RNA, 19 nt, Artificial Sequence
  Description of Artificial Sequence: Synthetic oligonucleotide
ggggauacccagcaggcuu

SEQ ID NO: 2198169 - RNA, 19 nt, Artificial Sequence
  Description of Artificial Sequence: Synthetic oligonucleotide
ugggaucucuggggccaug

SEQ ID NO: 2198170 - RNA, 19 nt, Artificial Sequence
  Description of Artificial Sequence: Synthetic oligonucleotide
accccacaccuagcugggg

SEQ ID NO: 2198171 - RNA, 19 nt, Artificial Sequence
  Description of Artificial Sequence: Synthetic oligonucleotide
gucccuggccuuagcuaug

SEQ ID NO: 2198172 - RNA, 19 nt, Artificial Sequence
  Description of Artificial Sequence: Synthetic oligonucleotide
uggggcucuuuggcugaca

SEQ ID NO: 2198173 - RNA, 19 nt, Artificial Sequence
  Description of Artificial Sequence: Synthetic oligonucleotide
gguuggccauccccacccc

SEQ ID NO: 2198174 - RNA, 19 nt, Artificial Sequence
  Description of Artificial Sequence: Synthetic oligonucleotide
gaggggcgguuggccaucc

SEQ ID NO: 2198175 - RNA, 19 nt, Artificial Sequence
  Description of Artificial Sequence: Synthetic oligonucleotide
gugcuacaucucuccccac

SEQ ID NO: 2198176 - RNA, 19 nt, Artificial Sequence
  Description of Artificial Sequence: Synthetic oligonucleotide
gaguucccaugacgcaggu

SEQ ID NO: 2198177 - RNA, 19 nt, Artificial Sequence
  Description of Artificial Sequence: Synthetic oligonucleotide
gcacucucaaugacacuuc

SEQ ID NO: 2198178 - RNA, 19 nt, Artificial Sequence
  Description of Artificial Sequence: Synthetic oligonucleotide
cuuuaccaggaggucccaa

SEQ ID NO: 2198179 - RNA, 19 nt, Artificial Sequence
  Description of Artificial Sequence: Synthetic oligonucleotide
cuaugccaccugugaacua

SEQ ID NO: 2198180 - RNA, 19 nt, Artificial Sequence
  Description of Artificial Sequence: Synthetic oligonucleotide
ccggugcuacaucucuccc

SEQ ID NO: 2198181 - RNA, 19 nt, Artificial Sequence
  Description of Artificial Sequence: Synthetic oligonucleotide
cagggaccuuggccauggg

SEQ ID NO: 2198182 - RNA, 19 nt, Artificial Sequence
  Description of Artificial Sequence: Synthetic oligonucleotide
ccgcuagcagcucaaaugu

SEQ ID NO: 2198183 - RNA, 19 nt, Artificial Sequence
  Description of Artificial Sequence: Synthetic oligonucleotide
ggcuugggauagaaacuuc

SEQ ID NO: 2198184 - RNA, 19 nt, Artificial Sequence
  Description of Artificial Sequence: Synthetic oligonucleotide
cucccacccauggccugag

SEQ ID NO: 2198185 - RNA, 19 nt, Artificial Sequence
  Description of Artificial Sequence: Synthetic oligonucleotide
ggcagccugucagggaaac

SEQ ID NO: 2198186 - RNA, 19 nt, Artificial Sequence
  Description of Artificial Sequence: Synthetic oligonucleotide
ggauacccagcaggcuuug

SEQ ID NO: 2198187 - RNA, 19 nt, Artificial Sequence
  Description of Artificial Sequence: Synthetic oligonucleotide
gggugcuaagucauagggu

SEQ ID NO: 2198188 - RNA, 19 nt, Artificial Sequence
  Description of Artificial Sequence: Synthetic oligonucleotide
cccaacagcacccugucuu

SEQ ID NO: 2198189 - RNA, 19 nt, Artificial Sequence
  Description of Artificial Sequence: Synthetic oligonucleotide
caccucagugggguaggca

SEQ ID NO: 2198190 - RNA, 19 nt, Artificial Sequence
  Description of Artificial Sequence: Synthetic oligonucleotide
gaccaaggauagggcggga

SEQ ID NO: 2198191 - RNA, 19 nt, Artificial Sequence
  Description of Artificial Sequence: Synthetic oligonucleotide
uggggccaugauggcucug

SEQ ID NO: 2198192 - RNA, 19 nt, Artificial Sequence
  Description of Artificial Sequence: Synthetic oligonucleotide
gggcgguuggccaucccca

SEQ ID NO: 2198193 - RNA, 19 nt, Artificial Sequence
  Description of Artificial Sequence: Synthetic oligonucleotide
  modified_base (15)..(15): a, c, u, g, unknown or other
cugacagcccuuccncuuu

SEQ ID NO: 2198194 - RNA, 19 nt, Artificial Sequence
  Description of Artificial Sequence: Synthetic oligonucleotide
gggcuugggauagaaacuu

SEQ ID NO: 2198195 - RNA, 19 nt, Artificial Sequence
  Description of Artificial Sequence: Synthetic oligonucleotide
ggccugaggucaggacagg

SEQ ID NO: 2198196 - RNA, 19 nt, Artificial Sequence
  Description of Artificial Sequence: Synthetic oligonucleotide
gcaucuguugacccugguu

SEQ ID NO: 2198197 - RNA, 19 nt, Artificial Sequence
  Description of Artificial Sequence: Synthetic oligonucleotide
cuggggcucuuuggcugac

SEQ ID NO: 2198198 - RNA, 19 nt, Artificial Sequence
  Description of Artificial Sequence: Synthetic oligonucleotide
  modified_base (8)..(8): a, c, u, g, unknown or other
cccuuccncuuuaccagga

SEQ ID NO: 2198199 - RNA, 19 nt, Artificial Sequence
  Description of Artificial Sequence: Synthetic oligonucleotide
caacagcacccugucuuua

SEQ ID NO: 2198200 - RNA, 19 nt, Artificial Sequence
  Description of Artificial Sequence: Synthetic oligonucleotide
ggccuuagcuaugccaccu

SEQ ID NO: 2198201 - RNA, 19 nt, Artificial Sequence
  Description of Artificial Sequence: Synthetic oligonucleotide
cacaggcgcuugcugccaa

SEQ ID NO: 2198202 - RNA, 19 nt, Artificial Sequence
  Description of Artificial Sequence: Synthetic oligonucleotide
caccgcuagcagcucaaau

SEQ ID NO: 2198203 - RNA, 19 nt, Artificial Sequence
  Description of Artificial Sequence: Synthetic oligonucleotide
cgcuagcagcucaaauguc

SEQ ID NO: 2198204 - RNA, 19 nt, Artificial Sequence
  Description of Artificial Sequence: Synthetic oligonucleotide
cugagaaaguggggacugu

SEQ ID NO: 2198205 - RNA, 19 nt, Artificial Sequence
  Description of Artificial Sequence: Synthetic oligonucleotide
cacaggcauccugggaucu

SEQ ID NO: 2198206 - RNA, 19 nt, Artificial Sequence
  Description of Artificial Sequence: Synthetic oligonucleotide
cagaggggcgguuggccau

SEQ ID NO: 2198207 - RNA, 19 nt, Artificial Sequence
  Description of Artificial Sequence: Synthetic oligonucleotide
agggcgggaucagcacaaa

SEQ ID NO: 2198208 - RNA, 19 nt, Artificial Sequence
  Description of Artificial Sequence: Synthetic oligonucleotide
ccaugacgcaggucaguaa

SEQ ID NO: 2198209 - RNA, 19 nt, Artificial Sequence
  Description of Artificial Sequence: Synthetic oligonucleotide
gcuaagucauaggguuucu

SEQ ID NO: 2198210 - RNA, 19 nt, Artificial Sequence
  Description of Artificial Sequence: Synthetic oligonucleotide
gcaccucagugggguaggc

SEQ ID NO: 2198211 - RNA, 19 nt, Artificial Sequence
  Description of Artificial Sequence: Synthetic oligonucleotide
cccaugacgcaggucagua

SEQ ID NO: 2198212 - RNA, 19 nt, Artificial Sequence
  Description of Artificial Sequence: Synthetic oligonucleotide
cacaccuagcuggggcucu

SEQ ID NO: 2198213 - RNA, 19 nt, Artificial Sequence
  Description of Artificial Sequence: Synthetic oligonucleotide
cccacccauggccugaggu

SEQ ID NO: 2198214 - RNA, 19 nt, Artificial Sequence
  Description of Artificial Sequence: Synthetic oligonucleotide
caagcccuccuggcuaccu

SEQ ID NO: 2198215 - RNA, 19 nt, Artificial Sequence
  Description of Artificial Sequence: Synthetic oligonucleotide
ccuggcuaccugguccuga

SEQ ID NO: 2198216 - RNA, 19 nt, Artificial Sequence
  Description of Artificial Sequence: Synthetic oligonucleotide
cccaccgcuagcagcucaa

SEQ ID NO: 2198217 - RNA, 19 nt, Artificial Sequence
  Description of Artificial Sequence: Synthetic oligonucleotide
gggauacccagcaggcuuu

SEQ ID NO: 2198218 - RNA, 19 nt, Artificial Sequence
  Description of Artificial Sequence: Synthetic oligonucleotide
gcacaggcgcuugcugcca

SEQ ID NO: 2198219 - RNA, 19 nt, Artificial Sequence
  Description of Artificial Sequence: Synthetic oligonucleotide
ccaacagcacccugucuuu

SEQ ID NO: 2198220 - RNA, 19 nt, Artificial Sequence
  Description of Artificial Sequence: Synthetic oligonucleotide
gggcgggaucagcacaaau

SEQ ID NO: 2198221 - RNA, 19 nt, Artificial Sequence
  Description of Artificial Sequence: Synthetic oligonucleotide
ggguguuggcugacaggcu

SEQ ID NO: 2198222 - RNA, 19 nt, Artificial Sequence
  Description of Artificial Sequence: Synthetic oligonucleotide
ccucccacccauggccuga

SEQ ID NO: 2198223 - RNA, 19 nt, Artificial Sequence
  Description of Artificial Sequence: Synthetic oligonucleotide
ggguccucuggggcagccu

SEQ ID NO: 2198224 - RNA, 19 nt, Artificial Sequence
  Description of Artificial Sequence: Synthetic oligonucleotide
ccaccgcuagcagcucaaa

SEQ ID NO: 2198225 - RNA, 19 nt, Artificial Sequence
  Description of Artificial Sequence: Synthetic oligonucleotide
caccuagcuggggcucuuu

SEQ ID NO: 2198226 - RNA, 19 nt, Artificial Sequence
  Description of Artificial Sequence: Synthetic oligonucleotide
  modified_base (1)..(1): a, c, u, g, unknown or other
ncuuuaccaggagguccca

SEQ ID NO: 2198227 - RNA, 19 nt, Artificial Sequence
  Description of Artificial Sequence: Synthetic oligonucleotide
aaugaaucuguucaagugc

SEQ ID NO: 2198228 - RNA, 19 nt, Artificial Sequence
  Description of Artificial Sequence: Synthetic oligonucleotide
aauugauaaauauuuauug

SEQ ID NO: 2198229 - RNA, 19 nt, Artificial Sequence
  Description of Artificial Sequence: Synthetic oligonucleotide
acagucaagguauugaagc

SEQ ID NO: 2198230 - RNA, 19 nt, Artificial Sequence
  Description of Artificial Sequence: Synthetic oligonucleotide
aacaccggaagcuaccucc

SEQ ID NO: 2198231 - RNA, 19 nt, Artificial Sequence
  Description of Artificial Sequence: Synthetic oligonucleotide
uaaauguugggcuauguag

SEQ ID NO: 2198232 - RNA, 19 nt, Artificial Sequence
  Description of Artificial Sequence: Synthetic oligonucleotide
aaauguguuuucuuggaag

SEQ ID NO: 2198233 - RNA, 19 nt, Artificial Sequence
  Description of Artificial Sequence: Synthetic oligonucleotide
aacaccgaaguucauagag

SEQ ID NO: 2198234 - RNA, 19 nt, Artificial Sequence
  Description of Artificial Sequence: Synthetic oligonucleotide
agguagucaaauuucaugg

SEQ ID NO: 2198235 - RNA, 19 nt, Artificial Sequence
  Description of Artificial Sequence: Synthetic oligonucleotide
aauguugggcuauguagcc

SEQ ID NO: 2198236 - RNA, 19 nt, Artificial Sequence
  Description of Artificial Sequence: Synthetic oligonucleotide
gacauaaugaaucuguuca

SEQ ID NO: 2198237 - RNA, 19 nt, Artificial Sequence
  Description of Artificial Sequence: Synthetic oligonucleotide
aaauguugggcuauguagc

SEQ ID NO: 2198238 - RNA, 19 nt, Artificial Sequence
  Description of Artificial Sequence: Synthetic oligonucleotide
aaggagauguccuagguca

SEQ ID NO: 2198239 - RNA, 19 nt, Artificial Sequence
  Description of Artificial Sequence: Synthetic oligonucleotide
aaauuucaugggcucaggc

SEQ ID NO: 2198240 - RNA, 19 nt, Artificial Sequence
  Description of Artificial Sequence: Synthetic oligonucleotide
ucuuccaucaauucaaaca

SEQ ID NO: 2198241 - RNA, 19 nt, Artificial Sequence
  Description of Artificial Sequence: Synthetic oligonucleotide
aacuuaagcugcuaaccac

SEQ ID NO: 2198242 - RNA, 19 nt, Artificial Sequence
  Description of Artificial Sequence: Synthetic oligonucleotide
ucaauucaaacauuccagg

SEQ ID NO: 2198243 - RNA, 19 nt, Artificial Sequence
  Description of Artificial Sequence: Synthetic oligonucleotide
uacauuucucuguaaacgg

SEQ ID NO: 2198244 - RNA, 19 nt, Artificial Sequence
  Description of Artificial Sequence: Synthetic oligonucleotide
uaaaucuuccaucaauuca

SEQ ID NO: 2198245 - RNA, 19 nt, Artificial Sequence
  Description of Artificial Sequence: Synthetic oligonucleotide
uuugcuaacucuccaaaug

SEQ ID NO: 2198246 - RNA, 19 nt, Artificial Sequence
  Description of Artificial Sequence: Synthetic oligonucleotide
uauuuauuguuucuuuccc

SEQ ID NO: 2198247 - RNA, 19 nt, Artificial Sequence
  Description of Artificial Sequence: Synthetic oligonucleotide
auugauaaauauuuauugu

SEQ ID NO: 2198248 - RNA, 19 nt, Artificial Sequence
  Description of Artificial Sequence: Synthetic oligonucleotide
auaaacacggucugcaauc

SEQ ID NO: 2198249 - RNA, 19 nt, Artificial Sequence
  Description of Artificial Sequence: Synthetic oligonucleotide
ugguuuuaagacauaauga

SEQ ID NO: 2198250 - RNA, 19 nt, Artificial Sequence
  Description of Artificial Sequence: Synthetic oligonucleotide
uguccuaggucauugacag

SEQ ID NO: 2198251 - RNA, 19 nt, Artificial Sequence
  Description of Artificial Sequence: Synthetic oligonucleotide
uauggaaccauccucauuu

SEQ ID NO: 2198252 - RNA, 19 nt, Artificial Sequence
  Description of Artificial Sequence: Synthetic oligonucleotide
ugaaaggagaaaugugugg

SEQ ID NO: 2198253 - RNA, 19 nt, Artificial Sequence
  Description of Artificial Sequence: Synthetic oligonucleotide
gaaaggagaaauguguggg

SEQ ID NO: 2198254 - RNA, 19 nt, Artificial Sequence
  Description of Artificial Sequence: Synthetic oligonucleotide
aaacaucgcaccgacaaac

SEQ ID NO: 2198255 - RNA, 19 nt, Artificial Sequence
  Description of Artificial Sequence: Synthetic oligonucleotide
uuuuaaaucuuccaucaau

SEQ ID NO: 2198256 - RNA, 19 nt, Artificial Sequence
  Description of Artificial Sequence: Synthetic oligonucleotide
ugaacaccgaaguucauag

SEQ ID NO: 2198257 - RNA, 19 nt, Artificial Sequence
  Description of Artificial Sequence: Synthetic oligonucleotide
aaggucauuuacccagugc

SEQ ID NO: 2198258 - RNA, 19 nt, Artificial Sequence
  Description of Artificial Sequence: Synthetic oligonucleotide
uaaugaacaccgaaguuca

SEQ ID NO: 2198259 - RNA, 19 nt, Artificial Sequence
  Description of Artificial Sequence: Synthetic oligonucleotide
aggaauaucuguuucuaag

SEQ ID NO: 2198260 - RNA, 19 nt, Artificial Sequence
  Description of Artificial Sequence: Synthetic oligonucleotide
uucaagugcucuaggaagg

SEQ ID NO: 2198261 - RNA, 19 nt, Artificial Sequence
  Description of Artificial Sequence: Synthetic oligonucleotide
ucugcuaacuguaaugaac

SEQ ID NO: 2198262 - RNA, 19 nt, Artificial Sequence
  Description of Artificial Sequence: Synthetic oligonucleotide
ucuaggaaggucauuuacc

SEQ ID NO: 2198263 - RNA, 19 nt, Artificial Sequence
  Description of Artificial Sequence: Synthetic oligonucleotide
aauuucaugggcucaggcu

SEQ ID NO: 2198264 - RNA, 19 nt, Artificial Sequence
  Description of Artificial Sequence: Synthetic oligonucleotide
gaaaaucuuuccuacaguc

SEQ ID NO: 2198265 - RNA, 19 nt, Artificial Sequence
  Description of Artificial Sequence: Synthetic oligonucleotide
ugcaaucugacuuccaacc

SEQ ID NO: 2198266 - RNA, 19 nt, Artificial Sequence
  Description of Artificial Sequence: Synthetic oligonucleotide
aaggaggaacaccggaagc

SEQ ID NO: 2198267 - RNA, 19 nt, Artificial Sequence
  Description of Artificial Sequence: Synthetic oligonucleotide
uuuaaaucuuccaucaauu

SEQ ID NO: 2198268 - RNA, 19 nt, Artificial Sequence
  Description of Artificial Sequence: Synthetic oligonucleotide
cuggcuaugucauaaacac

SEQ ID NO: 2198269 - RNA, 19 nt, Artificial Sequence
  Description of Artificial Sequence: Synthetic oligonucleotide
uauguagcagguauggaac

SEQ ID NO: 2198270 - RNA, 19 nt, Artificial Sequence
  Description of Artificial Sequence: Synthetic oligonucleotide
uccaggauaguuaacuuga

SEQ ID NO: 2198271 - RNA, 19 nt, Artificial Sequence
  Description of Artificial Sequence: Synthetic oligonucleotide
uugauaaauauuuauuguu

SEQ ID NO: 2198272 - RNA, 19 nt, Artificial Sequence
  Description of Artificial Sequence: Synthetic oligonucleotide
cuaaccaccagaucaaaug

SEQ ID NO: 2198273 - RNA, 19 nt, Artificial Sequence
  Description of Artificial Sequence: Synthetic oligonucleotide
uguagccucuuccacaucc

SEQ ID NO: 2198274 - RNA, 19 nt, Artificial Sequence
  Description of Artificial Sequence: Synthetic oligonucleotide
uaucaugugguagaucugg

SEQ ID NO: 2198275 - RNA, 19 nt, Artificial Sequence
  Description of Artificial Sequence: Synthetic oligonucleotide
aagaacaguugcucucacc

SEQ ID NO: 2198276 - RNA, 19 nt, Artificial Sequence
  Description of Artificial Sequence: Synthetic oligonucleotide
aagguauugaagccugcuc

SEQ ID NO: 2198277 - RNA, 19 nt, Artificial Sequence
  Description of Artificial Sequence: Synthetic oligonucleotide
cuccuuauuuaaauguugg

SEQ ID NO: 2198278 - RNA, 19 nt, Artificial Sequence
  Description of Artificial Sequence: Synthetic oligonucleotide
cuaacucuccaaaugacac

SEQ ID NO: 2198279 - RNA, 19 nt, Artificial Sequence
  Description of Artificial Sequence: Synthetic oligonucleotide
aggauaguuaacuugaauu

SEQ ID NO: 2198280 - RNA, 19 nt, Artificial Sequence
  Description of Artificial Sequence: Synthetic oligonucleotide
aacucuccaaaugacacag

SEQ ID NO: 2198281 - RNA, 19 nt, Artificial Sequence
  Description of Artificial Sequence: Synthetic oligonucleotide
uuucaaagcauguucugca

SEQ ID NO: 2198282 - RNA, 19 nt, Artificial Sequence
  Description of Artificial Sequence: Synthetic oligonucleotide
uccaucaauucaaacauuc

SEQ ID NO: 2198283 - RNA, 19 nt, Artificial Sequence
  Description of Artificial Sequence: Synthetic oligonucleotide
uaagcugcuaaccaccaga

SEQ ID NO: 2198284 - RNA, 19 nt, Artificial Sequence
  Description of Artificial Sequence: Synthetic oligonucleotide
aguucauagagagugucac

SEQ ID NO: 2198285 - RNA, 19 nt, Artificial Sequence
  Description of Artificial Sequence: Synthetic oligonucleotide
agacauaaugaaucuguuc

SEQ ID NO: 2198286 - RNA, 19 nt, Artificial Sequence
  Description of Artificial Sequence: Synthetic oligonucleotide
uguggcaugacuucacuca

SEQ ID NO: 2198287 - RNA, 19 nt, Artificial Sequence
  Description of Artificial Sequence: Synthetic oligonucleotide
uccuuauuuaaauguuggg

SEQ ID NO: 2198288 - RNA, 19 nt, Artificial Sequence
  Description of Artificial Sequence: Synthetic oligonucleotide
cauaccuuuuaaaucuucc

SEQ ID NO: 2198289 - RNA, 19 nt, Artificial Sequence
  Description of Artificial Sequence: Synthetic oligonucleotide
ucuggcuaugucauaaaca

SEQ ID NO: 2198290 - RNA, 19 nt, Artificial Sequence
  Description of Artificial Sequence: Synthetic oligonucleotide
ucuccuuauuuaaauguug

SEQ ID NO: 2198291 - RNA, 19 nt, Artificial Sequence
  Description of Artificial Sequence: Synthetic oligonucleotide
ugagaaucaugguauuucc

SEQ ID NO: 2198292 - RNA, 19 nt, Artificial Sequence
  Description of Artificial Sequence: Synthetic oligonucleotide
acauccuacauccagugca

SEQ ID NO: 2198293 - RNA, 19 nt, Artificial Sequence
  Description of Artificial Sequence: Synthetic oligonucleotide
auaaugaaucuguucaagu

SEQ ID NO: 2198294 - RNA, 19 nt, Artificial Sequence
  Description of Artificial Sequence: Synthetic oligonucleotide
aggucauuuacccagugca

SEQ ID NO: 2198295 - RNA, 19 nt, Artificial Sequence
  Description of Artificial Sequence: Synthetic oligonucleotide
ggcuaugucauaaacacgg

SEQ ID NO: 2198296 - RNA, 19 nt, Artificial Sequence
  Description of Artificial Sequence: Synthetic oligonucleotide
acuuaagcugcuaaccacc

SEQ ID NO: 2198297 - RNA, 19 nt, Artificial Sequence
  Description of Artificial Sequence: Synthetic oligonucleotide
aucaauucaaacauuccag

SEQ ID NO: 2198298 - RNA, 19 nt, Artificial Sequence
  Description of Artificial Sequence: Synthetic oligonucleotide
guagucaaauuucaugggc

SEQ ID NO: 2198299 - RNA, 19 nt, Artificial Sequence
  Description of Artificial Sequence: Synthetic oligonucleotide
agauguuuagggcucuggg

SEQ ID NO: 2198300 - RNA, 19 nt, Artificial Sequence
  Description of Artificial Sequence: Synthetic oligonucleotide
uuucuuguuccaagaacag

SEQ ID NO: 2198301 - RNA, 19 nt, Artificial Sequence
  Description of Artificial Sequence: Synthetic oligonucleotide
gauguuuagggcucugggc

SEQ ID NO: 2198302 - RNA, 19 nt, Artificial Sequence
  Description of Artificial Sequence: Synthetic oligonucleotide
aguuaacuugaauuucauc

SEQ ID NO: 2198303 - RNA, 19 nt, Artificial Sequence
  Description of Artificial Sequence: Synthetic oligonucleotide
caaacuuaagcugcuaacc

SEQ ID NO: 2198304 - RNA, 19 nt, Artificial Sequence
  Description of Artificial Sequence: Synthetic oligonucleotide
ucaguuuugcuaacucucc

SEQ ID NO: 2198305 - RNA, 19 nt, Artificial Sequence
  Description of Artificial Sequence: Synthetic oligonucleotide
uucauagagagugucaccu

SEQ ID NO: 2198306 - RNA, 19 nt, Artificial Sequence
  Description of Artificial Sequence: Synthetic oligonucleotide
aaggggaaaaucucuggcu

SEQ ID NO: 2198307 - RNA, 19 nt, Artificial Sequence
  Description of Artificial Sequence: Synthetic oligonucleotide
uccuaggucauugacagca

SEQ ID NO: 2198308 - RNA, 19 nt, Artificial Sequence
  Description of Artificial Sequence: Synthetic oligonucleotide
ucaaauguguuuucuugga

SEQ ID NO: 2198309 - RNA, 19 nt, Artificial Sequence
  Description of Artificial Sequence: Synthetic oligonucleotide
uaaccaccagaucaaaugu

SEQ ID NO: 2198310 - RNA, 19 nt, Artificial Sequence
  Description of Artificial Sequence: Synthetic oligonucleotide
aacuguaaugaacaccgaa

SEQ ID NO: 2198311 - RNA, 19 nt, Artificial Sequence
  Description of Artificial Sequence: Synthetic oligonucleotide
guaaugaacaccgaaguuc

SEQ ID NO: 2198312 - RNA, 19 nt, Artificial Sequence
  Description of Artificial Sequence: Synthetic oligonucleotide
aucgcaccgacaaacaccc

SEQ ID NO: 2198313 - RNA, 19 nt, Artificial Sequence
  Description of Artificial Sequence: Synthetic oligonucleotide
agugaaaggagaaaugugu

SEQ ID NO: 2198314 - RNA, 19 nt, Artificial Sequence
  Description of Artificial Sequence: Synthetic oligonucleotide
uguucaagugcucuaggaa

SEQ ID NO: 2198315 - RNA, 19 nt, Artificial Sequence
  Description of Artificial Sequence: Synthetic oligonucleotide
agguauugaagccugcucu

SEQ ID NO: 2198316 - RNA, 19 nt, Artificial Sequence
  Description of Artificial Sequence: Synthetic oligonucleotide
uucaauucccggucgaaga

SEQ ID NO: 2198317 - RNA, 19 nt, Artificial Sequence
  Description of Artificial Sequence: Synthetic oligonucleotide
ugguauguagcagguaugg

SEQ ID NO: 2198318 - RNA, 19 nt, Artificial Sequence
  Description of Artificial Sequence: Synthetic oligonucleotide
acuguaaugaacaccgaag

SEQ ID NO: 2198319 - RNA, 19 nt, Artificial Sequence
  Description of Artificial Sequence: Synthetic oligonucleotide
ucuguuucugcuaacugua

SEQ ID NO: 2198320 - RNA, 19 nt, Artificial Sequence
  Description of Artificial Sequence: Synthetic oligonucleotide
cauagagagugucaccucc

SEQ ID NO: 2198321 - RNA, 19 nt, Artificial Sequence
  Description of Artificial Sequence: Synthetic oligonucleotide
uguuccaagaacaguugcu

SEQ ID NO: 2198322 - RNA, 19 nt, Artificial Sequence
  Description of Artificial Sequence: Synthetic oligonucleotide
agcuaaaacauucacugua

SEQ ID NO: 2198323 - RNA, 19 nt, Artificial Sequence
  Description of Artificial Sequence: Synthetic oligonucleotide
accccauaccuuuuaaauc

SEQ ID NO: 2198324 - RNA, 19 nt, Artificial Sequence
  Description of Artificial Sequence: Synthetic oligonucleotide
ucuccaaaugacacaguug

SEQ ID NO: 2198325 - RNA, 19 nt, Artificial Sequence
  Description of Artificial Sequence: Synthetic oligonucleotide
ucaaauuucaugggcucag

SEQ ID NO: 2198326 - RNA, 19 nt, Artificial Sequence
  Description of Artificial Sequence: Synthetic oligonucleotide
ucaucagcuaaaacauuca

SEQ ID NO: 2198327 - RNA, 19 nt, Artificial Sequence
  Description of Artificial Sequence: Synthetic oligonucleotide
uuccaggauaguuaacuug

SEQ ID NO: 2198328 - RNA, 19 nt, Artificial Sequence
  Description of Artificial Sequence: Synthetic oligonucleotide
uuaaauguugggcuaugua

SEQ ID NO: 2198329 - RNA, 19 nt, Artificial Sequence
  Description of Artificial Sequence: Synthetic oligonucleotide
uauuuccauccuaucaugu

SEQ ID NO: 2198330 - RNA, 19 nt, Artificial Sequence
  Description of Artificial Sequence: Synthetic oligonucleotide
caccgaaguucauagagag

SEQ ID NO: 2198331 - RNA, 19 nt, Artificial Sequence
  Description of Artificial Sequence: Synthetic oligonucleotide
uguuuucuuggaagggaag

SEQ ID NO: 2198332 - RNA, 19 nt, Artificial Sequence
  Description of Artificial Sequence: Synthetic oligonucleotide
gauaguuaacuugaauuuc

SEQ ID NO: 2198333 - RNA, 19 nt, Artificial Sequence
  Description of Artificial Sequence: Synthetic oligonucleotide
caucaauucaaacauucca

SEQ ID NO: 2198334 - RNA, 19 nt, Artificial Sequence
  Description of Artificial Sequence: Synthetic oligonucleotide
acauuucucuguaaacggc

SEQ ID NO: 2198335 - RNA, 19 nt, Artificial Sequence
  Description of Artificial Sequence: Synthetic oligonucleotide
cuucagguagucaaauuuc

SEQ ID NO: 2198336 - RNA, 19 nt, Artificial Sequence
  Description of Artificial Sequence: Synthetic oligonucleotide
aguugcagaaccucuuuca

SEQ ID NO: 2198337 - RNA, 19 nt, Artificial Sequence
  Description of Artificial Sequence: Synthetic oligonucleotide
ucauuuacccagugcaaac

SEQ ID NO: 2198338 - RNA, 19 nt, Artificial Sequence
  Description of Artificial Sequence: Synthetic oligonucleotide
cauaaugaaucuguucaag

SEQ ID NO: 2198339 - RNA, 19 nt, Artificial Sequence
  Description of Artificial Sequence: Synthetic oligonucleotide
caucgcaccgacaaacacc

SEQ ID NO: 2198340 - RNA, 19 nt, Artificial Sequence
  Description of Artificial Sequence: Synthetic oligonucleotide
ugaauuucaucaguaucca

SEQ ID NO: 2198341 - RNA, 19 nt, Artificial Sequence
  Description of Artificial Sequence: Synthetic oligonucleotide
aagauguuuagggcucugg

SEQ ID NO: 2198342 - RNA, 19 nt, Artificial Sequence
  Description of Artificial Sequence: Synthetic oligonucleotide
ugcaaacuuaagcugcuaa

SEQ ID NO: 2198343 - RNA, 19 nt, Artificial Sequence
  Description of Artificial Sequence: Synthetic oligonucleotide
ugccugagaaucaugguau

SEQ ID NO: 2198344 - RNA, 19 nt, Artificial Sequence
  Description of Artificial Sequence: Synthetic oligonucleotide
cagaaccucuuucagcugg

SEQ ID NO: 2198345 - RNA, 19 nt, Artificial Sequence
  Description of Artificial Sequence: Synthetic oligonucleotide
uggcuaugucauaaacacg

SEQ ID NO: 2198346 - RNA, 19 nt, Artificial Sequence
  Description of Artificial Sequence: Synthetic oligonucleotide
uguguuuucuuggaaggga

SEQ ID NO: 2198347 - RNA, 19 nt, Artificial Sequence
  Description of Artificial Sequence: Synthetic oligonucleotide
caaggggaaaaucucuggc

SEQ ID NO: 2198348 - RNA, 19 nt, Artificial Sequence
  Description of Artificial Sequence: Synthetic oligonucleotide
acaucgcaccgacaaacac

SEQ ID NO: 2198349 - RNA, 19 nt, Artificial Sequence
  Description of Artificial Sequence: Synthetic oligonucleotide
uuacccagugcaaacuuaa

SEQ ID NO: 2198350 - RNA, 19 nt, Artificial Sequence
  Description of Artificial Sequence: Synthetic oligonucleotide
guauguagcagguauggaa

SEQ ID NO: 2198351 - RNA, 19 nt, Artificial Sequence
  Description of Artificial Sequence: Synthetic oligonucleotide
guugcagaaccucuuucag

SEQ ID NO: 2198352 - RNA, 19 nt, Artificial Sequence
  Description of Artificial Sequence: Synthetic oligonucleotide
agugcaaggggaaaaucuc

SEQ ID NO: 2198353 - RNA, 19 nt, Artificial Sequence
  Description of Artificial Sequence: Synthetic oligonucleotide
uuuucuuggaagggaagga

SEQ ID NO: 2198354 - RNA, 19 nt, Artificial Sequence
  Description of Artificial Sequence: Synthetic oligonucleotide
uuuccuacagucuccuuau

SEQ ID NO: 2198355 - RNA, 19 nt, Artificial Sequence
  Description of Artificial Sequence: Synthetic oligonucleotide
gauguccuaggucauugac

SEQ ID NO: 2198356 - RNA, 19 nt, Artificial Sequence
  Description of Artificial Sequence: Synthetic oligonucleotide
ucgaagauguuuagggcuc

SEQ ID NO: 2198357 - RNA, 19 nt, Artificial Sequence
  Description of Artificial Sequence: Synthetic oligonucleotide
cugcuaacuguaaugaaca

SEQ ID NO: 2198358 - RNA, 19 nt, Artificial Sequence
  Description of Artificial Sequence: Synthetic oligonucleotide
uuccauccuaucauguggu

SEQ ID NO: 2198359 - RNA, 19 nt, Artificial Sequence
  Description of Artificial Sequence: Synthetic oligonucleotide
ugcuaacucuccaaaugac

SEQ ID NO: 2198360 - RNA, 19 nt, Artificial Sequence
  Description of Artificial Sequence: Synthetic oligonucleotide
uacauccagugcaagggga

SEQ ID NO: 2198361 - RNA, 19 nt, Artificial Sequence
  Description of Artificial Sequence: Synthetic oligonucleotide
uuucaugggcucaggcugc

SEQ ID NO: 2198362 - RNA, 19 nt, Artificial Sequence
  Description of Artificial Sequence: Synthetic oligonucleotide
uuaagcugcuaaccaccag

SEQ ID NO: 2198363 - RNA, 19 nt, Artificial Sequence
  Description of Artificial Sequence: Synthetic oligonucleotide
auucacuguaggaauaucu

SEQ ID NO: 2198364 - RNA, 19 nt, Artificial Sequence
  Description of Artificial Sequence: Synthetic oligonucleotide
uguuucugcuaacuguaau

SEQ ID NO: 2198365 - RNA, 19 nt, Artificial Sequence
  Description of Artificial Sequence: Synthetic oligonucleotide
uaacucuccaaaugacaca

SEQ ID NO: 2198366 - RNA, 19 nt, Artificial Sequence
  Description of Artificial Sequence: Synthetic oligonucleotide
augguauuuccauccuauc

SEQ ID NO: 2198367 - RNA, 19 nt, Artificial Sequence
  Description of Artificial Sequence: Synthetic oligonucleotide
ugcccaauucuucugcuuc

SEQ ID NO: 2198368 - RNA, 19 nt, Artificial Sequence
  Description of Artificial Sequence: Synthetic oligonucleotide
aauucccggucgaagaugu

SEQ ID NO: 2198369 - RNA, 19 nt, Artificial Sequence
  Description of Artificial Sequence: Synthetic oligonucleotide
acuucacucaguuuugcua

SEQ ID NO: 2198370 - RNA, 19 nt, Artificial Sequence
  Description of Artificial Sequence: Synthetic oligonucleotide
uucuuggaagggaaggaau

SEQ ID NO: 2198371 - RNA, 19 nt, Artificial Sequence
  Description of Artificial Sequence: Synthetic oligonucleotide
aguauccacagucaaggua

SEQ ID NO: 2198372 - RNA, 19 nt, Artificial Sequence
  Description of Artificial Sequence: Synthetic oligonucleotide
cacagucaagguauugaag

SEQ ID NO: 2198373 - RNA, 19 nt, Artificial Sequence
  Description of Artificial Sequence: Synthetic oligonucleotide
cugagaaucaugguauuuc

SEQ ID NO: 2198374 - RNA, 19 nt, Artificial Sequence
  Description of Artificial Sequence: Synthetic oligonucleotide
cucuaggaaggucauuuac

SEQ ID NO: 2198375 - RNA, 19 nt, Artificial Sequence
  Description of Artificial Sequence: Synthetic oligonucleotide
gucaccuccaaacaucgca

SEQ ID NO: 2198376 - RNA, 19 nt, Artificial Sequence
  Description of Artificial Sequence: Synthetic oligonucleotide
caucagcuaaaacauucac

SEQ ID NO: 2198377 - RNA, 19 nt, Artificial Sequence
  Description of Artificial Sequence: Synthetic oligonucleotide
cuacauccagugcaagggg

SEQ ID NO: 2198378 - RNA, 19 nt, Artificial Sequence
  Description of Artificial Sequence: Synthetic oligonucleotide
acggucugcaaucugacuu

SEQ ID NO: 2198379 - RNA, 19 nt, Artificial Sequence
  Description of Artificial Sequence: Synthetic oligonucleotide
acauaaugaaucuguucaa

SEQ ID NO: 2198380 - RNA, 19 nt, Artificial Sequence
  Description of Artificial Sequence: Synthetic oligonucleotide
aaucuguucaagugcucua

SEQ ID NO: 2198381 - RNA, 19 nt, Artificial Sequence
  Description of Artificial Sequence: Synthetic oligonucleotide
aagcuaccucccugcgucc

SEQ ID NO: 2198382 - RNA, 19 nt, Artificial Sequence
  Description of Artificial Sequence: Synthetic oligonucleotide
uuuaaauguugggcuaugu

SEQ ID NO: 2198383 - RNA, 19 nt, Artificial Sequence
  Description of Artificial Sequence: Synthetic oligonucleotide
guagaucugguauguagca

SEQ ID NO: 2198384 - RNA, 19 nt, Artificial Sequence
  Description of Artificial Sequence: Synthetic oligonucleotide
gaacaguugcucucacccc

SEQ ID NO: 2198385 - RNA, 19 nt, Artificial Sequence
  Description of Artificial Sequence: Synthetic oligonucleotide
gugaaaggagaaaugugug

SEQ ID NO: 2198386 - RNA, 19 nt, Artificial Sequence
  Description of Artificial Sequence: Synthetic oligonucleotide
ucaauucccggucgaagau

SEQ ID NO: 2198387 - RNA, 19 nt, Artificial Sequence
  Description of Artificial Sequence: Synthetic oligonucleotide
gaaguucauagagaguguc

SEQ ID NO: 2198388 - RNA, 19 nt, Artificial Sequence
  Description of Artificial Sequence: Synthetic oligonucleotide
aacuugaauuucaucagua

SEQ ID NO: 2198389 - RNA, 19 nt, Artificial Sequence
  Description of Artificial Sequence: Synthetic oligonucleotide
uuuacccagugcaaacuua

SEQ ID NO: 2198390 - RNA, 19 nt, Artificial Sequence
  Description of Artificial Sequence: Synthetic oligonucleotide
uucaaagcauguucugcaa

SEQ ID NO: 2198391 - RNA, 19 nt, Artificial Sequence
  Description of Artificial Sequence: Synthetic oligonucleotide
accgacaaacaccccaucu

SEQ ID NO: 2198392 - RNA, 19 nt, Artificial Sequence
  Description of Artificial Sequence: Synthetic oligonucleotide
cuucacucaguuuugcuaa

SEQ ID NO: 2198393 - RNA, 19 nt, Artificial Sequence
  Description of Artificial Sequence: Synthetic oligonucleotide
augaaucuguucaagugcu

SEQ ID NO: 2198394 - RNA, 19 nt, Artificial Sequence
  Description of Artificial Sequence: Synthetic oligonucleotide
uccuacagucuccuuauuu

SEQ ID NO: 2198395 - RNA, 19 nt, Artificial Sequence
  Description of Artificial Sequence: Synthetic oligonucleotide
ccgaaguucauagagagug

SEQ ID NO: 2198396 - RNA, 19 nt, Artificial Sequence
  Description of Artificial Sequence: Synthetic oligonucleotide
uccaaaugacacaguugca

SEQ ID NO: 2198397 - RNA, 19 nt, Artificial Sequence
  Description of Artificial Sequence: Synthetic oligonucleotide
ucaagguauugaagccugc

SEQ ID NO: 2198398 - RNA, 19 nt, Artificial Sequence
  Description of Artificial Sequence: Synthetic oligonucleotide
ugcucuaggaaggucauuu

SEQ ID NO: 2198399 - RNA, 19 nt, Artificial Sequence
  Description of Artificial Sequence: Synthetic oligonucleotide
cuauguagccucuuccaca

SEQ ID NO: 2198400 - RNA, 19 nt, Artificial Sequence
  Description of Artificial Sequence: Synthetic oligonucleotide
uguuuagggcucugggcga

SEQ ID NO: 2198401 - RNA, 19 nt, Artificial Sequence
  Description of Artificial Sequence: Synthetic oligonucleotide
ugucauaaacacggucugc

SEQ ID NO: 2198402 - RNA, 19 nt, Artificial Sequence
  Description of Artificial Sequence: Synthetic oligonucleotide
uuucuuggaagggaaggaa

SEQ ID NO: 2198403 - RNA, 19 nt, Artificial Sequence
  Description of Artificial Sequence: Synthetic oligonucleotide
agucaagguauugaagccu

SEQ ID NO: 2198404 - RNA, 19 nt, Artificial Sequence
  Description of Artificial Sequence: Synthetic oligonucleotide
gguagaucugguauguagc

SEQ ID NO: 2198405 - RNA, 19 nt, Artificial Sequence
  Description of Artificial Sequence: Synthetic oligonucleotide
aaacaccccaucugguuuu

SEQ ID NO: 2198406 - RNA, 19 nt, Artificial Sequence
  Description of Artificial Sequence: Synthetic oligonucleotide
aggaacaccggaagcuacc

SEQ ID NO: 2198407 - RNA, 19 nt, Artificial Sequence
  Description of Artificial Sequence: Synthetic oligonucleotide
cagguauggaaccauccuc

SEQ ID NO: 2198408 - RNA, 19 nt, Artificial Sequence
  Description of Artificial Sequence: Synthetic oligonucleotide
gcuaaaacauucacuguag

SEQ ID NO: 2198409 - RNA, 19 nt, Artificial Sequence
  Description of Artificial Sequence: Synthetic oligonucleotide
aaccaccagaucaaaugug

SEQ ID NO: 2198410 - RNA, 19 nt, Artificial Sequence
  Description of Artificial Sequence: Synthetic oligonucleotide
caugggcucaggcugccgg

SEQ ID NO: 2198411 - RNA, 19 nt, Artificial Sequence
  Description of Artificial Sequence: Synthetic oligonucleotide
uaggaauaucuguuucuaa

SEQ ID NO: 2198412 - RNA, 19 nt, Artificial Sequence
  Description of Artificial Sequence: Synthetic oligonucleotide
aaacggcugcagcugccag

SEQ ID NO: 2198413 - RNA, 19 nt, Artificial Sequence
  Description of Artificial Sequence: Synthetic oligonucleotide
auuuacccagugcaaacuu

SEQ ID NO: 2198414 - RNA, 19 nt, Artificial Sequence
  Description of Artificial Sequence: Synthetic oligonucleotide
aggggaaaaucucuggcua

SEQ ID NO: 2198415 - RNA, 19 nt, Artificial Sequence
  Description of Artificial Sequence: Synthetic oligonucleotide
ugcuaacuguaaugaacac

SEQ ID NO: 2198416 - RNA, 19 nt, Artificial Sequence
  Description of Artificial Sequence: Synthetic oligonucleotide
gucgaagauguuuagggcu

SEQ ID NO: 2198417 - RNA, 19 nt, Artificial Sequence
  Description of Artificial Sequence: Synthetic oligonucleotide
cuggccuugccugagaauc

SEQ ID NO: 2198418 - RNA, 19 nt, Artificial Sequence
  Description of Artificial Sequence: Synthetic oligonucleotide
gucaagguauugaagccug

SEQ ID NO: 2198419 - RNA, 19 nt, Artificial Sequence
  Description of Artificial Sequence: Synthetic oligonucleotide
ugacacaguugcagaaccu

SEQ ID NO: 2198420 - RNA, 19 nt, Artificial Sequence
  Description of Artificial Sequence: Synthetic oligonucleotide
agguauggaaccauccuca

SEQ ID NO: 2198421 - RNA, 19 nt, Artificial Sequence
  Description of Artificial Sequence: Synthetic oligonucleotide
ccaaaugacacaguugcag

SEQ ID NO: 2198422 - RNA, 19 nt, Artificial Sequence
  Description of Artificial Sequence: Synthetic oligonucleotide
auggaaccauccucauuuc

SEQ ID NO: 2198423 - RNA, 19 nt, Artificial Sequence
  Description of Artificial Sequence: Synthetic oligonucleotide
guuccaagaacaguugcuc

SEQ ID NO: 2198424 - RNA, 19 nt, Artificial Sequence
  Description of Artificial Sequence: Synthetic oligonucleotide
ucugacuuccaaccuccuc

SEQ ID NO: 2198425 - RNA, 19 nt, Artificial Sequence
  Description of Artificial Sequence: Synthetic oligonucleotide
uucuuguuccaagaacagu

SEQ ID NO: 2198426 - RNA, 19 nt, Artificial Sequence
  Description of Artificial Sequence: Synthetic oligonucleotide
cucuggcuaugucauaaac

SEQ ID NO: 2198427 - RNA, 19 nt, Artificial Sequence
  Description of Artificial Sequence: Synthetic oligonucleotide
auuuaaauguugggcuaug

SEQ ID NO: 2198428 - RNA, 19 nt, Artificial Sequence
  Description of Artificial Sequence: Synthetic oligonucleotide
aucaugguauuuccauccu

SEQ ID NO: 2198429 - RNA, 19 nt, Artificial Sequence
  Description of Artificial Sequence: Synthetic oligonucleotide
aggaggaacaccggaagcu

SEQ ID NO: 2198430 - RNA, 19 nt, Artificial Sequence
  Description of Artificial Sequence: Synthetic oligonucleotide
ugacuuccaaccuccuccu

SEQ ID NO: 2198431 - RNA, 19 nt, Artificial Sequence
  Description of Artificial Sequence: Synthetic oligonucleotide
uaacuguaaugaacaccga

SEQ ID NO: 2198432 - RNA, 19 nt, Artificial Sequence
  Description of Artificial Sequence: Synthetic oligonucleotide
caaggagauguccuagguc

SEQ ID NO: 2198433 - RNA, 19 nt, Artificial Sequence
  Description of Artificial Sequence: Synthetic oligonucleotide
accucuuucagcuggccuu

SEQ ID NO: 2198434 - RNA, 19 nt, Artificial Sequence
  Description of Artificial Sequence: Synthetic oligonucleotide
cuaucaugugguagaucug

SEQ ID NO: 2198435 - RNA, 19 nt, Artificial Sequence
  Description of Artificial Sequence: Synthetic oligonucleotide
ucauagagagugucaccuc

SEQ ID NO: 2198436 - RNA, 19 nt, Artificial Sequence
  Description of Artificial Sequence: Synthetic oligonucleotide
caaauuucaugggcucagg

SEQ ID NO: 2198437 - RNA, 19 nt, Artificial Sequence
  Description of Artificial Sequence: Synthetic oligonucleotide
cggucgaagauguuuaggg

SEQ ID NO: 2198438 - RNA, 19 nt, Artificial Sequence
  Description of Artificial Sequence: Synthetic oligonucleotide
aacaucgcaccgacaaaca

SEQ ID NO: 2198439 - RNA, 19 nt, Artificial Sequence
  Description of Artificial Sequence: Synthetic oligonucleotide
ugggcuauguagccucuuc

SEQ ID NO: 2198440 - RNA, 19 nt, Artificial Sequence
  Description of Artificial Sequence: Synthetic oligonucleotide
guauugaagccugcucucc

SEQ ID NO: 2198441 - RNA, 19 nt, Artificial Sequence
  Description of Artificial Sequence: Synthetic oligonucleotide
aacauucacuguaggaaua

SEQ ID NO: 2198442 - RNA, 19 nt, Artificial Sequence
  Description of Artificial Sequence: Synthetic oligonucleotide
guauccacagucaagguau

SEQ ID NO: 2198443 - RNA, 19 nt, Artificial Sequence
  Description of Artificial Sequence: Synthetic oligonucleotide
uagagagugucaccuccaa

SEQ ID NO: 2198444 - RNA, 19 nt, Artificial Sequence
  Description of Artificial Sequence: Synthetic oligonucleotide
caccccaucugguuuuaag

SEQ ID NO: 2198445 - RNA, 19 nt, Artificial Sequence
  Description of Artificial Sequence: Synthetic oligonucleotide
cuuccaaccuccuccuuca

SEQ ID NO: 2198446 - RNA, 19 nt, Artificial Sequence
  Description of Artificial Sequence: Synthetic oligonucleotide
ucccggucgaagauguuua

SEQ ID NO: 2198447 - RNA, 19 nt, Artificial Sequence
  Description of Artificial Sequence: Synthetic oligonucleotide
ucaccccauaccuuuuaaa

SEQ ID NO: 2198448 - RNA, 19 nt, Artificial Sequence
  Description of Artificial Sequence: Synthetic oligonucleotide
gagaaucaugguauuucca

SEQ ID NO: 2198449 - RNA, 19 nt, Artificial Sequence
  Description of Artificial Sequence: Synthetic oligonucleotide
cauuucucuguaaacggcu

SEQ ID NO: 2198450 - RNA, 19 nt, Artificial Sequence
  Description of Artificial Sequence: Synthetic oligonucleotide
ggauaguuaacuugaauuu

SEQ ID NO: 2198451 - RNA, 19 nt, Artificial Sequence
  Description of Artificial Sequence: Synthetic oligonucleotide
caucgugucucggugcagc

SEQ ID NO: 2198452 - RNA, 19 nt, Artificial Sequence
  Description of Artificial Sequence: Synthetic oligonucleotide
auguccuaggucauugaca

SEQ ID NO: 2198453 - RNA, 19 nt, Artificial Sequence
  Description of Artificial Sequence: Synthetic oligonucleotide
uggccuugccugagaauca

SEQ ID NO: 2198454 - RNA, 19 nt, Artificial Sequence
  Description of Artificial Sequence: Synthetic oligonucleotide
acaccggaagcuaccuccc

SEQ ID NO: 2198455 - RNA, 19 nt, Artificial Sequence
  Description of Artificial Sequence: Synthetic oligonucleotide
cacauccuacauccagugc

SEQ ID NO: 2198456 - RNA, 19 nt, Artificial Sequence
  Description of Artificial Sequence: Synthetic oligonucleotide
uaaacggcugcagcugcca

SEQ ID NO: 2198457 - RNA, 19 nt, Artificial Sequence
  Description of Artificial Sequence: Synthetic oligonucleotide
acacggucugcaaucugac

SEQ ID NO: 2198458 - RNA, 19 nt, Artificial Sequence
  Description of Artificial Sequence: Synthetic oligonucleotide
gguauugaagccugcucuc

SEQ ID NO: 2198459 - RNA, 19 nt, Artificial Sequence
  Description of Artificial Sequence: Synthetic oligonucleotide
caugguauuuccauccuau

SEQ ID NO: 2198460 - RNA, 19 nt, Artificial Sequence
  Description of Artificial Sequence: Synthetic oligonucleotide
agauguccuaggucauuga

SEQ ID NO: 2198461 - RNA, 19 nt, Artificial Sequence
  Description of Artificial Sequence: Synthetic oligonucleotide
uccaaacaucgcaccgaca

SEQ ID NO: 2198462 - RNA, 19 nt, Artificial Sequence
  Description of Artificial Sequence: Synthetic oligonucleotide
aaccauccucauuucugua

SEQ ID NO: 2198463 - RNA, 19 nt, Artificial Sequence
  Description of Artificial Sequence: Synthetic oligonucleotide
cuggaaaaucuuuccuaca

SEQ ID NO: 2198464 - RNA, 19 nt, Artificial Sequence
  Description of Artificial Sequence: Synthetic oligonucleotide
aagcugcuaaccaccagau

SEQ ID NO: 2198465 - RNA, 19 nt, Artificial Sequence
  Description of Artificial Sequence: Synthetic oligonucleotide
uggcaugacuucacucagu

SEQ ID NO: 2198466 - RNA, 19 nt, Artificial Sequence
  Description of Artificial Sequence: Synthetic oligonucleotide
gucaaauuucaugggcuca

SEQ ID NO: 2198467 - RNA, 19 nt, Artificial Sequence
  Description of Artificial Sequence: Synthetic oligonucleotide
guaggaauaucuguuucua

SEQ ID NO: 2198468 - RNA, 19 nt, Artificial Sequence
  Description of Artificial Sequence: Synthetic oligonucleotide
cucugggcgagcugcugcc

SEQ ID NO: 2198469 - RNA, 19 nt, Artificial Sequence
  Description of Artificial Sequence: Synthetic oligonucleotide
cuguggcaugacuucacuc

SEQ ID NO: 2198470 - RNA, 19 nt, Artificial Sequence
  Description of Artificial Sequence: Synthetic oligonucleotide
cgacaaacaccccaucugg

SEQ ID NO: 2198471 - RNA, 19 nt, Artificial Sequence
  Description of Artificial Sequence: Synthetic oligonucleotide
augaacaccgaaguucaua

SEQ ID NO: 2198472 - RNA, 19 nt, Artificial Sequence
  Description of Artificial Sequence: Synthetic oligonucleotide
caaauguguuuucuuggaa

SEQ ID NO: 2198473 - RNA, 19 nt, Artificial Sequence
  Description of Artificial Sequence: Synthetic oligonucleotide
gcugcagcugccagcaucg

SEQ ID NO: 2198474 - RNA, 19 nt, Artificial Sequence
  Description of Artificial Sequence: Synthetic oligonucleotide
gcuauguagccucuuccac

SEQ ID NO: 2198475 - RNA, 19 nt, Artificial Sequence
  Description of Artificial Sequence: Synthetic oligonucleotide
gaacaccgaaguucauaga

SEQ ID NO: 2198476 - RNA, 19 nt, Artificial Sequence
  Description of Artificial Sequence: Synthetic oligonucleotide
aaucucuggcuaugucaua

SEQ ID NO: 2198477 - RNA, 19 nt, Artificial Sequence
  Description of Artificial Sequence: Synthetic oligonucleotide
agagagugucaccuccaaa

SEQ ID NO: 2198478 - RNA, 19 nt, Artificial Sequence
  Description of Artificial Sequence: Synthetic oligonucleotide
acaccgaaguucauagaga

SEQ ID NO: 2198479 - RNA, 19 nt, Artificial Sequence
  Description of Artificial Sequence: Synthetic oligonucleotide
cagcaucgugucucggugc

SEQ ID NO: 2198480 - RNA, 19 nt, Artificial Sequence
  Description of Artificial Sequence: Synthetic oligonucleotide
ucucuggcuaugucauaaa

SEQ ID NO: 2198481 - RNA, 19 nt, Artificial Sequence
  Description of Artificial Sequence: Synthetic oligonucleotide
ucucaccccauaccuuuua

SEQ ID NO: 2198482 - RNA, 19 nt, Artificial Sequence
  Description of Artificial Sequence: Synthetic oligonucleotide
auagagagugucaccucca

SEQ ID NO: 2198483 - RNA, 19 nt, Artificial Sequence
  Description of Artificial Sequence: Synthetic oligonucleotide
gggcuauguagccucuucc

SEQ ID NO: 2198484 - RNA, 19 nt, Artificial Sequence
  Description of Artificial Sequence: Synthetic oligonucleotide
ccccaucugguuuuaagac

SEQ ID NO: 2198485 - RNA, 19 nt, Artificial Sequence
  Description of Artificial Sequence: Synthetic oligonucleotide
gagaaauguguggggaaaa

SEQ ID NO: 2198486 - RNA, 19 nt, Artificial Sequence
  Description of Artificial Sequence: Synthetic oligonucleotide
caauucccggucgaagaug

SEQ ID NO: 2198487 - RNA, 19 nt, Artificial Sequence
  Description of Artificial Sequence: Synthetic oligonucleotide
ggcuauguagccucuucca

SEQ ID NO: 2198488 - RNA, 19 nt, Artificial Sequence
  Description of Artificial Sequence: Synthetic oligonucleotide
uuccaaccuccuccuucag

SEQ ID NO: 2198489 - RNA, 19 nt, Artificial Sequence
  Description of Artificial Sequence: Synthetic oligonucleotide
uucccggucgaagauguuu

SEQ ID NO: 2198490 - RNA, 19 nt, Artificial Sequence
  Description of Artificial Sequence: Synthetic oligonucleotide
guuuagggcucugggcgag

SEQ ID NO: 2198491 - RNA, 19 nt, Artificial Sequence
  Description of Artificial Sequence: Synthetic oligonucleotide
cugccagcaucgugucucg

SEQ ID NO: 2198492 - RNA, 19 nt, Artificial Sequence
  Description of Artificial Sequence: Synthetic oligonucleotide
cugggcgagcugcugcccg

SEQ ID NO: 2198493 - RNA, 19 nt, Artificial Sequence
  Description of Artificial Sequence: Synthetic oligonucleotide
cauccuacauccagugcaa

SEQ ID NO: 2198494 - RNA, 19 nt, Artificial Sequence
  Description of Artificial Sequence: Synthetic oligonucleotide
aucgugucucggugcagca

SEQ ID NO: 2198495 - RNA, 19 nt, Artificial Sequence
  Description of Artificial Sequence: Synthetic oligonucleotide
gcuaacucuccaaaugaca

SEQ ID NO: 2198496 - RNA, 19 nt, Artificial Sequence
  Description of Artificial Sequence: Synthetic oligonucleotide
ccgacaaacaccccaucug

SEQ ID NO: 2198497 - RNA, 19 nt, Artificial Sequence
  Description of Artificial Sequence: Synthetic oligonucleotide
gaacaccggaagcuaccuc

SEQ ID NO: 2198498 - RNA, 19 nt, Artificial Sequence
  Description of Artificial Sequence: Synthetic oligonucleotide
guaaacggcugcagcugcc

SEQ ID NO: 2198499 - RNA, 19 nt, Artificial Sequence
  Description of Artificial Sequence: Synthetic oligonucleotide
cauaaacacggucugcaau

SEQ ID NO: 2198500 - RNA, 19 nt, Artificial Sequence
  Description of Artificial Sequence: Synthetic oligonucleotide
cauucacuguaggaauauc

SEQ ID NO: 2198501 - RNA, 19 nt, Artificial Sequence
  Description of Artificial Sequence: Synthetic oligonucleotide
caccccauaccuuuuaaau

SEQ ID NO: 2198502 - RNA, 19 nt, Artificial Sequence
  Description of Artificial Sequence: Synthetic oligonucleotide
uuagggcucugggcgagcu

SEQ ID NO: 2198503 - RNA, 19 nt, Artificial Sequence
  Description of Artificial Sequence: Synthetic oligonucleotide
gcgagcugcugcccgaagg

SEQ ID NO: 2198504 - RNA, 19 nt, Artificial Sequence
  Description of Artificial Sequence: Synthetic oligonucleotide
uauccacagucaagguauu

SEQ ID NO: 2198505 - RNA, 19 nt, Artificial Sequence
  Description of Artificial Sequence: Synthetic oligonucleotide
ucgugucucggugcagcag

SEQ ID NO: 2198506 - RNA, 19 nt, Artificial Sequence
  Description of Artificial Sequence: Synthetic oligonucleotide
ccucauuucuguacauuuc

SEQ ID NO: 2198507 - RNA, 19 nt, Artificial Sequence
  Description of Artificial Sequence: Synthetic oligonucleotide
uccauccuaucauguggua

SEQ ID NO: 2198508 - RNA, 19 nt, Artificial Sequence
  Description of Artificial Sequence: Synthetic oligonucleotide
aaugaacaccgaaguucau

SEQ ID NO: 2198509 - RNA, 19 nt, Artificial Sequence
  Description of Artificial Sequence: Synthetic oligonucleotide
ggaaaaucuuuccuacagu

SEQ ID NO: 2198510 - RNA, 19 nt, Artificial Sequence
  Description of Artificial Sequence: Synthetic oligonucleotide
ggucauugacagcagugaa

SEQ ID NO: 2198511 - RNA, 19 nt, Artificial Sequence
  Description of Artificial Sequence: Synthetic oligonucleotide
uucaugggcucaggcugcc

SEQ ID NO: 2198512 - RNA, 19 nt, Artificial Sequence
  Description of Artificial Sequence: Synthetic oligonucleotide
ccccauaccuuuuaaaucu

SEQ ID NO: 2198513 - RNA, 19 nt, Artificial Sequence
  Description of Artificial Sequence: Synthetic oligonucleotide
ugcuaaccaccagaucaaa

SEQ ID NO: 2198514 - RNA, 19 nt, Artificial Sequence
  Description of Artificial Sequence: Synthetic oligonucleotide
gcagugaaaggagaaaugu

SEQ ID NO: 2198515 - RNA, 19 nt, Artificial Sequence
  Description of Artificial Sequence: Synthetic oligonucleotide
ccauccuaucaugugguag

SEQ ID NO: 2198516 - RNA, 19 nt, Artificial Sequence
  Description of Artificial Sequence: Synthetic oligonucleotide
auguugggcuauguagccu

SEQ ID NO: 2198517 - RNA, 19 nt, Artificial Sequence
  Description of Artificial Sequence: Synthetic oligonucleotide
gcccaauucuucugcuucc

SEQ ID NO: 2198518 - RNA, 19 nt, Artificial Sequence
  Description of Artificial Sequence: Synthetic oligonucleotide
cuuucagcuggccuugccu

SEQ ID NO: 2198519 - RNA, 19 nt, Artificial Sequence
  Description of Artificial Sequence: Synthetic oligonucleotide
agcuggccuugccugagaa

SEQ ID NO: 2198520 - RNA, 19 nt, Artificial Sequence
  Description of Artificial Sequence: Synthetic oligonucleotide
acauccagugcaaggggaa

SEQ ID NO: 2198521 - RNA, 19 nt, Artificial Sequence
  Description of Artificial Sequence: Synthetic oligonucleotide
auccuacauccagugcaag

SEQ ID NO: 2198522 - RNA, 19 nt, Artificial Sequence
  Description of Artificial Sequence: Synthetic oligonucleotide
uccuaucaugugguagauc

SEQ ID NO: 2198523 - RNA, 19 nt, Artificial Sequence
  Description of Artificial Sequence: Synthetic oligonucleotide
ccagcaucgugucucggug

SEQ ID NO: 2198524 - RNA, 19 nt, Artificial Sequence
  Description of Artificial Sequence: Synthetic oligonucleotide
caaacaucgcaccgacaaa

SEQ ID NO: 2198525 - RNA, 19 nt, Artificial Sequence
  Description of Artificial Sequence: Synthetic oligonucleotide
caagugcucuaggaagguc

SEQ ID NO: 2198526 - RNA, 19 nt, Artificial Sequence
  Description of Artificial Sequence: Synthetic oligonucleotide
agugcucuaggaaggucau

SEQ ID NO: 2198527 - RNA, 19 nt, Artificial Sequence
  Description of Artificial Sequence: Synthetic oligonucleotide
auccuaucaugugguagau

SEQ ID NO: 2198528 - RNA, 19 nt, Artificial Sequence
  Description of Artificial Sequence: Synthetic oligonucleotide
ugggcgagcugcugcccga

SEQ ID NO: 2198529 - RNA, 19 nt, Artificial Sequence
  Description of Artificial Sequence: Synthetic oligonucleotide
accgaaguucauagagagu

SEQ ID NO: 2198530 - RNA, 19 nt, Artificial Sequence
  Description of Artificial Sequence: Synthetic oligonucleotide
guccuaggucauugacagc

SEQ ID NO: 2198531 - RNA, 19 nt, Artificial Sequence
  Description of Artificial Sequence: Synthetic oligonucleotide
ucugggcgagcugcugccc

SEQ ID NO: 2198532 - RNA, 19 nt, Artificial Sequence
  Description of Artificial Sequence: Synthetic oligonucleotide
cccaucugguuuuaagaca

SEQ ID NO: 2198533 - RNA, 19 nt, Artificial Sequence
  Description of Artificial Sequence: Synthetic oligonucleotide
cauuuacccagugcaaacu

SEQ ID NO: 2198534 - RNA, 19 nt, Artificial Sequence
  Description of Artificial Sequence: Synthetic oligonucleotide
ccuaggucauugacagcag

SEQ ID NO: 2198535 - RNA, 19 nt, Artificial Sequence
  Description of Artificial Sequence: Synthetic oligonucleotide
ccauccucauuucuguaca

SEQ ID NO: 2198536 - RNA, 19 nt, Artificial Sequence
  Description of Artificial Sequence: Synthetic oligonucleotide
gugucucggugcagcagag

SEQ ID NO: 2198537 - RNA, 19 nt, Artificial Sequence
  Description of Artificial Sequence: Synthetic oligonucleotide
uuccuacagucuccuuauu

SEQ ID NO: 2198538 - RNA, 19 nt, Artificial Sequence
  Description of Artificial Sequence: Synthetic oligonucleotide
cuaggucauugacagcagu

SEQ ID NO: 2198539 - RNA, 19 nt, Artificial Sequence
  Description of Artificial Sequence: Synthetic oligonucleotide
caggauaguuaacuugaau

SEQ ID NO: 2198540 - RNA, 19 nt, Artificial Sequence
  Description of Artificial Sequence: Synthetic oligonucleotide
gguauguagcagguaugga

SEQ ID NO: 2198541 - RNA, 19 nt, Artificial Sequence
  Description of Artificial Sequence: Synthetic oligonucleotide
caagguauugaagccugcu

SEQ ID NO: 2198542 - RNA, 19 nt, Artificial Sequence
  Description of Artificial Sequence: Synthetic oligonucleotide
gcagguauggaaccauccu

SEQ ID NO: 2198543 - RNA, 19 nt, Artificial Sequence
  Description of Artificial Sequence: Synthetic oligonucleotide
cucaccccauaccuuuuaa

SEQ ID NO: 2198544 - RNA, 19 nt, Artificial Sequence
  Description of Artificial Sequence: Synthetic oligonucleotide
gugcaaggggaaaaucucu

SEQ ID NO: 2198545 - RNA, 19 nt, Artificial Sequence
  Description of Artificial Sequence: Synthetic oligonucleotide
gucuccuuauuuaaauguu

SEQ ID NO: 2198546 - RNA, 19 nt, Artificial Sequence
  Description of Artificial Sequence: Synthetic oligonucleotide
ucgcaccgacaaacacccc

SEQ ID NO: 2198547 - RNA, 19 nt, Artificial Sequence
  Description of Artificial Sequence: Synthetic oligonucleotide
aacaccccaucugguuuua

SEQ ID NO: 2198548 - RNA, 19 nt, Artificial Sequence
  Description of Artificial Sequence: Synthetic oligonucleotide
caccgacaaacaccccauc

SEQ ID NO: 2198549 - RNA, 19 nt, Artificial Sequence
  Description of Artificial Sequence: Synthetic oligonucleotide
ccggucgaagauguuuagg

SEQ ID NO: 2198550 - RNA, 19 nt, Artificial Sequence
  Description of Artificial Sequence: Synthetic oligonucleotide
cugccgggcugcccaauuc

SEQ ID NO: 2198551 - RNA, 19 nt, Artificial Sequence
  Description of Artificial Sequence: Synthetic oligonucleotide
agcuaccucccugcgucca

SEQ ID NO: 2198552 - RNA, 19 nt, Artificial Sequence
  Description of Artificial Sequence: Synthetic oligonucleotide
acaguugcucucaccccau

SEQ ID NO: 2198553 - RNA, 19 nt, Artificial Sequence
  Description of Artificial Sequence: Synthetic oligonucleotide
guauggaaccauccucauu

SEQ ID NO: 2198554 - RNA, 19 nt, Artificial Sequence
  Description of Artificial Sequence: Synthetic oligonucleotide
guagcagguauggaaccau

SEQ ID NO: 2198555 - RNA, 19 nt, Artificial Sequence
  Description of Artificial Sequence: Synthetic oligonucleotide
aucugguauguagcaggua

SEQ ID NO: 2198556 - RNA, 19 nt, Artificial Sequence
  Description of Artificial Sequence: Synthetic oligonucleotide
aucugacuuccaaccuccu

SEQ ID NO: 2198557 - RNA, 19 nt, Artificial Sequence
  Description of Artificial Sequence: Synthetic oligonucleotide
ccgaaggaggaacaccgga

SEQ ID NO: 2198558 - RNA, 19 nt, Artificial Sequence
  Description of Artificial Sequence: Synthetic oligonucleotide
ggaggaacaccggaagcua

SEQ ID NO: 2198559 - RNA, 19 nt, Artificial Sequence
  Description of Artificial Sequence: Synthetic oligonucleotide
cccggucgaagauguuuag

SEQ ID NO: 2198560 - RNA, 19 nt, Artificial Sequence
  Description of Artificial Sequence: Synthetic oligonucleotide
uugggcuauguagccucuu

SEQ ID NO: 2198561 - RNA, 19 nt, Artificial Sequence
  Description of Artificial Sequence: Synthetic oligonucleotide
ggggaaaaucucuggcuau

SEQ ID NO: 2198562 - RNA, 19 nt, Artificial Sequence
  Description of Artificial Sequence: Synthetic oligonucleotide
ucggugcagcagagguuuu

SEQ ID NO: 2198563 - RNA, 19 nt, Artificial Sequence
  Description of Artificial Sequence: Synthetic oligonucleotide
cgcaccgacaaacacccca

SEQ ID NO: 2198564 - RNA, 19 nt, Artificial Sequence
  Description of Artificial Sequence: Synthetic oligonucleotide
gcucucaccccauaccuuu

SEQ ID NO: 2198565 - RNA, 19 nt, Artificial Sequence
  Description of Artificial Sequence: Synthetic oligonucleotide
ccagugcaaggggaaaauc

SEQ ID NO: 2198566 - RNA, 19 nt, Artificial Sequence
  Description of Artificial Sequence: Synthetic oligonucleotide
cgugucucggugcagcaga

SEQ ID NO: 2198567 - RNA, 19 nt, Artificial Sequence
  Description of Artificial Sequence: Synthetic oligonucleotide
caaccuccuccuucaggua

SEQ ID NO: 2198568 - RNA, 19 nt, Artificial Sequence
  Description of Artificial Sequence: Synthetic oligonucleotide
ccaggauaguuaacuugaa

SEQ ID NO: 2198569 - RNA, 19 nt, Artificial Sequence
  Description of Artificial Sequence: Synthetic oligonucleotide
ggaacaccggaagcuaccu

SEQ ID NO: 2198570 - RNA, 19 nt, Artificial Sequence
  Description of Artificial Sequence: Synthetic oligonucleotide
gugcaaacuuaagcugcua

SEQ ID NO: 2198571 - RNA, 19 nt, Artificial Sequence
  Description of Artificial Sequence: Synthetic oligonucleotide
ccgggcugcccaauucuuc

SEQ ID NO: 2198572 - RNA, 19 nt, Artificial Sequence
  Description of Artificial Sequence: Synthetic oligonucleotide
ccaaggagauguccuaggu

SEQ ID NO: 2198573 - RNA, 19 nt, Artificial Sequence
  Description of Artificial Sequence: Synthetic oligonucleotide
gcuaugucauaaacacggu

SEQ ID NO: 2198574 - RNA, 19 nt, Artificial Sequence
  Description of Artificial Sequence: Synthetic oligonucleotide
guugggcuauguagccucu

SEQ ID NO: 2198575 - RNA, 19 nt, Artificial Sequence
  Description of Artificial Sequence: Synthetic oligonucleotide
gcaucgugucucggugcag

SEQ ID NO: 2198576 - RNA, 19 nt, Artificial Sequence
  Description of Artificial Sequence: Synthetic oligonucleotide
gcuaaccaccagaucaaau

SEQ ID NO: 2198577 - RNA, 19 nt, Artificial Sequence
  Description of Artificial Sequence: Synthetic oligonucleotide
cugcccaauucuucugcuu

SEQ ID NO: 2198578 - RNA, 19 nt, Artificial Sequence
  Description of Artificial Sequence: Synthetic oligonucleotide
ccugcucucccaaggagau

SEQ ID NO: 2198579 - RNA, 19 nt, Artificial Sequence
  Description of Artificial Sequence: Synthetic oligonucleotide
gacuuccaaccuccuccuu

SEQ ID NO: 2198580 - RNA, 19 nt, Artificial Sequence
  Description of Artificial Sequence: Synthetic oligonucleotide
caguugcucucaccccaua

SEQ ID NO: 2198581 - RNA, 19 nt, Artificial Sequence
  Description of Artificial Sequence: Synthetic oligonucleotide
aggcugccgggcugcccaa

SEQ ID NO: 2198582 - RNA, 19 nt, Artificial Sequence
  Description of Artificial Sequence: Synthetic oligonucleotide
cgaaguucauagagagugu

SEQ ID NO: 2198583 - RNA, 19 nt, Artificial Sequence
  Description of Artificial Sequence: Synthetic oligonucleotide
auucccggucgaagauguu

SEQ ID NO: 2198584 - RNA, 19 nt, Artificial Sequence
  Description of Artificial Sequence: Synthetic oligonucleotide
gcaccgacaaacaccccau

SEQ ID NO: 2198585 - RNA, 19 nt, Artificial Sequence
  Description of Artificial Sequence: Synthetic oligonucleotide
caccggaagcuaccucccu

SEQ ID NO: 2198586 - RNA, 19 nt, Artificial Sequence
  Description of Artificial Sequence: Synthetic oligonucleotide
ccucccugcguccaccgcu

SEQ ID NO: 2198587 - RNA, 19 nt, Artificial Sequence
  Description of Artificial Sequence: Synthetic oligonucleotide
ggagauguccuaggucauu

SEQ ID NO: 2198588 - RNA, 19 nt, Artificial Sequence
  Description of Artificial Sequence: Synthetic oligonucleotide
ccugagaaucaugguauuu

SEQ ID NO: 2198589 - RNA, 19 nt, Artificial Sequence
  Description of Artificial Sequence: Synthetic oligonucleotide
cggugcagcagagguuuuc

SEQ ID NO: 2198590 - RNA, 19 nt, Artificial Sequence
  Description of Artificial Sequence: Synthetic oligonucleotide
cccauaccuuuuaaaucuu

SEQ ID NO: 2198591 - RNA, 19 nt, Artificial Sequence
  Description of Artificial Sequence: Synthetic oligonucleotide
ggccuugccugagaaucau

SEQ ID NO: 2198592 - RNA, 19 nt, Artificial Sequence
  Description of Artificial Sequence: Synthetic oligonucleotide
gugcucuaggaaggucauu

SEQ ID NO: 2198593 - RNA, 19 nt, Artificial Sequence
  Description of Artificial Sequence: Synthetic oligonucleotide
cugcugcccgaaggaggaa

SEQ ID NO: 2198594 - RNA, 19 nt, Artificial Sequence
  Description of Artificial Sequence: Synthetic oligonucleotide
gcugccgggcugcccaauu

SEQ ID NO: 2198595 - RNA, 19 nt, Artificial Sequence
  Description of Artificial Sequence: Synthetic oligonucleotide
gggcgagcugcugcccgaa

SEQ ID NO: 2198596 - RNA, 19 nt, Artificial Sequence
  Description of Artificial Sequence: Synthetic oligonucleotide
gccgggcugcccaauucuu

SEQ ID NO: 2198597 - RNA, 19 nt, Artificial Sequence
  Description of Artificial Sequence: Synthetic oligonucleotide
aagggauuugcucagaagc

SEQ ID NO: 2198598 - RNA, 19 nt, Artificial Sequence
  Description of Artificial Sequence: Synthetic oligonucleotide
uuuauuaucaaaacaaaca

SEQ ID NO: 2198599 - RNA, 19 nt, Artificial Sequence
  Description of Artificial Sequence: Synthetic oligonucleotide
uccagaaccacgauaaagg

SEQ ID NO: 2198600 - RNA, 19 nt, Artificial Sequence
  Description of Artificial Sequence: Synthetic oligonucleotide
aaaaggagccaccuugccc

SEQ ID NO: 2198601 - RNA, 19 nt, Artificial Sequence
  Description of Artificial Sequence: Synthetic oligonucleotide
uuagcaaucacucgcagga

SEQ ID NO: 2198602 - RNA, 19 nt, Artificial Sequence
  Description of Artificial Sequence: Synthetic oligonucleotide
ucucacagcgacuacaacg

SEQ ID NO: 2198603 - RNA, 19 nt, Artificial Sequence
  Description of Artificial Sequence: Synthetic oligonucleotide
acuacaacggccucuuucc

SEQ ID NO: 2198604 - RNA, 19 nt, Artificial Sequence
  Description of Artificial Sequence: Synthetic oligonucleotide
ugagcaauucccuuguggg

SEQ ID NO: 2198605 - RNA, 19 nt, Artificial Sequence
  Description of Artificial Sequence: Synthetic oligonucleotide
ucauaaagggauuugcuca

SEQ ID NO: 2198606 - RNA, 19 nt, Artificial Sequence
  Description of Artificial Sequence: Synthetic oligonucleotide
uaggauaagugauacaaug

SEQ ID NO: 2198607 - RNA, 19 nt, Artificial Sequence
  Description of Artificial Sequence: Synthetic oligonucleotide
uuggaguauucauaaaggg

SEQ ID NO: 2198608 - RNA, 19 nt, Artificial Sequence
  Description of Artificial Sequence: Synthetic oligonucleotide
uacaaugaagucuuuggag

SEQ ID NO: 2198609 - RNA, 19 nt, Artificial Sequence
  Description of Artificial Sequence: Synthetic oligonucleotide
cuuuggaguauucauaaag

SEQ ID NO: 2198610 - RNA, 19 nt, Artificial Sequence
  Description of Artificial Sequence: Synthetic oligonucleotide
aauauccagcucgagauuc

SEQ ID NO: 2198611 - RNA, 19 nt, Artificial Sequence
  Description of Artificial Sequence: Synthetic oligonucleotide
agcaagaucuuguacuucg

SEQ ID NO: 2198612 - RNA, 19 nt, Artificial Sequence
  Description of Artificial Sequence: Synthetic oligonucleotide
ucaauauccagcucgagau

SEQ ID NO: 2198613 - RNA, 19 nt, Artificial Sequence
  Description of Artificial Sequence: Synthetic oligonucleotide
uaaagggcaguucauacac

SEQ ID NO: 2198614 - RNA, 19 nt, Artificial Sequence
  Description of Artificial Sequence: Synthetic oligonucleotide
uccggagcaacgcugaagg

SEQ ID NO: 2198615 - RNA, 19 nt, Artificial Sequence
  Description of Artificial Sequence: Synthetic oligonucleotide
aguuaucagggcuuccucc

SEQ ID NO: 2198616 - RNA, 19 nt, Artificial Sequence
  Description of Artificial Sequence: Synthetic oligonucleotide
gaaggcuuggcucagaauc

SEQ ID NO: 2198617 - RNA, 19 nt, Artificial Sequence
  Description of Artificial Sequence: Synthetic oligonucleotide
agaacaagccgauacuccg

SEQ ID NO: 2198618 - RNA, 19 nt, Artificial Sequence
  Description of Artificial Sequence: Synthetic oligonucleotide
ugauccagaaccacgauaa

SEQ ID NO: 2198619 - RNA, 19 nt, Artificial Sequence
  Description of Artificial Sequence: Synthetic oligonucleotide
aaauucugcuucgugugcc

SEQ ID NO: 2198620 - RNA, 19 nt, Artificial Sequence
  Description of Artificial Sequence: Synthetic oligonucleotide
agaguuggguacuuggugg

SEQ ID NO: 2198621 - RNA, 19 nt, Artificial Sequence
  Description of Artificial Sequence: Synthetic oligonucleotide
ucauugaccagucuguggu

SEQ ID NO: 2198622 - RNA, 19 nt, Artificial Sequence
  Description of Artificial Sequence: Synthetic oligonucleotide
ucagucagcaucuuugggc

SEQ ID NO: 2198623 - RNA, 19 nt, Artificial Sequence
  Description of Artificial Sequence: Synthetic oligonucleotide
aaacguaucuggcugcuug

SEQ ID NO: 2198624 - RNA, 19 nt, Artificial Sequence
  Description of Artificial Sequence: Synthetic oligonucleotide
auaagugauacaaugaagu

SEQ ID NO: 2198625 - RNA, 19 nt, Artificial Sequence
  Description of Artificial Sequence: Synthetic oligonucleotide
auaagcgcggacuuguggg

SEQ ID NO: 2198626 - RNA, 19 nt, Artificial Sequence
  Description of Artificial Sequence: Synthetic oligonucleotide
uuguacuucggcuuguugc

SEQ ID NO: 2198627 - RNA, 19 nt, Artificial Sequence
  Description of Artificial Sequence: Synthetic oligonucleotide
uggaguauucauaaaggga

SEQ ID NO: 2198628 - RNA, 19 nt, Artificial Sequence
  Description of Artificial Sequence: Synthetic oligonucleotide
acaaugaagucuuuggagu

SEQ ID NO: 2198629 - RNA, 19 nt, Artificial Sequence
  Description of Artificial Sequence: Synthetic oligonucleotide
ucucauccaguucagucgg

SEQ ID NO: 2198630 - RNA, 19 nt, Artificial Sequence
  Description of Artificial Sequence: Synthetic oligonucleotide
ucggcaaccacuuugucca

SEQ ID NO: 2198631 - RNA, 19 nt, Artificial Sequence
  Description of Artificial Sequence: Synthetic oligonucleotide
gauaaagggcaguucauac

SEQ ID NO: 2198632 - RNA, 19 nt, Artificial Sequence
  Description of Artificial Sequence: Synthetic oligonucleotide
cucacagcgacuacaacgg

SEQ ID NO: 2198633 - RNA, 19 nt, Artificial Sequence
  Description of Artificial Sequence: Synthetic oligonucleotide
ugugguaaacguaucuggc

SEQ ID NO: 2198634 - RNA, 19 nt, Artificial Sequence
  Description of Artificial Sequence: Synthetic oligonucleotide
uacagaguuggguacuugg

SEQ ID NO: 2198635 - RNA, 19 nt, Artificial Sequence
  Description of Artificial Sequence: Synthetic oligonucleotide
gauaagugauacaaugaag

SEQ ID NO: 2198636 - RNA, 19 nt, Artificial Sequence
  Description of Artificial Sequence: Synthetic oligonucleotide
agcaauucccuugugggcc

SEQ ID NO: 2198637 - RNA, 19 nt, Artificial Sequence
  Description of Artificial Sequence: Synthetic oligonucleotide
ugguaaacguaucuggcug

SEQ ID NO: 2198638 - RNA, 19 nt, Artificial Sequence
  Description of Artificial Sequence: Synthetic oligonucleotide
uguucugucggcaaccacu

SEQ ID NO: 2198639 - RNA, 19 nt, Artificial Sequence
  Description of Artificial Sequence: Synthetic oligonucleotide
agaaccacgauaaagggca

SEQ ID NO: 2198640 - RNA, 19 nt, Artificial Sequence
  Description of Artificial Sequence: Synthetic oligonucleotide
uaggcaaguggucagucag

SEQ ID NO: 2198641 - RNA, 19 nt, Artificial Sequence
  Description of Artificial Sequence: Synthetic oligonucleotide
ucugucggcaaccacuuug

SEQ ID NO: 2198642 - RNA, 19 nt, Artificial Sequence
  Description of Artificial Sequence: Synthetic oligonucleotide
ugauucaggauguuaggca

SEQ ID NO: 2198643 - RNA, 19 nt, Artificial Sequence
  Description of Artificial Sequence: Synthetic oligonucleotide
uggucagucagcaucuuug

SEQ ID NO: 2198644 - RNA, 19 nt, Artificial Sequence
  Description of Artificial Sequence: Synthetic oligonucleotide
caucuuugggccuaucagg

SEQ ID NO: 2198645 - RNA, 19 nt, Artificial Sequence
  Description of Artificial Sequence: Synthetic oligonucleotide
aagucuuuggaguauucau

SEQ ID NO: 2198646 - RNA, 19 nt, Artificial Sequence
  Description of Artificial Sequence: Synthetic oligonucleotide
ucuagguggaugauccugc

SEQ ID NO: 2198647 - RNA, 19 nt, Artificial Sequence
  Description of Artificial Sequence: Synthetic oligonucleotide
ucagaaucccaucauugac

SEQ ID NO: 2198648 - RNA, 19 nt, Artificial Sequence
  Description of Artificial Sequence: Synthetic oligonucleotide
uugucaugaaagcuuauau

SEQ ID NO: 2198649 - RNA, 19 nt, Artificial Sequence
  Description of Artificial Sequence: Synthetic oligonucleotide
auccaguucagucggagag

SEQ ID NO: 2198650 - RNA, 19 nt, Artificial Sequence
  Description of Artificial Sequence: Synthetic oligonucleotide
cugugguaaacguaucugg

SEQ ID NO: 2198651 - RNA, 19 nt, Artificial Sequence
  Description of Artificial Sequence: Synthetic oligonucleotide
caggauguuaggcaagugg

SEQ ID NO: 2198652 - RNA, 19 nt, Artificial Sequence
  Description of Artificial Sequence: Synthetic oligonucleotide
aguccugcagcucaauauc

SEQ ID NO: 2198653 - RNA, 19 nt, Artificial Sequence
  Description of Artificial Sequence: Synthetic oligonucleotide
cagaaucccaucauugacc

SEQ ID NO: 2198654 - RNA, 19 nt, Artificial Sequence
  Description of Artificial Sequence: Synthetic oligonucleotide
cacacuuuaaaccugggga

SEQ ID NO: 2198655 - RNA, 19 nt, Artificial Sequence
  Description of Artificial Sequence: Synthetic oligonucleotide
uguacuucggcuuguugca

SEQ ID NO: 2198656 - RNA, 19 nt, Artificial Sequence
  Description of Artificial Sequence: Synthetic oligonucleotide
cauaaagggauuugcucag

SEQ ID NO: 2198657 - RNA, 19 nt, Artificial Sequence
  Description of Artificial Sequence: Synthetic oligonucleotide
uccauuccuaggauaagug

SEQ ID NO: 2198658 - RNA, 19 nt, Artificial Sequence
  Description of Artificial Sequence: Synthetic oligonucleotide
ugcaguuagcaaucacucg

SEQ ID NO: 2198659 - RNA, 19 nt, Artificial Sequence
  Description of Artificial Sequence: Synthetic oligonucleotide
guuagcaaucacucgcagg

SEQ ID NO: 2198660 - RNA, 19 nt, Artificial Sequence
  Description of Artificial Sequence: Synthetic oligonucleotide
agaaucccaucauugacca

SEQ ID NO: 2198661 - RNA, 19 nt, Artificial Sequence
  Description of Artificial Sequence: Synthetic oligonucleotide
uugcaguuagcaaucacuc

SEQ ID NO: 2198662 - RNA, 19 nt, Artificial Sequence
  Description of Artificial Sequence: Synthetic oligonucleotide
agucaggacauccuggaca

SEQ ID NO: 2198663 - RNA, 19 nt, Artificial Sequence
  Description of Artificial Sequence: Synthetic oligonucleotide
uuggcucagaaucccauca

SEQ ID NO: 2198664 - RNA, 19 nt, Artificial Sequence
  Description of Artificial Sequence: Synthetic oligonucleotide
uuuaaaccuggggaaauca

SEQ ID NO: 2198665 - RNA, 19 nt, Artificial Sequence
  Description of Artificial Sequence: Synthetic oligonucleotide
caaguggucagucagcauc

SEQ ID NO: 2198666 - RNA, 19 nt, Artificial Sequence
  Description of Artificial Sequence: Synthetic oligonucleotide
cagucggagaguuaucagg

SEQ ID NO: 2198667 - RNA, 19 nt, Artificial Sequence
  Description of Artificial Sequence: Synthetic oligonucleotide
caacaguccauccaacagc

SEQ ID NO: 2198668 - RNA, 19 nt, Artificial Sequence
  Description of Artificial Sequence: Synthetic oligonucleotide
augaaagcuuauaugaaug

SEQ ID NO: 2198669 - RNA, 19 nt, Artificial Sequence
  Description of Artificial Sequence: Synthetic oligonucleotide
agcaaucacucgcaggauc

SEQ ID NO: 2198670 - RNA, 19 nt, Artificial Sequence
  Description of Artificial Sequence: Synthetic oligonucleotide
uuaaaccuggggaaaucac

SEQ ID NO: 2198671 - RNA, 19 nt, Artificial Sequence
  Description of Artificial Sequence: Synthetic oligonucleotide
guaucuggcugcuugagca

SEQ ID NO: 2198672 - RNA, 19 nt, Artificial Sequence
  Description of Artificial Sequence: Synthetic oligonucleotide
cagucagcaucuuugggcc

SEQ ID NO: 2198673 - RNA, 19 nt, Artificial Sequence
  Description of Artificial Sequence: Synthetic oligonucleotide
auaaagggcaguucauaca

SEQ ID NO: 2198674 - RNA, 19 nt, Artificial Sequence
  Description of Artificial Sequence: Synthetic oligonucleotide
uuguggguagggcagcucc

SEQ ID NO: 2198675 - RNA, 19 nt, Artificial Sequence
  Description of Artificial Sequence: Synthetic oligonucleotide
agggauuugcucagaagcc

SEQ ID NO: 2198676 - RNA, 19 nt, Artificial Sequence
  Description of Artificial Sequence: Synthetic oligonucleotide
ucucgcucucugcagacag

SEQ ID NO: 2198677 - RNA, 19 nt, Artificial Sequence
  Description of Artificial Sequence: Synthetic oligonucleotide
aagccgauacuccggagca

SEQ ID NO: 2198678 - RNA, 19 nt, Artificial Sequence
  Description of Artificial Sequence: Synthetic oligonucleotide
agucggagaguuaucaggg

SEQ ID NO: 2198679 - RNA, 19 nt, Artificial Sequence
  Description of Artificial Sequence: Synthetic oligonucleotide
ucugcagacaggucaguca

SEQ ID NO: 2198680 - RNA, 19 nt, Artificial Sequence
  Description of Artificial Sequence: Synthetic oligonucleotide
ugcuugagcaauucccuug

SEQ ID NO: 2198681 - RNA, 19 nt, Artificial Sequence
  Description of Artificial Sequence: Synthetic oligonucleotide
uccagcucgagauucucgc

SEQ ID NO: 2198682 - RNA, 19 nt, Artificial Sequence
  Description of Artificial Sequence: Synthetic oligonucleotide
gcaguuagcaaucacucgc

SEQ ID NO: 2198683 - RNA, 19 nt, Artificial Sequence
  Description of Artificial Sequence: Synthetic oligonucleotide
gauguuaggcaagugguca

SEQ ID NO: 2198684 - RNA, 19 nt, Artificial Sequence
  Description of Artificial Sequence: Synthetic oligonucleotide
agugauacaaugaagucuu

SEQ ID NO: 2198685 - RNA, 19 nt, Artificial Sequence
  Description of Artificial Sequence: Synthetic oligonucleotide
ucggagaguuaucagggcu

SEQ ID NO: 2198686 - RNA, 19 nt, Artificial Sequence
  Description of Artificial Sequence: Synthetic oligonucleotide
gaguuggguacuugguggg

SEQ ID NO: 2198687 - RNA, 19 nt, Artificial Sequence
  Description of Artificial Sequence: Synthetic oligonucleotide
ggggaaaucacauccauuc

SEQ ID NO: 2198688 - RNA, 19 nt, Artificial Sequence
  Description of Artificial Sequence: Synthetic oligonucleotide
acacuuuaaaccuggggaa

SEQ ID NO: 2198689 - RNA, 19 nt, Artificial Sequence
  Description of Artificial Sequence: Synthetic oligonucleotide
cagaacaagccgauacucc

SEQ ID NO: 2198690 - RNA, 19 nt, Artificial Sequence
  Description of Artificial Sequence: Synthetic oligonucleotide
cagaaccacgauaaagggc

SEQ ID NO: 2198691 - RNA, 19 nt, Artificial Sequence
  Description of Artificial Sequence: Synthetic oligonucleotide
agggcuuccuccaacaguc

SEQ ID NO: 2198692 - RNA, 19 nt, Artificial Sequence
  Description of Artificial Sequence: Synthetic oligonucleotide
aaccuggggaaaucacauc

SEQ ID NO: 2198693 - RNA, 19 nt, Artificial Sequence
  Description of Artificial Sequence: Synthetic oligonucleotide
uccaacaguccauccaaca

SEQ ID NO: 2198694 - RNA, 19 nt, Artificial Sequence
  Description of Artificial Sequence: Synthetic oligonucleotide
caccagaacaagccgauac

SEQ ID NO: 2198695 - RNA, 19 nt, Artificial Sequence
  Description of Artificial Sequence: Synthetic oligonucleotide
agcuccuaggcugugcccc

SEQ ID NO: 2198696 - RNA, 19 nt, Artificial Sequence
  Description of Artificial Sequence: Synthetic oligonucleotide
cauaagcgcggacuugugg

SEQ ID NO: 2198697 - RNA, 19 nt, Artificial Sequence
  Description of Artificial Sequence: Synthetic oligonucleotide
gacuacaacggccucuuuc

SEQ ID NO: 2198698 - RNA, 19 nt, Artificial Sequence
  Description of Artificial Sequence: Synthetic oligonucleotide
auccagaaccacgauaaag

SEQ ID NO: 2198699 - RNA, 19 nt, Artificial Sequence
  Description of Artificial Sequence: Synthetic oligonucleotide
ucgagauucucgcucucug

SEQ ID NO: 2198700 - RNA, 19 nt, Artificial Sequence
  Description of Artificial Sequence: Synthetic oligonucleotide
auacaccuugucaugaaag

SEQ ID NO: 2198701 - RNA, 19 nt, Artificial Sequence
  Description of Artificial Sequence: Synthetic oligonucleotide
cugauucaggauguuaggc

SEQ ID NO: 2198702 - RNA, 19 nt, Artificial Sequence
  Description of Artificial Sequence: Synthetic oligonucleotide
caagccgauacuccggagc

SEQ ID NO: 2198703 - RNA, 19 nt, Artificial Sequence
  Description of Artificial Sequence: Synthetic oligonucleotide
uccccaacgaagaggguca

SEQ ID NO: 2198704 - RNA, 19 nt, Artificial Sequence
  Description of Artificial Sequence: Synthetic oligonucleotide
uguagcccggggagcaucg

SEQ ID NO: 2198705 - RNA, 19 nt, Artificial Sequence
  Description of Artificial Sequence: Synthetic oligonucleotide
cacagcgacuacaacggcc

SEQ ID NO: 2198706 - RNA, 19 nt, Artificial Sequence
  Description of Artificial Sequence: Synthetic oligonucleotide
uucauacaccuugucauga

SEQ ID NO: 2198707 - RNA, 19 nt, Artificial Sequence
  Description of Artificial Sequence: Synthetic oligonucleotide
aacguaucuggcugcuuga

SEQ ID NO: 2198708 - RNA, 19 nt, Artificial Sequence
  Description of Artificial Sequence: Synthetic oligonucleotide
cacgauaaagggcaguuca

SEQ ID NO: 2198709 - RNA, 19 nt, Artificial Sequence
  Description of Artificial Sequence: Synthetic oligonucleotide
uucuagguggaugauccug

SEQ ID NO: 2198710 - RNA, 19 nt, Artificial Sequence
  Description of Artificial Sequence: Synthetic oligonucleotide
acaacggccucuuuccugu

SEQ ID NO: 2198711 - RNA, 19 nt, Artificial Sequence
  Description of Artificial Sequence: Synthetic oligonucleotide
cauccaacagccgugcagc

SEQ ID NO: 2198712 - RNA, 19 nt, Artificial Sequence
  Description of Artificial Sequence: Synthetic oligonucleotide
acagccgugcagcaagauc

SEQ ID NO: 2198713 - RNA, 19 nt, Artificial Sequence
  Description of Artificial Sequence: Synthetic oligonucleotide
gagauucucgcucucugca

SEQ ID NO: 2198714 - RNA, 19 nt, Artificial Sequence
  Description of Artificial Sequence: Synthetic oligonucleotide
guucauacaccuugucaug

SEQ ID NO: 2198715 - RNA, 19 nt, Artificial Sequence
  Description of Artificial Sequence: Synthetic oligonucleotide
auguuggucacacuuuaaa

SEQ ID NO: 2198716 - RNA, 19 nt, Artificial Sequence
  Description of Artificial Sequence: Synthetic oligonucleotide
aaaccuggggaaaucacau

SEQ ID NO: 2198717 - RNA, 19 nt, Artificial Sequence
  Description of Artificial Sequence: Synthetic oligonucleotide
aaggcauaagcgcggacuu

SEQ ID NO: 2198718 - RNA, 19 nt, Artificial Sequence
  Description of Artificial Sequence: Synthetic oligonucleotide
uucgugugcccaccuagcc

SEQ ID NO: 2198719 - RNA, 19 nt, Artificial Sequence
  Description of Artificial Sequence: Synthetic oligonucleotide
auguuaggcaaguggucag

SEQ ID NO: 2198720 - RNA, 19 nt, Artificial Sequence
  Description of Artificial Sequence: Synthetic oligonucleotide
gagcaauucccuugugggc

SEQ ID NO: 2198721 - RNA, 19 nt, Artificial Sequence
  Description of Artificial Sequence: Synthetic oligonucleotide
aguucagucggagaguuau

SEQ ID NO: 2198722 - RNA, 19 nt, Artificial Sequence
  Description of Artificial Sequence: Synthetic oligonucleotide
agcggaacagcagccaaac

SEQ ID NO: 2198723 - RNA, 19 nt, Artificial Sequence
  Description of Artificial Sequence: Synthetic oligonucleotide
uuaggcaaguggucaguca

SEQ ID NO: 2198724 - RNA, 19 nt, Artificial Sequence
  Description of Artificial Sequence: Synthetic oligonucleotide
aggauguuaggcaaguggu

SEQ ID NO: 2198725 - RNA, 19 nt, Artificial Sequence
  Description of Artificial Sequence: Synthetic oligonucleotide
agauucucgcucucugcag

SEQ ID NO: 2198726 - RNA, 19 nt, Artificial Sequence
  Description of Artificial Sequence: Synthetic oligonucleotide
ggauaagugauacaaugaa

SEQ ID NO: 2198727 - RNA, 19 nt, Artificial Sequence
  Description of Artificial Sequence: Synthetic oligonucleotide
uacaacggccucuuuccug

SEQ ID NO: 2198728 - RNA, 19 nt, Artificial Sequence
  Description of Artificial Sequence: Synthetic oligonucleotide
cucaauauccagcucgaga

SEQ ID NO: 2198729 - RNA, 19 nt, Artificial Sequence
  Description of Artificial Sequence: Synthetic oligonucleotide
uuccuaggauaagugauac

SEQ ID NO: 2198730 - RNA, 19 nt, Artificial Sequence
  Description of Artificial Sequence: Synthetic oligonucleotide
uguugcaguuagcaaucac

SEQ ID NO: 2198731 - RNA, 19 nt, Artificial Sequence
  Description of Artificial Sequence: Synthetic oligonucleotide
aggauaagugauacaauga

SEQ ID NO: 2198732 - RNA, 19 nt, Artificial Sequence
  Description of Artificial Sequence: Synthetic oligonucleotide
uacuuggugggagagucca

SEQ ID NO: 2198733 - RNA, 19 nt, Artificial Sequence
  Description of Artificial Sequence: Synthetic oligonucleotide
ucgugugcccaccuagccc

SEQ ID NO: 2198734 - RNA, 19 nt, Artificial Sequence
  Description of Artificial Sequence: Synthetic oligonucleotide
gaccagucugugguaaacg

SEQ ID NO: 2198735 - RNA, 19 nt, Artificial Sequence
  Description of Artificial Sequence: Synthetic oligonucleotide
uggguacagaguuggguac

SEQ ID NO: 2198736 - RNA, 19 nt, Artificial Sequence
  Description of Artificial Sequence: Synthetic oligonucleotide
gggagaaggcauaagcgcg

SEQ ID NO: 2198737 - RNA, 19 nt, Artificial Sequence
  Description of Artificial Sequence: Synthetic oligonucleotide
gauucucgcucucugcaga

SEQ ID NO: 2198738 - RNA, 19 nt, Artificial Sequence
  Description of Artificial Sequence: Synthetic oligonucleotide
aguauucauaaagggauuu

SEQ ID NO: 2198739 - RNA, 19 nt, Artificial Sequence
  Description of Artificial Sequence: Synthetic oligonucleotide
gguaaacguaucuggcugc

SEQ ID NO: 2198740 - RNA, 19 nt, Artificial Sequence
  Description of Artificial Sequence: Synthetic oligonucleotide
uacuccggagcaacgcuga

SEQ ID NO: 2198741 - RNA, 19 nt, Artificial Sequence
  Description of Artificial Sequence: Synthetic oligonucleotide
ccagaaccacgauaaaggg

SEQ ID NO: 2198742 - RNA, 19 nt, Artificial Sequence
  Description of Artificial Sequence: Synthetic oligonucleotide
cuucgugugcccaccuagc

SEQ ID NO: 2198743 - RNA, 19 nt, Artificial Sequence
  Description of Artificial Sequence: Synthetic oligonucleotide
agaaggcauaagcgcggac

SEQ ID NO: 2198744 - RNA, 19 nt, Artificial Sequence
  Description of Artificial Sequence: Synthetic oligonucleotide
gcaaccacuuuguccaggg

SEQ ID NO: 2198745 - RNA, 19 nt, Artificial Sequence
  Description of Artificial Sequence: Synthetic oligonucleotide
caucgucugcuccccaacg

SEQ ID NO: 2198746 - RNA, 19 nt, Artificial Sequence
  Description of Artificial Sequence: Synthetic oligonucleotide
ucuuuggaguauucauaaa

SEQ ID NO: 2198747 - RNA, 19 nt, Artificial Sequence
  Description of Artificial Sequence: Synthetic oligonucleotide
ucauacaccuugucaugaa

SEQ ID NO: 2198748 - RNA, 19 nt, Artificial Sequence
  Description of Artificial Sequence: Synthetic oligonucleotide
cugugauccagaaccacga

SEQ ID NO: 2198749 - RNA, 19 nt, Artificial Sequence
  Description of Artificial Sequence: Synthetic oligonucleotide
ggucacacuuuaaaccugg

SEQ ID NO: 2198750 - RNA, 19 nt, Artificial Sequence
  Description of Artificial Sequence: Synthetic oligonucleotide
aucuuugggccuaucagga

SEQ ID NO: 2198751 - RNA, 19 nt, Artificial Sequence
  Description of Artificial Sequence: Synthetic oligonucleotide
agcucgagauucucgcucu

SEQ ID NO: 2198752 - RNA, 19 nt, Artificial Sequence
  Description of Artificial Sequence: Synthetic oligonucleotide
caacgaagagggucagggc

SEQ ID NO: 2198753 - RNA, 19 nt, Artificial Sequence
  Description of Artificial Sequence: Synthetic oligonucleotide
caugaaagcuuauaugaau

SEQ ID NO: 2198754 - RNA, 19 nt, Artificial Sequence
  Description of Artificial Sequence: Synthetic oligonucleotide
ucacauccauuccuaggau

SEQ ID NO: 2198755 - RNA, 19 nt, Artificial Sequence
  Description of Artificial Sequence: Synthetic oligonucleotide
gaguuaucagggcuuccuc

SEQ ID NO: 2198756 - RNA, 19 nt, Artificial Sequence
  Description of Artificial Sequence: Synthetic oligonucleotide
aucacucgcaggauccuuc

SEQ ID NO: 2198757 - RNA, 19 nt, Artificial Sequence
  Description of Artificial Sequence: Synthetic oligonucleotide
guugcaguuagcaaucacu

SEQ ID NO: 2198758 - RNA, 19 nt, Artificial Sequence
  Description of Artificial Sequence: Synthetic oligonucleotide
gacaugguccccucucaca

SEQ ID NO: 2198759 - RNA, 19 nt, Artificial Sequence
  Description of Artificial Sequence: Synthetic oligonucleotide
uggacagacaugguccccu

SEQ ID NO: 2198760 - RNA, 19 nt, Artificial Sequence
  Description of Artificial Sequence: Synthetic oligonucleotide
uccuaggauaagugauaca

SEQ ID NO: 2198761 - RNA, 19 nt, Artificial Sequence
  Description of Artificial Sequence: Synthetic oligonucleotide
gccugauucaggauguuag

SEQ ID NO: 2198762 - RNA, 19 nt, Artificial Sequence
  Description of Artificial Sequence: Synthetic oligonucleotide
cuuuaaaccuggggaaauc

SEQ ID NO: 2198763 - RNA, 19 nt, Artificial Sequence
  Description of Artificial Sequence: Synthetic oligonucleotide
accuccccgagccacucuc

SEQ ID NO: 2198764 - RNA, 19 nt, Artificial Sequence
  Description of Artificial Sequence: Synthetic oligonucleotide
ucgucugcuccccaacgaa

SEQ ID NO: 2198765 - RNA, 19 nt, Artificial Sequence
  Description of Artificial Sequence: Synthetic oligonucleotide
auucccuugugggccacac

SEQ ID NO: 2198766 - RNA, 19 nt, Artificial Sequence
  Description of Artificial Sequence: Synthetic oligonucleotide
cauuccuaggauaagugau

SEQ ID NO: 2198767 - RNA, 19 nt, Artificial Sequence
  Description of Artificial Sequence: Synthetic oligonucleotide
uacuucggcuuguugcagu

SEQ ID NO: 2198768 - RNA, 19 nt, Artificial Sequence
  Description of Artificial Sequence: Synthetic oligonucleotide
ugugauccagaaccacgau

SEQ ID NO: 2198769 - RNA, 19 nt, Artificial Sequence
  Description of Artificial Sequence: Synthetic oligonucleotide
uaagcgcggacuugugggu

SEQ ID NO: 2198770 - RNA, 19 nt, Artificial Sequence
  Description of Artificial Sequence: Synthetic oligonucleotide
cccaucauugaccagucug

SEQ ID NO: 2198771 - RNA, 19 nt, Artificial Sequence
  Description of Artificial Sequence: Synthetic oligonucleotide
aacggccucuuuccuguga

SEQ ID NO: 2198772 - RNA, 19 nt, Artificial Sequence
  Description of Artificial Sequence: Synthetic oligonucleotide
guggguacagaguugggua

SEQ ID NO: 2198773 - RNA, 19 nt, Artificial Sequence
  Description of Artificial Sequence: Synthetic oligonucleotide
ccugauucaggauguuagg

SEQ ID NO: 2198774 - RNA, 19 nt, Artificial Sequence
  Description of Artificial Sequence: Synthetic oligonucleotide
acuuuaaaccuggggaaau

SEQ ID NO: 2198775 - RNA, 19 nt, Artificial Sequence
  Description of Artificial Sequence: Synthetic oligonucleotide
acgaagagggucagggcuc

SEQ ID NO: 2198776 - RNA, 19 nt, Artificial Sequence
  Description of Artificial Sequence: Synthetic oligonucleotide
ccaacaguccauccaacag

SEQ ID NO: 2198777 - RNA, 19 nt, Artificial Sequence
  Description of Artificial Sequence: Synthetic oligonucleotide
gggaaaucacauccauucc

SEQ ID NO: 2198778 - RNA, 19 nt, Artificial Sequence
  Description of Artificial Sequence: Synthetic oligonucleotide
gauccugcccgguggguac

SEQ ID NO: 2198779 - RNA, 19 nt, Artificial Sequence
  Description of Artificial Sequence: Synthetic oligonucleotide
ucugcuucgugugcccacc

SEQ ID NO: 2198780 - RNA, 19 nt, Artificial Sequence
  Description of Artificial Sequence: Synthetic oligonucleotide
ucacagcgacuacaacggc

SEQ ID NO: 2198781 - RNA, 19 nt, Artificial Sequence
  Description of Artificial Sequence: Synthetic oligonucleotide
uguuaggcaaguggucagu

SEQ ID NO: 2198782 - RNA, 19 nt, Artificial Sequence
  Description of Artificial Sequence: Synthetic oligonucleotide
aucgucugcuccccaacga

SEQ ID NO: 2198783 - RNA, 19 nt, Artificial Sequence
  Description of Artificial Sequence: Synthetic oligonucleotide
uggggaaaucacauccauu

SEQ ID NO: 2198784 - RNA, 19 nt, Artificial Sequence
  Description of Artificial Sequence: Synthetic oligonucleotide
gauacuccggagcaacgcu

SEQ ID NO: 2198785 - RNA, 19 nt, Artificial Sequence
  Description of Artificial Sequence: Synthetic oligonucleotide
ccuaggauaagugauacaa

SEQ ID NO: 2198786 - RNA, 19 nt, Artificial Sequence
  Description of Artificial Sequence: Synthetic oligonucleotide
ugaccagucugugguaaac

SEQ ID NO: 2198787 - RNA, 19 nt, Artificial Sequence
  Description of Artificial Sequence: Synthetic oligonucleotide
gcaaucacucgcaggaucc

SEQ ID NO: 2198788 - RNA, 19 nt, Artificial Sequence
  Description of Artificial Sequence: Synthetic oligonucleotide
ucacucgcaggauccuucu

SEQ ID NO: 2198789 - RNA, 19 nt, Artificial Sequence
  Description of Artificial Sequence: Synthetic oligonucleotide
uggggcuguagcccgggga

SEQ ID NO: 2198790 - RNA, 19 nt, Artificial Sequence
  Description of Artificial Sequence: Synthetic oligonucleotide
gcucagaaucccaucauug

SEQ ID NO: 2198791 - RNA, 19 nt, Artificial Sequence
  Description of Artificial Sequence: Synthetic oligonucleotide
gaaucccaucauugaccag

SEQ ID NO: 2198792 - RNA, 19 nt, Artificial Sequence
  Description of Artificial Sequence: Synthetic oligonucleotide
auugaccagucugugguaa

SEQ ID NO: 2198793 - RNA, 19 nt, Artificial Sequence
  Description of Artificial Sequence: Synthetic oligonucleotide
ucgcucucugcagacaggu

SEQ ID NO: 2198794 - RNA, 19 nt, Artificial Sequence
  Description of Artificial Sequence: Synthetic oligonucleotide
cuccccaacgaagaggguc

SEQ ID NO: 2198795 - RNA, 19 nt, Artificial Sequence
  Description of Artificial Sequence: Synthetic oligonucleotide
gcggggagaaggcauaagc

SEQ ID NO: 2198796 - RNA, 19 nt, Artificial Sequence
  Description of Artificial Sequence: Synthetic oligonucleotide
gucggagaguuaucagggc

SEQ ID NO: 2198797 - RNA, 19 nt, Artificial Sequence
  Description of Artificial Sequence: Synthetic oligonucleotide
agucuuuggaguauucaua

SEQ ID NO: 2198798 - RNA, 19 nt, Artificial Sequence
  Description of Artificial Sequence: Synthetic oligonucleotide
uaucuggcugcuugagcaa

SEQ ID NO: 2198799 - RNA, 19 nt, Artificial Sequence
  Description of Artificial Sequence: Synthetic oligonucleotide
caucauugaccagucugug

SEQ ID NO: 2198800 - RNA, 19 nt, Artificial Sequence
  Description of Artificial Sequence: Synthetic oligonucleotide
gggccuaucaggaucuugc

SEQ ID NO: 2198801 - RNA, 19 nt, Artificial Sequence
  Description of Artificial Sequence: Synthetic oligonucleotide
ccuaucaggaucuugccaa

SEQ ID NO: 2198802 - RNA, 19 nt, Artificial Sequence
  Description of Artificial Sequence: Synthetic oligonucleotide
ggucagggcucucugguug

SEQ ID NO: 2198803 - RNA, 19 nt, Artificial Sequence
  Description of Artificial Sequence: Synthetic oligonucleotide
agcgcggacuuguggguag

SEQ ID NO: 2198804 - RNA, 19 nt, Artificial Sequence
  Description of Artificial Sequence: Synthetic oligonucleotide
acaagccgauacuccggag

SEQ ID NO: 2198805 - RNA, 19 nt, Artificial Sequence
  Description of Artificial Sequence: Synthetic oligonucleotide
cugcccgguggguacagag

SEQ ID NO: 2198806 - RNA, 19 nt, Artificial Sequence
  Description of Artificial Sequence: Synthetic oligonucleotide
cagcagccaaaccuccccg

SEQ ID NO: 2198807 - RNA, 19 nt, Artificial Sequence
  Description of Artificial Sequence: Synthetic oligonucleotide
aaccacgauaaagggcagu

SEQ ID NO: 2198808 - RNA, 19 nt, Artificial Sequence
  Description of Artificial Sequence: Synthetic oligonucleotide
ugugccccaccagaacaag

SEQ ID NO: 2198809 - RNA, 19 nt, Artificial Sequence
  Description of Artificial Sequence: Synthetic oligonucleotide
ucggcuuguugcaguuagc

SEQ ID NO: 2198810 - RNA, 19 nt, Artificial Sequence
  Description of Artificial Sequence: Synthetic oligonucleotide
uucugcuucgugugcccac

SEQ ID NO: 2198811 - RNA, 19 nt, Artificial Sequence
  Description of Artificial Sequence: Synthetic oligonucleotide
acagaguuggguacuuggu

SEQ ID NO: 2198812 - RNA, 19 nt, Artificial Sequence
  Description of Artificial Sequence: Synthetic oligonucleotide
cagcucgagauucucgcuc

SEQ ID NO: 2198813 - RNA, 19 nt, Artificial Sequence
  Description of Artificial Sequence: Synthetic oligonucleotide
ggauuugcucagaagcccc

SEQ ID NO: 2198814 - RNA, 19 nt, Artificial Sequence
  Description of Artificial Sequence: Synthetic oligonucleotide
gugguaaacguaucuggcu

SEQ ID NO: 2198815 - RNA, 19 nt, Artificial Sequence
  Description of Artificial Sequence: Synthetic oligonucleotide
ugaaggcuuggcucagaau

SEQ ID NO: 2198816 - RNA, 19 nt, Artificial Sequence
  Description of Artificial Sequence: Synthetic oligonucleotide
cucgcucucugcagacagg

SEQ ID NO: 2198817 - RNA, 19 nt, Artificial Sequence
  Description of Artificial Sequence: Synthetic oligonucleotide
auuccuaggauaagugaua

SEQ ID NO: 2198818 - RNA, 19 nt, Artificial Sequence
  Description of Artificial Sequence: Synthetic oligonucleotide
accacgauaaagggcaguu

SEQ ID NO: 2198819 - RNA, 19 nt, Artificial Sequence
  Description of Artificial Sequence: Synthetic oligonucleotide
gucacacuuuaaaccuggg

SEQ ID NO: 2198820 - RNA, 19 nt, Artificial Sequence
  Description of Artificial Sequence: Synthetic oligonucleotide
agucugugguaaacguauc

SEQ ID NO: 2198821 - RNA, 19 nt, Artificial Sequence
  Description of Artificial Sequence: Synthetic oligonucleotide
gcuuguugcaguuagcaau

SEQ ID NO: 2198822 - RNA, 19 nt, Artificial Sequence
  Description of Artificial Sequence: Synthetic oligonucleotide
gugauccagaaccacgaua

SEQ ID NO: 2198823 - RNA, 19 nt, Artificial Sequence
  Description of Artificial Sequence: Synthetic oligonucleotide
agcaacgcugaaggcuugg

SEQ ID NO: 2198824 - RNA, 19 nt, Artificial Sequence
  Description of Artificial Sequence: Synthetic oligonucleotide
cuagcccuguaccgggcag

SEQ ID NO: 2198825 - RNA, 19 nt, Artificial Sequence
  Description of Artificial Sequence: Synthetic oligonucleotide
auacuccggagcaacgcug

SEQ ID NO: 2198826 - RNA, 19 nt, Artificial Sequence
  Description of Artificial Sequence: Synthetic oligonucleotide
ugcccgguggguacagagu

SEQ ID NO: 2198827 - RNA, 19 nt, Artificial Sequence
  Description of Artificial Sequence: Synthetic oligonucleotide
cggggagaaggcauaagcg

SEQ ID NO: 2198828 - RNA, 19 nt, Artificial Sequence
  Description of Artificial Sequence: Synthetic oligonucleotide
uccugugauccagaaccac

SEQ ID NO: 2198829 - RNA, 19 nt, Artificial Sequence
  Description of Artificial Sequence: Synthetic oligonucleotide
aaucacucgcaggauccuu

SEQ ID NO: 2198830 - RNA, 19 nt, Artificial Sequence
  Description of Artificial Sequence: Synthetic oligonucleotide
cauacaccuugucaugaaa

SEQ ID NO: 2198831 - RNA, 19 nt, Artificial Sequence
  Description of Artificial Sequence: Synthetic oligonucleotide
guuaggcaaguggucaguc

SEQ ID NO: 2198832 - RNA, 19 nt, Artificial Sequence
  Description of Artificial Sequence: Synthetic oligonucleotide
uccccucucacagcgacua

SEQ ID NO: 2198833 - RNA, 19 nt, Artificial Sequence
  Description of Artificial Sequence: Synthetic oligonucleotide
cuugagcaauucccuugug

SEQ ID NO: 2198834 - RNA, 19 nt, Artificial Sequence
  Description of Artificial Sequence: Synthetic oligonucleotide
uccuaggcugugccccacc

SEQ ID NO: 2198835 - RNA, 19 nt, Artificial Sequence
  Description of Artificial Sequence: Synthetic oligonucleotide
gaaccacgauaaagggcag

SEQ ID NO: 2198836 - RNA, 19 nt, Artificial Sequence
  Description of Artificial Sequence: Synthetic oligonucleotide
agcucaauauccagcucga

SEQ ID NO: 2198837 - RNA, 19 nt, Artificial Sequence
  Description of Artificial Sequence: Synthetic oligonucleotide
acguaucuggcugcuugag

SEQ ID NO: 2198838 - RNA, 19 nt, Artificial Sequence
  Description of Artificial Sequence: Synthetic oligonucleotide
cccaccuagcccuguaccg

SEQ ID NO: 2198839 - RNA, 19 nt, Artificial Sequence
  Description of Artificial Sequence: Synthetic oligonucleotide
acuucggcuuguugcaguu

SEQ ID NO: 2198840 - RNA, 19 nt, Artificial Sequence
  Description of Artificial Sequence: Synthetic oligonucleotide
agcgacuacaacggccucu

SEQ ID NO: 2198841 - RNA, 19 nt, Artificial Sequence
  Description of Artificial Sequence: Synthetic oligonucleotide
acaguccugcagcucaaua

SEQ ID NO: 2198842 - RNA, 19 nt, Artificial Sequence
  Description of Artificial Sequence: Synthetic oligonucleotide
gacuuguggguagggcagc

SEQ ID NO: 2198843 - RNA, 19 nt, Artificial Sequence
  Description of Artificial Sequence: Synthetic oligonucleotide
gggagaguccaguggggag

SEQ ID NO: 2198844 - RNA, 19 nt, Artificial Sequence
  Description of Artificial Sequence: Synthetic oligonucleotide
guaccgggcagcggaacag

SEQ ID NO: 2198845 - RNA, 19 nt, Artificial Sequence
  Description of Artificial Sequence: Synthetic oligonucleotide
ugggccuaucaggaucuug

SEQ ID NO: 2198846 - RNA, 19 nt, Artificial Sequence
  Description of Artificial Sequence: Synthetic oligonucleotide
acggccucuuuccugugau

SEQ ID NO: 2198847 - RNA, 19 nt, Artificial Sequence
  Description of Artificial Sequence: Synthetic oligonucleotide
agucagcaucuuugggccu

SEQ ID NO: 2198848 - RNA, 19 nt, Artificial Sequence
  Description of Artificial Sequence: Synthetic oligonucleotide
ugcccaccuagcccuguac

SEQ ID NO: 2198849 - RNA, 19 nt, Artificial Sequence
  Description of Artificial Sequence: Synthetic oligonucleotide
gcaagaucuuguacuucgg

SEQ ID NO: 2198850 - RNA, 19 nt, Artificial Sequence
  Description of Artificial Sequence: Synthetic oligonucleotide
ugucggcaaccacuuuguc

SEQ ID NO: 2198851 - RNA, 19 nt, Artificial Sequence
  Description of Artificial Sequence: Synthetic oligonucleotide
ucccaucauugaccagucu

SEQ ID NO: 2198852 - RNA, 19 nt, Artificial Sequence
  Description of Artificial Sequence: Synthetic oligonucleotide
accuugucaugaaagcuua

SEQ ID NO: 2198853 - RNA, 19 nt, Artificial Sequence
  Description of Artificial Sequence: Synthetic oligonucleotide
cacauccauuccuaggaua

SEQ ID NO: 2198854 - RNA, 19 nt, Artificial Sequence
  Description of Artificial Sequence: Synthetic oligonucleotide
guacuucggcuuguugcag

SEQ ID NO: 2198855 - RNA, 19 nt, Artificial Sequence
  Description of Artificial Sequence: Synthetic oligonucleotide
cagucaggacauccuggac

SEQ ID NO: 2198856 - RNA, 19 nt, Artificial Sequence
  Description of Artificial Sequence: Synthetic oligonucleotide
cuaggauaagugauacaau

SEQ ID NO: 2198857 - RNA, 19 nt, Artificial Sequence
  Description of Artificial Sequence: Synthetic oligonucleotide
ugauccugcccggugggua

SEQ ID NO: 2198858 - RNA, 19 nt, Artificial Sequence
  Description of Artificial Sequence: Synthetic oligonucleotide
gucugcuccccaacgaaga

SEQ ID NO: 2198859 - RNA, 19 nt, Artificial Sequence
  Description of Artificial Sequence: Synthetic oligonucleotide
gcagccaaaccuccccgag

SEQ ID NO: 2198860 - RNA, 19 nt, Artificial Sequence
  Description of Artificial Sequence: Synthetic oligonucleotide
cuccggagcaacgcugaag

SEQ ID NO: 2198861 - RNA, 19 nt, Artificial Sequence
  Description of Artificial Sequence: Synthetic oligonucleotide
caguccauccaacagccgu

SEQ ID NO: 2198862 - RNA, 19 nt, Artificial Sequence
  Description of Artificial Sequence: Synthetic oligonucleotide
cucugcagacaggucaguc

SEQ ID NO: 2198863 - RNA, 19 nt, Artificial Sequence
  Description of Artificial Sequence: Synthetic oligonucleotide
cauguuggucacacuuuaa

SEQ ID NO: 2198864 - RNA, 19 nt, Artificial Sequence
  Description of Artificial Sequence: Synthetic oligonucleotide
gagaaggcauaagcgcgga

SEQ ID NO: 2198865 - RNA, 19 nt, Artificial Sequence
  Description of Artificial Sequence: Synthetic oligonucleotide
cuaucaggaucuugccaaa

SEQ ID NO: 2198866 - RNA, 19 nt, Artificial Sequence
  Description of Artificial Sequence: Synthetic oligonucleotide
guacagaguuggguacuug

SEQ ID NO: 2198867 - RNA, 19 nt, Artificial Sequence
  Description of Artificial Sequence: Synthetic oligonucleotide
ugggcggggagaaggcaua

SEQ ID NO: 2198868 - RNA, 19 nt, Artificial Sequence
  Description of Artificial Sequence: Synthetic oligonucleotide
aauucccuugugggccaca

SEQ ID NO: 2198869 - RNA, 19 nt, Artificial Sequence
  Description of Artificial Sequence: Synthetic oligonucleotide
ccagaacaagccgauacuc

SEQ ID NO: 2198870 - RNA, 19 nt, Artificial Sequence
  Description of Artificial Sequence: Synthetic oligonucleotide
ccauuccuaggauaaguga

SEQ ID NO: 2198871 - RNA, 19 nt, Artificial Sequence
  Description of Artificial Sequence: Synthetic oligonucleotide
cuccauguuggucacacuu

SEQ ID NO: 2198872 - RNA, 19 nt, Artificial Sequence
  Description of Artificial Sequence: Synthetic oligonucleotide
cuguucugucggcaaccac

SEQ ID NO: 2198873 - RNA, 19 nt, Artificial Sequence
  Description of Artificial Sequence: Synthetic oligonucleotide
acaguccauccaacagccg

SEQ ID NO: 2198874 - RNA, 19 nt, Artificial Sequence
  Description of Artificial Sequence: Synthetic oligonucleotide
aacagccgugcagcaagau

SEQ ID NO: 2198875 - RNA, 19 nt, Artificial Sequence
  Description of Artificial Sequence: Synthetic oligonucleotide
gguccccucucacagcgac

SEQ ID NO: 2198876 - RNA, 19 nt, Artificial Sequence
  Description of Artificial Sequence: Synthetic oligonucleotide
auucugcuucgugugccca

SEQ ID NO: 2198877 - RNA, 19 nt, Artificial Sequence
  Description of Artificial Sequence: Synthetic oligonucleotide
gguagggcagcuccagcuc

SEQ ID NO: 2198878 - RNA, 19 nt, Artificial Sequence
  Description of Artificial Sequence: Synthetic oligonucleotide
ugcuucgugugcccaccua

SEQ ID NO: 2198879 - RNA, 19 nt, Artificial Sequence
  Description of Artificial Sequence: Synthetic oligonucleotide
cugaaggcuuggcucagaa

SEQ ID NO: 2198880 - RNA, 19 nt, Artificial Sequence
  Description of Artificial Sequence: Synthetic oligonucleotide
ggauguuaggcaagugguc

SEQ ID NO: 2198881 - RNA, 19 nt, Artificial Sequence
  Description of Artificial Sequence: Synthetic oligonucleotide
cuggacagacauggucccc

SEQ ID NO: 2198882 - RNA, 19 nt, Artificial Sequence
  Description of Artificial Sequence: Synthetic oligonucleotide
ucgcaggauccuucucuuc

SEQ ID NO: 2198883 - RNA, 19 nt, Artificial Sequence
  Description of Artificial Sequence: Synthetic oligonucleotide
aggcauaagcgcggacuug

SEQ ID NO: 2198884 - RNA, 19 nt, Artificial Sequence
  Description of Artificial Sequence: Synthetic oligonucleotide
gccuaucaggaucuugcca

SEQ ID NO: 2198885 - RNA, 19 nt, Artificial Sequence
  Description of Artificial Sequence: Synthetic oligonucleotide
ggcuguucugucggcaacc

SEQ ID NO: 2198886 - RNA, 19 nt, Artificial Sequence
  Description of Artificial Sequence: Synthetic oligonucleotide
uagcaaucacucgcaggau

SEQ ID NO: 2198887 - RNA, 19 nt, Artificial Sequence
  Description of Artificial Sequence: Synthetic oligonucleotide
uaaacguaucuggcugcuu

SEQ ID NO: 2198888 - RNA, 19 nt, Artificial Sequence
  Description of Artificial Sequence: Synthetic oligonucleotide
ggagaguuaucagggcuuc

SEQ ID NO: 2198889 - RNA, 19 nt, Artificial Sequence
  Description of Artificial Sequence: Synthetic oligonucleotide
cgagauucucgcucucugc

SEQ ID NO: 2198890 - RNA, 19 nt, Artificial Sequence
  Description of Artificial Sequence: Synthetic oligonucleotide
gcccaccuagcccuguacc

SEQ ID NO: 2198891 - RNA, 19 nt, Artificial Sequence
  Description of Artificial Sequence: Synthetic oligonucleotide
cugucggcaaccacuuugu

SEQ ID NO: 2198892 - RNA, 19 nt, Artificial Sequence
  Description of Artificial Sequence: Synthetic oligonucleotide
ccgauacuccggagcaacg

SEQ ID NO: 2198893 - RNA, 19 nt, Artificial Sequence
  Description of Artificial Sequence: Synthetic oligonucleotide
aagcgcggacuugugggua

SEQ ID NO: 2198894 - RNA, 19 nt, Artificial Sequence
  Description of Artificial Sequence: Synthetic oligonucleotide
guaaacguaucuggcugcu

SEQ ID NO: 2198895 - RNA, 19 nt, Artificial Sequence
  Description of Artificial Sequence: Synthetic oligonucleotide
ggagcaucgucugcucccc

SEQ ID NO: 2198896 - RNA, 19 nt, Artificial Sequence
  Description of Artificial Sequence: Synthetic oligonucleotide
ggcuuguugcaguuagcaa

SEQ ID NO: 2198897 - RNA, 19 nt, Artificial Sequence
  Description of Artificial Sequence: Synthetic oligonucleotide
caguggggagucgcugggg

SEQ ID NO: 2198898 - RNA, 19 nt, Artificial Sequence
  Description of Artificial Sequence: Synthetic oligonucleotide
cguaucuggcugcuugagc

SEQ ID NO: 2198899 - RNA, 19 nt, Artificial Sequence
  Description of Artificial Sequence: Synthetic oligonucleotide
gcuugagcaauucccuugu

SEQ ID NO: 2198900 - RNA, 19 nt, Artificial Sequence
  Description of Artificial Sequence: Synthetic oligonucleotide
uucugucggcaaccacuuu

SEQ ID NO: 2198901 - RNA, 19 nt, Artificial Sequence
  Description of Artificial Sequence: Synthetic oligonucleotide
cauugaccagucuguggua

SEQ ID NO: 2198902 - RNA, 19 nt, Artificial Sequence
  Description of Artificial Sequence: Synthetic oligonucleotide
caggcuguucugucggcaa

SEQ ID NO: 2198903 - RNA, 19 nt, Artificial Sequence
  Description of Artificial Sequence: Synthetic oligonucleotide
ucagggcucucugguugcu

SEQ ID NO: 2198904 - RNA, 19 nt, Artificial Sequence
  Description of Artificial Sequence: Synthetic oligonucleotide
ccaucauugaccagucugu

SEQ ID NO: 2198905 - RNA, 19 nt, Artificial Sequence
  Description of Artificial Sequence: Synthetic oligonucleotide
uugcccugggcaggagaca

SEQ ID NO: 2198906 - RNA, 19 nt, Artificial Sequence
  Description of Artificial Sequence: Synthetic oligonucleotide
guucagucggagaguuauc

SEQ ID NO: 2198907 - RNA, 19 nt, Artificial Sequence
  Description of Artificial Sequence: Synthetic oligonucleotide
gagcaacgcugaaggcuug

SEQ ID NO: 2198908 - RNA, 19 nt, Artificial Sequence
  Description of Artificial Sequence: Synthetic oligonucleotide
ccuccaacaguccauccaa

SEQ ID NO: 2198909 - RNA, 19 nt, Artificial Sequence
  Description of Artificial Sequence: Synthetic oligonucleotide
ucaggacauccuggacaga

SEQ ID NO: 2198910 - RNA, 19 nt, Artificial Sequence
  Description of Artificial Sequence: Synthetic oligonucleotide
caacagccgugcagcaaga

SEQ ID NO: 2198911 - RNA, 19 nt, Artificial Sequence
  Description of Artificial Sequence: Synthetic oligonucleotide
caacgcugaaggcuuggcu

SEQ ID NO: 2198912 - RNA, 19 nt, Artificial Sequence
  Description of Artificial Sequence: Synthetic oligonucleotide
ugugcccaccuagcccugu

SEQ ID NO: 2198913 - RNA, 19 nt, Artificial Sequence
  Description of Artificial Sequence: Synthetic oligonucleotide
cuggggaaaucacauccau

SEQ ID NO: 2198914 - RNA, 19 nt, Artificial Sequence
  Description of Artificial Sequence: Synthetic oligonucleotide
uccugcccgguggguacag

SEQ ID NO: 2198915 - RNA, 19 nt, Artificial Sequence
  Description of Artificial Sequence: Synthetic oligonucleotide
ccuggggaaaucacaucca

SEQ ID NO: 2198916 - RNA, 19 nt, Artificial Sequence
  Description of Artificial Sequence: Synthetic oligonucleotide
cagcggaacagcagccaaa

SEQ ID NO: 2198917 - RNA, 19 nt, Artificial Sequence
  Description of Artificial Sequence: Synthetic oligonucleotide
cuguagcccggggagcauc

SEQ ID NO: 2198918 - RNA, 19 nt, Artificial Sequence
  Description of Artificial Sequence: Synthetic oligonucleotide
cucauccaguucagucgga

SEQ ID NO: 2198919 - RNA, 19 nt, Artificial Sequence
  Description of Artificial Sequence: Synthetic oligonucleotide
cacucgcaggauccuucuc

SEQ ID NO: 2198920 - RNA, 19 nt, Artificial Sequence
  Description of Artificial Sequence: Synthetic oligonucleotide
cgucugcuccccaacgaag

SEQ ID NO: 2198921 - RNA, 19 nt, Artificial Sequence
  Description of Artificial Sequence: Synthetic oligonucleotide
cgauacuccggagcaacgc

SEQ ID NO: 2198922 - RNA, 19 nt, Artificial Sequence
  Description of Artificial Sequence: Synthetic oligonucleotide
acuccggagcaacgcugaa

SEQ ID NO: 2198923 - RNA, 19 nt, Artificial Sequence
  Description of Artificial Sequence: Synthetic oligonucleotide
ggcauaagcgcggacuugu

SEQ ID NO: 2198924 - RNA, 19 nt, Artificial Sequence
  Description of Artificial Sequence: Synthetic oligonucleotide
caacggccucuuuccugug

SEQ ID NO: 2198925 - RNA, 19 nt, Artificial Sequence
  Description of Artificial Sequence: Synthetic oligonucleotide
gcagcucaauauccagcuc

SEQ ID NO: 2198926 - RNA, 19 nt, Artificial Sequence
  Description of Artificial Sequence: Synthetic oligonucleotide
gcaacgcugaaggcuuggc

SEQ ID NO: 2198927 - RNA, 19 nt, Artificial Sequence
  Description of Artificial Sequence: Synthetic oligonucleotide
ggagaguccaguggggagu

SEQ ID NO: 2198928 - RNA, 19 nt, Artificial Sequence
  Description of Artificial Sequence: Synthetic oligonucleotide
cuucuagguggaugauccu

SEQ ID NO: 2198929 - RNA, 19 nt, Artificial Sequence
  Description of Artificial Sequence: Synthetic oligonucleotide
guucugucggcaaccacuu

SEQ ID NO: 2198930 - RNA, 19 nt, Artificial Sequence
  Description of Artificial Sequence: Synthetic oligonucleotide
gcggacuuguggguagggc

SEQ ID NO: 2198931 - RNA, 19 nt, Artificial Sequence
  Description of Artificial Sequence: Synthetic oligonucleotide
ccccugggcggggagaagg

SEQ ID NO: 2198932 - RNA, 19 nt, Artificial Sequence
  Description of Artificial Sequence: Synthetic oligonucleotide
ggagcaacgcugaaggcuu

SEQ ID NO: 2198933 - RNA, 19 nt, Artificial Sequence
  Description of Artificial Sequence: Synthetic oligonucleotide
cuacaacggccucuuuccu

SEQ ID NO: 2198934 - RNA, 19 nt, Artificial Sequence
  Description of Artificial Sequence: Synthetic oligonucleotide
caauauccagcucgagauu

SEQ ID NO: 2198935 - RNA, 19 nt, Artificial Sequence
  Description of Artificial Sequence: Synthetic oligonucleotide
ccagucugugguaaacgua

SEQ ID NO: 2198936 - RNA, 19 nt, Artificial Sequence
  Description of Artificial Sequence: Synthetic oligonucleotide
gcauaagcgcggacuugug

SEQ ID NO: 2198937 - RNA, 19 nt, Artificial Sequence
  Description of Artificial Sequence: Synthetic oligonucleotide
cagcgacuacaacggccuc

SEQ ID NO: 2198938 - RNA, 19 nt, Artificial Sequence
  Description of Artificial Sequence: Synthetic oligonucleotide
ccggagcaacgcugaaggc

SEQ ID NO: 2198939 - RNA, 19 nt, Artificial Sequence
  Description of Artificial Sequence: Synthetic oligonucleotide
ccaccuugcccugggcagg

SEQ ID NO: 2198940 - RNA, 19 nt, Artificial Sequence
  Description of Artificial Sequence: Synthetic oligonucleotide
gggcagcggaacagcagcc

SEQ ID NO: 2198941 - RNA, 19 nt, Artificial Sequence
  Description of Artificial Sequence: Synthetic oligonucleotide
gcuguucugucggcaacca

SEQ ID NO: 2198942 - RNA, 19 nt, Artificial Sequence
  Description of Artificial Sequence: Synthetic oligonucleotide
cucgcaggauccuucucuu

SEQ ID NO: 2198943 - RNA, 19 nt, Artificial Sequence
  Description of Artificial Sequence: Synthetic oligonucleotide
guggucagucagcaucuuu

SEQ ID NO: 2198944 - RNA, 19 nt, Artificial Sequence
  Description of Artificial Sequence: Synthetic oligonucleotide
cucgagauucucgcucucu

SEQ ID NO: 2198945 - RNA, 19 nt, Artificial Sequence
  Description of Artificial Sequence: Synthetic oligonucleotide
agccgauacuccggagcaa

SEQ ID NO: 2198946 - RNA, 19 nt, Artificial Sequence
  Description of Artificial Sequence: Synthetic oligonucleotide
ccacgauaaagggcaguuc

SEQ ID NO: 2198947 - RNA, 19 nt, Artificial Sequence
  Description of Artificial Sequence: Synthetic oligonucleotide
cccgguggguacagaguug

SEQ ID NO: 2198948 - RNA, 19 nt, Artificial Sequence
  Description of Artificial Sequence: Synthetic oligonucleotide
cuccuaggcugugccccac

SEQ ID NO: 2198949 - RNA, 19 nt, Artificial Sequence
  Description of Artificial Sequence: Synthetic oligonucleotide
ggcaguucauacaccuugu

SEQ ID NO: 2198950 - RNA, 19 nt, Artificial Sequence
  Description of Artificial Sequence: Synthetic oligonucleotide
cugcuugagcaauucccuu

SEQ ID NO: 2198951 - RNA, 19 nt, Artificial Sequence
  Description of Artificial Sequence: Synthetic oligonucleotide
gcuccuaggcugugcccca

SEQ ID NO: 2198952 - RNA, 19 nt, Artificial Sequence
  Description of Artificial Sequence: Synthetic oligonucleotide
caguucagucggagaguua

SEQ ID NO: 2198953 - RNA, 19 nt, Artificial Sequence
  Description of Artificial Sequence: Synthetic oligonucleotide
caaucacucgcaggauccu

SEQ ID NO: 2198954 - RNA, 19 nt, Artificial Sequence
  Description of Artificial Sequence: Synthetic oligonucleotide
gcucgagauucucgcucuc

SEQ ID NO: 2198955 - RNA, 19 nt, Artificial Sequence
  Description of Artificial Sequence: Synthetic oligonucleotide
ggccugauucaggauguua

SEQ ID NO: 2198956 - RNA, 19 nt, Artificial Sequence
  Description of Artificial Sequence: Synthetic oligonucleotide
cggcuuguugcaguuagca

SEQ ID NO: 2198957 - RNA, 19 nt, Artificial Sequence
  Description of Artificial Sequence: Synthetic oligonucleotide
ccgugcagcaagaucuugu

SEQ ID NO: 2198958 - RNA, 19 nt, Artificial Sequence
  Description of Artificial Sequence: Synthetic oligonucleotide
gggcuguagcccggggagc

SEQ ID NO: 2198959 - RNA, 19 nt, Artificial Sequence
  Description of Artificial Sequence: Synthetic oligonucleotide
ggguacagaguuggguacu

SEQ ID NO: 2198960 - RNA, 19 nt, Artificial Sequence
  Description of Artificial Sequence: Synthetic oligonucleotide
uugggccuaucaggaucuu

SEQ ID NO: 2198961 - RNA, 19 nt, Artificial Sequence
  Description of Artificial Sequence: Synthetic oligonucleotide
gcccgguggguacagaguu

SEQ ID NO: 2198962 - RNA, 19 nt, Artificial Sequence
  Description of Artificial Sequence: Synthetic oligonucleotide
cuucggcuuguugcaguua

SEQ ID NO: 2198963 - RNA, 19 nt, Artificial Sequence
  Description of Artificial Sequence: Synthetic oligonucleotide
cgauaaagggcaguucaua

SEQ ID NO: 2198964 - RNA, 19 nt, Artificial Sequence
  Description of Artificial Sequence: Synthetic oligonucleotide
gcgcggacuuguggguagg

SEQ ID NO: 2198965 - RNA, 19 nt, Artificial Sequence
  Description of Artificial Sequence: Synthetic oligonucleotide
gccaaaccuccccgagcca

SEQ ID NO: 2198966 - RNA, 19 nt, Artificial Sequence
  Description of Artificial Sequence: Synthetic oligonucleotide
ggcaggagacacaggcugu

SEQ ID NO: 2198967 - RNA, 19 nt, Artificial Sequence
  Description of Artificial Sequence: Synthetic oligonucleotide
cuucuucuagguggaugau

SEQ ID NO: 2198968 - RNA, 19 nt, Artificial Sequence
  Description of Artificial Sequence: Synthetic oligonucleotide
ccacuuuguccagggccug

SEQ ID NO: 2198969 - RNA, 19 nt, Artificial Sequence
  Description of Artificial Sequence: Synthetic oligonucleotide
cccaccagaacaagccgau

SEQ ID NO: 2198970 - RNA, 19 nt, Artificial Sequence
  Description of Artificial Sequence: Synthetic oligonucleotide
gcaaguggucagucagcau

SEQ ID NO: 2198971 - RNA, 19 nt, Artificial Sequence
  Description of Artificial Sequence: Synthetic oligonucleotide
cggagcaacgcugaaggcu

SEQ ID NO: 2198972 - RNA, 19 nt, Artificial Sequence
  Description of Artificial Sequence: Synthetic oligonucleotide
cugcuucgugugcccaccu

SEQ ID NO: 2198973 - RNA, 19 nt, Artificial Sequence
  Description of Artificial Sequence: Synthetic oligonucleotide
gcccuguaccgggcagcgg

SEQ ID NO: 2198974 - RNA, 19 nt, Artificial Sequence
  Description of Artificial Sequence: Synthetic oligonucleotide
ccagcucgagauucucgcu

SEQ ID NO: 2198975 - RNA, 19 nt, Artificial Sequence
  Description of Artificial Sequence: Synthetic oligonucleotide
gcgacuacaacggccucuu

SEQ ID NO: 2198976 - RNA, 19 nt, Artificial Sequence
  Description of Artificial Sequence: Synthetic oligonucleotide
cgcggacuuguggguaggg

SEQ ID NO: 2198977 - RNA, 19 nt, Artificial Sequence
  Description of Artificial Sequence: Synthetic oligonucleotide
guccccucucacagcgacu

SEQ ID NO: 2198978 - RNA, 19 nt, Artificial Sequence
  Description of Artificial Sequence: Synthetic oligonucleotide
cggcaaccacuuuguccag

SEQ ID NO: 2198979 - RNA, 19 nt, Artificial Sequence
  Description of Artificial Sequence: Synthetic oligonucleotide
cggggagcaucgucugcuc

SEQ ID NO: 2198980 - RNA, 19 nt, Artificial Sequence
  Description of Artificial Sequence: Synthetic oligonucleotide
cuccccgagccacucucuu

SEQ ID NO: 2198981 - RNA, 19 nt, Artificial Sequence
  Description of Artificial Sequence: Synthetic oligonucleotide
gggucagggcucucugguu

SEQ ID NO: 2198982 - RNA, 19 nt, Artificial Sequence
  Description of Artificial Sequence: Synthetic oligonucleotide
gggcggggagaaggcauaa

SEQ ID NO: 2198983 - RNA, 19 nt, Artificial Sequence
  Description of Artificial Sequence: Synthetic oligonucleotide
guagcccggggagcaucgu

SEQ ID NO: 2198984 - RNA, 19 nt, Artificial Sequence
  Description of Artificial Sequence: Synthetic oligonucleotide
cggccucuuuccugugauc

SEQ ID NO: 2198985 - RNA, 19 nt, Artificial Sequence
  Description of Artificial Sequence: Synthetic oligonucleotide
ccggggagcaucgucugcu

SEQ ID NO: 2198986 - RNA, 19 nt, Artificial Sequence
  Description of Artificial Sequence: Synthetic oligonucleotide
ccaccagaacaagccgaua

SEQ ID NO: 2198987 - RNA, 19 nt, Artificial Sequence
  Description of Artificial Sequence: Synthetic oligonucleotide
ccuccccgagccacucucu

SEQ ID NO: 2198988 - RNA, 19 nt, Artificial Sequence
  Description of Artificial Sequence: Synthetic oligonucleotide
gcuguagcccggggagcau

SEQ ID NO: 2198989 - RNA, 19 nt, Artificial Sequence
  Description of Artificial Sequence: Synthetic oligonucleotide
ccugcccgguggguacaga

SEQ ID NO: 2198990 - RNA, 19 nt, Artificial Sequence
  Description of Artificial Sequence: Synthetic oligonucleotide
gcuccccaacgaagagggu

SEQ ID NO: 2198991 - RNA, 19 nt, Artificial Sequence
  Description of Artificial Sequence: Synthetic oligonucleotide
gggccugauucaggauguu

SEQ ID NO: 2198992 - RNA, 19 nt, Artificial Sequence
  Description of Artificial Sequence: Synthetic oligonucleotide
cgacuacaacggccucuuu

SEQ ID NO: 2198993 - RNA, 19 nt, Artificial Sequence
  Description of Artificial Sequence: Synthetic oligonucleotide
aaauccuucucuuaacucc

SEQ ID NO: 2198994 - RNA, 19 nt, Artificial Sequence
  Description of Artificial Sequence: Synthetic oligonucleotide
ucugcaauuauacugauga

SEQ ID NO: 2198995 - RNA, 19 nt, Artificial Sequence
  Description of Artificial Sequence: Synthetic oligonucleotide
aacauaaagaacgauaauc

SEQ ID NO: 2198996 - RNA, 19 nt, Artificial Sequence
  Description of Artificial Sequence: Synthetic oligonucleotide
aagauuuacaaauugccag

SEQ ID NO: 2198997 - RNA, 19 nt, Artificial Sequence
  Description of Artificial Sequence: Synthetic oligonucleotide
cuucugaacauaaagaacg

SEQ ID NO: 2198998 - RNA, 19 nt, Artificial Sequence
  Description of Artificial Sequence: Synthetic oligonucleotide
uaagggaucacauauauac

SEQ ID NO: 2198999 - RNA, 19 nt, Artificial Sequence
  Description of Artificial Sequence: Synthetic oligonucleotide
uuucaauuaggucacagag

SEQ ID NO: 2199000 - RNA, 19 nt, Artificial Sequence
  Description of Artificial Sequence: Synthetic oligonucleotide
ucuugugugucuaagagag

SEQ ID NO: 2199001 - RNA, 19 nt, Artificial Sequence
  Description of Artificial Sequence: Synthetic oligonucleotide
aaauucaaagucugaauag

SEQ ID NO: 2199002 - RNA, 19 nt, Artificial Sequence
  Description of Artificial Sequence: Synthetic oligonucleotide
aauucaaagucugaauagc

SEQ ID NO: 2199003 - RNA, 19 nt, Artificial Sequence
  Description of Artificial Sequence: Synthetic oligonucleotide
aauuuauugggaccgauca

SEQ ID NO: 2199004 - RNA, 19 nt, Artificial Sequence
  Description of Artificial Sequence: Synthetic oligonucleotide
acaucugacaagcaguugc

SEQ ID NO: 2199005 - RNA, 19 nt, Artificial Sequence
  Description of Artificial Sequence: Synthetic oligonucleotide
uaaagaacgauaaucgucu

SEQ ID NO: 2199006 - RNA, 19 nt, Artificial Sequence
  Description of Artificial Sequence: Synthetic oligonucleotide
agauuuacaaauugccagc

SEQ ID NO: 2199007 - RNA, 19 nt, Artificial Sequence
  Description of Artificial Sequence: Synthetic oligonucleotide
acacuuaauaaccuuuacc

SEQ ID NO: 2199008 - RNA, 19 nt, Artificial Sequence
  Description of Artificial Sequence: Synthetic oligonucleotide
aauugaguaauucuuguaa

SEQ ID NO: 2199009 - RNA, 19 nt, Artificial Sequence
  Description of Artificial Sequence: Synthetic oligonucleotide
aacaacguuagcuaggcgu

SEQ ID NO: 2199010 - RNA, 19 nt, Artificial Sequence
  Description of Artificial Sequence: Synthetic oligonucleotide
ugaacauaaagaacgauaa

SEQ ID NO: 2199011 - RNA, 19 nt, Artificial Sequence
  Description of Artificial Sequence: Synthetic oligonucleotide
uacauugcaaccauaauuc

SEQ ID NO: 2199012 - RNA, 19 nt, Artificial Sequence
  Description of Artificial Sequence: Synthetic oligonucleotide
agauuugggaauuuauugg

SEQ ID NO: 2199013 - RNA, 19 nt, Artificial Sequence
  Description of Artificial Sequence: Synthetic oligonucleotide
uuaauaaccuuuaccaaca

SEQ ID NO: 2199014 - RNA, 19 nt, Artificial Sequence
  Description of Artificial Sequence: Synthetic oligonucleotide
uuuccuauugcugagauac

SEQ ID NO: 2199015 - RNA, 19 nt, Artificial Sequence
  Description of Artificial Sequence: Synthetic oligonucleotide
ucacagagaaaauucaaag

SEQ ID NO: 2199016 - RNA, 19 nt, Artificial Sequence
  Description of Artificial Sequence: Synthetic oligonucleotide
acauaaagaacgauaaucg

SEQ ID NO: 2199017 - RNA, 19 nt, Artificial Sequence
  Description of Artificial Sequence: Synthetic oligonucleotide
aagaacgauaaucgucucc

SEQ ID NO: 2199018 - RNA, 19 nt, Artificial Sequence
  Description of Artificial Sequence: Synthetic oligonucleotide
ugaaaguucuuuuaccaag

SEQ ID NO: 2199019 - RNA, 19 nt, Artificial Sequence
  Description of Artificial Sequence: Synthetic oligonucleotide
aauaaagugcuucaagcaa

SEQ ID NO: 2199020 - RNA, 19 nt, Artificial Sequence
  Description of Artificial Sequence: Synthetic oligonucleotide
auuugcacacuuaauaacc

SEQ ID NO: 2199021 - RNA, 19 nt, Artificial Sequence
  Description of Artificial Sequence: Synthetic oligonucleotide
auaaucgucuccuaucagg

SEQ ID NO: 2199022 - RNA, 19 nt, Artificial Sequence
  Description of Artificial Sequence: Synthetic oligonucleotide
auugcugagauacaguucu

SEQ ID NO: 2199023 - RNA, 19 nt, Artificial Sequence
  Description of Artificial Sequence: Synthetic oligonucleotide
uuaccaaguaauuuuacac

SEQ ID NO: 2199024 - RNA, 19 nt, Artificial Sequence
  Description of Artificial Sequence: Synthetic oligonucleotide
ugauuaagggaucacauau

SEQ ID NO: 2199025 - RNA, 19 nt, Artificial Sequence
  Description of Artificial Sequence: Synthetic oligonucleotide
aguccugagguuuuaauuc

SEQ ID NO: 2199026 - RNA, 19 nt, Artificial Sequence
  Description of Artificial Sequence: Synthetic oligonucleotide
gagguuuuaauuccaaagc

SEQ ID NO: 2199027 - RNA, 19 nt, Artificial Sequence
  Description of Artificial Sequence: Synthetic oligonucleotide
uucuguauaguccacaaau

SEQ ID NO: 2199028 - RNA, 19 nt, Artificial Sequence
  Description of Artificial Sequence: Synthetic oligonucleotide
accauaauucuucagaagu

SEQ ID NO: 2199029 - RNA, 19 nt, Artificial Sequence
  Description of Artificial Sequence: Synthetic oligonucleotide
auaaccuuuaccaacagug

SEQ ID NO: 2199030 - RNA, 19 nt, Artificial Sequence
  Description of Artificial Sequence: Synthetic oligonucleotide
uccaagauuuacaaauugc

SEQ ID NO: 2199031 - RNA, 19 nt, Artificial Sequence
  Description of Artificial Sequence: Synthetic oligonucleotide
aaauuucaacaaaggaacc

SEQ ID NO: 2199032 - RNA, 19 nt, Artificial Sequence
  Description of Artificial Sequence: Synthetic oligonucleotide
cacuuaauaaccuuuacca

SEQ ID NO: 2199033 - RNA, 19 nt, Artificial Sequence
  Description of Artificial Sequence: Synthetic oligonucleotide
auaaagaacgauaaucguc

SEQ ID NO: 2199034 - RNA, 19 nt, Artificial Sequence
  Description of Artificial Sequence: Synthetic oligonucleotide
ugucgugaaaauaaaauuu

SEQ ID NO: 2199035 - RNA, 19 nt, Artificial Sequence
  Description of Artificial Sequence: Synthetic oligonucleotide
acacaauugggcuugaacu

SEQ ID NO: 2199036 - RNA, 19 nt, Artificial Sequence
  Description of Artificial Sequence: Synthetic oligonucleotide
uaguaaaccaacaucugac

SEQ ID NO: 2199037 - RNA, 19 nt, Artificial Sequence
  Description of Artificial Sequence: Synthetic oligonucleotide
aacaaaggaaccaucagcu

SEQ ID NO: 2199038 - RNA, 19 nt, Artificial Sequence
  Description of Artificial Sequence: Synthetic oligonucleotide
ucagguuuagcugaggcag

SEQ ID NO: 2199039 - RNA, 19 nt, Artificial Sequence
  Description of Artificial Sequence: Synthetic oligonucleotide
uuuaccaacaguggaacag

SEQ ID NO: 2199040 - RNA, 19 nt, Artificial Sequence
  Description of Artificial Sequence: Synthetic oligonucleotide
uuuaccaaguaauuuuaca

SEQ ID NO: 2199041 - RNA, 19 nt, Artificial Sequence
  Description of Artificial Sequence: Synthetic oligonucleotide
gagaaccucaucuacauuc

SEQ ID NO: 2199042 - RNA, 19 nt, Artificial Sequence
  Description of Artificial Sequence: Synthetic oligonucleotide
aguggaacagcuucugaac

SEQ ID NO: 2199043 - RNA, 19 nt, Artificial Sequence
  Description of Artificial Sequence: Synthetic oligonucleotide
aacuccuuagcauaguaaa

SEQ ID NO: 2199044 - RNA, 19 nt, Artificial Sequence
  Description of Artificial Sequence: Synthetic oligonucleotide
uugaguaauucuuguaaag

SEQ ID NO: 2199045 - RNA, 19 nt, Artificial Sequence
  Description of Artificial Sequence: Synthetic oligonucleotide
uuugguaagauuugggaau

SEQ ID NO: 2199046 - RNA, 19 nt, Artificial Sequence
  Description of Artificial Sequence: Synthetic oligonucleotide
agcaaaauugaguaauucu

SEQ ID NO: 2199047 - RNA, 19 nt, Artificial Sequence
  Description of Artificial Sequence: Synthetic oligonucleotide
ugggaauuuauugggaccg

SEQ ID NO: 2199048 - RNA, 19 nt, Artificial Sequence
  Description of Artificial Sequence: Synthetic oligonucleotide
caaaauugaguaauucuug

SEQ ID NO: 2199049 - RNA, 19 nt, Artificial Sequence
  Description of Artificial Sequence: Synthetic oligonucleotide
uugcuuuugcuucaagucc

SEQ ID NO: 2199050 - RNA, 19 nt, Artificial Sequence
  Description of Artificial Sequence: Synthetic oligonucleotide
ucaacaaaggaaccaucag

SEQ ID NO: 2199051 - RNA, 19 nt, Artificial Sequence
  Description of Artificial Sequence: Synthetic oligonucleotide
uuuugguaagauuugggaa

SEQ ID NO: 2199052 - RNA, 19 nt, Artificial Sequence
  Description of Artificial Sequence: Synthetic oligonucleotide
ucguuuuggaauuugcaca

SEQ ID NO: 2199053 - RNA, 19 nt, Artificial Sequence
  Description of Artificial Sequence: Synthetic oligonucleotide
uuuauugggaccgaucaca

SEQ ID NO: 2199054 - RNA, 19 nt, Artificial Sequence
  Description of Artificial Sequence: Synthetic oligonucleotide
cuacauucacacaauuggg

SEQ ID NO: 2199055 - RNA, 19 nt, Artificial Sequence
  Description of Artificial Sequence: Synthetic oligonucleotide
agggaucacauauauacug

SEQ ID NO: 2199056 - RNA, 19 nt, Artificial Sequence
  Description of Artificial Sequence: Synthetic oligonucleotide
auacauugcaaccauaauu

SEQ ID NO: 2199057 - RNA, 19 nt, Artificial Sequence
  Description of Artificial Sequence: Synthetic oligonucleotide
ucuaagagagcaacaucag

SEQ ID NO: 2199058 - RNA, 19 nt, Artificial Sequence
  Description of Artificial Sequence: Synthetic oligonucleotide
uucguuuuggaauuugcac

SEQ ID NO: 2199059 - RNA, 19 nt, Artificial Sequence
  Description of Artificial Sequence: Synthetic oligonucleotide
auaguaaaccaacaucuga

SEQ ID NO: 2199060 - RNA, 19 nt, Artificial Sequence
  Description of Artificial Sequence: Synthetic oligonucleotide
ucauaaucuuuccuauugc

SEQ ID NO: 2199061 - RNA, 19 nt, Artificial Sequence
  Description of Artificial Sequence: Synthetic oligonucleotide
aagucuguaucugucgaac

SEQ ID NO: 2199062 - RNA, 19 nt, Artificial Sequence
  Description of Artificial Sequence: Synthetic oligonucleotide
uuuucguuuuggaauuugc

SEQ ID NO: 2199063 - RNA, 19 nt, Artificial Sequence
  Description of Artificial Sequence: Synthetic oligonucleotide
uuagcuaggcguuuggcac

SEQ ID NO: 2199064 - RNA, 19 nt, Artificial Sequence
  Description of Artificial Sequence: Synthetic oligonucleotide
aagugcuucaagcaaaauu

SEQ ID NO: 2199065 - RNA, 19 nt, Artificial Sequence
  Description of Artificial Sequence: Synthetic oligonucleotide
aucgucuccuaucagguuc

SEQ ID NO: 2199066 - RNA, 19 nt, Artificial Sequence
  Description of Artificial Sequence: Synthetic oligonucleotide
aagcaaaauugaguaauuc

SEQ ID NO: 2199067 - RNA, 19 nt, Artificial Sequence
  Description of Artificial Sequence: Synthetic oligonucleotide
ucuuaacuccuuagcauag

SEQ ID NO: 2199068 - RNA, 19 nt, Artificial Sequence
  Description of Artificial Sequence: Synthetic oligonucleotide
caacaaaggaaccaucagc

SEQ ID NO: 2199069 - RNA, 19 nt, Artificial Sequence
  Description of Artificial Sequence: Synthetic oligonucleotide
cauuccaagagaaagggca

SEQ ID NO: 2199070 - RNA, 19 nt, Artificial Sequence
  Description of Artificial Sequence: Synthetic oligonucleotide
uaaagcuuccugcuggucu

SEQ ID NO: 2199071 - RNA, 19 nt, Artificial Sequence
  Description of Artificial Sequence: Synthetic oligonucleotide
uucaauuaggucacagaga

SEQ ID NO: 2199072 - RNA, 19 nt, Artificial Sequence
  Description of Artificial Sequence: Synthetic oligonucleotide
uuugggaauuuauugggac

SEQ ID NO: 2199073 - RNA, 19 nt, Artificial Sequence
  Description of Artificial Sequence: Synthetic oligonucleotide
uaggucacagagaaaauuc

SEQ ID NO: 2199074 - RNA, 19 nt, Artificial Sequence
  Description of Artificial Sequence: Synthetic oligonucleotide
uuucguuuuggaauuugca

SEQ ID NO: 2199075 - RNA, 19 nt, Artificial Sequence
  Description of Artificial Sequence: Synthetic oligonucleotide
ugaggcagucuuaauaaga

SEQ ID NO: 2199076 - RNA, 19 nt, Artificial Sequence
  Description of Artificial Sequence: Synthetic oligonucleotide
ugugaaagauacuccgugc

SEQ ID NO: 2199077 - RNA, 19 nt, Artificial Sequence
  Description of Artificial Sequence: Synthetic oligonucleotide
acgauaaucgucuccuauc

SEQ ID NO: 2199078 - RNA, 19 nt, Artificial Sequence
  Description of Artificial Sequence: Synthetic oligonucleotide
ucgaacaacguuagcuagg

SEQ ID NO: 2199079 - RNA, 19 nt, Artificial Sequence
  Description of Artificial Sequence: Synthetic oligonucleotide
aaccuuuaccaacagugga

SEQ ID NO: 2199080 - RNA, 19 nt, Artificial Sequence
  Description of Artificial Sequence: Synthetic oligonucleotide
auuuauugggaccgaucac

SEQ ID NO: 2199081 - RNA, 19 nt, Artificial Sequence
  Description of Artificial Sequence: Synthetic oligonucleotide
aagggcauggcuuccgcag

SEQ ID NO: 2199082 - RNA, 19 nt, Artificial Sequence
  Description of Artificial Sequence: Synthetic oligonucleotide
uaagauuugggaauuuauu

SEQ ID NO: 2199083 - RNA, 19 nt, Artificial Sequence
  Description of Artificial Sequence: Synthetic oligonucleotide
uaucugucgaacaacguua

SEQ ID NO: 2199084 - RNA, 19 nt, Artificial Sequence
  Description of Artificial Sequence: Synthetic oligonucleotide
cuguaucugucgaacaacg

SEQ ID NO: 2199085 - RNA, 19 nt, Artificial Sequence
  Description of Artificial Sequence: Synthetic oligonucleotide
uaaucgucuccuaucaggu

SEQ ID NO: 2199086 - RNA, 19 nt, Artificial Sequence
  Description of Artificial Sequence: Synthetic oligonucleotide
aaagaacgauaaucgucuc

SEQ ID NO: 2199087 - RNA, 19 nt, Artificial Sequence
  Description of Artificial Sequence: Synthetic oligonucleotide
caucuugugugucuaagag

SEQ ID NO: 2199088 - RNA, 19 nt, Artificial Sequence
  Description of Artificial Sequence: Synthetic oligonucleotide
uaaccaguggaagauacug

SEQ ID NO: 2199089 - RNA, 19 nt, Artificial Sequence
  Description of Artificial Sequence: Synthetic oligonucleotide
caaauugccagccaucauc

SEQ ID NO: 2199090 - RNA, 19 nt, Artificial Sequence
  Description of Artificial Sequence: Synthetic oligonucleotide
aaauugaguaauucuugua

SEQ ID NO: 2199091 - RNA, 19 nt, Artificial Sequence
  Description of Artificial Sequence: Synthetic oligonucleotide
uugucgugaaaauaaaauu

SEQ ID NO: 2199092 - RNA, 19 nt, Artificial Sequence
  Description of Artificial Sequence: Synthetic oligonucleotide
uuuuaccaaguaauuuuac

SEQ ID NO: 2199093 - RNA, 19 nt, Artificial Sequence
  Description of Artificial Sequence: Synthetic oligonucleotide
gaugauuuugguaagauuu

SEQ ID NO: 2199094 - RNA, 19 nt, Artificial Sequence
  Description of Artificial Sequence: Synthetic oligonucleotide
aaccaguggaagauacugc

SEQ ID NO: 2199095 - RNA, 19 nt, Artificial Sequence
  Description of Artificial Sequence: Synthetic oligonucleotide
ucuguauaguccacaaauc

SEQ ID NO: 2199096 - RNA, 19 nt, Artificial Sequence
  Description of Artificial Sequence: Synthetic oligonucleotide
aacgauaaucgucuccuau

SEQ ID NO: 2199097 - RNA, 19 nt, Artificial Sequence
  Description of Artificial Sequence: Synthetic oligonucleotide
ucgaacauugucgugaaaa

SEQ ID NO: 2199098 - RNA, 19 nt, Artificial Sequence
  Description of Artificial Sequence: Synthetic oligonucleotide
ugcugaaaguucuuuuacc

SEQ ID NO: 2199099 - RNA, 19 nt, Artificial Sequence
  Description of Artificial Sequence: Synthetic oligonucleotide
uucguggcuaauagucucg

SEQ ID NO: 2199100 - RNA, 19 nt, Artificial Sequence
  Description of Artificial Sequence: Synthetic oligonucleotide
acauauauacugccacauc

SEQ ID NO: 2199101 - RNA, 19 nt, Artificial Sequence
  Description of Artificial Sequence: Synthetic oligonucleotide
accgaucacaacugggugg

SEQ ID NO: 2199102 - RNA, 19 nt, Artificial Sequence
  Description of Artificial Sequence: Synthetic oligonucleotide
gaggcagucuuaauaagag

SEQ ID NO: 2199103 - RNA, 19 nt, Artificial Sequence
  Description of Artificial Sequence: Synthetic oligonucleotide
agagaaaauucaaagucug

SEQ ID NO: 2199104 - RNA, 19 nt, Artificial Sequence
  Description of Artificial Sequence: Synthetic oligonucleotide
agaacgauaaucgucuccu

SEQ ID NO: 2199105 - RNA, 19 nt, Artificial Sequence
  Description of Artificial Sequence: Synthetic oligonucleotide
uucugaacauaaagaacga

SEQ ID NO: 2199106 - RNA, 19 nt, Artificial Sequence
  Description of Artificial Sequence: Synthetic oligonucleotide
ucucuuaacuccuuagcau

SEQ ID NO: 2199107 - RNA, 19 nt, Artificial Sequence
  Description of Artificial Sequence: Synthetic oligonucleotide
gauaaccaguggaagauac

SEQ ID NO: 2199108 - RNA, 19 nt, Artificial Sequence
  Description of Artificial Sequence: Synthetic oligonucleotide
ucuucaucaaguugggaua

SEQ ID NO: 2199109 - RNA, 19 nt, Artificial Sequence
  Description of Artificial Sequence: Synthetic oligonucleotide
aaauugccagccaucauca

SEQ ID NO: 2199110 - RNA, 19 nt, Artificial Sequence
  Description of Artificial Sequence: Synthetic oligonucleotide
aaguccugagguuuuaauu

SEQ ID NO: 2199111 - RNA, 19 nt, Artificial Sequence
  Description of Artificial Sequence: Synthetic oligonucleotide
cuucucuuaacuccuuagc

SEQ ID NO: 2199112 - RNA, 19 nt, Artificial Sequence
  Description of Artificial Sequence: Synthetic oligonucleotide
auugucgugaaaauaaaau

SEQ ID NO: 2199113 - RNA, 19 nt, Artificial Sequence
  Description of Artificial Sequence: Synthetic oligonucleotide
uccuauugcugagauacag

SEQ ID NO: 2199114 - RNA, 19 nt, Artificial Sequence
  Description of Artificial Sequence: Synthetic oligonucleotide
aagauacugcugaaaguuc

SEQ ID NO: 2199115 - RNA, 19 nt, Artificial Sequence
  Description of Artificial Sequence: Synthetic oligonucleotide
ugugucuaagagagcaaca

SEQ ID NO: 2199116 - RNA, 19 nt, Artificial Sequence
  Description of Artificial Sequence: Synthetic oligonucleotide
augacagccagugugggag

SEQ ID NO: 2199117 - RNA, 19 nt, Artificial Sequence
  Description of Artificial Sequence: Synthetic oligonucleotide
agucuuaauaagaggcucg

SEQ ID NO: 2199118 - RNA, 19 nt, Artificial Sequence
  Description of Artificial Sequence: Synthetic oligonucleotide
ucacauauauacugccaca

SEQ ID NO: 2199119 - RNA, 19 nt, Artificial Sequence
  Description of Artificial Sequence: Synthetic oligonucleotide
uugcuucaaguccugaggu

SEQ ID NO: 2199120 - RNA, 19 nt, Artificial Sequence
  Description of Artificial Sequence: Synthetic oligonucleotide
ucugugaaagauacuccgu

SEQ ID NO: 2199121 - RNA, 19 nt, Artificial Sequence
  Description of Artificial Sequence: Synthetic oligonucleotide
uacuccgugccacggaucc

SEQ ID NO: 2199122 - RNA, 19 nt, Artificial Sequence
  Description of Artificial Sequence: Synthetic oligonucleotide
aguugggauauacauugca

SEQ ID NO: 2199123 - RNA, 19 nt, Artificial Sequence
  Description of Artificial Sequence: Synthetic oligonucleotide
uuauacugaugauuuuggu

SEQ ID NO: 2199124 - RNA, 19 nt, Artificial Sequence
  Description of Artificial Sequence: Synthetic oligonucleotide
aagagagcaacaucagguu

SEQ ID NO: 2199125 - RNA, 19 nt, Artificial Sequence
  Description of Artificial Sequence: Synthetic oligonucleotide
uaagaggcucgauaaccag

SEQ ID NO: 2199126 - RNA, 19 nt, Artificial Sequence
  Description of Artificial Sequence: Synthetic oligonucleotide
uauacauugcaaccauaau

SEQ ID NO: 2199127 - RNA, 19 nt, Artificial Sequence
  Description of Artificial Sequence: Synthetic oligonucleotide
ucaaguugggauauacauu

SEQ ID NO: 2199128 - RNA, 19 nt, Artificial Sequence
  Description of Artificial Sequence: Synthetic oligonucleotide
ggugguuacuuucaauuag

SEQ ID NO: 2199129 - RNA, 19 nt, Artificial Sequence
  Description of Artificial Sequence: Synthetic oligonucleotide
gauaaucgucuccuaucag

SEQ ID NO: 2199130 - RNA, 19 nt, Artificial Sequence
  Description of Artificial Sequence: Synthetic oligonucleotide
uuaucuucaugcagcggga

SEQ ID NO: 2199131 - RNA, 19 nt, Artificial Sequence
  Description of Artificial Sequence: Synthetic oligonucleotide
ugggugguuacuuucaauu

SEQ ID NO: 2199132 - RNA, 19 nt, Artificial Sequence
  Description of Artificial Sequence: Synthetic oligonucleotide
cuuaauaagaggcucgaua

SEQ ID NO: 2199133 - RNA, 19 nt, Artificial Sequence
  Description of Artificial Sequence: Synthetic oligonucleotide
cugugaaagauacuccgug

SEQ ID NO: 2199134 - RNA, 19 nt, Artificial Sequence
  Description of Artificial Sequence: Synthetic oligonucleotide
aauucuuguaaagcuuccu

SEQ ID NO: 2199135 - RNA, 19 nt, Artificial Sequence
  Description of Artificial Sequence: Synthetic oligonucleotide
caucagguuuagcugaggc

SEQ ID NO: 2199136 - RNA, 19 nt, Artificial Sequence
  Description of Artificial Sequence: Synthetic oligonucleotide
gugguuacuuucaauuagg

SEQ ID NO: 2199137 - RNA, 19 nt, Artificial Sequence
  Description of Artificial Sequence: Synthetic oligonucleotide
ugcacacuuaauaaccuuu

SEQ ID NO: 2199138 - RNA, 19 nt, Artificial Sequence
  Description of Artificial Sequence: Synthetic oligonucleotide
ugucgaacaacguuagcua

SEQ ID NO: 2199139 - RNA, 19 nt, Artificial Sequence
  Description of Artificial Sequence: Synthetic oligonucleotide
uccaaagcuuugcuggucu

SEQ ID NO: 2199140 - RNA, 19 nt, Artificial Sequence
  Description of Artificial Sequence: Synthetic oligonucleotide
uuaacuccuuagcauagua

SEQ ID NO: 2199141 - RNA, 19 nt, Artificial Sequence
  Description of Artificial Sequence: Synthetic oligonucleotide
ucuucguggcuaauagucu

SEQ ID NO: 2199142 - RNA, 19 nt, Artificial Sequence
  Description of Artificial Sequence: Synthetic oligonucleotide
acaauugggcuugaacuuc

SEQ ID NO: 2199143 - RNA, 19 nt, Artificial Sequence
  Description of Artificial Sequence: Synthetic oligonucleotide
uggucuucaucaaguuggg

SEQ ID NO: 2199144 - RNA, 19 nt, Artificial Sequence
  Description of Artificial Sequence: Synthetic oligonucleotide
agcgggagccaugacagcc

SEQ ID NO: 2199145 - RNA, 19 nt, Artificial Sequence
  Description of Artificial Sequence: Synthetic oligonucleotide
ugucuaagagagcaacauc

SEQ ID NO: 2199146 - RNA, 19 nt, Artificial Sequence
  Description of Artificial Sequence: Synthetic oligonucleotide
uuucaacaaaggaaccauc

SEQ ID NO: 2199147 - RNA, 19 nt, Artificial Sequence
  Description of Artificial Sequence: Synthetic oligonucleotide
gucgaacaacguuagcuag

SEQ ID NO: 2199148 - RNA, 19 nt, Artificial Sequence
  Description of Artificial Sequence: Synthetic oligonucleotide
ugcagcgggagccaugaca

SEQ ID NO: 2199149 - RNA, 19 nt, Artificial Sequence
  Description of Artificial Sequence: Synthetic oligonucleotide
ucaucaaguugggauauac

SEQ ID NO: 2199150 - RNA, 19 nt, Artificial Sequence
  Description of Artificial Sequence: Synthetic oligonucleotide
uggcuaauagucucguuaa

SEQ ID NO: 2199151 - RNA, 19 nt, Artificial Sequence
  Description of Artificial Sequence: Synthetic oligonucleotide
uuaccaacaguggaacagc

SEQ ID NO: 2199152 - RNA, 19 nt, Artificial Sequence
  Description of Artificial Sequence: Synthetic oligonucleotide
ucuuuccuauugcugagau

SEQ ID NO: 2199153 - RNA, 19 nt, Artificial Sequence
  Description of Artificial Sequence: Synthetic oligonucleotide
auuucaacaaaggaaccau

SEQ ID NO: 2199154 - RNA, 19 nt, Artificial Sequence
  Description of Artificial Sequence: Synthetic oligonucleotide
uuuggaauuugcacacuua

SEQ ID NO: 2199155 - RNA, 19 nt, Artificial Sequence
  Description of Artificial Sequence: Synthetic oligonucleotide
uaacuccuuagcauaguaa

SEQ ID NO: 2199156 - RNA, 19 nt, Artificial Sequence
  Description of Artificial Sequence: Synthetic oligonucleotide
uacugaugauuuugguaag

SEQ ID NO: 2199157 - RNA, 19 nt, Artificial Sequence
  Description of Artificial Sequence: Synthetic oligonucleotide
uuauugggaccgaucacaa

SEQ ID NO: 2199158 - RNA, 19 nt, Artificial Sequence
  Description of Artificial Sequence: Synthetic oligonucleotide
uguaucugucgaacaacgu

SEQ ID NO: 2199159 - RNA, 19 nt, Artificial Sequence
  Description of Artificial Sequence: Synthetic oligonucleotide
auguucuccacaucuugug

SEQ ID NO: 2199160 - RNA, 19 nt, Artificial Sequence
  Description of Artificial Sequence: Synthetic oligonucleotide
cacacaauugggcuugaac

SEQ ID NO: 2199161 - RNA, 19 nt, Artificial Sequence
  Description of Artificial Sequence: Synthetic oligonucleotide
cuuguaaagcuuccugcug

SEQ ID NO: 2199162 - RNA, 19 nt, Artificial Sequence
  Description of Artificial Sequence: Synthetic oligonucleotide
ucugacaagcaguugcuuu

SEQ ID NO: 2199163 - RNA, 19 nt, Artificial Sequence
  Description of Artificial Sequence: Synthetic oligonucleotide
uugggaccgaucacaacug

SEQ ID NO: 2199164 - RNA, 19 nt, Artificial Sequence
  Description of Artificial Sequence: Synthetic oligonucleotide
aucagguuuagcugaggca

SEQ ID NO: 2199165 - RNA, 19 nt, Artificial Sequence
  Description of Artificial Sequence: Synthetic oligonucleotide
guuagcuaggcguuuggca

SEQ ID NO: 2199166 - RNA, 19 nt, Artificial Sequence
  Description of Artificial Sequence: Synthetic oligonucleotide
ucuguaucugucgaacaac

SEQ ID NO: 2199167 - RNA, 19 nt, Artificial Sequence
  Description of Artificial Sequence: Synthetic oligonucleotide
uuaggucacagagaaaauu

SEQ ID NO: 2199168 - RNA, 19 nt, Artificial Sequence
  Description of Artificial Sequence: Synthetic oligonucleotide
auauauacugccacaucug

SEQ ID NO: 2199169 - RNA, 19 nt, Artificial Sequence
  Description of Artificial Sequence: Synthetic oligonucleotide
uaguccacaaauccuucuc

SEQ ID NO: 2199170 - RNA, 19 nt, Artificial Sequence
  Description of Artificial Sequence: Synthetic oligonucleotide
aguccacaaauccuucucu

SEQ ID NO: 2199171 - RNA, 19 nt, Artificial Sequence
  Description of Artificial Sequence: Synthetic oligonucleotide
acugcugaaaguucuuuua

SEQ ID NO: 2199172 - RNA, 19 nt, Artificial Sequence
  Description of Artificial Sequence: Synthetic oligonucleotide
caauggccuugauuaaggg

SEQ ID NO: 2199173 - RNA, 19 nt, Artificial Sequence
  Description of Artificial Sequence: Synthetic oligonucleotide
ggaucacauauauacugcc

SEQ ID NO: 2199174 - RNA, 19 nt, Artificial Sequence
  Description of Artificial Sequence: Synthetic oligonucleotide
ugaauagcuucuucuuuau

SEQ ID NO: 2199175 - RNA, 19 nt, Artificial Sequence
  Description of Artificial Sequence: Synthetic oligonucleotide
gaagauacugcugaaaguu

SEQ ID NO: 2199176 - RNA, 19 nt, Artificial Sequence
  Description of Artificial Sequence: Synthetic oligonucleotide
auaguccacaaauccuucu

SEQ ID NO: 2199177 - RNA, 19 nt, Artificial Sequence
  Description of Artificial Sequence: Synthetic oligonucleotide
cuucguggcuaauagucuc

SEQ ID NO: 2199178 - RNA, 19 nt, Artificial Sequence
  Description of Artificial Sequence: Synthetic oligonucleotide
gaccgaucacaacugggug

SEQ ID NO: 2199179 - RNA, 19 nt, Artificial Sequence
  Description of Artificial Sequence: Synthetic oligonucleotide
cuugcacauuccaagagaa

SEQ ID NO: 2199180 - RNA, 19 nt, Artificial Sequence
  Description of Artificial Sequence: Synthetic oligonucleotide
agggcauggcuuccgcagc

SEQ ID NO: 2199181 - RNA, 19 nt, Artificial Sequence
  Description of Artificial Sequence: Synthetic oligonucleotide
acauugcaaccauaauucu

SEQ ID NO: 2199182 - RNA, 19 nt, Artificial Sequence
  Description of Artificial Sequence: Synthetic oligonucleotide
uuaagggaucacauauaua

SEQ ID NO: 2199183 - RNA, 19 nt, Artificial Sequence
  Description of Artificial Sequence: Synthetic oligonucleotide
ugggaccgaucacaacugg

SEQ ID NO: 2199184 - RNA, 19 nt, Artificial Sequence
  Description of Artificial Sequence: Synthetic oligonucleotide
gaauuuauugggaccgauc

SEQ ID NO: 2199185 - RNA, 19 nt, Artificial Sequence
  Description of Artificial Sequence: Synthetic oligonucleotide
cuuuuaccaaguaauuuua

SEQ ID NO: 2199186 - RNA, 19 nt, Artificial Sequence
  Description of Artificial Sequence: Synthetic oligonucleotide
aacaucagguuuagcugag

SEQ ID NO: 2199187 - RNA, 19 nt, Artificial Sequence
  Description of Artificial Sequence: Synthetic oligonucleotide
aacguuagcuaggcguuug

SEQ ID NO: 2199188 - RNA, 19 nt, Artificial Sequence
  Description of Artificial Sequence: Synthetic oligonucleotide
aagggaucacauauauacu

SEQ ID NO: 2199189 - RNA, 19 nt, Artificial Sequence
  Description of Artificial Sequence: Synthetic oligonucleotide
cucgauaaccaguggaaga

SEQ ID NO: 2199190 - RNA, 19 nt, Artificial Sequence
  Description of Artificial Sequence: Synthetic oligonucleotide
agcugaggcagucuuaaua

SEQ ID NO: 2199191 - RNA, 19 nt, Artificial Sequence
  Description of Artificial Sequence: Synthetic oligonucleotide
auaagaggcucgauaacca

SEQ ID NO: 2199192 - RNA, 19 nt, Artificial Sequence
  Description of Artificial Sequence: Synthetic oligonucleotide
ugugggagaaccucaucua

SEQ ID NO: 2199193 - RNA, 19 nt, Artificial Sequence
  Description of Artificial Sequence: Synthetic oligonucleotide
ugggcuugaacuucauaau

SEQ ID NO: 2199194 - RNA, 19 nt, Artificial Sequence
  Description of Artificial Sequence: Synthetic oligonucleotide
aguuccaauggccuugauu

SEQ ID NO: 2199195 - RNA, 19 nt, Artificial Sequence
  Description of Artificial Sequence: Synthetic oligonucleotide
guggcuaauagucucguua

SEQ ID NO: 2199196 - RNA, 19 nt, Artificial Sequence
  Description of Artificial Sequence: Synthetic oligonucleotide
uggaacagcuucugaacau

SEQ ID NO: 2199197 - RNA, 19 nt, Artificial Sequence
  Description of Artificial Sequence: Synthetic oligonucleotide
gaacaacguuagcuaggcg

SEQ ID NO: 2199198 - RNA, 19 nt, Artificial Sequence
  Description of Artificial Sequence: Synthetic oligonucleotide
aggcucgauaaccagugga

SEQ ID NO: 2199199 - RNA, 19 nt, Artificial Sequence
  Description of Artificial Sequence: Synthetic oligonucleotide
uaccaacaguggaacagcu

SEQ ID NO: 2199200 - RNA, 19 nt, Artificial Sequence
  Description of Artificial Sequence: Synthetic oligonucleotide
agaggcucgauaaccagug

SEQ ID NO: 2199201 - RNA, 19 nt, Artificial Sequence
  Description of Artificial Sequence: Synthetic oligonucleotide
ugugugucuaagagagcaa

SEQ ID NO: 2199202 - RNA, 19 nt, Artificial Sequence
  Description of Artificial Sequence: Synthetic oligonucleotide
gucuucaucaaguugggau

SEQ ID NO: 2199203 - RNA, 19 nt, Artificial Sequence
  Description of Artificial Sequence: Synthetic oligonucleotide
agugugggagaaccucauc

SEQ ID NO: 2199204 - RNA, 19 nt, Artificial Sequence
  Description of Artificial Sequence: Synthetic oligonucleotide
uuuagcugaggcagucuua

SEQ ID NO: 2199205 - RNA, 19 nt, Artificial Sequence
  Description of Artificial Sequence: Synthetic oligonucleotide
ucugucgaacaacguuagc

SEQ ID NO: 2199206 - RNA, 19 nt, Artificial Sequence
  Description of Artificial Sequence: Synthetic oligonucleotide
ccaacaguggaacagcuuc

SEQ ID NO: 2199207 - RNA, 19 nt, Artificial Sequence
  Description of Artificial Sequence: Synthetic oligonucleotide
cacggauccuugcacauuc

SEQ ID NO: 2199208 - RNA, 19 nt, Artificial Sequence
  Description of Artificial Sequence: Synthetic oligonucleotide
ccaauggccuugauuaagg

SEQ ID NO: 2199209 - RNA, 19 nt, Artificial Sequence
  Description of Artificial Sequence: Synthetic oligonucleotide
agagagcaacaucagguuu

SEQ ID NO: 2199210 - RNA, 19 nt, Artificial Sequence
  Description of Artificial Sequence: Synthetic oligonucleotide
guggaacagcuucugaaca

SEQ ID NO: 2199211 - RNA, 19 nt, Artificial Sequence
  Description of Artificial Sequence: Synthetic oligonucleotide
cuugauuaagggaucacau

SEQ ID NO: 2199212 - RNA, 19 nt, Artificial Sequence
  Description of Artificial Sequence: Synthetic oligonucleotide
agaaagggcauggcuuccg

SEQ ID NO: 2199213 - RNA, 19 nt, Artificial Sequence
  Description of Artificial Sequence: Synthetic oligonucleotide
cucuuaacuccuuagcaua

SEQ ID NO: 2199214 - RNA, 19 nt, Artificial Sequence
  Description of Artificial Sequence: Synthetic oligonucleotide
gacaagcaguugcuuuugc

SEQ ID NO: 2199215 - RNA, 19 nt, Artificial Sequence
  Description of Artificial Sequence: Synthetic oligonucleotide
gguuacuuucaauuagguc

SEQ ID NO: 2199216 - RNA, 19 nt, Artificial Sequence
  Description of Artificial Sequence: Synthetic oligonucleotide
cauaaucuuuccuauugcu

SEQ ID NO: 2199217 - RNA, 19 nt, Artificial Sequence
  Description of Artificial Sequence: Synthetic oligonucleotide
cauaaagaacgauaaucgu

SEQ ID NO: 2199218 - RNA, 19 nt, Artificial Sequence
  Description of Artificial Sequence: Synthetic oligonucleotide
acguuagcuaggcguuugg

SEQ ID NO: 2199219 - RNA, 19 nt, Artificial Sequence
  Description of Artificial Sequence: Synthetic oligonucleotide
gugggagaaccucaucuac

SEQ ID NO: 2199220 - RNA, 19 nt, Artificial Sequence
  Description of Artificial Sequence: Synthetic oligonucleotide
auuugggaauuuauuggga

SEQ ID NO: 2199221 - RNA, 19 nt, Artificial Sequence
  Description of Artificial Sequence: Synthetic oligonucleotide
acaacuuguucuguauagu

SEQ ID NO: 2199222 - RNA, 19 nt, Artificial Sequence
  Description of Artificial Sequence: Synthetic oligonucleotide
cauugucgugaaaauaaaa

SEQ ID NO: 2199223 - RNA, 19 nt, Artificial Sequence
  Description of Artificial Sequence: Synthetic oligonucleotide
uuccaagagaaagggcaug

SEQ ID NO: 2199224 - RNA, 19 nt, Artificial Sequence
  Description of Artificial Sequence: Synthetic oligonucleotide
gggucuucguggcuaauag

SEQ ID NO: 2199225 - RNA, 19 nt, Artificial Sequence
  Description of Artificial Sequence: Synthetic oligonucleotide
uuucugcaauuauacugau

SEQ ID NO: 2199226 - RNA, 19 nt, Artificial Sequence
  Description of Artificial Sequence: Synthetic oligonucleotide
gaggcucgauaaccagugg

SEQ ID NO: 2199227 - RNA, 19 nt, Artificial Sequence
  Description of Artificial Sequence: Synthetic oligonucleotide
agguuuagcugaggcaguc

SEQ ID NO: 2199228 - RNA, 19 nt, Artificial Sequence
  Description of Artificial Sequence: Synthetic oligonucleotide
ugccacggauccuugcaca

SEQ ID NO: 2199229 - RNA, 19 nt, Artificial Sequence
  Description of Artificial Sequence: Synthetic oligonucleotide
aaucgucuccuaucagguu

SEQ ID NO: 2199230 - RNA, 19 nt, Artificial Sequence
  Description of Artificial Sequence: Synthetic oligonucleotide
gugugucuaagagagcaac

SEQ ID NO: 2199231 - RNA, 19 nt, Artificial Sequence
  Description of Artificial Sequence: Synthetic oligonucleotide
cagguucaguuccaauggc

SEQ ID NO: 2199232 - RNA, 19 nt, Artificial Sequence
  Description of Artificial Sequence: Synthetic oligonucleotide
acugaugauuuugguaaga

SEQ ID NO: 2199233 - RNA, 19 nt, Artificial Sequence
  Description of Artificial Sequence: Synthetic oligonucleotide
guugggauauacauugcaa

SEQ ID NO: 2199234 - RNA, 19 nt, Artificial Sequence
  Description of Artificial Sequence: Synthetic oligonucleotide
cacucgaacauugucguga

SEQ ID NO: 2199235 - RNA, 19 nt, Artificial Sequence
  Description of Artificial Sequence: Synthetic oligonucleotide
uuccuauugcugagauaca

SEQ ID NO: 2199236 - RNA, 19 nt, Artificial Sequence
  Description of Artificial Sequence: Synthetic oligonucleotide
uauugggaccgaucacaac

SEQ ID NO: 2199237 - RNA, 19 nt, Artificial Sequence
  Description of Artificial Sequence: Synthetic oligonucleotide
gcugaggcagucuuaauaa

SEQ ID NO: 2199238 - RNA, 19 nt, Artificial Sequence
  Description of Artificial Sequence: Synthetic oligonucleotide
aguggaagauacugcugaa

SEQ ID NO: 2199239 - RNA, 19 nt, Artificial Sequence
  Description of Artificial Sequence: Synthetic oligonucleotide
gaacauugucgugaaaaua

SEQ ID NO: 2199240 - RNA, 19 nt, Artificial Sequence
  Description of Artificial Sequence: Synthetic oligonucleotide
uugcacacuuaauaaccuu

SEQ ID NO: 2199241 - RNA, 19 nt, Artificial Sequence
  Description of Artificial Sequence: Synthetic oligonucleotide
gauuaagggaucacauaua

SEQ ID NO: 2199242 - RNA, 19 nt, Artificial Sequence
  Description of Artificial Sequence: Synthetic oligonucleotide
caguggaacagcuucugaa

SEQ ID NO: 2199243 - RNA, 19 nt, Artificial Sequence
  Description of Artificial Sequence: Synthetic oligonucleotide
cuauugcugagauacaguu

SEQ ID NO: 2199244 - RNA, 19 nt, Artificial Sequence
  Description of Artificial Sequence: Synthetic oligonucleotide
ucaugcagcgggagccaug

SEQ ID NO: 2199245 - RNA, 19 nt, Artificial Sequence
  Description of Artificial Sequence: Synthetic oligonucleotide
accuuuaccaacaguggaa

SEQ ID NO: 2199246 - RNA, 19 nt, Artificial Sequence
  Description of Artificial Sequence: Synthetic oligonucleotide
ucuuaauaagaggcucgau

SEQ ID NO: 2199247 - RNA, 19 nt, Artificial Sequence
  Description of Artificial Sequence: Synthetic oligonucleotide
cguuuuggaauuugcacac

SEQ ID NO: 2199248 - RNA, 19 nt, Artificial Sequence
  Description of Artificial Sequence: Synthetic oligonucleotide
acucgaacauugucgugaa

SEQ ID NO: 2199249 - RNA, 19 nt, Artificial Sequence
  Description of Artificial Sequence: Synthetic oligonucleotide
acaaauugccagccaucau

SEQ ID NO: 2199250 - RNA, 19 nt, Artificial Sequence
  Description of Artificial Sequence: Synthetic oligonucleotide
guaucugucgaacaacguu

SEQ ID NO: 2199251 - RNA, 19 nt, Artificial Sequence
  Description of Artificial Sequence: Synthetic oligonucleotide
uuccaauggccuugauuaa

SEQ ID NO: 2199252 - RNA, 19 nt, Artificial Sequence
  Description of Artificial Sequence: Synthetic oligonucleotide
gaacauaaagaacgauaau

SEQ ID NO: 2199253 - RNA, 19 nt, Artificial Sequence
  Description of Artificial Sequence: Synthetic oligonucleotide
gcagcgggagccaugacag

SEQ ID NO: 2199254 - RNA, 19 nt, Artificial Sequence
  Description of Artificial Sequence: Synthetic oligonucleotide
caauugggcuugaacuuca

SEQ ID NO: 2199255 - RNA, 19 nt, Artificial Sequence
  Description of Artificial Sequence: Synthetic oligonucleotide
gucuuaauaagaggcucga

SEQ ID NO: 2199256 - RNA, 19 nt, Artificial Sequence
  Description of Artificial Sequence: Synthetic oligonucleotide
cugucgaacaacguuagcu

SEQ ID NO: 2199257 - RNA, 19 nt, Artificial Sequence
  Description of Artificial Sequence: Synthetic oligonucleotide
ucaguuccaauggccuuga

SEQ ID NO: 2199258 - RNA, 19 nt, Artificial Sequence
  Description of Artificial Sequence: Synthetic oligonucleotide
auuccaagagaaagggcau

SEQ ID NO: 2199259 - RNA, 19 nt, Artificial Sequence
  Description of Artificial Sequence: Synthetic oligonucleotide
uggccuugauuaagggauc

SEQ ID NO: 2199260 - RNA, 19 nt, Artificial Sequence
  Description of Artificial Sequence: Synthetic oligonucleotide
acaacguuagcuaggcguu

SEQ ID NO: 2199261 - RNA, 19 nt, Artificial Sequence
  Description of Artificial Sequence: Synthetic oligonucleotide
auaaccaguggaagauacu

SEQ ID NO: 2199262 - RNA, 19 nt, Artificial Sequence
  Description of Artificial Sequence: Synthetic oligonucleotide
gaucacaacugggugguua

SEQ ID NO: 2199263 - RNA, 19 nt, Artificial Sequence
  Description of Artificial Sequence: Synthetic oligonucleotide
gauacuccgugccacggau

SEQ ID NO: 2199264 - RNA, 19 nt, Artificial Sequence
  Description of Artificial Sequence: Synthetic oligonucleotide
guaagauuugggaauuuau

SEQ ID NO: 2199265 - RNA, 19 nt, Artificial Sequence
  Description of Artificial Sequence: Synthetic oligonucleotide
auacugccacaucugugaa

SEQ ID NO: 2199266 - RNA, 19 nt, Artificial Sequence
  Description of Artificial Sequence: Synthetic oligonucleotide
cugagguuuuaauuccaaa

SEQ ID NO: 2199267 - RNA, 19 nt, Artificial Sequence
  Description of Artificial Sequence: Synthetic oligonucleotide
acauugucgugaaaauaaa

SEQ ID NO: 2199268 - RNA, 19 nt, Artificial Sequence
  Description of Artificial Sequence: Synthetic oligonucleotide
guauaguccacaaauccuu

SEQ ID NO: 2199269 - RNA, 19 nt, Artificial Sequence
  Description of Artificial Sequence: Synthetic oligonucleotide
gcaaaauugaguaauucuu

SEQ ID NO: 2199270 - RNA, 19 nt, Artificial Sequence
  Description of Artificial Sequence: Synthetic oligonucleotide
uuccaaagcuuugcugguc

SEQ ID NO: 2199271 - RNA, 19 nt, Artificial Sequence
  Description of Artificial Sequence: Synthetic oligonucleotide
acggauccuugcacauucc

SEQ ID NO: 2199272 - RNA, 19 nt, Artificial Sequence
  Description of Artificial Sequence: Synthetic oligonucleotide
gcucgauaaccaguggaag

SEQ ID NO: 2199273 - RNA, 19 nt, Artificial Sequence
  Description of Artificial Sequence: Synthetic oligonucleotide
ucguggcuaauagucucgu

SEQ ID NO: 2199274 - RNA, 19 nt, Artificial Sequence
  Description of Artificial Sequence: Synthetic oligonucleotide
ggaagauacugcugaaagu

SEQ ID NO: 2199275 - RNA, 19 nt, Artificial Sequence
  Description of Artificial Sequence: Synthetic oligonucleotide
auacugcugaaaguucuuu

SEQ ID NO: 2199276 - RNA, 19 nt, Artificial Sequence
  Description of Artificial Sequence: Synthetic oligonucleotide
gugcuucaagcaaaauuga

SEQ ID NO: 2199277 - RNA, 19 nt, Artificial Sequence
  Description of Artificial Sequence: Synthetic oligonucleotide
caugcagcgggagccauga

SEQ ID NO: 2199278 - RNA, 19 nt, Artificial Sequence
  Description of Artificial Sequence: Synthetic oligonucleotide
cacaauugggcuugaacuu

SEQ ID NO: 2199279 - RNA, 19 nt, Artificial Sequence
  Description of Artificial Sequence: Synthetic oligonucleotide
gugccacggauccuugcac

SEQ ID NO: 2199280 - RNA, 19 nt, Artificial Sequence
  Description of Artificial Sequence: Synthetic oligonucleotide
uccgugccacggauccuug

SEQ ID NO: 2199281 - RNA, 19 nt, Artificial Sequence
  Description of Artificial Sequence: Synthetic oligonucleotide
caucugacaagcaguugcu

SEQ ID NO: 2199282 - RNA, 19 nt, Artificial Sequence
  Description of Artificial Sequence: Synthetic oligonucleotide
ggcuugaacuucauaaucu

SEQ ID NO: 2199283 - RNA, 19 nt, Artificial Sequence
  Description of Artificial Sequence: Synthetic oligonucleotide
cgaacaacguuagcuaggc

SEQ ID NO: 2199284 - RNA, 19 nt, Artificial Sequence
  Description of Artificial Sequence: Synthetic oligonucleotide
gaacgauaaucgucuccua

SEQ ID NO: 2199285 - RNA, 19 nt, Artificial Sequence
  Description of Artificial Sequence: Synthetic oligonucleotide
ggauauacauugcaaccau

SEQ ID NO: 2199286 - RNA, 19 nt, Artificial Sequence
  Description of Artificial Sequence: Synthetic oligonucleotide
auacuccgugccacggauc

SEQ ID NO: 2199287 - RNA, 19 nt, Artificial Sequence
  Description of Artificial Sequence: Synthetic oligonucleotide
accaucagcuucacaacuu

SEQ ID NO: 2199288 - RNA, 19 nt, Artificial Sequence
  Description of Artificial Sequence: Synthetic oligonucleotide
uggcuuccgcagcugccac

SEQ ID NO: 2199289 - RNA, 19 nt, Artificial Sequence
  Description of Artificial Sequence: Synthetic oligonucleotide
ccaguggaagauacugcug

SEQ ID NO: 2199290 - RNA, 19 nt, Artificial Sequence
  Description of Artificial Sequence: Synthetic oligonucleotide
caagcaaaauugaguaauu

SEQ ID NO: 2199291 - RNA, 19 nt, Artificial Sequence
  Description of Artificial Sequence: Synthetic oligonucleotide
uucaucaaguugggauaua

SEQ ID NO: 2199292 - RNA, 19 nt, Artificial Sequence
  Description of Artificial Sequence: Synthetic oligonucleotide
ugcuggucuccaagauuua

SEQ ID NO: 2199293 - RNA, 19 nt, Artificial Sequence
  Description of Artificial Sequence: Synthetic oligonucleotide
ccuugauuaagggaucaca

SEQ ID NO: 2199294 - RNA, 19 nt, Artificial Sequence
  Description of Artificial Sequence: Synthetic oligonucleotide
gggugguuacuuucaauua

SEQ ID NO: 2199295 - RNA, 19 nt, Artificial Sequence
  Description of Artificial Sequence: Synthetic oligonucleotide
cgauaaucgucuccuauca

SEQ ID NO: 2199296 - RNA, 19 nt, Artificial Sequence
  Description of Artificial Sequence: Synthetic oligonucleotide
uucacacaauugggcuuga

SEQ ID NO: 2199297 - RNA, 19 nt, Artificial Sequence
  Description of Artificial Sequence: Synthetic oligonucleotide
guaaagcuuccugcugguc

SEQ ID NO: 2199298 - RNA, 19 nt, Artificial Sequence
  Description of Artificial Sequence: Synthetic oligonucleotide
cuucauaaucuuuccuauu

SEQ ID NO: 2199299 - RNA, 19 nt, Artificial Sequence
  Description of Artificial Sequence: Synthetic oligonucleotide
ggcucgauaaccaguggaa

SEQ ID NO: 2199300 - RNA, 19 nt, Artificial Sequence
  Description of Artificial Sequence: Synthetic oligonucleotide
gggagaaccucaucuacau

SEQ ID NO: 2199301 - RNA, 19 nt, Artificial Sequence
  Description of Artificial Sequence: Synthetic oligonucleotide
ucacacaauugggcuugaa

SEQ ID NO: 2199302 - RNA, 19 nt, Artificial Sequence
  Description of Artificial Sequence: Synthetic oligonucleotide
gagcaacaucagguuuagc

SEQ ID NO: 2199303 - RNA, 19 nt, Artificial Sequence
  Description of Artificial Sequence: Synthetic oligonucleotide
ggauccuugcacauuccaa

SEQ ID NO: 2199304 - RNA, 19 nt, Artificial Sequence
  Description of Artificial Sequence: Synthetic oligonucleotide
ggucuccaagauuuacaaa

SEQ ID NO: 2199305 - RNA, 19 nt, Artificial Sequence
  Description of Artificial Sequence: Synthetic oligonucleotide
guccacaaauccuucucuu

SEQ ID NO: 2199306 - RNA, 19 nt, Artificial Sequence
  Description of Artificial Sequence: Synthetic oligonucleotide
cuucaucaaguugggauau

SEQ ID NO: 2199307 - RNA, 19 nt, Artificial Sequence
  Description of Artificial Sequence: Synthetic oligonucleotide
gcuaauagucucguuaauu

SEQ ID NO: 2199308 - RNA, 19 nt, Artificial Sequence
  Description of Artificial Sequence: Synthetic oligonucleotide
cagcgggagccaugacagc

SEQ ID NO: 2199309 - RNA, 19 nt, Artificial Sequence
  Description of Artificial Sequence: Synthetic oligonucleotide
ggaccgaucacaacugggu

SEQ ID NO: 2199310 - RNA, 19 nt, Artificial Sequence
  Description of Artificial Sequence: Synthetic oligonucleotide
cuucaugcagcgggagcca

SEQ ID NO: 2199311 - RNA, 19 nt, Artificial Sequence
  Description of Artificial Sequence: Synthetic oligonucleotide
cuuaacuccuuagcauagu

SEQ ID NO: 2199312 - RNA, 19 nt, Artificial Sequence
  Description of Artificial Sequence: Synthetic oligonucleotide
gcagucuuaauaagaggcu

SEQ ID NO: 2199313 - RNA, 19 nt, Artificial Sequence
  Description of Artificial Sequence: Synthetic oligonucleotide
caucuacauucacacaauu

SEQ ID NO: 2199314 - RNA, 19 nt, Artificial Sequence
  Description of Artificial Sequence: Synthetic oligonucleotide
cucauguucuccacaucuu

SEQ ID NO: 2199315 - RNA, 19 nt, Artificial Sequence
  Description of Artificial Sequence: Synthetic oligonucleotide
cugcaauuauacugaugau

SEQ ID NO: 2199316 - RNA, 19 nt, Artificial Sequence
  Description of Artificial Sequence: Synthetic oligonucleotide
ccuauugcugagauacagu

SEQ ID NO: 2199317 - RNA, 19 nt, Artificial Sequence
  Description of Artificial Sequence: Synthetic oligonucleotide
gggaauuuauugggaccga

SEQ ID NO: 2199318 - RNA, 19 nt, Artificial Sequence
  Description of Artificial Sequence: Synthetic oligonucleotide
cagguuuagcugaggcagu

SEQ ID NO: 2199319 - RNA, 19 nt, Artificial Sequence
  Description of Artificial Sequence: Synthetic oligonucleotide
ggucuucguggcuaauagu

SEQ ID NO: 2199320 - RNA, 19 nt, Artificial Sequence
  Description of Artificial Sequence: Synthetic oligonucleotide
cguuagcuaggcguuuggc

SEQ ID NO: 2199321 - RNA, 19 nt, Artificial Sequence
  Description of Artificial Sequence: Synthetic oligonucleotide
ccucaucuacauucacaca

SEQ ID NO: 2199322 - RNA, 19 nt, Artificial Sequence
  Description of Artificial Sequence: Synthetic oligonucleotide
ccacucgaacauugucgug

SEQ ID NO: 2199323 - RNA, 19 nt, Artificial Sequence
  Description of Artificial Sequence: Synthetic oligonucleotide
ggaauuuauugggaccgau

SEQ ID NO: 2199324 - RNA, 19 nt, Artificial Sequence
  Description of Artificial Sequence: Synthetic oligonucleotide
ggucuucaucaaguuggga

SEQ ID NO: 2199325 - RNA, 19 nt, Artificial Sequence
  Description of Artificial Sequence: Synthetic oligonucleotide
acuccgugccacggauccu

SEQ ID NO: 2199326 - RNA, 19 nt, Artificial Sequence
  Description of Artificial Sequence: Synthetic oligonucleotide
cucgaacauugucgugaaa

SEQ ID NO: 2199327 - RNA, 19 nt, Artificial Sequence
  Description of Artificial Sequence: Synthetic oligonucleotide
caggggucuucguggcuaa

SEQ ID NO: 2199328 - RNA, 19 nt, Artificial Sequence
  Description of Artificial Sequence: Synthetic oligonucleotide
ggcuaauagucucguuaau

SEQ ID NO: 2199329 - RNA, 19 nt, Artificial Sequence
  Description of Artificial Sequence: Synthetic oligonucleotide
cgaacauugucgugaaaau

SEQ ID NO: 2199330 - RNA, 19 nt, Artificial Sequence
  Description of Artificial Sequence: Synthetic oligonucleotide
gguuuagcugaggcagucu

SEQ ID NO: 2199331 - RNA, 19 nt, Artificial Sequence
  Description of Artificial Sequence: Synthetic oligonucleotide
ccgugccacggauccuugc

SEQ ID NO: 2199332 - RNA, 19 nt, Artificial Sequence
  Description of Artificial Sequence: Synthetic oligonucleotide
gcgggagccaugacagcca

SEQ ID NO: 2199333 - RNA, 19 nt, Artificial Sequence
  Description of Artificial Sequence: Synthetic oligonucleotide
ggagaaccucaucuacauu

SEQ ID NO: 2199334 - RNA, 19 nt, Artificial Sequence
  Description of Artificial Sequence: Synthetic oligonucleotide
ccgaucacaacuggguggu

SEQ ID NO: 2199335 - RNA, 19 nt, Artificial Sequence
  Description of Artificial Sequence: Synthetic oligonucleotide
gccacggauccuugcacau

SEQ ID NO: 2199336 - RNA, 19 nt, Artificial Sequence
  Description of Artificial Sequence: Synthetic oligonucleotide
aggggucuucguggcuaau

SEQ ID NO: 2199337 - RNA, 19 nt, Artificial Sequence
  Description of Artificial Sequence: Synthetic oligonucleotide
cuccgugccacggauccuu

SEQ ID NO: 2199338 - RNA, 19 nt, Artificial Sequence
  Description of Artificial Sequence: Synthetic oligonucleotide
gccagccaucaucaucacu

SEQ ID NO: 2199339 - RNA, 19 nt, Artificial Sequence
  Description of Artificial Sequence: Synthetic oligonucleotide
ccacaucuugugugucuaa

SEQ ID NO: 2199340 - RNA, 19 nt, Artificial Sequence
  Description of Artificial Sequence: Synthetic oligonucleotide
caacguuagcuaggcguuu

SEQ ID NO: 2199341 - RNA, 19 nt, Artificial Sequence
  Description of Artificial Sequence: Synthetic oligonucleotide
cgauaaccaguggaagaua

SEQ ID NO: 2199342 - RNA, 19 nt, Artificial Sequence
  Description of Artificial Sequence: Synthetic oligonucleotide
cguggcuaauagucucguu

SEQ ID NO: 2199343 - RNA, 19 nt, Artificial Sequence
  Description of Artificial Sequence: Synthetic oligonucleotide
ccacggauccuugcacauu

SEQ ID NO: 2199344 - RNA, 19 nt, Artificial Sequence
  Description of Artificial Sequence: Synthetic oligonucleotide
ucagcaauggaccagaugg

SEQ ID NO: 2199345 - RNA, 19 nt, Artificial Sequence
  Description of Artificial Sequence: Synthetic oligonucleotide
ugagacauugccaaggugg

SEQ ID NO: 2199346 - RNA, 19 nt, Artificial Sequence
  Description of Artificial Sequence: Synthetic oligonucleotide
guuggugucgcacagaggg

SEQ ID NO: 2199347 - RNA, 19 nt, Artificial Sequence
  Description of Artificial Sequence: Synthetic oligonucleotide
agagugauuuuccagcagc

SEQ ID NO: 2199348 - RNA, 19 nt, Artificial Sequence
  Description of Artificial Sequence: Synthetic oligonucleotide
uguggaauggggcauuggg

SEQ ID NO: 2199349 - RNA, 19 nt, Artificial Sequence
  Description of Artificial Sequence: Synthetic oligonucleotide
cuugucuuuggcaucaugc

SEQ ID NO: 2199350 - RNA, 19 nt, Artificial Sequence
  Description of Artificial Sequence: Synthetic oligonucleotide
gaauuuugaagugcaaacg

SEQ ID NO: 2199351 - RNA, 19 nt, Artificial Sequence
  Description of Artificial Sequence: Synthetic oligonucleotide
caaaauguagucuuccuug

SEQ ID NO: 2199352 - RNA, 19 nt, Artificial Sequence
  Description of Artificial Sequence: Synthetic oligonucleotide
gagaacacauccucaaagg

SEQ ID NO: 2199353 - RNA, 19 nt, Artificial Sequence
  Description of Artificial Sequence: Synthetic oligonucleotide
ugaaguagaaguugucucc

SEQ ID NO: 2199354 - RNA, 19 nt, Artificial Sequence
  Description of Artificial Sequence: Synthetic oligonucleotide
ucagaguugccacacagca

SEQ ID NO: 2199355 - RNA, 19 nt, Artificial Sequence
  Description of Artificial Sequence: Synthetic oligonucleotide
gauaguaagggcuugggaa

SEQ ID NO: 2199356 - RNA, 19 nt, Artificial Sequence
  Description of Artificial Sequence: Synthetic oligonucleotide
auaggugauacucauuucu

SEQ ID NO: 2199357 - RNA, 19 nt, Artificial Sequence
  Description of Artificial Sequence: Synthetic oligonucleotide
ugcuugaccaggcagcggg

SEQ ID NO: 2199358 - RNA, 19 nt, Artificial Sequence
  Description of Artificial Sequence: Synthetic oligonucleotide
auaguaagggcuugggaag

SEQ ID NO: 2199359 - RNA, 19 nt, Artificial Sequence
  Description of Artificial Sequence: Synthetic oligonucleotide
ucuugaagagugauuuucc

SEQ ID NO: 2199360 - RNA, 19 nt, Artificial Sequence
  Description of Artificial Sequence: Synthetic oligonucleotide
aggcaauuugugcugagac

SEQ ID NO: 2199361 - RNA, 19 nt, Artificial Sequence
  Description of Artificial Sequence: Synthetic oligonucleotide
ugugcugagacauugccaa

SEQ ID NO: 2199362 - RNA, 19 nt, Artificial Sequence
  Description of Artificial Sequence: Synthetic oligonucleotide
uuagcauuggccacuuccc

SEQ ID NO: 2199363 - RNA, 19 nt, Artificial Sequence
  Description of Artificial Sequence: Synthetic oligonucleotide
gauacucauuucuuuggag

SEQ ID NO: 2199364 - RNA, 19 nt, Artificial Sequence
  Description of Artificial Sequence: Synthetic oligonucleotide
aggacagcugacuucgggc

SEQ ID NO: 2199365 - RNA, 19 nt, Artificial Sequence
  Description of Artificial Sequence: Synthetic oligonucleotide
uguccguggaauuuugaag

SEQ ID NO: 2199366 - RNA, 19 nt, Artificial Sequence
  Description of Artificial Sequence: Synthetic oligonucleotide
gucugagucgucuagggag

SEQ ID NO: 2199367 - RNA, 19 nt, Artificial Sequence
  Description of Artificial Sequence: Synthetic oligonucleotide
uccguguucagcaauggac

SEQ ID NO: 2199368 - RNA, 19 nt, Artificial Sequence
  Description of Artificial Sequence: Synthetic oligonucleotide
ucugagucgucuagggagg

SEQ ID NO: 2199369 - RNA, 19 nt, Artificial Sequence
  Description of Artificial Sequence: Synthetic oligonucleotide
agcggcugcacaaugagcc

SEQ ID NO: 2199370 - RNA, 19 nt, Artificial Sequence
  Description of Artificial Sequence: Synthetic oligonucleotide
agugcaaacgauaguaagg

SEQ ID NO: 2199371 - RNA, 19 nt, Artificial Sequence
  Description of Artificial Sequence: Synthetic oligonucleotide
ugaagugcaaacgauagua

SEQ ID NO: 2199372 - RNA, 19 nt, Artificial Sequence
  Description of Artificial Sequence: Synthetic oligonucleotide
uuuugaagugcaaacgaua

SEQ ID NO: 2199373 - RNA, 19 nt, Artificial Sequence
  Description of Artificial Sequence: Synthetic oligonucleotide
gugauacucauuucuuugg

SEQ ID NO: 2199374 - RNA, 19 nt, Artificial Sequence
  Description of Artificial Sequence: Synthetic oligonucleotide
acauaggugauacucauuu

SEQ ID NO: 2199375 - RNA, 19 nt, Artificial Sequence
  Description of Artificial Sequence: Synthetic oligonucleotide
cauaugugaagccacccag

SEQ ID NO: 2199376 - RNA, 19 nt, Artificial Sequence
  Description of Artificial Sequence: Synthetic oligonucleotide
gugcaaacgauaguaaggg

SEQ ID NO: 2199377 - RNA, 19 nt, Artificial Sequence
  Description of Artificial Sequence: Synthetic oligonucleotide
ucuuggaguaggcaauuug

SEQ ID NO: 2199378 - RNA, 19 nt, Artificial Sequence
  Description of Artificial Sequence: Synthetic oligonucleotide
caaagguaggcagugaccc

SEQ ID NO: 2199379 - RNA, 19 nt, Artificial Sequence
  Description of Artificial Sequence: Synthetic oligonucleotide
acgaagucaucagaguugc

SEQ ID NO: 2199380 - RNA, 19 nt, Artificial Sequence
  Description of Artificial Sequence: Synthetic oligonucleotide
aagguaggcagugaccccg

SEQ ID NO: 2199381 - RNA, 19 nt, Artificial Sequence
  Description of Artificial Sequence: Synthetic oligonucleotide
uccauagugaaagcgcagg

SEQ ID NO: 2199382 - RNA, 19 nt, Artificial Sequence
  Description of Artificial Sequence: Synthetic oligonucleotide
auaaucugcacgguucugg

SEQ ID NO: 2199383 - RNA, 19 nt, Artificial Sequence
  Description of Artificial Sequence: Synthetic oligonucleotide
agauacugcaaguuguggu

SEQ ID NO: 2199384 - RNA, 19 nt, Artificial Sequence
  Description of Artificial Sequence: Synthetic oligonucleotide
ugacaugauuugcaggccc

SEQ ID NO: 2199385 - RNA, 19 nt, Artificial Sequence
  Description of Artificial Sequence: Synthetic oligonucleotide
ugauacucauuucuuugga

SEQ ID NO: 2199386 - RNA, 19 nt, Artificial Sequence
  Description of Artificial Sequence: Synthetic oligonucleotide
uguaagugcuugaccaggc

SEQ ID NO: 2199387 - RNA, 19 nt, Artificial Sequence
  Description of Artificial Sequence: Synthetic oligonucleotide
uuggaguaggcaauuugug

SEQ ID NO: 2199388 - RNA, 19 nt, Artificial Sequence
  Description of Artificial Sequence: Synthetic oligonucleotide
cucggauccauagugaaag

SEQ ID NO: 2199389 - RNA, 19 nt, Artificial Sequence
  Description of Artificial Sequence: Synthetic oligonucleotide
ggaauuuugaagugcaaac

SEQ ID NO: 2199390 - RNA, 19 nt, Artificial Sequence
  Description of Artificial Sequence: Synthetic oligonucleotide
uccacauaggugauacuca

SEQ ID NO: 2199391 - RNA, 19 nt, Artificial Sequence
  Description of Artificial Sequence: Synthetic oligonucleotide
uaggcagugaccccguaug

SEQ ID NO: 2199392 - RNA, 19 nt, Artificial Sequence
  Description of Artificial Sequence: Synthetic oligonucleotide
aagagugauuuuccagcag

SEQ ID NO: 2199393 - RNA, 19 nt, Artificial Sequence
  Description of Artificial Sequence: Synthetic oligonucleotide
aaucugcacgguucuggcg

SEQ ID NO: 2199394 - RNA, 19 nt, Artificial Sequence
  Description of Artificial Sequence: Synthetic oligonucleotide
agcacccauaaucugcacg

SEQ ID NO: 2199395 - RNA, 19 nt, Artificial Sequence
  Description of Artificial Sequence: Synthetic oligonucleotide
aguccucggauccauagug

SEQ ID NO: 2199396 - RNA, 19 nt, Artificial Sequence
  Description of Artificial Sequence: Synthetic oligonucleotide
aguagaaguugucucccag

SEQ ID NO: 2199397 - RNA, 19 nt, Artificial Sequence
  Description of Artificial Sequence: Synthetic oligonucleotide
acaaaucucagggugggag

SEQ ID NO: 2199398 - RNA, 19 nt, Artificial Sequence
  Description of Artificial Sequence: Synthetic oligonucleotide
agaacacauccucaaaggu

SEQ ID NO: 2199399 - RNA, 19 nt, Artificial Sequence
  Description of Artificial Sequence: Synthetic oligonucleotide
ucuggcgauuucuuuagca

SEQ ID NO: 2199400 - RNA, 19 nt, Artificial Sequence
  Description of Artificial Sequence: Synthetic oligonucleotide
agccacaaaucucagggug

SEQ ID NO: 2199401 - RNA, 19 nt, Artificial Sequence
  Description of Artificial Sequence: Synthetic oligonucleotide
agggacaugaugaagucag

SEQ ID NO: 2199402 - RNA, 19 nt, Artificial Sequence
  Description of Artificial Sequence: Synthetic oligonucleotide
ugucuuuggcaucaugcac

SEQ ID NO: 2199403 - RNA, 19 nt, Artificial Sequence
  Description of Artificial Sequence: Synthetic oligonucleotide
gauauugcggagggcacgg

SEQ ID NO: 2199404 - RNA, 19 nt, Artificial Sequence
  Description of Artificial Sequence: Synthetic oligonucleotide
guugccacacagcaucacg

SEQ ID NO: 2199405 - RNA, 19 nt, Artificial Sequence
  Description of Artificial Sequence: Synthetic oligonucleotide
aagucagcacccauaaucu

SEQ ID NO: 2199406 - RNA, 19 nt, Artificial Sequence
  Description of Artificial Sequence: Synthetic oligonucleotide
ugacgaagucaucagaguu

SEQ ID NO: 2199407 - RNA, 19 nt, Artificial Sequence
  Description of Artificial Sequence: Synthetic oligonucleotide
acugacgaagucaucagag

SEQ ID NO: 2199408 - RNA, 19 nt, Artificial Sequence
  Description of Artificial Sequence: Synthetic oligonucleotide
uuaucuccacauaugugaa

SEQ ID NO: 2199409 - RNA, 19 nt, Artificial Sequence
  Description of Artificial Sequence: Synthetic oligonucleotide
aguuccagcgcuuggagau

SEQ ID NO: 2199410 - RNA, 19 nt, Artificial Sequence
  Description of Artificial Sequence: Synthetic oligonucleotide
acaaagguaggcagugacc

SEQ ID NO: 2199411 - RNA, 19 nt, Artificial Sequence
  Description of Artificial Sequence: Synthetic oligonucleotide
ugucucggggcauuuuggg

SEQ ID NO: 2199412 - RNA, 19 nt, Artificial Sequence
  Description of Artificial Sequence: Synthetic oligonucleotide
gaaguagaaguugucuccc

SEQ ID NO: 2199413 - RNA, 19 nt, Artificial Sequence
  Description of Artificial Sequence: Synthetic oligonucleotide
uuuggagcuuaucuccaca

SEQ ID NO: 2199414 - RNA, 19 nt, Artificial Sequence
  Description of Artificial Sequence: Synthetic oligonucleotide
augauuugcaggcccagca

SEQ ID NO: 2199415 - RNA, 19 nt, Artificial Sequence
  Description of Artificial Sequence: Synthetic oligonucleotide
uuccacauaggugauacuc

SEQ ID NO: 2199416 - RNA, 19 nt, Artificial Sequence
  Description of Artificial Sequence: Synthetic oligonucleotide
ggugauacucauuucuuug

SEQ ID NO: 2199417 - RNA, 19 nt, Artificial Sequence
  Description of Artificial Sequence: Synthetic oligonucleotide
gaagagugauuuuccagca

SEQ ID NO: 2199418 - RNA, 19 nt, Artificial Sequence
  Description of Artificial Sequence: Synthetic oligonucleotide
cugacuucgggccacuccc

SEQ ID NO: 2199419 - RNA, 19 nt, Artificial Sequence
  Description of Artificial Sequence: Synthetic oligonucleotide
agcgcagguagccauuggg

SEQ ID NO: 2199420 - RNA, 19 nt, Artificial Sequence
  Description of Artificial Sequence: Synthetic oligonucleotide
gacgaagucaucagaguug

SEQ ID NO: 2199421 - RNA, 19 nt, Artificial Sequence
  Description of Artificial Sequence: Synthetic oligonucleotide
uuucuuuagcauuggccac

SEQ ID NO: 2199422 - RNA, 19 nt, Artificial Sequence
  Description of Artificial Sequence: Synthetic oligonucleotide
guauguggccaacaguggc

SEQ ID NO: 2199423 - RNA, 19 nt, Artificial Sequence
  Description of Artificial Sequence: Synthetic oligonucleotide
caucagaguugccacacag

SEQ ID NO: 2199424 - RNA, 19 nt, Artificial Sequence
  Description of Artificial Sequence: Synthetic oligonucleotide
ugacugacgaagucaucag

SEQ ID NO: 2199425 - RNA, 19 nt, Artificial Sequence
  Description of Artificial Sequence: Synthetic oligonucleotide
ucagggugggaguagcggc

SEQ ID NO: 2199426 - RNA, 19 nt, Artificial Sequence
  Description of Artificial Sequence: Synthetic oligonucleotide
gcacccauaaucugcacgg

SEQ ID NO: 2199427 - RNA, 19 nt, Artificial Sequence
  Description of Artificial Sequence: Synthetic oligonucleotide
gaacacauccucaaagguc

SEQ ID NO: 2199428 - RNA, 19 nt, Artificial Sequence
  Description of Artificial Sequence: Synthetic oligonucleotide
agugaccccguauguggcc

SEQ ID NO: 2199429 - RNA, 19 nt, Artificial Sequence
  Description of Artificial Sequence: Synthetic oligonucleotide
aucugcacgguucuggcga

SEQ ID NO: 2199430 - RNA, 19 nt, Artificial Sequence
  Description of Artificial Sequence: Synthetic oligonucleotide
guucuggcgauuucuuuag

SEQ ID NO: 2199431 - RNA, 19 nt, Artificial Sequence
  Description of Artificial Sequence: Synthetic oligonucleotide
acauaugugaagccaccca

SEQ ID NO: 2199432 - RNA, 19 nt, Artificial Sequence
  Description of Artificial Sequence: Synthetic oligonucleotide
uggucuugaagagugauuu

SEQ ID NO: 2199433 - RNA, 19 nt, Artificial Sequence
  Description of Artificial Sequence: Synthetic oligonucleotide
agcaauggaccagaugggg

SEQ ID NO: 2199434 - RNA, 19 nt, Artificial Sequence
  Description of Artificial Sequence: Synthetic oligonucleotide
augaagucagcacccauaa

SEQ ID NO: 2199435 - RNA, 19 nt, Artificial Sequence
  Description of Artificial Sequence: Synthetic oligonucleotide
acaaugagccaggagcggg

SEQ ID NO: 2199436 - RNA, 19 nt, Artificial Sequence
  Description of Artificial Sequence: Synthetic oligonucleotide
uugggcugcugacugacga

SEQ ID NO: 2199437 - RNA, 19 nt, Artificial Sequence
  Description of Artificial Sequence: Synthetic oligonucleotide
cacaaagguaggcagugac

SEQ ID NO: 2199438 - RNA, 19 nt, Artificial Sequence
  Description of Artificial Sequence: Synthetic oligonucleotide
aauggaccagaugggguag

SEQ ID NO: 2199439 - RNA, 19 nt, Artificial Sequence
  Description of Artificial Sequence: Synthetic oligonucleotide
ucaugcacuccagugaagu

SEQ ID NO: 2199440 - RNA, 19 nt, Artificial Sequence
  Description of Artificial Sequence: Synthetic oligonucleotide
uagugaaagcgcagguagc

SEQ ID NO: 2199441 - RNA, 19 nt, Artificial Sequence
  Description of Artificial Sequence: Synthetic oligonucleotide
ugggguaguggccagccac

SEQ ID NO: 2199442 - RNA, 19 nt, Artificial Sequence
  Description of Artificial Sequence: Synthetic oligonucleotide
agucuuccuuggcugcugc

SEQ ID NO: 2199443 - RNA, 19 nt, Artificial Sequence
  Description of Artificial Sequence: Synthetic oligonucleotide
ugcaaacgauaguaagggc

SEQ ID NO: 2199444 - RNA, 19 nt, Artificial Sequence
  Description of Artificial Sequence: Synthetic oligonucleotide
aaguagaaguugucuccca

SEQ ID NO: 2199445 - RNA, 19 nt, Artificial Sequence
  Description of Artificial Sequence: Synthetic oligonucleotide
aucagaguugccacacagc

SEQ ID NO: 2199446 - RNA, 19 nt, Artificial Sequence
  Description of Artificial Sequence: Synthetic oligonucleotide
auuugugcugagacauugc

SEQ ID NO: 2199447 - RNA, 19 nt, Artificial Sequence
  Description of Artificial Sequence: Synthetic oligonucleotide
gcaaguuguggucaugucc

SEQ ID NO: 2199448 - RNA, 19 nt, Artificial Sequence
  Description of Artificial Sequence: Synthetic oligonucleotide
guagcggcugcacaaugag

SEQ ID NO: 2199449 - RNA, 19 nt, Artificial Sequence
  Description of Artificial Sequence: Synthetic oligonucleotide
caacaguggcuguaagugc

SEQ ID NO: 2199450 - RNA, 19 nt, Artificial Sequence
  Description of Artificial Sequence: Synthetic oligonucleotide
ugcugacugacgaagucau

SEQ ID NO: 2199451 - RNA, 19 nt, Artificial Sequence
  Description of Artificial Sequence: Synthetic oligonucleotide
uuguccguggaauuuugaa

SEQ ID NO: 2199452 - RNA, 19 nt, Artificial Sequence
  Description of Artificial Sequence: Synthetic oligonucleotide
auaugugaagccacccagg

SEQ ID NO: 2199453 - RNA, 19 nt, Artificial Sequence
  Description of Artificial Sequence: Synthetic oligonucleotide
ugaaagcgcagguagccau

SEQ ID NO: 2199454 - RNA, 19 nt, Artificial Sequence
  Description of Artificial Sequence: Synthetic oligonucleotide
cuguaagugcuugaccagg

SEQ ID NO: 2199455 - RNA, 19 nt, Artificial Sequence
  Description of Artificial Sequence: Synthetic oligonucleotide
uuggugucgcacagagggg

SEQ ID NO: 2199456 - RNA, 19 nt, Artificial Sequence
  Description of Artificial Sequence: Synthetic oligonucleotide
uccugaagauacugcaagu

SEQ ID NO: 2199457 - RNA, 19 nt, Artificial Sequence
  Description of Artificial Sequence: Synthetic oligonucleotide
uccguggaauuuugaagug

SEQ ID NO: 2199458 - RNA, 19 nt, Artificial Sequence
  Description of Artificial Sequence: Synthetic oligonucleotide
ggcuguaagugcuugacca

SEQ ID NO: 2199459 - RNA, 19 nt, Artificial Sequence
  Description of Artificial Sequence: Synthetic oligonucleotide
uaggugauacucauuucuu

SEQ ID NO: 2199460 - RNA, 19 nt, Artificial Sequence
  Description of Artificial Sequence: Synthetic oligonucleotide
ccguauguggccaacagug

SEQ ID NO: 2199461 - RNA, 19 nt, Artificial Sequence
  Description of Artificial Sequence: Synthetic oligonucleotide
caggggauauugcggaggg

SEQ ID NO: 2199462 - RNA, 19 nt, Artificial Sequence
  Description of Artificial Sequence: Synthetic oligonucleotide
guaccaggggauauugcgg

SEQ ID NO: 2199463 - RNA, 19 nt, Artificial Sequence
  Description of Artificial Sequence: Synthetic oligonucleotide
uggcuguaagugcuugacc

SEQ ID NO: 2199464 - RNA, 19 nt, Artificial Sequence
  Description of Artificial Sequence: Synthetic oligonucleotide
ggcuugggaaguuccagcg

SEQ ID NO: 2199465 - RNA, 19 nt, Artificial Sequence
  Description of Artificial Sequence: Synthetic oligonucleotide
cagcaauggaccagauggg

SEQ ID NO: 2199466 - RNA, 19 nt, Artificial Sequence
  Description of Artificial Sequence: Synthetic oligonucleotide
aaacgauaguaagggcuug

SEQ ID NO: 2199467 - RNA, 19 nt, Artificial Sequence
  Description of Artificial Sequence: Synthetic oligonucleotide
ggauccauagugaaagcgc

SEQ ID NO: 2199468 - RNA, 19 nt, Artificial Sequence
  Description of Artificial Sequence: Synthetic oligonucleotide
cugacugacgaagucauca

SEQ ID NO: 2199469 - RNA, 19 nt, Artificial Sequence
  Description of Artificial Sequence: Synthetic oligonucleotide
caccaaaauguagucuucc

SEQ ID NO: 2199470 - RNA, 19 nt, Artificial Sequence
  Description of Artificial Sequence: Synthetic oligonucleotide
uuggagcuuaucuccacau

SEQ ID NO: 2199471 - RNA, 19 nt, Artificial Sequence
  Description of Artificial Sequence: Synthetic oligonucleotide
acucccaugucucggggca

SEQ ID NO: 2199472 - RNA, 19 nt, Artificial Sequence
  Description of Artificial Sequence: Synthetic oligonucleotide
auuuugaagugcaaacgau

SEQ ID NO: 2199473 - RNA, 19 nt, Artificial Sequence
  Description of Artificial Sequence: Synthetic oligonucleotide
aggagcgggagugacauga

SEQ ID NO: 2199474 - RNA, 19 nt, Artificial Sequence
  Description of Artificial Sequence: Synthetic oligonucleotide
uugcguuggugucgcacag

SEQ ID NO: 2199475 - RNA, 19 nt, Artificial Sequence
  Description of Artificial Sequence: Synthetic oligonucleotide
aaucucagggugggaguag

SEQ ID NO: 2199476 - RNA, 19 nt, Artificial Sequence
  Description of Artificial Sequence: Synthetic oligonucleotide
gagcuuaucuccacauaug

SEQ ID NO: 2199477 - RNA, 19 nt, Artificial Sequence
  Description of Artificial Sequence: Synthetic oligonucleotide
uguguuuguccguggaauu

SEQ ID NO: 2199478 - RNA, 19 nt, Artificial Sequence
  Description of Artificial Sequence: Synthetic oligonucleotide
uauugcggagggcacgguc

SEQ ID NO: 2199479 - RNA, 19 nt, Artificial Sequence
  Description of Artificial Sequence: Synthetic oligonucleotide
cacgguguccagcaugaag

SEQ ID NO: 2199480 - RNA, 19 nt, Artificial Sequence
  Description of Artificial Sequence: Synthetic oligonucleotide
cauaggugauacucauuuc

SEQ ID NO: 2199481 - RNA, 19 nt, Artificial Sequence
  Description of Artificial Sequence: Synthetic oligonucleotide
cacauaugugaagccaccc

SEQ ID NO: 2199482 - RNA, 19 nt, Artificial Sequence
  Description of Artificial Sequence: Synthetic oligonucleotide
aagcgcagguagccauugg

SEQ ID NO: 2199483 - RNA, 19 nt, Artificial Sequence
  Description of Artificial Sequence: Synthetic oligonucleotide
uugccggccccacucagca

SEQ ID NO: 2199484 - RNA, 19 nt, Artificial Sequence
  Description of Artificial Sequence: Synthetic oligonucleotide
gagucgucuagggaggcug

SEQ ID NO: 2199485 - RNA, 19 nt, Artificial Sequence
  Description of Artificial Sequence: Synthetic oligonucleotide
aggcccagcaguaccgucc

SEQ ID NO: 2199486 - RNA, 19 nt, Artificial Sequence
  Description of Artificial Sequence: Synthetic oligonucleotide
uccucggauccauagugaa

SEQ ID NO: 2199487 - RNA, 19 nt, Artificial Sequence
  Description of Artificial Sequence: Synthetic oligonucleotide
agucagcacccauaaucug

SEQ ID NO: 2199488 - RNA, 19 nt, Artificial Sequence
  Description of Artificial Sequence: Synthetic oligonucleotide
caucacgguguccagcaug

SEQ ID NO: 2199489 - RNA, 19 nt, Artificial Sequence
  Description of Artificial Sequence: Synthetic oligonucleotide
ugagccaggacagcugacu

SEQ ID NO: 2199490 - RNA, 19 nt, Artificial Sequence
  Description of Artificial Sequence: Synthetic oligonucleotide
cguaccaggggauauugcg

SEQ ID NO: 2199491 - RNA, 19 nt, Artificial Sequence
  Description of Artificial Sequence: Synthetic oligonucleotide
agaaguugucucccaggga

SEQ ID NO: 2199492 - RNA, 19 nt, Artificial Sequence
  Description of Artificial Sequence: Synthetic oligonucleotide
ccguguucagcaauggacc

SEQ ID NO: 2199493 - RNA, 19 nt, Artificial Sequence
  Description of Artificial Sequence: Synthetic oligonucleotide
ggucagagaacacauccuc

SEQ ID NO: 2199494 - RNA, 19 nt, Artificial Sequence
  Description of Artificial Sequence: Synthetic oligonucleotide
gacugacgaagucaucaga

SEQ ID NO: 2199495 - RNA, 19 nt, Artificial Sequence
  Description of Artificial Sequence: Synthetic oligonucleotide
uggcgauuucuuuagcauu

SEQ ID NO: 2199496 - RNA, 19 nt, Artificial Sequence
  Description of Artificial Sequence: Synthetic oligonucleotide
gaugaagucagcacccaua

SEQ ID NO: 2199497 - RNA, 19 nt, Artificial Sequence
  Description of Artificial Sequence: Synthetic oligonucleotide
gcacaaugagccaggagcg

SEQ ID NO: 2199498 - RNA, 19 nt, Artificial Sequence
  Description of Artificial Sequence: Synthetic oligonucleotide
cacguagcccacuccauuc

SEQ ID NO: 2199499 - RNA, 19 nt, Artificial Sequence
  Description of Artificial Sequence: Synthetic oligonucleotide
cucagggugggaguagcgg

SEQ ID NO: 2199500 - RNA, 19 nt, Artificial Sequence
  Description of Artificial Sequence: Synthetic oligonucleotide
ccaacaguggcuguaagug

SEQ ID NO: 2199501 - RNA, 19 nt, Artificial Sequence
  Description of Artificial Sequence: Synthetic oligonucleotide
aggugauacucauuucuuu

SEQ ID NO: 2199502 - RNA, 19 nt, Artificial Sequence
  Description of Artificial Sequence: Synthetic oligonucleotide
ggaguccucggauccauag

SEQ ID NO: 2199503 - RNA, 19 nt, Artificial Sequence
  Description of Artificial Sequence: Synthetic oligonucleotide
guaguggccagccaccaaa

SEQ ID NO: 2199504 - RNA, 19 nt, Artificial Sequence
  Description of Artificial Sequence: Synthetic oligonucleotide
ggcgauuucuuuagcauug

SEQ ID NO: 2199505 - RNA, 19 nt, Artificial Sequence
  Description of Artificial Sequence: Synthetic oligonucleotide
ucggauccauagugaaagc

SEQ ID NO: 2199506 - RNA, 19 nt, Artificial Sequence
  Description of Artificial Sequence: Synthetic oligonucleotide
agcaguaccguccgugcau

SEQ ID NO: 2199507 - RNA, 19 nt, Artificial Sequence
  Description of Artificial Sequence: Synthetic oligonucleotide
uggugucgcacagaggggu

SEQ ID NO: 2199508 - RNA, 19 nt, Artificial Sequence
  Description of Artificial Sequence: Synthetic oligonucleotide
cuugcguuggugucgcaca

SEQ ID NO: 2199509 - RNA, 19 nt, Artificial Sequence
  Description of Artificial Sequence: Synthetic oligonucleotide
acagcugacuucgggccac

SEQ ID NO: 2199510 - RNA, 19 nt, Artificial Sequence
  Description of Artificial Sequence: Synthetic oligonucleotide
gucaucagaguugccacac

SEQ ID NO: 2199511 - RNA, 19 nt, Artificial Sequence
  Description of Artificial Sequence: Synthetic oligonucleotide
ucuagggaggcuggucuug

SEQ ID NO: 2199512 - RNA, 19 nt, Artificial Sequence
  Description of Artificial Sequence: Synthetic oligonucleotide
uaggcaauuugugcugaga

SEQ ID NO: 2199513 - RNA, 19 nt, Artificial Sequence
  Description of Artificial Sequence: Synthetic oligonucleotide
auacugcaaguugugguca

SEQ ID NO: 2199514 - RNA, 19 nt, Artificial Sequence
  Description of Artificial Sequence: Synthetic oligonucleotide
gaagauggccacaguugug

SEQ ID NO: 2199515 - RNA, 19 nt, Artificial Sequence
  Description of Artificial Sequence: Synthetic oligonucleotide
ggaaccucuugucuuuggc

SEQ ID NO: 2199516 - RNA, 19 nt, Artificial Sequence
  Description of Artificial Sequence: Synthetic oligonucleotide
uucuggcgauuucuuuagc

SEQ ID NO: 2199517 - RNA, 19 nt, Artificial Sequence
  Description of Artificial Sequence: Synthetic oligonucleotide
aggcuggucuugaagagug

SEQ ID NO: 2199518 - RNA, 19 nt, Artificial Sequence
  Description of Artificial Sequence: Synthetic oligonucleotide
caucaugcacuccagugaa

SEQ ID NO: 2199519 - RNA, 19 nt, Artificial Sequence
  Description of Artificial Sequence: Synthetic oligonucleotide
uguuuguccguggaauuuu

SEQ ID NO: 2199520 - RNA, 19 nt, Artificial Sequence
  Description of Artificial Sequence: Synthetic oligonucleotide
caugauuugcaggcccagc

SEQ ID NO: 2199521 - RNA, 19 nt, Artificial Sequence
  Description of Artificial Sequence: Synthetic oligonucleotide
auuuugggcugcugacuga

SEQ ID NO: 2199522 - RNA, 19 nt, Artificial Sequence
  Description of Artificial Sequence: Synthetic oligonucleotide
guaggcaauuugugcugag

SEQ ID NO: 2199523 - RNA, 19 nt, Artificial Sequence
  Description of Artificial Sequence: Synthetic oligonucleotide
gaguagcggcugcacaaug

SEQ ID NO: 2199524 - RNA, 19 nt, Artificial Sequence
  Description of Artificial Sequence: Synthetic oligonucleotide
cacuccauucucauccuga

SEQ ID NO: 2199525 - RNA, 19 nt, Artificial Sequence
  Description of Artificial Sequence: Synthetic oligonucleotide
agaucuuggaguaggcaau

SEQ ID NO: 2199526 - RNA, 19 nt, Artificial Sequence
  Description of Artificial Sequence: Synthetic oligonucleotide
ugcaaguuguggucauguc

SEQ ID NO: 2199527 - RNA, 19 nt, Artificial Sequence
  Description of Artificial Sequence: Synthetic oligonucleotide
uggagcuuaucuccacaua

SEQ ID NO: 2199528 - RNA, 19 nt, Artificial Sequence
  Description of Artificial Sequence: Synthetic oligonucleotide
aguugccacacagcaucac

SEQ ID NO: 2199529 - RNA, 19 nt, Artificial Sequence
  Description of Artificial Sequence: Synthetic oligonucleotide
gacaugauuugcaggccca

SEQ ID NO: 2199530 - RNA, 19 nt, Artificial Sequence
  Description of Artificial Sequence: Synthetic oligonucleotide
guccgugcauccauccugg

SEQ ID NO: 2199531 - RNA, 19 nt, Artificial Sequence
  Description of Artificial Sequence: Synthetic oligonucleotide
gcuguaagugcuugaccag

SEQ ID NO: 2199532 - RNA, 19 nt, Artificial Sequence
  Description of Artificial Sequence: Synthetic oligonucleotide
aaguugccggccccacuca

SEQ ID NO: 2199533 - RNA, 19 nt, Artificial Sequence
  Description of Artificial Sequence: Synthetic oligonucleotide
aguaggcaauuugugcuga

SEQ ID NO: 2199534 - RNA, 19 nt, Artificial Sequence
  Description of Artificial Sequence: Synthetic oligonucleotide
caauggaccagauggggua

SEQ ID NO: 2199535 - RNA, 19 nt, Artificial Sequence
  Description of Artificial Sequence: Synthetic oligonucleotide
auugcggagggcacgguca

SEQ ID NO: 2199536 - RNA, 19 nt, Artificial Sequence
  Description of Artificial Sequence: Synthetic oligonucleotide
cccauaaucugcacgguuc

SEQ ID NO: 2199537 - RNA, 19 nt, Artificial Sequence
  Description of Artificial Sequence: Synthetic oligonucleotide
cacaaugagccaggagcgg

SEQ ID NO: 2199538 - RNA, 19 nt, Artificial Sequence
  Description of Artificial Sequence: Synthetic oligonucleotide
gcuuccacauaggugauac

SEQ ID NO: 2199539 - RNA, 19 nt, Artificial Sequence
  Description of Artificial Sequence: Synthetic oligonucleotide
ugggaaguuccagcgcuug

SEQ ID NO: 2199540 - RNA, 19 nt, Artificial Sequence
  Description of Artificial Sequence: Synthetic oligonucleotide
ggauauugcggagggcacg

SEQ ID NO: 2199541 - RNA, 19 nt, Artificial Sequence
  Description of Artificial Sequence: Synthetic oligonucleotide
ggcauuuugggcugcugac

SEQ ID NO: 2199542 - RNA, 19 nt, Artificial Sequence
  Description of Artificial Sequence: Synthetic oligonucleotide
cugagacauugccaaggug

SEQ ID NO: 2199543 - RNA, 19 nt, Artificial Sequence
  Description of Artificial Sequence: Synthetic oligonucleotide
cauuggggaccuugcguug

SEQ ID NO: 2199544 - RNA, 19 nt, Artificial Sequence
  Description of Artificial Sequence: Synthetic oligonucleotide
aaguugucucccagggaca

SEQ ID NO: 2199545 - RNA, 19 nt, Artificial Sequence
  Description of Artificial Sequence: Synthetic oligonucleotide
cuugggaaguuccagcgcu

SEQ ID NO: 2199546 - RNA, 19 nt, Artificial Sequence
  Description of Artificial Sequence: Synthetic oligonucleotide
agggcuugggaaguuccag

SEQ ID NO: 2199547 - RNA, 19 nt, Artificial Sequence
  Description of Artificial Sequence: Synthetic oligonucleotide
caguuguguuuguccgugg

SEQ ID NO: 2199548 - RNA, 19 nt, Artificial Sequence
  Description of Artificial Sequence: Synthetic oligonucleotide
gggaggcuggucuugaaga

SEQ ID NO: 2199549 - RNA, 19 nt, Artificial Sequence
  Description of Artificial Sequence: Synthetic oligonucleotide
agcgggagugacaugauuu

SEQ ID NO: 2199550 - RNA, 19 nt, Artificial Sequence
  Description of Artificial Sequence: Synthetic oligonucleotide
ggcaauuugugcugagaca

SEQ ID NO: 2199551 - RNA, 19 nt, Artificial Sequence
  Description of Artificial Sequence: Synthetic oligonucleotide
gcaucaugcacuccaguga

SEQ ID NO: 2199552 - RNA, 19 nt, Artificial Sequence
  Description of Artificial Sequence: Synthetic oligonucleotide
guguucagcaauggaccag

SEQ ID NO: 2199553 - RNA, 19 nt, Artificial Sequence
  Description of Artificial Sequence: Synthetic oligonucleotide
ugacuucgggccacuccca

SEQ ID NO: 2199554 - RNA, 19 nt, Artificial Sequence
  Description of Artificial Sequence: Synthetic oligonucleotide
ggggauauugcggagggca

SEQ ID NO: 2199555 - RNA, 19 nt, Artificial Sequence
  Description of Artificial Sequence: Synthetic oligonucleotide
acguagcccacuccauucu

SEQ ID NO: 2199556 - RNA, 19 nt, Artificial Sequence
  Description of Artificial Sequence: Synthetic oligonucleotide
guggcuguaagugcuugac

SEQ ID NO: 2199557 - RNA, 19 nt, Artificial Sequence
  Description of Artificial Sequence: Synthetic oligonucleotide
acguaccaggggauauugc

SEQ ID NO: 2199558 - RNA, 19 nt, Artificial Sequence
  Description of Artificial Sequence: Synthetic oligonucleotide
ugguucccagccagcacgu

SEQ ID NO: 2199559 - RNA, 19 nt, Artificial Sequence
  Description of Artificial Sequence: Synthetic oligonucleotide
cacguaccaggggauauug

SEQ ID NO: 2199560 - RNA, 19 nt, Artificial Sequence
  Description of Artificial Sequence: Synthetic oligonucleotide
acccauaaucugcacgguu

SEQ ID NO: 2199561 - RNA, 19 nt, Artificial Sequence
  Description of Artificial Sequence: Synthetic oligonucleotide
cucagcacguagcccacuc

SEQ ID NO: 2199562 - RNA, 19 nt, Artificial Sequence
  Description of Artificial Sequence: Synthetic oligonucleotide
cacucccaugucucggggc

SEQ ID NO: 2199563 - RNA, 19 nt, Artificial Sequence
  Description of Artificial Sequence: Synthetic oligonucleotide
gcaaacgauaguaagggcu

SEQ ID NO: 2199564 - RNA, 19 nt, Artificial Sequence
  Description of Artificial Sequence: Synthetic oligonucleotide
uacugcaaguuguggucau

SEQ ID NO: 2199565 - RNA, 19 nt, Artificial Sequence
  Description of Artificial Sequence: Synthetic oligonucleotide
caaacgauaguaagggcuu

SEQ ID NO: 2199566 - RNA, 19 nt, Artificial Sequence
  Description of Artificial Sequence: Synthetic oligonucleotide
acuucgggccacucccaug

SEQ ID NO: 2199567 - RNA, 19 nt, Artificial Sequence
  Description of Artificial Sequence: Synthetic oligonucleotide
uuccagcgcuuggagaucu

SEQ ID NO: 2199568 - RNA, 19 nt, Artificial Sequence
  Description of Artificial Sequence: Synthetic oligonucleotide
ggagcuuaucuccacauau

SEQ ID NO: 2199569 - RNA, 19 nt, Artificial Sequence
  Description of Artificial Sequence: Synthetic oligonucleotide
gccggccccacucagcacg

SEQ ID NO: 2199570 - RNA, 19 nt, Artificial Sequence
  Description of Artificial Sequence: Synthetic oligonucleotide
cugcacaaugagccaggag

SEQ ID NO: 2199571 - RNA, 19 nt, Artificial Sequence
  Description of Artificial Sequence: Synthetic oligonucleotide
gaccuugcguuggugucgc

SEQ ID NO: 2199572 - RNA, 19 nt, Artificial Sequence
  Description of Artificial Sequence: Synthetic oligonucleotide
aggggauauugcggagggc

SEQ ID NO: 2199573 - RNA, 19 nt, Artificial Sequence
  Description of Artificial Sequence: Synthetic oligonucleotide
uggguccguguucagcaau

SEQ ID NO: 2199574 - RNA, 19 nt, Artificial Sequence
  Description of Artificial Sequence: Synthetic oligonucleotide
cauaaucugcacgguucug

SEQ ID NO: 2199575 - RNA, 19 nt, Artificial Sequence
  Description of Artificial Sequence: Synthetic oligonucleotide
augaugaagucagcaccca

SEQ ID NO: 2199576 - RNA, 19 nt, Artificial Sequence
  Description of Artificial Sequence: Synthetic oligonucleotide
cucggggcauuuugggcug

SEQ ID NO: 2199577 - RNA, 19 nt, Artificial Sequence
  Description of Artificial Sequence: Synthetic oligonucleotide
uggaccagaugggguagug

SEQ ID NO: 2199578 - RNA, 19 nt, Artificial Sequence
  Description of Artificial Sequence: Synthetic oligonucleotide
agucgucuagggaggcugg

SEQ ID NO: 2199579 - RNA, 19 nt, Artificial Sequence
  Description of Artificial Sequence: Synthetic oligonucleotide
agccagcacguaccagggg

SEQ ID NO: 2199580 - RNA, 19 nt, Artificial Sequence
  Description of Artificial Sequence: Synthetic oligonucleotide
aggcagugaccccguaugu

SEQ ID NO: 2199581 - RNA, 19 nt, Artificial Sequence
  Description of Artificial Sequence: Synthetic oligonucleotide
caaugagccaggagcggga

SEQ ID NO: 2199582 - RNA, 19 nt, Artificial Sequence
  Description of Artificial Sequence: Synthetic oligonucleotide
gcgggagugacaugauuug

SEQ ID NO: 2199583 - RNA, 19 nt, Artificial Sequence
  Description of Artificial Sequence: Synthetic oligonucleotide
ggaccuugcguuggugucg

SEQ ID NO: 2199584 - RNA, 19 nt, Artificial Sequence
  Description of Artificial Sequence: Synthetic oligonucleotide
gcaauuugugcugagacau

SEQ ID NO: 2199585 - RNA, 19 nt, Artificial Sequence
  Description of Artificial Sequence: Synthetic oligonucleotide
aguaccguccgugcaucca

SEQ ID NO: 2199586 - RNA, 19 nt, Artificial Sequence
  Description of Artificial Sequence: Synthetic oligonucleotide
cagcacguagcccacucca

SEQ ID NO: 2199587 - RNA, 19 nt, Artificial Sequence
  Description of Artificial Sequence: Synthetic oligonucleotide
gagggcacggucagagaac

SEQ ID NO: 2199588 - RNA, 19 nt, Artificial Sequence
  Description of Artificial Sequence: Synthetic oligonucleotide
gccagcacguaccagggga

SEQ ID NO: 2199589 - RNA, 19 nt, Artificial Sequence
  Description of Artificial Sequence: Synthetic oligonucleotide
gcugacuucgggccacucc

SEQ ID NO: 2199590 - RNA, 19 nt, Artificial Sequence
  Description of Artificial Sequence: Synthetic oligonucleotide
gggcuugggaaguuccagc

SEQ ID NO: 2199591 - RNA, 19 nt, Artificial Sequence
  Description of Artificial Sequence: Synthetic oligonucleotide
uuggggaccuugcguuggu

SEQ ID NO: 2199592 - RNA, 19 nt, Artificial Sequence
  Description of Artificial Sequence: Synthetic oligonucleotide
gcgcuuggagaucuuggag

SEQ ID NO: 2199593 - RNA, 19 nt, Artificial Sequence
  Description of Artificial Sequence: Synthetic oligonucleotide
cacggucagagaacacauc

SEQ ID NO: 2199594 - RNA, 19 nt, Artificial Sequence
  Description of Artificial Sequence: Synthetic oligonucleotide
gggagugacaugauuugca

SEQ ID NO: 2199595 - RNA, 19 nt, Artificial Sequence
  Description of Artificial Sequence: Synthetic oligonucleotide
cguauguggccaacagugg

SEQ ID NO: 2199596 - RNA, 19 nt, Artificial Sequence
  Description of Artificial Sequence: Synthetic oligonucleotide
cugcugacugacgaaguca

SEQ ID NO: 2199597 - RNA, 19 nt, Artificial Sequence
  Description of Artificial Sequence: Synthetic oligonucleotide
uguggccaacaguggcugu

SEQ ID NO: 2199598 - RNA, 19 nt, Artificial Sequence
  Description of Artificial Sequence: Synthetic oligonucleotide
gcgcagguagccauugggg

SEQ ID NO: 2199599 - RNA, 19 nt, Artificial Sequence
  Description of Artificial Sequence: Synthetic oligonucleotide
ggcacggucagagaacaca

SEQ ID NO: 2199600 - RNA, 19 nt, Artificial Sequence
  Description of Artificial Sequence: Synthetic oligonucleotide
ggcauuggggaccccuccc

SEQ ID NO: 2199601 - RNA, 19 nt, Artificial Sequence
  Description of Artificial Sequence: Synthetic oligonucleotide
ugagucgucuagggaggcu

SEQ ID NO: 2199602 - RNA, 19 nt, Artificial Sequence
  Description of Artificial Sequence: Synthetic oligonucleotide
gcuugggaaguuccagcgc

SEQ ID NO: 2199603 - RNA, 19 nt, Artificial Sequence
  Description of Artificial Sequence: Synthetic oligonucleotide
ggaccagaugggguagugg

SEQ ID NO: 2199604 - RNA, 19 nt, Artificial Sequence
  Description of Artificial Sequence: Synthetic oligonucleotide
ccagcaguaccguccgugc

SEQ ID NO: 2199605 - RNA, 19 nt, Artificial Sequence
  Description of Artificial Sequence: Synthetic oligonucleotide
auuugcaggcccagcagua

SEQ ID NO: 2199606 - RNA, 19 nt, Artificial Sequence
  Description of Artificial Sequence: Synthetic oligonucleotide
agcacguaccaggggauau

SEQ ID NO: 2199607 - RNA, 19 nt, Artificial Sequence
  Description of Artificial Sequence: Synthetic oligonucleotide
cguggaauuuugaagugca

SEQ ID NO: 2199608 - RNA, 19 nt, Artificial Sequence
  Description of Artificial Sequence: Synthetic oligonucleotide
ugcacgguucuggcgauuu

SEQ ID NO: 2199609 - RNA, 19 nt, Artificial Sequence
  Description of Artificial Sequence: Synthetic oligonucleotide
gguccguguucagcaaugg

SEQ ID NO: 2199610 - RNA, 19 nt, Artificial Sequence
  Description of Artificial Sequence: Synthetic oligonucleotide
gcuuggagaucuuggagua

SEQ ID NO: 2199611 - RNA, 19 nt, Artificial Sequence
  Description of Artificial Sequence: Synthetic oligonucleotide
cuggcgauuucuuuagcau

SEQ ID NO: 2199612 - RNA, 19 nt, Artificial Sequence
  Description of Artificial Sequence: Synthetic oligonucleotide
caguaccguccgugcaucc

SEQ ID NO: 2199613 - RNA, 19 nt, Artificial Sequence
  Description of Artificial Sequence: Synthetic oligonucleotide
cugagucgucuagggaggc

SEQ ID NO: 2199614 - RNA, 19 nt, Artificial Sequence
  Description of Artificial Sequence: Synthetic oligonucleotide
guccguguucagcaaugga

SEQ ID NO: 2199615 - RNA, 19 nt, Artificial Sequence
  Description of Artificial Sequence: Synthetic oligonucleotide
cggauccauagugaaagcg

SEQ ID NO: 2199616 - RNA, 19 nt, Artificial Sequence
  Description of Artificial Sequence: Synthetic oligonucleotide
gucaugguucccagccagc

SEQ ID NO: 2199617 - RNA, 19 nt, Artificial Sequence
  Description of Artificial Sequence: Synthetic oligonucleotide
cugacgaagucaucagagu

SEQ ID NO: 2199618 - RNA, 19 nt, Artificial Sequence
  Description of Artificial Sequence: Synthetic oligonucleotide
uaccguccgugcauccauc

SEQ ID NO: 2199619 - RNA, 19 nt, Artificial Sequence
  Description of Artificial Sequence: Synthetic oligonucleotide
gguggucaugguucccagc

SEQ ID NO: 2199620 - RNA, 19 nt, Artificial Sequence
  Description of Artificial Sequence: Synthetic oligonucleotide
ucgcacagagggguccaug

SEQ ID NO: 2199621 - RNA, 19 nt, Artificial Sequence
  Description of Artificial Sequence: Synthetic oligonucleotide
gugucgcacagaggggucc

SEQ ID NO: 2199622 - RNA, 19 nt, Artificial Sequence
  Description of Artificial Sequence: Synthetic oligonucleotide
ucgucuagggaggcugguc

SEQ ID NO: 2199623 - RNA, 19 nt, Artificial Sequence
  Description of Artificial Sequence: Synthetic oligonucleotide
agggguccaugaaguugcc

SEQ ID NO: 2199624 - RNA, 19 nt, Artificial Sequence
  Description of Artificial Sequence: Synthetic oligonucleotide
caugaaguugccggcccca

SEQ ID NO: 2199625 - RNA, 19 nt, Artificial Sequence
  Description of Artificial Sequence: Synthetic oligonucleotide
caguggcuguaagugcuug

SEQ ID NO: 2199626 - RNA, 19 nt, Artificial Sequence
  Description of Artificial Sequence: Synthetic oligonucleotide
gaguccucggauccauagu

SEQ ID NO: 2199627 - RNA, 19 nt, Artificial Sequence
  Description of Artificial Sequence: Synthetic oligonucleotide
gggaccuugcguugguguc

SEQ ID NO: 2199628 - RNA, 19 nt, Artificial Sequence
  Description of Artificial Sequence: Synthetic oligonucleotide
cauuggggaccccucccca

SEQ ID NO: 2199629 - RNA, 19 nt, Artificial Sequence
  Description of Artificial Sequence: Synthetic oligonucleotide
ggcagugaccccguaugug

SEQ ID NO: 2199630 - RNA, 19 nt, Artificial Sequence
  Description of Artificial Sequence: Synthetic oligonucleotide
ccguggaauuuugaagugc

SEQ ID NO: 2199631 - RNA, 19 nt, Artificial Sequence
  Description of Artificial Sequence: Synthetic oligonucleotide
guugccggccccacucagc

SEQ ID NO: 2199632 - RNA, 19 nt, Artificial Sequence
  Description of Artificial Sequence: Synthetic oligonucleotide
caugcacuccagugaagua

SEQ ID NO: 2199633 - RNA, 19 nt, Artificial Sequence
  Description of Artificial Sequence: Synthetic oligonucleotide
ggucugagucgucuaggga

SEQ ID NO: 2199634 - RNA, 19 nt, Artificial Sequence
  Description of Artificial Sequence: Synthetic oligonucleotide
gcggagggcacggucagag

SEQ ID NO: 2199635 - RNA, 19 nt, Artificial Sequence
  Description of Artificial Sequence: Synthetic oligonucleotide
aguaagggcuugggaaguu

SEQ ID NO: 2199636 - RNA, 19 nt, Artificial Sequence
  Description of Artificial Sequence: Synthetic oligonucleotide
uucccgggcuguguggaau

SEQ ID NO: 2199637 - RNA, 19 nt, Artificial Sequence
  Description of Artificial Sequence: Synthetic oligonucleotide
guccucggauccauaguga

SEQ ID NO: 2199638 - RNA, 19 nt, Artificial Sequence
  Description of Artificial Sequence: Synthetic oligonucleotide
cauucucauccugaagaua

SEQ ID NO: 2199639 - RNA, 19 nt, Artificial Sequence
  Description of Artificial Sequence: Synthetic oligonucleotide
guggaauuuugaagugcaa

SEQ ID NO: 2199640 - RNA, 19 nt, Artificial Sequence
  Description of Artificial Sequence: Synthetic oligonucleotide
ccccacucagcacguagcc

SEQ ID NO: 2199641 - RNA, 19 nt, Artificial Sequence
  Description of Artificial Sequence: Synthetic oligonucleotide
uggggaccuugcguuggug

SEQ ID NO: 2199642 - RNA, 19 nt, Artificial Sequence
  Description of Artificial Sequence: Synthetic oligonucleotide
ccaugaaguugccggcccc

SEQ ID NO: 2199643 - RNA, 19 nt, Artificial Sequence
  Description of Artificial Sequence: Synthetic oligonucleotide
ugaccccguauguggccaa

SEQ ID NO: 2199644 - RNA, 19 nt, Artificial Sequence
  Description of Artificial Sequence: Synthetic oligonucleotide
guugucucccagggacaug

SEQ ID NO: 2199645 - RNA, 19 nt, Artificial Sequence
  Description of Artificial Sequence: Synthetic oligonucleotide
gggauauugcggagggcac

SEQ ID NO: 2199646 - RNA, 19 nt, Artificial Sequence
  Description of Artificial Sequence: Synthetic oligonucleotide
ggccacucccaugucucgg

SEQ ID NO: 2199647 - RNA, 19 nt, Artificial Sequence
  Description of Artificial Sequence: Synthetic oligonucleotide
cagcacccauaaucugcac

SEQ ID NO: 2199648 - RNA, 19 nt, Artificial Sequence
  Description of Artificial Sequence: Synthetic oligonucleotide
cuagggaggcuggucuuga

SEQ ID NO: 2199649 - RNA, 19 nt, Artificial Sequence
  Description of Artificial Sequence: Synthetic oligonucleotide
gugggaguagcggcugcac

SEQ ID NO: 2199650 - RNA, 19 nt, Artificial Sequence
  Description of Artificial Sequence: Synthetic oligonucleotide
cguccgugcauccauccug

SEQ ID NO: 2199651 - RNA, 19 nt, Artificial Sequence
  Description of Artificial Sequence: Synthetic oligonucleotide
guaggcagugaccccguau

SEQ ID NO: 2199652 - RNA, 19 nt, Artificial Sequence
  Description of Artificial Sequence: Synthetic oligonucleotide
ccccguauguggccaacag

SEQ ID NO: 2199653 - RNA, 19 nt, Artificial Sequence
  Description of Artificial Sequence: Synthetic oligonucleotide
gggguccaugaaguugccg

SEQ ID NO: 2199654 - RNA, 19 nt, Artificial Sequence
  Description of Artificial Sequence: Synthetic oligonucleotide
cuccagugaaguagaaguu

SEQ ID NO: 2199655 - RNA, 19 nt, Artificial Sequence
  Description of Artificial Sequence: Synthetic oligonucleotide
gggaccccuccccagucac

SEQ ID NO: 2199656 - RNA, 19 nt, Artificial Sequence
  Description of Artificial Sequence: Synthetic oligonucleotide
guaccguccgugcauccau

SEQ ID NO: 2199657 - RNA, 19 nt, Artificial Sequence
  Description of Artificial Sequence: Synthetic oligonucleotide
uggccacaguuguguuugu

SEQ ID NO: 2199658 - RNA, 19 nt, Artificial Sequence
  Description of Artificial Sequence: Synthetic oligonucleotide
agcacguagcccacuccau

SEQ ID NO: 2199659 - RNA, 19 nt, Artificial Sequence
  Description of Artificial Sequence: Synthetic oligonucleotide
auauugcggagggcacggu

SEQ ID NO: 2199660 - RNA, 19 nt, Artificial Sequence
  Description of Artificial Sequence: Synthetic oligonucleotide
cacgguucuggcgauuucu

SEQ ID NO: 2199661 - RNA, 19 nt, Artificial Sequence
  Description of Artificial Sequence: Synthetic oligonucleotide
gccaacaguggcuguaagu

SEQ ID NO: 2199662 - RNA, 19 nt, Artificial Sequence
  Description of Artificial Sequence: Synthetic oligonucleotide
ccuugcguuggugucgcac

SEQ ID NO: 2199663 - RNA, 19 nt, Artificial Sequence
  Description of Artificial Sequence: Synthetic oligonucleotide
accccguauguggccaaca

SEQ ID NO: 2199664 - RNA, 19 nt, Artificial Sequence
  Description of Artificial Sequence: Synthetic oligonucleotide
ucggggcauuuugggcugc

SEQ ID NO: 2199665 - RNA, 19 nt, Artificial Sequence
  Description of Artificial Sequence: Synthetic oligonucleotide
cuggucuugaagagugauu

SEQ ID NO: 2199666 - RNA, 19 nt, Artificial Sequence
  Description of Artificial Sequence: Synthetic oligonucleotide
gaccccguauguggccaac

SEQ ID NO: 2199667 - RNA, 19 nt, Artificial Sequence
  Description of Artificial Sequence: Synthetic oligonucleotide
cacaaaucucaggguggga

SEQ ID NO: 2199668 - RNA, 19 nt, Artificial Sequence
  Description of Artificial Sequence: Synthetic oligonucleotide
cagccacaaaucucagggu

SEQ ID NO: 2199669 - RNA, 19 nt, Artificial Sequence
  Description of Artificial Sequence: Synthetic oligonucleotide
gccccacucagcacguagc

SEQ ID NO: 2199670 - RNA, 19 nt, Artificial Sequence
  Description of Artificial Sequence: Synthetic oligonucleotide
guggguccguguucagcaa

SEQ ID NO: 2199671 - RNA, 19 nt, Artificial Sequence
  Description of Artificial Sequence: Synthetic oligonucleotide
ggggaccuugcguuggugu

SEQ ID NO: 2199672 - RNA, 19 nt, Artificial Sequence
  Description of Artificial Sequence: Synthetic oligonucleotide
cguuggugucgcacagagg

SEQ ID NO: 2199673 - RNA, 19 nt, Artificial Sequence
  Description of Artificial Sequence: Synthetic oligonucleotide
ugcggagggcacggucaga

SEQ ID NO: 2199674 - RNA, 19 nt, Artificial Sequence
  Description of Artificial Sequence: Synthetic oligonucleotide
uccagcgcuuggagaucuu

SEQ ID NO: 2199675 - RNA, 19 nt, Artificial Sequence
  Description of Artificial Sequence: Synthetic oligonucleotide
ccaaaauguagucuuccuu

SEQ ID NO: 2199676 - RNA, 19 nt, Artificial Sequence
  Description of Artificial Sequence: Synthetic oligonucleotide
cgauaguaagggcuuggga

SEQ ID NO: 2199677 - RNA, 19 nt, Artificial Sequence
  Description of Artificial Sequence: Synthetic oligonucleotide
caauuugugcugagacauu

SEQ ID NO: 2199678 - RNA, 19 nt, Artificial Sequence
  Description of Artificial Sequence: Synthetic oligonucleotide
gcaauggaccagauggggu

SEQ ID NO: 2199679 - RNA, 19 nt, Artificial Sequence
  Description of Artificial Sequence: Synthetic oligonucleotide
ugccggccccacucagcac

SEQ ID NO: 2199680 - RNA, 19 nt, Artificial Sequence
  Description of Artificial Sequence: Synthetic oligonucleotide
cacauaggugauacucauu

SEQ ID NO: 2199681 - RNA, 19 nt, Artificial Sequence
  Description of Artificial Sequence: Synthetic oligonucleotide
ccauaaucugcacgguucu

SEQ ID NO: 2199682 - RNA, 19 nt, Artificial Sequence
  Description of Artificial Sequence: Synthetic oligonucleotide
cgggagugacaugauuugc

SEQ ID NO: 2199683 - RNA, 19 nt, Artificial Sequence
  Description of Artificial Sequence: Synthetic oligonucleotide
gagcgggagugacaugauu

SEQ ID NO: 2199684 - RNA, 19 nt, Artificial Sequence
  Description of Artificial Sequence: Synthetic oligonucleotide
ggugggaguagcggcugca

SEQ ID NO: 2199685 - RNA, 19 nt, Artificial Sequence
  Description of Artificial Sequence: Synthetic oligonucleotide
ccacuccauucucauccug

SEQ ID NO: 2199686 - RNA, 19 nt, Artificial Sequence
  Description of Artificial Sequence: Synthetic oligonucleotide
gcaguaccguccgugcauc

SEQ ID NO: 2199687 - RNA, 19 nt, Artificial Sequence
  Description of Artificial Sequence: Synthetic oligonucleotide
gcggcugcacaaugagcca

SEQ ID NO: 2199688 - RNA, 19 nt, Artificial Sequence
  Description of Artificial Sequence: Synthetic oligonucleotide
ccagucacccacagccaca

SEQ ID NO: 2199689 - RNA, 19 nt, Artificial Sequence
  Description of Artificial Sequence: Synthetic oligonucleotide
gcauuuugggcugcugacu

SEQ ID NO: 2199690 - RNA, 19 nt, Artificial Sequence
  Description of Artificial Sequence: Synthetic oligonucleotide
ggugucgcacagagggguc

SEQ ID NO: 2199691 - RNA, 19 nt, Artificial Sequence
  Description of Artificial Sequence: Synthetic oligonucleotide
auggggcauuggggacccc

SEQ ID NO: 2199692 - RNA, 19 nt, Artificial Sequence
  Description of Artificial Sequence: Synthetic oligonucleotide
ccacauaggugauacucau

SEQ ID NO: 2199693 - RNA, 19 nt, Artificial Sequence
  Description of Artificial Sequence: Synthetic oligonucleotide
ccauagugaaagcgcaggu

SEQ ID NO: 2199694 - RNA, 19 nt, Artificial Sequence
  Description of Artificial Sequence: Synthetic oligonucleotide
ccucggauccauagugaaa

SEQ ID NO: 2199695 - RNA, 19 nt, Artificial Sequence
  Description of Artificial Sequence: Synthetic oligonucleotide
gucuagggaggcuggucuu

SEQ ID NO: 2199696 - RNA, 19 nt, Artificial Sequence
  Description of Artificial Sequence: Synthetic oligonucleotide
gcggguggguccguguuca

SEQ ID NO: 2199697 - RNA, 19 nt, Artificial Sequence
  Description of Artificial Sequence: Synthetic oligonucleotide
ggggcauuuugggcugcug

SEQ ID NO: 2199698 - RNA, 19 nt, Artificial Sequence
  Description of Artificial Sequence: Synthetic oligonucleotide
gcugcacaaugagccagga

SEQ ID NO: 2199699 - RNA, 19 nt, Artificial Sequence
  Description of Artificial Sequence: Synthetic oligonucleotide
ggguaguggccagccacca

SEQ ID NO: 2199700 - RNA, 19 nt, Artificial Sequence
  Description of Artificial Sequence: Synthetic oligonucleotide
cuucccgggcuguguggaa

SEQ ID NO: 2199701 - RNA, 19 nt, Artificial Sequence
  Description of Artificial Sequence: Synthetic oligonucleotide
accuugcguuggugucgca

SEQ ID NO: 2199702 - RNA, 19 nt, Artificial Sequence
  Description of Artificial Sequence: Synthetic oligonucleotide
ggggcauuggggaccccuc

SEQ ID NO: 2199703 - RNA, 19 nt, Artificial Sequence
  Description of Artificial Sequence: Synthetic oligonucleotide
gcugacugacgaagucauc

SEQ ID NO: 2199704 - RNA, 19 nt, Artificial Sequence
  Description of Artificial Sequence: Synthetic oligonucleotide
gcacggucagagaacacau

SEQ ID NO: 2199705 - RNA, 19 nt, Artificial Sequence
  Description of Artificial Sequence: Synthetic oligonucleotide
ccugaagauacugcaaguu

SEQ ID NO: 2199706 - RNA, 19 nt, Artificial Sequence
  Description of Artificial Sequence: Synthetic oligonucleotide
cagagggguccaugaaguu

SEQ ID NO: 2199707 - RNA, 19 nt, Artificial Sequence
  Description of Artificial Sequence: Synthetic oligonucleotide
ggcuggucuugaagaguga

SEQ ID NO: 2199708 - RNA, 19 nt, Artificial Sequence
  Description of Artificial Sequence: Synthetic oligonucleotide
cgucuagggaggcuggucu

SEQ ID NO: 2199709 - RNA, 19 nt, Artificial Sequence
  Description of Artificial Sequence: Synthetic oligonucleotide
guucagcaauggaccagau

SEQ ID NO: 2199710 - RNA, 19 nt, Artificial Sequence
  Description of Artificial Sequence: Synthetic oligonucleotide
gucgucuagggaggcuggu

SEQ ID NO: 2199711 - RNA, 19 nt, Artificial Sequence
  Description of Artificial Sequence: Synthetic oligonucleotide
cagcacguaccaggggaua

SEQ ID NO: 2199712 - RNA, 19 nt, Artificial Sequence
  Description of Artificial Sequence: Synthetic oligonucleotide
ccuggaaccucuugucuuu

SEQ ID NO: 2199713 - RNA, 19 nt, Artificial Sequence
  Description of Artificial Sequence: Synthetic oligonucleotide
cacccauaaucugcacggu

SEQ ID NO: 2199714 - RNA, 19 nt, Artificial Sequence
  Description of Artificial Sequence: Synthetic oligonucleotide
ggaguagcggcugcacaau

SEQ ID NO: 2199715 - RNA, 19 nt, Artificial Sequence
  Description of Artificial Sequence: Synthetic oligonucleotide
ccaggagcgggagugacau

SEQ ID NO: 2199716 - RNA, 19 nt, Artificial Sequence
  Description of Artificial Sequence: Synthetic oligonucleotide
ggccacuucccgggcugug

SEQ ID NO: 2199717 - RNA, 19 nt, Artificial Sequence
  Description of Artificial Sequence: Synthetic oligonucleotide
gggcacggucagagaacac

SEQ ID NO: 2199718 - RNA, 19 nt, Artificial Sequence
  Description of Artificial Sequence: Synthetic oligonucleotide
cuguguggaauggggcauu

SEQ ID NO: 2199719 - RNA, 19 nt, Artificial Sequence
  Description of Artificial Sequence: Synthetic oligonucleotide
ccagcacguaccaggggau

SEQ ID NO: 2199720 - RNA, 19 nt, Artificial Sequence
  Description of Artificial Sequence: Synthetic oligonucleotide
gcagcggguggguccgugu

SEQ ID NO: 2199721 - RNA, 19 nt, Artificial Sequence
  Description of Artificial Sequence: Synthetic oligonucleotide
cagcggguggguccguguu

SEQ ID NO: 2199722 - RNA, 19 nt, Artificial Sequence
  Description of Artificial Sequence: Synthetic oligonucleotide
gcaucacgguguccagcau

SEQ ID NO: 2199723 - RNA, 19 nt, Artificial Sequence
  Description of Artificial Sequence: Synthetic oligonucleotide
gggaguccucggauccaua

SEQ ID NO: 2199724 - RNA, 19 nt, Artificial Sequence
  Description of Artificial Sequence: Synthetic oligonucleotide
ggagcgggagugacaugau

SEQ ID NO: 2199725 - RNA, 19 nt, Artificial Sequence
  Description of Artificial Sequence: Synthetic oligonucleotide
gcacguaccaggggauauu

SEQ ID NO: 2199726 - RNA, 19 nt, Artificial Sequence
  Description of Artificial Sequence: Synthetic oligonucleotide
gucgcacagagggguccau

SEQ ID NO: 2199727 - RNA, 19 nt, Artificial Sequence
  Description of Artificial Sequence: Synthetic oligonucleotide
cucccaugucucggggcau

SEQ ID NO: 2199728 - RNA, 19 nt, Artificial Sequence
  Description of Artificial Sequence: Synthetic oligonucleotide
ccguccgugcauccauccu

SEQ ID NO: 2199729 - RNA, 19 nt, Artificial Sequence
  Description of Artificial Sequence: Synthetic oligonucleotide
cggagggcacggucagaga

SEQ ID NO: 2199730 - RNA, 19 nt, Artificial Sequence
  Description of Artificial Sequence: Synthetic oligonucleotide
cagcugacuucgggccacu

SEQ ID NO: 2199731 - RNA, 19 nt, Artificial Sequence
  Description of Artificial Sequence: Synthetic oligonucleotide
ccggccccacucagcacgu

SEQ ID NO: 2199732 - RNA, 19 nt, Artificial Sequence
  Description of Artificial Sequence: Synthetic oligonucleotide
cugcacgguucuggcgauu

SEQ ID NO: 2199733 - RNA, 19 nt, Artificial Sequence
  Description of Artificial Sequence: Synthetic oligonucleotide
gguagccauuggggaccuu

SEQ ID NO: 2199734 - RNA, 19 nt, Artificial Sequence
  Description of Artificial Sequence: Synthetic oligonucleotide
cggggcauuuugggcugcu

SEQ ID NO: 2199735 - RNA, 19 nt, Artificial Sequence
  Description of Artificial Sequence: Synthetic oligonucleotide
agaacuacagcccuccucc

SEQ ID NO: 2199736 - RNA, 19 nt, Artificial Sequence
  Description of Artificial Sequence: Synthetic oligonucleotide
ugaaaguuaguccagcacc

SEQ ID NO: 2199737 - RNA, 19 nt, Artificial Sequence
  Description of Artificial Sequence: Synthetic oligonucleotide
uuuaucuaggcccaggcgc

SEQ ID NO: 2199738 - RNA, 19 nt, Artificial Sequence
  Description of Artificial Sequence: Synthetic oligonucleotide
ucagaaguggccuugagac

SEQ ID NO: 2199739 - RNA, 19 nt, Artificial Sequence
  Description of Artificial Sequence: Synthetic oligonucleotide
aacgaaguuccucucaguc

SEQ ID NO: 2199740 - RNA, 19 nt, Artificial Sequence
  Description of Artificial Sequence: Synthetic oligonucleotide
uuuacuggugcccaggccc

SEQ ID NO: 2199741 - RNA, 19 nt, Artificial Sequence
  Description of Artificial Sequence: Synthetic oligonucleotide
gaaacauugauccugaccu

SEQ ID NO: 2199742 - RNA, 19 nt, Artificial Sequence
  Description of Artificial Sequence: Synthetic oligonucleotide
aaaacgaaguuccucucag

SEQ ID NO: 2199743 - RNA, 19 nt, Artificial Sequence
  Description of Artificial Sequence: Synthetic oligonucleotide
aaaggaaacauugauccug

SEQ ID NO: 2199744 - RNA, 19 nt, Artificial Sequence
  Description of Artificial Sequence: Synthetic oligonucleotide
agagccucgcgauaaaggc

SEQ ID NO: 2199745 - RNA, 19 nt, Artificial Sequence
  Description of Artificial Sequence: Synthetic oligonucleotide
aaaguuccgccgcaggcgc

SEQ ID NO: 2199746 - RNA, 19 nt, Artificial Sequence
  Description of Artificial Sequence: Synthetic oligonucleotide
auugauccugaccuuggcc

SEQ ID NO: 2199747 - RNA, 19 nt, Artificial Sequence
  Description of Artificial Sequence: Synthetic oligonucleotide
ucugcaguaaaguuccgcc

SEQ ID NO: 2199748 - RNA, 19 nt, Artificial Sequence
  Description of Artificial Sequence: Synthetic oligonucleotide
agucgugcaggucuggagc

SEQ ID NO: 2199749 - RNA, 19 nt, Artificial Sequence
  Description of Artificial Sequence: Synthetic oligonucleotide
uggagcauggcguagcucc

SEQ ID NO: 2199750 - RNA, 19 nt, Artificial Sequence
  Description of Artificial Sequence: Synthetic oligonucleotide
uccagcaccucuuugauaa

SEQ ID NO: 2199751 - RNA, 19 nt, Artificial Sequence
  Description of Artificial Sequence: Synthetic oligonucleotide
aggagagccgcacaugggc

SEQ ID NO: 2199752 - RNA, 19 nt, Artificial Sequence
  Description of Artificial Sequence: Synthetic oligonucleotide
aaugguuucugcaguaaag

SEQ ID NO: 2199753 - RNA, 19 nt, Artificial Sequence
  Description of Artificial Sequence: Synthetic oligonucleotide
guuucugcaguaaaguucc

SEQ ID NO: 2199754 - RNA, 19 nt, Artificial Sequence
  Description of Artificial Sequence: Synthetic oligonucleotide
aaaacuguucaaaggcccg

SEQ ID NO: 2199755 - RNA, 19 nt, Artificial Sequence
  Description of Artificial Sequence: Synthetic oligonucleotide
aaaaggaaacauugauccu

SEQ ID NO: 2199756 - RNA, 19 nt, Artificial Sequence
  Description of Artificial Sequence: Synthetic oligonucleotide
ugcaguaaaguuccgccgc

SEQ ID NO: 2199757 - RNA, 19 nt, Artificial Sequence
  Description of Artificial Sequence: Synthetic oligonucleotide
ucgagcuucuccaggaucc

SEQ ID NO: 2199758 - RNA, 19 nt, Artificial Sequence
  Description of Artificial Sequence: Synthetic oligonucleotide
ucgggcagcacgaagaagu

SEQ ID NO: 2199759 - RNA, 19 nt, Artificial Sequence
  Description of Artificial Sequence: Synthetic oligonucleotide
cugccguuuaucuaggccc

SEQ ID NO: 2199760 - RNA, 19 nt, Artificial Sequence
  Description of Artificial Sequence: Synthetic oligonucleotide
ugcuacagacucuuucugg

SEQ ID NO: 2199761 - RNA, 19 nt, Artificial Sequence
  Description of Artificial Sequence: Synthetic oligonucleotide
aguaguaguccccagcacu

SEQ ID NO: 2199762 - RNA, 19 nt, Artificial Sequence
  Description of Artificial Sequence: Synthetic oligonucleotide
cagucucuggcuauggugg

SEQ ID NO: 2199763 - RNA, 19 nt, Artificial Sequence
  Description of Artificial Sequence: Synthetic oligonucleotide
uguucaaaggcccggcuac

SEQ ID NO: 2199764 - RNA, 19 nt, Artificial Sequence
  Description of Artificial Sequence: Synthetic oligonucleotide
aucauccuaggguaacccc

SEQ ID NO: 2199765 - RNA, 19 nt, Artificial Sequence
  Description of Artificial Sequence: Synthetic oligonucleotide
ucgaagucagaguagcggc

SEQ ID NO: 2199766 - RNA, 19 nt, Artificial Sequence
  Description of Artificial Sequence: Synthetic oligonucleotide
uuaucuaggcccaggcgcc

SEQ ID NO: 2199767 - RNA, 19 nt, Artificial Sequence
  Description of Artificial Sequence: Synthetic oligonucleotide
cuuucuggaacuacucccc

SEQ ID NO: 2199768 - RNA, 19 nt, Artificial Sequence
  Description of Artificial Sequence: Synthetic oligonucleotide
gauaagcagcuccuugagg

SEQ ID NO: 2199769 - RNA, 19 nt, Artificial Sequence
  Description of Artificial Sequence: Synthetic oligonucleotide
ugggccucuagaaagggug

SEQ ID NO: 2199770 - RNA, 19 nt, Artificial Sequence
  Description of Artificial Sequence: Synthetic oligonucleotide
auggggucguccuuguccc

SEQ ID NO: 2199771 - RNA, 19 nt, Artificial Sequence
  Description of Artificial Sequence: Synthetic oligonucleotide
ucauccuaggguaacccca

SEQ ID NO: 2199772 - RNA, 19 nt, Artificial Sequence
  Description of Artificial Sequence: Synthetic oligonucleotide
ucugccguuuaucuaggcc

SEQ ID NO: 2199773 - RNA, 19 nt, Artificial Sequence
  Description of Artificial Sequence: Synthetic oligonucleotide
aaguuaguccagcaccucu

SEQ ID NO: 2199774 - RNA, 19 nt, Artificial Sequence
  Description of Artificial Sequence: Synthetic oligonucleotide
aguaaaguuccgccgcagg

SEQ ID NO: 2199775 - RNA, 19 nt, Artificial Sequence
  Description of Artificial Sequence: Synthetic oligonucleotide
ucucacuacaggcucgagc

SEQ ID NO: 2199776 - RNA, 19 nt, Artificial Sequence
  Description of Artificial Sequence: Synthetic oligonucleotide
cagucugccguuuaucuag

SEQ ID NO: 2199777 - RNA, 19 nt, Artificial Sequence
  Description of Artificial Sequence: Synthetic oligonucleotide
uccuuguaucauccuaggg

SEQ ID NO: 2199778 - RNA, 19 nt, Artificial Sequence
  Description of Artificial Sequence: Synthetic oligonucleotide
ucuagaaagggugccagga

SEQ ID NO: 2199779 - RNA, 19 nt, Artificial Sequence
  Description of Artificial Sequence: Synthetic oligonucleotide
agaaguggccuugagacug

SEQ ID NO: 2199780 - RNA, 19 nt, Artificial Sequence
  Description of Artificial Sequence: Synthetic oligonucleotide
guuuaucuaggcccaggcg

SEQ ID NO: 2199781 - RNA, 19 nt, Artificial Sequence
  Description of Artificial Sequence: Synthetic oligonucleotide
caggcguuggcccagagug

SEQ ID NO: 2199782 - RNA, 19 nt, Artificial Sequence
  Description of Artificial Sequence: Synthetic oligonucleotide
gaagaagucgugcaggucu

SEQ ID NO: 2199783 - RNA, 19 nt, Artificial Sequence
  Description of Artificial Sequence: Synthetic oligonucleotide
acaaaacgaaguuccucuc

SEQ ID NO: 2199784 - RNA, 19 nt, Artificial Sequence
  Description of Artificial Sequence: Synthetic oligonucleotide
uacagacucuuucuggaac

SEQ ID NO: 2199785 - RNA, 19 nt, Artificial Sequence
  Description of Artificial Sequence: Synthetic oligonucleotide
agcuguuuuacuggugccc

SEQ ID NO: 2199786 - RNA, 19 nt, Artificial Sequence
  Description of Artificial Sequence: Synthetic oligonucleotide
uccaguaguaguccccagc

SEQ ID NO: 2199787 - RNA, 19 nt, Artificial Sequence
  Description of Artificial Sequence: Synthetic oligonucleotide
aaacuuccuccuuguauca

SEQ ID NO: 2199788 - RNA, 19 nt, Artificial Sequence
  Description of Artificial Sequence: Synthetic oligonucleotide
guaaaguuccgccgcaggc

SEQ ID NO: 2199789 - RNA, 19 nt, Artificial Sequence
  Description of Artificial Sequence: Synthetic oligonucleotide
cucgaagucagaguagcgg

SEQ ID NO: 2199790 - RNA, 19 nt, Artificial Sequence
  Description of Artificial Sequence: Synthetic oligonucleotide
aggauuccaguaguagucc

SEQ ID NO: 2199791 - RNA, 19 nt, Artificial Sequence
  Description of Artificial Sequence: Synthetic oligonucleotide
aagucgugcaggucuggag

SEQ ID NO: 2199792 - RNA, 19 nt, Artificial Sequence
  Description of Artificial Sequence: Synthetic oligonucleotide
guuccucucagucugcuac

SEQ ID NO: 2199793 - RNA, 19 nt, Artificial Sequence
  Description of Artificial Sequence: Synthetic oligonucleotide
uaaacuccaggauuccagu

SEQ ID NO: 2199794 - RNA, 19 nt, Artificial Sequence
  Description of Artificial Sequence: Synthetic oligonucleotide
cuguuuggagcccagcccc

SEQ ID NO: 2199795 - RNA, 19 nt, Artificial Sequence
  Description of Artificial Sequence: Synthetic oligonucleotide
gaagucagaguagcggcgg

SEQ ID NO: 2199796 - RNA, 19 nt, Artificial Sequence
  Description of Artificial Sequence: Synthetic oligonucleotide
uuuuacuggugcccaggcc

SEQ ID NO: 2199797 - RNA, 19 nt, Artificial Sequence
  Description of Artificial Sequence: Synthetic oligonucleotide
ggaaacauugauccugacc

SEQ ID NO: 2199798 - RNA, 19 nt, Artificial Sequence
  Description of Artificial Sequence: Synthetic oligonucleotide
agcacgaagaagucgugca

SEQ ID NO: 2199799 - RNA, 19 nt, Artificial Sequence
  Description of Artificial Sequence: Synthetic oligonucleotide
aaaguuaguccagcaccuc

SEQ ID NO: 2199800 - RNA, 19 nt, Artificial Sequence
  Description of Artificial Sequence: Synthetic oligonucleotide
caaaggcccggcuacggcg

SEQ ID NO: 2199801 - RNA, 19 nt, Artificial Sequence
  Description of Artificial Sequence: Synthetic oligonucleotide
cuuguaucauccuagggua

SEQ ID NO: 2199802 - RNA, 19 nt, Artificial Sequence
  Description of Artificial Sequence: Synthetic oligonucleotide
gaaagggugccaggaaagg

SEQ ID NO: 2199803 - RNA, 19 nt, Artificial Sequence
  Description of Artificial Sequence: Synthetic oligonucleotide
cugcaguaaaguuccgccg

SEQ ID NO: 2199804 - RNA, 19 nt, Artificial Sequence
  Description of Artificial Sequence: Synthetic oligonucleotide
cucagucugcuacagacuc

SEQ ID NO: 2199805 - RNA, 19 nt, Artificial Sequence
  Description of Artificial Sequence: Synthetic oligonucleotide
gguaaccccaggcaaagcc

SEQ ID NO: 2199806 - RNA, 19 nt, Artificial Sequence
  Description of Artificial Sequence: Synthetic oligonucleotide
uaucauccuaggguaaccc

SEQ ID NO: 2199807 - RNA, 19 nt, Artificial Sequence
  Description of Artificial Sequence: Synthetic oligonucleotide
aaacgaaguuccucucagu

SEQ ID NO: 2199808 - RNA, 19 nt, Artificial Sequence
  Description of Artificial Sequence: Synthetic oligonucleotide
gugaaaguuaguccagcac

SEQ ID NO: 2199809 - RNA, 19 nt, Artificial Sequence
  Description of Artificial Sequence: Synthetic oligonucleotide
ucagccaagcuguuuuacu

SEQ ID NO: 2199810 - RNA, 19 nt, Artificial Sequence
  Description of Artificial Sequence: Synthetic oligonucleotide
uguaucauccuaggguaac

SEQ ID NO: 2199811 - RNA, 19 nt, Artificial Sequence
  Description of Artificial Sequence: Synthetic oligonucleotide
uugagacuggugaaaguua

SEQ ID NO: 2199812 - RNA, 19 nt, Artificial Sequence
  Description of Artificial Sequence: Synthetic oligonucleotide
cagccaagcuguuuuacug

SEQ ID NO: 2199813 - RNA, 19 nt, Artificial Sequence
  Description of Artificial Sequence: Synthetic oligonucleotide
aagagccguugccaaaacu

SEQ ID NO: 2199814 - RNA, 19 nt, Artificial Sequence
  Description of Artificial Sequence: Synthetic oligonucleotide
aggggugcccaacuggguc

SEQ ID NO: 2199815 - RNA, 19 nt, Artificial Sequence
  Description of Artificial Sequence: Synthetic oligonucleotide
aaagggugccaggaaagga

SEQ ID NO: 2199816 - RNA, 19 nt, Artificial Sequence
  Description of Artificial Sequence: Synthetic oligonucleotide
gauuccaguaguagucccc

SEQ ID NO: 2199817 - RNA, 19 nt, Artificial Sequence
  Description of Artificial Sequence: Synthetic oligonucleotide
acgaaguuccucucagucu

SEQ ID NO: 2199818 - RNA, 19 nt, Artificial Sequence
  Description of Artificial Sequence: Synthetic oligonucleotide
ggcggucugggccagaagg

SEQ ID NO: 2199819 - RNA, 19 nt, Artificial Sequence
  Description of Artificial Sequence: Synthetic oligonucleotide
ucaaaggcccggcuacggc

SEQ ID NO: 2199820 - RNA, 19 nt, Artificial Sequence
  Description of Artificial Sequence: Synthetic oligonucleotide
cagguuucugugcagccgc

SEQ ID NO: 2199821 - RNA, 19 nt, Artificial Sequence
  Description of Artificial Sequence: Synthetic oligonucleotide
ucucagucugcuacagacu

SEQ ID NO: 2199822 - RNA, 19 nt, Artificial Sequence
  Description of Artificial Sequence: Synthetic oligonucleotide
augguuucugcaguaaagu

SEQ ID NO: 2199823 - RNA, 19 nt, Artificial Sequence
  Description of Artificial Sequence: Synthetic oligonucleotide
cuauggugggcugaagagc

SEQ ID NO: 2199824 - RNA, 19 nt, Artificial Sequence
  Description of Artificial Sequence: Synthetic oligonucleotide
uccuccuggcucuaaacuc

SEQ ID NO: 2199825 - RNA, 19 nt, Artificial Sequence
  Description of Artificial Sequence: Synthetic oligonucleotide
uucaaaggcccggcuacgg

SEQ ID NO: 2199826 - RNA, 19 nt, Artificial Sequence
  Description of Artificial Sequence: Synthetic oligonucleotide
ugaucugguggcccugggc

SEQ ID NO: 2199827 - RNA, 19 nt, Artificial Sequence
  Description of Artificial Sequence: Synthetic oligonucleotide
ucuaaacuccaggauucca

SEQ ID NO: 2199828 - RNA, 19 nt, Artificial Sequence
  Description of Artificial Sequence: Synthetic oligonucleotide
agcggcgggagaucugggc

SEQ ID NO: 2199829 - RNA, 19 nt, Artificial Sequence
  Description of Artificial Sequence: Synthetic oligonucleotide
uucugcaguaaaguuccgc

SEQ ID NO: 2199830 - RNA, 19 nt, Artificial Sequence
  Description of Artificial Sequence: Synthetic oligonucleotide
ccccacaaaacgaaguucc

SEQ ID NO: 2199831 - RNA, 19 nt, Artificial Sequence
  Description of Artificial Sequence: Synthetic oligonucleotide
cuuggccacagucucuggc

SEQ ID NO: 2199832 - RNA, 19 nt, Artificial Sequence
  Description of Artificial Sequence: Synthetic oligonucleotide
gcuauggugggcugaagag

SEQ ID NO: 2199833 - RNA, 19 nt, Artificial Sequence
  Description of Artificial Sequence: Synthetic oligonucleotide
ugccguuuaucuaggccca

SEQ ID NO: 2199834 - RNA, 19 nt, Artificial Sequence
  Description of Artificial Sequence: Synthetic oligonucleotide
cacaaaacgaaguuccucu

SEQ ID NO: 2199835 - RNA, 19 nt, Artificial Sequence
  Description of Artificial Sequence: Synthetic oligonucleotide
aaacauugauccugaccuu

SEQ ID NO: 2199836 - RNA, 19 nt, Artificial Sequence
  Description of Artificial Sequence: Synthetic oligonucleotide
cauccuaggguaaccccag

SEQ ID NO: 2199837 - RNA, 19 nt, Artificial Sequence
  Description of Artificial Sequence: Synthetic oligonucleotide
aaaggcccggcuacggcgg

SEQ ID NO: 2199838 - RNA, 19 nt, Artificial Sequence
  Description of Artificial Sequence: Synthetic oligonucleotide
aacugggucugcagcugcc

SEQ ID NO: 2199839 - RNA, 19 nt, Artificial Sequence
  Description of Artificial Sequence: Synthetic oligonucleotide
uaggguaaccccaggcaaa

SEQ ID NO: 2199840 - RNA, 19 nt, Artificial Sequence
  Description of Artificial Sequence: Synthetic oligonucleotide
agucucuggcuaugguggg

SEQ ID NO: 2199841 - RNA, 19 nt, Artificial Sequence
  Description of Artificial Sequence: Synthetic oligonucleotide
uccuccuuguaucauccua

SEQ ID NO: 2199842 - RNA, 19 nt, Artificial Sequence
  Description of Artificial Sequence: Synthetic oligonucleotide
uacuccccugaccuggggc

SEQ ID NO: 2199843 - RNA, 19 nt, Artificial Sequence
  Description of Artificial Sequence: Synthetic oligonucleotide
ucgcgauaaaggccagugc

SEQ ID NO: 2199844 - RNA, 19 nt, Artificial Sequence
  Description of Artificial Sequence: Synthetic oligonucleotide
aguaguccccagcacuuca

SEQ ID NO: 2199845 - RNA, 19 nt, Artificial Sequence
  Description of Artificial Sequence: Synthetic oligonucleotide
uuucugugcagccgcucga

SEQ ID NO: 2199846 - RNA, 19 nt, Artificial Sequence
  Description of Artificial Sequence: Synthetic oligonucleotide
uuacuggugcccaggccca

SEQ ID NO: 2199847 - RNA, 19 nt, Artificial Sequence
  Description of Artificial Sequence: Synthetic oligonucleotide
agacucuuucuggaacuac

SEQ ID NO: 2199848 - RNA, 19 nt, Artificial Sequence
  Description of Artificial Sequence: Synthetic oligonucleotide
ggaacuacuccccugaccu

SEQ ID NO: 2199849 - RNA, 19 nt, Artificial Sequence
  Description of Artificial Sequence: Synthetic oligonucleotide
agugccagagccucgcgau

SEQ ID NO: 2199850 - RNA, 19 nt, Artificial Sequence
  Description of Artificial Sequence: Synthetic oligonucleotide
aaagccuguuuggagccca

SEQ ID NO: 2199851 - RNA, 19 nt, Artificial Sequence
  Description of Artificial Sequence: Synthetic oligonucleotide
ugcagugccuucucacuac

SEQ ID NO: 2199852 - RNA, 19 nt, Artificial Sequence
  Description of Artificial Sequence: Synthetic oligonucleotide
cugaagcugggccucaguc

SEQ ID NO: 2199853 - RNA, 19 nt, Artificial Sequence
  Description of Artificial Sequence: Synthetic oligonucleotide
gaaaggauggggucguccu

SEQ ID NO: 2199854 - RNA, 19 nt, Artificial Sequence
  Description of Artificial Sequence: Synthetic oligonucleotide
cucgcgauaaaggccagug

SEQ ID NO: 2199855 - RNA, 19 nt, Artificial Sequence
  Description of Artificial Sequence: Synthetic oligonucleotide
caaaacgaaguuccucuca

SEQ ID NO: 2199856 - RNA, 19 nt, Artificial Sequence
  Description of Artificial Sequence: Synthetic oligonucleotide
auuccaguaguagucccca

SEQ ID NO: 2199857 - RNA, 19 nt, Artificial Sequence
  Description of Artificial Sequence: Synthetic oligonucleotide
gaaaguuaguccagcaccu

SEQ ID NO: 2199858 - RNA, 19 nt, Artificial Sequence
  Description of Artificial Sequence: Synthetic oligonucleotide
ugcagccgcucgaagucag

SEQ ID NO: 2199859 - RNA, 19 nt, Artificial Sequence
  Description of Artificial Sequence: Synthetic oligonucleotide
uggcucuaaacuccaggau

SEQ ID NO: 2199860 - RNA, 19 nt, Artificial Sequence
  Description of Artificial Sequence: Synthetic oligonucleotide
uccggcacugccugcaggu

SEQ ID NO: 2199861 - RNA, 19 nt, Artificial Sequence
  Description of Artificial Sequence: Synthetic oligonucleotide
uguuuggagcccagcccca

SEQ ID NO: 2199862 - RNA, 19 nt, Artificial Sequence
  Description of Artificial Sequence: Synthetic oligonucleotide
guaucauccuaggguaacc

SEQ ID NO: 2199863 - RNA, 19 nt, Artificial Sequence
  Description of Artificial Sequence: Synthetic oligonucleotide
ccuccuuguaucauccuag

SEQ ID NO: 2199864 - RNA, 19 nt, Artificial Sequence
  Description of Artificial Sequence: Synthetic oligonucleotide
acuccccugaccuggggca

SEQ ID NO: 2199865 - RNA, 19 nt, Artificial Sequence
  Description of Artificial Sequence: Synthetic oligonucleotide
cuaggguaaccccaggcaa

SEQ ID NO: 2199866 - RNA, 19 nt, Artificial Sequence
  Description of Artificial Sequence: Synthetic oligonucleotide
ccaggagagccgcacaugg

SEQ ID NO: 2199867 - RNA, 19 nt, Artificial Sequence
  Description of Artificial Sequence: Synthetic oligonucleotide
gagccucgcgauaaaggcc

SEQ ID NO: 2199868 - RNA, 19 nt, Artificial Sequence
  Description of Artificial Sequence: Synthetic oligonucleotide
caugggccucuagaaaggg

SEQ ID NO: 2199869 - RNA, 19 nt, Artificial Sequence
  Description of Artificial Sequence: Synthetic oligonucleotide
aggcccauggaaaaggaaa

SEQ ID NO: 2199870 - RNA, 19 nt, Artificial Sequence
  Description of Artificial Sequence: Synthetic oligonucleotide
aauuggcgcugcagguuuc

SEQ ID NO: 2199871 - RNA, 19 nt, Artificial Sequence
  Description of Artificial Sequence: Synthetic oligonucleotide
agccucgcgauaaaggcca

SEQ ID NO: 2199872 - RNA, 19 nt, Artificial Sequence
  Description of Artificial Sequence: Synthetic oligonucleotide
gaacuacuccccugaccug

SEQ ID NO: 2199873 - RNA, 19 nt, Artificial Sequence
  Description of Artificial Sequence: Synthetic oligonucleotide
cagcaccucuuugauaagc

SEQ ID NO: 2199874 - RNA, 19 nt, Artificial Sequence
  Description of Artificial Sequence: Synthetic oligonucleotide
agccccacaaaacgaaguu

SEQ ID NO: 2199875 - RNA, 19 nt, Artificial Sequence
  Description of Artificial Sequence: Synthetic oligonucleotide
cuguuuuacuggugcccag

SEQ ID NO: 2199876 - RNA, 19 nt, Artificial Sequence
  Description of Artificial Sequence: Synthetic oligonucleotide
guucaaaggcccggcuacg

SEQ ID NO: 2199877 - RNA, 19 nt, Artificial Sequence
  Description of Artificial Sequence: Synthetic oligonucleotide
ggauuccaguaguaguccc

SEQ ID NO: 2199878 - RNA, 19 nt, Artificial Sequence
  Description of Artificial Sequence: Synthetic oligonucleotide
cacuacaggcucgagcuuc

SEQ ID NO: 2199879 - RNA, 19 nt, Artificial Sequence
  Description of Artificial Sequence: Synthetic oligonucleotide
ccggaauuggcgcugcagg

SEQ ID NO: 2199880 - RNA, 19 nt, Artificial Sequence
  Description of Artificial Sequence: Synthetic oligonucleotide
auccuaggguaaccccagg

SEQ ID NO: 2199881 - RNA, 19 nt, Artificial Sequence
  Description of Artificial Sequence: Synthetic oligonucleotide
agagugccagagccucgcg

SEQ ID NO: 2199882 - RNA, 19 nt, Artificial Sequence
  Description of Artificial Sequence: Synthetic oligonucleotide
cucgagcuucuccaggauc

SEQ ID NO: 2199883 - RNA, 19 nt, Artificial Sequence
  Description of Artificial Sequence: Synthetic oligonucleotide
ucuggcuauggugggcuga

SEQ ID NO: 2199884 - RNA, 19 nt, Artificial Sequence
  Description of Artificial Sequence: Synthetic oligonucleotide
ggcgcugcagguuucugug

SEQ ID NO: 2199885 - RNA, 19 nt, Artificial Sequence
  Description of Artificial Sequence: Synthetic oligonucleotide
gagccguugccaaaacuuc

SEQ ID NO: 2199886 - RNA, 19 nt, Artificial Sequence
  Description of Artificial Sequence: Synthetic oligonucleotide
cagcacgaagaagucgugc

SEQ ID NO: 2199887 - RNA, 19 nt, Artificial Sequence
  Description of Artificial Sequence: Synthetic oligonucleotide
gaaguuccucucagucugc

SEQ ID NO: 2199888 - RNA, 19 nt, Artificial Sequence
  Description of Artificial Sequence: Synthetic oligonucleotide
cucagucugccguuuaucu

SEQ ID NO: 2199889 - RNA, 19 nt, Artificial Sequence
  Description of Artificial Sequence: Synthetic oligonucleotide
agaagucgugcaggucugg

SEQ ID NO: 2199890 - RNA, 19 nt, Artificial Sequence
  Description of Artificial Sequence: Synthetic oligonucleotide
ccuuguaucauccuagggu

SEQ ID NO: 2199891 - RNA, 19 nt, Artificial Sequence
  Description of Artificial Sequence: Synthetic oligonucleotide
agucugccguuuaucuagg

SEQ ID NO: 2199892 - RNA, 19 nt, Artificial Sequence
  Description of Artificial Sequence: Synthetic oligonucleotide
ugccagagccucgcgauaa

SEQ ID NO: 2199893 - RNA, 19 nt, Artificial Sequence
  Description of Artificial Sequence: Synthetic oligonucleotide
uggcccagagugccagagc

SEQ ID NO: 2199894 - RNA, 19 nt, Artificial Sequence
  Description of Artificial Sequence: Synthetic oligonucleotide
gucgugcaggucuggagca

SEQ ID NO: 2199895 - RNA, 19 nt, Artificial Sequence
  Description of Artificial Sequence: Synthetic oligonucleotide
gagcauggcguagcuccgg

SEQ ID NO: 2199896 - RNA, 19 nt, Artificial Sequence
  Description of Artificial Sequence: Synthetic oligonucleotide
cuagaaagggugccaggaa

SEQ ID NO: 2199897 - RNA, 19 nt, Artificial Sequence
  Description of Artificial Sequence: Synthetic oligonucleotide
ggcuauggugggcugaaga

SEQ ID NO: 2199898 - RNA, 19 nt, Artificial Sequence
  Description of Artificial Sequence: Synthetic oligonucleotide
gagugccagagccucgcga

SEQ ID NO: 2199899 - RNA, 19 nt, Artificial Sequence
  Description of Artificial Sequence: Synthetic oligonucleotide
ggaaaggauggggucgucc

SEQ ID NO: 2199900 - RNA, 19 nt, Artificial Sequence
  Description of Artificial Sequence: Synthetic oligonucleotide
agccuguuuggagcccagc

SEQ ID NO: 2199901 - RNA, 19 nt, Artificial Sequence
  Description of Artificial Sequence: Synthetic oligonucleotide
gaauuggcgcugcagguuu

SEQ ID NO: 2199902 - RNA, 19 nt, Artificial Sequence
  Description of Artificial Sequence: Synthetic oligonucleotide
gcagguuucugugcagccg

SEQ ID NO: 2199903 - RNA, 19 nt, Artificial Sequence
  Description of Artificial Sequence: Synthetic oligonucleotide
cguuuaucuaggcccaggc

SEQ ID NO: 2199904 - RNA, 19 nt, Artificial Sequence
  Description of Artificial Sequence: Synthetic oligonucleotide
auggcguagcuccggcacu

SEQ ID NO: 2199905 - RNA, 19 nt, Artificial Sequence
  Description of Artificial Sequence: Synthetic oligonucleotide
caguaaaguuccgccgcag

SEQ ID NO: 2199906 - RNA, 19 nt, Artificial Sequence
  Description of Artificial Sequence: Synthetic oligonucleotide
aguuaguccagcaccucuu

SEQ ID NO: 2199907 - RNA, 19 nt, Artificial Sequence
  Description of Artificial Sequence: Synthetic oligonucleotide
aggcguuggcccagagugc

SEQ ID NO: 2199908 - RNA, 19 nt, Artificial Sequence
  Description of Artificial Sequence: Synthetic oligonucleotide
gucuggagcauggcguagc

SEQ ID NO: 2199909 - RNA, 19 nt, Artificial Sequence
  Description of Artificial Sequence: Synthetic oligonucleotide
gagcccagccccacaaaac

SEQ ID NO: 2199910 - RNA, 19 nt, Artificial Sequence
  Description of Artificial Sequence: Synthetic oligonucleotide
gaagucgugcaggucugga

SEQ ID NO: 2199911 - RNA, 19 nt, Artificial Sequence
  Description of Artificial Sequence: Synthetic oligonucleotide
cuacagacucuuucuggaa

SEQ ID NO: 2199912 - RNA, 19 nt, Artificial Sequence
  Description of Artificial Sequence: Synthetic oligonucleotide
cgaagucagaguagcggcg

SEQ ID NO: 2199913 - RNA, 19 nt, Artificial Sequence
  Description of Artificial Sequence: Synthetic oligonucleotide
aggucuggagcauggcgua

SEQ ID NO: 2199914 - RNA, 19 nt, Artificial Sequence
  Description of Artificial Sequence: Synthetic oligonucleotide
uccgccgcaggcgcuuacg

SEQ ID NO: 2199915 - RNA, 19 nt, Artificial Sequence
  Description of Artificial Sequence: Synthetic oligonucleotide
uucugugcagccgcucgaa

SEQ ID NO: 2199916 - RNA, 19 nt, Artificial Sequence
  Description of Artificial Sequence: Synthetic oligonucleotide
caaagccuguuuggagccc

SEQ ID NO: 2199917 - RNA, 19 nt, Artificial Sequence
  Description of Artificial Sequence: Synthetic oligonucleotide
cuggaacuacuccccugac

SEQ ID NO: 2199918 - RNA, 19 nt, Artificial Sequence
  Description of Artificial Sequence: Synthetic oligonucleotide
ugggccagaaggggugccc

SEQ ID NO: 2199919 - RNA, 19 nt, Artificial Sequence
  Description of Artificial Sequence: Synthetic oligonucleotide
ucacuacaggcucgagcuu

SEQ ID NO: 2199920 - RNA, 19 nt, Artificial Sequence
  Description of Artificial Sequence: Synthetic oligonucleotide
gucugccguuuaucuaggc

SEQ ID NO: 2199921 - RNA, 19 nt, Artificial Sequence
  Description of Artificial Sequence: Synthetic oligonucleotide
aggauggggucguccuugu

SEQ ID NO: 2199922 - RNA, 19 nt, Artificial Sequence
  Description of Artificial Sequence: Synthetic oligonucleotide
uucucacuacaggcucgag

SEQ ID NO: 2199923 - RNA, 19 nt, Artificial Sequence
  Description of Artificial Sequence: Synthetic oligonucleotide
uaucuaggcccaggcgcca

SEQ ID NO: 2199924 - RNA, 19 nt, Artificial Sequence
  Description of Artificial Sequence: Synthetic oligonucleotide
uacggcgggcaaugguuuc

SEQ ID NO: 2199925 - RNA, 19 nt, Artificial Sequence
  Description of Artificial Sequence: Synthetic oligonucleotide
cuacuccccugaccugggg

SEQ ID NO: 2199926 - RNA, 19 nt, Artificial Sequence
  Description of Artificial Sequence: Synthetic oligonucleotide
ggcguuggcccagagugcc

SEQ ID NO: 2199927 - RNA, 19 nt, Artificial Sequence
  Description of Artificial Sequence: Synthetic oligonucleotide
gacugaagcugggccucag

SEQ ID NO: 2199928 - RNA, 19 nt, Artificial Sequence
  Description of Artificial Sequence: Synthetic oligonucleotide
cuguucaaaggcccggcua

SEQ ID NO: 2199929 - RNA, 19 nt, Artificial Sequence
  Description of Artificial Sequence: Synthetic oligonucleotide
cgcgauaaaggccagugca

SEQ ID NO: 2199930 - RNA, 19 nt, Artificial Sequence
  Description of Artificial Sequence: Synthetic oligonucleotide
acuacaggcucgagcuucu

SEQ ID NO: 2199931 - RNA, 19 nt, Artificial Sequence
  Description of Artificial Sequence: Synthetic oligonucleotide
gccaggaaaggaugggguc

SEQ ID NO: 2199932 - RNA, 19 nt, Artificial Sequence
  Description of Artificial Sequence: Synthetic oligonucleotide
ggagagccgcacaugggcc

SEQ ID NO: 2199933 - RNA, 19 nt, Artificial Sequence
  Description of Artificial Sequence: Synthetic oligonucleotide
ggcucgagcuucuccagga

SEQ ID NO: 2199934 - RNA, 19 nt, Artificial Sequence
  Description of Artificial Sequence: Synthetic oligonucleotide
ccuccuguagggacugaag

SEQ ID NO: 2199935 - RNA, 19 nt, Artificial Sequence
  Description of Artificial Sequence: Synthetic oligonucleotide
gcccaacugggucugcagc

SEQ ID NO: 2199936 - RNA, 19 nt, Artificial Sequence
  Description of Artificial Sequence: Synthetic oligonucleotide
guaaccccaggcaaagccu

SEQ ID NO: 2199937 - RNA, 19 nt, Artificial Sequence
  Description of Artificial Sequence: Synthetic oligonucleotide
gggcagcacgaagaagucg

SEQ ID NO: 2199938 - RNA, 19 nt, Artificial Sequence
  Description of Artificial Sequence: Synthetic oligonucleotide
gagagccgcacaugggccu

SEQ ID NO: 2199939 - RNA, 19 nt, Artificial Sequence
  Description of Artificial Sequence: Synthetic oligonucleotide
auggugggcugaagagccg

SEQ ID NO: 2199940 - RNA, 19 nt, Artificial Sequence
  Description of Artificial Sequence: Synthetic oligonucleotide
gcucgaagucagaguagcg

SEQ ID NO: 2199941 - RNA, 19 nt, Artificial Sequence
  Description of Artificial Sequence: Synthetic oligonucleotide
ggagcauggcguagcuccg

SEQ ID NO: 2199942 - RNA, 19 nt, Artificial Sequence
  Description of Artificial Sequence: Synthetic oligonucleotide
cuucucacuacaggcucga

SEQ ID NO: 2199943 - RNA, 19 nt, Artificial Sequence
  Description of Artificial Sequence: Synthetic oligonucleotide
aggaaaggauggggucguc

SEQ ID NO: 2199944 - RNA, 19 nt, Artificial Sequence
  Description of Artificial Sequence: Synthetic oligonucleotide
ccacaaaacgaaguuccuc

SEQ ID NO: 2199945 - RNA, 19 nt, Artificial Sequence
  Description of Artificial Sequence: Synthetic oligonucleotide
aucuaggcccaggcgccag

SEQ ID NO: 2199946 - RNA, 19 nt, Artificial Sequence
  Description of Artificial Sequence: Synthetic oligonucleotide
caggcgccaggagagccgc

SEQ ID NO: 2199947 - RNA, 19 nt, Artificial Sequence
  Description of Artificial Sequence: Synthetic oligonucleotide
cucuggcuauggugggcug

SEQ ID NO: 2199948 - RNA, 19 nt, Artificial Sequence
  Description of Artificial Sequence: Synthetic oligonucleotide
gcggucugggccagaaggg

SEQ ID NO: 2199949 - RNA, 19 nt, Artificial Sequence
  Description of Artificial Sequence: Synthetic oligonucleotide
ccaagcuguuuuacuggug

SEQ ID NO: 2199950 - RNA, 19 nt, Artificial Sequence
  Description of Artificial Sequence: Synthetic oligonucleotide
agugcaggugaggcucugu

SEQ ID NO: 2199951 - RNA, 19 nt, Artificial Sequence
  Description of Artificial Sequence: Synthetic oligonucleotide
cugcagugccuucucacua

SEQ ID NO: 2199952 - RNA, 19 nt, Artificial Sequence
  Description of Artificial Sequence: Synthetic oligonucleotide
augggccucuagaaagggu

SEQ ID NO: 2199953 - RNA, 19 nt, Artificial Sequence
  Description of Artificial Sequence: Synthetic oligonucleotide
guuuggagcccagccccac

SEQ ID NO: 2199954 - RNA, 19 nt, Artificial Sequence
  Description of Artificial Sequence: Synthetic oligonucleotide
cuucagccaagcuguuuua

SEQ ID NO: 2199955 - RNA, 19 nt, Artificial Sequence
  Description of Artificial Sequence: Synthetic oligonucleotide
ggcacugccugcagguggc

SEQ ID NO: 2199956 - RNA, 19 nt, Artificial Sequence
  Description of Artificial Sequence: Synthetic oligonucleotide
uggcuauggugggcugaag

SEQ ID NO: 2199957 - RNA, 19 nt, Artificial Sequence
  Description of Artificial Sequence: Synthetic oligonucleotide
acggcgggcaaugguuucu

SEQ ID NO: 2199958 - RNA, 19 nt, Artificial Sequence
  Description of Artificial Sequence: Synthetic oligonucleotide
aguggccuugagacuggug

SEQ ID NO: 2199959 - RNA, 19 nt, Artificial Sequence
  Description of Artificial Sequence: Synthetic oligonucleotide
guaguaguccccagcacuu

SEQ ID NO: 2199960 - RNA, 19 nt, Artificial Sequence
  Description of Artificial Sequence: Synthetic oligonucleotide
gggccucuagaaagggugc

SEQ ID NO: 2199961 - RNA, 19 nt, Artificial Sequence
  Description of Artificial Sequence: Synthetic oligonucleotide
caggcccauggaaaaggaa

SEQ ID NO: 2199962 - RNA, 19 nt, Artificial Sequence
  Description of Artificial Sequence: Synthetic oligonucleotide
gugcccaggcccauggaaa

SEQ ID NO: 2199963 - RNA, 19 nt, Artificial Sequence
  Description of Artificial Sequence: Synthetic oligonucleotide
agccccucucucagaagug

SEQ ID NO: 2199964 - RNA, 19 nt, Artificial Sequence
  Description of Artificial Sequence: Synthetic oligonucleotide
cgcucgaagucagaguagc

SEQ ID NO: 2199965 - RNA, 19 nt, Artificial Sequence
  Description of Artificial Sequence: Synthetic oligonucleotide
cagccccacaaaacgaagu

SEQ ID NO: 2199966 - RNA, 19 nt, Artificial Sequence
  Description of Artificial Sequence: Synthetic oligonucleotide
ccaggauuccaguaguagu

SEQ ID NO: 2199967 - RNA, 19 nt, Artificial Sequence
  Description of Artificial Sequence: Synthetic oligonucleotide
ccguuuaucuaggcccagg

SEQ ID NO: 2199968 - RNA, 19 nt, Artificial Sequence
  Description of Artificial Sequence: Synthetic oligonucleotide
uccccugaccuggggcagc

SEQ ID NO: 2199969 - RNA, 19 nt, Artificial Sequence
  Description of Artificial Sequence: Synthetic oligonucleotide
gaguagcggcgggagaucu

SEQ ID NO: 2199970 - RNA, 19 nt, Artificial Sequence
  Description of Artificial Sequence: Synthetic oligonucleotide
cuccaggauuccaguagua

SEQ ID NO: 2199971 - RNA, 19 nt, Artificial Sequence
  Description of Artificial Sequence: Synthetic oligonucleotide
aaguuccgccgcaggcgcu

SEQ ID NO: 2199972 - RNA, 19 nt, Artificial Sequence
  Description of Artificial Sequence: Synthetic oligonucleotide
gggacugaagcugggccuc

SEQ ID NO: 2199973 - RNA, 19 nt, Artificial Sequence
  Description of Artificial Sequence: Synthetic oligonucleotide
cccagagugccagagccuc

SEQ ID NO: 2199974 - RNA, 19 nt, Artificial Sequence
  Description of Artificial Sequence: Synthetic oligonucleotide
uuccgccgcaggcgcuuac

SEQ ID NO: 2199975 - RNA, 19 nt, Artificial Sequence
  Description of Artificial Sequence: Synthetic oligonucleotide
ccagagccucgcgauaaag

SEQ ID NO: 2199976 - RNA, 19 nt, Artificial Sequence
  Description of Artificial Sequence: Synthetic oligonucleotide
ucgugcaggucuggagcau

SEQ ID NO: 2199977 - RNA, 19 nt, Artificial Sequence
  Description of Artificial Sequence: Synthetic oligonucleotide
guuggcccagagugccaga

SEQ ID NO: 2199978 - RNA, 19 nt, Artificial Sequence
  Description of Artificial Sequence: Synthetic oligonucleotide
gcccauggaaaaggaaaca

SEQ ID NO: 2199979 - RNA, 19 nt, Artificial Sequence
  Description of Artificial Sequence: Synthetic oligonucleotide
gccccacaaaacgaaguuc

SEQ ID NO: 2199980 - RNA, 19 nt, Artificial Sequence
  Description of Artificial Sequence: Synthetic oligonucleotide
cuggcuauggugggcugaa

SEQ ID NO: 2199981 - RNA, 19 nt, Artificial Sequence
  Description of Artificial Sequence: Synthetic oligonucleotide
ccgcucgaagucagaguag

SEQ ID NO: 2199982 - RNA, 19 nt, Artificial Sequence
  Description of Artificial Sequence: Synthetic oligonucleotide
aguuccgccgcaggcgcuu

SEQ ID NO: 2199983 - RNA, 19 nt, Artificial Sequence
  Description of Artificial Sequence: Synthetic oligonucleotide
gcaaugguuucugcaguaa

SEQ ID NO: 2199984 - RNA, 19 nt, Artificial Sequence
  Description of Artificial Sequence: Synthetic oligonucleotide
gcucuugguggcacacagc

SEQ ID NO: 2199985 - RNA, 19 nt, Artificial Sequence
  Description of Artificial Sequence: Synthetic oligonucleotide
ccagcaccucuuugauaag

SEQ ID NO: 2199986 - RNA, 19 nt, Artificial Sequence
  Description of Artificial Sequence: Synthetic oligonucleotide
cccggaauuggcgcugcag

SEQ ID NO: 2199987 - RNA, 19 nt, Artificial Sequence
  Description of Artificial Sequence: Synthetic oligonucleotide
gugcccaacugggucugca

SEQ ID NO: 2199988 - RNA, 19 nt, Artificial Sequence
  Description of Artificial Sequence: Synthetic oligonucleotide
gccucuagaaagggugcca

SEQ ID NO: 2199989 - RNA, 19 nt, Artificial Sequence
  Description of Artificial Sequence: Synthetic oligonucleotide
gcagcacgaagaagucgug

SEQ ID NO: 2199990 - RNA, 19 nt, Artificial Sequence
  Description of Artificial Sequence: Synthetic oligonucleotide
cagucugcuacagacucuu

SEQ ID NO: 2199991 - RNA, 19 nt, Artificial Sequence
  Description of Artificial Sequence: Synthetic oligonucleotide
ccgcacaugggccucuaga

SEQ ID NO: 2199992 - RNA, 19 nt, Artificial Sequence
  Description of Artificial Sequence: Synthetic oligonucleotide
ggcgccaggagagccgcac

SEQ ID NO: 2199993 - RNA, 19 nt, Artificial Sequence
  Description of Artificial Sequence: Synthetic oligonucleotide
cuacaggcucgagcuucuc

SEQ ID NO: 2199994 - RNA, 19 nt, Artificial Sequence
  Description of Artificial Sequence: Synthetic oligonucleotide
ggguaaccccaggcaaagc

SEQ ID NO: 2199995 - RNA, 19 nt, Artificial Sequence
  Description of Artificial Sequence: Synthetic oligonucleotide
ggggugcccaacugggucu

SEQ ID NO: 2199996 - RNA, 19 nt, Artificial Sequence
  Description of Artificial Sequence: Synthetic oligonucleotide
cuacggcgggcaaugguuu

SEQ ID NO: 2199997 - RNA, 19 nt, Artificial Sequence
  Description of Artificial Sequence: Synthetic oligonucleotide
gaccuuggccacagucucu

SEQ ID NO: 2199998 - RNA, 19 nt, Artificial Sequence
  Description of Artificial Sequence: Synthetic oligonucleotide
cagugcaggugaggcucug

SEQ ID NO: 2199999 - RNA, 19 nt, Artificial Sequence
  Description of Artificial Sequence: Synthetic oligonucleotide
ccggcuacggcgggcaaug

SEQ ID NO: 2200000 - RNA, 19 nt, Artificial Sequence
  Description of Artificial Sequence: Synthetic oligonucleotide
gccguuuaucuaggcccag

SEQ ID NO: 2200001 - RNA, 19 nt, Artificial Sequence
  Description of Artificial Sequence: Synthetic oligonucleotide
cucucucagaaguggccuu

SEQ ID NO: 2200002 - RNA, 19 nt, Artificial Sequence
  Description of Artificial Sequence: Synthetic oligonucleotide
gugccagagccucgcgaua

SEQ ID NO: 2200003 - RNA, 19 nt, Artificial Sequence
  Description of Artificial Sequence: Synthetic oligonucleotide
gcggcgggagaucugggcu

SEQ ID NO: 2200004 - RNA, 19 nt, Artificial Sequence
  Description of Artificial Sequence: Synthetic oligonucleotide
cgccgcaggcgcuuacggg

SEQ ID NO: 2200005 - RNA, 19 nt, Artificial Sequence
  Description of Artificial Sequence: Synthetic oligonucleotide
gcuacggcgggcaaugguu

SEQ ID NO: 2200006 - RNA, 19 nt, Artificial Sequence
  Description of Artificial Sequence: Synthetic oligonucleotide
ggaauuggcgcugcagguu

SEQ ID NO: 2200007 - RNA, 19 nt, Artificial Sequence
  Description of Artificial Sequence: Synthetic oligonucleotide
ggcuacggcgggcaauggu

SEQ ID NO: 2200008 - RNA, 19 nt, Artificial Sequence
  Description of Artificial Sequence: Synthetic oligonucleotide
ccccacgcagcugcagugc

SEQ ID NO: 2200009 - RNA, 19 nt, Artificial Sequence
  Description of Artificial Sequence: Synthetic oligonucleotide
cgggcagcacgaagaaguc

SEQ ID NO: 2200010 - RNA, 19 nt, Artificial Sequence
  Description of Artificial Sequence: Synthetic oligonucleotide
ggccccggaauuggcgcug

SEQ ID NO: 2200011 - RNA, 19 nt, Artificial Sequence
  Description of Artificial Sequence: Synthetic oligonucleotide
ggcguagcuccggcacugc

SEQ ID NO: 2200012 - RNA, 19 nt, Artificial Sequence
  Description of Artificial Sequence: Synthetic oligonucleotide
cgugcaggucuggagcaug

SEQ ID NO: 2200013 - RNA, 19 nt, Artificial Sequence
  Description of Artificial Sequence: Synthetic oligonucleotide
ccucucucagaaguggccu

SEQ ID NO: 2200014 - RNA, 19 nt, Artificial Sequence
  Description of Artificial Sequence: Synthetic oligonucleotide
ggccagugcaggugaggcu

SEQ ID NO: 2200015 - RNA, 19 nt, Artificial Sequence
  Description of Artificial Sequence: Synthetic oligonucleotide
ggugcccaacugggucugc

SEQ ID NO: 2200016 - RNA, 19 nt, Artificial Sequence
  Description of Artificial Sequence: Synthetic oligonucleotide
ccccugaccuggggcagcc

SEQ ID NO: 2200017 - RNA, 19 nt, Artificial Sequence
  Description of Artificial Sequence: Synthetic oligonucleotide
gcgccaggagagccgcaca

SEQ ID NO: 2200018 - RNA, 19 nt, Artificial Sequence
  Description of Artificial Sequence: Synthetic oligonucleotide
gccagagccucgcgauaaa

SEQ ID NO: 2200019 - RNA, 19 nt, Artificial Sequence
  Description of Artificial Sequence: Synthetic oligonucleotide
gccucgcgauaaaggccag

SEQ ID NO: 2200020 - RNA, 19 nt, Artificial Sequence
  Description of Artificial Sequence: Synthetic oligonucleotide
cggaauuggcgcugcaggu

SEQ ID NO: 2200021 - RNA, 19 nt, Artificial Sequence
  Description of Artificial Sequence: Synthetic oligonucleotide
cacuucagccaagcuguuu

SEQ ID NO: 2200022 - RNA, 19 nt, Artificial Sequence
  Description of Artificial Sequence: Synthetic oligonucleotide
ggccucagucugccguuua

SEQ ID NO: 2200023 - RNA, 19 nt, Artificial Sequence
  Description of Artificial Sequence: Synthetic oligonucleotide
gccccggaauuggcgcugc

SEQ ID NO: 2200024 - RNA, 19 nt, Artificial Sequence
  Description of Artificial Sequence: Synthetic oligonucleotide
gccauggggccccggaauu

SEQ ID NO: 2200025 - RNA, 19 nt, Artificial Sequence
  Description of Artificial Sequence: Synthetic oligonucleotide
ccggcacugccugcaggug

SEQ ID NO: 2200026 - RNA, 19 nt, Artificial Sequence
  Description of Artificial Sequence: Synthetic oligonucleotide
gcagccgcucgaagucaga

SEQ ID NO: 2200027 - RNA, 19 nt, Artificial Sequence
  Description of Artificial Sequence: Synthetic oligonucleotide
ccaggcguuggcccagagu

SEQ ID NO: 2200028 - RNA, 19 nt, Artificial Sequence
  Description of Artificial Sequence: Synthetic oligonucleotide
gcguuggcccagagugcca

SEQ ID NO: 2200029 - RNA, 19 nt, Artificial Sequence
  Description of Artificial Sequence: Synthetic oligonucleotide
gcgggagaucugggcuggc

SEQ ID NO: 2200030 - RNA, 19 nt, Artificial Sequence
  Description of Artificial Sequence: Synthetic oligonucleotide
cccugaccuggggcagccc

SEQ ID NO: 2200031 - RNA, 19 nt, Artificial Sequence
  Description of Artificial Sequence: Synthetic oligonucleotide
cggcuacggcgggcaaugg

SEQ ID NO: 2200032 - RNA, 19 nt, Artificial Sequence
  Description of Artificial Sequence: Synthetic oligonucleotide
ccccggaauuggcgcugca

SEQ ID NO: 2200033 - RNA, 19 nt, Artificial Sequence
  Description of Artificial Sequence: Synthetic oligonucleotide
ccucgcgauaaaggccagu

SEQ ID NO: 2200034 - RNA, 19 nt, Artificial Sequence
  Description of Artificial Sequence: Synthetic oligonucleotide
gcccggcuacggcgggcaa

SEQ ID NO: 2200035 - RNA, 19 nt, Artificial Sequence
  Description of Artificial Sequence: Synthetic oligonucleotide
cccggcuacggcgggcaau

SEQ ID NO: 2200036 - RNA, 19 nt, Artificial Sequence
  Description of Artificial Sequence: Synthetic oligonucleotide
auuuguuggccccugaggc

SEQ ID NO: 2200037 - RNA, 19 nt, Artificial Sequence
  Description of Artificial Sequence: Synthetic oligonucleotide
cauaugaagucucagcagg

SEQ ID NO: 2200038 - RNA, 19 nt, Artificial Sequence
  Description of Artificial Sequence: Synthetic oligonucleotide
ugauccugaagccaucugg

SEQ ID NO: 2200039 - RNA, 19 nt, Artificial Sequence
  Description of Artificial Sequence: Synthetic oligonucleotide
uauagaacugagcugugcc

SEQ ID NO: 2200040 - RNA, 19 nt, Artificial Sequence
  Description of Artificial Sequence: Synthetic oligonucleotide
uggguguuuaucaggaggg

SEQ ID NO: 2200041 - RNA, 19 nt, Artificial Sequence
  Description of Artificial Sequence: Synthetic oligonucleotide
uccuaucuccccuugaccg

SEQ ID NO: 2200042 - RNA, 19 nt, Artificial Sequence
  Description of Artificial Sequence: Synthetic oligonucleotide
uuuaggaaacuuuuccuca

SEQ ID NO: 2200043 - RNA, 19 nt, Artificial Sequence
  Description of Artificial Sequence: Synthetic oligonucleotide
uuguauagaacugagcugu

SEQ ID NO: 2200044 - RNA, 19 nt, Artificial Sequence
  Description of Artificial Sequence: Synthetic oligonucleotide
gaguucagccaucagaacc

SEQ ID NO: 2200045 - RNA, 19 nt, Artificial Sequence
  Description of Artificial Sequence: Synthetic oligonucleotide
guagagaaggagcucaggg

SEQ ID NO: 2200046 - RNA, 19 nt, Artificial Sequence
  Description of Artificial Sequence: Synthetic oligonucleotide
uauuuaggaaacuuuuccu

SEQ ID NO: 2200047 - RNA, 19 nt, Artificial Sequence
  Description of Artificial Sequence: Synthetic oligonucleotide
auuauucuccacaugagag

SEQ ID NO: 2200048 - RNA, 19 nt, Artificial Sequence
  Description of Artificial Sequence: Synthetic oligonucleotide
uacuccugcauccagucag

SEQ ID NO: 2200049 - RNA, 19 nt, Artificial Sequence
  Description of Artificial Sequence: Synthetic oligonucleotide
uguugaaagcuccuucugc

SEQ ID NO: 2200050 - RNA, 19 nt, Artificial Sequence
  Description of Artificial Sequence: Synthetic oligonucleotide
uagacacuguccaacaaug

SEQ ID NO: 2200051 - RNA, 19 nt, Artificial Sequence
  Description of Artificial Sequence: Synthetic oligonucleotide
uacgcagcccgacacagcg

SEQ ID NO: 2200052 - RNA, 19 nt, Artificial Sequence
  Description of Artificial Sequence: Synthetic oligonucleotide
ucucgaaggacugugagga

SEQ ID NO: 2200053 - RNA, 19 nt, Artificial Sequence
  Description of Artificial Sequence: Synthetic oligonucleotide
ggugcuagaguagagaagg

SEQ ID NO: 2200054 - RNA, 19 nt, Artificial Sequence
  Description of Artificial Sequence: Synthetic oligonucleotide
gaugaguaggccucgguac

SEQ ID NO: 2200055 - RNA, 19 nt, Artificial Sequence
  Description of Artificial Sequence: Synthetic oligonucleotide
uguggaggaacucaguuuu

SEQ ID NO: 2200056 - RNA, 19 nt, Artificial Sequence
  Description of Artificial Sequence: Synthetic oligonucleotide
ucuaggaugaguaggccuc

SEQ ID NO: 2200057 - RNA, 19 nt, Artificial Sequence
  Description of Artificial Sequence: Synthetic oligonucleotide
acugugaggaauugcucac

SEQ ID NO: 2200058 - RNA, 19 nt, Artificial Sequence
  Description of Artificial Sequence: Synthetic oligonucleotide
ugugaggaauugcucaccc

SEQ ID NO: 2200059 - RNA, 19 nt, Artificial Sequence
  Description of Artificial Sequence: Synthetic oligonucleotide
uuaucaggagggaagaguu

SEQ ID NO: 2200060 - RNA, 19 nt, Artificial Sequence
  Description of Artificial Sequence: Synthetic oligonucleotide
cuuguauagaacugagcug

SEQ ID NO: 2200061 - RNA, 19 nt, Artificial Sequence
  Description of Artificial Sequence: Synthetic oligonucleotide
aaccuuuucuagauggauc

SEQ ID NO: 2200062 - RNA, 19 nt, Artificial Sequence
  Description of Artificial Sequence: Synthetic oligonucleotide
uaccagagaagcuugucug

SEQ ID NO: 2200063 - RNA, 19 nt, Artificial Sequence
  Description of Artificial Sequence: Synthetic oligonucleotide
uuuucuagauggaucugcu

SEQ ID NO: 2200064 - RNA, 19 nt, Artificial Sequence
  Description of Artificial Sequence: Synthetic oligonucleotide
acuguacgcagcccgacac

SEQ ID NO: 2200065 - RNA, 19 nt, Artificial Sequence
  Description of Artificial Sequence: Synthetic oligonucleotide
agucaguggggucaucucg

SEQ ID NO: 2200066 - RNA, 19 nt, Artificial Sequence
  Description of Artificial Sequence: Synthetic oligonucleotide
uccaacaauggucugcagu

SEQ ID NO: 2200067 - RNA, 19 nt, Artificial Sequence
  Description of Artificial Sequence: Synthetic oligonucleotide
aagaguucagccaucagaa

SEQ ID NO: 2200068 - RNA, 19 nt, Artificial Sequence
  Description of Artificial Sequence: Synthetic oligonucleotide
aggaaacuuuuccucaauc

SEQ ID NO: 2200069 - RNA, 19 nt, Artificial Sequence
  Description of Artificial Sequence: Synthetic oligonucleotide
ucuguucucucuugggucc

SEQ ID NO: 2200070 - RNA, 19 nt, Artificial Sequence
  Description of Artificial Sequence: Synthetic oligonucleotide
uuuaucaggagggaagagu

SEQ ID NO: 2200071 - RNA, 19 nt, Artificial Sequence
  Description of Artificial Sequence: Synthetic oligonucleotide
uccuucuaggaugaguagg

SEQ ID NO: 2200072 - RNA, 19 nt, Artificial Sequence
  Description of Artificial Sequence: Synthetic oligonucleotide
cuggguguuuaucaggagg

SEQ ID NO: 2200073 - RNA, 19 nt, Artificial Sequence
  Description of Artificial Sequence: Synthetic oligonucleotide
aacaauggucugcaguccu

SEQ ID NO: 2200074 - RNA, 19 nt, Artificial Sequence
  Description of Artificial Sequence: Synthetic oligonucleotide
uguggcuagaugauccuga

SEQ ID NO: 2200075 - RNA, 19 nt, Artificial Sequence
  Description of Artificial Sequence: Synthetic oligonucleotide
ucucuuggguccuaucucc

SEQ ID NO: 2200076 - RNA, 19 nt, Artificial Sequence
  Description of Artificial Sequence: Synthetic oligonucleotide
gagacucuaccagagaagc

SEQ ID NO: 2200077 - RNA, 19 nt, Artificial Sequence
  Description of Artificial Sequence: Synthetic oligonucleotide
ucucucuuggguccuaucu

SEQ ID NO: 2200078 - RNA, 19 nt, Artificial Sequence
  Description of Artificial Sequence: Synthetic oligonucleotide
ggaaacuuuuccucaaucc

SEQ ID NO: 2200079 - RNA, 19 nt, Artificial Sequence
  Description of Artificial Sequence: Synthetic oligonucleotide
uggucugcaguccuucuag

SEQ ID NO: 2200080 - RNA, 19 nt, Artificial Sequence
  Description of Artificial Sequence: Synthetic oligonucleotide
ugucacagcugcuuguagc

SEQ ID NO: 2200081 - RNA, 19 nt, Artificial Sequence
  Description of Artificial Sequence: Synthetic oligonucleotide
gagucacuggcuuguauag

SEQ ID NO: 2200082 - RNA, 19 nt, Artificial Sequence
  Description of Artificial Sequence: Synthetic oligonucleotide
aagaguucuguggaaggag

SEQ ID NO: 2200083 - RNA, 19 nt, Artificial Sequence
  Description of Artificial Sequence: Synthetic oligonucleotide
gaagcuucaagguugccaa

SEQ ID NO: 2200084 - RNA, 19 nt, Artificial Sequence
  Description of Artificial Sequence: Synthetic oligonucleotide
uuuguggaggaacucaguu

SEQ ID NO: 2200085 - RNA, 19 nt, Artificial Sequence
  Description of Artificial Sequence: Synthetic oligonucleotide
gaggaggagacucuaccag

SEQ ID NO: 2200086 - RNA, 19 nt, Artificial Sequence
  Description of Artificial Sequence: Synthetic oligonucleotide
gagaggaggagacucuacc

SEQ ID NO: 2200087 - RNA, 19 nt, Artificial Sequence
  Description of Artificial Sequence: Synthetic oligonucleotide
cauuuguuggccccugagg

SEQ ID NO: 2200088 - RNA, 19 nt, Artificial Sequence
  Description of Artificial Sequence: Synthetic oligonucleotide
aggaggaacagcucccggg

SEQ ID NO: 2200089 - RNA, 19 nt, Artificial Sequence
  Description of Artificial Sequence: Synthetic oligonucleotide
ucuagcauggccacucgaa

SEQ ID NO: 2200090 - RNA, 19 nt, Artificial Sequence
  Description of Artificial Sequence: Synthetic oligonucleotide
gugggcuuucuccacaagg

SEQ ID NO: 2200091 - RNA, 19 nt, Artificial Sequence
  Description of Artificial Sequence: Synthetic oligonucleotide
uucuaggaugaguaggccu

SEQ ID NO: 2200092 - RNA, 19 nt, Artificial Sequence
  Description of Artificial Sequence: Synthetic oligonucleotide
ucuagauggaucugcuggu

SEQ ID NO: 2200093 - RNA, 19 nt, Artificial Sequence
  Description of Artificial Sequence: Synthetic oligonucleotide
ugcuagaguagagaaggag

SEQ ID NO: 2200094 - RNA, 19 nt, Artificial Sequence
  Description of Artificial Sequence: Synthetic oligonucleotide
uguuuaucaggagggaaga

SEQ ID NO: 2200095 - RNA, 19 nt, Artificial Sequence
  Description of Artificial Sequence: Synthetic oligonucleotide
uucuuagucagugggguca

SEQ ID NO: 2200096 - RNA, 19 nt, Artificial Sequence
  Description of Artificial Sequence: Synthetic oligonucleotide
guugaaagcuccuucugca

SEQ ID NO: 2200097 - RNA, 19 nt, Artificial Sequence
  Description of Artificial Sequence: Synthetic oligonucleotide
acacuguccaacaaugguc

SEQ ID NO: 2200098 - RNA, 19 nt, Artificial Sequence
  Description of Artificial Sequence: Synthetic oligonucleotide
guaacuugggcuucuguuc

SEQ ID NO: 2200099 - RNA, 19 nt, Artificial Sequence
  Description of Artificial Sequence: Synthetic oligonucleotide
aauuguucugucacagcug

SEQ ID NO: 2200100 - RNA, 19 nt, Artificial Sequence
  Description of Artificial Sequence: Synthetic oligonucleotide
uccugaagccaucuggagu

SEQ ID NO: 2200101 - RNA, 19 nt, Artificial Sequence
  Description of Artificial Sequence: Synthetic oligonucleotide
guguuuaucaggagggaag

SEQ ID NO: 2200102 - RNA, 19 nt, Artificial Sequence
  Description of Artificial Sequence: Synthetic oligonucleotide
acagacgagaauucuggga

SEQ ID NO: 2200103 - RNA, 19 nt, Artificial Sequence
  Description of Artificial Sequence: Synthetic oligonucleotide
ucugcauaugaagucucag

SEQ ID NO: 2200104 - RNA, 19 nt, Artificial Sequence
  Description of Artificial Sequence: Synthetic oligonucleotide
uuuguuggccccugaggcc

SEQ ID NO: 2200105 - RNA, 19 nt, Artificial Sequence
  Description of Artificial Sequence: Synthetic oligonucleotide
uccugcauccagucagugg

SEQ ID NO: 2200106 - RNA, 19 nt, Artificial Sequence
  Description of Artificial Sequence: Synthetic oligonucleotide
aggagacucuaccagagaa

SEQ ID NO: 2200107 - RNA, 19 nt, Artificial Sequence
  Description of Artificial Sequence: Synthetic oligonucleotide
uagugugaagaguucugug

SEQ ID NO: 2200108 - RNA, 19 nt, Artificial Sequence
  Description of Artificial Sequence: Synthetic oligonucleotide
gaagucucagcaggguacg

SEQ ID NO: 2200109 - RNA, 19 nt, Artificial Sequence
  Description of Artificial Sequence: Synthetic oligonucleotide
uuucuagauggaucugcug

SEQ ID NO: 2200110 - RNA, 19 nt, Artificial Sequence
  Description of Artificial Sequence: Synthetic oligonucleotide
uuagucaguggggucaucu

SEQ ID NO: 2200111 - RNA, 19 nt, Artificial Sequence
  Description of Artificial Sequence: Synthetic oligonucleotide
aagucugcagcuccucggu

SEQ ID NO: 2200112 - RNA, 19 nt, Artificial Sequence
  Description of Artificial Sequence: Synthetic oligonucleotide
uguccaacaauggucugca

SEQ ID NO: 2200113 - RNA, 19 nt, Artificial Sequence
  Description of Artificial Sequence: Synthetic oligonucleotide
uguacgcagcccgacacag

SEQ ID NO: 2200114 - RNA, 19 nt, Artificial Sequence
  Description of Artificial Sequence: Synthetic oligonucleotide
agaguucuguggaaggagg

SEQ ID NO: 2200115 - RNA, 19 nt, Artificial Sequence
  Description of Artificial Sequence: Synthetic oligonucleotide
agacccgguaacuugggcu

SEQ ID NO: 2200116 - RNA, 19 nt, Artificial Sequence
  Description of Artificial Sequence: Synthetic oligonucleotide
agaagcuugucugcccagc

SEQ ID NO: 2200117 - RNA, 19 nt, Artificial Sequence
  Description of Artificial Sequence: Synthetic oligonucleotide
ucggugcuagaguagagaa

SEQ ID NO: 2200118 - RNA, 19 nt, Artificial Sequence
  Description of Artificial Sequence: Synthetic oligonucleotide
ugcaguccuucuaggauga

SEQ ID NO: 2200119 - RNA, 19 nt, Artificial Sequence
  Description of Artificial Sequence: Synthetic oligonucleotide
uagauggaucugcuggucu

SEQ ID NO: 2200120 - RNA, 19 nt, Artificial Sequence
  Description of Artificial Sequence: Synthetic oligonucleotide
caaagucugcagcuccucg

SEQ ID NO: 2200121 - RNA, 19 nt, Artificial Sequence
  Description of Artificial Sequence: Synthetic oligonucleotide
acucgaagcuucaagguug

SEQ ID NO: 2200122 - RNA, 19 nt, Artificial Sequence
  Description of Artificial Sequence: Synthetic oligonucleotide
gaagcuugucugcccagcc

SEQ ID NO: 2200123 - RNA, 19 nt, Artificial Sequence
  Description of Artificial Sequence: Synthetic oligonucleotide
aauggucugcaguccuucu

SEQ ID NO: 2200124 - RNA, 19 nt, Artificial Sequence
  Description of Artificial Sequence: Synthetic oligonucleotide
cuagcauggccacucgaag

SEQ ID NO: 2200125 - RNA, 19 nt, Artificial Sequence
  Description of Artificial Sequence: Synthetic oligonucleotide
agagcagacuguacgcagc

SEQ ID NO: 2200126 - RNA, 19 nt, Artificial Sequence
  Description of Artificial Sequence: Synthetic oligonucleotide
gacgagaauucugggaagc

SEQ ID NO: 2200127 - RNA, 19 nt, Artificial Sequence
  Description of Artificial Sequence: Synthetic oligonucleotide
cugcaguccuucuaggaug

SEQ ID NO: 2200128 - RNA, 19 nt, Artificial Sequence
  Description of Artificial Sequence: Synthetic oligonucleotide
uccacaugagaggaggaga

SEQ ID NO: 2200129 - RNA, 19 nt, Artificial Sequence
  Description of Artificial Sequence: Synthetic oligonucleotide
cuguucauuauucuccaca

SEQ ID NO: 2200130 - RNA, 19 nt, Artificial Sequence
  Description of Artificial Sequence: Synthetic oligonucleotide
agacgagaauucugggaag

SEQ ID NO: 2200131 - RNA, 19 nt, Artificial Sequence
  Description of Artificial Sequence: Synthetic oligonucleotide
ugagugggcuuucuccaca

SEQ ID NO: 2200132 - RNA, 19 nt, Artificial Sequence
  Description of Artificial Sequence: Synthetic oligonucleotide
gcagacuguacgcagcccg

SEQ ID NO: 2200133 - RNA, 19 nt, Artificial Sequence
  Description of Artificial Sequence: Synthetic oligonucleotide
ugugaagaguucuguggaa

SEQ ID NO: 2200134 - RNA, 19 nt, Artificial Sequence
  Description of Artificial Sequence: Synthetic oligonucleotide
uguggagucacuggcuugu

SEQ ID NO: 2200135 - RNA, 19 nt, Artificial Sequence
  Description of Artificial Sequence: Synthetic oligonucleotide
ggaggaacagcucccgggg

SEQ ID NO: 2200136 - RNA, 19 nt, Artificial Sequence
  Description of Artificial Sequence: Synthetic oligonucleotide
accugcacccuguguagac

SEQ ID NO: 2200137 - RNA, 19 nt, Artificial Sequence
  Description of Artificial Sequence: Synthetic oligonucleotide
cuuuccugaaggccacagg

SEQ ID NO: 2200138 - RNA, 19 nt, Artificial Sequence
  Description of Artificial Sequence: Synthetic oligonucleotide
cuagaguagagaaggagcu

SEQ ID NO: 2200139 - RNA, 19 nt, Artificial Sequence
  Description of Artificial Sequence: Synthetic oligonucleotide
uguaguccuggcaauuguu

SEQ ID NO: 2200140 - RNA, 19 nt, Artificial Sequence
  Description of Artificial Sequence: Synthetic oligonucleotide
acaagguguaguccuggca

SEQ ID NO: 2200141 - RNA, 19 nt, Artificial Sequence
  Description of Artificial Sequence: Synthetic oligonucleotide
ucccggggccauuuguugg

SEQ ID NO: 2200142 - RNA, 19 nt, Artificial Sequence
  Description of Artificial Sequence: Synthetic oligonucleotide
ccaacaauggucugcaguc

SEQ ID NO: 2200143 - RNA, 19 nt, Artificial Sequence
  Description of Artificial Sequence: Synthetic oligonucleotide
augaguaggccucgguacu

SEQ ID NO: 2200144 - RNA, 19 nt, Artificial Sequence
  Description of Artificial Sequence: Synthetic oligonucleotide
aggaggagacucuaccaga

SEQ ID NO: 2200145 - RNA, 19 nt, Artificial Sequence
  Description of Artificial Sequence: Synthetic oligonucleotide
cucgaagcuucaagguugc

SEQ ID NO: 2200146 - RNA, 19 nt, Artificial Sequence
  Description of Artificial Sequence: Synthetic oligonucleotide
aagguguaguccuggcaau

SEQ ID NO: 2200147 - RNA, 19 nt, Artificial Sequence
  Description of Artificial Sequence: Synthetic oligonucleotide
uggcuagaugauccugaag

SEQ ID NO: 2200148 - RNA, 19 nt, Artificial Sequence
  Description of Artificial Sequence: Synthetic oligonucleotide
gucacuggcuuguauagaa

SEQ ID NO: 2200149 - RNA, 19 nt, Artificial Sequence
  Description of Artificial Sequence: Synthetic oligonucleotide
caagguguaguccuggcaa

SEQ ID NO: 2200150 - RNA, 19 nt, Artificial Sequence
  Description of Artificial Sequence: Synthetic oligonucleotide
gauccugaagccaucugga

SEQ ID NO: 2200151 - RNA, 19 nt, Artificial Sequence
  Description of Artificial Sequence: Synthetic oligonucleotide
gagcugugcccacagacga

SEQ ID NO: 2200152 - RNA, 19 nt, Artificial Sequence
  Description of Artificial Sequence: Synthetic oligonucleotide
uuguggaggaacucaguuu

SEQ ID NO: 2200153 - RNA, 19 nt, Artificial Sequence
  Description of Artificial Sequence: Synthetic oligonucleotide
uguucugucacagcugcuu

SEQ ID NO: 2200154 - RNA, 19 nt, Artificial Sequence
  Description of Artificial Sequence: Synthetic oligonucleotide
aguccuucuaggaugagua

SEQ ID NO: 2200155 - RNA, 19 nt, Artificial Sequence
  Description of Artificial Sequence: Synthetic oligonucleotide
ucuccacaagguguagucc

SEQ ID NO: 2200156 - RNA, 19 nt, Artificial Sequence
  Description of Artificial Sequence: Synthetic oligonucleotide
guauagaacugagcugugc

SEQ ID NO: 2200157 - RNA, 19 nt, Artificial Sequence
  Description of Artificial Sequence: Synthetic oligonucleotide
ucaaucccuguucauuauu

SEQ ID NO: 2200158 - RNA, 19 nt, Artificial Sequence
  Description of Artificial Sequence: Synthetic oligonucleotide
gaagaguucuguggaagga

SEQ ID NO: 2200159 - RNA, 19 nt, Artificial Sequence
  Description of Artificial Sequence: Synthetic oligonucleotide
ucgguacuccugcauccag

SEQ ID NO: 2200160 - RNA, 19 nt, Artificial Sequence
  Description of Artificial Sequence: Synthetic oligonucleotide
uugaaagcuccuucugcau

SEQ ID NO: 2200161 - RNA, 19 nt, Artificial Sequence
  Description of Artificial Sequence: Synthetic oligonucleotide
guacgggccuuccucaggc

SEQ ID NO: 2200162 - RNA, 19 nt, Artificial Sequence
  Description of Artificial Sequence: Synthetic oligonucleotide
uaggaaacuuuuccucaau

SEQ ID NO: 2200163 - RNA, 19 nt, Artificial Sequence
  Description of Artificial Sequence: Synthetic oligonucleotide
ggcaauuguucugucacag

SEQ ID NO: 2200164 - RNA, 19 nt, Artificial Sequence
  Description of Artificial Sequence: Synthetic oligonucleotide
cagggcuccaggaaguguc

SEQ ID NO: 2200165 - RNA, 19 nt, Artificial Sequence
  Description of Artificial Sequence: Synthetic oligonucleotide
cuggaguuuguggaggaac

SEQ ID NO: 2200166 - RNA, 19 nt, Artificial Sequence
  Description of Artificial Sequence: Synthetic oligonucleotide
uggcaauuguucugucaca

SEQ ID NO: 2200167 - RNA, 19 nt, Artificial Sequence
  Description of Artificial Sequence: Synthetic oligonucleotide
augaagucucagcagggua

SEQ ID NO: 2200168 - RNA, 19 nt, Artificial Sequence
  Description of Artificial Sequence: Synthetic oligonucleotide
gagaagcuugucugcccag

SEQ ID NO: 2200169 - RNA, 19 nt, Artificial Sequence
  Description of Artificial Sequence: Synthetic oligonucleotide
ucgaaggacugugaggaau

SEQ ID NO: 2200170 - RNA, 19 nt, Artificial Sequence
  Description of Artificial Sequence: Synthetic oligonucleotide
acuggcuuguauagaacug

SEQ ID NO: 2200171 - RNA, 19 nt, Artificial Sequence
  Description of Artificial Sequence: Synthetic oligonucleotide
cacaagguguaguccuggc

SEQ ID NO: 2200172 - RNA, 19 nt, Artificial Sequence
  Description of Artificial Sequence: Synthetic oligonucleotide
guccuaucuccccuugacc

SEQ ID NO: 2200173 - RNA, 19 nt, Artificial Sequence
  Description of Artificial Sequence: Synthetic oligonucleotide
guuuaucaggagggaagag

SEQ ID NO: 2200174 - RNA, 19 nt, Artificial Sequence
  Description of Artificial Sequence: Synthetic oligonucleotide
uaucuccccuugaccgacg

SEQ ID NO: 2200175 - RNA, 19 nt, Artificial Sequence
  Description of Artificial Sequence: Synthetic oligonucleotide
gacacagcgccagcugagg

SEQ ID NO: 2200176 - RNA, 19 nt, Artificial Sequence
  Description of Artificial Sequence: Synthetic oligonucleotide
cuaggaugaguaggccucg

SEQ ID NO: 2200177 - RNA, 19 nt, Artificial Sequence
  Description of Artificial Sequence: Synthetic oligonucleotide
cucuuggguccuaucuccc

SEQ ID NO: 2200178 - RNA, 19 nt, Artificial Sequence
  Description of Artificial Sequence: Synthetic oligonucleotide
gaaagcuccuucugcauau

SEQ ID NO: 2200179 - RNA, 19 nt, Artificial Sequence
  Description of Artificial Sequence: Synthetic oligonucleotide
guccagacccgguaacuug

SEQ ID NO: 2200180 - RNA, 19 nt, Artificial Sequence
  Description of Artificial Sequence: Synthetic oligonucleotide
cuucuaggaugaguaggcc

SEQ ID NO: 2200181 - RNA, 19 nt, Artificial Sequence
  Description of Artificial Sequence: Synthetic oligonucleotide
cugcacccuguguagacac

SEQ ID NO: 2200182 - RNA, 19 nt, Artificial Sequence
  Description of Artificial Sequence: Synthetic oligonucleotide
cugcuggucuagcauggcc

SEQ ID NO: 2200183 - RNA, 19 nt, Artificial Sequence
  Description of Artificial Sequence: Synthetic oligonucleotide
augauccugaagccaucug

SEQ ID NO: 2200184 - RNA, 19 nt, Artificial Sequence
  Description of Artificial Sequence: Synthetic oligonucleotide
caacaauggucugcagucc

SEQ ID NO: 2200185 - RNA, 19 nt, Artificial Sequence
  Description of Artificial Sequence: Synthetic oligonucleotide
guccuucuaggaugaguag

SEQ ID NO: 2200186 - RNA, 19 nt, Artificial Sequence
  Description of Artificial Sequence: Synthetic oligonucleotide
gugaggaauugcucacccc

SEQ ID NO: 2200187 - RNA, 19 nt, Artificial Sequence
  Description of Artificial Sequence: Synthetic oligonucleotide
ugucugcccagccuucuua

SEQ ID NO: 2200188 - RNA, 19 nt, Artificial Sequence
  Description of Artificial Sequence: Synthetic oligonucleotide
agcagacuguacgcagccc

SEQ ID NO: 2200189 - RNA, 19 nt, Artificial Sequence
  Description of Artificial Sequence: Synthetic oligonucleotide
cugcuuguagcaccugcac

SEQ ID NO: 2200190 - RNA, 19 nt, Artificial Sequence
  Description of Artificial Sequence: Synthetic oligonucleotide
uccucaaucccuguucauu

SEQ ID NO: 2200191 - RNA, 19 nt, Artificial Sequence
  Description of Artificial Sequence: Synthetic oligonucleotide
cauggccacucgaagcuuc

SEQ ID NO: 2200192 - RNA, 19 nt, Artificial Sequence
  Description of Artificial Sequence: Synthetic oligonucleotide
aucucuccuccaccaagug

SEQ ID NO: 2200193 - RNA, 19 nt, Artificial Sequence
  Description of Artificial Sequence: Synthetic oligonucleotide
guaguccuggcaauuguuc

SEQ ID NO: 2200194 - RNA, 19 nt, Artificial Sequence
  Description of Artificial Sequence: Synthetic oligonucleotide
cuccacaugagaggaggag

SEQ ID NO: 2200195 - RNA, 19 nt, Artificial Sequence
  Description of Artificial Sequence: Synthetic oligonucleotide
ugaagccaucuggaguuug

SEQ ID NO: 2200196 - RNA, 19 nt, Artificial Sequence
  Description of Artificial Sequence: Synthetic oligonucleotide
cugcccagccuucuuaguc

SEQ ID NO: 2200197 - RNA, 19 nt, Artificial Sequence
  Description of Artificial Sequence: Synthetic oligonucleotide
gccaucuggaguuugugga

SEQ ID NO: 2200198 - RNA, 19 nt, Artificial Sequence
  Description of Artificial Sequence: Synthetic oligonucleotide
acagagcagacuguacgca

SEQ ID NO: 2200199 - RNA, 19 nt, Artificial Sequence
  Description of Artificial Sequence: Synthetic oligonucleotide
agcuccucggugcuagagu

SEQ ID NO: 2200200 - RNA, 19 nt, Artificial Sequence
  Description of Artificial Sequence: Synthetic oligonucleotide
agguugccaaagucugcag

SEQ ID NO: 2200201 - RNA, 19 nt, Artificial Sequence
  Description of Artificial Sequence: Synthetic oligonucleotide
agacuguacgcagcccgac

SEQ ID NO: 2200202 - RNA, 19 nt, Artificial Sequence
  Description of Artificial Sequence: Synthetic oligonucleotide
ugcccacagacgagaauuc

SEQ ID NO: 2200203 - RNA, 19 nt, Artificial Sequence
  Description of Artificial Sequence: Synthetic oligonucleotide
uaggaugaguaggccucgg

SEQ ID NO: 2200204 - RNA, 19 nt, Artificial Sequence
  Description of Artificial Sequence: Synthetic oligonucleotide
caggguacgggccuuccuc

SEQ ID NO: 2200205 - RNA, 19 nt, Artificial Sequence
  Description of Artificial Sequence: Synthetic oligonucleotide
ggagacucuaccagagaag

SEQ ID NO: 2200206 - RNA, 19 nt, Artificial Sequence
  Description of Artificial Sequence: Synthetic oligonucleotide
ccacaugagaggaggagac

SEQ ID NO: 2200207 - RNA, 19 nt, Artificial Sequence
  Description of Artificial Sequence: Synthetic oligonucleotide
aggguacgggccuuccuca

SEQ ID NO: 2200208 - RNA, 19 nt, Artificial Sequence
  Description of Artificial Sequence: Synthetic oligonucleotide
uggacgugugccuccacuu

SEQ ID NO: 2200209 - RNA, 19 nt, Artificial Sequence
  Description of Artificial Sequence: Synthetic oligonucleotide
agaaccuuuucuagaugga

SEQ ID NO: 2200210 - RNA, 19 nt, Artificial Sequence
  Description of Artificial Sequence: Synthetic oligonucleotide
gguccuaucuccccuugac

SEQ ID NO: 2200211 - RNA, 19 nt, Artificial Sequence
  Description of Artificial Sequence: Synthetic oligonucleotide
gguacuccugcauccaguc

SEQ ID NO: 2200212 - RNA, 19 nt, Artificial Sequence
  Description of Artificial Sequence: Synthetic oligonucleotide
uagucaguggggucaucuc

SEQ ID NO: 2200213 - RNA, 19 nt, Artificial Sequence
  Description of Artificial Sequence: Synthetic oligonucleotide
cugugaggaauugcucacc

SEQ ID NO: 2200214 - RNA, 19 nt, Artificial Sequence
  Description of Artificial Sequence: Synthetic oligonucleotide
aggaugaguaggccucggu

SEQ ID NO: 2200215 - RNA, 19 nt, Artificial Sequence
  Description of Artificial Sequence: Synthetic oligonucleotide
aguugcagcaggguccccu

SEQ ID NO: 2200216 - RNA, 19 nt, Artificial Sequence
  Description of Artificial Sequence: Synthetic oligonucleotide
gacucuaccagagaagcuu

SEQ ID NO: 2200217 - RNA, 19 nt, Artificial Sequence
  Description of Artificial Sequence: Synthetic oligonucleotide
ugugcccacagacgagaau

SEQ ID NO: 2200218 - RNA, 19 nt, Artificial Sequence
  Description of Artificial Sequence: Synthetic oligonucleotide
uggguccuaucuccccuug

SEQ ID NO: 2200219 - RNA, 19 nt, Artificial Sequence
  Description of Artificial Sequence: Synthetic oligonucleotide
cugagugggcuuucuccac

SEQ ID NO: 2200220 - RNA, 19 nt, Artificial Sequence
  Description of Artificial Sequence: Synthetic oligonucleotide
cuaucuccccuugaccgac

SEQ ID NO: 2200221 - RNA, 19 nt, Artificial Sequence
  Description of Artificial Sequence: Synthetic oligonucleotide
aagcuucaagguugccaaa

SEQ ID NO: 2200222 - RNA, 19 nt, Artificial Sequence
  Description of Artificial Sequence: Synthetic oligonucleotide
agaugauccugaagccauc

SEQ ID NO: 2200223 - RNA, 19 nt, Artificial Sequence
  Description of Artificial Sequence: Synthetic oligonucleotide
uccccuugaccgacgucug

SEQ ID NO: 2200224 - RNA, 19 nt, Artificial Sequence
  Description of Artificial Sequence: Synthetic oligonucleotide
gacuguacgcagcccgaca

SEQ ID NO: 2200225 - RNA, 19 nt, Artificial Sequence
  Description of Artificial Sequence: Synthetic oligonucleotide
gcaauuguucugucacagc

SEQ ID NO: 2200226 - RNA, 19 nt, Artificial Sequence
  Description of Artificial Sequence: Synthetic oligonucleotide
cuagauggaucugcugguc

SEQ ID NO: 2200227 - RNA, 19 nt, Artificial Sequence
  Description of Artificial Sequence: Synthetic oligonucleotide
gaggagacucuaccagaga

SEQ ID NO: 2200228 - RNA, 19 nt, Artificial Sequence
  Description of Artificial Sequence: Synthetic oligonucleotide
agcucuggugacaucugug

SEQ ID NO: 2200229 - RNA, 19 nt, Artificial Sequence
  Description of Artificial Sequence: Synthetic oligonucleotide
caauggucugcaguccuuc

SEQ ID NO: 2200230 - RNA, 19 nt, Artificial Sequence
  Description of Artificial Sequence: Synthetic oligonucleotide
agcaggguacgggccuucc

SEQ ID NO: 2200231 - RNA, 19 nt, Artificial Sequence
  Description of Artificial Sequence: Synthetic oligonucleotide
ggagucacuggcuuguaua

SEQ ID NO: 2200232 - RNA, 19 nt, Artificial Sequence
  Description of Artificial Sequence: Synthetic oligonucleotide
gguacgggccuuccucagg

SEQ ID NO: 2200233 - RNA, 19 nt, Artificial Sequence
  Description of Artificial Sequence: Synthetic oligonucleotide
agcgccagcugaggugacc

SEQ ID NO: 2200234 - RNA, 19 nt, Artificial Sequence
  Description of Artificial Sequence: Synthetic oligonucleotide
gguguaguccuggcaauug

SEQ ID NO: 2200235 - RNA, 19 nt, Artificial Sequence
  Description of Artificial Sequence: Synthetic oligonucleotide
agcccgacacagcgccagc

SEQ ID NO: 2200236 - RNA, 19 nt, Artificial Sequence
  Description of Artificial Sequence: Synthetic oligonucleotide
cucccggggccauuuguug

SEQ ID NO: 2200237 - RNA, 19 nt, Artificial Sequence
  Description of Artificial Sequence: Synthetic oligonucleotide
gaugauccugaagccaucu

SEQ ID NO: 2200238 - RNA, 19 nt, Artificial Sequence
  Description of Artificial Sequence: Synthetic oligonucleotide
gccuguggcuagaugaucc

SEQ ID NO: 2200239 - RNA, 19 nt, Artificial Sequence
  Description of Artificial Sequence: Synthetic oligonucleotide
ucuuagucaguggggucau

SEQ ID NO: 2200240 - RNA, 19 nt, Artificial Sequence
  Description of Artificial Sequence: Synthetic oligonucleotide
gacgugugccuccacuucu

SEQ ID NO: 2200241 - RNA, 19 nt, Artificial Sequence
  Description of Artificial Sequence: Synthetic oligonucleotide
cagacccgguaacuugggc

SEQ ID NO: 2200242 - RNA, 19 nt, Artificial Sequence
  Description of Artificial Sequence: Synthetic oligonucleotide
gaaccuuuucuagauggau

SEQ ID NO: 2200243 - RNA, 19 nt, Artificial Sequence
  Description of Artificial Sequence: Synthetic oligonucleotide
gucaguggggucaucucga

SEQ ID NO: 2200244 - RNA, 19 nt, Artificial Sequence
  Description of Artificial Sequence: Synthetic oligonucleotide
uucucucuuggguccuauc

SEQ ID NO: 2200245 - RNA, 19 nt, Artificial Sequence
  Description of Artificial Sequence: Synthetic oligonucleotide
ggaaguguccaucucuccu

SEQ ID NO: 2200246 - RNA, 19 nt, Artificial Sequence
  Description of Artificial Sequence: Synthetic oligonucleotide
agucacuggcuuguauaga

SEQ ID NO: 2200247 - RNA, 19 nt, Artificial Sequence
  Description of Artificial Sequence: Synthetic oligonucleotide
ucuggaguuuguggaggaa

SEQ ID NO: 2200248 - RNA, 19 nt, Artificial Sequence
  Description of Artificial Sequence: Synthetic oligonucleotide
uucagccaucagaaccuuu

SEQ ID NO: 2200249 - RNA, 19 nt, Artificial Sequence
  Description of Artificial Sequence: Synthetic oligonucleotide
uuccucaaucccuguucau

SEQ ID NO: 2200250 - RNA, 19 nt, Artificial Sequence
  Description of Artificial Sequence: Synthetic oligonucleotide
ggucuagcauggccacucg

SEQ ID NO: 2200251 - RNA, 19 nt, Artificial Sequence
  Description of Artificial Sequence: Synthetic oligonucleotide
aucuccccuugaccgacgu

SEQ ID NO: 2200252 - RNA, 19 nt, Artificial Sequence
  Description of Artificial Sequence: Synthetic oligonucleotide
cuguggcuagaugauccug

SEQ ID NO: 2200253 - RNA, 19 nt, Artificial Sequence
  Description of Artificial Sequence: Synthetic oligonucleotide
ggaugaguaggccucggua

SEQ ID NO: 2200254 - RNA, 19 nt, Artificial Sequence
  Description of Artificial Sequence: Synthetic oligonucleotide
ggcuuguauagaacugagc

SEQ ID NO: 2200255 - RNA, 19 nt, Artificial Sequence
  Description of Artificial Sequence: Synthetic oligonucleotide
uggugacaucuguggaguc

SEQ ID NO: 2200256 - RNA, 19 nt, Artificial Sequence
  Description of Artificial Sequence: Synthetic oligonucleotide
cucggugcuagaguagaga

SEQ ID NO: 2200257 - RNA, 19 nt, Artificial Sequence
  Description of Artificial Sequence: Synthetic oligonucleotide
guggcuagaugauccugaa

SEQ ID NO: 2200258 - RNA, 19 nt, Artificial Sequence
  Description of Artificial Sequence: Synthetic oligonucleotide
cagacuguacgcagcccga

SEQ ID NO: 2200259 - RNA, 19 nt, Artificial Sequence
  Description of Artificial Sequence: Synthetic oligonucleotide
uggggucaucucgaaggac

SEQ ID NO: 2200260 - RNA, 19 nt, Artificial Sequence
  Description of Artificial Sequence: Synthetic oligonucleotide
cucaggcucuggacgugug

SEQ ID NO: 2200261 - RNA, 19 nt, Artificial Sequence
  Description of Artificial Sequence: Synthetic oligonucleotide
gcuggucuagcauggccac

SEQ ID NO: 2200262 - RNA, 19 nt, Artificial Sequence
  Description of Artificial Sequence: Synthetic oligonucleotide
gacccgguaacuugggcuu

SEQ ID NO: 2200263 - RNA, 19 nt, Artificial Sequence
  Description of Artificial Sequence: Synthetic oligonucleotide
gucuagcauggccacucga

SEQ ID NO: 2200264 - RNA, 19 nt, Artificial Sequence
  Description of Artificial Sequence: Synthetic oligonucleotide
guacuccugcauccaguca

SEQ ID NO: 2200265 - RNA, 19 nt, Artificial Sequence
  Description of Artificial Sequence: Synthetic oligonucleotide
guggaggaacucaguuuug

SEQ ID NO: 2200266 - RNA, 19 nt, Artificial Sequence
  Description of Artificial Sequence: Synthetic oligonucleotide
cuccccuugaccgacgucu

SEQ ID NO: 2200267 - RNA, 19 nt, Artificial Sequence
  Description of Artificial Sequence: Synthetic oligonucleotide
ccugagugggcuuucucca

SEQ ID NO: 2200268 - RNA, 19 nt, Artificial Sequence
  Description of Artificial Sequence: Synthetic oligonucleotide
ucuggacgugugccuccac

SEQ ID NO: 2200269 - RNA, 19 nt, Artificial Sequence
  Description of Artificial Sequence: Synthetic oligonucleotide
uccuggcaauuguucuguc

SEQ ID NO: 2200270 - RNA, 19 nt, Artificial Sequence
  Description of Artificial Sequence: Synthetic oligonucleotide
gaacugagcugugcccaca

SEQ ID NO: 2200271 - RNA, 19 nt, Artificial Sequence
  Description of Artificial Sequence: Synthetic oligonucleotide
cagcccgacacagcgccag

SEQ ID NO: 2200272 - RNA, 19 nt, Artificial Sequence
  Description of Artificial Sequence: Synthetic oligonucleotide
cuguguagacacuguccaa

SEQ ID NO: 2200273 - RNA, 19 nt, Artificial Sequence
  Description of Artificial Sequence: Synthetic oligonucleotide
acccgguaacuugggcuuc

SEQ ID NO: 2200274 - RNA, 19 nt, Artificial Sequence
  Description of Artificial Sequence: Synthetic oligonucleotide
agcugugcccacagacgag

SEQ ID NO: 2200275 - RNA, 19 nt, Artificial Sequence
  Description of Artificial Sequence: Synthetic oligonucleotide
gggucaucucgaaggacug

SEQ ID NO: 2200276 - RNA, 19 nt, Artificial Sequence
  Description of Artificial Sequence: Synthetic oligonucleotide
uacgggccuuccucaggcu

SEQ ID NO: 2200277 - RNA, 19 nt, Artificial Sequence
  Description of Artificial Sequence: Synthetic oligonucleotide
gugcccacagacgagaauu

SEQ ID NO: 2200278 - RNA, 19 nt, Artificial Sequence
  Description of Artificial Sequence: Synthetic oligonucleotide
acgcagcccgacacagcgc

SEQ ID NO: 2200279 - RNA, 19 nt, Artificial Sequence
  Description of Artificial Sequence: Synthetic oligonucleotide
ggacgugugccuccacuuc

SEQ ID NO: 2200280 - RNA, 19 nt, Artificial Sequence
  Description of Artificial Sequence: Synthetic oligonucleotide
ccacaagguguaguccugg

SEQ ID NO: 2200281 - RNA, 19 nt, Artificial Sequence
  Description of Artificial Sequence: Synthetic oligonucleotide
cuguacgcagcccgacaca

SEQ ID NO: 2200282 - RNA, 19 nt, Artificial Sequence
  Description of Artificial Sequence: Synthetic oligonucleotide
ccucaaucccuguucauua

SEQ ID NO: 2200283 - RNA, 19 nt, Artificial Sequence
  Description of Artificial Sequence: Synthetic oligonucleotide
ccagacccgguaacuuggg

SEQ ID NO: 2200284 - RNA, 19 nt, Artificial Sequence
  Description of Artificial Sequence: Synthetic oligonucleotide
agguguaguccuggcaauu

SEQ ID NO: 2200285 - RNA, 19 nt, Artificial Sequence
  Description of Artificial Sequence: Synthetic oligonucleotide
gccucgguacuccugcauc

SEQ ID NO: 2200286 - RNA, 19 nt, Artificial Sequence
  Description of Artificial Sequence: Synthetic oligonucleotide
ccuggguguuuaucaggag

SEQ ID NO: 2200287 - RNA, 19 nt, Artificial Sequence
  Description of Artificial Sequence: Synthetic oligonucleotide
ggguacgggccuuccucag

SEQ ID NO: 2200288 - RNA, 19 nt, Artificial Sequence
  Description of Artificial Sequence: Synthetic oligonucleotide
accaagugaugaggccuga

SEQ ID NO: 2200289 - RNA, 19 nt, Artificial Sequence
  Description of Artificial Sequence: Synthetic oligonucleotide
guacgcagcccgacacagc

SEQ ID NO: 2200290 - RNA, 19 nt, Artificial Sequence
  Description of Artificial Sequence: Synthetic oligonucleotide
cccggggccauuuguuggc

SEQ ID NO: 2200291 - RNA, 19 nt, Artificial Sequence
  Description of Artificial Sequence: Synthetic oligonucleotide
gugcuagaguagagaagga

SEQ ID NO: 2200292 - RNA, 19 nt, Artificial Sequence
  Description of Artificial Sequence: Synthetic oligonucleotide
cucgguacuccugcaucca

SEQ ID NO: 2200293 - RNA, 19 nt, Artificial Sequence
  Description of Artificial Sequence: Synthetic oligonucleotide
gugacccuccugccuccug

SEQ ID NO: 2200294 - RNA, 19 nt, Artificial Sequence
  Description of Artificial Sequence: Synthetic oligonucleotide
cucaaucccuguucauuau

SEQ ID NO: 2200295 - RNA, 19 nt, Artificial Sequence
  Description of Artificial Sequence: Synthetic oligonucleotide
gcgccagcugaggugaccc

SEQ ID NO: 2200296 - RNA, 19 nt, Artificial Sequence
  Description of Artificial Sequence: Synthetic oligonucleotide
augaggccugagugggcuu

SEQ ID NO: 2200297 - RNA, 19 nt, Artificial Sequence
  Description of Artificial Sequence: Synthetic oligonucleotide
ccucggugcuagaguagag

SEQ ID NO: 2200298 - RNA, 19 nt, Artificial Sequence
  Description of Artificial Sequence: Synthetic oligonucleotide
cuggacgugugccuccacu

SEQ ID NO: 2200299 - RNA, 19 nt, Artificial Sequence
  Description of Artificial Sequence: Synthetic oligonucleotide
ccuaucuccccuugaccga

SEQ ID NO: 2200300 - RNA, 19 nt, Artificial Sequence
  Description of Artificial Sequence: Synthetic oligonucleotide
cuuagucaguggggucauc

SEQ ID NO: 2200301 - RNA, 19 nt, Artificial Sequence
  Description of Artificial Sequence: Synthetic oligonucleotide
cgaagcuucaagguugcca

SEQ ID NO: 2200302 - RNA, 19 nt, Artificial Sequence
  Description of Artificial Sequence: Synthetic oligonucleotide
cucuaccagagaagcuugu

SEQ ID NO: 2200303 - RNA, 19 nt, Artificial Sequence
  Description of Artificial Sequence: Synthetic oligonucleotide
ggaacagcucccggggcca

SEQ ID NO: 2200304 - RNA, 19 nt, Artificial Sequence
  Description of Artificial Sequence: Synthetic oligonucleotide
gaauucugggaagcugcuu

SEQ ID NO: 2200305 - RNA, 19 nt, Artificial Sequence
  Description of Artificial Sequence: Synthetic oligonucleotide
ggguguuuaucaggaggga

SEQ ID NO: 2200306 - RNA, 19 nt, Artificial Sequence
  Description of Artificial Sequence: Synthetic oligonucleotide
caguccuucuaggaugagu

SEQ ID NO: 2200307 - RNA, 19 nt, Artificial Sequence
  Description of Artificial Sequence: Synthetic oligonucleotide
gccccugaggccuggucca

SEQ ID NO: 2200308 - RNA, 19 nt, Artificial Sequence
  Description of Artificial Sequence: Synthetic oligonucleotide
cuuguagcaccugcacccu

SEQ ID NO: 2200309 - RNA, 19 nt, Artificial Sequence
  Description of Artificial Sequence: Synthetic oligonucleotide
ggcucuggacgugugccuc

SEQ ID NO: 2200310 - RNA, 19 nt, Artificial Sequence
  Description of Artificial Sequence: Synthetic oligonucleotide
cccgacacagcgccagcug

SEQ ID NO: 2200311 - RNA, 19 nt, Artificial Sequence
  Description of Artificial Sequence: Synthetic oligonucleotide
uaguugcagcagggucccc

SEQ ID NO: 2200312 - RNA, 19 nt, Artificial Sequence
  Description of Artificial Sequence: Synthetic oligonucleotide
cucuggacgugugccucca

SEQ ID NO: 2200313 - RNA, 19 nt, Artificial Sequence
  Description of Artificial Sequence: Synthetic oligonucleotide
gcagcaggguccccuucuc

SEQ ID NO: 2200314 - RNA, 19 nt, Artificial Sequence
  Description of Artificial Sequence: Synthetic oligonucleotide
acugggccuguggcuagau

SEQ ID NO: 2200315 - RNA, 19 nt, Artificial Sequence
  Description of Artificial Sequence: Synthetic oligonucleotide
cacccuguguagacacugu

SEQ ID NO: 2200316 - RNA, 19 nt, Artificial Sequence
  Description of Artificial Sequence: Synthetic oligonucleotide
cacaugagaggaggagacu

SEQ ID NO: 2200317 - RNA, 19 nt, Artificial Sequence
  Description of Artificial Sequence: Synthetic oligonucleotide
ccgacacagcgccagcuga

SEQ ID NO: 2200318 - RNA, 19 nt, Artificial Sequence
  Description of Artificial Sequence: Synthetic oligonucleotide
ggccugagugggcuuucuc

SEQ ID NO: 2200319 - RNA, 19 nt, Artificial Sequence
  Description of Artificial Sequence: Synthetic oligonucleotide
caccugcacccuguguaga

SEQ ID NO: 2200320 - RNA, 19 nt, Artificial Sequence
  Description of Artificial Sequence: Synthetic oligonucleotide
cagcgccagcugaggugac

SEQ ID NO: 2200321 - RNA, 19 nt, Artificial Sequence
  Description of Artificial Sequence: Synthetic oligonucleotide
cagcaggguacgggccuuc

SEQ ID NO: 2200322 - RNA, 19 nt, Artificial Sequence
  Description of Artificial Sequence: Synthetic oligonucleotide
ccuucacagagcagacugu

SEQ ID NO: 2200323 - RNA, 19 nt, Artificial Sequence
  Description of Artificial Sequence: Synthetic oligonucleotide
ccugaaggccacagguagu

SEQ ID NO: 2200324 - RNA, 19 nt, Artificial Sequence
  Description of Artificial Sequence: Synthetic oligonucleotide
cuguucucucuuggguccu

SEQ ID NO: 2200325 - RNA, 19 nt, Artificial Sequence
  Description of Artificial Sequence: Synthetic oligonucleotide
uccugccuccuggguguuu

SEQ ID NO: 2200326 - RNA, 19 nt, Artificial Sequence
  Description of Artificial Sequence: Synthetic oligonucleotide
ccggggccauuuguuggcc

SEQ ID NO: 2200327 - RNA, 19 nt, Artificial Sequence
  Description of Artificial Sequence: Synthetic oligonucleotide
cacugggccuguggcuaga

SEQ ID NO: 2200328 - RNA, 19 nt, Artificial Sequence
  Description of Artificial Sequence: Synthetic oligonucleotide
gcccacagacgagaauucu

SEQ ID NO: 2200329 - RNA, 19 nt, Artificial Sequence
  Description of Artificial Sequence: Synthetic oligonucleotide
cuggucuagcauggccacu

SEQ ID NO: 2200330 - RNA, 19 nt, Artificial Sequence
  Description of Artificial Sequence: Synthetic oligonucleotide
ccgguaacuugggcuucug

SEQ ID NO: 2200331 - RNA, 19 nt, Artificial Sequence
  Description of Artificial Sequence: Synthetic oligonucleotide
gcagcccgacacagcgcca

SEQ ID NO: 2200332 - RNA, 19 nt, Artificial Sequence
  Description of Artificial Sequence: Synthetic oligonucleotide
gcccgacacagcgccagcu

SEQ ID NO: 2200333 - RNA, 19 nt, Artificial Sequence
  Description of Artificial Sequence: Synthetic oligonucleotide
gcucccggggccauuuguu

SEQ ID NO: 2200334 - RNA, 19 nt, Artificial Sequence
  Description of Artificial Sequence: Synthetic oligonucleotide
cgggccuuccucaggcucu

SEQ ID NO: 2200335 - RNA, 19 nt, Artificial Sequence
  Description of Artificial Sequence: Synthetic oligonucleotide
cgguaacuugggcuucugu

SEQ ID NO: 2200336 - RNA, 19 nt, Artificial Sequence
  Description of Artificial Sequence: Synthetic oligonucleotide
ccucaggcucuggacgugu

SEQ ID NO: 2200337 - RNA, 19 nt, Artificial Sequence
  Description of Artificial Sequence: Synthetic oligonucleotide
cccgguaacuugggcuucu

SEQ ID NO: 2200338 - RNA, 19 nt, Artificial Sequence
  Description of Artificial Sequence: Synthetic oligonucleotide
aaggaacauagccugaggc

SEQ ID NO: 2200339 - RNA, 19 nt, Artificial Sequence
  Description of Artificial Sequence: Synthetic oligonucleotide
ucuaccaccauguagugcc

SEQ ID NO: 2200340 - RNA, 19 nt, Artificial Sequence
  Description of Artificial Sequence: Synthetic oligonucleotide
ucucaauuugcccuugugg

SEQ ID NO: 2200341 - RNA, 19 nt, Artificial Sequence
  Description of Artificial Sequence: Synthetic oligonucleotide
gauguugucaaaacuagag

SEQ ID NO: 2200342 - RNA, 19 nt, Artificial Sequence
  Description of Artificial Sequence: Synthetic oligonucleotide
acuuguauccacuggugcc

SEQ ID NO: 2200343 - RNA, 19 nt, Artificial Sequence
  Description of Artificial Sequence: Synthetic oligonucleotide
agagccauggccuuuuacg

SEQ ID NO: 2200344 - RNA, 19 nt, Artificial Sequence
  Description of Artificial Sequence: Synthetic oligonucleotide
acucccaaggcccaggagc

SEQ ID NO: 2200345 - RNA, 19 nt, Artificial Sequence
  Description of Artificial Sequence: Synthetic oligonucleotide
agaagccgcaaucagaguc

SEQ ID NO: 2200346 - RNA, 19 nt, Artificial Sequence
  Description of Artificial Sequence: Synthetic oligonucleotide
aaucagagucuucaaagga

SEQ ID NO: 2200347 - RNA, 19 nt, Artificial Sequence
  Description of Artificial Sequence: Synthetic oligonucleotide
uugaucuggacuuguaucc

SEQ ID NO: 2200348 - RNA, 19 nt, Artificial Sequence
  Description of Artificial Sequence: Synthetic oligonucleotide
uauggucuguccaaggacc

SEQ ID NO: 2200349 - RNA, 19 nt, Artificial Sequence
  Description of Artificial Sequence: Synthetic oligonucleotide
ucaucgagggcaaugggcc

SEQ ID NO: 2200350 - RNA, 19 nt, Artificial Sequence
  Description of Artificial Sequence: Synthetic oligonucleotide
uuucacccuggcuagacgg

SEQ ID NO: 2200351 - RNA, 19 nt, Artificial Sequence
  Description of Artificial Sequence: Synthetic oligonucleotide
aaaguuacaggagaccucu

SEQ ID NO: 2200352 - RNA, 19 nt, Artificial Sequence
  Description of Artificial Sequence: Synthetic oligonucleotide
auguugucaaaacuagagg

SEQ ID NO: 2200353 - RNA, 19 nt, Artificial Sequence
  Description of Artificial Sequence: Synthetic oligonucleotide
cauauucagagccauggcc

SEQ ID NO: 2200354 - RNA, 19 nt, Artificial Sequence
  Description of Artificial Sequence: Synthetic oligonucleotide
gaggccuucaaacagcagc

SEQ ID NO: 2200355 - RNA, 19 nt, Artificial Sequence
  Description of Artificial Sequence: Synthetic oligonucleotide
cauagucacauuauccacc

SEQ ID NO: 2200356 - RNA, 19 nt, Artificial Sequence
  Description of Artificial Sequence: Synthetic oligonucleotide
guuacaggagaccucuugg

SEQ ID NO: 2200357 - RNA, 19 nt, Artificial Sequence
  Description of Artificial Sequence: Synthetic oligonucleotide
ugugaggugaacugugugc

SEQ ID NO: 2200358 - RNA, 19 nt, Artificial Sequence
  Description of Artificial Sequence: Synthetic oligonucleotide
aguacauuugggcuggugu

SEQ ID NO: 2200359 - RNA, 19 nt, Artificial Sequence
  Description of Artificial Sequence: Synthetic oligonucleotide
caaucagagucuucaaagg

SEQ ID NO: 2200360 - RNA, 19 nt, Artificial Sequence
  Description of Artificial Sequence: Synthetic oligonucleotide
ucaaaguuacaggagaccu

SEQ ID NO: 2200361 - RNA, 19 nt, Artificial Sequence
  Description of Artificial Sequence: Synthetic oligonucleotide
uuugaucuggacuuguauc

SEQ ID NO: 2200362 - RNA, 19 nt, Artificial Sequence
  Description of Artificial Sequence: Synthetic oligonucleotide
uugguguugaccucuagcu

SEQ ID NO: 2200363 - RNA, 19 nt, Artificial Sequence
  Description of Artificial Sequence: Synthetic oligonucleotide
caaaggaacagcuccuggg

SEQ ID NO: 2200364 - RNA, 19 nt, Artificial Sequence
  Description of Artificial Sequence: Synthetic oligonucleotide
uguccaaggaccccaagga

SEQ ID NO: 2200365 - RNA, 19 nt, Artificial Sequence
  Description of Artificial Sequence: Synthetic oligonucleotide
gaccccaaggaacauagcc

SEQ ID NO: 2200366 - RNA, 19 nt, Artificial Sequence
  Description of Artificial Sequence: Synthetic oligonucleotide
gguguugaccucuagcugg

SEQ ID NO: 2200367 - RNA, 19 nt, Artificial Sequence
  Description of Artificial Sequence: Synthetic oligonucleotide
ugugccaugguacccauuc

SEQ ID NO: 2200368 - RNA, 19 nt, Artificial Sequence
  Description of Artificial Sequence: Synthetic oligonucleotide
aauuugcccuugugguacc

SEQ ID NO: 2200369 - RNA, 19 nt, Artificial Sequence
  Description of Artificial Sequence: Synthetic oligonucleotide
agaguuggacacuuugauc

SEQ ID NO: 2200370 - RNA, 19 nt, Artificial Sequence
  Description of Artificial Sequence: Synthetic oligonucleotide
agcuggugaagccuuggcc

SEQ ID NO: 2200371 - RNA, 19 nt, Artificial Sequence
  Description of Artificial Sequence: Synthetic oligonucleotide
uuuacgcggugccaguggg

SEQ ID NO: 2200372 - RNA, 19 nt, Artificial Sequence
  Description of Artificial Sequence: Synthetic oligonucleotide
gaacacgaagaagaggagg

SEQ ID NO: 2200373 - RNA, 19 nt, Artificial Sequence
  Description of Artificial Sequence: Synthetic oligonucleotide
ugccauuucacccuggcua

SEQ ID NO: 2200374 - RNA, 19 nt, Artificial Sequence
  Description of Artificial Sequence: Synthetic oligonucleotide
uggacuuguauccacuggu

SEQ ID NO: 2200375 - RNA, 19 nt, Artificial Sequence
  Description of Artificial Sequence: Synthetic oligonucleotide
aaaacuagagguugcugua

SEQ ID NO: 2200376 - RNA, 19 nt, Artificial Sequence
  Description of Artificial Sequence: Synthetic oligonucleotide
uuuuacgcggugccagugg

SEQ ID NO: 2200377 - RNA, 19 nt, Artificial Sequence
  Description of Artificial Sequence: Synthetic oligonucleotide
ugccaaguauugcacauca

SEQ ID NO: 2200378 - RNA, 19 nt, Artificial Sequence
  Description of Artificial Sequence: Synthetic oligonucleotide
agcuaguuggccuugggca

SEQ ID NO: 2200379 - RNA, 19 nt, Artificial Sequence
  Description of Artificial Sequence: Synthetic oligonucleotide
uugggcaguacauuugggc

SEQ ID NO: 2200380 - RNA, 19 nt, Artificial Sequence
  Description of Artificial Sequence: Synthetic oligonucleotide
ugucaaaacuagagguugc

SEQ ID NO: 2200381 - RNA, 19 nt, Artificial Sequence
  Description of Artificial Sequence: Synthetic oligonucleotide
uccaaggaccccaaggaac

SEQ ID NO: 2200382 - RNA, 19 nt, Artificial Sequence
  Description of Artificial Sequence: Synthetic oligonucleotide
uccucuggaagggacagcg

SEQ ID NO: 2200383 - RNA, 19 nt, Artificial Sequence
  Description of Artificial Sequence: Synthetic oligonucleotide
ucccguucaaaguuacagg

SEQ ID NO: 2200384 - RNA, 19 nt, Artificial Sequence
  Description of Artificial Sequence: Synthetic oligonucleotide
agagaagccgcaaucagag

SEQ ID NO: 2200385 - RNA, 19 nt, Artificial Sequence
  Description of Artificial Sequence: Synthetic oligonucleotide
cucauagucacauuaucca

SEQ ID NO: 2200386 - RNA, 19 nt, Artificial Sequence
  Description of Artificial Sequence: Synthetic oligonucleotide
aucaucgagggcaaugggc

SEQ ID NO: 2200387 - RNA, 19 nt, Artificial Sequence
  Description of Artificial Sequence: Synthetic oligonucleotide
agcugcaugagucccguuc

SEQ ID NO: 2200388 - RNA, 19 nt, Artificial Sequence
  Description of Artificial Sequence: Synthetic oligonucleotide
gacuuguauccacuggugc

SEQ ID NO: 2200389 - RNA, 19 nt, Artificial Sequence
  Description of Artificial Sequence: Synthetic oligonucleotide
uucaaaguuacaggagacc

SEQ ID NO: 2200390 - RNA, 19 nt, Artificial Sequence
  Description of Artificial Sequence: Synthetic oligonucleotide
ugggcaguacauuugggcu

SEQ ID NO: 2200391 - RNA, 19 nt, Artificial Sequence
  Description of Artificial Sequence: Synthetic oligonucleotide
aguuacaggagaccucuug

SEQ ID NO: 2200392 - RNA, 19 nt, Artificial Sequence
  Description of Artificial Sequence: Synthetic oligonucleotide
acaggagaccucuugguca

SEQ ID NO: 2200393 - RNA, 19 nt, Artificial Sequence
  Description of Artificial Sequence: Synthetic oligonucleotide
auuacccuggcgcuuccac

SEQ ID NO: 2200394 - RNA, 19 nt, Artificial Sequence
  Description of Artificial Sequence: Synthetic oligonucleotide
cuuguauccacuggugccg

SEQ ID NO: 2200395 - RNA, 19 nt, Artificial Sequence
  Description of Artificial Sequence: Synthetic oligonucleotide
acaucaucgagggcaaugg

SEQ ID NO: 2200396 - RNA, 19 nt, Artificial Sequence
  Description of Artificial Sequence: Synthetic oligonucleotide
uccucugaggucagagagg

SEQ ID NO: 2200397 - RNA, 19 nt, Artificial Sequence
  Description of Artificial Sequence: Synthetic oligonucleotide
cuagacggagguuucuggc

SEQ ID NO: 2200398 - RNA, 19 nt, Artificial Sequence
  Description of Artificial Sequence: Synthetic oligonucleotide
auauucagagccauggccu

SEQ ID NO: 2200399 - RNA, 19 nt, Artificial Sequence
  Description of Artificial Sequence: Synthetic oligonucleotide
acgaagaagaggagggccc

SEQ ID NO: 2200400 - RNA, 19 nt, Artificial Sequence
  Description of Artificial Sequence: Synthetic oligonucleotide
aggagcacucucaauuugc

SEQ ID NO: 2200401 - RNA, 19 nt, Artificial Sequence
  Description of Artificial Sequence: Synthetic oligonucleotide
gacacuuugaucuggacuu

SEQ ID NO: 2200402 - RNA, 19 nt, Artificial Sequence
  Description of Artificial Sequence: Synthetic oligonucleotide
uguagccagugccaacucc

SEQ ID NO: 2200403 - RNA, 19 nt, Artificial Sequence
  Description of Artificial Sequence: Synthetic oligonucleotide
ucucucauagucacauuau

SEQ ID NO: 2200404 - RNA, 19 nt, Artificial Sequence
  Description of Artificial Sequence: Synthetic oligonucleotide
gaagggacagcgcugcuuc

SEQ ID NO: 2200405 - RNA, 19 nt, Artificial Sequence
  Description of Artificial Sequence: Synthetic oligonucleotide
aggauguugucaaaacuag

SEQ ID NO: 2200406 - RNA, 19 nt, Artificial Sequence
  Description of Artificial Sequence: Synthetic oligonucleotide
cucagaguuggacacuuug

SEQ ID NO: 2200407 - RNA, 19 nt, Artificial Sequence
  Description of Artificial Sequence: Synthetic oligonucleotide
auuucacccuggcuagacg

SEQ ID NO: 2200408 - RNA, 19 nt, Artificial Sequence
  Description of Artificial Sequence: Synthetic oligonucleotide
agacggagguuucuggcag

SEQ ID NO: 2200409 - RNA, 19 nt, Artificial Sequence
  Description of Artificial Sequence: Synthetic oligonucleotide
ucaaaacuagagguugcug

SEQ ID NO: 2200410 - RNA, 19 nt, Artificial Sequence
  Description of Artificial Sequence: Synthetic oligonucleotide
gacagcgcugcuucuguag

SEQ ID NO: 2200411 - RNA, 19 nt, Artificial Sequence
  Description of Artificial Sequence: Synthetic oligonucleotide
auuugggcuggugucuacc

SEQ ID NO: 2200412 - RNA, 19 nt, Artificial Sequence
  Description of Artificial Sequence: Synthetic oligonucleotide
gucccguucaaaguuacag

SEQ ID NO: 2200413 - RNA, 19 nt, Artificial Sequence
  Description of Artificial Sequence: Synthetic oligonucleotide
agccauggccuuuuacgcg

SEQ ID NO: 2200414 - RNA, 19 nt, Artificial Sequence
  Description of Artificial Sequence: Synthetic oligonucleotide
uacaggagaccucuugguc

SEQ ID NO: 2200415 - RNA, 19 nt, Artificial Sequence
  Description of Artificial Sequence: Synthetic oligonucleotide
ggugucuaccaccauguag

SEQ ID NO: 2200416 - RNA, 19 nt, Artificial Sequence
  Description of Artificial Sequence: Synthetic oligonucleotide
ugguauggucuguccaagg

SEQ ID NO: 2200417 - RNA, 19 nt, Artificial Sequence
  Description of Artificial Sequence: Synthetic oligonucleotide
cauccagggccauugugcc

SEQ ID NO: 2200418 - RNA, 19 nt, Artificial Sequence
  Description of Artificial Sequence: Synthetic oligonucleotide
acuagagguugcuguaucu

SEQ ID NO: 2200419 - RNA, 19 nt, Artificial Sequence
  Description of Artificial Sequence: Synthetic oligonucleotide
gaggauguugucaaaacua

SEQ ID NO: 2200420 - RNA, 19 nt, Artificial Sequence
  Description of Artificial Sequence: Synthetic oligonucleotide
guauggucuguccaaggac

SEQ ID NO: 2200421 - RNA, 19 nt, Artificial Sequence
  Description of Artificial Sequence: Synthetic oligonucleotide
uuucuggcagugcugcccu

SEQ ID NO: 2200422 - RNA, 19 nt, Artificial Sequence
  Description of Artificial Sequence: Synthetic oligonucleotide
ucugugaggugaacugugu

SEQ ID NO: 2200423 - RNA, 19 nt, Artificial Sequence
  Description of Artificial Sequence: Synthetic oligonucleotide
gucacauuauccaccucgg

SEQ ID NO: 2200424 - RNA, 19 nt, Artificial Sequence
  Description of Artificial Sequence: Synthetic oligonucleotide
caaaacuagagguugcugu

SEQ ID NO: 2200425 - RNA, 19 nt, Artificial Sequence
  Description of Artificial Sequence: Synthetic oligonucleotide
ucaauuugcccuuguggua

SEQ ID NO: 2200426 - RNA, 19 nt, Artificial Sequence
  Description of Artificial Sequence: Synthetic oligonucleotide
uuggacacuuugaucugga

SEQ ID NO: 2200427 - RNA, 19 nt, Artificial Sequence
  Description of Artificial Sequence: Synthetic oligonucleotide
caaaguuacaggagaccuc

SEQ ID NO: 2200428 - RNA, 19 nt, Artificial Sequence
  Description of Artificial Sequence: Synthetic oligonucleotide
auggccuuuuacgcggugc

SEQ ID NO: 2200429 - RNA, 19 nt, Artificial Sequence
  Description of Artificial Sequence: Synthetic oligonucleotide
cuggacuuguauccacugg

SEQ ID NO: 2200430 - RNA, 19 nt, Artificial Sequence
  Description of Artificial Sequence: Synthetic oligonucleotide
cacgaagaagaggagggcc

SEQ ID NO: 2200431 - RNA, 19 nt, Artificial Sequence
  Description of Artificial Sequence: Synthetic oligonucleotide
uugaccucuagcuggugaa

SEQ ID NO: 2200432 - RNA, 19 nt, Artificial Sequence
  Description of Artificial Sequence: Synthetic oligonucleotide
acaggugcugccauuucac

SEQ ID NO: 2200433 - RNA, 19 nt, Artificial Sequence
  Description of Artificial Sequence: Synthetic oligonucleotide
aggagcaccaggaacacga

SEQ ID NO: 2200434 - RNA, 19 nt, Artificial Sequence
  Description of Artificial Sequence: Synthetic oligonucleotide
aggccguacagccacguca

SEQ ID NO: 2200435 - RNA, 19 nt, Artificial Sequence
  Description of Artificial Sequence: Synthetic oligonucleotide
cucaauuugcccuuguggu

SEQ ID NO: 2200436 - RNA, 19 nt, Artificial Sequence
  Description of Artificial Sequence: Synthetic oligonucleotide
ugcuguaucuguacuccuc

SEQ ID NO: 2200437 - RNA, 19 nt, Artificial Sequence
  Description of Artificial Sequence: Synthetic oligonucleotide
cuugggcaguacauuuggg

SEQ ID NO: 2200438 - RNA, 19 nt, Artificial Sequence
  Description of Artificial Sequence: Synthetic oligonucleotide
aagaagcuggcuagccagg

SEQ ID NO: 2200439 - RNA, 19 nt, Artificial Sequence
  Description of Artificial Sequence: Synthetic oligonucleotide
gaucuggacuuguauccac

SEQ ID NO: 2200440 - RNA, 19 nt, Artificial Sequence
  Description of Artificial Sequence: Synthetic oligonucleotide
aguuggacacuuugaucug

SEQ ID NO: 2200441 - RNA, 19 nt, Artificial Sequence
  Description of Artificial Sequence: Synthetic oligonucleotide
gcaugagucccguucaaag

SEQ ID NO: 2200442 - RNA, 19 nt, Artificial Sequence
  Description of Artificial Sequence: Synthetic oligonucleotide
accucuuggucacucucag

SEQ ID NO: 2200443 - RNA, 19 nt, Artificial Sequence
  Description of Artificial Sequence: Synthetic oligonucleotide
ugggguugcagucucucau

SEQ ID NO: 2200444 - RNA, 19 nt, Artificial Sequence
  Description of Artificial Sequence: Synthetic oligonucleotide
ucccacacagcuaguuggc

SEQ ID NO: 2200445 - RNA, 19 nt, Artificial Sequence
  Description of Artificial Sequence: Synthetic oligonucleotide
aucgagggcaaugggcccc

SEQ ID NO: 2200446 - RNA, 19 nt, Artificial Sequence
  Description of Artificial Sequence: Synthetic oligonucleotide
guucaaaguuacaggagac

SEQ ID NO: 2200447 - RNA, 19 nt, Artificial Sequence
  Description of Artificial Sequence: Synthetic oligonucleotide
gaagccuuggccaguggug

SEQ ID NO: 2200448 - RNA, 19 nt, Artificial Sequence
  Description of Artificial Sequence: Synthetic oligonucleotide
aggaccccaaggaacauag

SEQ ID NO: 2200449 - RNA, 19 nt, Artificial Sequence
  Description of Artificial Sequence: Synthetic oligonucleotide
accauguagugcccuuggg

SEQ ID NO: 2200450 - RNA, 19 nt, Artificial Sequence
  Description of Artificial Sequence: Synthetic oligonucleotide
acagcuaguuggccuuggg

SEQ ID NO: 2200451 - RNA, 19 nt, Artificial Sequence
  Description of Artificial Sequence: Synthetic oligonucleotide
ugucuaccaccauguagug

SEQ ID NO: 2200452 - RNA, 19 nt, Artificial Sequence
  Description of Artificial Sequence: Synthetic oligonucleotide
aacucccaaggcccaggag

SEQ ID NO: 2200453 - RNA, 19 nt, Artificial Sequence
  Description of Artificial Sequence: Synthetic oligonucleotide
gucucucauagucacauua

SEQ ID NO: 2200454 - RNA, 19 nt, Artificial Sequence
  Description of Artificial Sequence: Synthetic oligonucleotide
cagugguguggucauauuc

SEQ ID NO: 2200455 - RNA, 19 nt, Artificial Sequence
  Description of Artificial Sequence: Synthetic oligonucleotide
aagccuuggccaguggugu

SEQ ID NO: 2200456 - RNA, 19 nt, Artificial Sequence
  Description of Artificial Sequence: Synthetic oligonucleotide
cuagagguugcuguaucug

SEQ ID NO: 2200457 - RNA, 19 nt, Artificial Sequence
  Description of Artificial Sequence: Synthetic oligonucleotide
caucaucgagggcaauggg

SEQ ID NO: 2200458 - RNA, 19 nt, Artificial Sequence
  Description of Artificial Sequence: Synthetic oligonucleotide
ugagucccguucaaaguua

SEQ ID NO: 2200459 - RNA, 19 nt, Artificial Sequence
  Description of Artificial Sequence: Synthetic oligonucleotide
gccauggccuuuuacgcgg

SEQ ID NO: 2200460 - RNA, 19 nt, Artificial Sequence
  Description of Artificial Sequence: Synthetic oligonucleotide
gugucuaccaccauguagu

SEQ ID NO: 2200461 - RNA, 19 nt, Artificial Sequence
  Description of Artificial Sequence: Synthetic oligonucleotide
aagaggagggccccuccaa

SEQ ID NO: 2200462 - RNA, 19 nt, Artificial Sequence
  Description of Artificial Sequence: Synthetic oligonucleotide
cagcuaguuggccuugggc

SEQ ID NO: 2200463 - RNA, 19 nt, Artificial Sequence
  Description of Artificial Sequence: Synthetic oligonucleotide
cucaguggucacugugggg

SEQ ID NO: 2200464 - RNA, 19 nt, Artificial Sequence
  Description of Artificial Sequence: Synthetic oligonucleotide
caggagaccucuuggucac

SEQ ID NO: 2200465 - RNA, 19 nt, Artificial Sequence
  Description of Artificial Sequence: Synthetic oligonucleotide
gcuagacggagguuucugg

SEQ ID NO: 2200466 - RNA, 19 nt, Artificial Sequence
  Description of Artificial Sequence: Synthetic oligonucleotide
gagagaagccgcaaucaga

SEQ ID NO: 2200467 - RNA, 19 nt, Artificial Sequence
  Description of Artificial Sequence: Synthetic oligonucleotide
uucacccuggcuagacgga

SEQ ID NO: 2200468 - RNA, 19 nt, Artificial Sequence
  Description of Artificial Sequence: Synthetic oligonucleotide
gaccucuagcuggugaagc

SEQ ID NO: 2200469 - RNA, 19 nt, Artificial Sequence
  Description of Artificial Sequence: Synthetic oligonucleotide
cugcccugcucccacacag

SEQ ID NO: 2200470 - RNA, 19 nt, Artificial Sequence
  Description of Artificial Sequence: Synthetic oligonucleotide
guugaccucuagcugguga

SEQ ID NO: 2200471 - RNA, 19 nt, Artificial Sequence
  Description of Artificial Sequence: Synthetic oligonucleotide
uauucagagccauggccuu

SEQ ID NO: 2200472 - RNA, 19 nt, Artificial Sequence
  Description of Artificial Sequence: Synthetic oligonucleotide
cucucaauuugcccuugug

SEQ ID NO: 2200473 - RNA, 19 nt, Artificial Sequence
  Description of Artificial Sequence: Synthetic oligonucleotide
cccuccaacagcaaccggc

SEQ ID NO: 2200474 - RNA, 19 nt, Artificial Sequence
  Description of Artificial Sequence: Synthetic oligonucleotide
agguugcuguaucuguacu

SEQ ID NO: 2200475 - RNA, 19 nt, Artificial Sequence
  Description of Artificial Sequence: Synthetic oligonucleotide
ugccgcaagugacugcccu

SEQ ID NO: 2200476 - RNA, 19 nt, Artificial Sequence
  Description of Artificial Sequence: Synthetic oligonucleotide
uacgcggugccagugggca

SEQ ID NO: 2200477 - RNA, 19 nt, Artificial Sequence
  Description of Artificial Sequence: Synthetic oligonucleotide
cucggcccucugaagaagc

SEQ ID NO: 2200478 - RNA, 19 nt, Artificial Sequence
  Description of Artificial Sequence: Synthetic oligonucleotide
gccauuucacccuggcuag

SEQ ID NO: 2200479 - RNA, 19 nt, Artificial Sequence
  Description of Artificial Sequence: Synthetic oligonucleotide
gugggcaucugugagguga

SEQ ID NO: 2200480 - RNA, 19 nt, Artificial Sequence
  Description of Artificial Sequence: Synthetic oligonucleotide
ccauguagugcccuugggc

SEQ ID NO: 2200481 - RNA, 19 nt, Artificial Sequence
  Description of Artificial Sequence: Synthetic oligonucleotide
ccuugggcaguacauuugg

SEQ ID NO: 2200482 - RNA, 19 nt, Artificial Sequence
  Description of Artificial Sequence: Synthetic oligonucleotide
ugaccucuagcuggugaag

SEQ ID NO: 2200483 - RNA, 19 nt, Artificial Sequence
  Description of Artificial Sequence: Synthetic oligonucleotide
ugccagugggcaucuguga

SEQ ID NO: 2200484 - RNA, 19 nt, Artificial Sequence
  Description of Artificial Sequence: Synthetic oligonucleotide
acgucauccagggccauug

SEQ ID NO: 2200485 - RNA, 19 nt, Artificial Sequence
  Description of Artificial Sequence: Synthetic oligonucleotide
ucacccuggcuagacggag

SEQ ID NO: 2200486 - RNA, 19 nt, Artificial Sequence
  Description of Artificial Sequence: Synthetic oligonucleotide
ggcaguacauuugggcugg

SEQ ID NO: 2200487 - RNA, 19 nt, Artificial Sequence
  Description of Artificial Sequence: Synthetic oligonucleotide
uggucauauucagagccau

SEQ ID NO: 2200488 - RNA, 19 nt, Artificial Sequence
  Description of Artificial Sequence: Synthetic oligonucleotide
caucgagggcaaugggccc

SEQ ID NO: 2200489 - RNA, 19 nt, Artificial Sequence
  Description of Artificial Sequence: Synthetic oligonucleotide
cauuucacccuggcuagac

SEQ ID NO: 2200490 - RNA, 19 nt, Artificial Sequence
  Description of Artificial Sequence: Synthetic oligonucleotide
uuacgcggugccagugggc

SEQ ID NO: 2200491 - RNA, 19 nt, Artificial Sequence
  Description of Artificial Sequence: Synthetic oligonucleotide
gucacugugggguugcagu

SEQ ID NO: 2200492 - RNA, 19 nt, Artificial Sequence
  Description of Artificial Sequence: Synthetic oligonucleotide
uguagugcccuugggccgu

SEQ ID NO: 2200493 - RNA, 19 nt, Artificial Sequence
  Description of Artificial Sequence: Synthetic oligonucleotide
cugguacuugguguugacc

SEQ ID NO: 2200494 - RNA, 19 nt, Artificial Sequence
  Description of Artificial Sequence: Synthetic oligonucleotide
caggagcacucucaauuug

SEQ ID NO: 2200495 - RNA, 19 nt, Artificial Sequence
  Description of Artificial Sequence: Synthetic oligonucleotide
uggacacuuugaucuggac

SEQ ID NO: 2200496 - RNA, 19 nt, Artificial Sequence
  Description of Artificial Sequence: Synthetic oligonucleotide
ggugccgcaagugacugcc

SEQ ID NO: 2200497 - RNA, 19 nt, Artificial Sequence
  Description of Artificial Sequence: Synthetic oligonucleotide
cacagacacaggugcugcc

SEQ ID NO: 2200498 - RNA, 19 nt, Artificial Sequence
  Description of Artificial Sequence: Synthetic oligonucleotide
gagguuucuggcagugcug

SEQ ID NO: 2200499 - RNA, 19 nt, Artificial Sequence
  Description of Artificial Sequence: Synthetic oligonucleotide
ggguugcagucucucauag

SEQ ID NO: 2200500 - RNA, 19 nt, Artificial Sequence
  Description of Artificial Sequence: Synthetic oligonucleotide
uuauccaccucggcccucu

SEQ ID NO: 2200501 - RNA, 19 nt, Artificial Sequence
  Description of Artificial Sequence: Synthetic oligonucleotide
cagagucuucaaaggaaca

SEQ ID NO: 2200502 - RNA, 19 nt, Artificial Sequence
  Description of Artificial Sequence: Synthetic oligonucleotide
uggcccuugggcaguacau

SEQ ID NO: 2200503 - RNA, 19 nt, Artificial Sequence
  Description of Artificial Sequence: Synthetic oligonucleotide
gugguauggucuguccaag

SEQ ID NO: 2200504 - RNA, 19 nt, Artificial Sequence
  Description of Artificial Sequence: Synthetic oligonucleotide
uuguauccacuggugccgc

SEQ ID NO: 2200505 - RNA, 19 nt, Artificial Sequence
  Description of Artificial Sequence: Synthetic oligonucleotide
ccggcacagacacaggugc

SEQ ID NO: 2200506 - RNA, 19 nt, Artificial Sequence
  Description of Artificial Sequence: Synthetic oligonucleotide
cucaggagcacucucaauu

SEQ ID NO: 2200507 - RNA, 19 nt, Artificial Sequence
  Description of Artificial Sequence: Synthetic oligonucleotide
ggcaaugggccccagagcu

SEQ ID NO: 2200508 - RNA, 19 nt, Artificial Sequence
  Description of Artificial Sequence: Synthetic oligonucleotide
ugggccccagagcuggcug

SEQ ID NO: 2200509 - RNA, 19 nt, Artificial Sequence
  Description of Artificial Sequence: Synthetic oligonucleotide
cuuuuacgcggugccagug

SEQ ID NO: 2200510 - RNA, 19 nt, Artificial Sequence
  Description of Artificial Sequence: Synthetic oligonucleotide
agugcugcccugccaagua

SEQ ID NO: 2200511 - RNA, 19 nt, Artificial Sequence
  Description of Artificial Sequence: Synthetic oligonucleotide
ugugggguugcagucucuc

SEQ ID NO: 2200512 - RNA, 19 nt, Artificial Sequence
  Description of Artificial Sequence: Synthetic oligonucleotide
gcuaguuggccuugggcac

SEQ ID NO: 2200513 - RNA, 19 nt, Artificial Sequence
  Description of Artificial Sequence: Synthetic oligonucleotide
ugggccguuucugugguau

SEQ ID NO: 2200514 - RNA, 19 nt, Artificial Sequence
  Description of Artificial Sequence: Synthetic oligonucleotide
ugugugccagcugcaugag

SEQ ID NO: 2200515 - RNA, 19 nt, Artificial Sequence
  Description of Artificial Sequence: Synthetic oligonucleotide
cucccaaggcccaggagca

SEQ ID NO: 2200516 - RNA, 19 nt, Artificial Sequence
  Description of Artificial Sequence: Synthetic oligonucleotide
cccguucaaaguuacagga

SEQ ID NO: 2200517 - RNA, 19 nt, Artificial Sequence
  Description of Artificial Sequence: Synthetic oligonucleotide
gaggcauuacccuggcgcu

SEQ ID NO: 2200518 - RNA, 19 nt, Artificial Sequence
  Description of Artificial Sequence: Synthetic oligonucleotide
cauugugccaugguaccca

SEQ ID NO: 2200519 - RNA, 19 nt, Artificial Sequence
  Description of Artificial Sequence: Synthetic oligonucleotide
ucggcccucugaagaagcu

SEQ ID NO: 2200520 - RNA, 19 nt, Artificial Sequence
  Description of Artificial Sequence: Synthetic oligonucleotide
ugcaugagucccguucaaa

SEQ ID NO: 2200521 - RNA, 19 nt, Artificial Sequence
  Description of Artificial Sequence: Synthetic oligonucleotide
ccguucaaaguuacaggag

SEQ ID NO: 2200522 - RNA, 19 nt, Artificial Sequence
  Description of Artificial Sequence: Synthetic oligonucleotide
gaagccgcaaucagagucu

SEQ ID NO: 2200523 - RNA, 19 nt, Artificial Sequence
  Description of Artificial Sequence: Synthetic oligonucleotide
ggagcacucucaauuugcc

SEQ ID NO: 2200524 - RNA, 19 nt, Artificial Sequence
  Description of Artificial Sequence: Synthetic oligonucleotide
ggacacuuugaucuggacu

SEQ ID NO: 2200525 - RNA, 19 nt, Artificial Sequence
  Description of Artificial Sequence: Synthetic oligonucleotide
gagucccguucaaaguuac

SEQ ID NO: 2200526 - RNA, 19 nt, Artificial Sequence
  Description of Artificial Sequence: Synthetic oligonucleotide
gaccucuuggucacucuca

SEQ ID NO: 2200527 - RNA, 19 nt, Artificial Sequence
  Description of Artificial Sequence: Synthetic oligonucleotide
ggccauugugccaugguac

SEQ ID NO: 2200528 - RNA, 19 nt, Artificial Sequence
  Description of Artificial Sequence: Synthetic oligonucleotide
gugccagugggcaucugug

SEQ ID NO: 2200529 - RNA, 19 nt, Artificial Sequence
  Description of Artificial Sequence: Synthetic oligonucleotide
acuggugccgcaagugacu

SEQ ID NO: 2200530 - RNA, 19 nt, Artificial Sequence
  Description of Artificial Sequence: Synthetic oligonucleotide
gccaugguacccauuccgg

SEQ ID NO: 2200531 - RNA, 19 nt, Artificial Sequence
  Description of Artificial Sequence: Synthetic oligonucleotide
gucuaccaccauguagugc

SEQ ID NO: 2200532 - RNA, 19 nt, Artificial Sequence
  Description of Artificial Sequence: Synthetic oligonucleotide
acacuuugaucuggacuug

SEQ ID NO: 2200533 - RNA, 19 nt, Artificial Sequence
  Description of Artificial Sequence: Synthetic oligonucleotide
gccgcaaucagagucuuca

SEQ ID NO: 2200534 - RNA, 19 nt, Artificial Sequence
  Description of Artificial Sequence: Synthetic oligonucleotide
gugccaugguacccauucc

SEQ ID NO: 2200535 - RNA, 19 nt, Artificial Sequence
  Description of Artificial Sequence: Synthetic oligonucleotide
gacugcccugcucccacac

SEQ ID NO: 2200536 - RNA, 19 nt, Artificial Sequence
  Description of Artificial Sequence: Synthetic oligonucleotide
cauuugggcuggugucuac

SEQ ID NO: 2200537 - RNA, 19 nt, Artificial Sequence
  Description of Artificial Sequence: Synthetic oligonucleotide
cuuugaucuggacuuguau

SEQ ID NO: 2200538 - RNA, 19 nt, Artificial Sequence
  Description of Artificial Sequence: Synthetic oligonucleotide
aaggaccccaaggaacaua

SEQ ID NO: 2200539 - RNA, 19 nt, Artificial Sequence
  Description of Artificial Sequence: Synthetic oligonucleotide
gguacuugguguugaccuc

SEQ ID NO: 2200540 - RNA, 19 nt, Artificial Sequence
  Description of Artificial Sequence: Synthetic oligonucleotide
ggaacacgaagaagaggag

SEQ ID NO: 2200541 - RNA, 19 nt, Artificial Sequence
  Description of Artificial Sequence: Synthetic oligonucleotide
cugaggcauuacccuggcg

SEQ ID NO: 2200542 - RNA, 19 nt, Artificial Sequence
  Description of Artificial Sequence: Synthetic oligonucleotide
cagagccauggccuuuuac

SEQ ID NO: 2200543 - RNA, 19 nt, Artificial Sequence
  Description of Artificial Sequence: Synthetic oligonucleotide
agcgcugcuucuguagcca

SEQ ID NO: 2200544 - RNA, 19 nt, Artificial Sequence
  Description of Artificial Sequence: Synthetic oligonucleotide
gagggccccuccaacagca

SEQ ID NO: 2200545 - RNA, 19 nt, Artificial Sequence
  Description of Artificial Sequence: Synthetic oligonucleotide
auuauccaccucggcccuc

SEQ ID NO: 2200546 - RNA, 19 nt, Artificial Sequence
  Description of Artificial Sequence: Synthetic oligonucleotide
ccaaggaccccaaggaaca

SEQ ID NO: 2200547 - RNA, 19 nt, Artificial Sequence
  Description of Artificial Sequence: Synthetic oligonucleotide
caccucggcccucugaaga

SEQ ID NO: 2200548 - RNA, 19 nt, Artificial Sequence
  Description of Artificial Sequence: Synthetic oligonucleotide
guggucauauucagagcca

SEQ ID NO: 2200549 - RNA, 19 nt, Artificial Sequence
  Description of Artificial Sequence: Synthetic oligonucleotide
agagguugcuguaucugua

SEQ ID NO: 2200550 - RNA, 19 nt, Artificial Sequence
  Description of Artificial Sequence: Synthetic oligonucleotide
acggagguuucuggcagug

SEQ ID NO: 2200551 - RNA, 19 nt, Artificial Sequence
  Description of Artificial Sequence: Synthetic oligonucleotide
cagaguuggacacuuugau

SEQ ID NO: 2200552 - RNA, 19 nt, Artificial Sequence
  Description of Artificial Sequence: Synthetic oligonucleotide
gcucccacacagcuaguug

SEQ ID NO: 2200553 - RNA, 19 nt, Artificial Sequence
  Description of Artificial Sequence: Synthetic oligonucleotide
cacagcuaguuggccuugg

SEQ ID NO: 2200554 - RNA, 19 nt, Artificial Sequence
  Description of Artificial Sequence: Synthetic oligonucleotide
uggugccgcaagugacugc

SEQ ID NO: 2200555 - RNA, 19 nt, Artificial Sequence
  Description of Artificial Sequence: Synthetic oligonucleotide
cuggugccgcaagugacug

SEQ ID NO: 2200556 - RNA, 19 nt, Artificial Sequence
  Description of Artificial Sequence: Synthetic oligonucleotide
ggauguugucaaaacuaga

SEQ ID NO: 2200557 - RNA, 19 nt, Artificial Sequence
  Description of Artificial Sequence: Synthetic oligonucleotide
uggugucuaccaccaugua

SEQ ID NO: 2200558 - RNA, 19 nt, Artificial Sequence
  Description of Artificial Sequence: Synthetic oligonucleotide
gcuggugcuccucugaggu

SEQ ID NO: 2200559 - RNA, 19 nt, Artificial Sequence
  Description of Artificial Sequence: Synthetic oligonucleotide
uguugaccucuagcuggug

SEQ ID NO: 2200560 - RNA, 19 nt, Artificial Sequence
  Description of Artificial Sequence: Synthetic oligonucleotide
agucucucauagucacauu

SEQ ID NO: 2200561 - RNA, 19 nt, Artificial Sequence
  Description of Artificial Sequence: Synthetic oligonucleotide
ugcucccacacagcuaguu

SEQ ID NO: 2200562 - RNA, 19 nt, Artificial Sequence
  Description of Artificial Sequence: Synthetic oligonucleotide
ggccaggccguacagccac

SEQ ID NO: 2200563 - RNA, 19 nt, Artificial Sequence
  Description of Artificial Sequence: Synthetic oligonucleotide
cuguagccagugccaacuc

SEQ ID NO: 2200564 - RNA, 19 nt, Artificial Sequence
  Description of Artificial Sequence: Synthetic oligonucleotide
guacuugguguugaccucu

SEQ ID NO: 2200565 - RNA, 19 nt, Artificial Sequence
  Description of Artificial Sequence: Synthetic oligonucleotide
gugcugccauuucacccug

SEQ ID NO: 2200566 - RNA, 19 nt, Artificial Sequence
  Description of Artificial Sequence: Synthetic oligonucleotide
gaacugugugccagcugca

SEQ ID NO: 2200567 - RNA, 19 nt, Artificial Sequence
  Description of Artificial Sequence: Synthetic oligonucleotide
caguacauuugggcuggug

SEQ ID NO: 2200568 - RNA, 19 nt, Artificial Sequence
  Description of Artificial Sequence: Synthetic oligonucleotide
acuuugaucuggacuugua

SEQ ID NO: 2200569 - RNA, 19 nt, Artificial Sequence
  Description of Artificial Sequence: Synthetic oligonucleotide
caggagcaccaggaacacg

SEQ ID NO: 2200570 - RNA, 19 nt, Artificial Sequence
  Description of Artificial Sequence: Synthetic oligonucleotide
agccagugccaacucccaa

SEQ ID NO: 2200571 - RNA, 19 nt, Artificial Sequence
  Description of Artificial Sequence: Synthetic oligonucleotide
aagccgcaaucagagucuu

SEQ ID NO: 2200572 - RNA, 19 nt, Artificial Sequence
  Description of Artificial Sequence: Synthetic oligonucleotide
cauggccuuuuacgcggug

SEQ ID NO: 2200573 - RNA, 19 nt, Artificial Sequence
  Description of Artificial Sequence: Synthetic oligonucleotide
uggcuagacggagguuucu

SEQ ID NO: 2200574 - RNA, 19 nt, Artificial Sequence
  Description of Artificial Sequence: Synthetic oligonucleotide
guacccauuccggaggccu

SEQ ID NO: 2200575 - RNA, 19 nt, Artificial Sequence
  Description of Artificial Sequence: Synthetic oligonucleotide
uggugaagccuuggccagu

SEQ ID NO: 2200576 - RNA, 19 nt, Artificial Sequence
  Description of Artificial Sequence: Synthetic oligonucleotide
ggcuagacggagguuucug

SEQ ID NO: 2200577 - RNA, 19 nt, Artificial Sequence
  Description of Artificial Sequence: Synthetic oligonucleotide
gcaagugacugcccugcuc

SEQ ID NO: 2200578 - RNA, 19 nt, Artificial Sequence
  Description of Artificial Sequence: Synthetic oligonucleotide
cagagcuggcuggccaccc

SEQ ID NO: 2200579 - RNA, 19 nt, Artificial Sequence
  Description of Artificial Sequence: Synthetic oligonucleotide
auuugcccuugugguacca

SEQ ID NO: 2200580 - RNA, 19 nt, Artificial Sequence
  Description of Artificial Sequence: Synthetic oligonucleotide
guauccacuggugccgcaa

SEQ ID NO: 2200581 - RNA, 19 nt, Artificial Sequence
  Description of Artificial Sequence: Synthetic oligonucleotide
ccggagagaagccgcaauc

SEQ ID NO: 2200582 - RNA, 19 nt, Artificial Sequence
  Description of Artificial Sequence: Synthetic oligonucleotide
cagggccauugugccaugg

SEQ ID NO: 2200583 - RNA, 19 nt, Artificial Sequence
  Description of Artificial Sequence: Synthetic oligonucleotide
cccuugggcaguacauuug

SEQ ID NO: 2200584 - RNA, 19 nt, Artificial Sequence
  Description of Artificial Sequence: Synthetic oligonucleotide
gagaagccgcaaucagagu

SEQ ID NO: 2200585 - RNA, 19 nt, Artificial Sequence
  Description of Artificial Sequence: Synthetic oligonucleotide
ccauugugccaugguaccc

SEQ ID NO: 2200586 - RNA, 19 nt, Artificial Sequence
  Description of Artificial Sequence: Synthetic oligonucleotide
agucccguucaaaguuaca

SEQ ID NO: 2200587 - RNA, 19 nt, Artificial Sequence
  Description of Artificial Sequence: Synthetic oligonucleotide
gccgcaagugacugcccug

SEQ ID NO: 2200588 - RNA, 19 nt, Artificial Sequence
  Description of Artificial Sequence: Synthetic oligonucleotide
gacggagguuucuggcagu

SEQ ID NO: 2200589 - RNA, 19 nt, Artificial Sequence
  Description of Artificial Sequence: Synthetic oligonucleotide
gggccauugugccauggua

SEQ ID NO: 2200590 - RNA, 19 nt, Artificial Sequence
  Description of Artificial Sequence: Synthetic oligonucleotide
ccgcaagugacugcccugc

SEQ ID NO: 2200591 - RNA, 19 nt, Artificial Sequence
  Description of Artificial Sequence: Synthetic oligonucleotide
ccaugguacccauuccgga

SEQ ID NO: 2200592 - RNA, 19 nt, Artificial Sequence
  Description of Artificial Sequence: Synthetic oligonucleotide
ggugccagugggcaucugu

SEQ ID NO: 2200593 - RNA, 19 nt, Artificial Sequence
  Description of Artificial Sequence: Synthetic oligonucleotide
cguacagccacgucaucca

SEQ ID NO: 2200594 - RNA, 19 nt, Artificial Sequence
  Description of Artificial Sequence: Synthetic oligonucleotide
gaagaagaggagggccccu

SEQ ID NO: 2200595 - RNA, 19 nt, Artificial Sequence
  Description of Artificial Sequence: Synthetic oligonucleotide
ccaacucccaaggcccagg

SEQ ID NO: 2200596 - RNA, 19 nt, Artificial Sequence
  Description of Artificial Sequence: Synthetic oligonucleotide
agccgcaaucagagucuuc

SEQ ID NO: 2200597 - RNA, 19 nt, Artificial Sequence
  Description of Artificial Sequence: Synthetic oligonucleotide
cuugggccguuucuguggu

SEQ ID NO: 2200598 - RNA, 19 nt, Artificial Sequence
  Description of Artificial Sequence: Synthetic oligonucleotide
ggcaucugugaggugaacu

SEQ ID NO: 2200599 - RNA, 19 nt, Artificial Sequence
  Description of Artificial Sequence: Synthetic oligonucleotide
ccucuggaagggacagcgc

SEQ ID NO: 2200600 - RNA, 19 nt, Artificial Sequence
  Description of Artificial Sequence: Synthetic oligonucleotide
caggccguacagccacguc

SEQ ID NO: 2200601 - RNA, 19 nt, Artificial Sequence
  Description of Artificial Sequence: Synthetic oligonucleotide
gaacauagccugaggcauu

SEQ ID NO: 2200602 - RNA, 19 nt, Artificial Sequence
  Description of Artificial Sequence: Synthetic oligonucleotide
cucuagcuggugaagccuu

SEQ ID NO: 2200603 - RNA, 19 nt, Artificial Sequence
  Description of Artificial Sequence: Synthetic oligonucleotide
gggccccuccaacagcaac

SEQ ID NO: 2200604 - RNA, 19 nt, Artificial Sequence
  Description of Artificial Sequence: Synthetic oligonucleotide
ggaggccuucaaacagcag

SEQ ID NO: 2200605 - RNA, 19 nt, Artificial Sequence
  Description of Artificial Sequence: Synthetic oligonucleotide
gcaaugggccccagagcug

SEQ ID NO: 2200606 - RNA, 19 nt, Artificial Sequence
  Description of Artificial Sequence: Synthetic oligonucleotide
uggucacugugggguugca

SEQ ID NO: 2200607 - RNA, 19 nt, Artificial Sequence
  Description of Artificial Sequence: Synthetic oligonucleotide
gcauuacccuggcgcuucc

SEQ ID NO: 2200608 - RNA, 19 nt, Artificial Sequence
  Description of Artificial Sequence: Synthetic oligonucleotide
gggcuggugucuaccacca

SEQ ID NO: 2200609 - RNA, 19 nt, Artificial Sequence
  Description of Artificial Sequence: Synthetic oligonucleotide
cacuuugaucuggacuugu

SEQ ID NO: 2200610 - RNA, 19 nt, Artificial Sequence
  Description of Artificial Sequence: Synthetic oligonucleotide
gguugcagucucucauagu

SEQ ID NO: 2200611 - RNA, 19 nt, Artificial Sequence
  Description of Artificial Sequence: Synthetic oligonucleotide
cugccauuucacccuggcu

SEQ ID NO: 2200612 - RNA, 19 nt, Artificial Sequence
  Description of Artificial Sequence: Synthetic oligonucleotide
uugggccguuucuguggua

SEQ ID NO: 2200613 - RNA, 19 nt, Artificial Sequence
  Description of Artificial Sequence: Synthetic oligonucleotide
cgcaaucagagucuucaaa

SEQ ID NO: 2200614 - RNA, 19 nt, Artificial Sequence
  Description of Artificial Sequence: Synthetic oligonucleotide
cccaaggaacauagccuga

SEQ ID NO: 2200615 - RNA, 19 nt, Artificial Sequence
  Description of Artificial Sequence: Synthetic oligonucleotide
cauuacccuggcgcuucca

SEQ ID NO: 2200616 - RNA, 19 nt, Artificial Sequence
  Description of Artificial Sequence: Synthetic oligonucleotide
ccugccaaguauugcacau

SEQ ID NO: 2200617 - RNA, 19 nt, Artificial Sequence
  Description of Artificial Sequence: Synthetic oligonucleotide
acgcggugccagugggcau

SEQ ID NO: 2200618 - RNA, 19 nt, Artificial Sequence
  Description of Artificial Sequence: Synthetic oligonucleotide
aggagaccucuuggucacu

SEQ ID NO: 2200619 - RNA, 19 nt, Artificial Sequence
  Description of Artificial Sequence: Synthetic oligonucleotide
gccaacucccaaggcccag

SEQ ID NO: 2200620 - RNA, 19 nt, Artificial Sequence
  Description of Artificial Sequence: Synthetic oligonucleotide
ggaccccaaggaacauagc

SEQ ID NO: 2200621 - RNA, 19 nt, Artificial Sequence
  Description of Artificial Sequence: Synthetic oligonucleotide
ccagagcuggcuggccacc

SEQ ID NO: 2200622 - RNA, 19 nt, Artificial Sequence
  Description of Artificial Sequence: Synthetic oligonucleotide
ccucggcccucugaagaag

SEQ ID NO: 2200623 - RNA, 19 nt, Artificial Sequence
  Description of Artificial Sequence: Synthetic oligonucleotide
ggccuuuuacgcggugcca

SEQ ID NO: 2200624 - RNA, 19 nt, Artificial Sequence
  Description of Artificial Sequence: Synthetic oligonucleotide
cacucucaguggucacugu

SEQ ID NO: 2200625 - RNA, 19 nt, Artificial Sequence
  Description of Artificial Sequence: Synthetic oligonucleotide
ggacagcgcugcuucugua

SEQ ID NO: 2200626 - RNA, 19 nt, Artificial Sequence
  Description of Artificial Sequence: Synthetic oligonucleotide
gccaggccguacagccacg

SEQ ID NO: 2200627 - RNA, 19 nt, Artificial Sequence
  Description of Artificial Sequence: Synthetic oligonucleotide
ggccguacagccacgucau

SEQ ID NO: 2200628 - RNA, 19 nt, Artificial Sequence
  Description of Artificial Sequence: Synthetic oligonucleotide
cagugcugcccugccaagu

SEQ ID NO: 2200629 - RNA, 19 nt, Artificial Sequence
  Description of Artificial Sequence: Synthetic oligonucleotide
ccuuuuacgcggugccagu

SEQ ID NO: 2200630 - RNA, 19 nt, Artificial Sequence
  Description of Artificial Sequence: Synthetic oligonucleotide
gggcaucugugaggugaac

SEQ ID NO: 2200631 - RNA, 19 nt, Artificial Sequence
  Description of Artificial Sequence: Synthetic oligonucleotide
ccgcaaucagagucuucaa

SEQ ID NO: 2200632 - RNA, 19 nt, Artificial Sequence
  Description of Artificial Sequence: Synthetic oligonucleotide
gccguuucugugguauggu

SEQ ID NO: 2200633 - RNA, 19 nt, Artificial Sequence
  Description of Artificial Sequence: Synthetic oligonucleotide
ccucuagcuggugaagccu

SEQ ID NO: 2200634 - RNA, 19 nt, Artificial Sequence
  Description of Artificial Sequence: Synthetic oligonucleotide
gcgcuuccacagccccaag

SEQ ID NO: 2200635 - RNA, 19 nt, Artificial Sequence
  Description of Artificial Sequence: Synthetic oligonucleotide
cggagguuucuggcagugc

SEQ ID NO: 2200636 - RNA, 19 nt, Artificial Sequence
  Description of Artificial Sequence: Synthetic oligonucleotide
gccguacagccacgucauc

SEQ ID NO: 2200637 - RNA, 19 nt, Artificial Sequence
  Description of Artificial Sequence: Synthetic oligonucleotide
cggcccucugaagaagcug

SEQ ID NO: 2200638 - RNA, 19 nt, Artificial Sequence
  Description of Artificial Sequence: Synthetic oligonucleotide
caaggaccccaaggaacau

SEQ ID NO: 2200639 - RNA, 19 nt, Artificial Sequence
  Description of Artificial Sequence: Synthetic oligonucleotide
gcccagcaggggccaggcc

SEQ ID NO: 2200640 - RNA, 19 nt, Artificial Sequence
  Description of Artificial Sequence: Synthetic oligonucleotide
cacuuggcccuugggcagu

SEQ ID NO: 2200641 - RNA, 19 nt, Artificial Sequence
  Description of Artificial Sequence: Synthetic oligonucleotide
agggccccuccaacagcaa

SEQ ID NO: 2200642 - RNA, 19 nt, Artificial Sequence
  Description of Artificial Sequence: Synthetic oligonucleotide
cgcggugccagugggcauc

SEQ ID NO: 2200643 - RNA, 19 nt, Artificial Sequence
  Description of Artificial Sequence: Synthetic oligonucleotide
uagugcccuugggccguuu

SEQ ID NO: 2200644 - RNA, 19 nt, Artificial Sequence
  Description of Artificial Sequence: Synthetic oligonucleotide
gugcuccucugaggucaga

SEQ ID NO: 2200645 - RNA, 19 nt, Artificial Sequence
  Description of Artificial Sequence: Synthetic oligonucleotide
ccauuucacccuggcuaga

SEQ ID NO: 2200646 - RNA, 19 nt, Artificial Sequence
  Description of Artificial Sequence: Synthetic oligonucleotide
cccauuccggaggccuuca

SEQ ID NO: 2200647 - RNA, 19 nt, Artificial Sequence
  Description of Artificial Sequence: Synthetic oligonucleotide
ccauuccggaggccuucaa

SEQ ID NO: 2200648 - RNA, 19 nt, Artificial Sequence
  Description of Artificial Sequence: Synthetic oligonucleotide
cccggagagaagccgcaau

SEQ ID NO: 2200649 - RNA, 19 nt, Artificial Sequence
  Description of Artificial Sequence: Synthetic oligonucleotide
ccauggccuuuuacgcggu

SEQ ID NO: 2200650 - RNA, 19 nt, Artificial Sequence
  Description of Artificial Sequence: Synthetic oligonucleotide
ggcuggugucuaccaccau

SEQ ID NO: 2200651 - RNA, 19 nt, Artificial Sequence
  Description of Artificial Sequence: Synthetic oligonucleotide
ccagugguguggucauauu

SEQ ID NO: 2200652 - RNA, 19 nt, Artificial Sequence
  Description of Artificial Sequence: Synthetic oligonucleotide
ccucagaguuggacacuuu

SEQ ID NO: 2200653 - RNA, 19 nt, Artificial Sequence
  Description of Artificial Sequence: Synthetic oligonucleotide
ccaggccguacagccacgu

SEQ ID NO: 2200654 - RNA, 19 nt, Artificial Sequence
  Description of Artificial Sequence: Synthetic oligonucleotide
cagcugcaugagucccguu

SEQ ID NO: 2200655 - RNA, 19 nt, Artificial Sequence
  Description of Artificial Sequence: Synthetic oligonucleotide
gcggugccagugggcaucu

SEQ ID NO: 2200656 - RNA, 19 nt, Artificial Sequence
  Description of Artificial Sequence: Synthetic oligonucleotide
guagugcccuugggccguu

SEQ ID NO: 2200657 - RNA, 19 nt, Artificial Sequence
  Description of Artificial Sequence: Synthetic oligonucleotide
gcaguacauuugggcuggu

SEQ ID NO: 2200658 - RNA, 19 nt, Artificial Sequence
  Description of Artificial Sequence: Synthetic oligonucleotide
ccccggagagaagccgcaa

SEQ ID NO: 2200659 - RNA, 19 nt, Artificial Sequence
  Description of Artificial Sequence: Synthetic oligonucleotide
gcacaucaucgagggcaau

SEQ ID NO: 2200660 - RNA, 19 nt, Artificial Sequence
  Description of Artificial Sequence: Synthetic oligonucleotide
cgcaagugacugcccugcu

SEQ ID NO: 2200661 - RNA, 19 nt, Artificial Sequence
  Description of Artificial Sequence: Synthetic oligonucleotide
cggugccagugggcaucug

SEQ ID NO: 2200662 - RNA, 19 nt, Artificial Sequence
  Description of Artificial Sequence: Synthetic oligonucleotide
ccacgucauccagggccau

SEQ ID NO: 2200663 - RNA, 19 nt, Artificial Sequence
  Description of Artificial Sequence: Synthetic oligonucleotide
cccuggcuagacggagguu

SEQ ID NO: 2200664 - RNA, 19 nt, Artificial Sequence
  Description of Artificial Sequence: Synthetic oligonucleotide
uuaauggcagccaauaagc

SEQ ID NO: 2200665 - RNA, 19 nt, Artificial Sequence
  Description of Artificial Sequence: Synthetic oligonucleotide
aaauaguccaguuucagau

SEQ ID NO: 2200666 - RNA, 19 nt, Artificial Sequence
  Description of Artificial Sequence: Synthetic oligonucleotide
auuaauggcagccaauaag

SEQ ID NO: 2200667 - RNA, 19 nt, Artificial Sequence
  Description of Artificial Sequence: Synthetic oligonucleotide
ucauggaaaggauaguccg

SEQ ID NO: 2200668 - RNA, 19 nt, Artificial Sequence
  Description of Artificial Sequence: Synthetic oligonucleotide
aaucugguuggucacuggc

SEQ ID NO: 2200669 - RNA, 19 nt, Artificial Sequence
  Description of Artificial Sequence: Synthetic oligonucleotide
auaggcacagucuaugugg

SEQ ID NO: 2200670 - RNA, 19 nt, Artificial Sequence
  Description of Artificial Sequence: Synthetic oligonucleotide
aagugaauuaacuucagua

SEQ ID NO: 2200671 - RNA, 19 nt, Artificial Sequence
  Description of Artificial Sequence: Synthetic oligonucleotide
acuucaguauuccucaugg

SEQ ID NO: 2200672 - RNA, 19 nt, Artificial Sequence
  Description of Artificial Sequence: Synthetic oligonucleotide
aaaguucucucguauccgg

SEQ ID NO: 2200673 - RNA, 19 nt, Artificial Sequence
  Description of Artificial Sequence: Synthetic oligonucleotide
gugaacuagauacaggucc

SEQ ID NO: 2200674 - RNA, 19 nt, Artificial Sequence
  Description of Artificial Sequence: Synthetic oligonucleotide
ugaauuaacuucaguauuc

SEQ ID NO: 2200675 - RNA, 19 nt, Artificial Sequence
  Description of Artificial Sequence: Synthetic oligonucleotide
auuaacuucaguauuccuc

SEQ ID NO: 2200676 - RNA, 19 nt, Artificial Sequence
  Description of Artificial Sequence: Synthetic oligonucleotide
uuuucucaaagaagguggg

SEQ ID NO: 2200677 - RNA, 19 nt, Artificial Sequence
  Description of Artificial Sequence: Synthetic oligonucleotide
gauaucuuugauuuuggga

SEQ ID NO: 2200678 - RNA, 19 nt, Artificial Sequence
  Description of Artificial Sequence: Synthetic oligonucleotide
uuauguuugaguccaggcu

SEQ ID NO: 2200679 - RNA, 19 nt, Artificial Sequence
  Description of Artificial Sequence: Synthetic oligonucleotide
aguuucagauccgagaggg

SEQ ID NO: 2200680 - RNA, 19 nt, Artificial Sequence
  Description of Artificial Sequence: Synthetic oligonucleotide
uuuugggaaucucaggucu

SEQ ID NO: 2200681 - RNA, 19 nt, Artificial Sequence
  Description of Artificial Sequence: Synthetic oligonucleotide
uuacucaugagaacuuugc

SEQ ID NO: 2200682 - RNA, 19 nt, Artificial Sequence
  Description of Artificial Sequence: Synthetic oligonucleotide
acaguacuggaucaguuuc

SEQ ID NO: 2200683 - RNA, 19 nt, Artificial Sequence
  Description of Artificial Sequence: Synthetic oligonucleotide
cagccaauaagccacaggc

SEQ ID NO: 2200684 - RNA, 19 nt, Artificial Sequence
  Description of Artificial Sequence: Synthetic oligonucleotide
augcuuuucucaaagaagg

SEQ ID NO: 2200685 - RNA, 19 nt, Artificial Sequence
  Description of Artificial Sequence: Synthetic oligonucleotide
uccucaucacucaaacugg

SEQ ID NO: 2200686 - RNA, 19 nt, Artificial Sequence
  Description of Artificial Sequence: Synthetic oligonucleotide
gaugccaaugcccuuggag

SEQ ID NO: 2200687 - RNA, 19 nt, Artificial Sequence
  Description of Artificial Sequence: Synthetic oligonucleotide
uggauauggaaccgaauca

SEQ ID NO: 2200688 - RNA, 19 nt, Artificial Sequence
  Description of Artificial Sequence: Synthetic oligonucleotide
cuuauguuugaguccaggc

SEQ ID NO: 2200689 - RNA, 19 nt, Artificial Sequence
  Description of Artificial Sequence: Synthetic oligonucleotide
ucugaaagcauuucuucac

SEQ ID NO: 2200690 - RNA, 19 nt, Artificial Sequence
  Description of Artificial Sequence: Synthetic oligonucleotide
uauguuugaguccaggcuu

SEQ ID NO: 2200691 - RNA, 19 nt, Artificial Sequence
  Description of Artificial Sequence: Synthetic oligonucleotide
agagacuuuuccgagagag

SEQ ID NO: 2200692 - RNA, 19 nt, Artificial Sequence
  Description of Artificial Sequence: Synthetic oligonucleotide
ugauuuugggaaucucagg

SEQ ID NO: 2200693 - RNA, 19 nt, Artificial Sequence
  Description of Artificial Sequence: Synthetic oligonucleotide
aguccgguucauuaauggc

SEQ ID NO: 2200694 - RNA, 19 nt, Artificial Sequence
  Description of Artificial Sequence: Synthetic oligonucleotide
uauccggcaucaauggcgg

SEQ ID NO: 2200695 - RNA, 19 nt, Artificial Sequence
  Description of Artificial Sequence: Synthetic oligonucleotide
acucaugagaacuuugccu

SEQ ID NO: 2200696 - RNA, 19 nt, Artificial Sequence
  Description of Artificial Sequence: Synthetic oligonucleotide
auuuugggaaucucagguc

SEQ ID NO: 2200697 - RNA, 19 nt, Artificial Sequence
  Description of Artificial Sequence: Synthetic oligonucleotide
aauuaacuucaguauuccu

SEQ ID NO: 2200698 - RNA, 19 nt, Artificial Sequence
  Description of Artificial Sequence: Synthetic oligonucleotide
ugaacuagauacaggucca

SEQ ID NO: 2200699 - RNA, 19 nt, Artificial Sequence
  Description of Artificial Sequence: Synthetic oligonucleotide
uuugaguccaggcuuguuc

SEQ ID NO: 2200700 - RNA, 19 nt, Artificial Sequence
  Description of Artificial Sequence: Synthetic oligonucleotide
uccgguucauuaauggcag

SEQ ID NO: 2200701 - RNA, 19 nt, Artificial Sequence
  Description of Artificial Sequence: Synthetic oligonucleotide
uuucugaaagcauuucuuc

SEQ ID NO: 2200702 - RNA, 19 nt, Artificial Sequence
  Description of Artificial Sequence: Synthetic oligonucleotide
uaguccgguucauuaaugg

SEQ ID NO: 2200703 - RNA, 19 nt, Artificial Sequence
  Description of Artificial Sequence: Synthetic oligonucleotide
cauuccgauaggcauaggc

SEQ ID NO: 2200704 - RNA, 19 nt, Artificial Sequence
  Description of Artificial Sequence: Synthetic oligonucleotide
gauuuugggaaucucaggu

SEQ ID NO: 2200705 - RNA, 19 nt, Artificial Sequence
  Description of Artificial Sequence: Synthetic oligonucleotide
auggcagccaauaagccac

SEQ ID NO: 2200706 - RNA, 19 nt, Artificial Sequence
  Description of Artificial Sequence: Synthetic oligonucleotide
uacucaugagaacuuugcc

SEQ ID NO: 2200707 - RNA, 19 nt, Artificial Sequence
  Description of Artificial Sequence: Synthetic oligonucleotide
gaaaggauaguccgguuca

SEQ ID NO: 2200708 - RNA, 19 nt, Artificial Sequence
  Description of Artificial Sequence: Synthetic oligonucleotide
uauggaaccgaaucagaac

SEQ ID NO: 2200709 - RNA, 19 nt, Artificial Sequence
  Description of Artificial Sequence: Synthetic oligonucleotide
gaauuaacuucaguauucc

SEQ ID NO: 2200710 - RNA, 19 nt, Artificial Sequence
  Description of Artificial Sequence: Synthetic oligonucleotide
ugcugcagagacuuuuccg

SEQ ID NO: 2200711 - RNA, 19 nt, Artificial Sequence
  Description of Artificial Sequence: Synthetic oligonucleotide
ucaucaagugaauuaacuu

SEQ ID NO: 2200712 - RNA, 19 nt, Artificial Sequence
  Description of Artificial Sequence: Synthetic oligonucleotide
aacuucaguauuccucaug

SEQ ID NO: 2200713 - RNA, 19 nt, Artificial Sequence
  Description of Artificial Sequence: Synthetic oligonucleotide
guauccggcaucaauggcg

SEQ ID NO: 2200714 - RNA, 19 nt, Artificial Sequence
  Description of Artificial Sequence: Synthetic oligonucleotide
caguauuccucauggaaag

SEQ ID NO: 2200715 - RNA, 19 nt, Artificial Sequence
  Description of Artificial Sequence: Synthetic oligonucleotide
ucuauguggcgguauccgg

SEQ ID NO: 2200716 - RNA, 19 nt, Artificial Sequence
  Description of Artificial Sequence: Synthetic oligonucleotide
accgaaucagaaccugagc

SEQ ID NO: 2200717 - RNA, 19 nt, Artificial Sequence
  Description of Artificial Sequence: Synthetic oligonucleotide
cuuugcagcgauaucuuug

SEQ ID NO: 2200718 - RNA, 19 nt, Artificial Sequence
  Description of Artificial Sequence: Synthetic oligonucleotide
aagguggauuuacucauga

SEQ ID NO: 2200719 - RNA, 19 nt, Artificial Sequence
  Description of Artificial Sequence: Synthetic oligonucleotide
aaugccuguggccagugaa

SEQ ID NO: 2200720 - RNA, 19 nt, Artificial Sequence
  Description of Artificial Sequence: Synthetic oligonucleotide
uggcacucaaucugguugg

SEQ ID NO: 2200721 - RNA, 19 nt, Artificial Sequence
  Description of Artificial Sequence: Synthetic oligonucleotide
gaccaucucacucccagcc

SEQ ID NO: 2200722 - RNA, 19 nt, Artificial Sequence
  Description of Artificial Sequence: Synthetic oligonucleotide
uucacuaucuguggggacc

SEQ ID NO: 2200723 - RNA, 19 nt, Artificial Sequence
  Description of Artificial Sequence: Synthetic oligonucleotide
agcgauaucuuugauuuug

SEQ ID NO: 2200724 - RNA, 19 nt, Artificial Sequence
  Description of Artificial Sequence: Synthetic oligonucleotide
uuucaccagucccuggucc

SEQ ID NO: 2200725 - RNA, 19 nt, Artificial Sequence
  Description of Artificial Sequence: Synthetic oligonucleotide
acucaaucugguuggucac

SEQ ID NO: 2200726 - RNA, 19 nt, Artificial Sequence
  Description of Artificial Sequence: Synthetic oligonucleotide
uaggccgugaugccaaugc

SEQ ID NO: 2200727 - RNA, 19 nt, Artificial Sequence
  Description of Artificial Sequence: Synthetic oligonucleotide
ucucaggucugucuggaga

SEQ ID NO: 2200728 - RNA, 19 nt, Artificial Sequence
  Description of Artificial Sequence: Synthetic oligonucleotide
agacuuuuccgagagagca

SEQ ID NO: 2200729 - RNA, 19 nt, Artificial Sequence
  Description of Artificial Sequence: Synthetic oligonucleotide
gaaucucaggucugucugg

SEQ ID NO: 2200730 - RNA, 19 nt, Artificial Sequence
  Description of Artificial Sequence: Synthetic oligonucleotide
uucaccaugcuuuucucaa

SEQ ID NO: 2200731 - RNA, 19 nt, Artificial Sequence
  Description of Artificial Sequence: Synthetic oligonucleotide
uugaguccaggcuuguuca

SEQ ID NO: 2200732 - RNA, 19 nt, Artificial Sequence
  Description of Artificial Sequence: Synthetic oligonucleotide
guggcacucaaucugguug

SEQ ID NO: 2200733 - RNA, 19 nt, Artificial Sequence
  Description of Artificial Sequence: Synthetic oligonucleotide
ugucuggagagcccagggg

SEQ ID NO: 2200734 - RNA, 19 nt, Artificial Sequence
  Description of Artificial Sequence: Synthetic oligonucleotide
uccaggcuuguucaggagc

SEQ ID NO: 2200735 - RNA, 19 nt, Artificial Sequence
  Description of Artificial Sequence: Synthetic oligonucleotide
agaacuuugccuucacuau

SEQ ID NO: 2200736 - RNA, 19 nt, Artificial Sequence
  Description of Artificial Sequence: Synthetic oligonucleotide
uuuuguugaagcugagaau

SEQ ID NO: 2200737 - RNA, 19 nt, Artificial Sequence
  Description of Artificial Sequence: Synthetic oligonucleotide
aaccgaaucagaaccugag

SEQ ID NO: 2200738 - RNA, 19 nt, Artificial Sequence
  Description of Artificial Sequence: Synthetic oligonucleotide
uucucucguauccgggagg

SEQ ID NO: 2200739 - RNA, 19 nt, Artificial Sequence
  Description of Artificial Sequence: Synthetic oligonucleotide
cuauguggcgguauccggc

SEQ ID NO: 2200740 - RNA, 19 nt, Artificial Sequence
  Description of Artificial Sequence: Synthetic oligonucleotide
uaggcauaggcacagucua

SEQ ID NO: 2200741 - RNA, 19 nt, Artificial Sequence
  Description of Artificial Sequence: Synthetic oligonucleotide
ugccuucacuaucuguggg

SEQ ID NO: 2200742 - RNA, 19 nt, Artificial Sequence
  Description of Artificial Sequence: Synthetic oligonucleotide
aaccugagcuacuguuuuc

SEQ ID NO: 2200743 - RNA, 19 nt, Artificial Sequence
  Description of Artificial Sequence: Synthetic oligonucleotide
gauaggcauaggcacaguc

SEQ ID NO: 2200744 - RNA, 19 nt, Artificial Sequence
  Description of Artificial Sequence: Synthetic oligonucleotide
gccaauaagccacaggccc

SEQ ID NO: 2200745 - RNA, 19 nt, Artificial Sequence
  Description of Artificial Sequence: Synthetic oligonucleotide
gguggauuuacucaugaga

SEQ ID NO: 2200746 - RNA, 19 nt, Artificial Sequence
  Description of Artificial Sequence: Synthetic oligonucleotide
aacuuugccuucacuaucu

SEQ ID NO: 2200747 - RNA, 19 nt, Artificial Sequence
  Description of Artificial Sequence: Synthetic oligonucleotide
aucacucaaacuggaaguc

SEQ ID NO: 2200748 - RNA, 19 nt, Artificial Sequence
  Description of Artificial Sequence: Synthetic oligonucleotide
uuugggaaucucaggucug

SEQ ID NO: 2200749 - RNA, 19 nt, Artificial Sequence
  Description of Artificial Sequence: Synthetic oligonucleotide
ucauuaauggcagccaaua

SEQ ID NO: 2200750 - RNA, 19 nt, Artificial Sequence
  Description of Artificial Sequence: Synthetic oligonucleotide
cucaggucugucuggagag

SEQ ID NO: 2200751 - RNA, 19 nt, Artificial Sequence
  Description of Artificial Sequence: Synthetic oligonucleotide
gaagcugagaaugguggcc

SEQ ID NO: 2200752 - RNA, 19 nt, Artificial Sequence
  Description of Artificial Sequence: Synthetic oligonucleotide
uauuccucauggaaaggau

SEQ ID NO: 2200753 - RNA, 19 nt, Artificial Sequence
  Description of Artificial Sequence: Synthetic oligonucleotide
ucucaucaagugaauuaac

SEQ ID NO: 2200754 - RNA, 19 nt, Artificial Sequence
  Description of Artificial Sequence: Synthetic oligonucleotide
ucucucguauccgggaggg

SEQ ID NO: 2200755 - RNA, 19 nt, Artificial Sequence
  Description of Artificial Sequence: Synthetic oligonucleotide
uggauuuacucaugagaac

SEQ ID NO: 2200756 - RNA, 19 nt, Artificial Sequence
  Description of Artificial Sequence: Synthetic oligonucleotide
ucucguauccgggagggug

SEQ ID NO: 2200757 - RNA, 19 nt, Artificial Sequence
  Description of Artificial Sequence: Synthetic oligonucleotide
uguggggaccaucucacuc

SEQ ID NO: 2200758 - RNA, 19 nt, Artificial Sequence
  Description of Artificial Sequence: Synthetic oligonucleotide
agaggguuuucugaaagca

SEQ ID NO: 2200759 - RNA, 19 nt, Artificial Sequence
  Description of Artificial Sequence: Synthetic oligonucleotide
aauaagccacaggcccucc

SEQ ID NO: 2200760 - RNA, 19 nt, Artificial Sequence
  Description of Artificial Sequence: Synthetic oligonucleotide
uucauuaauggcagccaau

SEQ ID NO: 2200761 - RNA, 19 nt, Artificial Sequence
  Description of Artificial Sequence: Synthetic oligonucleotide
aguacuggaucaguuucuc

SEQ ID NO: 2200762 - RNA, 19 nt, Artificial Sequence
  Description of Artificial Sequence: Synthetic oligonucleotide
cacucaaucugguugguca

SEQ ID NO: 2200763 - RNA, 19 nt, Artificial Sequence
  Description of Artificial Sequence: Synthetic oligonucleotide
gaacuuugccuucacuauc

SEQ ID NO: 2200764 - RNA, 19 nt, Artificial Sequence
  Description of Artificial Sequence: Synthetic oligonucleotide
ugccaaugcccuuggagug

SEQ ID NO: 2200765 - RNA, 19 nt, Artificial Sequence
  Description of Artificial Sequence: Synthetic oligonucleotide
guggauuuacucaugagaa

SEQ ID NO: 2200766 - RNA, 19 nt, Artificial Sequence
  Description of Artificial Sequence: Synthetic oligonucleotide
uccaagaagguggauuuac

SEQ ID NO: 2200767 - RNA, 19 nt, Artificial Sequence
  Description of Artificial Sequence: Synthetic oligonucleotide
uaucuuugauuuugggaau

SEQ ID NO: 2200768 - RNA, 19 nt, Artificial Sequence
  Description of Artificial Sequence: Synthetic oligonucleotide
aucuuugauuuugggaauc

SEQ ID NO: 2200769 - RNA, 19 nt, Artificial Sequence
  Description of Artificial Sequence: Synthetic oligonucleotide
aucuguggggaccaucuca

SEQ ID NO: 2200770 - RNA, 19 nt, Artificial Sequence
  Description of Artificial Sequence: Synthetic oligonucleotide
cugagcuacuguuuucuug

SEQ ID NO: 2200771 - RNA, 19 nt, Artificial Sequence
  Description of Artificial Sequence: Synthetic oligonucleotide
ggaaucucaggucugucug

SEQ ID NO: 2200772 - RNA, 19 nt, Artificial Sequence
  Description of Artificial Sequence: Synthetic oligonucleotide
gauccgagaggguuuucug

SEQ ID NO: 2200773 - RNA, 19 nt, Artificial Sequence
  Description of Artificial Sequence: Synthetic oligonucleotide
aaguucucucguauccggg

SEQ ID NO: 2200774 - RNA, 19 nt, Artificial Sequence
  Description of Artificial Sequence: Synthetic oligonucleotide
agccaauaagccacaggcc

SEQ ID NO: 2200775 - RNA, 19 nt, Artificial Sequence
  Description of Artificial Sequence: Synthetic oligonucleotide
guugaagcugagaauggug

SEQ ID NO: 2200776 - RNA, 19 nt, Artificial Sequence
  Description of Artificial Sequence: Synthetic oligonucleotide
ggauauggaaccgaaucag

SEQ ID NO: 2200777 - RNA, 19 nt, Artificial Sequence
  Description of Artificial Sequence: Synthetic oligonucleotide
caccaugcuuuucucaaag

SEQ ID NO: 2200778 - RNA, 19 nt, Artificial Sequence
  Description of Artificial Sequence: Synthetic oligonucleotide
aggauaguccgguucauua

SEQ ID NO: 2200779 - RNA, 19 nt, Artificial Sequence
  Description of Artificial Sequence: Synthetic oligonucleotide
gagagcagaugaaagccug

SEQ ID NO: 2200780 - RNA, 19 nt, Artificial Sequence
  Description of Artificial Sequence: Synthetic oligonucleotide
uuucagauccgagaggguu

SEQ ID NO: 2200781 - RNA, 19 nt, Artificial Sequence
  Description of Artificial Sequence: Synthetic oligonucleotide
aagcugagaaugguggcca

SEQ ID NO: 2200782 - RNA, 19 nt, Artificial Sequence
  Description of Artificial Sequence: Synthetic oligonucleotide
ugagaacuuugccuucacu

SEQ ID NO: 2200783 - RNA, 19 nt, Artificial Sequence
  Description of Artificial Sequence: Synthetic oligonucleotide
agugaacuagauacagguc

SEQ ID NO: 2200784 - RNA, 19 nt, Artificial Sequence
  Description of Artificial Sequence: Synthetic oligonucleotide
gucuauguggcgguauccg

SEQ ID NO: 2200785 - RNA, 19 nt, Artificial Sequence
  Description of Artificial Sequence: Synthetic oligonucleotide
uccgagaggguuuucugaa

SEQ ID NO: 2200786 - RNA, 19 nt, Artificial Sequence
  Description of Artificial Sequence: Synthetic oligonucleotide
cuagauacagguccaaaua

SEQ ID NO: 2200787 - RNA, 19 nt, Artificial Sequence
  Description of Artificial Sequence: Synthetic oligonucleotide
uuuuccgagagagcagaug

SEQ ID NO: 2200788 - RNA, 19 nt, Artificial Sequence
  Description of Artificial Sequence: Synthetic oligonucleotide
caaauaguccaguuucaga

SEQ ID NO: 2200789 - RNA, 19 nt, Artificial Sequence
  Description of Artificial Sequence: Synthetic oligonucleotide
uguugaagcugagaauggu

SEQ ID NO: 2200790 - RNA, 19 nt, Artificial Sequence
  Description of Artificial Sequence: Synthetic oligonucleotide
aguauuccucauggaaagg

SEQ ID NO: 2200791 - RNA, 19 nt, Artificial Sequence
  Description of Artificial Sequence: Synthetic oligonucleotide
agagcagaugaaagccugc

SEQ ID NO: 2200792 - RNA, 19 nt, Artificial Sequence
  Description of Artificial Sequence: Synthetic oligonucleotide
cagugaacuagauacaggu

SEQ ID NO: 2200793 - RNA, 19 nt, Artificial Sequence
  Description of Artificial Sequence: Synthetic oligonucleotide
ugcagagacuuuuccgaga

SEQ ID NO: 2200794 - RNA, 19 nt, Artificial Sequence
  Description of Artificial Sequence: Synthetic oligonucleotide
ugcagcgauaucuuugauu

SEQ ID NO: 2200795 - RNA, 19 nt, Artificial Sequence
  Description of Artificial Sequence: Synthetic oligonucleotide
cauuucuucaccaugcuuu

SEQ ID NO: 2200796 - RNA, 19 nt, Artificial Sequence
  Description of Artificial Sequence: Synthetic oligonucleotide
acuuuuccgagagagcaga

SEQ ID NO: 2200797 - RNA, 19 nt, Artificial Sequence
  Description of Artificial Sequence: Synthetic oligonucleotide
aguccaggcuuguucagga

SEQ ID NO: 2200798 - RNA, 19 nt, Artificial Sequence
  Description of Artificial Sequence: Synthetic oligonucleotide
guucucucguauccgggag

SEQ ID NO: 2200799 - RNA, 19 nt, Artificial Sequence
  Description of Artificial Sequence: Synthetic oligonucleotide
gcagagacuuuuccgagag

SEQ ID NO: 2200800 - RNA, 19 nt, Artificial Sequence
  Description of Artificial Sequence: Synthetic oligonucleotide
agguggauuuacucaugag

SEQ ID NO: 2200801 - RNA, 19 nt, Artificial Sequence
  Description of Artificial Sequence: Synthetic oligonucleotide
uucagauccgagaggguuu

SEQ ID NO: 2200802 - RNA, 19 nt, Artificial Sequence
  Description of Artificial Sequence: Synthetic oligonucleotide
cagggcuuucaccaguccc

SEQ ID NO: 2200803 - RNA, 19 nt, Artificial Sequence
  Description of Artificial Sequence: Synthetic oligonucleotide
cucauuccgauaggcauag

SEQ ID NO: 2200804 - RNA, 19 nt, Artificial Sequence
  Description of Artificial Sequence: Synthetic oligonucleotide
auaggcauaggcacagucu

SEQ ID NO: 2200805 - RNA, 19 nt, Artificial Sequence
  Description of Artificial Sequence: Synthetic oligonucleotide
ucuggauauggaaccgaau

SEQ ID NO: 2200806 - RNA, 19 nt, Artificial Sequence
  Description of Artificial Sequence: Synthetic oligonucleotide
auauggaaccgaaucagaa

SEQ ID NO: 2200807 - RNA, 19 nt, Artificial Sequence
  Description of Artificial Sequence: Synthetic oligonucleotide
uccggcaucaauggcggcc

SEQ ID NO: 2200808 - RNA, 19 nt, Artificial Sequence
  Description of Artificial Sequence: Synthetic oligonucleotide
auccgagaggguuuucuga

SEQ ID NO: 2200809 - RNA, 19 nt, Artificial Sequence
  Description of Artificial Sequence: Synthetic oligonucleotide
cugucuggagagcccaggg

SEQ ID NO: 2200810 - RNA, 19 nt, Artificial Sequence
  Description of Artificial Sequence: Synthetic oligonucleotide
cugcagagacuuuuccgag

SEQ ID NO: 2200811 - RNA, 19 nt, Artificial Sequence
  Description of Artificial Sequence: Synthetic oligonucleotide
aucagaaccugagcuacug

SEQ ID NO: 2200812 - RNA, 19 nt, Artificial Sequence
  Description of Artificial Sequence: Synthetic oligonucleotide
ggaaaggauaguccgguuc

SEQ ID NO: 2200813 - RNA, 19 nt, Artificial Sequence
  Description of Artificial Sequence: Synthetic oligonucleotide
gaguccaggcuuguucagg

SEQ ID NO: 2200814 - RNA, 19 nt, Artificial Sequence
  Description of Artificial Sequence: Synthetic oligonucleotide
uuucuccugggugagguau

SEQ ID NO: 2200815 - RNA, 19 nt, Artificial Sequence
  Description of Artificial Sequence: Synthetic oligonucleotide
acuucacucucauuccgau

SEQ ID NO: 2200816 - RNA, 19 nt, Artificial Sequence
  Description of Artificial Sequence: Synthetic oligonucleotide
aacuagauacagguccaaa

SEQ ID NO: 2200817 - RNA, 19 nt, Artificial Sequence
  Description of Artificial Sequence: Synthetic oligonucleotide
ugaguccaggcuuguucag

SEQ ID NO: 2200818 - RNA, 19 nt, Artificial Sequence
  Description of Artificial Sequence: Synthetic oligonucleotide
caucucacucccagccugg

SEQ ID NO: 2200819 - RNA, 19 nt, Artificial Sequence
  Description of Artificial Sequence: Synthetic oligonucleotide
gacuuuuccgagagagcag

SEQ ID NO: 2200820 - RNA, 19 nt, Artificial Sequence
  Description of Artificial Sequence: Synthetic oligonucleotide
guccgguucauuaauggca

SEQ ID NO: 2200821 - RNA, 19 nt, Artificial Sequence
  Description of Artificial Sequence: Synthetic oligonucleotide
gcuuuucucaaagaaggug

SEQ ID NO: 2200822 - RNA, 19 nt, Artificial Sequence
  Description of Artificial Sequence: Synthetic oligonucleotide
uccgagagagcagaugaaa

SEQ ID NO: 2200823 - RNA, 19 nt, Artificial Sequence
  Description of Artificial Sequence: Synthetic oligonucleotide
acuaucuguggggaccauc

SEQ ID NO: 2200824 - RNA, 19 nt, Artificial Sequence
  Description of Artificial Sequence: Synthetic oligonucleotide
caaucugguuggucacugg

SEQ ID NO: 2200825 - RNA, 19 nt, Artificial Sequence
  Description of Artificial Sequence: Synthetic oligonucleotide
cacucucauuccgauaggc

SEQ ID NO: 2200826 - RNA, 19 nt, Artificial Sequence
  Description of Artificial Sequence: Synthetic oligonucleotide
gagacuuuuccgagagagc

SEQ ID NO: 2200827 - RNA, 19 nt, Artificial Sequence
  Description of Artificial Sequence: Synthetic oligonucleotide
uucuccugggugagguaug

SEQ ID NO: 2200828 - RNA, 19 nt, Artificial Sequence
  Description of Artificial Sequence: Synthetic oligonucleotide
gcugcagagacuuuuccga

SEQ ID NO: 2200829 - RNA, 19 nt, Artificial Sequence
  Description of Artificial Sequence: Synthetic oligonucleotide
guacuggaucaguuucucc

SEQ ID NO: 2200830 - RNA, 19 nt, Artificial Sequence
  Description of Artificial Sequence: Synthetic oligonucleotide
gugaauuaacuucaguauu

SEQ ID NO: 2200831 - RNA, 19 nt, Artificial Sequence
  Description of Artificial Sequence: Synthetic oligonucleotide
ucacuaucuguggggacca

SEQ ID NO: 2200832 - RNA, 19 nt, Artificial Sequence
  Description of Artificial Sequence: Synthetic oligonucleotide
gaagguggauuuacucaug

SEQ ID NO: 2200833 - RNA, 19 nt, Artificial Sequence
  Description of Artificial Sequence: Synthetic oligonucleotide
gauaguccgguucauuaau

SEQ ID NO: 2200834 - RNA, 19 nt, Artificial Sequence
  Description of Artificial Sequence: Synthetic oligonucleotide
ggauuuacucaugagaacu

SEQ ID NO: 2200835 - RNA, 19 nt, Artificial Sequence
  Description of Artificial Sequence: Synthetic oligonucleotide
accaugcuuuucucaaaga

SEQ ID NO: 2200836 - RNA, 19 nt, Artificial Sequence
  Description of Artificial Sequence: Synthetic oligonucleotide
cucaugagaacuuugccuu

SEQ ID NO: 2200837 - RNA, 19 nt, Artificial Sequence
  Description of Artificial Sequence: Synthetic oligonucleotide
accugagcuacuguuuucu

SEQ ID NO: 2200838 - RNA, 19 nt, Artificial Sequence
  Description of Artificial Sequence: Synthetic oligonucleotide
cacucaaacuggaagucaa

SEQ ID NO: 2200839 - RNA, 19 nt, Artificial Sequence
  Description of Artificial Sequence: Synthetic oligonucleotide
agagagcagaugaaagccu

SEQ ID NO: 2200840 - RNA, 19 nt, Artificial Sequence
  Description of Artificial Sequence: Synthetic oligonucleotide
agauccgagaggguuuucu

SEQ ID NO: 2200841 - RNA, 19 nt, Artificial Sequence
  Description of Artificial Sequence: Synthetic oligonucleotide
augccuguggccagugaac

SEQ ID NO: 2200842 - RNA, 19 nt, Artificial Sequence
  Description of Artificial Sequence: Synthetic oligonucleotide
ccagugaacuagauacagg

SEQ ID NO: 2200843 - RNA, 19 nt, Artificial Sequence
  Description of Artificial Sequence: Synthetic oligonucleotide
auaguccgguucauuaaug

SEQ ID NO: 2200844 - RNA, 19 nt, Artificial Sequence
  Description of Artificial Sequence: Synthetic oligonucleotide
cuucacuaucuguggggac

SEQ ID NO: 2200845 - RNA, 19 nt, Artificial Sequence
  Description of Artificial Sequence: Synthetic oligonucleotide
cuaucuguggggaccaucu

SEQ ID NO: 2200846 - RNA, 19 nt, Artificial Sequence
  Description of Artificial Sequence: Synthetic oligonucleotide
cuuugauuuugggaaucuc

SEQ ID NO: 2200847 - RNA, 19 nt, Artificial Sequence
  Description of Artificial Sequence: Synthetic oligonucleotide
caggucugucuggagagcc

SEQ ID NO: 2200848 - RNA, 19 nt, Artificial Sequence
  Description of Artificial Sequence: Synthetic oligonucleotide
uuccgagagagcagaugaa

SEQ ID NO: 2200849 - RNA, 19 nt, Artificial Sequence
  Description of Artificial Sequence: Synthetic oligonucleotide
uugggaaucucaggucugu

SEQ ID NO: 2200850 - RNA, 19 nt, Artificial Sequence
  Description of Artificial Sequence: Synthetic oligonucleotide
ucaccaugcuuuucucaaa

SEQ ID NO: 2200851 - RNA, 19 nt, Artificial Sequence
  Description of Artificial Sequence: Synthetic oligonucleotide
aggguuuucugaaagcauu

SEQ ID NO: 2200852 - RNA, 19 nt, Artificial Sequence
  Description of Artificial Sequence: Synthetic oligonucleotide
gcagccaauaagccacagg

SEQ ID NO: 2200853 - RNA, 19 nt, Artificial Sequence
  Description of Artificial Sequence: Synthetic oligonucleotide
ccgagagagcagaugaaag

SEQ ID NO: 2200854 - RNA, 19 nt, Artificial Sequence
  Description of Artificial Sequence: Synthetic oligonucleotide
gaaccgaaucagaaccuga

SEQ ID NO: 2200855 - RNA, 19 nt, Artificial Sequence
  Description of Artificial Sequence: Synthetic oligonucleotide
gagcuacuguuuucuugug

SEQ ID NO: 2200856 - RNA, 19 nt, Artificial Sequence
  Description of Artificial Sequence: Synthetic oligonucleotide
ugccuguggccagugaacu

SEQ ID NO: 2200857 - RNA, 19 nt, Artificial Sequence
  Description of Artificial Sequence: Synthetic oligonucleotide
gcuacuguuuucuugugcu

SEQ ID NO: 2200858 - RNA, 19 nt, Artificial Sequence
  Description of Artificial Sequence: Synthetic oligonucleotide
cauuaauggcagccaauaa

SEQ ID NO: 2200859 - RNA, 19 nt, Artificial Sequence
  Description of Artificial Sequence: Synthetic oligonucleotide
accaucucacucccagccu

SEQ ID NO: 2200860 - RNA, 19 nt, Artificial Sequence
  Description of Artificial Sequence: Synthetic oligonucleotide
uaucuguggggaccaucuc

SEQ ID NO: 2200861 - RNA, 19 nt, Artificial Sequence
  Description of Artificial Sequence: Synthetic oligonucleotide
cucucauuccgauaggcau

SEQ ID NO: 2200862 - RNA, 19 nt, Artificial Sequence
  Description of Artificial Sequence: Synthetic oligonucleotide
acucucauuccgauaggca

SEQ ID NO: 2200863 - RNA, 19 nt, Artificial Sequence
  Description of Artificial Sequence: Synthetic oligonucleotide
auaagccacaggcccucca

SEQ ID NO: 2200864 - RNA, 19 nt, Artificial Sequence
  Description of Artificial Sequence: Synthetic oligonucleotide
auccgggagggugucacag

SEQ ID NO: 2200865 - RNA, 19 nt, Artificial Sequence
  Description of Artificial Sequence: Synthetic oligonucleotide
gaccugaaaguucucucgu

SEQ ID NO: 2200866 - RNA, 19 nt, Artificial Sequence
  Description of Artificial Sequence: Synthetic oligonucleotide
uaacuucaguauuccucau

SEQ ID NO: 2200867 - RNA, 19 nt, Artificial Sequence
  Description of Artificial Sequence: Synthetic oligonucleotide
caauaagccacaggcccuc

SEQ ID NO: 2200868 - RNA, 19 nt, Artificial Sequence
  Description of Artificial Sequence: Synthetic oligonucleotide
ucaggucugucuggagagc

SEQ ID NO: 2200869 - RNA, 19 nt, Artificial Sequence
  Description of Artificial Sequence: Synthetic oligonucleotide
gcgauaucuuugauuuugg

SEQ ID NO: 2200870 - RNA, 19 nt, Artificial Sequence
  Description of Artificial Sequence: Synthetic oligonucleotide
cccacuucacucucauucc

SEQ ID NO: 2200871 - RNA, 19 nt, Artificial Sequence
  Description of Artificial Sequence: Synthetic oligonucleotide
cugguccaccaguuccucc

SEQ ID NO: 2200872 - RNA, 19 nt, Artificial Sequence
  Description of Artificial Sequence: Synthetic oligonucleotide
agaaccugagcuacuguuu

SEQ ID NO: 2200873 - RNA, 19 nt, Artificial Sequence
  Description of Artificial Sequence: Synthetic oligonucleotide
cacuucacucucauuccga

SEQ ID NO: 2200874 - RNA, 19 nt, Artificial Sequence
  Description of Artificial Sequence: Synthetic oligonucleotide
cuucaguauuccucaugga

SEQ ID NO: 2200875 - RNA, 19 nt, Artificial Sequence
  Description of Artificial Sequence: Synthetic oligonucleotide
cucuggauauggaaccgaa

SEQ ID NO: 2200876 - RNA, 19 nt, Artificial Sequence
  Description of Artificial Sequence: Synthetic oligonucleotide
guauccgggagggugucac

SEQ ID NO: 2200877 - RNA, 19 nt, Artificial Sequence
  Description of Artificial Sequence: Synthetic oligonucleotide
cgauaucuuugauuuuggg

SEQ ID NO: 2200878 - RNA, 19 nt, Artificial Sequence
  Description of Artificial Sequence: Synthetic oligonucleotide
ugcugcugcagagacuuuu

SEQ ID NO: 2200879 - RNA, 19 nt, Artificial Sequence
  Description of Artificial Sequence: Synthetic oligonucleotide
gaaccugagcuacuguuuu

SEQ ID NO: 2200880 - RNA, 19 nt, Artificial Sequence
  Description of Artificial Sequence: Synthetic oligonucleotide
auccggcaucaauggcggc

SEQ ID NO: 2200881 - RNA, 19 nt, Artificial Sequence
  Description of Artificial Sequence: Synthetic oligonucleotide
ucagauccgagaggguuuu

SEQ ID NO: 2200882 - RNA, 19 nt, Artificial Sequence
  Description of Artificial Sequence: Synthetic oligonucleotide
ccacuucacucucauuccg

SEQ ID NO: 2200883 - RNA, 19 nt, Artificial Sequence
  Description of Artificial Sequence: Synthetic oligonucleotide
uggaaaggauaguccgguu

SEQ ID NO: 2200884 - RNA, 19 nt, Artificial Sequence
  Description of Artificial Sequence: Synthetic oligonucleotide
cgagaggguuuucugaaag

SEQ ID NO: 2200885 - RNA, 19 nt, Artificial Sequence
  Description of Artificial Sequence: Synthetic oligonucleotide
uccgggagggugucacaga

SEQ ID NO: 2200886 - RNA, 19 nt, Artificial Sequence
  Description of Artificial Sequence: Synthetic oligonucleotide
ggauaguccgguucauuaa

SEQ ID NO: 2200887 - RNA, 19 nt, Artificial Sequence
  Description of Artificial Sequence: Synthetic oligonucleotide
uauccgggagggugucaca

SEQ ID NO: 2200888 - RNA, 19 nt, Artificial Sequence
  Description of Artificial Sequence: Synthetic oligonucleotide
gguuuucugaaagcauuuc

SEQ ID NO: 2200889 - RNA, 19 nt, Artificial Sequence
  Description of Artificial Sequence: Synthetic oligonucleotide
cuguaggccgugaugccaa

SEQ ID NO: 2200890 - RNA, 19 nt, Artificial Sequence
  Description of Artificial Sequence: Synthetic oligonucleotide
uugcagcgauaucuuugau

SEQ ID NO: 2200891 - RNA, 19 nt, Artificial Sequence
  Description of Artificial Sequence: Synthetic oligonucleotide
gaacuagauacagguccaa

SEQ ID NO: 2200892 - RNA, 19 nt, Artificial Sequence
  Description of Artificial Sequence: Synthetic oligonucleotide
ccaucucacucccagccug

SEQ ID NO: 2200893 - RNA, 19 nt, Artificial Sequence
  Description of Artificial Sequence: Synthetic oligonucleotide
ucauuccgauaggcauagg

SEQ ID NO: 2200894 - RNA, 19 nt, Artificial Sequence
  Description of Artificial Sequence: Synthetic oligonucleotide
ggccgugaugccaaugccc

SEQ ID NO: 2200895 - RNA, 19 nt, Artificial Sequence
  Description of Artificial Sequence: Synthetic oligonucleotide
cuuugccuucacuaucugu

SEQ ID NO: 2200896 - RNA, 19 nt, Artificial Sequence
  Description of Artificial Sequence: Synthetic oligonucleotide
ucaccagucccugguccac

SEQ ID NO: 2200897 - RNA, 19 nt, Artificial Sequence
  Description of Artificial Sequence: Synthetic oligonucleotide
ugggaaucucaggucuguc

SEQ ID NO: 2200898 - RNA, 19 nt, Artificial Sequence
  Description of Artificial Sequence: Synthetic oligonucleotide
ggaccaucucacucccagc

SEQ ID NO: 2200899 - RNA, 19 nt, Artificial Sequence
  Description of Artificial Sequence: Synthetic oligonucleotide
ccuggaaugccuguggcca

SEQ ID NO: 2200900 - RNA, 19 nt, Artificial Sequence
  Description of Artificial Sequence: Synthetic oligonucleotide
agcugagaaugguggccau

SEQ ID NO: 2200901 - RNA, 19 nt, Artificial Sequence
  Description of Artificial Sequence: Synthetic oligonucleotide
caguacuggaucaguuucu

SEQ ID NO: 2200902 - RNA, 19 nt, Artificial Sequence
  Description of Artificial Sequence: Synthetic oligonucleotide
cuucacucucauuccgaua

SEQ ID NO: 2200903 - RNA, 19 nt, Artificial Sequence
  Description of Artificial Sequence: Synthetic oligonucleotide
uguaggccgugaugccaau

SEQ ID NO: 2200904 - RNA, 19 nt, Artificial Sequence
  Description of Artificial Sequence: Synthetic oligonucleotide
gggaaucucaggucugucu

SEQ ID NO: 2200905 - RNA, 19 nt, Artificial Sequence
  Description of Artificial Sequence: Synthetic oligonucleotide
ccgauaggcauaggcacag

SEQ ID NO: 2200906 - RNA, 19 nt, Artificial Sequence
  Description of Artificial Sequence: Synthetic oligonucleotide
ggcuguaggccgugaugcc

SEQ ID NO: 2200907 - RNA, 19 nt, Artificial Sequence
  Description of Artificial Sequence: Synthetic oligonucleotide
guaggccgugaugccaaug

SEQ ID NO: 2200908 - RNA, 19 nt, Artificial Sequence
  Description of Artificial Sequence: Synthetic oligonucleotide
caguuucuccugggugagg

SEQ ID NO: 2200909 - RNA, 19 nt, Artificial Sequence
  Description of Artificial Sequence: Synthetic oligonucleotide
aggagccuuucaaucugca

SEQ ID NO: 2200910 - RNA, 19 nt, Artificial Sequence
  Description of Artificial Sequence: Synthetic oligonucleotide
aggcauccaagaaggugga

SEQ ID NO: 2200911 - RNA, 19 nt, Artificial Sequence
  Description of Artificial Sequence: Synthetic oligonucleotide
ggagccuuucaaucugcaa

SEQ ID NO: 2200912 - RNA, 19 nt, Artificial Sequence
  Description of Artificial Sequence: Synthetic oligonucleotide
cucguauccgggagggugu

SEQ ID NO: 2200913 - RNA, 19 nt, Artificial Sequence
  Description of Artificial Sequence: Synthetic oligonucleotide
uggagaugcccagggcuuu

SEQ ID NO: 2200914 - RNA, 19 nt, Artificial Sequence
  Description of Artificial Sequence: Synthetic oligonucleotide
ccgggagggugucacagac

SEQ ID NO: 2200915 - RNA, 19 nt, Artificial Sequence
  Description of Artificial Sequence: Synthetic oligonucleotide
caccagucccugguccacc

SEQ ID NO: 2200916 - RNA, 19 nt, Artificial Sequence
  Description of Artificial Sequence: Synthetic oligonucleotide
gucugucuggagagcccag

SEQ ID NO: 2200917 - RNA, 19 nt, Artificial Sequence
  Description of Artificial Sequence: Synthetic oligonucleotide
ucguauccgggaggguguc

SEQ ID NO: 2200918 - RNA, 19 nt, Artificial Sequence
  Description of Artificial Sequence: Synthetic oligonucleotide
ccucaucacucaaacugga

SEQ ID NO: 2200919 - RNA, 19 nt, Artificial Sequence
  Description of Artificial Sequence: Synthetic oligonucleotide
auccaagaagguggauuua

SEQ ID NO: 2200920 - RNA, 19 nt, Artificial Sequence
  Description of Artificial Sequence: Synthetic oligonucleotide
aggcuuguucaggagccuu

SEQ ID NO: 2200921 - RNA, 19 nt, Artificial Sequence
  Description of Artificial Sequence: Synthetic oligonucleotide
gcuguaggccgugaugcca

SEQ ID NO: 2200922 - RNA, 19 nt, Artificial Sequence
  Description of Artificial Sequence: Synthetic oligonucleotide
guuucuccugggugaggua

SEQ ID NO: 2200923 - RNA, 19 nt, Artificial Sequence
  Description of Artificial Sequence: Synthetic oligonucleotide
cagagacuuuuccgagaga

SEQ ID NO: 2200924 - RNA, 19 nt, Artificial Sequence
  Description of Artificial Sequence: Synthetic oligonucleotide
ccuucacuaucugugggga

SEQ ID NO: 2200925 - RNA, 19 nt, Artificial Sequence
  Description of Artificial Sequence: Synthetic oligonucleotide
ggcagccaauaagccacag

SEQ ID NO: 2200926 - RNA, 19 nt, Artificial Sequence
  Description of Artificial Sequence: Synthetic oligonucleotide
ccagggcuuucaccagucc

SEQ ID NO: 2200927 - RNA, 19 nt, Artificial Sequence
  Description of Artificial Sequence: Synthetic oligonucleotide
gcauccaagaagguggauu

SEQ ID NO: 2200928 - RNA, 19 nt, Artificial Sequence
  Description of Artificial Sequence: Synthetic oligonucleotide
ccaauaagccacaggcccu

SEQ ID NO: 2200929 - RNA, 19 nt, Artificial Sequence
  Description of Artificial Sequence: Synthetic oligonucleotide
ccaaugcccuuggagugac

SEQ ID NO: 2200930 - RNA, 19 nt, Artificial Sequence
  Description of Artificial Sequence: Synthetic oligonucleotide
cucaaucugguuggucacu

SEQ ID NO: 2200931 - RNA, 19 nt, Artificial Sequence
  Description of Artificial Sequence: Synthetic oligonucleotide
guuucagauccgagagggu

SEQ ID NO: 2200932 - RNA, 19 nt, Artificial Sequence
  Description of Artificial Sequence: Synthetic oligonucleotide
gcugagaaugguggccauc

SEQ ID NO: 2200933 - RNA, 19 nt, Artificial Sequence
  Description of Artificial Sequence: Synthetic oligonucleotide
gccaaugcccuuggaguga

SEQ ID NO: 2200934 - RNA, 19 nt, Artificial Sequence
  Description of Artificial Sequence: Synthetic oligonucleotide
gccgugaugccaaugcccu

SEQ ID NO: 2200935 - RNA, 19 nt, Artificial Sequence
  Description of Artificial Sequence: Synthetic oligonucleotide
gcacucaaucugguugguc

SEQ ID NO: 2200936 - RNA, 19 nt, Artificial Sequence
  Description of Artificial Sequence: Synthetic oligonucleotide
ccucucccacuucacucuc

SEQ ID NO: 2200937 - RNA, 19 nt, Artificial Sequence
  Description of Artificial Sequence: Synthetic oligonucleotide
cagauccgagaggguuuuc

SEQ ID NO: 2200938 - RNA, 19 nt, Artificial Sequence
  Description of Artificial Sequence: Synthetic oligonucleotide
ccagucccugguccaccag

SEQ ID NO: 2200939 - RNA, 19 nt, Artificial Sequence
  Description of Artificial Sequence: Synthetic oligonucleotide
ccgagaggguuuucugaaa

SEQ ID NO: 2200940 - RNA, 19 nt, Artificial Sequence
  Description of Artificial Sequence: Synthetic oligonucleotide
ggcggccuucacagcuucc

SEQ ID NO: 2200941 - RNA, 19 nt, Artificial Sequence
  Description of Artificial Sequence: Synthetic oligonucleotide
gggugagguauggguggca

SEQ ID NO: 2200942 - RNA, 19 nt, Artificial Sequence
  Description of Artificial Sequence: Synthetic oligonucleotide
gcggccuucacagcuuccu

SEQ ID NO: 2200943 - RNA, 19 nt, Artificial Sequence
  Description of Artificial Sequence: Synthetic oligonucleotide
gguauggguggcacucaau

SEQ ID NO: 2200944 - RNA, 19 nt, Artificial Sequence
  Description of Artificial Sequence: Synthetic oligonucleotide
caggcuuguucaggagccu

SEQ ID NO: 2200945 - RNA, 19 nt, Artificial Sequence
  Description of Artificial Sequence: Synthetic oligonucleotide
ggcuuguucaggagccuuu

SEQ ID NO: 2200946 - RNA, 19 nt, Artificial Sequence
  Description of Artificial Sequence: Synthetic oligonucleotide
ccacaggcccuccaguuuu

SEQ ID NO: 2200947 - RNA, 19 nt, Artificial Sequence
  Description of Artificial Sequence: Synthetic oligonucleotide
cucucguauccgggagggu

SEQ ID NO: 2200948 - RNA, 19 nt, Artificial Sequence
  Description of Artificial Sequence: Synthetic oligonucleotide
ccggcaucaauggcggccu

SEQ ID NO: 2200949 - RNA, 19 nt, Artificial Sequence
  Description of Artificial Sequence: Synthetic oligonucleotide
ccugagcuacuguuuucuu

SEQ ID NO: 2200950 - RNA, 19 nt, Artificial Sequence
  Description of Artificial Sequence: Synthetic oligonucleotide
cacuaucuguggggaccau

SEQ ID NO: 2200951 - RNA, 19 nt, Artificial Sequence
  Description of Artificial Sequence: Synthetic oligonucleotide
cguauccgggaggguguca

SEQ ID NO: 2200952 - RNA, 19 nt, Artificial Sequence
  Description of Artificial Sequence: Synthetic oligonucleotide
cgauaggcauaggcacagu

SEQ ID NO: 2200953 - RNA, 19 nt, Artificial Sequence
  Description of Artificial Sequence: Synthetic oligonucleotide
uggaaauaaaguuuaaggg

SEQ ID NO: 2200954 - RNA, 19 nt, Artificial Sequence
  Description of Artificial Sequence: Synthetic oligonucleotide
auugcuguuauguacagac

SEQ ID NO: 2200955 - RNA, 19 nt, Artificial Sequence
  Description of Artificial Sequence: Synthetic oligonucleotide
uaaaguuuuagcaucagca

SEQ ID NO: 2200956 - RNA, 19 nt, Artificial Sequence
  Description of Artificial Sequence: Synthetic oligonucleotide
uuuuccaugacauaagagc

SEQ ID NO: 2200957 - RNA, 19 nt, Artificial Sequence
  Description of Artificial Sequence: Synthetic oligonucleotide
uuuagcaucagcaauuagc

SEQ ID NO: 2200958 - RNA, 19 nt, Artificial Sequence
  Description of Artificial Sequence: Synthetic oligonucleotide
aacaaugcuacuccaaagg

SEQ ID NO: 2200959 - RNA, 19 nt, Artificial Sequence
  Description of Artificial Sequence: Synthetic oligonucleotide
aaugcuacuccaaagggcc

SEQ ID NO: 2200960 - RNA, 19 nt, Artificial Sequence
  Description of Artificial Sequence: Synthetic oligonucleotide
aaauugcaaagccagauug

SEQ ID NO: 2200961 - RNA, 19 nt, Artificial Sequence
  Description of Artificial Sequence: Synthetic oligonucleotide
aucaauuaaaguuuuagca

SEQ ID NO: 2200962 - RNA, 19 nt, Artificial Sequence
  Description of Artificial Sequence: Synthetic oligonucleotide
aacauguggaaauuuugac

SEQ ID NO: 2200963 - RNA, 19 nt, Artificial Sequence
  Description of Artificial Sequence: Synthetic oligonucleotide
ugaaauuguucccagaugu

SEQ ID NO: 2200964 - RNA, 19 nt, Artificial Sequence
  Description of Artificial Sequence: Synthetic oligonucleotide
uuagcaucagcaauuagcc

SEQ ID NO: 2200965 - RNA, 19 nt, Artificial Sequence
  Description of Artificial Sequence: Synthetic oligonucleotide
uguuugagaaugaugagug

SEQ ID NO: 2200966 - RNA, 19 nt, Artificial Sequence
  Description of Artificial Sequence: Synthetic oligonucleotide
auuuugaccaggcugcacc

SEQ ID NO: 2200967 - RNA, 19 nt, Artificial Sequence
  Description of Artificial Sequence: Synthetic oligonucleotide
aaaguuuaagggcaauuag

SEQ ID NO: 2200968 - RNA, 19 nt, Artificial Sequence
  Description of Artificial Sequence: Synthetic oligonucleotide
aaauaaucuuccuucagga

SEQ ID NO: 2200969 - RNA, 19 nt, Artificial Sequence
  Description of Artificial Sequence: Synthetic oligonucleotide
aaaggucccagaugggucc

SEQ ID NO: 2200970 - RNA, 19 nt, Artificial Sequence
  Description of Artificial Sequence: Synthetic oligonucleotide
guacaaaggucccagaugg

SEQ ID NO: 2200971 - RNA, 19 nt, Artificial Sequence
  Description of Artificial Sequence: Synthetic oligonucleotide
uaaacuucuugcaaggagc

SEQ ID NO: 2200972 - RNA, 19 nt, Artificial Sequence
  Description of Artificial Sequence: Synthetic oligonucleotide
acaauuuucucaaugcugc

SEQ ID NO: 2200973 - RNA, 19 nt, Artificial Sequence
  Description of Artificial Sequence: Synthetic oligonucleotide
aauugcucgagcaucacac

SEQ ID NO: 2200974 - RNA, 19 nt, Artificial Sequence
  Description of Artificial Sequence: Synthetic oligonucleotide
aaaacacacauauacugga

SEQ ID NO: 2200975 - RNA, 19 nt, Artificial Sequence
  Description of Artificial Sequence: Synthetic oligonucleotide
auuaggagaacugaaauug

SEQ ID NO: 2200976 - RNA, 19 nt, Artificial Sequence
  Description of Artificial Sequence: Synthetic oligonucleotide
agcuugauagcuucaaugg

SEQ ID NO: 2200977 - RNA, 19 nt, Artificial Sequence
  Description of Artificial Sequence: Synthetic oligonucleotide
aaaguauucacaccccugu

SEQ ID NO: 2200978 - RNA, 19 nt, Artificial Sequence
  Description of Artificial Sequence: Synthetic oligonucleotide
uuuccaugacauaagagcu

SEQ ID NO: 2200979 - RNA, 19 nt, Artificial Sequence
  Description of Artificial Sequence: Synthetic oligonucleotide
ucaauuaaaguuuuagcau

SEQ ID NO: 2200980 - RNA, 19 nt, Artificial Sequence
  Description of Artificial Sequence: Synthetic oligonucleotide
ucacacuguacaaaggucc

SEQ ID NO: 2200981 - RNA, 19 nt, Artificial Sequence
  Description of Artificial Sequence: Synthetic oligonucleotide
auacuugggguuuucaagg

SEQ ID NO: 2200982 - RNA, 19 nt, Artificial Sequence
  Description of Artificial Sequence: Synthetic oligonucleotide
cacagcuagacauacaccc

SEQ ID NO: 2200983 - RNA, 19 nt, Artificial Sequence
  Description of Artificial Sequence: Synthetic oligonucleotide
aaguuuaagggcaauuagg

SEQ ID NO: 2200984 - RNA, 19 nt, Artificial Sequence
  Description of Artificial Sequence: Synthetic oligonucleotide
accuauaugagcaucaauc

SEQ ID NO: 2200985 - RNA, 19 nt, Artificial Sequence
  Description of Artificial Sequence: Synthetic oligonucleotide
gaaauaaaguuuaagggca

SEQ ID NO: 2200986 - RNA, 19 nt, Artificial Sequence
  Description of Artificial Sequence: Synthetic oligonucleotide
aauuagcccacucauggca

SEQ ID NO: 2200987 - RNA, 19 nt, Artificial Sequence
  Description of Artificial Sequence: Synthetic oligonucleotide
ucgagcaucacacuguaca

SEQ ID NO: 2200988 - RNA, 19 nt, Artificial Sequence
  Description of Artificial Sequence: Synthetic oligonucleotide
ugcaaagccagauuggaca

SEQ ID NO: 2200989 - RNA, 19 nt, Artificial Sequence
  Description of Artificial Sequence: Synthetic oligonucleotide
aagcagagccaauugcucg

SEQ ID NO: 2200990 - RNA, 19 nt, Artificial Sequence
  Description of Artificial Sequence: Synthetic oligonucleotide
uuaaauguccuugaucacc

SEQ ID NO: 2200991 - RNA, 19 nt, Artificial Sequence
  Description of Artificial Sequence: Synthetic oligonucleotide
aaaguuuuagcaucagcaa

SEQ ID NO: 2200992 - RNA, 19 nt, Artificial Sequence
  Description of Artificial Sequence: Synthetic oligonucleotide
uccauuacuuguuugagaa

SEQ ID NO: 2200993 - RNA, 19 nt, Artificial Sequence
  Description of Artificial Sequence: Synthetic oligonucleotide
uuaaaguuuuagcaucagc

SEQ ID NO: 2200994 - RNA, 19 nt, Artificial Sequence
  Description of Artificial Sequence: Synthetic oligonucleotide
cauggcacaaccuauauga

SEQ ID NO: 2200995 - RNA, 19 nt, Artificial Sequence
  Description of Artificial Sequence: Synthetic oligonucleotide
accccagucaaccacaccg

SEQ ID NO: 2200996 - RNA, 19 nt, Artificial Sequence
  Description of Artificial Sequence: Synthetic oligonucleotide
gucauuguuucauuguagg

SEQ ID NO: 2200997 - RNA, 19 nt, Artificial Sequence
  Description of Artificial Sequence: Synthetic oligonucleotide
uugagaaugaugagugaag

SEQ ID NO: 2200998 - RNA, 19 nt, Artificial Sequence
  Description of Artificial Sequence: Synthetic oligonucleotide
caauuaaaguuuuagcauc

SEQ ID NO: 2200999 - RNA, 19 nt, Artificial Sequence
  Description of Artificial Sequence: Synthetic oligonucleotide
aaccaagcuugauagcuuc

SEQ ID NO: 2201000 - RNA, 19 nt, Artificial Sequence
  Description of Artificial Sequence: Synthetic oligonucleotide
cuggcuuuaucaauuaaag

SEQ ID NO: 2201001 - RNA, 19 nt, Artificial Sequence
  Description of Artificial Sequence: Synthetic oligonucleotide
uguacaaaggucccagaug

SEQ ID NO: 2201002 - RNA, 19 nt, Artificial Sequence
  Description of Artificial Sequence: Synthetic oligonucleotide
uucucuucuccacagcuag

SEQ ID NO: 2201003 - RNA, 19 nt, Artificial Sequence
  Description of Artificial Sequence: Synthetic oligonucleotide
ugacauaagagcuggaaau

SEQ ID NO: 2201004 - RNA, 19 nt, Artificial Sequence
  Description of Artificial Sequence: Synthetic oligonucleotide
aauuaggagaacugaaauu

SEQ ID NO: 2201005 - RNA, 19 nt, Artificial Sequence
  Description of Artificial Sequence: Synthetic oligonucleotide
cauguggaaauuuugacca

SEQ ID NO: 2201006 - RNA, 19 nt, Artificial Sequence
  Description of Artificial Sequence: Synthetic oligonucleotide
cuccaaacaacaaugcuac

SEQ ID NO: 2201007 - RNA, 19 nt, Artificial Sequence
  Description of Artificial Sequence: Synthetic oligonucleotide
uuugugaacauguggaaau

SEQ ID NO: 2201008 - RNA, 19 nt, Artificial Sequence
  Description of Artificial Sequence: Synthetic oligonucleotide
aacacacauauacuggaga

SEQ ID NO: 2201009 - RNA, 19 nt, Artificial Sequence
  Description of Artificial Sequence: Synthetic oligonucleotide
ugguaaacuucuugcaagg

SEQ ID NO: 2201010 - RNA, 19 nt, Artificial Sequence
  Description of Artificial Sequence: Synthetic oligonucleotide
acuagcaccccagucaacc

SEQ ID NO: 2201011 - RNA, 19 nt, Artificial Sequence
  Description of Artificial Sequence: Synthetic oligonucleotide
ugucauuguuucauuguag

SEQ ID NO: 2201012 - RNA, 19 nt, Artificial Sequence
  Description of Artificial Sequence: Synthetic oligonucleotide
cuccaaauugcaaagccag

SEQ ID NO: 2201013 - RNA, 19 nt, Artificial Sequence
  Description of Artificial Sequence: Synthetic oligonucleotide
augagcaucaaucucuaca

SEQ ID NO: 2201014 - RNA, 19 nt, Artificial Sequence
  Description of Artificial Sequence: Synthetic oligonucleotide
guaaacuucuugcaaggag

SEQ ID NO: 2201015 - RNA, 19 nt, Artificial Sequence
  Description of Artificial Sequence: Synthetic oligonucleotide
guccauaugaaacagcuga

SEQ ID NO: 2201016 - RNA, 19 nt, Artificial Sequence
  Description of Artificial Sequence: Synthetic oligonucleotide
gcaauuagcccacucaugg

SEQ ID NO: 2201017 - RNA, 19 nt, Artificial Sequence
  Description of Artificial Sequence: Synthetic oligonucleotide
gauguuugaggauggcucc

SEQ ID NO: 2201018 - RNA, 19 nt, Artificial Sequence
  Description of Artificial Sequence: Synthetic oligonucleotide
gaaccaaugguucuguguc

SEQ ID NO: 2201019 - RNA, 19 nt, Artificial Sequence
  Description of Artificial Sequence: Synthetic oligonucleotide
uaaucuuccuucaggagaa

SEQ ID NO: 2201020 - RNA, 19 nt, Artificial Sequence
  Description of Artificial Sequence: Synthetic oligonucleotide
aauuaaaguuuuagcauca

SEQ ID NO: 2201021 - RNA, 19 nt, Artificial Sequence
  Description of Artificial Sequence: Synthetic oligonucleotide
agacauggcaccuggaucu

SEQ ID NO: 2201022 - RNA, 19 nt, Artificial Sequence
  Description of Artificial Sequence: Synthetic oligonucleotide
ugcuguuauguacagacau

SEQ ID NO: 2201023 - RNA, 19 nt, Artificial Sequence
  Description of Artificial Sequence: Synthetic oligonucleotide
agauguuugaggauggcuc

SEQ ID NO: 2201024 - RNA, 19 nt, Artificial Sequence
  Description of Artificial Sequence: Synthetic oligonucleotide
agauggguccauaugaaac

SEQ ID NO: 2201025 - RNA, 19 nt, Artificial Sequence
  Description of Artificial Sequence: Synthetic oligonucleotide
ucaucaacuccuccaaaca

SEQ ID NO: 2201026 - RNA, 19 nt, Artificial Sequence
  Description of Artificial Sequence: Synthetic oligonucleotide
uguggaaauuuugaccagg

SEQ ID NO: 2201027 - RNA, 19 nt, Artificial Sequence
  Description of Artificial Sequence: Synthetic oligonucleotide
cauuguuucauuguaggug

SEQ ID NO: 2201028 - RNA, 19 nt, Artificial Sequence
  Description of Artificial Sequence: Synthetic oligonucleotide
cuugcaaggagcucugggc

SEQ ID NO: 2201029 - RNA, 19 nt, Artificial Sequence
  Description of Artificial Sequence: Synthetic oligonucleotide
uucagugucauagacuugu

SEQ ID NO: 2201030 - RNA, 19 nt, Artificial Sequence
  Description of Artificial Sequence: Synthetic oligonucleotide
gugguaaacuucuugcaag

SEQ ID NO: 2201031 - RNA, 19 nt, Artificial Sequence
  Description of Artificial Sequence: Synthetic oligonucleotide
acugaaauuguucccagau

SEQ ID NO: 2201032 - RNA, 19 nt, Artificial Sequence
  Description of Artificial Sequence: Synthetic oligonucleotide
ucuccaaauugcaaagcca

SEQ ID NO: 2201033 - RNA, 19 nt, Artificial Sequence
  Description of Artificial Sequence: Synthetic oligonucleotide
auuaguggggagguaauuc

SEQ ID NO: 2201034 - RNA, 19 nt, Artificial Sequence
  Description of Artificial Sequence: Synthetic oligonucleotide
ugugucuccacucuggcuu

SEQ ID NO: 2201035 - RNA, 19 nt, Artificial Sequence
  Description of Artificial Sequence: Synthetic oligonucleotide
uuugagaaugaugagugaa

SEQ ID NO: 2201036 - RNA, 19 nt, Artificial Sequence
  Description of Artificial Sequence: Synthetic oligonucleotide
ggagaacugaaauuguucc

SEQ ID NO: 2201037 - RNA, 19 nt, Artificial Sequence
  Description of Artificial Sequence: Synthetic oligonucleotide
cuugauagcuucaauggca

SEQ ID NO: 2201038 - RNA, 19 nt, Artificial Sequence
  Description of Artificial Sequence: Synthetic oligonucleotide
uuuugaccaggcugcaccg

SEQ ID NO: 2201039 - RNA, 19 nt, Artificial Sequence
  Description of Artificial Sequence: Synthetic oligonucleotide
gugaggaacauagcgaggg

SEQ ID NO: 2201040 - RNA, 19 nt, Artificial Sequence
  Description of Artificial Sequence: Synthetic oligonucleotide
ugucuggaugccaauggcc

SEQ ID NO: 2201041 - RNA, 19 nt, Artificial Sequence
  Description of Artificial Sequence: Synthetic oligonucleotide
aguuuaagggcaauuagga

SEQ ID NO: 2201042 - RNA, 19 nt, Artificial Sequence
  Description of Artificial Sequence: Synthetic oligonucleotide
uuguuugagaaugaugagu

SEQ ID NO: 2201043 - RNA, 19 nt, Artificial Sequence
  Description of Artificial Sequence: Synthetic oligonucleotide
guuuaagggcaauuaggag

SEQ ID NO: 2201044 - RNA, 19 nt, Artificial Sequence
  Description of Artificial Sequence: Synthetic oligonucleotide
ugagaaugaugagugaaga

SEQ ID NO: 2201045 - RNA, 19 nt, Artificial Sequence
  Description of Artificial Sequence: Synthetic oligonucleotide
agaaccaagcuugauagcu

SEQ ID NO: 2201046 - RNA, 19 nt, Artificial Sequence
  Description of Artificial Sequence: Synthetic oligonucleotide
ugaaccaaugguucugugu

SEQ ID NO: 2201047 - RNA, 19 nt, Artificial Sequence
  Description of Artificial Sequence: Synthetic oligonucleotide
gauggguccauaugaaaca

SEQ ID NO: 2201048 - RNA, 19 nt, Artificial Sequence
  Description of Artificial Sequence: Synthetic oligonucleotide
aaaaguauucacaccccug

SEQ ID NO: 2201049 - RNA, 19 nt, Artificial Sequence
  Description of Artificial Sequence: Synthetic oligonucleotide
cucaaugcugcuaggcucc

SEQ ID NO: 2201050 - RNA, 19 nt, Artificial Sequence
  Description of Artificial Sequence: Synthetic oligonucleotide
aaagggccgagacauggca

SEQ ID NO: 2201051 - RNA, 19 nt, Artificial Sequence
  Description of Artificial Sequence: Synthetic oligonucleotide
uuaggagaacugaaauugu

SEQ ID NO: 2201052 - RNA, 19 nt, Artificial Sequence
  Description of Artificial Sequence: Synthetic oligonucleotide
guggcuagcucuauguugg

SEQ ID NO: 2201053 - RNA, 19 nt, Artificial Sequence
  Description of Artificial Sequence: Synthetic oligonucleotide
agaacugaaauuguuccca

SEQ ID NO: 2201054 - RNA, 19 nt, Artificial Sequence
  Description of Artificial Sequence: Synthetic oligonucleotide
uccuccauuacuuguuuga

SEQ ID NO: 2201055 - RNA, 19 nt, Artificial Sequence
  Description of Artificial Sequence: Synthetic oligonucleotide
agcuucaauggcauauucc

SEQ ID NO: 2201056 - RNA, 19 nt, Artificial Sequence
  Description of Artificial Sequence: Synthetic oligonucleotide
auagacuugugguaaacuu

SEQ ID NO: 2201057 - RNA, 19 nt, Artificial Sequence
  Description of Artificial Sequence: Synthetic oligonucleotide
auucacaccccugucguac

SEQ ID NO: 2201058 - RNA, 19 nt, Artificial Sequence
  Description of Artificial Sequence: Synthetic oligonucleotide
cacccucugaagcagagcc

SEQ ID NO: 2201059 - RNA, 19 nt, Artificial Sequence
  Description of Artificial Sequence: Synthetic oligonucleotide
ugcuaggcuccauuagugg

SEQ ID NO: 2201060 - RNA, 19 nt, Artificial Sequence
  Description of Artificial Sequence: Synthetic oligonucleotide
aauuuugaccaggcugcac

SEQ ID NO: 2201061 - RNA, 19 nt, Artificial Sequence
  Description of Artificial Sequence: Synthetic oligonucleotide
auguacagacaucauaaaa

SEQ ID NO: 2201062 - RNA, 19 nt, Artificial Sequence
  Description of Artificial Sequence: Synthetic oligonucleotide
aauggccguagaaccaagc

SEQ ID NO: 2201063 - RNA, 19 nt, Artificial Sequence
  Description of Artificial Sequence: Synthetic oligonucleotide
ucauuguuucauuguaggu

SEQ ID NO: 2201064 - RNA, 19 nt, Artificial Sequence
  Description of Artificial Sequence: Synthetic oligonucleotide
accacaccgccacagcacc

SEQ ID NO: 2201065 - RNA, 19 nt, Artificial Sequence
  Description of Artificial Sequence: Synthetic oligonucleotide
cuuguuugagaaugaugag

SEQ ID NO: 2201066 - RNA, 19 nt, Artificial Sequence
  Description of Artificial Sequence: Synthetic oligonucleotide
agggccgagacauggcacc

SEQ ID NO: 2201067 - RNA, 19 nt, Artificial Sequence
  Description of Artificial Sequence: Synthetic oligonucleotide
ucaagggccacacgacucc

SEQ ID NO: 2201068 - RNA, 19 nt, Artificial Sequence
  Description of Artificial Sequence: Synthetic oligonucleotide
aaacacacauauacuggag

SEQ ID NO: 2201069 - RNA, 19 nt, Artificial Sequence
  Description of Artificial Sequence: Synthetic oligonucleotide
ucucaaugcugcuaggcuc

SEQ ID NO: 2201070 - RNA, 19 nt, Artificial Sequence
  Description of Artificial Sequence: Synthetic oligonucleotide
uuucucaaugcugcuaggc

SEQ ID NO: 2201071 - RNA, 19 nt, Artificial Sequence
  Description of Artificial Sequence: Synthetic oligonucleotide
uggcacaaccuauaugagc

SEQ ID NO: 2201072 - RNA, 19 nt, Artificial Sequence
  Description of Artificial Sequence: Synthetic oligonucleotide
uugauagcuucaauggcau

SEQ ID NO: 2201073 - RNA, 19 nt, Artificial Sequence
  Description of Artificial Sequence: Synthetic oligonucleotide
aggagaacugaaauuguuc

SEQ ID NO: 2201074 - RNA, 19 nt, Artificial Sequence
  Description of Artificial Sequence: Synthetic oligonucleotide
gaauugcuguuauguacag

SEQ ID NO: 2201075 - RNA, 19 nt, Artificial Sequence
  Description of Artificial Sequence: Synthetic oligonucleotide
gacuugauggcuucuuuca

SEQ ID NO: 2201076 - RNA, 19 nt, Artificial Sequence
  Description of Artificial Sequence: Synthetic oligonucleotide
cuauaugagcaucaaucuc

SEQ ID NO: 2201077 - RNA, 19 nt, Artificial Sequence
  Description of Artificial Sequence: Synthetic oligonucleotide
uacuccaaagggccgagac

SEQ ID NO: 2201078 - RNA, 19 nt, Artificial Sequence
  Description of Artificial Sequence: Synthetic oligonucleotide
uuccucuccaaauugcaaa

SEQ ID NO: 2201079 - RNA, 19 nt, Artificial Sequence
  Description of Artificial Sequence: Synthetic oligonucleotide
uuccacuugaaauaaucuu

SEQ ID NO: 2201080 - RNA, 19 nt, Artificial Sequence
  Description of Artificial Sequence: Synthetic oligonucleotide
aagggcaauuaggagaacu

SEQ ID NO: 2201081 - RNA, 19 nt, Artificial Sequence
  Description of Artificial Sequence: Synthetic oligonucleotide
augacauaagagcuggaaa

SEQ ID NO: 2201082 - RNA, 19 nt, Artificial Sequence
  Description of Artificial Sequence: Synthetic oligonucleotide
accccugucguacucggac

SEQ ID NO: 2201083 - RNA, 19 nt, Artificial Sequence
  Description of Artificial Sequence: Synthetic oligonucleotide
uugcucgagcaucacacug

SEQ ID NO: 2201084 - RNA, 19 nt, Artificial Sequence
  Description of Artificial Sequence: Synthetic oligonucleotide
uucauuguaggugaaccaa

SEQ ID NO: 2201085 - RNA, 19 nt, Artificial Sequence
  Description of Artificial Sequence: Synthetic oligonucleotide
ugucauagacuugugguaa

SEQ ID NO: 2201086 - RNA, 19 nt, Artificial Sequence
  Description of Artificial Sequence: Synthetic oligonucleotide
uggcuuuaucaauuaaagu

SEQ ID NO: 2201087 - RNA, 19 nt, Artificial Sequence
  Description of Artificial Sequence: Synthetic oligonucleotide
acgacuccaacuagcaccc

SEQ ID NO: 2201088 - RNA, 19 nt, Artificial Sequence
  Description of Artificial Sequence: Synthetic oligonucleotide
gucuggaugccaauggccg

SEQ ID NO: 2201089 - RNA, 19 nt, Artificial Sequence
  Description of Artificial Sequence: Synthetic oligonucleotide
uucucaucaacuccuccaa

SEQ ID NO: 2201090 - RNA, 19 nt, Artificial Sequence
  Description of Artificial Sequence: Synthetic oligonucleotide
acacauauacuggagauuu

SEQ ID NO: 2201091 - RNA, 19 nt, Artificial Sequence
  Description of Artificial Sequence: Synthetic oligonucleotide
acauacacccucugauguc

SEQ ID NO: 2201092 - RNA, 19 nt, Artificial Sequence
  Description of Artificial Sequence: Synthetic oligonucleotide
uggcauauuccacuugaaa

SEQ ID NO: 2201093 - RNA, 19 nt, Artificial Sequence
  Description of Artificial Sequence: Synthetic oligonucleotide
uggaaauuuugaccaggcu

SEQ ID NO: 2201094 - RNA, 19 nt, Artificial Sequence
  Description of Artificial Sequence: Synthetic oligonucleotide
acuccuccaaacaacaaug

SEQ ID NO: 2201095 - RNA, 19 nt, Artificial Sequence
  Description of Artificial Sequence: Synthetic oligonucleotide
ucauuguaggugaaccaau

SEQ ID NO: 2201096 - RNA, 19 nt, Artificial Sequence
  Description of Artificial Sequence: Synthetic oligonucleotide
ggcuuuaucaauuaaaguu

SEQ ID NO: 2201097 - RNA, 19 nt, Artificial Sequence
  Description of Artificial Sequence: Synthetic oligonucleotide
uccaaauugcaaagccaga

SEQ ID NO: 2201098 - RNA, 19 nt, Artificial Sequence
  Description of Artificial Sequence: Synthetic oligonucleotide
aaccacaccgccacagcac

SEQ ID NO: 2201099 - RNA, 19 nt, Artificial Sequence
  Description of Artificial Sequence: Synthetic oligonucleotide
aacauagcgagggcaggag

SEQ ID NO: 2201100 - RNA, 19 nt, Artificial Sequence
  Description of Artificial Sequence: Synthetic oligonucleotide
aaccaaugguucugugucu

SEQ ID NO: 2201101 - RNA, 19 nt, Artificial Sequence
  Description of Artificial Sequence: Synthetic oligonucleotide
cagugucauagacuugugg

SEQ ID NO: 2201102 - RNA, 19 nt, Artificial Sequence
  Description of Artificial Sequence: Synthetic oligonucleotide
aaccuauaugagcaucaau

SEQ ID NO: 2201103 - RNA, 19 nt, Artificial Sequence
  Description of Artificial Sequence: Synthetic oligonucleotide
gagacauggcaccuggauc

SEQ ID NO: 2201104 - RNA, 19 nt, Artificial Sequence
  Description of Artificial Sequence: Synthetic oligonucleotide
uccauuaguggggagguaa

SEQ ID NO: 2201105 - RNA, 19 nt, Artificial Sequence
  Description of Artificial Sequence: Synthetic oligonucleotide
ugcucgagcaucacacugu

SEQ ID NO: 2201106 - RNA, 19 nt, Artificial Sequence
  Description of Artificial Sequence: Synthetic oligonucleotide
agacuugugguaaacuucu

SEQ ID NO: 2201107 - RNA, 19 nt, Artificial Sequence
  Description of Artificial Sequence: Synthetic oligonucleotide
ugaggaacauagcgagggc

SEQ ID NO: 2201108 - RNA, 19 nt, Artificial Sequence
  Description of Artificial Sequence: Synthetic oligonucleotide
cuguuauguacagacauca

SEQ ID NO: 2201109 - RNA, 19 nt, Artificial Sequence
  Description of Artificial Sequence: Synthetic oligonucleotide
auuagcccacucauggcac

SEQ ID NO: 2201110 - RNA, 19 nt, Artificial Sequence
  Description of Artificial Sequence: Synthetic oligonucleotide
caauuagcccacucauggc

SEQ ID NO: 2201111 - RNA, 19 nt, Artificial Sequence
  Description of Artificial Sequence: Synthetic oligonucleotide
gacauacacccucugaugu

SEQ ID NO: 2201112 - RNA, 19 nt, Artificial Sequence
  Description of Artificial Sequence: Synthetic oligonucleotide
aguuuuagcaucagcaauu

SEQ ID NO: 2201113 - RNA, 19 nt, Artificial Sequence
  Description of Artificial Sequence: Synthetic oligonucleotide
gcuaggcuccauuaguggg

SEQ ID NO: 2201114 - RNA, 19 nt, Artificial Sequence
  Description of Artificial Sequence: Synthetic oligonucleotide
ccgagugaggaacauagcg

SEQ ID NO: 2201115 - RNA, 19 nt, Artificial Sequence
  Description of Artificial Sequence: Synthetic oligonucleotide
guccuuucucaucaacucc

SEQ ID NO: 2201116 - RNA, 19 nt, Artificial Sequence
  Description of Artificial Sequence: Synthetic oligonucleotide
agccaauugcucgagcauc

SEQ ID NO: 2201117 - RNA, 19 nt, Artificial Sequence
  Description of Artificial Sequence: Synthetic oligonucleotide
uccaacuagcaccccaguc

SEQ ID NO: 2201118 - RNA, 19 nt, Artificial Sequence
  Description of Artificial Sequence: Synthetic oligonucleotide
uguuauguacagacaucau

SEQ ID NO: 2201119 - RNA, 19 nt, Artificial Sequence
  Description of Artificial Sequence: Synthetic oligonucleotide
caaaggucccagauggguc

SEQ ID NO: 2201120 - RNA, 19 nt, Artificial Sequence
  Description of Artificial Sequence: Synthetic oligonucleotide
cuauguugguggcauucag

SEQ ID NO: 2201121 - RNA, 19 nt, Artificial Sequence
  Description of Artificial Sequence: Synthetic oligonucleotide
ugaugucuggaugccaaug

SEQ ID NO: 2201122 - RNA, 19 nt, Artificial Sequence
  Description of Artificial Sequence: Synthetic oligonucleotide
agauuggacacagccuggg

SEQ ID NO: 2201123 - RNA, 19 nt, Artificial Sequence
  Description of Artificial Sequence: Synthetic oligonucleotide
ugggucacgcucuccacug

SEQ ID NO: 2201124 - RNA, 19 nt, Artificial Sequence
  Description of Artificial Sequence: Synthetic oligonucleotide
ucuauguugguggcauuca

SEQ ID NO: 2201125 - RNA, 19 nt, Artificial Sequence
  Description of Artificial Sequence: Synthetic oligonucleotide
auguggaaauuuugaccag

SEQ ID NO: 2201126 - RNA, 19 nt, Artificial Sequence
  Description of Artificial Sequence: Synthetic oligonucleotide
accaaugguucugugucuc

SEQ ID NO: 2201127 - RNA, 19 nt, Artificial Sequence
  Description of Artificial Sequence: Synthetic oligonucleotide
uuugaggauggcuccuccu

SEQ ID NO: 2201128 - RNA, 19 nt, Artificial Sequence
  Description of Artificial Sequence: Synthetic oligonucleotide
aacuucuugcaaggagcuc

SEQ ID NO: 2201129 - RNA, 19 nt, Artificial Sequence
  Description of Artificial Sequence: Synthetic oligonucleotide
acaaccuauaugagcauca

SEQ ID NO: 2201130 - RNA, 19 nt, Artificial Sequence
  Description of Artificial Sequence: Synthetic oligonucleotide
cugcuaggcuccauuagug

SEQ ID NO: 2201131 - RNA, 19 nt, Artificial Sequence
  Description of Artificial Sequence: Synthetic oligonucleotide
uuucagugucauagacuug

SEQ ID NO: 2201132 - RNA, 19 nt, Artificial Sequence
  Description of Artificial Sequence: Synthetic oligonucleotide
agcgguggauacuuggggu

SEQ ID NO: 2201133 - RNA, 19 nt, Artificial Sequence
  Description of Artificial Sequence: Synthetic oligonucleotide
uguuucauuguaggugaac

SEQ ID NO: 2201134 - RNA, 19 nt, Artificial Sequence
  Description of Artificial Sequence: Synthetic oligonucleotide
gaugccaauggccguagaa

SEQ ID NO: 2201135 - RNA, 19 nt, Artificial Sequence
  Description of Artificial Sequence: Synthetic oligonucleotide
aaauuuugaccaggcugca

SEQ ID NO: 2201136 - RNA, 19 nt, Artificial Sequence
  Description of Artificial Sequence: Synthetic oligonucleotide
aagggccgagacauggcac

SEQ ID NO: 2201137 - RNA, 19 nt, Artificial Sequence
  Description of Artificial Sequence: Synthetic oligonucleotide
guggaaauuuugaccaggc

SEQ ID NO: 2201138 - RNA, 19 nt, Artificial Sequence
  Description of Artificial Sequence: Synthetic oligonucleotide
acauaagagcuggaaauaa

SEQ ID NO: 2201139 - RNA, 19 nt, Artificial Sequence
  Description of Artificial Sequence: Synthetic oligonucleotide
cagauuggacacagccugg

SEQ ID NO: 2201140 - RNA, 19 nt, Artificial Sequence
  Description of Artificial Sequence: Synthetic oligonucleotide
gucguacucggaccgagug

SEQ ID NO: 2201141 - RNA, 19 nt, Artificial Sequence
  Description of Artificial Sequence: Synthetic oligonucleotide
auggguccauaugaaacag

SEQ ID NO: 2201142 - RNA, 19 nt, Artificial Sequence
  Description of Artificial Sequence: Synthetic oligonucleotide
uacucggaccgagugagga

SEQ ID NO: 2201143 - RNA, 19 nt, Artificial Sequence
  Description of Artificial Sequence: Synthetic oligonucleotide
accgccacagcaccaagga

SEQ ID NO: 2201144 - RNA, 19 nt, Artificial Sequence
  Description of Artificial Sequence: Synthetic oligonucleotide
ucguacucggaccgaguga

SEQ ID NO: 2201145 - RNA, 19 nt, Artificial Sequence
  Description of Artificial Sequence: Synthetic oligonucleotide
gcuugauagcuucaauggc

SEQ ID NO: 2201146 - RNA, 19 nt, Artificial Sequence
  Description of Artificial Sequence: Synthetic oligonucleotide
gcuggaaauaaaguuuaag

SEQ ID NO: 2201147 - RNA, 19 nt, Artificial Sequence
  Description of Artificial Sequence: Synthetic oligonucleotide
gguaauucucuucuccaca

SEQ ID NO: 2201148 - RNA, 19 nt, Artificial Sequence
  Description of Artificial Sequence: Synthetic oligonucleotide
cauaagagcuggaaauaaa

SEQ ID NO: 2201149 - RNA, 19 nt, Artificial Sequence
  Description of Artificial Sequence: Synthetic oligonucleotide
auagcgagggcaggaggcg

SEQ ID NO: 2201150 - RNA, 19 nt, Artificial Sequence
  Description of Artificial Sequence: Synthetic oligonucleotide
agggcaauuaggagaacug

SEQ ID NO: 2201151 - RNA, 19 nt, Artificial Sequence
  Description of Artificial Sequence: Synthetic oligonucleotide
ugaggauggcuccuccuua

SEQ ID NO: 2201152 - RNA, 19 nt, Artificial Sequence
  Description of Artificial Sequence: Synthetic oligonucleotide
gaggaacauagcgagggca

SEQ ID NO: 2201153 - RNA, 19 nt, Artificial Sequence
  Description of Artificial Sequence: Synthetic oligonucleotide
gacuccaacuagcacccca

SEQ ID NO: 2201154 - RNA, 19 nt, Artificial Sequence
  Description of Artificial Sequence: Synthetic oligonucleotide
ugcaaggagcucugggcac

SEQ ID NO: 2201155 - RNA, 19 nt, Artificial Sequence
  Description of Artificial Sequence: Synthetic oligonucleotide
cuagacauacacccucuga

SEQ ID NO: 2201156 - RNA, 19 nt, Artificial Sequence
  Description of Artificial Sequence: Synthetic oligonucleotide
auugcucgagcaucacacu

SEQ ID NO: 2201157 - RNA, 19 nt, Artificial Sequence
  Description of Artificial Sequence: Synthetic oligonucleotide
cagcuagacauacacccuc

SEQ ID NO: 2201158 - RNA, 19 nt, Artificial Sequence
  Description of Artificial Sequence: Synthetic oligonucleotide
ucucaucaacuccuccaaa

SEQ ID NO: 2201159 - RNA, 19 nt, Artificial Sequence
  Description of Artificial Sequence: Synthetic oligonucleotide
gguccuuucucaucaacuc

SEQ ID NO: 2201160 - RNA, 19 nt, Artificial Sequence
  Description of Artificial Sequence: Synthetic oligonucleotide
acaccccugucguacucgg

SEQ ID NO: 2201161 - RNA, 19 nt, Artificial Sequence
  Description of Artificial Sequence: Synthetic oligonucleotide
gaaugaugagugaagacuu

SEQ ID NO: 2201162 - RNA, 19 nt, Artificial Sequence
  Description of Artificial Sequence: Synthetic oligonucleotide
guuugagaaugaugaguga

SEQ ID NO: 2201163 - RNA, 19 nt, Artificial Sequence
  Description of Artificial Sequence: Synthetic oligonucleotide
caucacacuguacaaaggu

SEQ ID NO: 2201164 - RNA, 19 nt, Artificial Sequence
  Description of Artificial Sequence: Synthetic oligonucleotide
gacauaagagcuggaaaua

SEQ ID NO: 2201165 - RNA, 19 nt, Artificial Sequence
  Description of Artificial Sequence: Synthetic oligonucleotide
gucaaccacaccgccacag

SEQ ID NO: 2201166 - RNA, 19 nt, Artificial Sequence
  Description of Artificial Sequence: Synthetic oligonucleotide
cucuauguugguggcauuc

SEQ ID NO: 2201167 - RNA, 19 nt, Artificial Sequence
  Description of Artificial Sequence: Synthetic oligonucleotide
ccaaacaacaaugcuacuc

SEQ ID NO: 2201168 - RNA, 19 nt, Artificial Sequence
  Description of Artificial Sequence: Synthetic oligonucleotide
gagguccuuucucaucaac

SEQ ID NO: 2201169 - RNA, 19 nt, Artificial Sequence
  Description of Artificial Sequence: Synthetic oligonucleotide
guauucacaccccugucgu

SEQ ID NO: 2201170 - RNA, 19 nt, Artificial Sequence
  Description of Artificial Sequence: Synthetic oligonucleotide
acuguacaaaggucccaga

SEQ ID NO: 2201171 - RNA, 19 nt, Artificial Sequence
  Description of Artificial Sequence: Synthetic oligonucleotide
ggcagcgguggauacuugg

SEQ ID NO: 2201172 - RNA, 19 nt, Artificial Sequence
  Description of Artificial Sequence: Synthetic oligonucleotide
gguggcauucagcuucucc

SEQ ID NO: 2201173 - RNA, 19 nt, Artificial Sequence
  Description of Artificial Sequence: Synthetic oligonucleotide
agcaauuagcccacucaug

SEQ ID NO: 2201174 - RNA, 19 nt, Artificial Sequence
  Description of Artificial Sequence: Synthetic oligonucleotide
cuccauuacuuguuugaga

SEQ ID NO: 2201175 - RNA, 19 nt, Artificial Sequence
  Description of Artificial Sequence: Synthetic oligonucleotide
cccucugaugucuggaugc

SEQ ID NO: 2201176 - RNA, 19 nt, Artificial Sequence
  Description of Artificial Sequence: Synthetic oligonucleotide
gugucauagacuuguggua

SEQ ID NO: 2201177 - RNA, 19 nt, Artificial Sequence
  Description of Artificial Sequence: Synthetic oligonucleotide
caugacauaagagcuggaa

SEQ ID NO: 2201178 - RNA, 19 nt, Artificial Sequence
  Description of Artificial Sequence: Synthetic oligonucleotide
cucggaccgagugaggaac

SEQ ID NO: 2201179 - RNA, 19 nt, Artificial Sequence
  Description of Artificial Sequence: Synthetic oligonucleotide
aggugaaccaaugguucug

SEQ ID NO: 2201180 - RNA, 19 nt, Artificial Sequence
  Description of Artificial Sequence: Synthetic oligonucleotide
uccaaacaacaaugcuacu

SEQ ID NO: 2201181 - RNA, 19 nt, Artificial Sequence
  Description of Artificial Sequence: Synthetic oligonucleotide
cuuugugaacauguggaaa

SEQ ID NO: 2201182 - RNA, 19 nt, Artificial Sequence
  Description of Artificial Sequence: Synthetic oligonucleotide
caccgccacagcaccaagg

SEQ ID NO: 2201183 - RNA, 19 nt, Artificial Sequence
  Description of Artificial Sequence: Synthetic oligonucleotide
cacaaccuauaugagcauc

SEQ ID NO: 2201184 - RNA, 19 nt, Artificial Sequence
  Description of Artificial Sequence: Synthetic oligonucleotide
ucacgcucuccacugucau

SEQ ID NO: 2201185 - RNA, 19 nt, Artificial Sequence
  Description of Artificial Sequence: Synthetic oligonucleotide
uuguuucauuguaggugaa

SEQ ID NO: 2201186 - RNA, 19 nt, Artificial Sequence
  Description of Artificial Sequence: Synthetic oligonucleotide
aagccagauuggacacagc

SEQ ID NO: 2201187 - RNA, 19 nt, Artificial Sequence
  Description of Artificial Sequence: Synthetic oligonucleotide
cugucauuguuucauugua

SEQ ID NO: 2201188 - RNA, 19 nt, Artificial Sequence
  Description of Artificial Sequence: Synthetic oligonucleotide
ugggcacccucugaagcag

SEQ ID NO: 2201189 - RNA, 19 nt, Artificial Sequence
  Description of Artificial Sequence: Synthetic oligonucleotide
ugcaccguggcuagcucua

SEQ ID NO: 2201190 - RNA, 19 nt, Artificial Sequence
  Description of Artificial Sequence: Synthetic oligonucleotide
ucggaccgagugaggaaca

SEQ ID NO: 2201191 - RNA, 19 nt, Artificial Sequence
  Description of Artificial Sequence: Synthetic oligonucleotide
uggauacuugggguuuuca

SEQ ID NO: 2201192 - RNA, 19 nt, Artificial Sequence
  Description of Artificial Sequence: Synthetic oligonucleotide
ccaacuagcaccccaguca

SEQ ID NO: 2201193 - RNA, 19 nt, Artificial Sequence
  Description of Artificial Sequence: Synthetic oligonucleotide
uguuugaggauggcuccuc

SEQ ID NO: 2201194 - RNA, 19 nt, Artificial Sequence
  Description of Artificial Sequence: Synthetic oligonucleotide
uagcgagggcaggaggcgg

SEQ ID NO: 2201195 - RNA, 19 nt, Artificial Sequence
  Description of Artificial Sequence: Synthetic oligonucleotide
acagcuagacauacacccu

SEQ ID NO: 2201196 - RNA, 19 nt, Artificial Sequence
  Description of Artificial Sequence: Synthetic oligonucleotide
auggcacaaccuauaugag

SEQ ID NO: 2201197 - RNA, 19 nt, Artificial Sequence
  Description of Artificial Sequence: Synthetic oligonucleotide
uucccagauguuugaggau

SEQ ID NO: 2201198 - RNA, 19 nt, Artificial Sequence
  Description of Artificial Sequence: Synthetic oligonucleotide
gaggauggcuccuccuuaa

SEQ ID NO: 2201199 - RNA, 19 nt, Artificial Sequence
  Description of Artificial Sequence: Synthetic oligonucleotide
gccgagacauggcaccugg

SEQ ID NO: 2201200 - RNA, 19 nt, Artificial Sequence
  Description of Artificial Sequence: Synthetic oligonucleotide
ggaacauagcgagggcagg

SEQ ID NO: 2201201 - RNA, 19 nt, Artificial Sequence
  Description of Artificial Sequence: Synthetic oligonucleotide
caacuagcaccccagucaa

SEQ ID NO: 2201202 - RNA, 19 nt, Artificial Sequence
  Description of Artificial Sequence: Synthetic oligonucleotide
caauugcucgagcaucaca

SEQ ID NO: 2201203 - RNA, 19 nt, Artificial Sequence
  Description of Artificial Sequence: Synthetic oligonucleotide
gguuuucaagggccacacg

SEQ ID NO: 2201204 - RNA, 19 nt, Artificial Sequence
  Description of Artificial Sequence: Synthetic oligonucleotide
uggaugccaauggccguag

SEQ ID NO: 2201205 - RNA, 19 nt, Artificial Sequence
  Description of Artificial Sequence: Synthetic oligonucleotide
guuuuagcaucagcaauua

SEQ ID NO: 2201206 - RNA, 19 nt, Artificial Sequence
  Description of Artificial Sequence: Synthetic oligonucleotide
ggauacuugggguuuucaa

SEQ ID NO: 2201207 - RNA, 19 nt, Artificial Sequence
  Description of Artificial Sequence: Synthetic oligonucleotide
ugauagcuucaauggcaua

SEQ ID NO: 2201208 - RNA, 19 nt, Artificial Sequence
  Description of Artificial Sequence: Synthetic oligonucleotide
cugggcacccucugaagca

SEQ ID NO: 2201209 - RNA, 19 nt, Artificial Sequence
  Description of Artificial Sequence: Synthetic oligonucleotide
cacaccccugucguacucg

SEQ ID NO: 2201210 - RNA, 19 nt, Artificial Sequence
  Description of Artificial Sequence: Synthetic oligonucleotide
ccacacgacuccaacuagc

SEQ ID NO: 2201211 - RNA, 19 nt, Artificial Sequence
  Description of Artificial Sequence: Synthetic oligonucleotide
agcuagacauacacccucu

SEQ ID NO: 2201212 - RNA, 19 nt, Artificial Sequence
  Description of Artificial Sequence: Synthetic oligonucleotide
gcaucacacuguacaaagg

SEQ ID NO: 2201213 - RNA, 19 nt, Artificial Sequence
  Description of Artificial Sequence: Synthetic oligonucleotide
gcaauuaggagaacugaaa

SEQ ID NO: 2201214 - RNA, 19 nt, Artificial Sequence
  Description of Artificial Sequence: Synthetic oligonucleotide
ccuauaugagcaucaaucu

SEQ ID NO: 2201215 - RNA, 19 nt, Artificial Sequence
  Description of Artificial Sequence: Synthetic oligonucleotide
cugucguacucggaccgag

SEQ ID NO: 2201216 - RNA, 19 nt, Artificial Sequence
  Description of Artificial Sequence: Synthetic oligonucleotide
ggcaauuaggagaacugaa

SEQ ID NO: 2201217 - RNA, 19 nt, Artificial Sequence
  Description of Artificial Sequence: Synthetic oligonucleotide
ugagguccuuucucaucaa

SEQ ID NO: 2201218 - RNA, 19 nt, Artificial Sequence
  Description of Artificial Sequence: Synthetic oligonucleotide
ucacaccccugucguacuc

SEQ ID NO: 2201219 - RNA, 19 nt, Artificial Sequence
  Description of Artificial Sequence: Synthetic oligonucleotide
cagauggguccauaugaaa

SEQ ID NO: 2201220 - RNA, 19 nt, Artificial Sequence
  Description of Artificial Sequence: Synthetic oligonucleotide
augcugcuaggcuccauua

SEQ ID NO: 2201221 - RNA, 19 nt, Artificial Sequence
  Description of Artificial Sequence: Synthetic oligonucleotide
acucggaccgagugaggaa

SEQ ID NO: 2201222 - RNA, 19 nt, Artificial Sequence
  Description of Artificial Sequence: Synthetic oligonucleotide
cuagcaccccagucaacca

SEQ ID NO: 2201223 - RNA, 19 nt, Artificial Sequence
  Description of Artificial Sequence: Synthetic oligonucleotide
cguggcuagcucuauguug

SEQ ID NO: 2201224 - RNA, 19 nt, Artificial Sequence
  Description of Artificial Sequence: Synthetic oligonucleotide
gcuagacauacacccucug

SEQ ID NO: 2201225 - RNA, 19 nt, Artificial Sequence
  Description of Artificial Sequence: Synthetic oligonucleotide
cucgagcaucacacuguac

SEQ ID NO: 2201226 - RNA, 19 nt, Artificial Sequence
  Description of Artificial Sequence: Synthetic oligonucleotide
gacauggcaccuggaucug

SEQ ID NO: 2201227 - RNA, 19 nt, Artificial Sequence
  Description of Artificial Sequence: Synthetic oligonucleotide
gcccacucauggcacaacc

SEQ ID NO: 2201228 - RNA, 19 nt, Artificial Sequence
  Description of Artificial Sequence: Synthetic oligonucleotide
acaccgccacagcaccaag

SEQ ID NO: 2201229 - RNA, 19 nt, Artificial Sequence
  Description of Artificial Sequence: Synthetic oligonucleotide
uagcucuauguugguggca

SEQ ID NO: 2201230 - RNA, 19 nt, Artificial Sequence
  Description of Artificial Sequence: Synthetic oligonucleotide
cguacucggaccgagugag

SEQ ID NO: 2201231 - RNA, 19 nt, Artificial Sequence
  Description of Artificial Sequence: Synthetic oligonucleotide
gguaaacuucuugcaagga

SEQ ID NO: 2201232 - RNA, 19 nt, Artificial Sequence
  Description of Artificial Sequence: Synthetic oligonucleotide
cccugucguacucggaccg

SEQ ID NO: 2201233 - RNA, 19 nt, Artificial Sequence
  Description of Artificial Sequence: Synthetic oligonucleotide
ccaaggauccugccucccg

SEQ ID NO: 2201234 - RNA, 19 nt, Artificial Sequence
  Description of Artificial Sequence: Synthetic oligonucleotide
ggguccauaugaaacagcu

SEQ ID NO: 2201235 - RNA, 19 nt, Artificial Sequence
  Description of Artificial Sequence: Synthetic oligonucleotide
ucaaugcugcuaggcucca

SEQ ID NO: 2201236 - RNA, 19 nt, Artificial Sequence
  Description of Artificial Sequence: Synthetic oligonucleotide
gcuguuauguacagacauc

SEQ ID NO: 2201237 - RNA, 19 nt, Artificial Sequence
  Description of Artificial Sequence: Synthetic oligonucleotide
cauacacccucugaugucu

SEQ ID NO: 2201238 - RNA, 19 nt, Artificial Sequence
  Description of Artificial Sequence: Synthetic oligonucleotide
acucauggcacaaccuaua

SEQ ID NO: 2201239 - RNA, 19 nt, Artificial Sequence
  Description of Artificial Sequence: Synthetic oligonucleotide
gccacacgacuccaacuag

SEQ ID NO: 2201240 - RNA, 19 nt, Artificial Sequence
  Description of Artificial Sequence: Synthetic oligonucleotide
agcccacucauggcacaac

SEQ ID NO: 2201241 - RNA, 19 nt, Artificial Sequence
  Description of Artificial Sequence: Synthetic oligonucleotide
gggcaauuaggagaacuga

SEQ ID NO: 2201242 - RNA, 19 nt, Artificial Sequence
  Description of Artificial Sequence: Synthetic oligonucleotide
cagcaccaaggauccugcc

SEQ ID NO: 2201243 - RNA, 19 nt, Artificial Sequence
  Description of Artificial Sequence: Synthetic oligonucleotide
ccaaugguucugugucucc

SEQ ID NO: 2201244 - RNA, 19 nt, Artificial Sequence
  Description of Artificial Sequence: Synthetic oligonucleotide
cauagacuugugguaaacu

SEQ ID NO: 2201245 - RNA, 19 nt, Artificial Sequence
  Description of Artificial Sequence: Synthetic oligonucleotide
agucaaccacaccgccaca

SEQ ID NO: 2201246 - RNA, 19 nt, Artificial Sequence
  Description of Artificial Sequence: Synthetic oligonucleotide
cgagugaggaacauagcga

SEQ ID NO: 2201247 - RNA, 19 nt, Artificial Sequence
  Description of Artificial Sequence: Synthetic oligonucleotide
aggauggcuccuccuuaaa

SEQ ID NO: 2201248 - RNA, 19 nt, Artificial Sequence
  Description of Artificial Sequence: Synthetic oligonucleotide
cagcaauuagcccacucau

SEQ ID NO: 2201249 - RNA, 19 nt, Artificial Sequence
  Description of Artificial Sequence: Synthetic oligonucleotide
uggcuagcucuauguuggu

SEQ ID NO: 2201250 - RNA, 19 nt, Artificial Sequence
  Description of Artificial Sequence: Synthetic oligonucleotide
gagccaauugcucgagcau

SEQ ID NO: 2201251 - RNA, 19 nt, Artificial Sequence
  Description of Artificial Sequence: Synthetic oligonucleotide
guacucggaccgagugagg

SEQ ID NO: 2201252 - RNA, 19 nt, Artificial Sequence
  Description of Artificial Sequence: Synthetic oligonucleotide
uggcuucuuucagugucau

SEQ ID NO: 2201253 - RNA, 19 nt, Artificial Sequence
  Description of Artificial Sequence: Synthetic oligonucleotide
gcugcuaggcuccauuagu

SEQ ID NO: 2201254 - RNA, 19 nt, Artificial Sequence
  Description of Artificial Sequence: Synthetic oligonucleotide
uagcccacucauggcacaa

SEQ ID NO: 2201255 - RNA, 19 nt, Artificial Sequence
  Description of Artificial Sequence: Synthetic oligonucleotide
cccagucaaccacaccgcc

SEQ ID NO: 2201256 - RNA, 19 nt, Artificial Sequence
  Description of Artificial Sequence: Synthetic oligonucleotide
auacacccucugaugucug

SEQ ID NO: 2201257 - RNA, 19 nt, Artificial Sequence
  Description of Artificial Sequence: Synthetic oligonucleotide
ccccagucaaccacaccgc

SEQ ID NO: 2201258 - RNA, 19 nt, Artificial Sequence
  Description of Artificial Sequence: Synthetic oligonucleotide
agcuggaaauaaaguuuaa

SEQ ID NO: 2201259 - RNA, 19 nt, Artificial Sequence
  Description of Artificial Sequence: Synthetic oligonucleotide
cacucauggcacaaccuau

SEQ ID NO: 2201260 - RNA, 19 nt, Artificial Sequence
  Description of Artificial Sequence: Synthetic oligonucleotide
caaccuauaugagcaucaa

SEQ ID NO: 2201261 - RNA, 19 nt, Artificial Sequence
  Description of Artificial Sequence: Synthetic oligonucleotide
cguagaaccaagcuugaua

SEQ ID NO: 2201262 - RNA, 19 nt, Artificial Sequence
  Description of Artificial Sequence: Synthetic oligonucleotide
ggucacgcucuccacuguc

SEQ ID NO: 2201263 - RNA, 19 nt, Artificial Sequence
  Description of Artificial Sequence: Synthetic oligonucleotide
augaaacagcugagguccu

SEQ ID NO: 2201264 - RNA, 19 nt, Artificial Sequence
  Description of Artificial Sequence: Synthetic oligonucleotide
gccaauugcucgagcauca

SEQ ID NO: 2201265 - RNA, 19 nt, Artificial Sequence
  Description of Artificial Sequence: Synthetic oligonucleotide
cuccacagcuagacauaca

SEQ ID NO: 2201266 - RNA, 19 nt, Artificial Sequence
  Description of Artificial Sequence: Synthetic oligonucleotide
caaggauccugccucccgu

SEQ ID NO: 2201267 - RNA, 19 nt, Artificial Sequence
  Description of Artificial Sequence: Synthetic oligonucleotide
ccuuugugaacauguggaa

SEQ ID NO: 2201268 - RNA, 19 nt, Artificial Sequence
  Description of Artificial Sequence: Synthetic oligonucleotide
gaaccaagcuugauagcuu

SEQ ID NO: 2201269 - RNA, 19 nt, Artificial Sequence
  Description of Artificial Sequence: Synthetic oligonucleotide
gcuacuccaaagggccgag

SEQ ID NO: 2201270 - RNA, 19 nt, Artificial Sequence
  Description of Artificial Sequence: Synthetic oligonucleotide
ccccugucguacucggacc

SEQ ID NO: 2201271 - RNA, 19 nt, Artificial Sequence
  Description of Artificial Sequence: Synthetic oligonucleotide
caagcuugauagcuucaau

SEQ ID NO: 2201272 - RNA, 19 nt, Artificial Sequence
  Description of Artificial Sequence: Synthetic oligonucleotide
aagggccacacgacuccaa

SEQ ID NO: 2201273 - RNA, 19 nt, Artificial Sequence
  Description of Artificial Sequence: Synthetic oligonucleotide
guggauacuugggguuuuc

SEQ ID NO: 2201274 - RNA, 19 nt, Artificial Sequence
  Description of Artificial Sequence: Synthetic oligonucleotide
gcucugggcacccucugaa

SEQ ID NO: 2201275 - RNA, 19 nt, Artificial Sequence
  Description of Artificial Sequence: Synthetic oligonucleotide
ccagucaaccacaccgcca

SEQ ID NO: 2201276 - RNA, 19 nt, Artificial Sequence
  Description of Artificial Sequence: Synthetic oligonucleotide
ccacucauggcacaaccua

SEQ ID NO: 2201277 - RNA, 19 nt, Artificial Sequence
  Description of Artificial Sequence: Synthetic oligonucleotide
cuggaugccaauggccgua

SEQ ID NO: 2201278 - RNA, 19 nt, Artificial Sequence
  Description of Artificial Sequence: Synthetic oligonucleotide
ccaaauugcaaagccagau

SEQ ID NO: 2201279 - RNA, 19 nt, Artificial Sequence
  Description of Artificial Sequence: Synthetic oligonucleotide
ggauggcuccuccuuaaau

SEQ ID NO: 2201280 - RNA, 19 nt, Artificial Sequence
  Description of Artificial Sequence: Synthetic oligonucleotide
gucccagauggguccauau

SEQ ID NO: 2201281 - RNA, 19 nt, Artificial Sequence
  Description of Artificial Sequence: Synthetic oligonucleotide
ggugaaccaaugguucugu

SEQ ID NO: 2201282 - RNA, 19 nt, Artificial Sequence
  Description of Artificial Sequence: Synthetic oligonucleotide
cacaccgccacagcaccaa

SEQ ID NO: 2201283 - RNA, 19 nt, Artificial Sequence
  Description of Artificial Sequence: Synthetic oligonucleotide
cacacauauacuggagauu

SEQ ID NO: 2201284 - RNA, 19 nt, Artificial Sequence
  Description of Artificial Sequence: Synthetic oligonucleotide
cugcaccguggcuagcucu

SEQ ID NO: 2201285 - RNA, 19 nt, Artificial Sequence
  Description of Artificial Sequence: Synthetic oligonucleotide
caagggccacacgacucca

SEQ ID NO: 2201286 - RNA, 19 nt, Artificial Sequence
  Description of Artificial Sequence: Synthetic oligonucleotide
ccaauugcucgagcaucac

SEQ ID NO: 2201287 - RNA, 19 nt, Artificial Sequence
  Description of Artificial Sequence: Synthetic oligonucleotide
cuacuccaaagggccgaga

SEQ ID NO: 2201288 - RNA, 19 nt, Artificial Sequence
  Description of Artificial Sequence: Synthetic oligonucleotide
cauuaguggggagguaauu

SEQ ID NO: 2201289 - RNA, 19 nt, Artificial Sequence
  Description of Artificial Sequence: Synthetic oligonucleotide
cacccucugaugucuggau

SEQ ID NO: 2201290 - RNA, 19 nt, Artificial Sequence
  Description of Artificial Sequence: Synthetic oligonucleotide
caccccugucguacucgga

SEQ ID NO: 2201291 - RNA, 19 nt, Artificial Sequence
  Description of Artificial Sequence: Synthetic oligonucleotide
ggccgagacauggcaccug

SEQ ID NO: 2201292 - RNA, 19 nt, Artificial Sequence
  Description of Artificial Sequence: Synthetic oligonucleotide
gccguagaaccaagcuuga

SEQ ID NO: 2201293 - RNA, 19 nt, Artificial Sequence
  Description of Artificial Sequence: Synthetic oligonucleotide
ccaugacauaagagcugga

SEQ ID NO: 2201294 - RNA, 19 nt, Artificial Sequence
  Description of Artificial Sequence: Synthetic oligonucleotide
ugguggcauucagcuucuc

SEQ ID NO: 2201295 - RNA, 19 nt, Artificial Sequence
  Description of Artificial Sequence: Synthetic oligonucleotide
gcgguggauacuugggguu

SEQ ID NO: 2201296 - RNA, 19 nt, Artificial Sequence
  Description of Artificial Sequence: Synthetic oligonucleotide
ggaccgagugaggaacaua

SEQ ID NO: 2201297 - RNA, 19 nt, Artificial Sequence
  Description of Artificial Sequence: Synthetic oligonucleotide
gcacaaccuauaugagcau

SEQ ID NO: 2201298 - RNA, 19 nt, Artificial Sequence
  Description of Artificial Sequence: Synthetic oligonucleotide
cccacucauggcacaaccu

SEQ ID NO: 2201299 - RNA, 19 nt, Artificial Sequence
  Description of Artificial Sequence: Synthetic oligonucleotide
ggcugcaccguggcuagcu

SEQ ID NO: 2201300 - RNA, 19 nt, Artificial Sequence
  Description of Artificial Sequence: Synthetic oligonucleotide
ccauuaguggggagguaau

SEQ ID NO: 2201301 - RNA, 19 nt, Artificial Sequence
  Description of Artificial Sequence: Synthetic oligonucleotide
cgagacauggcaccuggau

SEQ ID NO: 2201302 - RNA, 19 nt, Artificial Sequence
  Description of Artificial Sequence: Synthetic oligonucleotide
ccacucuggcuuuaucaau

SEQ ID NO: 2201303 - RNA, 19 nt, Artificial Sequence
  Description of Artificial Sequence: Synthetic oligonucleotide
cacgcucuccacugucauu

SEQ ID NO: 2201304 - RNA, 19 nt, Artificial Sequence
  Description of Artificial Sequence: Synthetic oligonucleotide
ccgagacauggcaccugga

SEQ ID NO: 2201305 - RNA, 19 nt, Artificial Sequence
  Description of Artificial Sequence: Synthetic oligonucleotide
gguggauacuugggguuuu

SEQ ID NO: 2201306 - RNA, 19 nt, Artificial Sequence
  Description of Artificial Sequence: Synthetic oligonucleotide
ccacaccgccacagcacca

SEQ ID NO: 2201307 - RNA, 19 nt, Artificial Sequence
  Description of Artificial Sequence: Synthetic oligonucleotide
gggcacccucugaagcaga

SEQ ID NO: 2201308 - RNA, 19 nt, Artificial Sequence
  Description of Artificial Sequence: Synthetic oligonucleotide
gggucacgcucuccacugu

SEQ ID NO: 2201309 - RNA, 19 nt, Artificial Sequence
  Description of Artificial Sequence: Synthetic oligonucleotide
ccugucguacucggaccga

SEQ ID NO: 2201310 - RNA, 19 nt, Artificial Sequence
  Description of Artificial Sequence: Synthetic oligonucleotide
gggccgagacauggcaccu

SEQ ID NO: 2201311 - RNA, 19 nt, Artificial Sequence
  Description of Artificial Sequence: Synthetic oligonucleotide
cgacuccaacuagcacccc

SEQ ID NO: 2201312 - RNA, 19 nt, Artificial Sequence
  Description of Artificial Sequence: Synthetic oligonucleotide
ccguagaaccaagcuugau

SEQ ID NO: 2201313 - RNA, 19 nt, Artificial Sequence
  Description of Artificial Sequence: Synthetic oligonucleotide
ccgccacagcaccaaggau

SEQ ID NO: 2201314 - RNA, 19 nt, Artificial Sequence
  Description of Artificial Sequence: Synthetic oligonucleotide
gcaccguggcuagcucuau

SEQ ID NO: 2201315 - RNA, 19 nt, Artificial Sequence
  Description of Artificial Sequence: Synthetic oligonucleotide
cgguggauacuugggguuu

SEQ ID NO: 2201316 - RNA, 19 nt, Artificial Sequence
  Description of Artificial Sequence: Synthetic oligonucleotide
cggaccgagugaggaacau

SEQ ID NO: 2201317 - RNA, 19 nt, Artificial Sequence
  Description of Artificial Sequence: Synthetic oligonucleotide
ccacagcaccaaggauccu

SEQ ID NO: 2201318 - RNA, 19 nt, Artificial Sequence
  Description of Artificial Sequence: Synthetic oligonucleotide
aguaacauaaccugagagg

SEQ ID NO: 2201319 - RNA, 19 nt, Artificial Sequence
  Description of Artificial Sequence: Synthetic oligonucleotide
uuuccuaccuguuuuaggg

SEQ ID NO: 2201320 - RNA, 19 nt, Artificial Sequence
  Description of Artificial Sequence: Synthetic oligonucleotide
aaaccaaaggguuggaguc

SEQ ID NO: 2201321 - RNA, 19 nt, Artificial Sequence
  Description of Artificial Sequence: Synthetic oligonucleotide
cuuuucuuagccuucuugg

SEQ ID NO: 2201322 - RNA, 19 nt, Artificial Sequence
  Description of Artificial Sequence: Synthetic oligonucleotide
uguuuuagggaacacggug

SEQ ID NO: 2201323 - RNA, 19 nt, Artificial Sequence
  Description of Artificial Sequence: Synthetic oligonucleotide
gaugcuguucugcagagcc

SEQ ID NO: 2201324 - RNA, 19 nt, Artificial Sequence
  Description of Artificial Sequence: Synthetic oligonucleotide
aaccugagagguuuucccc

SEQ ID NO: 2201325 - RNA, 19 nt, Artificial Sequence
  Description of Artificial Sequence: Synthetic oligonucleotide
agaaguggcuuuugaagcc

SEQ ID NO: 2201326 - RNA, 19 nt, Artificial Sequence
  Description of Artificial Sequence: Synthetic oligonucleotide
ucucuuggcauccuccucg

SEQ ID NO: 2201327 - RNA, 19 nt, Artificial Sequence
  Description of Artificial Sequence: Synthetic oligonucleotide
gaguaacauaaccugagag

SEQ ID NO: 2201328 - RNA, 19 nt, Artificial Sequence
  Description of Artificial Sequence: Synthetic oligonucleotide
uagaaguggcuuuugaagc

SEQ ID NO: 2201329 - RNA, 19 nt, Artificial Sequence
  Description of Artificial Sequence: Synthetic oligonucleotide
ugggaauuggccacagucg

SEQ ID NO: 2201330 - RNA, 19 nt, Artificial Sequence
  Description of Artificial Sequence: Synthetic oligonucleotide
uucccacucuccuugaugg

SEQ ID NO: 2201331 - RNA, 19 nt, Artificial Sequence
  Description of Artificial Sequence: Synthetic oligonucleotide
ucuggguuaucuuugguga

SEQ ID NO: 2201332 - RNA, 19 nt, Artificial Sequence
  Description of Artificial Sequence: Synthetic oligonucleotide
uucaccggauucaucaggg

SEQ ID NO: 2201333 - RNA, 19 nt, Artificial Sequence
  Description of Artificial Sequence: Synthetic oligonucleotide
uuucuuagccuucuugggc

SEQ ID NO: 2201334 - RNA, 19 nt, Artificial Sequence
  Description of Artificial Sequence: Synthetic oligonucleotide
guugcugagguccaggugc

SEQ ID NO: 2201335 - RNA, 19 nt, Artificial Sequence
  Description of Artificial Sequence: Synthetic oligonucleotide
uuaucuuuggugaccggag

SEQ ID NO: 2201336 - RNA, 19 nt, Artificial Sequence
  Description of Artificial Sequence: Synthetic oligonucleotide
aucuucaccggauucauca

SEQ ID NO: 2201337 - RNA, 19 nt, Artificial Sequence
  Description of Artificial Sequence: Synthetic oligonucleotide
aacauaaccugagaggaga

SEQ ID NO: 2201338 - RNA, 19 nt, Artificial Sequence
  Description of Artificial Sequence: Synthetic oligonucleotide
caccaacucaucuucaccg

SEQ ID NO: 2201339 - RNA, 19 nt, Artificial Sequence
  Description of Artificial Sequence: Synthetic oligonucleotide
aagaggucucuuuccuacc

SEQ ID NO: 2201340 - RNA, 19 nt, Artificial Sequence
  Description of Artificial Sequence: Synthetic oligonucleotide
aagccugggaauuggccac

SEQ ID NO: 2201341 - RNA, 19 nt, Artificial Sequence
  Description of Artificial Sequence: Synthetic oligonucleotide
uuuugucugagcuggugcc

SEQ ID NO: 2201342 - RNA, 19 nt, Artificial Sequence
  Description of Artificial Sequence: Synthetic oligonucleotide
gaagaggucucuuuccuac

SEQ ID NO: 2201343 - RNA, 19 nt, Artificial Sequence
  Description of Artificial Sequence: Synthetic oligonucleotide
accacagucuccuucuggg

SEQ ID NO: 2201344 - RNA, 19 nt, Artificial Sequence
  Description of Artificial Sequence: Synthetic oligonucleotide
uaaccugagagguuuuccc

SEQ ID NO: 2201345 - RNA, 19 nt, Artificial Sequence
  Description of Artificial Sequence: Synthetic oligonucleotide
uguagguccugucuucuug

SEQ ID NO: 2201346 - RNA, 19 nt, Artificial Sequence
  Description of Artificial Sequence: Synthetic oligonucleotide
ccuguuuuagggaacacgg

SEQ ID NO: 2201347 - RNA, 19 nt, Artificial Sequence
  Description of Artificial Sequence: Synthetic oligonucleotide
cugggaaagguguggaucc

SEQ ID NO: 2201348 - RNA, 19 nt, Artificial Sequence
  Description of Artificial Sequence: Synthetic oligonucleotide
gguccugucuucuuggugg

SEQ ID NO: 2201349 - RNA, 19 nt, Artificial Sequence
  Description of Artificial Sequence: Synthetic oligonucleotide
cacuacugcucucugagcc

SEQ ID NO: 2201350 - RNA, 19 nt, Artificial Sequence
  Description of Artificial Sequence: Synthetic oligonucleotide
cagguuuugucugagcugg

SEQ ID NO: 2201351 - RNA, 19 nt, Artificial Sequence
  Description of Artificial Sequence: Synthetic oligonucleotide
ugaggcagcucuaaccuga

SEQ ID NO: 2201352 - RNA, 19 nt, Artificial Sequence
  Description of Artificial Sequence: Synthetic oligonucleotide
ugagagguuuuccccacag

SEQ ID NO: 2201353 - RNA, 19 nt, Artificial Sequence
  Description of Artificial Sequence: Synthetic oligonucleotide
uaacauaaccugagaggag

SEQ ID NO: 2201354 - RNA, 19 nt, Artificial Sequence
  Description of Artificial Sequence: Synthetic oligonucleotide
aucuggguuaucuuuggug

SEQ ID NO: 2201355 - RNA, 19 nt, Artificial Sequence
  Description of Artificial Sequence: Synthetic oligonucleotide
uccgauucuucacuacugc

SEQ ID NO: 2201356 - RNA, 19 nt, Artificial Sequence
  Description of Artificial Sequence: Synthetic oligonucleotide
cuuuccuaccuguuuuagg

SEQ ID NO: 2201357 - RNA, 19 nt, Artificial Sequence
  Description of Artificial Sequence: Synthetic oligonucleotide
aauuggccacagucgcccc

SEQ ID NO: 2201358 - RNA, 19 nt, Artificial Sequence
  Description of Artificial Sequence: Synthetic oligonucleotide
uuggagucuggccuagaag

SEQ ID NO: 2201359 - RNA, 19 nt, Artificial Sequence
  Description of Artificial Sequence: Synthetic oligonucleotide
uguccgauucuucacuacu

SEQ ID NO: 2201360 - RNA, 19 nt, Artificial Sequence
  Description of Artificial Sequence: Synthetic oligonucleotide
uuuggugaccggagcagag

SEQ ID NO: 2201361 - RNA, 19 nt, Artificial Sequence
  Description of Artificial Sequence: Synthetic oligonucleotide
ggcagcucuaaccugagag

SEQ ID NO: 2201362 - RNA, 19 nt, Artificial Sequence
  Description of Artificial Sequence: Synthetic oligonucleotide
cugggaauuggccacaguc

SEQ ID NO: 2201363 - RNA, 19 nt, Artificial Sequence
  Description of Artificial Sequence: Synthetic oligonucleotide
uuuuagggaacacgguguc

SEQ ID NO: 2201364 - RNA, 19 nt, Artificial Sequence
  Description of Artificial Sequence: Synthetic oligonucleotide
gaauuggccacagucgccc

SEQ ID NO: 2201365 - RNA, 19 nt, Artificial Sequence
  Description of Artificial Sequence: Synthetic oligonucleotide
gaaaccaaaggguuggagu

SEQ ID NO: 2201366 - RNA, 19 nt, Artificial Sequence
  Description of Artificial Sequence: Synthetic oligonucleotide
uuccccacagguuuugucu

SEQ ID NO: 2201367 - RNA, 19 nt, Artificial Sequence
  Description of Artificial Sequence: Synthetic oligonucleotide
ugacguagccaccuggggu

SEQ ID NO: 2201368 - RNA, 19 nt, Artificial Sequence
  Description of Artificial Sequence: Synthetic oligonucleotide
guagguccugucuucuugg

SEQ ID NO: 2201369 - RNA, 19 nt, Artificial Sequence
  Description of Artificial Sequence: Synthetic oligonucleotide
ucucuuuccuaccuguuuu

SEQ ID NO: 2201370 - RNA, 19 nt, Artificial Sequence
  Description of Artificial Sequence: Synthetic oligonucleotide
agaggccugcaccugcgcc

SEQ ID NO: 2201371 - RNA, 19 nt, Artificial Sequence
  Description of Artificial Sequence: Synthetic oligonucleotide
ugugagggcgccaccaacu

SEQ ID NO: 2201372 - RNA, 19 nt, Artificial Sequence
  Description of Artificial Sequence: Synthetic oligonucleotide
accaacucaucuucaccgg

SEQ ID NO: 2201373 - RNA, 19 nt, Artificial Sequence
  Description of Artificial Sequence: Synthetic oligonucleotide
uguucccggaggcacuggg

SEQ ID NO: 2201374 - RNA, 19 nt, Artificial Sequence
  Description of Artificial Sequence: Synthetic oligonucleotide
ucaggggucuccucuacca

SEQ ID NO: 2201375 - RNA, 19 nt, Artificial Sequence
  Description of Artificial Sequence: Synthetic oligonucleotide
aggaguaacauaaccugag

SEQ ID NO: 2201376 - RNA, 19 nt, Artificial Sequence
  Description of Artificial Sequence: Synthetic oligonucleotide
ugaagaggugucacugcug

SEQ ID NO: 2201377 - RNA, 19 nt, Artificial Sequence
  Description of Artificial Sequence: Synthetic oligonucleotide
cuucaccggauucaucagg

SEQ ID NO: 2201378 - RNA, 19 nt, Artificial Sequence
  Description of Artificial Sequence: Synthetic oligonucleotide
uggcaucuccccaucacug

SEQ ID NO: 2201379 - RNA, 19 nt, Artificial Sequence
  Description of Artificial Sequence: Synthetic oligonucleotide
ugucagacucuucuucacu

SEQ ID NO: 2201380 - RNA, 19 nt, Artificial Sequence
  Description of Artificial Sequence: Synthetic oligonucleotide
ugccagaaccuucaccaca

SEQ ID NO: 2201381 - RNA, 19 nt, Artificial Sequence
  Description of Artificial Sequence: Synthetic oligonucleotide
ucgcucagggaccaggacu

SEQ ID NO: 2201382 - RNA, 19 nt, Artificial Sequence
  Description of Artificial Sequence: Synthetic oligonucleotide
cacggugucugcugcaucc

SEQ ID NO: 2201383 - RNA, 19 nt, Artificial Sequence
  Description of Artificial Sequence: Synthetic oligonucleotide
gaaagguguggauccaguc

SEQ ID NO: 2201384 - RNA, 19 nt, Artificial Sequence
  Description of Artificial Sequence: Synthetic oligonucleotide
gacguagccaccugggguc

SEQ ID NO: 2201385 - RNA, 19 nt, Artificial Sequence
  Description of Artificial Sequence: Synthetic oligonucleotide
agguuuuccccacagguuu

SEQ ID NO: 2201386 - RNA, 19 nt, Artificial Sequence
  Description of Artificial Sequence: Synthetic oligonucleotide
uggcuuuugaagccuggga

SEQ ID NO: 2201387 - RNA, 19 nt, Artificial Sequence
  Description of Artificial Sequence: Synthetic oligonucleotide
aucuuuggugaccggagca

SEQ ID NO: 2201388 - RNA, 19 nt, Artificial Sequence
  Description of Artificial Sequence: Synthetic oligonucleotide
uccuaccuguuuuagggaa

SEQ ID NO: 2201389 - RNA, 19 nt, Artificial Sequence
  Description of Artificial Sequence: Synthetic oligonucleotide
cagaaccuucaccacagag

SEQ ID NO: 2201390 - RNA, 19 nt, Artificial Sequence
  Description of Artificial Sequence: Synthetic oligonucleotide
ucuucaccggauucaucag

SEQ ID NO: 2201391 - RNA, 19 nt, Artificial Sequence
  Description of Artificial Sequence: Synthetic oligonucleotide
gauggcaucuccccaucac

SEQ ID NO: 2201392 - RNA, 19 nt, Artificial Sequence
  Description of Artificial Sequence: Synthetic oligonucleotide
uuuugaagccugggaauug

SEQ ID NO: 2201393 - RNA, 19 nt, Artificial Sequence
  Description of Artificial Sequence: Synthetic oligonucleotide
uaaccugagaggagagacu

SEQ ID NO: 2201394 - RNA, 19 nt, Artificial Sequence
  Description of Artificial Sequence: Synthetic oligonucleotide
accggauucaucagggguc

SEQ ID NO: 2201395 - RNA, 19 nt, Artificial Sequence
  Description of Artificial Sequence: Synthetic oligonucleotide
gagguguggugucugaaga

SEQ ID NO: 2201396 - RNA, 19 nt, Artificial Sequence
  Description of Artificial Sequence: Synthetic oligonucleotide
ucuuuccuaccuguuuuag

SEQ ID NO: 2201397 - RNA, 19 nt, Artificial Sequence
  Description of Artificial Sequence: Synthetic oligonucleotide
ugcaccugcgccucgcuca

SEQ ID NO: 2201398 - RNA, 19 nt, Artificial Sequence
  Description of Artificial Sequence: Synthetic oligonucleotide
cuaaccugagagguuuucc

SEQ ID NO: 2201399 - RNA, 19 nt, Artificial Sequence
  Description of Artificial Sequence: Synthetic oligonucleotide
uggguuaucuuuggugacc

SEQ ID NO: 2201400 - RNA, 19 nt, Artificial Sequence
  Description of Artificial Sequence: Synthetic oligonucleotide
cuggcugauggcaucuccc

SEQ ID NO: 2201401 - RNA, 19 nt, Artificial Sequence
  Description of Artificial Sequence: Synthetic oligonucleotide
ugggugaugcuguucugca

SEQ ID NO: 2201402 - RNA, 19 nt, Artificial Sequence
  Description of Artificial Sequence: Synthetic oligonucleotide
ccaggaguaacauaaccug

SEQ ID NO: 2201403 - RNA, 19 nt, Artificial Sequence
  Description of Artificial Sequence: Synthetic oligonucleotide
agaggucucuuuccuaccu

SEQ ID NO: 2201404 - RNA, 19 nt, Artificial Sequence
  Description of Artificial Sequence: Synthetic oligonucleotide
agguguggugucugaagag

SEQ ID NO: 2201405 - RNA, 19 nt, Artificial Sequence
  Description of Artificial Sequence: Synthetic oligonucleotide
uucuucacuacugcucucu

SEQ ID NO: 2201406 - RNA, 19 nt, Artificial Sequence
  Description of Artificial Sequence: Synthetic oligonucleotide
uuagccuucuugggcuucg

SEQ ID NO: 2201407 - RNA, 19 nt, Artificial Sequence
  Description of Artificial Sequence: Synthetic oligonucleotide
guuaucuuuggugaccgga

SEQ ID NO: 2201408 - RNA, 19 nt, Artificial Sequence
  Description of Artificial Sequence: Synthetic oligonucleotide
gggaauuggccacagucgc

SEQ ID NO: 2201409 - RNA, 19 nt, Artificial Sequence
  Description of Artificial Sequence: Synthetic oligonucleotide
ucaccggauucaucagggg

SEQ ID NO: 2201410 - RNA, 19 nt, Artificial Sequence
  Description of Artificial Sequence: Synthetic oligonucleotide
uugauggccucuguggccu

SEQ ID NO: 2201411 - RNA, 19 nt, Artificial Sequence
  Description of Artificial Sequence: Synthetic oligonucleotide
accugagagguuuucccca

SEQ ID NO: 2201412 - RNA, 19 nt, Artificial Sequence
  Description of Artificial Sequence: Synthetic oligonucleotide
gcagcucuaaccugagagg

SEQ ID NO: 2201413 - RNA, 19 nt, Artificial Sequence
  Description of Artificial Sequence: Synthetic oligonucleotide
ugcucuccgaguccugccc

SEQ ID NO: 2201414 - RNA, 19 nt, Artificial Sequence
  Description of Artificial Sequence: Synthetic oligonucleotide
accaggacuguucccggag

SEQ ID NO: 2201415 - RNA, 19 nt, Artificial Sequence
  Description of Artificial Sequence: Synthetic oligonucleotide
uccuucugggaaaggugug

SEQ ID NO: 2201416 - RNA, 19 nt, Artificial Sequence
  Description of Artificial Sequence: Synthetic oligonucleotide
caccacagaggccugcacc

SEQ ID NO: 2201417 - RNA, 19 nt, Artificial Sequence
  Description of Artificial Sequence: Synthetic oligonucleotide
acuacugcucucugagccu

SEQ ID NO: 2201418 - RNA, 19 nt, Artificial Sequence
  Description of Artificial Sequence: Synthetic oligonucleotide
aggucucuuuccuaccugu

SEQ ID NO: 2201419 - RNA, 19 nt, Artificial Sequence
  Description of Artificial Sequence: Synthetic oligonucleotide
aaccaaaggguuggagucu

SEQ ID NO: 2201420 - RNA, 19 nt, Artificial Sequence
  Description of Artificial Sequence: Synthetic oligonucleotide
accugcgccucgcucaggg

SEQ ID NO: 2201421 - RNA, 19 nt, Artificial Sequence
  Description of Artificial Sequence: Synthetic oligonucleotide
uuccuaccuguuuuaggga

SEQ ID NO: 2201422 - RNA, 19 nt, Artificial Sequence
  Description of Artificial Sequence: Synthetic oligonucleotide
ucucugagccuucugucuu

SEQ ID NO: 2201423 - RNA, 19 nt, Artificial Sequence
  Description of Artificial Sequence: Synthetic oligonucleotide
uugggcuucggaggugugg

SEQ ID NO: 2201424 - RNA, 19 nt, Artificial Sequence
  Description of Artificial Sequence: Synthetic oligonucleotide
agucucggggcugacguag

SEQ ID NO: 2201425 - RNA, 19 nt, Artificial Sequence
  Description of Artificial Sequence: Synthetic oligonucleotide
guggauccagucucggggc

SEQ ID NO: 2201426 - RNA, 19 nt, Artificial Sequence
  Description of Artificial Sequence: Synthetic oligonucleotide
ucacuacugcucucugagc

SEQ ID NO: 2201427 - RNA, 19 nt, Artificial Sequence
  Description of Artificial Sequence: Synthetic oligonucleotide
cugacguagccaccugggg

SEQ ID NO: 2201428 - RNA, 19 nt, Artificial Sequence
  Description of Artificial Sequence: Synthetic oligonucleotide
uccucgcucccugaagagg

SEQ ID NO: 2201429 - RNA, 19 nt, Artificial Sequence
  Description of Artificial Sequence: Synthetic oligonucleotide
caaaggguuggagucuggc

SEQ ID NO: 2201430 - RNA, 19 nt, Artificial Sequence
  Description of Artificial Sequence: Synthetic oligonucleotide
agggaccaggacuguuccc

SEQ ID NO: 2201431 - RNA, 19 nt, Artificial Sequence
  Description of Artificial Sequence: Synthetic oligonucleotide
cuguucugggccugggcag

SEQ ID NO: 2201432 - RNA, 19 nt, Artificial Sequence
  Description of Artificial Sequence: Synthetic oligonucleotide
caggaguaacauaaccuga

SEQ ID NO: 2201433 - RNA, 19 nt, Artificial Sequence
  Description of Artificial Sequence: Synthetic oligonucleotide
ugauggcaucuccccauca

SEQ ID NO: 2201434 - RNA, 19 nt, Artificial Sequence
  Description of Artificial Sequence: Synthetic oligonucleotide
gggaccaggacuguucccg

SEQ ID NO: 2201435 - RNA, 19 nt, Artificial Sequence
  Description of Artificial Sequence: Synthetic oligonucleotide
ugcgccucgcucagggacc

SEQ ID NO: 2201436 - RNA, 19 nt, Artificial Sequence
  Description of Artificial Sequence: Synthetic oligonucleotide
ucuucccuguucugggccu

SEQ ID NO: 2201437 - RNA, 19 nt, Artificial Sequence
  Description of Artificial Sequence: Synthetic oligonucleotide
ggcugaggcagcucuaacc

SEQ ID NO: 2201438 - RNA, 19 nt, Artificial Sequence
  Description of Artificial Sequence: Synthetic oligonucleotide
uuuccccacagguuuuguc

SEQ ID NO: 2201439 - RNA, 19 nt, Artificial Sequence
  Description of Artificial Sequence: Synthetic oligonucleotide
uccuuuuccaggggacucc

SEQ ID NO: 2201440 - RNA, 19 nt, Artificial Sequence
  Description of Artificial Sequence: Synthetic oligonucleotide
uuuagggaacacggugucu

SEQ ID NO: 2201441 - RNA, 19 nt, Artificial Sequence
  Description of Artificial Sequence: Synthetic oligonucleotide
cugugcuugcacugcuggg

SEQ ID NO: 2201442 - RNA, 19 nt, Artificial Sequence
  Description of Artificial Sequence: Synthetic oligonucleotide
uuugucugagcuggugccu

SEQ ID NO: 2201443 - RNA, 19 nt, Artificial Sequence
  Description of Artificial Sequence: Synthetic oligonucleotide
ugaccggagcagaggaaac

SEQ ID NO: 2201444 - RNA, 19 nt, Artificial Sequence
  Description of Artificial Sequence: Synthetic oligonucleotide
cugucagacucuucuucac

SEQ ID NO: 2201445 - RNA, 19 nt, Artificial Sequence
  Description of Artificial Sequence: Synthetic oligonucleotide
gagacugugagggcgccac

SEQ ID NO: 2201446 - RNA, 19 nt, Artificial Sequence
  Description of Artificial Sequence: Synthetic oligonucleotide
cugggugaugcuguucugc

SEQ ID NO: 2201447 - RNA, 19 nt, Artificial Sequence
  Description of Artificial Sequence: Synthetic oligonucleotide
acagucuccuucugggaaa

SEQ ID NO: 2201448 - RNA, 19 nt, Artificial Sequence
  Description of Artificial Sequence: Synthetic oligonucleotide
ggguuaucuuuggugaccg

SEQ ID NO: 2201449 - RNA, 19 nt, Artificial Sequence
  Description of Artificial Sequence: Synthetic oligonucleotide
gucacugcuggcugauggc

SEQ ID NO: 2201450 - RNA, 19 nt, Artificial Sequence
  Description of Artificial Sequence: Synthetic oligonucleotide
ggagguguggugucugaag

SEQ ID NO: 2201451 - RNA, 19 nt, Artificial Sequence
  Description of Artificial Sequence: Synthetic oligonucleotide
ccaggugcuuuucuuagcc

SEQ ID NO: 2201452 - RNA, 19 nt, Artificial Sequence
  Description of Artificial Sequence: Synthetic oligonucleotide
caggacuguucccggaggc

SEQ ID NO: 2201453 - RNA, 19 nt, Artificial Sequence
  Description of Artificial Sequence: Synthetic oligonucleotide
gccuucuugggcuucggag

SEQ ID NO: 2201454 - RNA, 19 nt, Artificial Sequence
  Description of Artificial Sequence: Synthetic oligonucleotide
ugagggcgccaccaacuca

SEQ ID NO: 2201455 - RNA, 19 nt, Artificial Sequence
  Description of Artificial Sequence: Synthetic oligonucleotide
aggggucuccucuaccaca

SEQ ID NO: 2201456 - RNA, 19 nt, Artificial Sequence
  Description of Artificial Sequence: Synthetic oligonucleotide
ucuugggcuucggaggugu

SEQ ID NO: 2201457 - RNA, 19 nt, Artificial Sequence
  Description of Artificial Sequence: Synthetic oligonucleotide
caggggacuccuuggcagg

SEQ ID NO: 2201458 - RNA, 19 nt, Artificial Sequence
  Description of Artificial Sequence: Synthetic oligonucleotide
cuugguggcuccuugggua

SEQ ID NO: 2201459 - RNA, 19 nt, Artificial Sequence
  Description of Artificial Sequence: Synthetic oligonucleotide
ucuaaccugagagguuuuc

SEQ ID NO: 2201460 - RNA, 19 nt, Artificial Sequence
  Description of Artificial Sequence: Synthetic oligonucleotide
ggcuuuugaagccugggaa

SEQ ID NO: 2201461 - RNA, 19 nt, Artificial Sequence
  Description of Artificial Sequence: Synthetic oligonucleotide
agguccugucuucuuggug

SEQ ID NO: 2201462 - RNA, 19 nt, Artificial Sequence
  Description of Artificial Sequence: Synthetic oligonucleotide
ucucggggcugacguagcc

SEQ ID NO: 2201463 - RNA, 19 nt, Artificial Sequence
  Description of Artificial Sequence: Synthetic oligonucleotide
gaccggagcagaggaaacc

SEQ ID NO: 2201464 - RNA, 19 nt, Artificial Sequence
  Description of Artificial Sequence: Synthetic oligonucleotide
guuuuagggaacacggugu

SEQ ID NO: 2201465 - RNA, 19 nt, Artificial Sequence
  Description of Artificial Sequence: Synthetic oligonucleotide
gccacuagccccuucugug

SEQ ID NO: 2201466 - RNA, 19 nt, Artificial Sequence
  Description of Artificial Sequence: Synthetic oligonucleotide
uggugucugaagaggucuc

SEQ ID NO: 2201467 - RNA, 19 nt, Artificial Sequence
  Description of Artificial Sequence: Synthetic oligonucleotide
guccgauucuucacuacug

SEQ ID NO: 2201468 - RNA, 19 nt, Artificial Sequence
  Description of Artificial Sequence: Synthetic oligonucleotide
ugggcuucggagguguggu

SEQ ID NO: 2201469 - RNA, 19 nt, Artificial Sequence
  Description of Artificial Sequence: Synthetic oligonucleotide
cucuuggcauccuccucgc

SEQ ID NO: 2201470 - RNA, 19 nt, Artificial Sequence
  Description of Artificial Sequence: Synthetic oligonucleotide
auccugggauuuugcuuuc

SEQ ID NO: 2201471 - RNA, 19 nt, Artificial Sequence
  Description of Artificial Sequence: Synthetic oligonucleotide
cacagguuuugucugagcu

SEQ ID NO: 2201472 - RNA, 19 nt, Artificial Sequence
  Description of Artificial Sequence: Synthetic oligonucleotide
aguggcuuuugaagccugg

SEQ ID NO: 2201473 - RNA, 19 nt, Artificial Sequence
  Description of Artificial Sequence: Synthetic oligonucleotide
gagccuguguggguguugc

SEQ ID NO: 2201474 - RNA, 19 nt, Artificial Sequence
  Description of Artificial Sequence: Synthetic oligonucleotide
accaaaggguuggagucug

SEQ ID NO: 2201475 - RNA, 19 nt, Artificial Sequence
  Description of Artificial Sequence: Synthetic oligonucleotide
agccacuagccccuucugu

SEQ ID NO: 2201476 - RNA, 19 nt, Artificial Sequence
  Description of Artificial Sequence: Synthetic oligonucleotide
aacacggugucugcugcau

SEQ ID NO: 2201477 - RNA, 19 nt, Artificial Sequence
  Description of Artificial Sequence: Synthetic oligonucleotide
ucuccuugauggccucugu

SEQ ID NO: 2201478 - RNA, 19 nt, Artificial Sequence
  Description of Artificial Sequence: Synthetic oligonucleotide
ucaucaggggucuccucua

SEQ ID NO: 2201479 - RNA, 19 nt, Artificial Sequence
  Description of Artificial Sequence: Synthetic oligonucleotide
acacggugucugcugcauc

SEQ ID NO: 2201480 - RNA, 19 nt, Artificial Sequence
  Description of Artificial Sequence: Synthetic oligonucleotide
cuccucuaccacagucucc

SEQ ID NO: 2201481 - RNA, 19 nt, Artificial Sequence
  Description of Artificial Sequence: Synthetic oligonucleotide
ggccccugcugcuagcugg

SEQ ID NO: 2201482 - RNA, 19 nt, Artificial Sequence
  Description of Artificial Sequence: Synthetic oligonucleotide
accggagcagaggaaacca

SEQ ID NO: 2201483 - RNA, 19 nt, Artificial Sequence
  Description of Artificial Sequence: Synthetic oligonucleotide
ugucugcugcauccuggga

SEQ ID NO: 2201484 - RNA, 19 nt, Artificial Sequence
  Description of Artificial Sequence: Synthetic oligonucleotide
cugcauccugggauuuugc

SEQ ID NO: 2201485 - RNA, 19 nt, Artificial Sequence
  Description of Artificial Sequence: Synthetic oligonucleotide
cugcgccucgcucagggac

SEQ ID NO: 2201486 - RNA, 19 nt, Artificial Sequence
  Description of Artificial Sequence: Synthetic oligonucleotide
uugguggcuccuuggguau

SEQ ID NO: 2201487 - RNA, 19 nt, Artificial Sequence
  Description of Artificial Sequence: Synthetic oligonucleotide
uucugggaaagguguggau

SEQ ID NO: 2201488 - RNA, 19 nt, Artificial Sequence
  Description of Artificial Sequence: Synthetic oligonucleotide
ggaguaacauaaccugaga

SEQ ID NO: 2201489 - RNA, 19 nt, Artificial Sequence
  Description of Artificial Sequence: Synthetic oligonucleotide
uguucugggccugggcaga

SEQ ID NO: 2201490 - RNA, 19 nt, Artificial Sequence
  Description of Artificial Sequence: Synthetic oligonucleotide
ggaaaccaaaggguuggag

SEQ ID NO: 2201491 - RNA, 19 nt, Artificial Sequence
  Description of Artificial Sequence: Synthetic oligonucleotide
guuggagucuggccuagaa

SEQ ID NO: 2201492 - RNA, 19 nt, Artificial Sequence
  Description of Artificial Sequence: Synthetic oligonucleotide
cuucacuacugcucucuga

SEQ ID NO: 2201493 - RNA, 19 nt, Artificial Sequence
  Description of Artificial Sequence: Synthetic oligonucleotide
ggcugacguagccaccugg

SEQ ID NO: 2201494 - RNA, 19 nt, Artificial Sequence
  Description of Artificial Sequence: Synthetic oligonucleotide
ugaugcuguucugcagagc

SEQ ID NO: 2201495 - RNA, 19 nt, Artificial Sequence
  Description of Artificial Sequence: Synthetic oligonucleotide
cauccugggauuuugcuuu

SEQ ID NO: 2201496 - RNA, 19 nt, Artificial Sequence
  Description of Artificial Sequence: Synthetic oligonucleotide
ucaccacagaggccugcac

SEQ ID NO: 2201497 - RNA, 19 nt, Artificial Sequence
  Description of Artificial Sequence: Synthetic oligonucleotide
uucuugcucucuggggccc

SEQ ID NO: 2201498 - RNA, 19 nt, Artificial Sequence
  Description of Artificial Sequence: Synthetic oligonucleotide
uucggagguguggugucug

SEQ ID NO: 2201499 - RNA, 19 nt, Artificial Sequence
  Description of Artificial Sequence: Synthetic oligonucleotide
agacucuucuucacugcug

SEQ ID NO: 2201500 - RNA, 19 nt, Artificial Sequence
  Description of Artificial Sequence: Synthetic oligonucleotide
gccacagucgccccaggag

SEQ ID NO: 2201501 - RNA, 19 nt, Artificial Sequence
  Description of Artificial Sequence: Synthetic oligonucleotide
ccugcuuucccuguggcug

SEQ ID NO: 2201502 - RNA, 19 nt, Artificial Sequence
  Description of Artificial Sequence: Synthetic oligonucleotide
gccagaaccuucaccacag

SEQ ID NO: 2201503 - RNA, 19 nt, Artificial Sequence
  Description of Artificial Sequence: Synthetic oligonucleotide
gcugacguagccaccuggg

SEQ ID NO: 2201504 - RNA, 19 nt, Artificial Sequence
  Description of Artificial Sequence: Synthetic oligonucleotide
gguguugcugagguccagg

SEQ ID NO: 2201505 - RNA, 19 nt, Artificial Sequence
  Description of Artificial Sequence: Synthetic oligonucleotide
cacagucuccuucugggaa

SEQ ID NO: 2201506 - RNA, 19 nt, Artificial Sequence
  Description of Artificial Sequence: Synthetic oligonucleotide
cuaccuguuuuagggaaca

SEQ ID NO: 2201507 - RNA, 19 nt, Artificial Sequence
  Description of Artificial Sequence: Synthetic oligonucleotide
cuugcccuucuucccacuc

SEQ ID NO: 2201508 - RNA, 19 nt, Artificial Sequence
  Description of Artificial Sequence: Synthetic oligonucleotide
uccagcaguucugccagaa

SEQ ID NO: 2201509 - RNA, 19 nt, Artificial Sequence
  Description of Artificial Sequence: Synthetic oligonucleotide
ccugaagaggugucacugc

SEQ ID NO: 2201510 - RNA, 19 nt, Artificial Sequence
  Description of Artificial Sequence: Synthetic oligonucleotide
ucccggaggcacuggguga

SEQ ID NO: 2201511 - RNA, 19 nt, Artificial Sequence
  Description of Artificial Sequence: Synthetic oligonucleotide
gguuaucuuuggugaccgg

SEQ ID NO: 2201512 - RNA, 19 nt, Artificial Sequence
  Description of Artificial Sequence: Synthetic oligonucleotide
cugcuugccaucuggguua

SEQ ID NO: 2201513 - RNA, 19 nt, Artificial Sequence
  Description of Artificial Sequence: Synthetic oligonucleotide
agccuucugucuucccugu

SEQ ID NO: 2201514 - RNA, 19 nt, Artificial Sequence
  Description of Artificial Sequence: Synthetic oligonucleotide
cugcucuccgaguccugcc

SEQ ID NO: 2201515 - RNA, 19 nt, Artificial Sequence
  Description of Artificial Sequence: Synthetic oligonucleotide
gaacacggugucugcugca

SEQ ID NO: 2201516 - RNA, 19 nt, Artificial Sequence
  Description of Artificial Sequence: Synthetic oligonucleotide
uccgaguccugcccugcuc

SEQ ID NO: 2201517 - RNA, 19 nt, Artificial Sequence
  Description of Artificial Sequence: Synthetic oligonucleotide
uuuuccccacagguuuugu

SEQ ID NO: 2201518 - RNA, 19 nt, Artificial Sequence
  Description of Artificial Sequence: Synthetic oligonucleotide
ccaccaacucaucuucacc

SEQ ID NO: 2201519 - RNA, 19 nt, Artificial Sequence
  Description of Artificial Sequence: Synthetic oligonucleotide
caucaggggucuccucuac

SEQ ID NO: 2201520 - RNA, 19 nt, Artificial Sequence
  Description of Artificial Sequence: Synthetic oligonucleotide
ccccaggaguaacauaacc

SEQ ID NO: 2201521 - RNA, 19 nt, Artificial Sequence
  Description of Artificial Sequence: Synthetic oligonucleotide
cugugagggcgccaccaac

SEQ ID NO: 2201522 - RNA, 19 nt, Artificial Sequence
  Description of Artificial Sequence: Synthetic oligonucleotide
acugcuggggccccugcuu

SEQ ID NO: 2201523 - RNA, 19 nt, Artificial Sequence
  Description of Artificial Sequence: Synthetic oligonucleotide
ucggagguguggugucuga

SEQ ID NO: 2201524 - RNA, 19 nt, Artificial Sequence
  Description of Artificial Sequence: Synthetic oligonucleotide
gauucaucaggggucuccu

SEQ ID NO: 2201525 - RNA, 19 nt, Artificial Sequence
  Description of Artificial Sequence: Synthetic oligonucleotide
cugagaggagagacuguga

SEQ ID NO: 2201526 - RNA, 19 nt, Artificial Sequence
  Description of Artificial Sequence: Synthetic oligonucleotide
ggaccaggacuguucccgg

SEQ ID NO: 2201527 - RNA, 19 nt, Artificial Sequence
  Description of Artificial Sequence: Synthetic oligonucleotide
gaggcagcucuaaccugag

SEQ ID NO: 2201528 - RNA, 19 nt, Artificial Sequence
  Description of Artificial Sequence: Synthetic oligonucleotide
ugggaaagguguggaucca

SEQ ID NO: 2201529 - RNA, 19 nt, Artificial Sequence
  Description of Artificial Sequence: Synthetic oligonucleotide
ucuugcccuucuucccacu

SEQ ID NO: 2201530 - RNA, 19 nt, Artificial Sequence
  Description of Artificial Sequence: Synthetic oligonucleotide
acugugagggcgccaccaa

SEQ ID NO: 2201531 - RNA, 19 nt, Artificial Sequence
  Description of Artificial Sequence: Synthetic oligonucleotide
gcugaggcagcucuaaccu

SEQ ID NO: 2201532 - RNA, 19 nt, Artificial Sequence
  Description of Artificial Sequence: Synthetic oligonucleotide
gauguagguccugucuucu

SEQ ID NO: 2201533 - RNA, 19 nt, Artificial Sequence
  Description of Artificial Sequence: Synthetic oligonucleotide
aggguuggagucuggccua

SEQ ID NO: 2201534 - RNA, 19 nt, Artificial Sequence
  Description of Artificial Sequence: Synthetic oligonucleotide
gugaccggagcagaggaaa

SEQ ID NO: 2201535 - RNA, 19 nt, Artificial Sequence
  Description of Artificial Sequence: Synthetic oligonucleotide
cugauggcaucuccccauc

SEQ ID NO: 2201536 - RNA, 19 nt, Artificial Sequence
  Description of Artificial Sequence: Synthetic oligonucleotide
ucuccgaguccugcccugc

SEQ ID NO: 2201537 - RNA, 19 nt, Artificial Sequence
  Description of Artificial Sequence: Synthetic oligonucleotide
cuggggucucuuggcaucc

SEQ ID NO: 2201538 - RNA, 19 nt, Artificial Sequence
  Description of Artificial Sequence: Synthetic oligonucleotide
ugcuuuucuuagccuucuu

SEQ ID NO: 2201539 - RNA, 19 nt, Artificial Sequence
  Description of Artificial Sequence: Synthetic oligonucleotide
gggugaugcuguucugcag

SEQ ID NO: 2201540 - RNA, 19 nt, Artificial Sequence
  Description of Artificial Sequence: Synthetic oligonucleotide
gauccagucucggggcuga

SEQ ID NO: 2201541 - RNA, 19 nt, Artificial Sequence
  Description of Artificial Sequence: Synthetic oligonucleotide
ccuaccuguuuuagggaac

SEQ ID NO: 2201542 - RNA, 19 nt, Artificial Sequence
  Description of Artificial Sequence: Synthetic oligonucleotide
ggagagacugugagggcgc

SEQ ID NO: 2201543 - RNA, 19 nt, Artificial Sequence
  Description of Artificial Sequence: Synthetic oligonucleotide
ccacuagccccuucugugc

SEQ ID NO: 2201544 - RNA, 19 nt, Artificial Sequence
  Description of Artificial Sequence: Synthetic oligonucleotide
gugagggcgccaccaacuc

SEQ ID NO: 2201545 - RNA, 19 nt, Artificial Sequence
  Description of Artificial Sequence: Synthetic oligonucleotide
cuaccacagucuccuucug

SEQ ID NO: 2201546 - RNA, 19 nt, Artificial Sequence
  Description of Artificial Sequence: Synthetic oligonucleotide
ggagucuggccuagaagug

SEQ ID NO: 2201547 - RNA, 19 nt, Artificial Sequence
  Description of Artificial Sequence: Synthetic oligonucleotide
uaccuguuuuagggaacac

SEQ ID NO: 2201548 - RNA, 19 nt, Artificial Sequence
  Description of Artificial Sequence: Synthetic oligonucleotide
cucgcucagggaccaggac

SEQ ID NO: 2201549 - RNA, 19 nt, Artificial Sequence
  Description of Artificial Sequence: Synthetic oligonucleotide
gccaccaacucaucuucac

SEQ ID NO: 2201550 - RNA, 19 nt, Artificial Sequence
  Description of Artificial Sequence: Synthetic oligonucleotide
gggacuccuuggcaggggc

SEQ ID NO: 2201551 - RNA, 19 nt, Artificial Sequence
  Description of Artificial Sequence: Synthetic oligonucleotide
agggaacacggugucugcu

SEQ ID NO: 2201552 - RNA, 19 nt, Artificial Sequence
  Description of Artificial Sequence: Synthetic oligonucleotide
gaccaggacuguucccgga

SEQ ID NO: 2201553 - RNA, 19 nt, Artificial Sequence
  Description of Artificial Sequence: Synthetic oligonucleotide
ucgcucccugaagaggugu

SEQ ID NO: 2201554 - RNA, 19 nt, Artificial Sequence
  Description of Artificial Sequence: Synthetic oligonucleotide
agccuucuugggcuucgga

SEQ ID NO: 2201555 - RNA, 19 nt, Artificial Sequence
  Description of Artificial Sequence: Synthetic oligonucleotide
cuuuggugaccggagcaga

SEQ ID NO: 2201556 - RNA, 19 nt, Artificial Sequence
  Description of Artificial Sequence: Synthetic oligonucleotide
uccugcccugcuccagcca

SEQ ID NO: 2201557 - RNA, 19 nt, Artificial Sequence
  Description of Artificial Sequence: Synthetic oligonucleotide
gcugcauccugggauuuug

SEQ ID NO: 2201558 - RNA, 19 nt, Artificial Sequence
  Description of Artificial Sequence: Synthetic oligonucleotide
gaguccugcccugcuccag

SEQ ID NO: 2201559 - RNA, 19 nt, Artificial Sequence
  Description of Artificial Sequence: Synthetic oligonucleotide
ugcugcucuccgaguccug

SEQ ID NO: 2201560 - RNA, 19 nt, Artificial Sequence
  Description of Artificial Sequence: Synthetic oligonucleotide
cucgcucccugaagaggug

SEQ ID NO: 2201561 - RNA, 19 nt, Artificial Sequence
  Description of Artificial Sequence: Synthetic oligonucleotide
ggacuguucccggaggcac

SEQ ID NO: 2201562 - RNA, 19 nt, Artificial Sequence
  Description of Artificial Sequence: Synthetic oligonucleotide
cuguuuuagggaacacggu

SEQ ID NO: 2201563 - RNA, 19 nt, Artificial Sequence
  Description of Artificial Sequence: Synthetic oligonucleotide
cucuuuccuaccuguuuua

SEQ ID NO: 2201564 - RNA, 19 nt, Artificial Sequence
  Description of Artificial Sequence: Synthetic oligonucleotide
gggucucuuggcauccucc

SEQ ID NO: 2201565 - RNA, 19 nt, Artificial Sequence
  Description of Artificial Sequence: Synthetic oligonucleotide
ccugagagguuuuccccac

SEQ ID NO: 2201566 - RNA, 19 nt, Artificial Sequence
  Description of Artificial Sequence: Synthetic oligonucleotide
ccgaguccugcccugcucc

SEQ ID NO: 2201567 - RNA, 19 nt, Artificial Sequence
  Description of Artificial Sequence: Synthetic oligonucleotide
cccugaagaggugucacug

SEQ ID NO: 2201568 - RNA, 19 nt, Artificial Sequence
  Description of Artificial Sequence: Synthetic oligonucleotide
ugggcagauguagguccug

SEQ ID NO: 2201569 - RNA, 19 nt, Artificial Sequence
  Description of Artificial Sequence: Synthetic oligonucleotide
caccggauucaucaggggu

SEQ ID NO: 2201570 - RNA, 19 nt, Artificial Sequence
  Description of Artificial Sequence: Synthetic oligonucleotide
aggaaaccaaaggguugga

SEQ ID NO: 2201571 - RNA, 19 nt, Artificial Sequence
  Description of Artificial Sequence: Synthetic oligonucleotide
gcuugcacugcuggggccc

SEQ ID NO: 2201572 - RNA, 19 nt, Artificial Sequence
  Description of Artificial Sequence: Synthetic oligonucleotide
cccaggaguaacauaaccu

SEQ ID NO: 2201573 - RNA, 19 nt, Artificial Sequence
  Description of Artificial Sequence: Synthetic oligonucleotide
cuugggcuucggaggugug

SEQ ID NO: 2201574 - RNA, 19 nt, Artificial Sequence
  Description of Artificial Sequence: Synthetic oligonucleotide
guggcuccuuggguauugg

SEQ ID NO: 2201575 - RNA, 19 nt, Artificial Sequence
  Description of Artificial Sequence: Synthetic oligonucleotide
agccaccuggggucucuug

SEQ ID NO: 2201576 - RNA, 19 nt, Artificial Sequence
  Description of Artificial Sequence: Synthetic oligonucleotide
gguccaggugcuuuucuua

SEQ ID NO: 2201577 - RNA, 19 nt, Artificial Sequence
  Description of Artificial Sequence: Synthetic oligonucleotide
cagcucuaaccugagaggu

SEQ ID NO: 2201578 - RNA, 19 nt, Artificial Sequence
  Description of Artificial Sequence: Synthetic oligonucleotide
gccuguguggguguugcug

SEQ ID NO: 2201579 - RNA, 19 nt, Artificial Sequence
  Description of Artificial Sequence: Synthetic oligonucleotide
gcuuuugaagccugggaau

SEQ ID NO: 2201580 - RNA, 19 nt, Artificial Sequence
  Description of Artificial Sequence: Synthetic oligonucleotide
uccugggauuuugcuuucu

SEQ ID NO: 2201581 - RNA, 19 nt, Artificial Sequence
  Description of Artificial Sequence: Synthetic oligonucleotide
guguugcugagguccaggu

SEQ ID NO: 2201582 - RNA, 19 nt, Artificial Sequence
  Description of Artificial Sequence: Synthetic oligonucleotide
cagaggccugcaccugcgc

SEQ ID NO: 2201583 - RNA, 19 nt, Artificial Sequence
  Description of Artificial Sequence: Synthetic oligonucleotide
acuagccccuucugugcuu

SEQ ID NO: 2201584 - RNA, 19 nt, Artificial Sequence
  Description of Artificial Sequence: Synthetic oligonucleotide
cuuuugaagccugggaauu

SEQ ID NO: 2201585 - RNA, 19 nt, Artificial Sequence
  Description of Artificial Sequence: Synthetic oligonucleotide
caacucaucuucaccggau

SEQ ID NO: 2201586 - RNA, 19 nt, Artificial Sequence
  Description of Artificial Sequence: Synthetic oligonucleotide
cagccacuagccccuucug

SEQ ID NO: 2201587 - RNA, 19 nt, Artificial Sequence
  Description of Artificial Sequence: Synthetic oligonucleotide
ggcagauguagguccuguc

SEQ ID NO: 2201588 - RNA, 19 nt, Artificial Sequence
  Description of Artificial Sequence: Synthetic oligonucleotide
acccgagugggcacuguca

SEQ ID NO: 2201589 - RNA, 19 nt, Artificial Sequence
  Description of Artificial Sequence: Synthetic oligonucleotide
cacuguccgauucuucacu

SEQ ID NO: 2201590 - RNA, 19 nt, Artificial Sequence
  Description of Artificial Sequence: Synthetic oligonucleotide
cacccgagugggcacuguc

SEQ ID NO: 2201591 - RNA, 19 nt, Artificial Sequence
  Description of Artificial Sequence: Synthetic oligonucleotide
aggcagcucuaaccugaga

SEQ ID NO: 2201592 - RNA, 19 nt, Artificial Sequence
  Description of Artificial Sequence: Synthetic oligonucleotide
ugcuuucccuguggcuggc

SEQ ID NO: 2201593 - RNA, 19 nt, Artificial Sequence
  Description of Artificial Sequence: Synthetic oligonucleotide
ccaccuggggucucuuggc

SEQ ID NO: 2201594 - RNA, 19 nt, Artificial Sequence
  Description of Artificial Sequence: Synthetic oligonucleotide
gcgccaccaacucaucuuc

SEQ ID NO: 2201595 - RNA, 19 nt, Artificial Sequence
  Description of Artificial Sequence: Synthetic oligonucleotide
cccugcugcuagcuggucc

SEQ ID NO: 2201596 - RNA, 19 nt, Artificial Sequence
  Description of Artificial Sequence: Synthetic oligonucleotide
cacucuccuugauggccuc

SEQ ID NO: 2201597 - RNA, 19 nt, Artificial Sequence
  Description of Artificial Sequence: Synthetic oligonucleotide
cacagucgccccaggagua

SEQ ID NO: 2201598 - RNA, 19 nt, Artificial Sequence
  Description of Artificial Sequence: Synthetic oligonucleotide
cugagagguuuuccccaca

SEQ ID NO: 2201599 - RNA, 19 nt, Artificial Sequence
  Description of Artificial Sequence: Synthetic oligonucleotide
guguggugucugaagaggu

SEQ ID NO: 2201600 - RNA, 19 nt, Artificial Sequence
  Description of Artificial Sequence: Synthetic oligonucleotide
ccaaaggguuggagucugg

SEQ ID NO: 2201601 - RNA, 19 nt, Artificial Sequence
  Description of Artificial Sequence: Synthetic oligonucleotide
agagacugugagggcgcca

SEQ ID NO: 2201602 - RNA, 19 nt, Artificial Sequence
  Description of Artificial Sequence: Synthetic oligonucleotide
cuucccuguucugggccug

SEQ ID NO: 2201603 - RNA, 19 nt, Artificial Sequence
  Description of Artificial Sequence: Synthetic oligonucleotide
ucgccccaggaguaacaua

SEQ ID NO: 2201604 - RNA, 19 nt, Artificial Sequence
  Description of Artificial Sequence: Synthetic oligonucleotide
ggcugauggcaucucccca

SEQ ID NO: 2201605 - RNA, 19 nt, Artificial Sequence
  Description of Artificial Sequence: Synthetic oligonucleotide
cuuuccugcuccagcaguu

SEQ ID NO: 2201606 - RNA, 19 nt, Artificial Sequence
  Description of Artificial Sequence: Synthetic oligonucleotide
ccacagguuuugucugagc

SEQ ID NO: 2201607 - RNA, 19 nt, Artificial Sequence
  Description of Artificial Sequence: Synthetic oligonucleotide
agucgccccaggaguaaca

SEQ ID NO: 2201608 - RNA, 19 nt, Artificial Sequence
  Description of Artificial Sequence: Synthetic oligonucleotide
acggugucugcugcauccu

SEQ ID NO: 2201609 - RNA, 19 nt, Artificial Sequence
  Description of Artificial Sequence: Synthetic oligonucleotide
cgccccaggaguaacauaa

SEQ ID NO: 2201610 - RNA, 19 nt, Artificial Sequence
  Description of Artificial Sequence: Synthetic oligonucleotide
cuccuuggcaggggcugag

SEQ ID NO: 2201611 - RNA, 19 nt, Artificial Sequence
  Description of Artificial Sequence: Synthetic oligonucleotide
agcucuaaccugagagguu

SEQ ID NO: 2201612 - RNA, 19 nt, Artificial Sequence
  Description of Artificial Sequence: Synthetic oligonucleotide
cuucugugcuugcacugcu

SEQ ID NO: 2201613 - RNA, 19 nt, Artificial Sequence
  Description of Artificial Sequence: Synthetic oligonucleotide
gcuucggaggugugguguc

SEQ ID NO: 2201614 - RNA, 19 nt, Artificial Sequence
  Description of Artificial Sequence: Synthetic oligonucleotide
accugagaggagagacugu

SEQ ID NO: 2201615 - RNA, 19 nt, Artificial Sequence
  Description of Artificial Sequence: Synthetic oligonucleotide
cugcaccugcgccucgcuc

SEQ ID NO: 2201616 - RNA, 19 nt, Artificial Sequence
  Description of Artificial Sequence: Synthetic oligonucleotide
acagucgccccaggaguaa

SEQ ID NO: 2201617 - RNA, 19 nt, Artificial Sequence
  Description of Artificial Sequence: Synthetic oligonucleotide
cuguucccggaggcacugg

SEQ ID NO: 2201618 - RNA, 19 nt, Artificial Sequence
  Description of Artificial Sequence: Synthetic oligonucleotide
ccaacucaucuucaccgga

SEQ ID NO: 2201619 - RNA, 19 nt, Artificial Sequence
  Description of Artificial Sequence: Synthetic oligonucleotide
ggauccagucucggggcug

SEQ ID NO: 2201620 - RNA, 19 nt, Artificial Sequence
  Description of Artificial Sequence: Synthetic oligonucleotide
ugcuugccaucuggguuau

SEQ ID NO: 2201621 - RNA, 19 nt, Artificial Sequence
  Description of Artificial Sequence: Synthetic oligonucleotide
ucccuguggcuggcacccg

SEQ ID NO: 2201622 - RNA, 19 nt, Artificial Sequence
  Description of Artificial Sequence: Synthetic oligonucleotide
ccuguggcuggcacccgag

SEQ ID NO: 2201623 - RNA, 19 nt, Artificial Sequence
  Description of Artificial Sequence: Synthetic oligonucleotide
agccugggaauuggccaca

SEQ ID NO: 2201624 - RNA, 19 nt, Artificial Sequence
  Description of Artificial Sequence: Synthetic oligonucleotide
acguagccaccuggggucu

SEQ ID NO: 2201625 - RNA, 19 nt, Artificial Sequence
  Description of Artificial Sequence: Synthetic oligonucleotide
gucucggggcugacguagc

SEQ ID NO: 2201626 - RNA, 19 nt, Artificial Sequence
  Description of Artificial Sequence: Synthetic oligonucleotide
cagucgccccaggaguaac

SEQ ID NO: 2201627 - RNA, 19 nt, Artificial Sequence
  Description of Artificial Sequence: Synthetic oligonucleotide
auccagucucggggcugac

SEQ ID NO: 2201628 - RNA, 19 nt, Artificial Sequence
  Description of Artificial Sequence: Synthetic oligonucleotide
ccuccucgcucccugaaga

SEQ ID NO: 2201629 - RNA, 19 nt, Artificial Sequence
  Description of Artificial Sequence: Synthetic oligonucleotide
cauccuccucgcucccuga

SEQ ID NO: 2201630 - RNA, 19 nt, Artificial Sequence
  Description of Artificial Sequence: Synthetic oligonucleotide
cucggggcugacguagcca

SEQ ID NO: 2201631 - RNA, 19 nt, Artificial Sequence
  Description of Artificial Sequence: Synthetic oligonucleotide
caucuggguuaucuuuggu

SEQ ID NO: 2201632 - RNA, 19 nt, Artificial Sequence
  Description of Artificial Sequence: Synthetic oligonucleotide
ggggacuccuuggcagggg

SEQ ID NO: 2201633 - RNA, 19 nt, Artificial Sequence
  Description of Artificial Sequence: Synthetic oligonucleotide
cccacagguuuugucugag

SEQ ID NO: 2201634 - RNA, 19 nt, Artificial Sequence
  Description of Artificial Sequence: Synthetic oligonucleotide
cugggcagauguagguccu

SEQ ID NO: 2201635 - RNA, 19 nt, Artificial Sequence
  Description of Artificial Sequence: Synthetic oligonucleotide
gcauccugggauuuugcuu

SEQ ID NO: 2201636 - RNA, 19 nt, Artificial Sequence
  Description of Artificial Sequence: Synthetic oligonucleotide
ggaaagguguggauccagu

SEQ ID NO: 2201637 - RNA, 19 nt, Artificial Sequence
  Description of Artificial Sequence: Synthetic oligonucleotide
cacuagccccuucugugcu

SEQ ID NO: 2201638 - RNA, 19 nt, Artificial Sequence
  Description of Artificial Sequence: Synthetic oligonucleotide
ggcaucuccccaucacugu

SEQ ID NO: 2201639 - RNA, 19 nt, Artificial Sequence
  Description of Artificial Sequence: Synthetic oligonucleotide
gacuguucccggaggcacu

SEQ ID NO: 2201640 - RNA, 19 nt, Artificial Sequence
  Description of Artificial Sequence: Synthetic oligonucleotide
gcucuaaccugagagguuu

SEQ ID NO: 2201641 - RNA, 19 nt, Artificial Sequence
  Description of Artificial Sequence: Synthetic oligonucleotide
agggcgccaccaacucauc

SEQ ID NO: 2201642 - RNA, 19 nt, Artificial Sequence
  Description of Artificial Sequence: Synthetic oligonucleotide
ggguuggagucuggccuag

SEQ ID NO: 2201643 - RNA, 19 nt, Artificial Sequence
  Description of Artificial Sequence: Synthetic oligonucleotide
gggcugaggcagcucuaac

SEQ ID NO: 2201644 - RNA, 19 nt, Artificial Sequence
  Description of Artificial Sequence: Synthetic oligonucleotide
ggccacagucgccccagga

SEQ ID NO: 2201645 - RNA, 19 nt, Artificial Sequence
  Description of Artificial Sequence: Synthetic oligonucleotide
gcuggggccccugcuuucc

SEQ ID NO: 2201646 - RNA, 19 nt, Artificial Sequence
  Description of Artificial Sequence: Synthetic oligonucleotide
gggcuucggagguguggug

SEQ ID NO: 2201647 - RNA, 19 nt, Artificial Sequence
  Description of Artificial Sequence: Synthetic oligonucleotide
ggccuagaaguggcuuuug

SEQ ID NO: 2201648 - RNA, 19 nt, Artificial Sequence
  Description of Artificial Sequence: Synthetic oligonucleotide
ggcgccaccaacucaucuu

SEQ ID NO: 2201649 - RNA, 19 nt, Artificial Sequence
  Description of Artificial Sequence: Synthetic oligonucleotide
ggugucugaagaggucucu

SEQ ID NO: 2201650 - RNA, 19 nt, Artificial Sequence
  Description of Artificial Sequence: Synthetic oligonucleotide
ccacagucuccuucuggga

SEQ ID NO: 2201651 - RNA, 19 nt, Artificial Sequence
  Description of Artificial Sequence: Synthetic oligonucleotide
gggcugacguagccaccug

SEQ ID NO: 2201652 - RNA, 19 nt, Artificial Sequence
  Description of Artificial Sequence: Synthetic oligonucleotide
ggcuucggagguguggugu

SEQ ID NO: 2201653 - RNA, 19 nt, Artificial Sequence
  Description of Artificial Sequence: Synthetic oligonucleotide
ggguguugcugagguccag

SEQ ID NO: 2201654 - RNA, 19 nt, Artificial Sequence
  Description of Artificial Sequence: Synthetic oligonucleotide
cuccagcaguucugccaga

SEQ ID NO: 2201655 - RNA, 19 nt, Artificial Sequence
  Description of Artificial Sequence: Synthetic oligonucleotide
gccugggaauuggccacag

SEQ ID NO: 2201656 - RNA, 19 nt, Artificial Sequence
  Description of Artificial Sequence: Synthetic oligonucleotide
ccucgcucagggaccagga

SEQ ID NO: 2201657 - RNA, 19 nt, Artificial Sequence
  Description of Artificial Sequence: Synthetic oligonucleotide
guagccaccuggggucucu

SEQ ID NO: 2201658 - RNA, 19 nt, Artificial Sequence
  Description of Artificial Sequence: Synthetic oligonucleotide
guucccggaggcacugggu

SEQ ID NO: 2201659 - RNA, 19 nt, Artificial Sequence
  Description of Artificial Sequence: Synthetic oligonucleotide
ggggcugacguagccaccu

SEQ ID NO: 2201660 - RNA, 19 nt, Artificial Sequence
  Description of Artificial Sequence: Synthetic oligonucleotide
ccacucuccuugauggccu

SEQ ID NO: 2201661 - RNA, 19 nt, Artificial Sequence
  Description of Artificial Sequence: Synthetic oligonucleotide
cucuaaccugagagguuuu

SEQ ID NO: 2201662 - RNA, 19 nt, Artificial Sequence
  Description of Artificial Sequence: Synthetic oligonucleotide
gucgccccaggaguaacau

SEQ ID NO: 2201663 - RNA, 19 nt, Artificial Sequence
  Description of Artificial Sequence: Synthetic oligonucleotide
cuucggagguguggugucu

SEQ ID NO: 2201664 - RNA, 19 nt, Artificial Sequence
  Description of Artificial Sequence: Synthetic oligonucleotide
caccugcgccucgcucagg

SEQ ID NO: 2201665 - RNA, 19 nt, Artificial Sequence
  Description of Artificial Sequence: Synthetic oligonucleotide
gccccaggaguaacauaac

SEQ ID NO: 2201666 - RNA, 19 nt, Artificial Sequence
  Description of Artificial Sequence: Synthetic oligonucleotide
ccccacagguuuugucuga

SEQ ID NO: 2201667 - RNA, 19 nt, Artificial Sequence
  Description of Artificial Sequence: Synthetic oligonucleotide
uagccaccuggggucucuu

SEQ ID NO: 2201668 - RNA, 19 nt, Artificial Sequence
  Description of Artificial Sequence: Synthetic oligonucleotide
ccggagcagaggaaaccaa

SEQ ID NO: 2201669 - RNA, 19 nt, Artificial Sequence
  Description of Artificial Sequence: Synthetic oligonucleotide
gcucuccgaguccugcccu

SEQ ID NO: 2201670 - RNA, 19 nt, Artificial Sequence
  Description of Artificial Sequence: Synthetic oligonucleotide
cgcucccugaagagguguc

SEQ ID NO: 2201671 - RNA, 19 nt, Artificial Sequence
  Description of Artificial Sequence: Synthetic oligonucleotide
aggggcugaggcagcucua

SEQ ID NO: 2201672 - RNA, 19 nt, Artificial Sequence
  Description of Artificial Sequence: Synthetic oligonucleotide
ggugucacugcuggcugau

SEQ ID NO: 2201673 - RNA, 19 nt, Artificial Sequence
  Description of Artificial Sequence: Synthetic oligonucleotide
gguuggagucuggccuaga

SEQ ID NO: 2201674 - RNA, 19 nt, Artificial Sequence
  Description of Artificial Sequence: Synthetic oligonucleotide
cggugucugcugcauccug

SEQ ID NO: 2201675 - RNA, 19 nt, Artificial Sequence
  Description of Artificial Sequence: Synthetic oligonucleotide
gucuggccuagaaguggcu

SEQ ID NO: 2201676 - RNA, 19 nt, Artificial Sequence
  Description of Artificial Sequence: Synthetic oligonucleotide
cccaucacuguccgauucu

SEQ ID NO: 2201677 - RNA, 19 nt, Artificial Sequence
  Description of Artificial Sequence: Synthetic oligonucleotide
gcugagguccaggugcuuu

SEQ ID NO: 2201678 - RNA, 19 nt, Artificial Sequence
  Description of Artificial Sequence: Synthetic oligonucleotide
cuccgaguccugcccugcu

SEQ ID NO: 2201679 - RNA, 19 nt, Artificial Sequence
  Description of Artificial Sequence: Synthetic oligonucleotide
ccccuucugugcuugcacu

SEQ ID NO: 2201680 - RNA, 19 nt, Artificial Sequence
  Description of Artificial Sequence: Synthetic oligonucleotide
cccuguggcuggcacccga

SEQ ID NO: 2201681 - RNA, 19 nt, Artificial Sequence
  Description of Artificial Sequence: Synthetic oligonucleotide
ggcacugggugaugcuguu

SEQ ID NO: 2201682 - RNA, 19 nt, Artificial Sequence
  Description of Artificial Sequence: Synthetic oligonucleotide
ccggauucaucaggggucu

SEQ ID NO: 2201683 - RNA, 19 nt, Artificial Sequence
  Description of Artificial Sequence: Synthetic oligonucleotide
ggacuccuuggcaggggcu

SEQ ID NO: 2201684 - RNA, 19 nt, Artificial Sequence
  Description of Artificial Sequence: Synthetic oligonucleotide
gcuuucccuguggcuggca

SEQ ID NO: 2201685 - RNA, 19 nt, Artificial Sequence
  Description of Artificial Sequence: Synthetic oligonucleotide
ccccgacagcuuccgcuuc

SEQ ID NO: 2201686 - RNA, 19 nt, Artificial Sequence
  Description of Artificial Sequence: Synthetic oligonucleotide
guucugggccugggcagau

SEQ ID NO: 2201687 - RNA, 19 nt, Artificial Sequence
  Description of Artificial Sequence: Synthetic oligonucleotide
ggcuggcacccgagugggc

SEQ ID NO: 2201688 - RNA, 19 nt, Artificial Sequence
  Description of Artificial Sequence: Synthetic oligonucleotide
cgccaccaacucaucuuca

SEQ ID NO: 2201689 - RNA, 19 nt, Artificial Sequence
  Description of Artificial Sequence: Synthetic oligonucleotide
gucugagcuggugccucuu

SEQ ID NO: 2201690 - RNA, 19 nt, Artificial Sequence
  Description of Artificial Sequence: Synthetic oligonucleotide
ccuuuuccaggggacuccu

SEQ ID NO: 2201691 - RNA, 19 nt, Artificial Sequence
  Description of Artificial Sequence: Synthetic oligonucleotide
ccugcgccucgcucaggga

SEQ ID NO: 2201692 - RNA, 19 nt, Artificial Sequence
  Description of Artificial Sequence: Synthetic oligonucleotide
cgaguccugcccugcucca

SEQ ID NO: 2201693 - RNA, 19 nt, Artificial Sequence
  Description of Artificial Sequence: Synthetic oligonucleotide
gcgccucgcucagggacca

SEQ ID NO: 2201694 - RNA, 19 nt, Artificial Sequence
  Description of Artificial Sequence: Synthetic oligonucleotide
gggucuccucuaccacagu

SEQ ID NO: 2201695 - RNA, 19 nt, Artificial Sequence
  Description of Artificial Sequence: Synthetic oligonucleotide
gggccccugcuuucccugu

SEQ ID NO: 2201696 - RNA, 19 nt, Artificial Sequence
  Description of Artificial Sequence: Synthetic oligonucleotide
ggggccccugcugcuagcu

SEQ ID NO: 2201697 - RNA, 19 nt, Artificial Sequence
  Description of Artificial Sequence: Synthetic oligonucleotide
cugcugcauccugggauuu

SEQ ID NO: 2201698 - RNA, 19 nt, Artificial Sequence
  Description of Artificial Sequence: Synthetic oligonucleotide
ccggaggcacugggugaug

SEQ ID NO: 2201699 - RNA, 19 nt, Artificial Sequence
  Description of Artificial Sequence: Synthetic oligonucleotide
gccccugcugcuagcuggu

SEQ ID NO: 2201700 - RNA, 19 nt, Artificial Sequence
  Description of Artificial Sequence: Synthetic oligonucleotide
gccuucugucuucccuguu

SEQ ID NO: 2201701 - RNA, 19 nt, Artificial Sequence
  Description of Artificial Sequence: Synthetic oligonucleotide
cggauucaucaggggucuc

SEQ ID NO: 2201702 - RNA, 19 nt, Artificial Sequence
  Description of Artificial Sequence: Synthetic oligonucleotide
gcacccgagugggcacugu

SEQ ID NO: 2201703 - RNA, 19 nt, Artificial Sequence
  Description of Artificial Sequence: Synthetic oligonucleotide
ccgacagcuuccgcuucuu

SEQ ID NO: 2201704 - RNA, 19 nt, Artificial Sequence
  Description of Artificial Sequence: Synthetic oligonucleotide
aauacaucaaugguaaagg

SEQ ID NO: 2201705 - RNA, 19 nt, Artificial Sequence
  Description of Artificial Sequence: Synthetic oligonucleotide
aaaagacgaaacuccaccc

SEQ ID NO: 2201706 - RNA, 19 nt, Artificial Sequence
  Description of Artificial Sequence: Synthetic oligonucleotide
uuuacugucacuucucggg

SEQ ID NO: 2201707 - RNA, 19 nt, Artificial Sequence
  Description of Artificial Sequence: Synthetic oligonucleotide
aaaccugacccuucaagcc

SEQ ID NO: 2201708 - RNA, 19 nt, Artificial Sequence
  Description of Artificial Sequence: Synthetic oligonucleotide
acuggaaauacaucaaugg

SEQ ID NO: 2201709 - RNA, 19 nt, Artificial Sequence
  Description of Artificial Sequence: Synthetic oligonucleotide
ugacaguccaugaaaaccg

SEQ ID NO: 2201710 - RNA, 19 nt, Artificial Sequence
  Description of Artificial Sequence: Synthetic oligonucleotide
aaacgucucagccucaguc

SEQ ID NO: 2201711 - RNA, 19 nt, Artificial Sequence
  Description of Artificial Sequence: Synthetic oligonucleotide
cuugauucuaagcucaggg

SEQ ID NO: 2201712 - RNA, 19 nt, Artificial Sequence
  Description of Artificial Sequence: Synthetic oligonucleotide
aaccugacccuucaagccc

SEQ ID NO: 2201713 - RNA, 19 nt, Artificial Sequence
  Description of Artificial Sequence: Synthetic oligonucleotide
cacaucagagacaagacag

SEQ ID NO: 2201714 - RNA, 19 nt, Artificial Sequence
  Description of Artificial Sequence: Synthetic oligonucleotide
ugauucuaagcucagggga

SEQ ID NO: 2201715 - RNA, 19 nt, Artificial Sequence
  Description of Artificial Sequence: Synthetic oligonucleotide
aaaaucgcccaccuggcag

SEQ ID NO: 2201716 - RNA, 19 nt, Artificial Sequence
  Description of Artificial Sequence: Synthetic oligonucleotide
aauuggugcgguuuggcug

SEQ ID NO: 2201717 - RNA, 19 nt, Artificial Sequence
  Description of Artificial Sequence: Synthetic oligonucleotide
agagccaucagcugugucg

SEQ ID NO: 2201718 - RNA, 19 nt, Artificial Sequence
  Description of Artificial Sequence: Synthetic oligonucleotide
ucuaucucugccuggaugc

SEQ ID NO: 2201719 - RNA, 19 nt, Artificial Sequence
  Description of Artificial Sequence: Synthetic oligonucleotide
ucauauaguccauaguugu

SEQ ID NO: 2201720 - RNA, 19 nt, Artificial Sequence
  Description of Artificial Sequence: Synthetic oligonucleotide
aaaucgcccaccuggcagc

SEQ ID NO: 2201721 - RNA, 19 nt, Artificial Sequence
  Description of Artificial Sequence: Synthetic oligonucleotide
caaaagacgaaacuccacc

SEQ ID NO: 2201722 - RNA, 19 nt, Artificial Sequence
  Description of Artificial Sequence: Synthetic oligonucleotide
uaaaccugacccuucaagc

SEQ ID NO: 2201723 - RNA, 19 nt, Artificial Sequence
  Description of Artificial Sequence: Synthetic oligonucleotide
ugcgguuuggcugaaaccg

SEQ ID NO: 2201724 - RNA, 19 nt, Artificial Sequence
  Description of Artificial Sequence: Synthetic oligonucleotide
uggaaauacaucaauggua

SEQ ID NO: 2201725 - RNA, 19 nt, Artificial Sequence
  Description of Artificial Sequence: Synthetic oligonucleotide
uugauucuaagcucagggg

SEQ ID NO: 2201726 - RNA, 19 nt, Artificial Sequence
  Description of Artificial Sequence: Synthetic oligonucleotide
uccaaaaugccuuuugcac

SEQ ID NO: 2201727 - RNA, 19 nt, Artificial Sequence
  Description of Artificial Sequence: Synthetic oligonucleotide
aacguggucagggacacac

SEQ ID NO: 2201728 - RNA, 19 nt, Artificial Sequence
  Description of Artificial Sequence: Synthetic oligonucleotide
agagacaagacagggagcg

SEQ ID NO: 2201729 - RNA, 19 nt, Artificial Sequence
  Description of Artificial Sequence: Synthetic oligonucleotide
auaaaccugacccuucaag

SEQ ID NO: 2201730 - RNA, 19 nt, Artificial Sequence
  Description of Artificial Sequence: Synthetic oligonucleotide
aauccucaaaagacgaaac

SEQ ID NO: 2201731 - RNA, 19 nt, Artificial Sequence
  Description of Artificial Sequence: Synthetic oligonucleotide
auuuuacugucacuucucg

SEQ ID NO: 2201732 - RNA, 19 nt, Artificial Sequence
  Description of Artificial Sequence: Synthetic oligonucleotide
agacaaaauccucaaaaga

SEQ ID NO: 2201733 - RNA, 19 nt, Artificial Sequence
  Description of Artificial Sequence: Synthetic oligonucleotide
ugcccaugaggucauauag

SEQ ID NO: 2201734 - RNA, 19 nt, Artificial Sequence
  Description of Artificial Sequence: Synthetic oligonucleotide
auauaguccauaguuguuc

SEQ ID NO: 2201735 - RNA, 19 nt, Artificial Sequence
  Description of Artificial Sequence: Synthetic oligonucleotide
ucuggaugccucuggaacg

SEQ ID NO: 2201736 - RNA, 19 nt, Artificial Sequence
  Description of Artificial Sequence: Synthetic oligonucleotide
cucccugaaaucuuuauug

SEQ ID NO: 2201737 - RNA, 19 nt, Artificial Sequence
  Description of Artificial Sequence: Synthetic oligonucleotide
uuucccugccacaaauugg

SEQ ID NO: 2201738 - RNA, 19 nt, Artificial Sequence
  Description of Artificial Sequence: Synthetic oligonucleotide
uuuuacugucacuucucgg

SEQ ID NO: 2201739 - RNA, 19 nt, Artificial Sequence
  Description of Artificial Sequence: Synthetic oligonucleotide
uuuucucccgaacaaacuc

SEQ ID NO: 2201740 - RNA, 19 nt, Artificial Sequence
  Description of Artificial Sequence: Synthetic oligonucleotide
aaagacgaaacuccaccca

SEQ ID NO: 2201741 - RNA, 19 nt, Artificial Sequence
  Description of Artificial Sequence: Synthetic oligonucleotide
caucugauuugcuugauuc

SEQ ID NO: 2201742 - RNA, 19 nt, Artificial Sequence
  Description of Artificial Sequence: Synthetic oligonucleotide
ugucgauccaugaugcccc

SEQ ID NO: 2201743 - RNA, 19 nt, Artificial Sequence
  Description of Artificial Sequence: Synthetic oligonucleotide
uuuggcugaaaccgguucc

SEQ ID NO: 2201744 - RNA, 19 nt, Artificial Sequence
  Description of Artificial Sequence: Synthetic oligonucleotide
ucccugaaaucuuuauugg

SEQ ID NO: 2201745 - RNA, 19 nt, Artificial Sequence
  Description of Artificial Sequence: Synthetic oligonucleotide
uuucucccgaacaaacucc

SEQ ID NO: 2201746 - RNA, 19 nt, Artificial Sequence
  Description of Artificial Sequence: Synthetic oligonucleotide
aaucuuuauuggugacugg

SEQ ID NO: 2201747 - RNA, 19 nt, Artificial Sequence
  Description of Artificial Sequence: Synthetic oligonucleotide
cagauugguauauggacgc

SEQ ID NO: 2201748 - RNA, 19 nt, Artificial Sequence
  Description of Artificial Sequence: Synthetic oligonucleotide
gaggucauauaguccauag

SEQ ID NO: 2201749 - RNA, 19 nt, Artificial Sequence
  Description of Artificial Sequence: Synthetic oligonucleotide
caugaaaaccgucuucagc

SEQ ID NO: 2201750 - RNA, 19 nt, Artificial Sequence
  Description of Artificial Sequence: Synthetic oligonucleotide
uguccuggcuggcagauug

SEQ ID NO: 2201751 - RNA, 19 nt, Artificial Sequence
  Description of Artificial Sequence: Synthetic oligonucleotide
uugcuugauucuaagcuca

SEQ ID NO: 2201752 - RNA, 19 nt, Artificial Sequence
  Description of Artificial Sequence: Synthetic oligonucleotide
ucucgaaugccagagccgg

SEQ ID NO: 2201753 - RNA, 19 nt, Artificial Sequence
  Description of Artificial Sequence: Synthetic oligonucleotide
aaauccucaaaagacgaaa

SEQ ID NO: 2201754 - RNA, 19 nt, Artificial Sequence
  Description of Artificial Sequence: Synthetic oligonucleotide
aaauuggugcgguuuggcu

SEQ ID NO: 2201755 - RNA, 19 nt, Artificial Sequence
  Description of Artificial Sequence: Synthetic oligonucleotide
gauucuaagcucaggggag

SEQ ID NO: 2201756 - RNA, 19 nt, Artificial Sequence
  Description of Artificial Sequence: Synthetic oligonucleotide
auggacgcuguccauuccc

SEQ ID NO: 2201757 - RNA, 19 nt, Artificial Sequence
  Description of Artificial Sequence: Synthetic oligonucleotide
augccuuuugcacugguug

SEQ ID NO: 2201758 - RNA, 19 nt, Artificial Sequence
  Description of Artificial Sequence: Synthetic oligonucleotide
ucagagauccuccuucagu

SEQ ID NO: 2201759 - RNA, 19 nt, Artificial Sequence
  Description of Artificial Sequence: Synthetic oligonucleotide
ugaaucuggaguguugccc

SEQ ID NO: 2201760 - RNA, 19 nt, Artificial Sequence
  Description of Artificial Sequence: Synthetic oligonucleotide
auauggacgcuguccauuc

SEQ ID NO: 2201761 - RNA, 19 nt, Artificial Sequence
  Description of Artificial Sequence: Synthetic oligonucleotide
aaaggauuuuacugucacu

SEQ ID NO: 2201762 - RNA, 19 nt, Artificial Sequence
  Description of Artificial Sequence: Synthetic oligonucleotide
uucccugccacaaauuggu

SEQ ID NO: 2201763 - RNA, 19 nt, Artificial Sequence
  Description of Artificial Sequence: Synthetic oligonucleotide
cuggcagauugguauaugg

SEQ ID NO: 2201764 - RNA, 19 nt, Artificial Sequence
  Description of Artificial Sequence: Synthetic oligonucleotide
uuucucucgaaugccagag

SEQ ID NO: 2201765 - RNA, 19 nt, Artificial Sequence
  Description of Artificial Sequence: Synthetic oligonucleotide
acccaaacgucucagccuc

SEQ ID NO: 2201766 - RNA, 19 nt, Artificial Sequence
  Description of Artificial Sequence: Synthetic oligonucleotide
uauaguccauaguuguucu

SEQ ID NO: 2201767 - RNA, 19 nt, Artificial Sequence
  Description of Artificial Sequence: Synthetic oligonucleotide
acugguugccaccagagaa

SEQ ID NO: 2201768 - RNA, 19 nt, Artificial Sequence
  Description of Artificial Sequence: Synthetic oligonucleotide
aacgucucagccucagucu

SEQ ID NO: 2201769 - RNA, 19 nt, Artificial Sequence
  Description of Artificial Sequence: Synthetic oligonucleotide
ucuggaguguugcccaucc

SEQ ID NO: 2201770 - RNA, 19 nt, Artificial Sequence
  Description of Artificial Sequence: Synthetic oligonucleotide
aagacgaaacuccacccaa

SEQ ID NO: 2201771 - RNA, 19 nt, Artificial Sequence
  Description of Artificial Sequence: Synthetic oligonucleotide
aggauuuuacugucacuuc

SEQ ID NO: 2201772 - RNA, 19 nt, Artificial Sequence
  Description of Artificial Sequence: Synthetic oligonucleotide
cuugguaucuggaugccuc

SEQ ID NO: 2201773 - RNA, 19 nt, Artificial Sequence
  Description of Artificial Sequence: Synthetic oligonucleotide
caaaauccucaaaagacga

SEQ ID NO: 2201774 - RNA, 19 nt, Artificial Sequence
  Description of Artificial Sequence: Synthetic oligonucleotide
caaugguaaaggauuuuac

SEQ ID NO: 2201775 - RNA, 19 nt, Artificial Sequence
  Description of Artificial Sequence: Synthetic oligonucleotide
ugguauauggacgcugucc

SEQ ID NO: 2201776 - RNA, 19 nt, Artificial Sequence
  Description of Artificial Sequence: Synthetic oligonucleotide
uaagcgcuagcaucguucc

SEQ ID NO: 2201777 - RNA, 19 nt, Artificial Sequence
  Description of Artificial Sequence: Synthetic oligonucleotide
acgaaacuccacccaaacg

SEQ ID NO: 2201778 - RNA, 19 nt, Artificial Sequence
  Description of Artificial Sequence: Synthetic oligonucleotide
cugugucgauccaugaugc

SEQ ID NO: 2201779 - RNA, 19 nt, Artificial Sequence
  Description of Artificial Sequence: Synthetic oligonucleotide
caucagagacaagacaggg

SEQ ID NO: 2201780 - RNA, 19 nt, Artificial Sequence
  Description of Artificial Sequence: Synthetic oligonucleotide
caaacucccacucuucuuc

SEQ ID NO: 2201781 - RNA, 19 nt, Artificial Sequence
  Description of Artificial Sequence: Synthetic oligonucleotide
ucacguguaccaccggaag

SEQ ID NO: 2201782 - RNA, 19 nt, Artificial Sequence
  Description of Artificial Sequence: Synthetic oligonucleotide
caugguaggagccugggca

SEQ ID NO: 2201783 - RNA, 19 nt, Artificial Sequence
  Description of Artificial Sequence: Synthetic oligonucleotide
cuuuggggaacuuucccug

SEQ ID NO: 2201784 - RNA, 19 nt, Artificial Sequence
  Description of Artificial Sequence: Synthetic oligonucleotide
guguugcccauccuggugg

SEQ ID NO: 2201785 - RNA, 19 nt, Artificial Sequence
  Description of Artificial Sequence: Synthetic oligonucleotide
aacagacggcaucugauuu

SEQ ID NO: 2201786 - RNA, 19 nt, Artificial Sequence
  Description of Artificial Sequence: Synthetic oligonucleotide
uucucccgaacaaacuccc

SEQ ID NO: 2201787 - RNA, 19 nt, Artificial Sequence
  Description of Artificial Sequence: Synthetic oligonucleotide
acgcuguccauucccacac

SEQ ID NO: 2201788 - RNA, 19 nt, Artificial Sequence
  Description of Artificial Sequence: Synthetic oligonucleotide
ugacuggaaauacaucaau

SEQ ID NO: 2201789 - RNA, 19 nt, Artificial Sequence
  Description of Artificial Sequence: Synthetic oligonucleotide
uuuugcacugguugccacc

SEQ ID NO: 2201790 - RNA, 19 nt, Artificial Sequence
  Description of Artificial Sequence: Synthetic oligonucleotide
gucauauaguccauaguug

SEQ ID NO: 2201791 - RNA, 19 nt, Artificial Sequence
  Description of Artificial Sequence: Synthetic oligonucleotide
ucaaugguaaaggauuuua

SEQ ID NO: 2201792 - RNA, 19 nt, Artificial Sequence
  Description of Artificial Sequence: Synthetic oligonucleotide
uguaccaccggaagcucca

SEQ ID NO: 2201793 - RNA, 19 nt, Artificial Sequence
  Description of Artificial Sequence: Synthetic oligonucleotide
auuggugcgguuuggcuga

SEQ ID NO: 2201794 - RNA, 19 nt, Artificial Sequence
  Description of Artificial Sequence: Synthetic oligonucleotide
ggagacaaaauccucaaaa

SEQ ID NO: 2201795 - RNA, 19 nt, Artificial Sequence
  Description of Artificial Sequence: Synthetic oligonucleotide
ggcauuuccuagcugaagc

SEQ ID NO: 2201796 - RNA, 19 nt, Artificial Sequence
  Description of Artificial Sequence: Synthetic oligonucleotide
ccugaaaucuuuauuggug

SEQ ID NO: 2201797 - RNA, 19 nt, Artificial Sequence
  Description of Artificial Sequence: Synthetic oligonucleotide
gauugguauauggacgcug

SEQ ID NO: 2201798 - RNA, 19 nt, Artificial Sequence
  Description of Artificial Sequence: Synthetic oligonucleotide
auccucaaaagacgaaacu

SEQ ID NO: 2201799 - RNA, 19 nt, Artificial Sequence
  Description of Artificial Sequence: Synthetic oligonucleotide
gacgaaacuccacccaaac

SEQ ID NO: 2201800 - RNA, 19 nt, Artificial Sequence
  Description of Artificial Sequence: Synthetic oligonucleotide
ggcagauugguauauggac

SEQ ID NO: 2201801 - RNA, 19 nt, Artificial Sequence
  Description of Artificial Sequence: Synthetic oligonucleotide
uuauuggugacuggaaaua

SEQ ID NO: 2201802 - RNA, 19 nt, Artificial Sequence
  Description of Artificial Sequence: Synthetic oligonucleotide
uugucugaggcugaaucug

SEQ ID NO: 2201803 - RNA, 19 nt, Artificial Sequence
  Description of Artificial Sequence: Synthetic oligonucleotide
ucugauuugcuugauucua

SEQ ID NO: 2201804 - RNA, 19 nt, Artificial Sequence
  Description of Artificial Sequence: Synthetic oligonucleotide
accgucuucagcucuguca

SEQ ID NO: 2201805 - RNA, 19 nt, Artificial Sequence
  Description of Artificial Sequence: Synthetic oligonucleotide
ugugcuggaagcgcagcgg

SEQ ID NO: 2201806 - RNA, 19 nt, Artificial Sequence
  Description of Artificial Sequence: Synthetic oligonucleotide
agacaagacagggagcgag

SEQ ID NO: 2201807 - RNA, 19 nt, Artificial Sequence
  Description of Artificial Sequence: Synthetic oligonucleotide
ugccuuuugcacugguugc

SEQ ID NO: 2201808 - RNA, 19 nt, Artificial Sequence
  Description of Artificial Sequence: Synthetic oligonucleotide
aucguuccagcucacgugu

SEQ ID NO: 2201809 - RNA, 19 nt, Artificial Sequence
  Description of Artificial Sequence: Synthetic oligonucleotide
cuagcaucguuccagcuca

SEQ ID NO: 2201810 - RNA, 19 nt, Artificial Sequence
  Description of Artificial Sequence: Synthetic oligonucleotide
uuuggggaacuuucccugc

SEQ ID NO: 2201811 - RNA, 19 nt, Artificial Sequence
  Description of Artificial Sequence: Synthetic oligonucleotide
aaggauaaaccugacccuu

SEQ ID NO: 2201812 - RNA, 19 nt, Artificial Sequence
  Description of Artificial Sequence: Synthetic oligonucleotide
aaacucccacucuucuucu

SEQ ID NO: 2201813 - RNA, 19 nt, Artificial Sequence
  Description of Artificial Sequence: Synthetic oligonucleotide
gaggacacgcauguccugg

SEQ ID NO: 2201814 - RNA, 19 nt, Artificial Sequence
  Description of Artificial Sequence: Synthetic oligonucleotide
acagacggcaucugauuug

SEQ ID NO: 2201815 - RNA, 19 nt, Artificial Sequence
  Description of Artificial Sequence: Synthetic oligonucleotide
gauuuuacugucacuucuc

SEQ ID NO: 2201816 - RNA, 19 nt, Artificial Sequence
  Description of Artificial Sequence: Synthetic oligonucleotide
cacaaauuggugcgguuug

SEQ ID NO: 2201817 - RNA, 19 nt, Artificial Sequence
  Description of Artificial Sequence: Synthetic oligonucleotide
ugcgcaguaagcgcuagca

SEQ ID NO: 2201818 - RNA, 19 nt, Artificial Sequence
  Description of Artificial Sequence: Synthetic oligonucleotide
caucucugccaucuggagc

SEQ ID NO: 2201819 - RNA, 19 nt, Artificial Sequence
  Description of Artificial Sequence: Synthetic oligonucleotide
cucucgaaugccagagccg

SEQ ID NO: 2201820 - RNA, 19 nt, Artificial Sequence
  Description of Artificial Sequence: Synthetic oligonucleotide
agaacugacaggagcuuuc

SEQ ID NO: 2201821 - RNA, 19 nt, Artificial Sequence
  Description of Artificial Sequence: Synthetic oligonucleotide
agcgcuagcaucguuccag

SEQ ID NO: 2201822 - RNA, 19 nt, Artificial Sequence
  Description of Artificial Sequence: Synthetic oligonucleotide
gguauauggacgcugucca

SEQ ID NO: 2201823 - RNA, 19 nt, Artificial Sequence
  Description of Artificial Sequence: Synthetic oligonucleotide
uuugcacugguugccacca

SEQ ID NO: 2201824 - RNA, 19 nt, Artificial Sequence
  Description of Artificial Sequence: Synthetic oligonucleotide
gcaguaagcgcuagcaucg

SEQ ID NO: 2201825 - RNA, 19 nt, Artificial Sequence
  Description of Artificial Sequence: Synthetic oligonucleotide
aaaaugccuuuugcacugg

SEQ ID NO: 2201826 - RNA, 19 nt, Artificial Sequence
  Description of Artificial Sequence: Synthetic oligonucleotide
ugcuugauucuaagcucag

SEQ ID NO: 2201827 - RNA, 19 nt, Artificial Sequence
  Description of Artificial Sequence: Synthetic oligonucleotide
aggacacgcauguccuggc

SEQ ID NO: 2201828 - RNA, 19 nt, Artificial Sequence
  Description of Artificial Sequence: Synthetic oligonucleotide
gcugugucgauccaugaug

SEQ ID NO: 2201829 - RNA, 19 nt, Artificial Sequence
  Description of Artificial Sequence: Synthetic oligonucleotide
caucguuccagcucacgug

SEQ ID NO: 2201830 - RNA, 19 nt, Artificial Sequence
  Description of Artificial Sequence: Synthetic oligonucleotide
gacaagacagggagcgagg

SEQ ID NO: 2201831 - RNA, 19 nt, Artificial Sequence
  Description of Artificial Sequence: Synthetic oligonucleotide
aaaaccgucuucagcucug

SEQ ID NO: 2201832 - RNA, 19 nt, Artificial Sequence
  Description of Artificial Sequence: Synthetic oligonucleotide
cugguugccaccagagaac

SEQ ID NO: 2201833 - RNA, 19 nt, Artificial Sequence
  Description of Artificial Sequence: Synthetic oligonucleotide
uuggggaacuuucccugcc

SEQ ID NO: 2201834 - RNA, 19 nt, Artificial Sequence
  Description of Artificial Sequence: Synthetic oligonucleotide
gagccugggcauuuccuag

SEQ ID NO: 2201835 - RNA, 19 nt, Artificial Sequence
  Description of Artificial Sequence: Synthetic oligonucleotide
ugcacugguugccaccaga

SEQ ID NO: 2201836 - RNA, 19 nt, Artificial Sequence
  Description of Artificial Sequence: Synthetic oligonucleotide
gguaucuggaugccucugg

SEQ ID NO: 2201837 - RNA, 19 nt, Artificial Sequence
  Description of Artificial Sequence: Synthetic oligonucleotide
agacagggagcgaggaacc

SEQ ID NO: 2201838 - RNA, 19 nt, Artificial Sequence
  Description of Artificial Sequence: Synthetic oligonucleotide
gugucgauccaugaugccc

SEQ ID NO: 2201839 - RNA, 19 nt, Artificial Sequence
  Description of Artificial Sequence: Synthetic oligonucleotide
gacacgcauguccuggcug

SEQ ID NO: 2201840 - RNA, 19 nt, Artificial Sequence
  Description of Artificial Sequence: Synthetic oligonucleotide
cagcucacguguaccaccg

SEQ ID NO: 2201841 - RNA, 19 nt, Artificial Sequence
  Description of Artificial Sequence: Synthetic oligonucleotide
aaaauccucaaaagacgaa

SEQ ID NO: 2201842 - RNA, 19 nt, Artificial Sequence
  Description of Artificial Sequence: Synthetic oligonucleotide
gguugucugaggcugaauc

SEQ ID NO: 2201843 - RNA, 19 nt, Artificial Sequence
  Description of Artificial Sequence: Synthetic oligonucleotide
auugguauauggacgcugu

SEQ ID NO: 2201844 - RNA, 19 nt, Artificial Sequence
  Description of Artificial Sequence: Synthetic oligonucleotide
ugaaaaccgucuucagcuc

SEQ ID NO: 2201845 - RNA, 19 nt, Artificial Sequence
  Description of Artificial Sequence: Synthetic oligonucleotide
agcgaggaacccaugcugg

SEQ ID NO: 2201846 - RNA, 19 nt, Artificial Sequence
  Description of Artificial Sequence: Synthetic oligonucleotide
gacaggagcuuucucuauc

SEQ ID NO: 2201847 - RNA, 19 nt, Artificial Sequence
  Description of Artificial Sequence: Synthetic oligonucleotide
ugccucuggaacgugguca

SEQ ID NO: 2201848 - RNA, 19 nt, Artificial Sequence
  Description of Artificial Sequence: Synthetic oligonucleotide
cugaaucuggaguguugcc

SEQ ID NO: 2201849 - RNA, 19 nt, Artificial Sequence
  Description of Artificial Sequence: Synthetic oligonucleotide
gaaacuccacccaaacguc

SEQ ID NO: 2201850 - RNA, 19 nt, Artificial Sequence
  Description of Artificial Sequence: Synthetic oligonucleotide
guugccaccagagaacaga

SEQ ID NO: 2201851 - RNA, 19 nt, Artificial Sequence
  Description of Artificial Sequence: Synthetic oligonucleotide
cacguguaccaccggaagc

SEQ ID NO: 2201852 - RNA, 19 nt, Artificial Sequence
  Description of Artificial Sequence: Synthetic oligonucleotide
aggcauucacuggugacag

SEQ ID NO: 2201853 - RNA, 19 nt, Artificial Sequence
  Description of Artificial Sequence: Synthetic oligonucleotide
caaauuggugcgguuuggc

SEQ ID NO: 2201854 - RNA, 19 nt, Artificial Sequence
  Description of Artificial Sequence: Synthetic oligonucleotide
uauauggacgcuguccauu

SEQ ID NO: 2201855 - RNA, 19 nt, Artificial Sequence
  Description of Artificial Sequence: Synthetic oligonucleotide
ucccacacauugcccauga

SEQ ID NO: 2201856 - RNA, 19 nt, Artificial Sequence
  Description of Artificial Sequence: Synthetic oligonucleotide
acguguaccaccggaagcu

SEQ ID NO: 2201857 - RNA, 19 nt, Artificial Sequence
  Description of Artificial Sequence: Synthetic oligonucleotide
ugugucgauccaugaugcc

SEQ ID NO: 2201858 - RNA, 19 nt, Artificial Sequence
  Description of Artificial Sequence: Synthetic oligonucleotide
ucgcccaccuggcagcugc

SEQ ID NO: 2201859 - RNA, 19 nt, Artificial Sequence
  Description of Artificial Sequence: Synthetic oligonucleotide
agggacacacagaacugac

SEQ ID NO: 2201860 - RNA, 19 nt, Artificial Sequence
  Description of Artificial Sequence: Synthetic oligonucleotide
ggucauauaguccauaguu

SEQ ID NO: 2201861 - RNA, 19 nt, Artificial Sequence
  Description of Artificial Sequence: Synthetic oligonucleotide
guuggccugugcuggaagc

SEQ ID NO: 2201862 - RNA, 19 nt, Artificial Sequence
  Description of Artificial Sequence: Synthetic oligonucleotide
guaagcgcuagcaucguuc

SEQ ID NO: 2201863 - RNA, 19 nt, Artificial Sequence
  Description of Artificial Sequence: Synthetic oligonucleotide
aaacuccacccaaacgucu

SEQ ID NO: 2201864 - RNA, 19 nt, Artificial Sequence
  Description of Artificial Sequence: Synthetic oligonucleotide
cagagacaagacagggagc

SEQ ID NO: 2201865 - RNA, 19 nt, Artificial Sequence
  Description of Artificial Sequence: Synthetic oligonucleotide
uauggacgcuguccauucc

SEQ ID NO: 2201866 - RNA, 19 nt, Artificial Sequence
  Description of Artificial Sequence: Synthetic oligonucleotide
agauccuccuucaguuggc

SEQ ID NO: 2201867 - RNA, 19 nt, Artificial Sequence
  Description of Artificial Sequence: Synthetic oligonucleotide
aacucccacucuucuucug

SEQ ID NO: 2201868 - RNA, 19 nt, Artificial Sequence
  Description of Artificial Sequence: Synthetic oligonucleotide
acgucucagccucagucug

SEQ ID NO: 2201869 - RNA, 19 nt, Artificial Sequence
  Description of Artificial Sequence: Synthetic oligonucleotide
agcugcaccaugguaggag

SEQ ID NO: 2201870 - RNA, 19 nt, Artificial Sequence
  Description of Artificial Sequence: Synthetic oligonucleotide
cugguggugacccgagccc

SEQ ID NO: 2201871 - RNA, 19 nt, Artificial Sequence
  Description of Artificial Sequence: Synthetic oligonucleotide
ugguggugacccgagcccg

SEQ ID NO: 2201872 - RNA, 19 nt, Artificial Sequence
  Description of Artificial Sequence: Synthetic oligonucleotide
uggacgcuguccauuccca

SEQ ID NO: 2201873 - RNA, 19 nt, Artificial Sequence
  Description of Artificial Sequence: Synthetic oligonucleotide
gacgcuguccauucccaca

SEQ ID NO: 2201874 - RNA, 19 nt, Artificial Sequence
  Description of Artificial Sequence: Synthetic oligonucleotide
augcgcaguaagcgcuagc

SEQ ID NO: 2201875 - RNA, 19 nt, Artificial Sequence
  Description of Artificial Sequence: Synthetic oligonucleotide
auuggugacuggaaauaca

SEQ ID NO: 2201876 - RNA, 19 nt, Artificial Sequence
  Description of Artificial Sequence: Synthetic oligonucleotide
ugguugccaccagagaaca

SEQ ID NO: 2201877 - RNA, 19 nt, Artificial Sequence
  Description of Artificial Sequence: Synthetic oligonucleotide
cuuuugcacugguugccac

SEQ ID NO: 2201878 - RNA, 19 nt, Artificial Sequence
  Description of Artificial Sequence: Synthetic oligonucleotide
aggauaaaccugacccuuc

SEQ ID NO: 2201879 - RNA, 19 nt, Artificial Sequence
  Description of Artificial Sequence: Synthetic oligonucleotide
cuggaacguggucagggac

SEQ ID NO: 2201880 - RNA, 19 nt, Artificial Sequence
  Description of Artificial Sequence: Synthetic oligonucleotide
ccuagcugaagccugggac

SEQ ID NO: 2201881 - RNA, 19 nt, Artificial Sequence
  Description of Artificial Sequence: Synthetic oligonucleotide
uccacccaaacgucucagc

SEQ ID NO: 2201882 - RNA, 19 nt, Artificial Sequence
  Description of Artificial Sequence: Synthetic oligonucleotide
cccaugaggucauauaguc

SEQ ID NO: 2201883 - RNA, 19 nt, Artificial Sequence
  Description of Artificial Sequence: Synthetic oligonucleotide
cuaagcucaggggagacaa

SEQ ID NO: 2201884 - RNA, 19 nt, Artificial Sequence
  Description of Artificial Sequence: Synthetic oligonucleotide
gaaaaccgucuucagcucu

SEQ ID NO: 2201885 - RNA, 19 nt, Artificial Sequence
  Description of Artificial Sequence: Synthetic oligonucleotide
gaaauacaucaaugguaaa

SEQ ID NO: 2201886 - RNA, 19 nt, Artificial Sequence
  Description of Artificial Sequence: Synthetic oligonucleotide
aaucuggaguguugcccau

SEQ ID NO: 2201887 - RNA, 19 nt, Artificial Sequence
  Description of Artificial Sequence: Synthetic oligonucleotide
gacccgagcccggugauug

SEQ ID NO: 2201888 - RNA, 19 nt, Artificial Sequence
  Description of Artificial Sequence: Synthetic oligonucleotide
guaaaggauuuuacuguca

SEQ ID NO: 2201889 - RNA, 19 nt, Artificial Sequence
  Description of Artificial Sequence: Synthetic oligonucleotide
gugcgguuuggcugaaacc

SEQ ID NO: 2201890 - RNA, 19 nt, Artificial Sequence
  Description of Artificial Sequence: Synthetic oligonucleotide
ucuaagcucaggggagaca

SEQ ID NO: 2201891 - RNA, 19 nt, Artificial Sequence
  Description of Artificial Sequence: Synthetic oligonucleotide
ugcaccaugguaggagccu

SEQ ID NO: 2201892 - RNA, 19 nt, Artificial Sequence
  Description of Artificial Sequence: Synthetic oligonucleotide
uucacuggugacaguccau

SEQ ID NO: 2201893 - RNA, 19 nt, Artificial Sequence
  Description of Artificial Sequence: Synthetic oligonucleotide
accaccggaagcuccaguu

SEQ ID NO: 2201894 - RNA, 19 nt, Artificial Sequence
  Description of Artificial Sequence: Synthetic oligonucleotide
ccauaguuguucugugggg

SEQ ID NO: 2201895 - RNA, 19 nt, Artificial Sequence
  Description of Artificial Sequence: Synthetic oligonucleotide
gauaaaccugacccuucaa

SEQ ID NO: 2201896 - RNA, 19 nt, Artificial Sequence
  Description of Artificial Sequence: Synthetic oligonucleotide
gcugaaucuggaguguugc

SEQ ID NO: 2201897 - RNA, 19 nt, Artificial Sequence
  Description of Artificial Sequence: Synthetic oligonucleotide
ggugcgguuuggcugaaac

SEQ ID NO: 2201898 - RNA, 19 nt, Artificial Sequence
  Description of Artificial Sequence: Synthetic oligonucleotide
guuucucucgaaugccaga

SEQ ID NO: 2201899 - RNA, 19 nt, Artificial Sequence
  Description of Artificial Sequence: Synthetic oligonucleotide
uccuucaguuggccugugc

SEQ ID NO: 2201900 - RNA, 19 nt, Artificial Sequence
  Description of Artificial Sequence: Synthetic oligonucleotide
cugcaccaugguaggagcc

SEQ ID NO: 2201901 - RNA, 19 nt, Artificial Sequence
  Description of Artificial Sequence: Synthetic oligonucleotide
auucuaagcucaggggaga

SEQ ID NO: 2201902 - RNA, 19 nt, Artificial Sequence
  Description of Artificial Sequence: Synthetic oligonucleotide
ggauuuuacugucacuucu

SEQ ID NO: 2201903 - RNA, 19 nt, Artificial Sequence
  Description of Artificial Sequence: Synthetic oligonucleotide
uggaugcucagagauccuc

SEQ ID NO: 2201904 - RNA, 19 nt, Artificial Sequence
  Description of Artificial Sequence: Synthetic oligonucleotide
agcaucuguccccaucaaa

SEQ ID NO: 2201905 - RNA, 19 nt, Artificial Sequence
  Description of Artificial Sequence: Synthetic oligonucleotide
cugauuugcuugauucuaa

SEQ ID NO: 2201906 - RNA, 19 nt, Artificial Sequence
  Description of Artificial Sequence: Synthetic oligonucleotide
uugcccaugaggucauaua

SEQ ID NO: 2201907 - RNA, 19 nt, Artificial Sequence
  Description of Artificial Sequence: Synthetic oligonucleotide
acaagacagggagcgagga

SEQ ID NO: 2201908 - RNA, 19 nt, Artificial Sequence
  Description of Artificial Sequence: Synthetic oligonucleotide
uucuaagcucaggggagac

SEQ ID NO: 2201909 - RNA, 19 nt, Artificial Sequence
  Description of Artificial Sequence: Synthetic oligonucleotide
caguccaugaaaaccgucu

SEQ ID NO: 2201910 - RNA, 19 nt, Artificial Sequence
  Description of Artificial Sequence: Synthetic oligonucleotide
uggaagcgcagcggaagcc

SEQ ID NO: 2201911 - RNA, 19 nt, Artificial Sequence
  Description of Artificial Sequence: Synthetic oligonucleotide
cagagccgggaccugcagg

SEQ ID NO: 2201912 - RNA, 19 nt, Artificial Sequence
  Description of Artificial Sequence: Synthetic oligonucleotide
uuccuagcugaagccuggg

SEQ ID NO: 2201913 - RNA, 19 nt, Artificial Sequence
  Description of Artificial Sequence: Synthetic oligonucleotide
ccaugaggucauauagucc

SEQ ID NO: 2201914 - RNA, 19 nt, Artificial Sequence
  Description of Artificial Sequence: Synthetic oligonucleotide
gcuagcaucguuccagcuc

SEQ ID NO: 2201915 - RNA, 19 nt, Artificial Sequence
  Description of Artificial Sequence: Synthetic oligonucleotide
ugcaggcugccuccaaaau

SEQ ID NO: 2201916 - RNA, 19 nt, Artificial Sequence
  Description of Artificial Sequence: Synthetic oligonucleotide
ucucccgaacaaacucccu

SEQ ID NO: 2201917 - RNA, 19 nt, Artificial Sequence
  Description of Artificial Sequence: Synthetic oligonucleotide
ggauaaaccugacccuuca

SEQ ID NO: 2201918 - RNA, 19 nt, Artificial Sequence
  Description of Artificial Sequence: Synthetic oligonucleotide
caaggauaaaccugacccu

SEQ ID NO: 2201919 - RNA, 19 nt, Artificial Sequence
  Description of Artificial Sequence: Synthetic oligonucleotide
agcaucguuccagcucacg

SEQ ID NO: 2201920 - RNA, 19 nt, Artificial Sequence
  Description of Artificial Sequence: Synthetic oligonucleotide
gcauucacuggugacaguc

SEQ ID NO: 2201921 - RNA, 19 nt, Artificial Sequence
  Description of Artificial Sequence: Synthetic oligonucleotide
aagcgcuagcaucguucca

SEQ ID NO: 2201922 - RNA, 19 nt, Artificial Sequence
  Description of Artificial Sequence: Synthetic oligonucleotide
ccggaggacacgcaugucc

SEQ ID NO: 2201923 - RNA, 19 nt, Artificial Sequence
  Description of Artificial Sequence: Synthetic oligonucleotide
caccagagaacagacggca

SEQ ID NO: 2201924 - RNA, 19 nt, Artificial Sequence
  Description of Artificial Sequence: Synthetic oligonucleotide
uguugcccauccugguggu

SEQ ID NO: 2201925 - RNA, 19 nt, Artificial Sequence
  Description of Artificial Sequence: Synthetic oligonucleotide
aaaccgucuucagcucugu

SEQ ID NO: 2201926 - RNA, 19 nt, Artificial Sequence
  Description of Artificial Sequence: Synthetic oligonucleotide
ucucuaucucugccuggau

SEQ ID NO: 2201927 - RNA, 19 nt, Artificial Sequence
  Description of Artificial Sequence: Synthetic oligonucleotide
ggaugcucagagauccucc

SEQ ID NO: 2201928 - RNA, 19 nt, Artificial Sequence
  Description of Artificial Sequence: Synthetic oligonucleotide
ggaacuuucccugccacaa

SEQ ID NO: 2201929 - RNA, 19 nt, Artificial Sequence
  Description of Artificial Sequence: Synthetic oligonucleotide
uccugguggugacccgagc

SEQ ID NO: 2201930 - RNA, 19 nt, Artificial Sequence
  Description of Artificial Sequence: Synthetic oligonucleotide
ugcuggaagcgcagcggaa

SEQ ID NO: 2201931 - RNA, 19 nt, Artificial Sequence
  Description of Artificial Sequence: Synthetic oligonucleotide
agauugguauauggacgcu

SEQ ID NO: 2201932 - RNA, 19 nt, Artificial Sequence
  Description of Artificial Sequence: Synthetic oligonucleotide
uugcacugguugccaccag

SEQ ID NO: 2201933 - RNA, 19 nt, Artificial Sequence
  Description of Artificial Sequence: Synthetic oligonucleotide
aucaaugguaaaggauuuu

SEQ ID NO: 2201934 - RNA, 19 nt, Artificial Sequence
  Description of Artificial Sequence: Synthetic oligonucleotide
agagaacagacggcaucug

SEQ ID NO: 2201935 - RNA, 19 nt, Artificial Sequence
  Description of Artificial Sequence: Synthetic oligonucleotide
cucacguguaccaccggaa

SEQ ID NO: 2201936 - RNA, 19 nt, Artificial Sequence
  Description of Artificial Sequence: Synthetic oligonucleotide
aucuggaguguugcccauc

SEQ ID NO: 2201937 - RNA, 19 nt, Artificial Sequence
  Description of Artificial Sequence: Synthetic oligonucleotide
auugcccaugaggucauau

SEQ ID NO: 2201938 - RNA, 19 nt, Artificial Sequence
  Description of Artificial Sequence: Synthetic oligonucleotide
aguaagcgcuagcaucguu

SEQ ID NO: 2201939 - RNA, 19 nt, Artificial Sequence
  Description of Artificial Sequence: Synthetic oligonucleotide
agcucacguguaccaccgg

SEQ ID NO: 2201940 - RNA, 19 nt, Artificial Sequence
  Description of Artificial Sequence: Synthetic oligonucleotide
uaccaccggaagcuccagu

SEQ ID NO: 2201941 - RNA, 19 nt, Artificial Sequence
  Description of Artificial Sequence: Synthetic oligonucleotide
cccggugauuggcagagcc

SEQ ID NO: 2201942 - RNA, 19 nt, Artificial Sequence
  Description of Artificial Sequence: Synthetic oligonucleotide
gaacagacggcaucugauu

SEQ ID NO: 2201943 - RNA, 19 nt, Artificial Sequence
  Description of Artificial Sequence: Synthetic oligonucleotide
gacggcaucugauuugcuu

SEQ ID NO: 2201944 - RNA, 19 nt, Artificial Sequence
  Description of Artificial Sequence: Synthetic oligonucleotide
guguaccaccggaagcucc

SEQ ID NO: 2201945 - RNA, 19 nt, Artificial Sequence
  Description of Artificial Sequence: Synthetic oligonucleotide
ccaugaaaaccgucuucag

SEQ ID NO: 2201946 - RNA, 19 nt, Artificial Sequence
  Description of Artificial Sequence: Synthetic oligonucleotide
aaacucccugaaaucuuua

SEQ ID NO: 2201947 - RNA, 19 nt, Artificial Sequence
  Description of Artificial Sequence: Synthetic oligonucleotide
agcgcagcggaagcccagg

SEQ ID NO: 2201948 - RNA, 19 nt, Artificial Sequence
  Description of Artificial Sequence: Synthetic oligonucleotide
aucagcugugucgauccau

SEQ ID NO: 2201949 - RNA, 19 nt, Artificial Sequence
  Description of Artificial Sequence: Synthetic oligonucleotide
cgaaacuccacccaaacgu

SEQ ID NO: 2201950 - RNA, 19 nt, Artificial Sequence
  Description of Artificial Sequence: Synthetic oligonucleotide
caucaaugguaaaggauuu

SEQ ID NO: 2201951 - RNA, 19 nt, Artificial Sequence
  Description of Artificial Sequence: Synthetic oligonucleotide
cuccacccaaacgucucag

SEQ ID NO: 2201952 - RNA, 19 nt, Artificial Sequence
  Description of Artificial Sequence: Synthetic oligonucleotide
uggcuggcagauugguaua

SEQ ID NO: 2201953 - RNA, 19 nt, Artificial Sequence
  Description of Artificial Sequence: Synthetic oligonucleotide
aagcgcagcggaagcccag

SEQ ID NO: 2201954 - RNA, 19 nt, Artificial Sequence
  Description of Artificial Sequence: Synthetic oligonucleotide
gcacugguugccaccagag

SEQ ID NO: 2201955 - RNA, 19 nt, Artificial Sequence
  Description of Artificial Sequence: Synthetic oligonucleotide
uggugacccgagcccggug

SEQ ID NO: 2201956 - RNA, 19 nt, Artificial Sequence
  Description of Artificial Sequence: Synthetic oligonucleotide
cccgccaugcgcaguaagc

SEQ ID NO: 2201957 - RNA, 19 nt, Artificial Sequence
  Description of Artificial Sequence: Synthetic oligonucleotide
ccacucuucuucugugggc

SEQ ID NO: 2201958 - RNA, 19 nt, Artificial Sequence
  Description of Artificial Sequence: Synthetic oligonucleotide
caugcgcaguaagcgcuag

SEQ ID NO: 2201959 - RNA, 19 nt, Artificial Sequence
  Description of Artificial Sequence: Synthetic oligonucleotide
gaagcgcagcggaagccca

SEQ ID NO: 2201960 - RNA, 19 nt, Artificial Sequence
  Description of Artificial Sequence: Synthetic oligonucleotide
cagggacacacagaacuga

SEQ ID NO: 2201961 - RNA, 19 nt, Artificial Sequence
  Description of Artificial Sequence: Synthetic oligonucleotide
cauauaguccauaguuguu

SEQ ID NO: 2201962 - RNA, 19 nt, Artificial Sequence
  Description of Artificial Sequence: Synthetic oligonucleotide
acccgagcccggugauugg

SEQ ID NO: 2201963 - RNA, 19 nt, Artificial Sequence
  Description of Artificial Sequence: Synthetic oligonucleotide
cccagguugucugaggcug

SEQ ID NO: 2201964 - RNA, 19 nt, Artificial Sequence
  Description of Artificial Sequence: Synthetic oligonucleotide
ggggaacuuucccugccac

SEQ ID NO: 2201965 - RNA, 19 nt, Artificial Sequence
  Description of Artificial Sequence: Synthetic oligonucleotide
gaugccucuggaacguggu

SEQ ID NO: 2201966 - RNA, 19 nt, Artificial Sequence
  Description of Artificial Sequence: Synthetic oligonucleotide
agacgaaacuccacccaaa

SEQ ID NO: 2201967 - RNA, 19 nt, Artificial Sequence
  Description of Artificial Sequence: Synthetic oligonucleotide
cagagaacagacggcaucu

SEQ ID NO: 2201968 - RNA, 19 nt, Artificial Sequence
  Description of Artificial Sequence: Synthetic oligonucleotide
cauuuccuagcugaagccu

SEQ ID NO: 2201969 - RNA, 19 nt, Artificial Sequence
  Description of Artificial Sequence: Synthetic oligonucleotide
cugaagccugggacuggac

SEQ ID NO: 2201970 - RNA, 19 nt, Artificial Sequence
  Description of Artificial Sequence: Synthetic oligonucleotide
gccuuuugcacugguugcc

SEQ ID NO: 2201971 - RNA, 19 nt, Artificial Sequence
  Description of Artificial Sequence: Synthetic oligonucleotide
gcucacguguaccaccgga

SEQ ID NO: 2201972 - RNA, 19 nt, Artificial Sequence
  Description of Artificial Sequence: Synthetic oligonucleotide
ccgccaugcgcaguaagcg

SEQ ID NO: 2201973 - RNA, 19 nt, Artificial Sequence
  Description of Artificial Sequence: Synthetic oligonucleotide
gcgguuuggcugaaaccgg

SEQ ID NO: 2201974 - RNA, 19 nt, Artificial Sequence
  Description of Artificial Sequence: Synthetic oligonucleotide
aggagccugggcauuuccu

SEQ ID NO: 2201975 - RNA, 19 nt, Artificial Sequence
  Description of Artificial Sequence: Synthetic oligonucleotide
ucguuccagcucacgugua

SEQ ID NO: 2201976 - RNA, 19 nt, Artificial Sequence
  Description of Artificial Sequence: Synthetic oligonucleotide
cacccaaacgucucagccu

SEQ ID NO: 2201977 - RNA, 19 nt, Artificial Sequence
  Description of Artificial Sequence: Synthetic oligonucleotide
ggcugaaucuggaguguug

SEQ ID NO: 2201978 - RNA, 19 nt, Artificial Sequence
  Description of Artificial Sequence: Synthetic oligonucleotide
gacaguccaugaaaaccgu

SEQ ID NO: 2201979 - RNA, 19 nt, Artificial Sequence
  Description of Artificial Sequence: Synthetic oligonucleotide
uagcaucguuccagcucac

SEQ ID NO: 2201980 - RNA, 19 nt, Artificial Sequence
  Description of Artificial Sequence: Synthetic oligonucleotide
gggcauuuccuagcugaag

SEQ ID NO: 2201981 - RNA, 19 nt, Artificial Sequence
  Description of Artificial Sequence: Synthetic oligonucleotide
ggaggacacgcauguccug

SEQ ID NO: 2201982 - RNA, 19 nt, Artificial Sequence
  Description of Artificial Sequence: Synthetic oligonucleotide
gggaacuuucccugccaca

SEQ ID NO: 2201983 - RNA, 19 nt, Artificial Sequence
  Description of Artificial Sequence: Synthetic oligonucleotide
uggaugccucuggaacgug

SEQ ID NO: 2201984 - RNA, 19 nt, Artificial Sequence
  Description of Artificial Sequence: Synthetic oligonucleotide
auccugguggugacccgag

SEQ ID NO: 2201985 - RNA, 19 nt, Artificial Sequence
  Description of Artificial Sequence: Synthetic oligonucleotide
gcaucguuccagcucacgu

SEQ ID NO: 2201986 - RNA, 19 nt, Artificial Sequence
  Description of Artificial Sequence: Synthetic oligonucleotide
cagagccaucagcuguguc

SEQ ID NO: 2201987 - RNA, 19 nt, Artificial Sequence
  Description of Artificial Sequence: Synthetic oligonucleotide
cccucgggccgcaaacucc

SEQ ID NO: 2201988 - RNA, 19 nt, Artificial Sequence
  Description of Artificial Sequence: Synthetic oligonucleotide
guaccaccggaagcuccag

SEQ ID NO: 2201989 - RNA, 19 nt, Artificial Sequence
  Description of Artificial Sequence: Synthetic oligonucleotide
ccaugguaggagccugggc

SEQ ID NO: 2201990 - RNA, 19 nt, Artificial Sequence
  Description of Artificial Sequence: Synthetic oligonucleotide
ccaaacgucucagccucag

SEQ ID NO: 2201991 - RNA, 19 nt, Artificial Sequence
  Description of Artificial Sequence: Synthetic oligonucleotide
guauauggacgcuguccau

SEQ ID NO: 2201992 - RNA, 19 nt, Artificial Sequence
  Description of Artificial Sequence: Synthetic oligonucleotide
gguggugacccgagcccgg

SEQ ID NO: 2201993 - RNA, 19 nt, Artificial Sequence
  Description of Artificial Sequence: Synthetic oligonucleotide
cacgcauguccuggcuggc

SEQ ID NO: 2201994 - RNA, 19 nt, Artificial Sequence
  Description of Artificial Sequence: Synthetic oligonucleotide
ggacgcuguccauucccac

SEQ ID NO: 2201995 - RNA, 19 nt, Artificial Sequence
  Description of Artificial Sequence: Synthetic oligonucleotide
gcgcuagcaucguuccagc

SEQ ID NO: 2201996 - RNA, 19 nt, Artificial Sequence
  Description of Artificial Sequence: Synthetic oligonucleotide
aggcugaaucuggaguguu

SEQ ID NO: 2201997 - RNA, 19 nt, Artificial Sequence
  Description of Artificial Sequence: Synthetic oligonucleotide
gcaccaugguaggagccug

SEQ ID NO: 2201998 - RNA, 19 nt, Artificial Sequence
  Description of Artificial Sequence: Synthetic oligonucleotide
acgcauguccuggcuggca

SEQ ID NO: 2201999 - RNA, 19 nt, Artificial Sequence
  Description of Artificial Sequence: Synthetic oligonucleotide
gucacuucucgggcagguc

SEQ ID NO: 2202000 - RNA, 19 nt, Artificial Sequence
  Description of Artificial Sequence: Synthetic oligonucleotide
cacuucucgggcagguccu

SEQ ID NO: 2202001 - RNA, 19 nt, Artificial Sequence
  Description of Artificial Sequence: Synthetic oligonucleotide
ugguaggagccugggcauu

SEQ ID NO: 2202002 - RNA, 19 nt, Artificial Sequence
  Description of Artificial Sequence: Synthetic oligonucleotide
ccuucaguuggccugugcu

SEQ ID NO: 2202003 - RNA, 19 nt, Artificial Sequence
  Description of Artificial Sequence: Synthetic oligonucleotide
cgccaugcgcaguaagcgc

SEQ ID NO: 2202004 - RNA, 19 nt, Artificial Sequence
  Description of Artificial Sequence: Synthetic oligonucleotide
guaggagccugggcauuuc

SEQ ID NO: 2202005 - RNA, 19 nt, Artificial Sequence
  Description of Artificial Sequence: Synthetic oligonucleotide
ugccuccaaaaugccuuuu

SEQ ID NO: 2202006 - RNA, 19 nt, Artificial Sequence
  Description of Artificial Sequence: Synthetic oligonucleotide
gguugccaccagagaacag

SEQ ID NO: 2202007 - RNA, 19 nt, Artificial Sequence
  Description of Artificial Sequence: Synthetic oligonucleotide
cagggagcgaggaacccau

SEQ ID NO: 2202008 - RNA, 19 nt, Artificial Sequence
  Description of Artificial Sequence: Synthetic oligonucleotide
caucagcugugucgaucca

SEQ ID NO: 2202009 - RNA, 19 nt, Artificial Sequence
  Description of Artificial Sequence: Synthetic oligonucleotide
gggccgcaaacucccacuc

SEQ ID NO: 2202010 - RNA, 19 nt, Artificial Sequence
  Description of Artificial Sequence: Synthetic oligonucleotide
cguuccagcucacguguac

SEQ ID NO: 2202011 - RNA, 19 nt, Artificial Sequence
  Description of Artificial Sequence: Synthetic oligonucleotide
cuggaugccucuggaacgu

SEQ ID NO: 2202012 - RNA, 19 nt, Artificial Sequence
  Description of Artificial Sequence: Synthetic oligonucleotide
ccgcaaacucccacucuuc

SEQ ID NO: 2202013 - RNA, 19 nt, Artificial Sequence
  Description of Artificial Sequence: Synthetic oligonucleotide
acguggucagggacacaca

SEQ ID NO: 2202014 - RNA, 19 nt, Artificial Sequence
  Description of Artificial Sequence: Synthetic oligonucleotide
cgagcccggugauuggcag

SEQ ID NO: 2202015 - RNA, 19 nt, Artificial Sequence
  Description of Artificial Sequence: Synthetic oligonucleotide
ccugggcauuuccuagcug

SEQ ID NO: 2202016 - RNA, 19 nt, Artificial Sequence
  Description of Artificial Sequence: Synthetic oligonucleotide
ugacccgagcccggugauu

SEQ ID NO: 2202017 - RNA, 19 nt, Artificial Sequence
  Description of Artificial Sequence: Synthetic oligonucleotide
caaacgucucagccucagu

SEQ ID NO: 2202018 - RNA, 19 nt, Artificial Sequence
  Description of Artificial Sequence: Synthetic oligonucleotide
cagcggaagcccagguugu

SEQ ID NO: 2202019 - RNA, 19 nt, Artificial Sequence
  Description of Artificial Sequence: Synthetic oligonucleotide
ccggugauuggcagagcca

SEQ ID NO: 2202020 - RNA, 19 nt, Artificial Sequence
  Description of Artificial Sequence: Synthetic oligonucleotide
agacggcaucugauuugcu

SEQ ID NO: 2202021 - RNA, 19 nt, Artificial Sequence
  Description of Artificial Sequence: Synthetic oligonucleotide
gccaugcgcaguaagcgcu

SEQ ID NO: 2202022 - RNA, 19 nt, Artificial Sequence
  Description of Artificial Sequence: Synthetic oligonucleotide
gccgcaaacucccacucuu

SEQ ID NO: 2202023 - RNA, 19 nt, Artificial Sequence
  Description of Artificial Sequence: Synthetic oligonucleotide
ccgaacaaacucccugaaa

SEQ ID NO: 2202024 - RNA, 19 nt, Artificial Sequence
  Description of Artificial Sequence: Synthetic oligonucleotide
agggagcgaggaacccaug

SEQ ID NO: 2202025 - RNA, 19 nt, Artificial Sequence
  Description of Artificial Sequence: Synthetic oligonucleotide
cuaucucugccuggaugcu

SEQ ID NO: 2202026 - RNA, 19 nt, Artificial Sequence
  Description of Artificial Sequence: Synthetic oligonucleotide
cagguugucugaggcugaa

SEQ ID NO: 2202027 - RNA, 19 nt, Artificial Sequence
  Description of Artificial Sequence: Synthetic oligonucleotide
ggcagguccuucacccauc

SEQ ID NO: 2202028 - RNA, 19 nt, Artificial Sequence
  Description of Artificial Sequence: Synthetic oligonucleotide
agccucagucugguacuuu

SEQ ID NO: 2202029 - RNA, 19 nt, Artificial Sequence
  Description of Artificial Sequence: Synthetic oligonucleotide
cuggaugcucagagauccu

SEQ ID NO: 2202030 - RNA, 19 nt, Artificial Sequence
  Description of Artificial Sequence: Synthetic oligonucleotide
cccgagcccggugauuggc

SEQ ID NO: 2202031 - RNA, 19 nt, Artificial Sequence
  Description of Artificial Sequence: Synthetic oligonucleotide
cccacacauugcccaugag

SEQ ID NO: 2202032 - RNA, 19 nt, Artificial Sequence
  Description of Artificial Sequence: Synthetic oligonucleotide
uuggugcgguuuggcugaa

SEQ ID NO: 2202033 - RNA, 19 nt, Artificial Sequence
  Description of Artificial Sequence: Synthetic oligonucleotide
ggacacgcauguccuggcu

SEQ ID NO: 2202034 - RNA, 19 nt, Artificial Sequence
  Description of Artificial Sequence: Synthetic oligonucleotide
cucgggccgcaaacuccca

SEQ ID NO: 2202035 - RNA, 19 nt, Artificial Sequence
  Description of Artificial Sequence: Synthetic oligonucleotide
uggugcgguuuggcugaaa

SEQ ID NO: 2202036 - RNA, 19 nt, Artificial Sequence
  Description of Artificial Sequence: Synthetic oligonucleotide
ccccucgggccgcaaacuc

SEQ ID NO: 2202037 - RNA, 19 nt, Artificial Sequence
  Description of Artificial Sequence: Synthetic oligonucleotide
gugacccgagcccggugau

SEQ ID NO: 2202038 - RNA, 19 nt, Artificial Sequence
  Description of Artificial Sequence: Synthetic oligonucleotide
ccggaagcuccaguuucuc

SEQ ID NO: 2202039 - RNA, 19 nt, Artificial Sequence
  Description of Artificial Sequence: Synthetic oligonucleotide
ccgagcccggugauuggca

SEQ ID NO: 2202040 - RNA, 19 nt, Artificial Sequence
  Description of Artificial Sequence: Synthetic oligonucleotide
ccacaaauuggugcgguuu

SEQ ID NO: 2202041 - RNA, 19 nt, Artificial Sequence
  Description of Artificial Sequence: Synthetic oligonucleotide
caguaagcgcuagcaucgu

SEQ ID NO: 2202042 - RNA, 19 nt, Artificial Sequence
  Description of Artificial Sequence: Synthetic oligonucleotide
ggcauucacuggugacagu

SEQ ID NO: 2202043 - RNA, 19 nt, Artificial Sequence
  Description of Artificial Sequence: Synthetic oligonucleotide
gcgcaguaagcgcuagcau

SEQ ID NO: 2202044 - RNA, 19 nt, Artificial Sequence
  Description of Artificial Sequence: Synthetic oligonucleotide
gguaggagccugggcauuu

SEQ ID NO: 2202045 - RNA, 19 nt, Artificial Sequence
  Description of Artificial Sequence: Synthetic oligonucleotide
cguguaccaccggaagcuc

SEQ ID NO: 2202046 - RNA, 19 nt, Artificial Sequence
  Description of Artificial Sequence: Synthetic oligonucleotide
ccaugcgcaguaagcgcua

SEQ ID NO: 2202047 - RNA, 19 nt, Artificial Sequence
  Description of Artificial Sequence: Synthetic oligonucleotide
cugucaccuuuggggaacu

SEQ ID NO: 2202048 - RNA, 19 nt, Artificial Sequence
  Description of Artificial Sequence: Synthetic oligonucleotide
gccacaaauuggugcgguu

SEQ ID NO: 2202049 - RNA, 19 nt, Artificial Sequence
  Description of Artificial Sequence: Synthetic oligonucleotide
ggcuggcagauugguauau

SEQ ID NO: 2202050 - RNA, 19 nt, Artificial Sequence
  Description of Artificial Sequence: Synthetic oligonucleotide
cccaaacgucucagccuca

SEQ ID NO: 2202051 - RNA, 19 nt, Artificial Sequence
  Description of Artificial Sequence: Synthetic oligonucleotide
gcggaagcccagguugucu

SEQ ID NO: 2202052 - RNA, 19 nt, Artificial Sequence
  Description of Artificial Sequence: Synthetic oligonucleotide
ggcaucugauuugcuugau

SEQ ID NO: 2202053 - RNA, 19 nt, Artificial Sequence
  Description of Artificial Sequence: Synthetic oligonucleotide
cgguuuggcugaaaccggu

SEQ ID NO: 2202054 - RNA, 19 nt, Artificial Sequence
  Description of Artificial Sequence: Synthetic oligonucleotide
ccuccuucaguuggccugu

SEQ ID NO: 2202055 - RNA, 19 nt, Artificial Sequence
  Description of Artificial Sequence: Synthetic oligonucleotide
gcccggugauuggcagagc

SEQ ID NO: 2202056 - RNA, 19 nt, Artificial Sequence
  Description of Artificial Sequence: Synthetic oligonucleotide
gcgcagcggaagcccaggu

SEQ ID NO: 2202057 - RNA, 19 nt, Artificial Sequence
  Description of Artificial Sequence: Synthetic oligonucleotide
cgcuguccauucccacaca

SEQ ID NO: 2202058 - RNA, 19 nt, Artificial Sequence
  Description of Artificial Sequence: Synthetic oligonucleotide
cgcagcggaagcccagguu

SEQ ID NO: 2202059 - RNA, 19 nt, Artificial Sequence
  Description of Artificial Sequence: Synthetic oligonucleotide
uagaauguuauaucgaggg

SEQ ID NO: 2202060 - RNA, 19 nt, Artificial Sequence
  Description of Artificial Sequence: Synthetic oligonucleotide
uguacugauagcuagggac

SEQ ID NO: 2202061 - RNA, 19 nt, Artificial Sequence
  Description of Artificial Sequence: Synthetic oligonucleotide
uguugcaauggcuagaggc

SEQ ID NO: 2202062 - RNA, 19 nt, Artificial Sequence
  Description of Artificial Sequence: Synthetic oligonucleotide
uuuacagacuccuuuguag

SEQ ID NO: 2202063 - RNA, 19 nt, Artificial Sequence
  Description of Artificial Sequence: Synthetic oligonucleotide
aaaaccaucuccuuuucaa

SEQ ID NO: 2202064 - RNA, 19 nt, Artificial Sequence
  Description of Artificial Sequence: Synthetic oligonucleotide
uugaaaggggccaugcccg

SEQ ID NO: 2202065 - RNA, 19 nt, Artificial Sequence
  Description of Artificial Sequence: Synthetic oligonucleotide
gauagcuagggacaauggg

SEQ ID NO: 2202066 - RNA, 19 nt, Artificial Sequence
  Description of Artificial Sequence: Synthetic oligonucleotide
uguuuucagacagugagag

SEQ ID NO: 2202067 - RNA, 19 nt, Artificial Sequence
  Description of Artificial Sequence: Synthetic oligonucleotide
uuauaggugaccucgucgc

SEQ ID NO: 2202068 - RNA, 19 nt, Artificial Sequence
  Description of Artificial Sequence: Synthetic oligonucleotide
gaauguuauaucgagggug

SEQ ID NO: 2202069 - RNA, 19 nt, Artificial Sequence
  Description of Artificial Sequence: Synthetic oligonucleotide
agugaaaacaaagcuguac

SEQ ID NO: 2202070 - RNA, 19 nt, Artificial Sequence
  Description of Artificial Sequence: Synthetic oligonucleotide
aauggcuagaggcugugcu

SEQ ID NO: 2202071 - RNA, 19 nt, Artificial Sequence
  Description of Artificial Sequence: Synthetic oligonucleotide
aagcuguacugauagcuag

SEQ ID NO: 2202072 - RNA, 19 nt, Artificial Sequence
  Description of Artificial Sequence: Synthetic oligonucleotide
gugaugaccaccucuacag

SEQ ID NO: 2202073 - RNA, 19 nt, Artificial Sequence
  Description of Artificial Sequence: Synthetic oligonucleotide
uaaaagccaccuuugaccu

SEQ ID NO: 2202074 - RNA, 19 nt, Artificial Sequence
  Description of Artificial Sequence: Synthetic oligonucleotide
ucuugggcgggauagagca

SEQ ID NO: 2202075 - RNA, 19 nt, Artificial Sequence
  Description of Artificial Sequence: Synthetic oligonucleotide
auagcuagggacaaugggg

SEQ ID NO: 2202076 - RNA, 19 nt, Artificial Sequence
  Description of Artificial Sequence: Synthetic oligonucleotide
gaacugaugacaugcccgg

SEQ ID NO: 2202077 - RNA, 19 nt, Artificial Sequence
  Description of Artificial Sequence: Synthetic oligonucleotide
uggagaacgaucccgggcc

SEQ ID NO: 2202078 - RNA, 19 nt, Artificial Sequence
  Description of Artificial Sequence: Synthetic oligonucleotide
caggaaaugcuugaaaggg

SEQ ID NO: 2202079 - RNA, 19 nt, Artificial Sequence
  Description of Artificial Sequence: Synthetic oligonucleotide
gguagaauguuauaucgag

SEQ ID NO: 2202080 - RNA, 19 nt, Artificial Sequence
  Description of Artificial Sequence: Synthetic oligonucleotide
aaccaugugucacccaaag

SEQ ID NO: 2202081 - RNA, 19 nt, Artificial Sequence
  Description of Artificial Sequence: Synthetic oligonucleotide
agagugaaaacaaagcugu

SEQ ID NO: 2202082 - RNA, 19 nt, Artificial Sequence
  Description of Artificial Sequence: Synthetic oligonucleotide
aauguuauaucgagggugu

SEQ ID NO: 2202083 - RNA, 19 nt, Artificial Sequence
  Description of Artificial Sequence: Synthetic oligonucleotide
ggcagaagcauuuacagac

SEQ ID NO: 2202084 - RNA, 19 nt, Artificial Sequence
  Description of Artificial Sequence: Synthetic oligonucleotide
ugauagcuagggacaaugg

SEQ ID NO: 2202085 - RNA, 19 nt, Artificial Sequence
  Description of Artificial Sequence: Synthetic oligonucleotide
auggagaacgaucccgggc

SEQ ID NO: 2202086 - RNA, 19 nt, Artificial Sequence
  Description of Artificial Sequence: Synthetic oligonucleotide
acugaugacaugcccggac

SEQ ID NO: 2202087 - RNA, 19 nt, Artificial Sequence
  Description of Artificial Sequence: Synthetic oligonucleotide
uuccacuggaacauacucc

SEQ ID NO: 2202088 - RNA, 19 nt, Artificial Sequence
  Description of Artificial Sequence: Synthetic oligonucleotide
gagcacaucuuauagguga

SEQ ID NO: 2202089 - RNA, 19 nt, Artificial Sequence
  Description of Artificial Sequence: Synthetic oligonucleotide
aucgaggguguccugcucc

SEQ ID NO: 2202090 - RNA, 19 nt, Artificial Sequence
  Description of Artificial Sequence: Synthetic oligonucleotide
uuguaugguagaauguuau

SEQ ID NO: 2202091 - RNA, 19 nt, Artificial Sequence
  Description of Artificial Sequence: Synthetic oligonucleotide
ugaccuggcgacacguucg

SEQ ID NO: 2202092 - RNA, 19 nt, Artificial Sequence
  Description of Artificial Sequence: Synthetic oligonucleotide
ugacauagcugaccuggcg

SEQ ID NO: 2202093 - RNA, 19 nt, Artificial Sequence
  Description of Artificial Sequence: Synthetic oligonucleotide
gaaaacaaagcuguacuga

SEQ ID NO: 2202094 - RNA, 19 nt, Artificial Sequence
  Description of Artificial Sequence: Synthetic oligonucleotide
ccaugugucacccaaagcc

SEQ ID NO: 2202095 - RNA, 19 nt, Artificial Sequence
  Description of Artificial Sequence: Synthetic oligonucleotide
uguuauaucgagggugucc

SEQ ID NO: 2202096 - RNA, 19 nt, Artificial Sequence
  Description of Artificial Sequence: Synthetic oligonucleotide
agccuggagggguaaaagc

SEQ ID NO: 2202097 - RNA, 19 nt, Artificial Sequence
  Description of Artificial Sequence: Synthetic oligonucleotide
cauagucucccucaagccc

SEQ ID NO: 2202098 - RNA, 19 nt, Artificial Sequence
  Description of Artificial Sequence: Synthetic oligonucleotide
ucagccggggugaugaagc

SEQ ID NO: 2202099 - RNA, 19 nt, Artificial Sequence
  Description of Artificial Sequence: Synthetic oligonucleotide
acucccuuccaggaaaugc

SEQ ID NO: 2202100 - RNA, 19 nt, Artificial Sequence
  Description of Artificial Sequence: Synthetic oligonucleotide
ugguagaauguuauaucga

SEQ ID NO: 2202101 - RNA, 19 nt, Artificial Sequence
  Description of Artificial Sequence: Synthetic oligonucleotide
caugcuuggugccuggugc

SEQ ID NO: 2202102 - RNA, 19 nt, Artificial Sequence
  Description of Artificial Sequence: Synthetic oligonucleotide
aaaugcuugaaaggggcca

SEQ ID NO: 2202103 - RNA, 19 nt, Artificial Sequence
  Description of Artificial Sequence: Synthetic oligonucleotide
uuccuuggccagcagaggc

SEQ ID NO: 2202104 - RNA, 19 nt, Artificial Sequence
  Description of Artificial Sequence: Synthetic oligonucleotide
aauagcccgacagaagacu

SEQ ID NO: 2202105 - RNA, 19 nt, Artificial Sequence
  Description of Artificial Sequence: Synthetic oligonucleotide
ucagaugacauagcugacc

SEQ ID NO: 2202106 - RNA, 19 nt, Artificial Sequence
  Description of Artificial Sequence: Synthetic oligonucleotide
uagcuagggacaauggggu

SEQ ID NO: 2202107 - RNA, 19 nt, Artificial Sequence
  Description of Artificial Sequence: Synthetic oligonucleotide
uauaucgaggguguccugc

SEQ ID NO: 2202108 - RNA, 19 nt, Artificial Sequence
  Description of Artificial Sequence: Synthetic oligonucleotide
uagcaggccaaccaugugu

SEQ ID NO: 2202109 - RNA, 19 nt, Artificial Sequence
  Description of Artificial Sequence: Synthetic oligonucleotide
aaaccaucuccuuuucaaa

SEQ ID NO: 2202110 - RNA, 19 nt, Artificial Sequence
  Description of Artificial Sequence: Synthetic oligonucleotide
cuagggaccacguugccuc

SEQ ID NO: 2202111 - RNA, 19 nt, Artificial Sequence
  Description of Artificial Sequence: Synthetic oligonucleotide
uggguccuagcaaaguggc

SEQ ID NO: 2202112 - RNA, 19 nt, Artificial Sequence
  Description of Artificial Sequence: Synthetic oligonucleotide
cuggguccuagcaaagugg

SEQ ID NO: 2202113 - RNA, 19 nt, Artificial Sequence
  Description of Artificial Sequence: Synthetic oligonucleotide
agacagggcccugugaagc

SEQ ID NO: 2202114 - RNA, 19 nt, Artificial Sequence
  Description of Artificial Sequence: Synthetic oligonucleotide
accaugugucacccaaagc

SEQ ID NO: 2202115 - RNA, 19 nt, Artificial Sequence
  Description of Artificial Sequence: Synthetic oligonucleotide
agcauuuacagacuccuuu

SEQ ID NO: 2202116 - RNA, 19 nt, Artificial Sequence
  Description of Artificial Sequence: Synthetic oligonucleotide
uguccaauagcccgacaga

SEQ ID NO: 2202117 - RNA, 19 nt, Artificial Sequence
  Description of Artificial Sequence: Synthetic oligonucleotide
ugaggccccaucuuguaug

SEQ ID NO: 2202118 - RNA, 19 nt, Artificial Sequence
  Description of Artificial Sequence: Synthetic oligonucleotide
acaauggggugacagagaa

SEQ ID NO: 2202119 - RNA, 19 nt, Artificial Sequence
  Description of Artificial Sequence: Synthetic oligonucleotide
aggccaaccaugugucacc

SEQ ID NO: 2202120 - RNA, 19 nt, Artificial Sequence
  Description of Artificial Sequence: Synthetic oligonucleotide
gaagccguggcccuuggac

SEQ ID NO: 2202121 - RNA, 19 nt, Artificial Sequence
  Description of Artificial Sequence: Synthetic oligonucleotide
agugaugaccaccucuaca

SEQ ID NO: 2202122 - RNA, 19 nt, Artificial Sequence
  Description of Artificial Sequence: Synthetic oligonucleotide
cagacuccuuuguagacag

SEQ ID NO: 2202123 - RNA, 19 nt, Artificial Sequence
  Description of Artificial Sequence: Synthetic oligonucleotide
cuuguugcaauggcuagag

SEQ ID NO: 2202124 - RNA, 19 nt, Artificial Sequence
  Description of Artificial Sequence: Synthetic oligonucleotide
ucuuguaugguagaauguu

SEQ ID NO: 2202125 - RNA, 19 nt, Artificial Sequence
  Description of Artificial Sequence: Synthetic oligonucleotide
caggucucaugcuuggugc

SEQ ID NO: 2202126 - RNA, 19 nt, Artificial Sequence
  Description of Artificial Sequence: Synthetic oligonucleotide
gaagucuguuccuuggcca

SEQ ID NO: 2202127 - RNA, 19 nt, Artificial Sequence
  Description of Artificial Sequence: Synthetic oligonucleotide
ggaacugaugacaugcccg

SEQ ID NO: 2202128 - RNA, 19 nt, Artificial Sequence
  Description of Artificial Sequence: Synthetic oligonucleotide
gacauagcugaccuggcga

SEQ ID NO: 2202129 - RNA, 19 nt, Artificial Sequence
  Description of Artificial Sequence: Synthetic oligonucleotide
agaauguuauaucgagggu

SEQ ID NO: 2202130 - RNA, 19 nt, Artificial Sequence
  Description of Artificial Sequence: Synthetic oligonucleotide
agaagacugaugcguuggg

SEQ ID NO: 2202131 - RNA, 19 nt, Artificial Sequence
  Description of Artificial Sequence: Synthetic oligonucleotide
gacacguucgacucgucca

SEQ ID NO: 2202132 - RNA, 19 nt, Artificial Sequence
  Description of Artificial Sequence: Synthetic oligonucleotide
auagcugaccuggcgacac

SEQ ID NO: 2202133 - RNA, 19 nt, Artificial Sequence
  Description of Artificial Sequence: Synthetic oligonucleotide
cuuccacuggaacauacuc

SEQ ID NO: 2202134 - RNA, 19 nt, Artificial Sequence
  Description of Artificial Sequence: Synthetic oligonucleotide
aggaaaugcuugaaagggg

SEQ ID NO: 2202135 - RNA, 19 nt, Artificial Sequence
  Description of Artificial Sequence: Synthetic oligonucleotide
ugaugacaugcccggacca

SEQ ID NO: 2202136 - RNA, 19 nt, Artificial Sequence
  Description of Artificial Sequence: Synthetic oligonucleotide
gaagaugucagggccacca

SEQ ID NO: 2202137 - RNA, 19 nt, Artificial Sequence
  Description of Artificial Sequence: Synthetic oligonucleotide
gucagccaagccuggaggg

SEQ ID NO: 2202138 - RNA, 19 nt, Artificial Sequence
  Description of Artificial Sequence: Synthetic oligonucleotide
ucaguggcggacagggccc

SEQ ID NO: 2202139 - RNA, 19 nt, Artificial Sequence
  Description of Artificial Sequence: Synthetic oligonucleotide
agcuuguugcaauggcuag

SEQ ID NO: 2202140 - RNA, 19 nt, Artificial Sequence
  Description of Artificial Sequence: Synthetic oligonucleotide
uggaagucuguuccuuggc

SEQ ID NO: 2202141 - RNA, 19 nt, Artificial Sequence
  Description of Artificial Sequence: Synthetic oligonucleotide
cccgacagaagacugaugc

SEQ ID NO: 2202142 - RNA, 19 nt, Artificial Sequence
  Description of Artificial Sequence: Synthetic oligonucleotide
gugucaaucucagggagcc

SEQ ID NO: 2202143 - RNA, 19 nt, Artificial Sequence
  Description of Artificial Sequence: Synthetic oligonucleotide
guucgacucguccagcagc

SEQ ID NO: 2202144 - RNA, 19 nt, Artificial Sequence
  Description of Artificial Sequence: Synthetic oligonucleotide
gagaugugcaggaagaugu

SEQ ID NO: 2202145 - RNA, 19 nt, Artificial Sequence
  Description of Artificial Sequence: Synthetic oligonucleotide
ucuuauaggugaccucguc

SEQ ID NO: 2202146 - RNA, 19 nt, Artificial Sequence
  Description of Artificial Sequence: Synthetic oligonucleotide
cugauagcuagggacaaug

SEQ ID NO: 2202147 - RNA, 19 nt, Artificial Sequence
  Description of Artificial Sequence: Synthetic oligonucleotide
uucgacucguccagcagcu

SEQ ID NO: 2202148 - RNA, 19 nt, Artificial Sequence
  Description of Artificial Sequence: Synthetic oligonucleotide
cugaugacaugcccggacc

SEQ ID NO: 2202149 - RNA, 19 nt, Artificial Sequence
  Description of Artificial Sequence: Synthetic oligonucleotide
accgucgcugagaaggucc

SEQ ID NO: 2202150 - RNA, 19 nt, Artificial Sequence
  Description of Artificial Sequence: Synthetic oligonucleotide
gguaaaagccaccuuugac

SEQ ID NO: 2202151 - RNA, 19 nt, Artificial Sequence
  Description of Artificial Sequence: Synthetic oligonucleotide
uguaugguagaauguuaua

SEQ ID NO: 2202152 - RNA, 19 nt, Artificial Sequence
  Description of Artificial Sequence: Synthetic oligonucleotide
cagaagacugaugcguugg

SEQ ID NO: 2202153 - RNA, 19 nt, Artificial Sequence
  Description of Artificial Sequence: Synthetic oligonucleotide
gaaaugcuugaaaggggcc

SEQ ID NO: 2202154 - RNA, 19 nt, Artificial Sequence
  Description of Artificial Sequence: Synthetic oligonucleotide
acacguucgacucguccag

SEQ ID NO: 2202155 - RNA, 19 nt, Artificial Sequence
  Description of Artificial Sequence: Synthetic oligonucleotide
aaaggggccaugcccgccu

SEQ ID NO: 2202156 - RNA, 19 nt, Artificial Sequence
  Description of Artificial Sequence: Synthetic oligonucleotide
acagaagacugaugcguug

SEQ ID NO: 2202157 - RNA, 19 nt, Artificial Sequence
  Description of Artificial Sequence: Synthetic oligonucleotide
ucaagcccaggagaagggg

SEQ ID NO: 2202158 - RNA, 19 nt, Artificial Sequence
  Description of Artificial Sequence: Synthetic oligonucleotide
gaggccccaucuuguaugg

SEQ ID NO: 2202159 - RNA, 19 nt, Artificial Sequence
  Description of Artificial Sequence: Synthetic oligonucleotide
cacguugccucgcagcggg

SEQ ID NO: 2202160 - RNA, 19 nt, Artificial Sequence
  Description of Artificial Sequence: Synthetic oligonucleotide
aacgaucccgggcccgagg

SEQ ID NO: 2202161 - RNA, 19 nt, Artificial Sequence
  Description of Artificial Sequence: Synthetic oligonucleotide
gaccaggucucaugcuugg

SEQ ID NO: 2202162 - RNA, 19 nt, Artificial Sequence
  Description of Artificial Sequence: Synthetic oligonucleotide
aaucucagggagccuuccu

SEQ ID NO: 2202163 - RNA, 19 nt, Artificial Sequence
  Description of Artificial Sequence: Synthetic oligonucleotide
gaagggugucaaucucagg

SEQ ID NO: 2202164 - RNA, 19 nt, Artificial Sequence
  Description of Artificial Sequence: Synthetic oligonucleotide
agggacaauggggugacag

SEQ ID NO: 2202165 - RNA, 19 nt, Artificial Sequence
  Description of Artificial Sequence: Synthetic oligonucleotide
uuguugcaauggcuagagg

SEQ ID NO: 2202166 - RNA, 19 nt, Artificial Sequence
  Description of Artificial Sequence: Synthetic oligonucleotide
agccguggcccuuggaccg

SEQ ID NO: 2202167 - RNA, 19 nt, Artificial Sequence
  Description of Artificial Sequence: Synthetic oligonucleotide
acaugcccggaccaggucu

SEQ ID NO: 2202168 - RNA, 19 nt, Artificial Sequence
  Description of Artificial Sequence: Synthetic oligonucleotide
auggcuagaggcugugcug

SEQ ID NO: 2202169 - RNA, 19 nt, Artificial Sequence
  Description of Artificial Sequence: Synthetic oligonucleotide
uucagaugacauagcugac

SEQ ID NO: 2202170 - RNA, 19 nt, Artificial Sequence
  Description of Artificial Sequence: Synthetic oligonucleotide
auagucucccucaagccca

SEQ ID NO: 2202171 - RNA, 19 nt, Artificial Sequence
  Description of Artificial Sequence: Synthetic oligonucleotide
agaagggugucaaucucag

SEQ ID NO: 2202172 - RNA, 19 nt, Artificial Sequence
  Description of Artificial Sequence: Synthetic oligonucleotide
gaugacaugcccggaccag

SEQ ID NO: 2202173 - RNA, 19 nt, Artificial Sequence
  Description of Artificial Sequence: Synthetic oligonucleotide
auucuugggcgggauagag

SEQ ID NO: 2202174 - RNA, 19 nt, Artificial Sequence
  Description of Artificial Sequence: Synthetic oligonucleotide
uggggugacagagaagggu

SEQ ID NO: 2202175 - RNA, 19 nt, Artificial Sequence
  Description of Artificial Sequence: Synthetic oligonucleotide
ucacccaaagccucaccac

SEQ ID NO: 2202176 - RNA, 19 nt, Artificial Sequence
  Description of Artificial Sequence: Synthetic oligonucleotide
cacaccagagugaaaacaa

SEQ ID NO: 2202177 - RNA, 19 nt, Artificial Sequence
  Description of Artificial Sequence: Synthetic oligonucleotide
agcacaucuuauaggugac

SEQ ID NO: 2202178 - RNA, 19 nt, Artificial Sequence
  Description of Artificial Sequence: Synthetic oligonucleotide
uucagacagugagagcuug

SEQ ID NO: 2202179 - RNA, 19 nt, Artificial Sequence
  Description of Artificial Sequence: Synthetic oligonucleotide
gaccacguugccucgcagc

SEQ ID NO: 2202180 - RNA, 19 nt, Artificial Sequence
  Description of Artificial Sequence: Synthetic oligonucleotide
gucacccaaagccucacca

SEQ ID NO: 2202181 - RNA, 19 nt, Artificial Sequence
  Description of Artificial Sequence: Synthetic oligonucleotide
cgaggaguguccaauagcc

SEQ ID NO: 2202182 - RNA, 19 nt, Artificial Sequence
  Description of Artificial Sequence: Synthetic oligonucleotide
guuuucagacagugagagc

SEQ ID NO: 2202183 - RNA, 19 nt, Artificial Sequence
  Description of Artificial Sequence: Synthetic oligonucleotide
cuggcgacacguucgacuc

SEQ ID NO: 2202184 - RNA, 19 nt, Artificial Sequence
  Description of Artificial Sequence: Synthetic oligonucleotide
caauagcccgacagaagac

SEQ ID NO: 2202185 - RNA, 19 nt, Artificial Sequence
  Description of Artificial Sequence: Synthetic oligonucleotide
ggacaauggggugacagag

SEQ ID NO: 2202186 - RNA, 19 nt, Artificial Sequence
  Description of Artificial Sequence: Synthetic oligonucleotide
cccauagucucccucaagc

SEQ ID NO: 2202187 - RNA, 19 nt, Artificial Sequence
  Description of Artificial Sequence: Synthetic oligonucleotide
auaucgaggguguccugcu

SEQ ID NO: 2202188 - RNA, 19 nt, Artificial Sequence
  Description of Artificial Sequence: Synthetic oligonucleotide
ucagacagugagagcuugu

SEQ ID NO: 2202189 - RNA, 19 nt, Artificial Sequence
  Description of Artificial Sequence: Synthetic oligonucleotide
ugacaugcccggaccaggu

SEQ ID NO: 2202190 - RNA, 19 nt, Artificial Sequence
  Description of Artificial Sequence: Synthetic oligonucleotide
cuggagggguaaaagccac

SEQ ID NO: 2202191 - RNA, 19 nt, Artificial Sequence
  Description of Artificial Sequence: Synthetic oligonucleotide
gucgccuuccacuggaaca

SEQ ID NO: 2202192 - RNA, 19 nt, Artificial Sequence
  Description of Artificial Sequence: Synthetic oligonucleotide
augacaugcccggaccagg

SEQ ID NO: 2202193 - RNA, 19 nt, Artificial Sequence
  Description of Artificial Sequence: Synthetic oligonucleotide
gagaagggugucaaucuca

SEQ ID NO: 2202194 - RNA, 19 nt, Artificial Sequence
  Description of Artificial Sequence: Synthetic oligonucleotide
gacagggcccugugaagcc

SEQ ID NO: 2202195 - RNA, 19 nt, Artificial Sequence
  Description of Artificial Sequence: Synthetic oligonucleotide
gugagagcuuguugcaaug

SEQ ID NO: 2202196 - RNA, 19 nt, Artificial Sequence
  Description of Artificial Sequence: Synthetic oligonucleotide
gggauggagaacgaucccg

SEQ ID NO: 2202197 - RNA, 19 nt, Artificial Sequence
  Description of Artificial Sequence: Synthetic oligonucleotide
uggaccggcagaagcauuu

SEQ ID NO: 2202198 - RNA, 19 nt, Artificial Sequence
  Description of Artificial Sequence: Synthetic oligonucleotide
uggagggguaaaagccacc

SEQ ID NO: 2202199 - RNA, 19 nt, Artificial Sequence
  Description of Artificial Sequence: Synthetic oligonucleotide
agcuguacugauagcuagg

SEQ ID NO: 2202200 - RNA, 19 nt, Artificial Sequence
  Description of Artificial Sequence: Synthetic oligonucleotide
ggauggagaacgaucccgg

SEQ ID NO: 2202201 - RNA, 19 nt, Artificial Sequence
  Description of Artificial Sequence: Synthetic oligonucleotide
gcuguacugauagcuaggg

SEQ ID NO: 2202202 - RNA, 19 nt, Artificial Sequence
  Description of Artificial Sequence: Synthetic oligonucleotide
acagacuccuuuguagaca

SEQ ID NO: 2202203 - RNA, 19 nt, Artificial Sequence
  Description of Artificial Sequence: Synthetic oligonucleotide
guucuggcaggucccuagg

SEQ ID NO: 2202204 - RNA, 19 nt, Artificial Sequence
  Description of Artificial Sequence: Synthetic oligonucleotide
uuauaucgaggguguccug

SEQ ID NO: 2202205 - RNA, 19 nt, Artificial Sequence
  Description of Artificial Sequence: Synthetic oligonucleotide
uuguccugcgggugggcag

SEQ ID NO: 2202206 - RNA, 19 nt, Artificial Sequence
  Description of Artificial Sequence: Synthetic oligonucleotide
agaugacauagcugaccug

SEQ ID NO: 2202207 - RNA, 19 nt, Artificial Sequence
  Description of Artificial Sequence: Synthetic oligonucleotide
uuucagacagugagagcuu

SEQ ID NO: 2202208 - RNA, 19 nt, Artificial Sequence
  Description of Artificial Sequence: Synthetic oligonucleotide
guuauaucgaggguguccu

SEQ ID NO: 2202209 - RNA, 19 nt, Artificial Sequence
  Description of Artificial Sequence: Synthetic oligonucleotide
ccggcagaagcauuuacag

SEQ ID NO: 2202210 - RNA, 19 nt, Artificial Sequence
  Description of Artificial Sequence: Synthetic oligonucleotide
ugucacccaaagccucacc

SEQ ID NO: 2202211 - RNA, 19 nt, Artificial Sequence
  Description of Artificial Sequence: Synthetic oligonucleotide
aagaugucagggccaccau

SEQ ID NO: 2202212 - RNA, 19 nt, Artificial Sequence
  Description of Artificial Sequence: Synthetic oligonucleotide
gaggaguguccaauagccc

SEQ ID NO: 2202213 - RNA, 19 nt, Artificial Sequence
  Description of Artificial Sequence: Synthetic oligonucleotide
cacuagcaggccaaccaug

SEQ ID NO: 2202214 - RNA, 19 nt, Artificial Sequence
  Description of Artificial Sequence: Synthetic oligonucleotide
caggugagugaugaccacc

SEQ ID NO: 2202215 - RNA, 19 nt, Artificial Sequence
  Description of Artificial Sequence: Synthetic oligonucleotide
uagcccgacagaagacuga

SEQ ID NO: 2202216 - RNA, 19 nt, Artificial Sequence
  Description of Artificial Sequence: Synthetic oligonucleotide
aucuuguaugguagaaugu

SEQ ID NO: 2202217 - RNA, 19 nt, Artificial Sequence
  Description of Artificial Sequence: Synthetic oligonucleotide
uacugauagcuagggacaa

SEQ ID NO: 2202218 - RNA, 19 nt, Artificial Sequence
  Description of Artificial Sequence: Synthetic oligonucleotide
auagcccgacagaagacug

SEQ ID NO: 2202219 - RNA, 19 nt, Artificial Sequence
  Description of Artificial Sequence: Synthetic oligonucleotide
uugaggccccaucuuguau

SEQ ID NO: 2202220 - RNA, 19 nt, Artificial Sequence
  Description of Artificial Sequence: Synthetic oligonucleotide
uggcgacacguucgacucg

SEQ ID NO: 2202221 - RNA, 19 nt, Artificial Sequence
  Description of Artificial Sequence: Synthetic oligonucleotide
uagcugaccuggcgacacg

SEQ ID NO: 2202222 - RNA, 19 nt, Artificial Sequence
  Description of Artificial Sequence: Synthetic oligonucleotide
cugaccuggcgacacguuc

SEQ ID NO: 2202223 - RNA, 19 nt, Artificial Sequence
  Description of Artificial Sequence: Synthetic oligonucleotide
agcuagggacaauggggug

SEQ ID NO: 2202224 - RNA, 19 nt, Artificial Sequence
  Description of Artificial Sequence: Synthetic oligonucleotide
ccauagucucccucaagcc

SEQ ID NO: 2202225 - RNA, 19 nt, Artificial Sequence
  Description of Artificial Sequence: Synthetic oligonucleotide
caauggggugacagagaag

SEQ ID NO: 2202226 - RNA, 19 nt, Artificial Sequence
  Description of Artificial Sequence: Synthetic oligonucleotide
gagaacgaucccgggcccg

SEQ ID NO: 2202227 - RNA, 19 nt, Artificial Sequence
  Description of Artificial Sequence: Synthetic oligonucleotide
ccaauagcccgacagaaga

SEQ ID NO: 2202228 - RNA, 19 nt, Artificial Sequence
  Description of Artificial Sequence: Synthetic oligonucleotide
auguuuucagacagugaga

SEQ ID NO: 2202229 - RNA, 19 nt, Artificial Sequence
  Description of Artificial Sequence: Synthetic oligonucleotide
uagucucccucaagcccag

SEQ ID NO: 2202230 - RNA, 19 nt, Artificial Sequence
  Description of Artificial Sequence: Synthetic oligonucleotide
gaagcccgcaccgucgcug

SEQ ID NO: 2202231 - RNA, 19 nt, Artificial Sequence
  Description of Artificial Sequence: Synthetic oligonucleotide
cagaugacauagcugaccu

SEQ ID NO: 2202232 - RNA, 19 nt, Artificial Sequence
  Description of Artificial Sequence: Synthetic oligonucleotide
uggcccuuggaccggcaga

SEQ ID NO: 2202233 - RNA, 19 nt, Artificial Sequence
  Description of Artificial Sequence: Synthetic oligonucleotide
caugugucacccaaagccu

SEQ ID NO: 2202234 - RNA, 19 nt, Artificial Sequence
  Description of Artificial Sequence: Synthetic oligonucleotide
auguuauaucgaggguguc

SEQ ID NO: 2202235 - RNA, 19 nt, Artificial Sequence
  Description of Artificial Sequence: Synthetic oligonucleotide
acguucgacucguccagca

SEQ ID NO: 2202236 - RNA, 19 nt, Artificial Sequence
  Description of Artificial Sequence: Synthetic oligonucleotide
ucgccuuccacuggaacau

SEQ ID NO: 2202237 - RNA, 19 nt, Artificial Sequence
  Description of Artificial Sequence: Synthetic oligonucleotide
gaccggcagaagcauuuac

SEQ ID NO: 2202238 - RNA, 19 nt, Artificial Sequence
  Description of Artificial Sequence: Synthetic oligonucleotide
gagcuuguugcaauggcua

SEQ ID NO: 2202239 - RNA, 19 nt, Artificial Sequence
  Description of Artificial Sequence: Synthetic oligonucleotide
accggcagaagcauuuaca

SEQ ID NO: 2202240 - RNA, 19 nt, Artificial Sequence
  Description of Artificial Sequence: Synthetic oligonucleotide
caggccaaccaugugucac

SEQ ID NO: 2202241 - RNA, 19 nt, Artificial Sequence
  Description of Artificial Sequence: Synthetic oligonucleotide
cagggagccuuccuggguc

SEQ ID NO: 2202242 - RNA, 19 nt, Artificial Sequence
  Description of Artificial Sequence: Synthetic oligonucleotide
ggggugacagagaagggug

SEQ ID NO: 2202243 - RNA, 19 nt, Artificial Sequence
  Description of Artificial Sequence: Synthetic oligonucleotide
agagcacaucuuauaggug

SEQ ID NO: 2202244 - RNA, 19 nt, Artificial Sequence
  Description of Artificial Sequence: Synthetic oligonucleotide
aacucccuuccaggaaaug

SEQ ID NO: 2202245 - RNA, 19 nt, Artificial Sequence
  Description of Artificial Sequence: Synthetic oligonucleotide
acgaucccgggcccgagga

SEQ ID NO: 2202246 - RNA, 19 nt, Artificial Sequence
  Description of Artificial Sequence: Synthetic oligonucleotide
uucucauucuugggcggga

SEQ ID NO: 2202247 - RNA, 19 nt, Artificial Sequence
  Description of Artificial Sequence: Synthetic oligonucleotide
ucgaggguguccugcuccu

SEQ ID NO: 2202248 - RNA, 19 nt, Artificial Sequence
  Description of Artificial Sequence: Synthetic oligonucleotide
cucgcagcggggauggaga

SEQ ID NO: 2202249 - RNA, 19 nt, Artificial Sequence
  Description of Artificial Sequence: Synthetic oligonucleotide
cggggauggagaacgaucc

SEQ ID NO: 2202250 - RNA, 19 nt, Artificial Sequence
  Description of Artificial Sequence: Synthetic oligonucleotide
cucccucaagcccaggaga

SEQ ID NO: 2202251 - RNA, 19 nt, Artificial Sequence
  Description of Artificial Sequence: Synthetic oligonucleotide
ggauagagcacaucuuaua

SEQ ID NO: 2202252 - RNA, 19 nt, Artificial Sequence
  Description of Artificial Sequence: Synthetic oligonucleotide
guccaauagcccgacagaa

SEQ ID NO: 2202253 - RNA, 19 nt, Artificial Sequence
  Description of Artificial Sequence: Synthetic oligonucleotide
aucagccggggugaugaag

SEQ ID NO: 2202254 - RNA, 19 nt, Artificial Sequence
  Description of Artificial Sequence: Synthetic oligonucleotide
gugaagcccgcaccgucgc

SEQ ID NO: 2202255 - RNA, 19 nt, Artificial Sequence
  Description of Artificial Sequence: Synthetic oligonucleotide
agccuuccuggguccuagc

SEQ ID NO: 2202256 - RNA, 19 nt, Artificial Sequence
  Description of Artificial Sequence: Synthetic oligonucleotide
ccgacagaagacugaugcg

SEQ ID NO: 2202257 - RNA, 19 nt, Artificial Sequence
  Description of Artificial Sequence: Synthetic oligonucleotide
gggguaaaagccaccuuug

SEQ ID NO: 2202258 - RNA, 19 nt, Artificial Sequence
  Description of Artificial Sequence: Synthetic oligonucleotide
cucaccacaccagagugaa

SEQ ID NO: 2202259 - RNA, 19 nt, Artificial Sequence
  Description of Artificial Sequence: Synthetic oligonucleotide
ggcgggauagagcacaucu

SEQ ID NO: 2202260 - RNA, 19 nt, Artificial Sequence
  Description of Artificial Sequence: Synthetic oligonucleotide
ggugucaaucucagggagc

SEQ ID NO: 2202261 - RNA, 19 nt, Artificial Sequence
  Description of Artificial Sequence: Synthetic oligonucleotide
uguccugcgggugggcaga

SEQ ID NO: 2202262 - RNA, 19 nt, Artificial Sequence
  Description of Artificial Sequence: Synthetic oligonucleotide
caugcccggaccaggucuc

SEQ ID NO: 2202263 - RNA, 19 nt, Artificial Sequence
  Description of Artificial Sequence: Synthetic oligonucleotide
uccuagcaaaguggcuuug

SEQ ID NO: 2202264 - RNA, 19 nt, Artificial Sequence
  Description of Artificial Sequence: Synthetic oligonucleotide
gcggacagggcccacuagc

SEQ ID NO: 2202265 - RNA, 19 nt, Artificial Sequence
  Description of Artificial Sequence: Synthetic oligonucleotide
agccggggugaugaagccg

SEQ ID NO: 2202266 - RNA, 19 nt, Artificial Sequence
  Description of Artificial Sequence: Synthetic oligonucleotide
cauuuacagacuccuuugu

SEQ ID NO: 2202267 - RNA, 19 nt, Artificial Sequence
  Description of Artificial Sequence: Synthetic oligonucleotide
accuuugaccuaguagaaa

SEQ ID NO: 2202268 - RNA, 19 nt, Artificial Sequence
  Description of Artificial Sequence: Synthetic oligonucleotide
auggggugacagagaaggg

SEQ ID NO: 2202269 - RNA, 19 nt, Artificial Sequence
  Description of Artificial Sequence: Synthetic oligonucleotide
cacuggaacauacuccccu

SEQ ID NO: 2202270 - RNA, 19 nt, Artificial Sequence
  Description of Artificial Sequence: Synthetic oligonucleotide
agggaccacguugccucgc

SEQ ID NO: 2202271 - RNA, 19 nt, Artificial Sequence
  Description of Artificial Sequence: Synthetic oligonucleotide
ugaccucgucgccuuccac

SEQ ID NO: 2202272 - RNA, 19 nt, Artificial Sequence
  Description of Artificial Sequence: Synthetic oligonucleotide
ggguaaaagccaccuuuga

SEQ ID NO: 2202273 - RNA, 19 nt, Artificial Sequence
  Description of Artificial Sequence: Synthetic oligonucleotide
ccgaggaguguccaauagc

SEQ ID NO: 2202274 - RNA, 19 nt, Artificial Sequence
  Description of Artificial Sequence: Synthetic oligonucleotide
cccuuggaccggcagaagc

SEQ ID NO: 2202275 - RNA, 19 nt, Artificial Sequence
  Description of Artificial Sequence: Synthetic oligonucleotide
caccuuugaccuaguagaa

SEQ ID NO: 2202276 - RNA, 19 nt, Artificial Sequence
  Description of Artificial Sequence: Synthetic oligonucleotide
cuguacugauagcuaggga

SEQ ID NO: 2202277 - RNA, 19 nt, Artificial Sequence
  Description of Artificial Sequence: Synthetic oligonucleotide
aguguccaauagcccgaca

SEQ ID NO: 2202278 - RNA, 19 nt, Artificial Sequence
  Description of Artificial Sequence: Synthetic oligonucleotide
aagcauuuacagacuccuu

SEQ ID NO: 2202279 - RNA, 19 nt, Artificial Sequence
  Description of Artificial Sequence: Synthetic oligonucleotide
caauggcuagaggcugugc

SEQ ID NO: 2202280 - RNA, 19 nt, Artificial Sequence
  Description of Artificial Sequence: Synthetic oligonucleotide
cugcgggugggcagagggc

SEQ ID NO: 2202281 - RNA, 19 nt, Artificial Sequence
  Description of Artificial Sequence: Synthetic oligonucleotide
ugaagcccgcaccgucgcu

SEQ ID NO: 2202282 - RNA, 19 nt, Artificial Sequence
  Description of Artificial Sequence: Synthetic oligonucleotide
cagccggggugaugaagcc

SEQ ID NO: 2202283 - RNA, 19 nt, Artificial Sequence
  Description of Artificial Sequence: Synthetic oligonucleotide
gacaugcccggaccagguc

SEQ ID NO: 2202284 - RNA, 19 nt, Artificial Sequence
  Description of Artificial Sequence: Synthetic oligonucleotide
uggugccuggugccaggug

SEQ ID NO: 2202285 - RNA, 19 nt, Artificial Sequence
  Description of Artificial Sequence: Synthetic oligonucleotide
cucgucgccuuccacugga

SEQ ID NO: 2202286 - RNA, 19 nt, Artificial Sequence
  Description of Artificial Sequence: Synthetic oligonucleotide
gaccuggcgacacguucga

SEQ ID NO: 2202287 - RNA, 19 nt, Artificial Sequence
  Description of Artificial Sequence: Synthetic oligonucleotide
guggcccuuggaccggcag

SEQ ID NO: 2202288 - RNA, 19 nt, Artificial Sequence
  Description of Artificial Sequence: Synthetic oligonucleotide
gaguguccaauagcccgac

SEQ ID NO: 2202289 - RNA, 19 nt, Artificial Sequence
  Description of Artificial Sequence: Synthetic oligonucleotide
agaacgaucccgggcccga

SEQ ID NO: 2202290 - RNA, 19 nt, Artificial Sequence
  Description of Artificial Sequence: Synthetic oligonucleotide
ccuaggaacugaugacaug

SEQ ID NO: 2202291 - RNA, 19 nt, Artificial Sequence
  Description of Artificial Sequence: Synthetic oligonucleotide
gugggcagagggcuaggga

SEQ ID NO: 2202292 - RNA, 19 nt, Artificial Sequence
  Description of Artificial Sequence: Synthetic oligonucleotide
cuuuguagacagggcccug

SEQ ID NO: 2202293 - RNA, 19 nt, Artificial Sequence
  Description of Artificial Sequence: Synthetic oligonucleotide
gcuagggacaaugggguga

SEQ ID NO: 2202294 - RNA, 19 nt, Artificial Sequence
  Description of Artificial Sequence: Synthetic oligonucleotide
agcccgacagaagacugau

SEQ ID NO: 2202295 - RNA, 19 nt, Artificial Sequence
  Description of Artificial Sequence: Synthetic oligonucleotide
ggagaacgaucccgggccc

SEQ ID NO: 2202296 - RNA, 19 nt, Artificial Sequence
  Description of Artificial Sequence: Synthetic oligonucleotide
uugccucgcagcggggaug

SEQ ID NO: 2202297 - RNA, 19 nt, Artificial Sequence
  Description of Artificial Sequence: Synthetic oligonucleotide
ucugggcggucagccaagc

SEQ ID NO: 2202298 - RNA, 19 nt, Artificial Sequence
  Description of Artificial Sequence: Synthetic oligonucleotide
ugucaaucucagggagccu

SEQ ID NO: 2202299 - RNA, 19 nt, Artificial Sequence
  Description of Artificial Sequence: Synthetic oligonucleotide
cacaacucccuuccaggaa

SEQ ID NO: 2202300 - RNA, 19 nt, Artificial Sequence
  Description of Artificial Sequence: Synthetic oligonucleotide
acugauagcuagggacaau

SEQ ID NO: 2202301 - RNA, 19 nt, Artificial Sequence
  Description of Artificial Sequence: Synthetic oligonucleotide
ucgcagcggggauggagaa

SEQ ID NO: 2202302 - RNA, 19 nt, Artificial Sequence
  Description of Artificial Sequence: Synthetic oligonucleotide
ccaaccaugugucacccaa

SEQ ID NO: 2202303 - RNA, 19 nt, Artificial Sequence
  Description of Artificial Sequence: Synthetic oligonucleotide
ugguggcugagagcacccc

SEQ ID NO: 2202304 - RNA, 19 nt, Artificial Sequence
  Description of Artificial Sequence: Synthetic oligonucleotide
augcuugaaaggggccaug

SEQ ID NO: 2202305 - RNA, 19 nt, Artificial Sequence
  Description of Artificial Sequence: Synthetic oligonucleotide
cuugaggccccaucuugua

SEQ ID NO: 2202306 - RNA, 19 nt, Artificial Sequence
  Description of Artificial Sequence: Synthetic oligonucleotide
gagugaaaacaaagcugua

SEQ ID NO: 2202307 - RNA, 19 nt, Artificial Sequence
  Description of Artificial Sequence: Synthetic oligonucleotide
ccuuggaccggcagaagca

SEQ ID NO: 2202308 - RNA, 19 nt, Artificial Sequence
  Description of Artificial Sequence: Synthetic oligonucleotide
cccacuagcaggccaacca

SEQ ID NO: 2202309 - RNA, 19 nt, Artificial Sequence
  Description of Artificial Sequence: Synthetic oligonucleotide
cugggcggucagccaagcc

SEQ ID NO: 2202310 - RNA, 19 nt, Artificial Sequence
  Description of Artificial Sequence: Synthetic oligonucleotide
gaacgaucccgggcccgag

SEQ ID NO: 2202311 - RNA, 19 nt, Artificial Sequence
  Description of Artificial Sequence: Synthetic oligonucleotide
cccgaggaguguccaauag

SEQ ID NO: 2202312 - RNA, 19 nt, Artificial Sequence
  Description of Artificial Sequence: Synthetic oligonucleotide
cacguucgacucguccagc

SEQ ID NO: 2202313 - RNA, 19 nt, Artificial Sequence
  Description of Artificial Sequence: Synthetic oligonucleotide
agacuccuuuguagacagg

SEQ ID NO: 2202314 - RNA, 19 nt, Artificial Sequence
  Description of Artificial Sequence: Synthetic oligonucleotide
cccaaagccucaccacacc

SEQ ID NO: 2202315 - RNA, 19 nt, Artificial Sequence
  Description of Artificial Sequence: Synthetic oligonucleotide
ggaguguccaauagcccga

SEQ ID NO: 2202316 - RNA, 19 nt, Artificial Sequence
  Description of Artificial Sequence: Synthetic oligonucleotide
ggugacagagaaggguguc

SEQ ID NO: 2202317 - RNA, 19 nt, Artificial Sequence
  Description of Artificial Sequence: Synthetic oligonucleotide
uuggugccuggugccaggu

SEQ ID NO: 2202318 - RNA, 19 nt, Artificial Sequence
  Description of Artificial Sequence: Synthetic oligonucleotide
augcccgccuugaggcccc

SEQ ID NO: 2202319 - RNA, 19 nt, Artificial Sequence
  Description of Artificial Sequence: Synthetic oligonucleotide
agagggcuagggaccacgu

SEQ ID NO: 2202320 - RNA, 19 nt, Artificial Sequence
  Description of Artificial Sequence: Synthetic oligonucleotide
gggcggucagccaagccug

SEQ ID NO: 2202321 - RNA, 19 nt, Artificial Sequence
  Description of Artificial Sequence: Synthetic oligonucleotide
ggcccugugaagcccgcac

SEQ ID NO: 2202322 - RNA, 19 nt, Artificial Sequence
  Description of Artificial Sequence: Synthetic oligonucleotide
cauagcugaccuggcgaca

SEQ ID NO: 2202323 - RNA, 19 nt, Artificial Sequence
  Description of Artificial Sequence: Synthetic oligonucleotide
ucgucgccuuccacuggaa

SEQ ID NO: 2202324 - RNA, 19 nt, Artificial Sequence
  Description of Artificial Sequence: Synthetic oligonucleotide
gcccugugaagcccgcacc

SEQ ID NO: 2202325 - RNA, 19 nt, Artificial Sequence
  Description of Artificial Sequence: Synthetic oligonucleotide
ggccccaucuuguauggua

SEQ ID NO: 2202326 - RNA, 19 nt, Artificial Sequence
  Description of Artificial Sequence: Synthetic oligonucleotide
accuggcgacacguucgac

SEQ ID NO: 2202327 - RNA, 19 nt, Artificial Sequence
  Description of Artificial Sequence: Synthetic oligonucleotide
cuuguccugcgggugggca

SEQ ID NO: 2202328 - RNA, 19 nt, Artificial Sequence
  Description of Artificial Sequence: Synthetic oligonucleotide
ccaucagccggggugauga

SEQ ID NO: 2202329 - RNA, 19 nt, Artificial Sequence
  Description of Artificial Sequence: Synthetic oligonucleotide
gcuuguugcaauggcuaga

SEQ ID NO: 2202330 - RNA, 19 nt, Artificial Sequence
  Description of Artificial Sequence: Synthetic oligonucleotide
gguccuagcaaaguggcuu

SEQ ID NO: 2202331 - RNA, 19 nt, Artificial Sequence
  Description of Artificial Sequence: Synthetic oligonucleotide
ggccaaccaugugucaccc

SEQ ID NO: 2202332 - RNA, 19 nt, Artificial Sequence
  Description of Artificial Sequence: Synthetic oligonucleotide
cgacacguucgacucgucc

SEQ ID NO: 2202333 - RNA, 19 nt, Artificial Sequence
  Description of Artificial Sequence: Synthetic oligonucleotide
ccugcccacaacucccuuc

SEQ ID NO: 2202334 - RNA, 19 nt, Artificial Sequence
  Description of Artificial Sequence: Synthetic oligonucleotide
gcggggauggagaacgauc

SEQ ID NO: 2202335 - RNA, 19 nt, Artificial Sequence
  Description of Artificial Sequence: Synthetic oligonucleotide
uccugcgggugggcagagg

SEQ ID NO: 2202336 - RNA, 19 nt, Artificial Sequence
  Description of Artificial Sequence: Synthetic oligonucleotide
agcggggauggagaacgau

SEQ ID NO: 2202337 - RNA, 19 nt, Artificial Sequence
  Description of Artificial Sequence: Synthetic oligonucleotide
ggaccacguugccucgcag

SEQ ID NO: 2202338 - RNA, 19 nt, Artificial Sequence
  Description of Artificial Sequence: Synthetic oligonucleotide
accaggucucaugcuuggu

SEQ ID NO: 2202339 - RNA, 19 nt, Artificial Sequence
  Description of Artificial Sequence: Synthetic oligonucleotide
aguggcggacagggcccac

SEQ ID NO: 2202340 - RNA, 19 nt, Artificial Sequence
  Description of Artificial Sequence: Synthetic oligonucleotide
ccaggugagugaugaccac

SEQ ID NO: 2202341 - RNA, 19 nt, Artificial Sequence
  Description of Artificial Sequence: Synthetic oligonucleotide
ggcaggucccuaggaacug

SEQ ID NO: 2202342 - RNA, 19 nt, Artificial Sequence
  Description of Artificial Sequence: Synthetic oligonucleotide
guccuagcaaaguggcuuu

SEQ ID NO: 2202343 - RNA, 19 nt, Artificial Sequence
  Description of Artificial Sequence: Synthetic oligonucleotide
cagugagagcuuguugcaa

SEQ ID NO: 2202344 - RNA, 19 nt, Artificial Sequence
  Description of Artificial Sequence: Synthetic oligonucleotide
ggcuagggaccacguugcc

SEQ ID NO: 2202345 - RNA, 19 nt, Artificial Sequence
  Description of Artificial Sequence: Synthetic oligonucleotide
gccuuccacuggaacauac

SEQ ID NO: 2202346 - RNA, 19 nt, Artificial Sequence
  Description of Artificial Sequence: Synthetic oligonucleotide
ggcggacagggcccacuag

SEQ ID NO: 2202347 - RNA, 19 nt, Artificial Sequence
  Description of Artificial Sequence: Synthetic oligonucleotide
gagggguaaaagccaccuu

SEQ ID NO: 2202348 - RNA, 19 nt, Artificial Sequence
  Description of Artificial Sequence: Synthetic oligonucleotide
cguucgacucguccagcag

SEQ ID NO: 2202349 - RNA, 19 nt, Artificial Sequence
  Description of Artificial Sequence: Synthetic oligonucleotide
gggaccacguugccucgca

SEQ ID NO: 2202350 - RNA, 19 nt, Artificial Sequence
  Description of Artificial Sequence: Synthetic oligonucleotide
ccucgcagcggggauggag

SEQ ID NO: 2202351 - RNA, 19 nt, Artificial Sequence
  Description of Artificial Sequence: Synthetic oligonucleotide
cgggauagagcacaucuua

SEQ ID NO: 2202352 - RNA, 19 nt, Artificial Sequence
  Description of Artificial Sequence: Synthetic oligonucleotide
ggcagagggcuagggacca

SEQ ID NO: 2202353 - RNA, 19 nt, Artificial Sequence
  Description of Artificial Sequence: Synthetic oligonucleotide
cuuggaccggcagaagcau

SEQ ID NO: 2202354 - RNA, 19 nt, Artificial Sequence
  Description of Artificial Sequence: Synthetic oligonucleotide
cggucagccaagccuggag

SEQ ID NO: 2202355 - RNA, 19 nt, Artificial Sequence
  Description of Artificial Sequence: Synthetic oligonucleotide
caccgucgcugagaagguc

SEQ ID NO: 2202356 - RNA, 19 nt, Artificial Sequence
  Description of Artificial Sequence: Synthetic oligonucleotide
cugccagcucaguggcgga

SEQ ID NO: 2202357 - RNA, 19 nt, Artificial Sequence
  Description of Artificial Sequence: Synthetic oligonucleotide
ccucgucgccuuccacugg

SEQ ID NO: 2202358 - RNA, 19 nt, Artificial Sequence
  Description of Artificial Sequence: Synthetic oligonucleotide
gcaggccaaccauguguca

SEQ ID NO: 2202359 - RNA, 19 nt, Artificial Sequence
  Description of Artificial Sequence: Synthetic oligonucleotide
acguugccucgcagcgggg

SEQ ID NO: 2202360 - RNA, 19 nt, Artificial Sequence
  Description of Artificial Sequence: Synthetic oligonucleotide
caacucccuuccaggaaau

SEQ ID NO: 2202361 - RNA, 19 nt, Artificial Sequence
  Description of Artificial Sequence: Synthetic oligonucleotide
ccacguugccucgcagcgg

SEQ ID NO: 2202362 - RNA, 19 nt, Artificial Sequence
  Description of Artificial Sequence: Synthetic oligonucleotide
ugcccggaccaggucucau

SEQ ID NO: 2202363 - RNA, 19 nt, Artificial Sequence
  Description of Artificial Sequence: Synthetic oligonucleotide
ggcgacacguucgacucgu

SEQ ID NO: 2202364 - RNA, 19 nt, Artificial Sequence
  Description of Artificial Sequence: Synthetic oligonucleotide
gccggggugaugaagccgu

SEQ ID NO: 2202365 - RNA, 19 nt, Artificial Sequence
  Description of Artificial Sequence: Synthetic oligonucleotide
gcccacuagcaggccaacc

SEQ ID NO: 2202366 - RNA, 19 nt, Artificial Sequence
  Description of Artificial Sequence: Synthetic oligonucleotide
aggccccaucuuguauggu

SEQ ID NO: 2202367 - RNA, 19 nt, Artificial Sequence
  Description of Artificial Sequence: Synthetic oligonucleotide
guccugcgggugggcagag

SEQ ID NO: 2202368 - RNA, 19 nt, Artificial Sequence
  Description of Artificial Sequence: Synthetic oligonucleotide
gcuagggaccacguugccu

SEQ ID NO: 2202369 - RNA, 19 nt, Artificial Sequence
  Description of Artificial Sequence: Synthetic oligonucleotide
augcccggaccaggucuca

SEQ ID NO: 2202370 - RNA, 19 nt, Artificial Sequence
  Description of Artificial Sequence: Synthetic oligonucleotide
ccaccaucagccgggguga

SEQ ID NO: 2202371 - RNA, 19 nt, Artificial Sequence
  Description of Artificial Sequence: Synthetic oligonucleotide
cccgccuugaggccccauc

SEQ ID NO: 2202372 - RNA, 19 nt, Artificial Sequence
  Description of Artificial Sequence: Synthetic oligonucleotide
ccuuccacuggaacauacu

SEQ ID NO: 2202373 - RNA, 19 nt, Artificial Sequence
  Description of Artificial Sequence: Synthetic oligonucleotide
cagcggggauggagaacga

SEQ ID NO: 2202374 - RNA, 19 nt, Artificial Sequence
  Description of Artificial Sequence: Synthetic oligonucleotide
ucccgggcccgaggagugu

SEQ ID NO: 2202375 - RNA, 19 nt, Artificial Sequence
  Description of Artificial Sequence: Synthetic oligonucleotide
cgucgccuuccacuggaac

SEQ ID NO: 2202376 - RNA, 19 nt, Artificial Sequence
  Description of Artificial Sequence: Synthetic oligonucleotide
ggucucaugcuuggugccu

SEQ ID NO: 2202377 - RNA, 19 nt, Artificial Sequence
  Description of Artificial Sequence: Synthetic oligonucleotide
ccccaucuuguaugguaga

SEQ ID NO: 2202378 - RNA, 19 nt, Artificial Sequence
  Description of Artificial Sequence: Synthetic oligonucleotide
gccaaccaugugucaccca

SEQ ID NO: 2202379 - RNA, 19 nt, Artificial Sequence
  Description of Artificial Sequence: Synthetic oligonucleotide
gggugacagagaagggugu

SEQ ID NO: 2202380 - RNA, 19 nt, Artificial Sequence
  Description of Artificial Sequence: Synthetic oligonucleotide
cuggugccaggugagugau

SEQ ID NO: 2202381 - RNA, 19 nt, Artificial Sequence
  Description of Artificial Sequence: Synthetic oligonucleotide
ccgggcccgaggagugucc

SEQ ID NO: 2202382 - RNA, 19 nt, Artificial Sequence
  Description of Artificial Sequence: Synthetic oligonucleotide
cgcugagaagguccuuguc

SEQ ID NO: 2202383 - RNA, 19 nt, Artificial Sequence
  Description of Artificial Sequence: Synthetic oligonucleotide
gcccgacagaagacugaug

SEQ ID NO: 2202384 - RNA, 19 nt, Artificial Sequence
  Description of Artificial Sequence: Synthetic oligonucleotide
gggcccacuagcaggccaa

SEQ ID NO: 2202385 - RNA, 19 nt, Artificial Sequence
  Description of Artificial Sequence: Synthetic oligonucleotide
gccguggcccuuggaccgg

SEQ ID NO: 2202386 - RNA, 19 nt, Artificial Sequence
  Description of Artificial Sequence: Synthetic oligonucleotide
cccgcaccgucgcugagaa

SEQ ID NO: 2202387 - RNA, 19 nt, Artificial Sequence
  Description of Artificial Sequence: Synthetic oligonucleotide
ccccuuccacaucagagau

SEQ ID NO: 2202388 - RNA, 19 nt, Artificial Sequence
  Description of Artificial Sequence: Synthetic oligonucleotide
gcccgaggaguguccaaua

SEQ ID NO: 2202389 - RNA, 19 nt, Artificial Sequence
  Description of Artificial Sequence: Synthetic oligonucleotide
ccacuagcaggccaaccau

SEQ ID NO: 2202390 - RNA, 19 nt, Artificial Sequence
  Description of Artificial Sequence: Synthetic oligonucleotide
ccggggugaugaagccgug

SEQ ID NO: 2202391 - RNA, 19 nt, Artificial Sequence
  Description of Artificial Sequence: Synthetic oligonucleotide
ggaccggcagaagcauuua

SEQ ID NO: 2202392 - RNA, 19 nt, Artificial Sequence
  Description of Artificial Sequence: Synthetic oligonucleotide
ggcccacuagcaggccaac

SEQ ID NO: 2202393 - RNA, 19 nt, Artificial Sequence
  Description of Artificial Sequence: Synthetic oligonucleotide
ccgccuugaggccccaucu

SEQ ID NO: 2202394 - RNA, 19 nt, Artificial Sequence
  Description of Artificial Sequence: Synthetic oligonucleotide
ggcccgaggaguguccaau

SEQ ID NO: 2202395 - RNA, 19 nt, Artificial Sequence
  Description of Artificial Sequence: Synthetic oligonucleotide
gggcgggauagagcacauc

SEQ ID NO: 2202396 - RNA, 19 nt, Artificial Sequence
  Description of Artificial Sequence: Synthetic oligonucleotide
ugcccgccuugaggcccca

SEQ ID NO: 2202397 - RNA, 19 nt, Artificial Sequence
  Description of Artificial Sequence: Synthetic oligonucleotide
ggagccuuccuggguccua

SEQ ID NO: 2202398 - RNA, 19 nt, Artificial Sequence
  Description of Artificial Sequence: Synthetic oligonucleotide
gcgggauagagcacaucuu

SEQ ID NO: 2202399 - RNA, 19 nt, Artificial Sequence
  Description of Artificial Sequence: Synthetic oligonucleotide
ccgucgcugagaagguccu

SEQ ID NO: 2202400 - RNA, 19 nt, Artificial Sequence
  Description of Artificial Sequence: Synthetic oligonucleotide
gcaccgucgcugagaaggu

SEQ ID NO: 2202401 - RNA, 19 nt, Artificial Sequence
  Description of Artificial Sequence: Synthetic oligonucleotide
cccgggcccgaggaguguc

SEQ ID NO: 2202402 - RNA, 19 nt, Artificial Sequence
  Description of Artificial Sequence: Synthetic oligonucleotide
gggguucuggcaggucccu

SEQ ID NO: 2202403 - RNA, 19 nt, Artificial Sequence
  Description of Artificial Sequence: Synthetic oligonucleotide
ccgcaccgucgcugagaag

SEQ ID NO: 2202404 - RNA, 19 nt, Artificial Sequence
  Description of Artificial Sequence: Synthetic oligonucleotide
ccaagccuggagggguaaa

SEQ ID NO: 2202405 - RNA, 19 nt, Artificial Sequence
  Description of Artificial Sequence: Synthetic oligonucleotide
gcgacacguucgacucguc

SEQ ID NO: 2202406 - RNA, 19 nt, Artificial Sequence
  Description of Artificial Sequence: Synthetic oligonucleotide
ccggaccaggucucaugcu

SEQ ID NO: 2202407 - RNA, 19 nt, Artificial Sequence
  Description of Artificial Sequence: Synthetic oligonucleotide
gcugaccuggcgacacguu

SEQ ID NO: 2202408 - RNA, 19 nt, Artificial Sequence
  Description of Artificial Sequence: Synthetic oligonucleotide
ggccaccaucagccggggu

SEQ ID NO: 2202409 - RNA, 19 nt, Artificial Sequence
  Description of Artificial Sequence: Synthetic oligonucleotide
caccaucagccggggugau

SEQ ID NO: 2202410 - RNA, 19 nt, Artificial Sequence
  Description of Artificial Sequence: Synthetic oligonucleotide
ccucuacagccugcaguuu

SEQ ID NO: 2202411 - RNA, 19 nt, Artificial Sequence
  Description of Artificial Sequence: Synthetic oligonucleotide
gccucgcagcggggaugga

SEQ ID NO: 2202412 - RNA, 19 nt, Artificial Sequence
  Description of Artificial Sequence: Synthetic oligonucleotide
cgccuuccacuggaacaua

SEQ ID NO: 2202413 - RNA, 19 nt, Artificial Sequence
  Description of Artificial Sequence: Synthetic oligonucleotide
cgucgcugagaagguccuu

SEQ ID NO: 2202414 - RNA, 19 nt, Artificial Sequence
  Description of Artificial Sequence: Synthetic oligonucleotide
gcccgccuugaggccccau

SEQ ID NO: 2202415 - RNA, 19 nt, Artificial Sequence
  Description of Artificial Sequence: Synthetic oligonucleotide
aacagauaaguguugaagc

SEQ ID NO: 2202416 - RNA, 19 nt, Artificial Sequence
  Description of Artificial Sequence: Synthetic oligonucleotide
aaauuugcaaaauaauggg

SEQ ID NO: 2202417 - RNA, 19 nt, Artificial Sequence
  Description of Artificial Sequence: Synthetic oligonucleotide
uauuaagucauauauuugg

SEQ ID NO: 2202418 - RNA, 19 nt, Artificial Sequence
  Description of Artificial Sequence: Synthetic oligonucleotide
aauauuuugacagauucac

SEQ ID NO: 2202419 - RNA, 19 nt, Artificial Sequence
  Description of Artificial Sequence: Synthetic oligonucleotide
aaagaaaauguccagcguc

SEQ ID NO: 2202420 - RNA, 19 nt, Artificial Sequence
  Description of Artificial Sequence: Synthetic oligonucleotide
aaaauuaugcacucuaucu

SEQ ID NO: 2202421 - RNA, 19 nt, Artificial Sequence
  Description of Artificial Sequence: Synthetic oligonucleotide
aauuaugcacucuaucuac

SEQ ID NO: 2202422 - RNA, 19 nt, Artificial Sequence
  Description of Artificial Sequence: Synthetic oligonucleotide
ucugauuuuagaaugaaac

SEQ ID NO: 2202423 - RNA, 19 nt, Artificial Sequence
  Description of Artificial Sequence: Synthetic oligonucleotide
gaaacuuaaaacuucuuag

SEQ ID NO: 2202424 - RNA, 19 nt, Artificial Sequence
  Description of Artificial Sequence: Synthetic oligonucleotide
acuaauaucuaaaagauag

SEQ ID NO: 2202425 - RNA, 19 nt, Artificial Sequence
  Description of Artificial Sequence: Synthetic oligonucleotide
agaacuaauaucuaaaaga

SEQ ID NO: 2202426 - RNA, 19 nt, Artificial Sequence
  Description of Artificial Sequence: Synthetic oligonucleotide
cuaaaaguuaauuacacug

SEQ ID NO: 2202427 - RNA, 19 nt, Artificial Sequence
  Description of Artificial Sequence: Synthetic oligonucleotide
aaaacaaaauuaugcacuc

SEQ ID NO: 2202428 - RNA, 19 nt, Artificial Sequence
  Description of Artificial Sequence: Synthetic oligonucleotide
uagaaugaaacuuaaaacu

SEQ ID NO: 2202429 - RNA, 19 nt, Artificial Sequence
  Description of Artificial Sequence: Synthetic oligonucleotide
auuaguaaauguuacagug

SEQ ID NO: 2202430 - RNA, 19 nt, Artificial Sequence
  Description of Artificial Sequence: Synthetic oligonucleotide
uuuuauucaaauauuuuga

SEQ ID NO: 2202431 - RNA, 19 nt, Artificial Sequence
  Description of Artificial Sequence: Synthetic oligonucleotide
aaguuaauuacacuggaug

SEQ ID NO: 2202432 - RNA, 19 nt, Artificial Sequence
  Description of Artificial Sequence: Synthetic oligonucleotide
uuuguuuaacauaacugcg

SEQ ID NO: 2202433 - RNA, 19 nt, Artificial Sequence
  Description of Artificial Sequence: Synthetic oligonucleotide
ucuugguuaaaacaaaccc

SEQ ID NO: 2202434 - RNA, 19 nt, Artificial Sequence
  Description of Artificial Sequence: Synthetic oligonucleotide
aauguuacaguguuggugu

SEQ ID NO: 2202435 - RNA, 19 nt, Artificial Sequence
  Description of Artificial Sequence: Synthetic oligonucleotide
acaauuaccaggaacaccc

SEQ ID NO: 2202436 - RNA, 19 nt, Artificial Sequence
  Description of Artificial Sequence: Synthetic oligonucleotide
acaauauuaagucauauau

SEQ ID NO: 2202437 - RNA, 19 nt, Artificial Sequence
  Description of Artificial Sequence: Synthetic oligonucleotide
gauaucauaauacaaugac

SEQ ID NO: 2202438 - RNA, 19 nt, Artificial Sequence
  Description of Artificial Sequence: Synthetic oligonucleotide
uuacaauuaauaauggaac

SEQ ID NO: 2202439 - RNA, 19 nt, Artificial Sequence
  Description of Artificial Sequence: Synthetic oligonucleotide
ugauacucaaguaagaauc

SEQ ID NO: 2202440 - RNA, 19 nt, Artificial Sequence
  Description of Artificial Sequence: Synthetic oligonucleotide
uuaauugagauacacagua

SEQ ID NO: 2202441 - RNA, 19 nt, Artificial Sequence
  Description of Artificial Sequence: Synthetic oligonucleotide
uguuuuaugcuucaguuac

SEQ ID NO: 2202442 - RNA, 19 nt, Artificial Sequence
  Description of Artificial Sequence: Synthetic oligonucleotide
uuaaaucuugguuaaaaca

SEQ ID NO: 2202443 - RNA, 19 nt, Artificial Sequence
  Description of Artificial Sequence: Synthetic oligonucleotide
uaauuaguaaauguuacag

SEQ ID NO: 2202444 - RNA, 19 nt, Artificial Sequence
  Description of Artificial Sequence: Synthetic oligonucleotide
ugcaauaaagcucucagcu

SEQ ID NO: 2202445 - RNA, 19 nt, Artificial Sequence
  Description of Artificial Sequence: Synthetic oligonucleotide
uauuaugauacucaaguaa

SEQ ID NO: 2202446 - RNA, 19 nt, Artificial Sequence
  Description of Artificial Sequence: Synthetic oligonucleotide
ugugaaaauagaaaguaaa

SEQ ID NO: 2202447 - RNA, 19 nt, Artificial Sequence
  Description of Artificial Sequence: Synthetic oligonucleotide
ugaaagaguaaguaaagcu

SEQ ID NO: 2202448 - RNA, 19 nt, Artificial Sequence
  Description of Artificial Sequence: Synthetic oligonucleotide
ugcacaauuaccaggaaca

SEQ ID NO: 2202449 - RNA, 19 nt, Artificial Sequence
  Description of Artificial Sequence: Synthetic oligonucleotide
aagcucucagcuuuuauuc

SEQ ID NO: 2202450 - RNA, 19 nt, Artificial Sequence
  Description of Artificial Sequence: Synthetic oligonucleotide
guaaauguuacaguguugg

SEQ ID NO: 2202451 - RNA, 19 nt, Artificial Sequence
  Description of Artificial Sequence: Synthetic oligonucleotide
uuggguaaagaaaaugucc

SEQ ID NO: 2202452 - RNA, 19 nt, Artificial Sequence
  Description of Artificial Sequence: Synthetic oligonucleotide
aaauagaaaguaaaacuag

SEQ ID NO: 2202453 - RNA, 19 nt, Artificial Sequence
  Description of Artificial Sequence: Synthetic oligonucleotide
acuuaaaacuucuuaguag

SEQ ID NO: 2202454 - RNA, 19 nt, Artificial Sequence
  Description of Artificial Sequence: Synthetic oligonucleotide
aaguaaagcuuuuccuacc

SEQ ID NO: 2202455 - RNA, 19 nt, Artificial Sequence
  Description of Artificial Sequence: Synthetic oligonucleotide
aauaaugggacagugauuu

SEQ ID NO: 2202456 - RNA, 19 nt, Artificial Sequence
  Description of Artificial Sequence: Synthetic oligonucleotide
uaaaagagaaccaaaucuc

SEQ ID NO: 2202457 - RNA, 19 nt, Artificial Sequence
  Description of Artificial Sequence: Synthetic oligonucleotide
cuggaaacaaugaugauac

SEQ ID NO: 2202458 - RNA, 19 nt, Artificial Sequence
  Description of Artificial Sequence: Synthetic oligonucleotide
uauuuugacagauucacuc

SEQ ID NO: 2202459 - RNA, 19 nt, Artificial Sequence
  Description of Artificial Sequence: Synthetic oligonucleotide
ugagauacacaguaaagca

SEQ ID NO: 2202460 - RNA, 19 nt, Artificial Sequence
  Description of Artificial Sequence: Synthetic oligonucleotide
ugauuuuacaguuuuaaua

SEQ ID NO: 2202461 - RNA, 19 nt, Artificial Sequence
  Description of Artificial Sequence: Synthetic oligonucleotide
aauuaguaaauguuacagu

SEQ ID NO: 2202462 - RNA, 19 nt, Artificial Sequence
  Description of Artificial Sequence: Synthetic oligonucleotide
ugaaaauagaaaguaaaac

SEQ ID NO: 2202463 - RNA, 19 nt, Artificial Sequence
  Description of Artificial Sequence: Synthetic oligonucleotide
aagaacacgaaaugauguc

SEQ ID NO: 2202464 - RNA, 19 nt, Artificial Sequence
  Description of Artificial Sequence: Synthetic oligonucleotide
uauguugugaaaauagaaa

SEQ ID NO: 2202465 - RNA, 19 nt, Artificial Sequence
  Description of Artificial Sequence: Synthetic oligonucleotide
aaugauaucauaauacaau

SEQ ID NO: 2202466 - RNA, 19 nt, Artificial Sequence
  Description of Artificial Sequence: Synthetic oligonucleotide
guaagaauccaguaccugg

SEQ ID NO: 2202467 - RNA, 19 nt, Artificial Sequence
  Description of Artificial Sequence: Synthetic oligonucleotide
ucaguuacauugauuauga

SEQ ID NO: 2202468 - RNA, 19 nt, Artificial Sequence
  Description of Artificial Sequence: Synthetic oligonucleotide
aaaacaaacccuuggguaa

SEQ ID NO: 2202469 - RNA, 19 nt, Artificial Sequence
  Description of Artificial Sequence: Synthetic oligonucleotide
uuuccuaccaguccuuagg

SEQ ID NO: 2202470 - RNA, 19 nt, Artificial Sequence
  Description of Artificial Sequence: Synthetic oligonucleotide
uuacaguuuuaauacuugg

SEQ ID NO: 2202471 - RNA, 19 nt, Artificial Sequence
  Description of Artificial Sequence: Synthetic oligonucleotide
augauaucauaauacaaug

SEQ ID NO: 2202472 - RNA, 19 nt, Artificial Sequence
  Description of Artificial Sequence: Synthetic oligonucleotide
ucucuaaaaguuaauuaca

SEQ ID NO: 2202473 - RNA, 19 nt, Artificial Sequence
  Description of Artificial Sequence: Synthetic oligonucleotide
uguuuaacauaacugcgug

SEQ ID NO: 2202474 - RNA, 19 nt, Artificial Sequence
  Description of Artificial Sequence: Synthetic oligonucleotide
uuaaaacaaacccuugggu

SEQ ID NO: 2202475 - RNA, 19 nt, Artificial Sequence
  Description of Artificial Sequence: Synthetic oligonucleotide
aaacacaacauauuaugau

SEQ ID NO: 2202476 - RNA, 19 nt, Artificial Sequence
  Description of Artificial Sequence: Synthetic oligonucleotide
uccaaauuaugcuuaaacu

SEQ ID NO: 2202477 - RNA, 19 nt, Artificial Sequence
  Description of Artificial Sequence: Synthetic oligonucleotide
uagaaauagcaugagaagc

SEQ ID NO: 2202478 - RNA, 19 nt, Artificial Sequence
  Description of Artificial Sequence: Synthetic oligonucleotide
uacaauuaauaauggaaca

SEQ ID NO: 2202479 - RNA, 19 nt, Artificial Sequence
  Description of Artificial Sequence: Synthetic oligonucleotide
acagauucacuccagaacu

SEQ ID NO: 2202480 - RNA, 19 nt, Artificial Sequence
  Description of Artificial Sequence: Synthetic oligonucleotide
aaauguuacaguguuggug

SEQ ID NO: 2202481 - RNA, 19 nt, Artificial Sequence
  Description of Artificial Sequence: Synthetic oligonucleotide
caauguguuaccuuagagc

SEQ ID NO: 2202482 - RNA, 19 nt, Artificial Sequence
  Description of Artificial Sequence: Synthetic oligonucleotide
aacaaaauuaugcacucua

SEQ ID NO: 2202483 - RNA, 19 nt, Artificial Sequence
  Description of Artificial Sequence: Synthetic oligonucleotide
uuuuaaaugauaucauaau

SEQ ID NO: 2202484 - RNA, 19 nt, Artificial Sequence
  Description of Artificial Sequence: Synthetic oligonucleotide
aggauaaugguguccacac

SEQ ID NO: 2202485 - RNA, 19 nt, Artificial Sequence
  Description of Artificial Sequence: Synthetic oligonucleotide
aguuaauuacacuggaugu

SEQ ID NO: 2202486 - RNA, 19 nt, Artificial Sequence
  Description of Artificial Sequence: Synthetic oligonucleotide
uaggauguaaaguaacccc

SEQ ID NO: 2202487 - RNA, 19 nt, Artificial Sequence
  Description of Artificial Sequence: Synthetic oligonucleotide
aaaaggauaauggugucca

SEQ ID NO: 2202488 - RNA, 19 nt, Artificial Sequence
  Description of Artificial Sequence: Synthetic oligonucleotide
uaccuggaaacaaugauga

SEQ ID NO: 2202489 - RNA, 19 nt, Artificial Sequence
  Description of Artificial Sequence: Synthetic oligonucleotide
auuaggugugcacaauuac

SEQ ID NO: 2202490 - RNA, 19 nt, Artificial Sequence
  Description of Artificial Sequence: Synthetic oligonucleotide
aaccccuugcuuuaaaucu

SEQ ID NO: 2202491 - RNA, 19 nt, Artificial Sequence
  Description of Artificial Sequence: Synthetic oligonucleotide
uugagauacacaguaaagc

SEQ ID NO: 2202492 - RNA, 19 nt, Artificial Sequence
  Description of Artificial Sequence: Synthetic oligonucleotide
aacacaacauauuaugaua

SEQ ID NO: 2202493 - RNA, 19 nt, Artificial Sequence
  Description of Artificial Sequence: Synthetic oligonucleotide
uuaggugugcacaauuacc

SEQ ID NO: 2202494 - RNA, 19 nt, Artificial Sequence
  Description of Artificial Sequence: Synthetic oligonucleotide
ucuauugaaagaauguauu

SEQ ID NO: 2202495 - RNA, 19 nt, Artificial Sequence
  Description of Artificial Sequence: Synthetic oligonucleotide
accaaagugagguagaaau

SEQ ID NO: 2202496 - RNA, 19 nt, Artificial Sequence
  Description of Artificial Sequence: Synthetic oligonucleotide
guauauguugugaaaauag

SEQ ID NO: 2202497 - RNA, 19 nt, Artificial Sequence
  Description of Artificial Sequence: Synthetic oligonucleotide
agaacacgaaaugaugucc

SEQ ID NO: 2202498 - RNA, 19 nt, Artificial Sequence
  Description of Artificial Sequence: Synthetic oligonucleotide
ucaauguguuaccuuagag

SEQ ID NO: 2202499 - RNA, 19 nt, Artificial Sequence
  Description of Artificial Sequence: Synthetic oligonucleotide
ugauaucauaauacaauga

SEQ ID NO: 2202500 - RNA, 19 nt, Artificial Sequence
  Description of Artificial Sequence: Synthetic oligonucleotide
uguugugaaaauagaaagu

SEQ ID NO: 2202501 - RNA, 19 nt, Artificial Sequence
  Description of Artificial Sequence: Synthetic oligonucleotide
uacacuggauguuagaggu

SEQ ID NO: 2202502 - RNA, 19 nt, Artificial Sequence
  Description of Artificial Sequence: Synthetic oligonucleotide
auacuuggugguuauaaag

SEQ ID NO: 2202503 - RNA, 19 nt, Artificial Sequence
  Description of Artificial Sequence: Synthetic oligonucleotide
aacauauuaugauacucaa

SEQ ID NO: 2202504 - RNA, 19 nt, Artificial Sequence
  Description of Artificial Sequence: Synthetic oligonucleotide
accaggaacaccccaaaac

SEQ ID NO: 2202505 - RNA, 19 nt, Artificial Sequence
  Description of Artificial Sequence: Synthetic oligonucleotide
aaagaacacgaaaugaugu

SEQ ID NO: 2202506 - RNA, 19 nt, Artificial Sequence
  Description of Artificial Sequence: Synthetic oligonucleotide
gaugauacaugccauguga

SEQ ID NO: 2202507 - RNA, 19 nt, Artificial Sequence
  Description of Artificial Sequence: Synthetic oligonucleotide
aaauuaugcacucuaucua

SEQ ID NO: 2202508 - RNA, 19 nt, Artificial Sequence
  Description of Artificial Sequence: Synthetic oligonucleotide
aauagaaaguaaaacuaga

SEQ ID NO: 2202509 - RNA, 19 nt, Artificial Sequence
  Description of Artificial Sequence: Synthetic oligonucleotide
uuacacuggauguuagagg

SEQ ID NO: 2202510 - RNA, 19 nt, Artificial Sequence
  Description of Artificial Sequence: Synthetic oligonucleotide
uaaguaaagcuuuuccuac

SEQ ID NO: 2202511 - RNA, 19 nt, Artificial Sequence
  Description of Artificial Sequence: Synthetic oligonucleotide
uuuaauugagauacacagu

SEQ ID NO: 2202512 - RNA, 19 nt, Artificial Sequence
  Description of Artificial Sequence: Synthetic oligonucleotide
uuaguaaauguuacagugu

SEQ ID NO: 2202513 - RNA, 19 nt, Artificial Sequence
  Description of Artificial Sequence: Synthetic oligonucleotide
aauuaugcuuaaacucugc

SEQ ID NO: 2202514 - RNA, 19 nt, Artificial Sequence
  Description of Artificial Sequence: Synthetic oligonucleotide
uacucaaguaagaauccag

SEQ ID NO: 2202515 - RNA, 19 nt, Artificial Sequence
  Description of Artificial Sequence: Synthetic oligonucleotide
uucuauugaaagaauguau

SEQ ID NO: 2202516 - RNA, 19 nt, Artificial Sequence
  Description of Artificial Sequence: Synthetic oligonucleotide
uaaaguaaccccuugcuuu

SEQ ID NO: 2202517 - RNA, 19 nt, Artificial Sequence
  Description of Artificial Sequence: Synthetic oligonucleotide
cucuaaaaguuaauuacac

SEQ ID NO: 2202518 - RNA, 19 nt, Artificial Sequence
  Description of Artificial Sequence: Synthetic oligonucleotide
uuaccuuagagcuuugggu

SEQ ID NO: 2202519 - RNA, 19 nt, Artificial Sequence
  Description of Artificial Sequence: Synthetic oligonucleotide
uucaguuacauugauuaug

SEQ ID NO: 2202520 - RNA, 19 nt, Artificial Sequence
  Description of Artificial Sequence: Synthetic oligonucleotide
uuugcaaaauaaugggaca

SEQ ID NO: 2202521 - RNA, 19 nt, Artificial Sequence
  Description of Artificial Sequence: Synthetic oligonucleotide
uaggugugcacaauuacca

SEQ ID NO: 2202522 - RNA, 19 nt, Artificial Sequence
  Description of Artificial Sequence: Synthetic oligonucleotide
agagguaacaaauuugcaa

SEQ ID NO: 2202523 - RNA, 19 nt, Artificial Sequence
  Description of Artificial Sequence: Synthetic oligonucleotide
uacacaguaaagcaguaau

SEQ ID NO: 2202524 - RNA, 19 nt, Artificial Sequence
  Description of Artificial Sequence: Synthetic oligonucleotide
cauauuaugauacucaagu

SEQ ID NO: 2202525 - RNA, 19 nt, Artificial Sequence
  Description of Artificial Sequence: Synthetic oligonucleotide
aguaggauguaaaguaacc

SEQ ID NO: 2202526 - RNA, 19 nt, Artificial Sequence
  Description of Artificial Sequence: Synthetic oligonucleotide
uuuuacaguuuuaauacuu

SEQ ID NO: 2202527 - RNA, 19 nt, Artificial Sequence
  Description of Artificial Sequence: Synthetic oligonucleotide
acaacauauuaugauacuc

SEQ ID NO: 2202528 - RNA, 19 nt, Artificial Sequence
  Description of Artificial Sequence: Synthetic oligonucleotide
ugcauuuauguauggaugu

SEQ ID NO: 2202529 - RNA, 19 nt, Artificial Sequence
  Description of Artificial Sequence: Synthetic oligonucleotide
acacaacauauuaugauac

SEQ ID NO: 2202530 - RNA, 19 nt, Artificial Sequence
  Description of Artificial Sequence: Synthetic oligonucleotide
ucuaaaaguuaauuacacu

SEQ ID NO: 2202531 - RNA, 19 nt, Artificial Sequence
  Description of Artificial Sequence: Synthetic oligonucleotide
uaaguguugaagcugugaa

SEQ ID NO: 2202532 - RNA, 19 nt, Artificial Sequence
  Description of Artificial Sequence: Synthetic oligonucleotide
uguguuugauguuaauuac

SEQ ID NO: 2202533 - RNA, 19 nt, Artificial Sequence
  Description of Artificial Sequence: Synthetic oligonucleotide
guuaccuuagagcuuuggg

SEQ ID NO: 2202534 - RNA, 19 nt, Artificial Sequence
  Description of Artificial Sequence: Synthetic oligonucleotide
uaagaauccaguaccugga

SEQ ID NO: 2202535 - RNA, 19 nt, Artificial Sequence
  Description of Artificial Sequence: Synthetic oligonucleotide
uucuuaguaggauguaaag

SEQ ID NO: 2202536 - RNA, 19 nt, Artificial Sequence
  Description of Artificial Sequence: Synthetic oligonucleotide
auauauuuggugaaguucu

SEQ ID NO: 2202537 - RNA, 19 nt, Artificial Sequence
  Description of Artificial Sequence: Synthetic oligonucleotide
uaugcuucaguuacauuga

SEQ ID NO: 2202538 - RNA, 19 nt, Artificial Sequence
  Description of Artificial Sequence: Synthetic oligonucleotide
gguuaaaacaaacccuugg

SEQ ID NO: 2202539 - RNA, 19 nt, Artificial Sequence
  Description of Artificial Sequence: Synthetic oligonucleotide
uacaguuuuaauacuuggu

SEQ ID NO: 2202540 - RNA, 19 nt, Artificial Sequence
  Description of Artificial Sequence: Synthetic oligonucleotide
uguuagagguaacaaauuu

SEQ ID NO: 2202541 - RNA, 19 nt, Artificial Sequence
  Description of Artificial Sequence: Synthetic oligonucleotide
gauaaugguguccacacaa

SEQ ID NO: 2202542 - RNA, 19 nt, Artificial Sequence
  Description of Artificial Sequence: Synthetic oligonucleotide
uuaugauacucaaguaaga

SEQ ID NO: 2202543 - RNA, 19 nt, Artificial Sequence
  Description of Artificial Sequence: Synthetic oligonucleotide
cuuaguaggauguaaagua

SEQ ID NO: 2202544 - RNA, 19 nt, Artificial Sequence
  Description of Artificial Sequence: Synthetic oligonucleotide
gugagguagaaauagcaug

SEQ ID NO: 2202545 - RNA, 19 nt, Artificial Sequence
  Description of Artificial Sequence: Synthetic oligonucleotide
ugauuaugauuuuacaguu

SEQ ID NO: 2202546 - RNA, 19 nt, Artificial Sequence
  Description of Artificial Sequence: Synthetic oligonucleotide
cauaaaagagaaccaaauc

SEQ ID NO: 2202547 - RNA, 19 nt, Artificial Sequence
  Description of Artificial Sequence: Synthetic oligonucleotide
uccagaacuaauaucuaaa

SEQ ID NO: 2202548 - RNA, 19 nt, Artificial Sequence
  Description of Artificial Sequence: Synthetic oligonucleotide
aucuugguuaaaacaaacc

SEQ ID NO: 2202549 - RNA, 19 nt, Artificial Sequence
  Description of Artificial Sequence: Synthetic oligonucleotide
aauuugcaaaauaauggga

SEQ ID NO: 2202550 - RNA, 19 nt, Artificial Sequence
  Description of Artificial Sequence: Synthetic oligonucleotide
ugauguuaauuacaauuaa

SEQ ID NO: 2202551 - RNA, 19 nt, Artificial Sequence
  Description of Artificial Sequence: Synthetic oligonucleotide
uaguaaauguuacaguguu

SEQ ID NO: 2202552 - RNA, 19 nt, Artificial Sequence
  Description of Artificial Sequence: Synthetic oligonucleotide
acagauaaguguugaagcu

SEQ ID NO: 2202553 - RNA, 19 nt, Artificial Sequence
  Description of Artificial Sequence: Synthetic oligonucleotide
gacagauucacuccagaac

SEQ ID NO: 2202554 - RNA, 19 nt, Artificial Sequence
  Description of Artificial Sequence: Synthetic oligonucleotide
cagaacuaauaucuaaaag

SEQ ID NO: 2202555 - RNA, 19 nt, Artificial Sequence
  Description of Artificial Sequence: Synthetic oligonucleotide
uuaguaggauguaaaguaa

SEQ ID NO: 2202556 - RNA, 19 nt, Artificial Sequence
  Description of Artificial Sequence: Synthetic oligonucleotide
ucuguauauguugugaaaa

SEQ ID NO: 2202557 - RNA, 19 nt, Artificial Sequence
  Description of Artificial Sequence: Synthetic oligonucleotide
aaaggauaaugguguccac

SEQ ID NO: 2202558 - RNA, 19 nt, Artificial Sequence
  Description of Artificial Sequence: Synthetic oligonucleotide
aacaaauuugcaaaauaau

SEQ ID NO: 2202559 - RNA, 19 nt, Artificial Sequence
  Description of Artificial Sequence: Synthetic oligonucleotide
aacugcgugcuuuaauuga

SEQ ID NO: 2202560 - RNA, 19 nt, Artificial Sequence
  Description of Artificial Sequence: Synthetic oligonucleotide
uaauuacacuggauguuag

SEQ ID NO: 2202561 - RNA, 19 nt, Artificial Sequence
  Description of Artificial Sequence: Synthetic oligonucleotide
aagucauauauuuggugaa

SEQ ID NO: 2202562 - RNA, 19 nt, Artificial Sequence
  Description of Artificial Sequence: Synthetic oligonucleotide
aauuacacuggauguuaga

SEQ ID NO: 2202563 - RNA, 19 nt, Artificial Sequence
  Description of Artificial Sequence: Synthetic oligonucleotide
uuaugcuuaaacucugcaa

SEQ ID NO: 2202564 - RNA, 19 nt, Artificial Sequence
  Description of Artificial Sequence: Synthetic oligonucleotide
ugaaauuaggugugcacaa

SEQ ID NO: 2202565 - RNA, 19 nt, Artificial Sequence
  Description of Artificial Sequence: Synthetic oligonucleotide
gauacucaaguaagaaucc

SEQ ID NO: 2202566 - RNA, 19 nt, Artificial Sequence
  Description of Artificial Sequence: Synthetic oligonucleotide
aaauuaugcuuaaacucug

SEQ ID NO: 2202567 - RNA, 19 nt, Artificial Sequence
  Description of Artificial Sequence: Synthetic oligonucleotide
guccaaauuaugcuuaaac

SEQ ID NO: 2202568 - RNA, 19 nt, Artificial Sequence
  Description of Artificial Sequence: Synthetic oligonucleotide
uaugauacucaaguaagaa

SEQ ID NO: 2202569 - RNA, 19 nt, Artificial Sequence
  Description of Artificial Sequence: Synthetic oligonucleotide
uagguuggugcauuuaugu

SEQ ID NO: 2202570 - RNA, 19 nt, Artificial Sequence
  Description of Artificial Sequence: Synthetic oligonucleotide
aaagaguaaguaaagcuuu

SEQ ID NO: 2202571 - RNA, 19 nt, Artificial Sequence
  Description of Artificial Sequence: Synthetic oligonucleotide
aauuaccaggaacacccca

SEQ ID NO: 2202572 - RNA, 19 nt, Artificial Sequence
  Description of Artificial Sequence: Synthetic oligonucleotide
auuucuauugaaagaaugu

SEQ ID NO: 2202573 - RNA, 19 nt, Artificial Sequence
  Description of Artificial Sequence: Synthetic oligonucleotide
uuugacagauucacuccag

SEQ ID NO: 2202574 - RNA, 19 nt, Artificial Sequence
  Description of Artificial Sequence: Synthetic oligonucleotide
cauauauuuggugaaguuc

SEQ ID NO: 2202575 - RNA, 19 nt, Artificial Sequence
  Description of Artificial Sequence: Synthetic oligonucleotide
agcaguaauauaaauacaa

SEQ ID NO: 2202576 - RNA, 19 nt, Artificial Sequence
  Description of Artificial Sequence: Synthetic oligonucleotide
auacaaugacaugaaagag

SEQ ID NO: 2202577 - RNA, 19 nt, Artificial Sequence
  Description of Artificial Sequence: Synthetic oligonucleotide
aauguccagcgucacauaa

SEQ ID NO: 2202578 - RNA, 19 nt, Artificial Sequence
  Description of Artificial Sequence: Synthetic oligonucleotide
uuagguuggugcauuuaug

SEQ ID NO: 2202579 - RNA, 19 nt, Artificial Sequence
  Description of Artificial Sequence: Synthetic oligonucleotide
aaacuucuuaguaggaugu

SEQ ID NO: 2202580 - RNA, 19 nt, Artificial Sequence
  Description of Artificial Sequence: Synthetic oligonucleotide
uucacuccagaacuaauau

SEQ ID NO: 2202581 - RNA, 19 nt, Artificial Sequence
  Description of Artificial Sequence: Synthetic oligonucleotide
guuagagguaacaaauuug

SEQ ID NO: 2202582 - RNA, 19 nt, Artificial Sequence
  Description of Artificial Sequence: Synthetic oligonucleotide
caaaauuaugcacucuauc

SEQ ID NO: 2202583 - RNA, 19 nt, Artificial Sequence
  Description of Artificial Sequence: Synthetic oligonucleotide
auaacugcgugcuuuaauu

SEQ ID NO: 2202584 - RNA, 19 nt, Artificial Sequence
  Description of Artificial Sequence: Synthetic oligonucleotide
uauugaaagaauguauuuu

SEQ ID NO: 2202585 - RNA, 19 nt, Artificial Sequence
  Description of Artificial Sequence: Synthetic oligonucleotide
caacauauuaugauacuca

SEQ ID NO: 2202586 - RNA, 19 nt, Artificial Sequence
  Description of Artificial Sequence: Synthetic oligonucleotide
uaauacuuggugguuauaa

SEQ ID NO: 2202587 - RNA, 19 nt, Artificial Sequence
  Description of Artificial Sequence: Synthetic oligonucleotide
aagaaaauguccagcguca

SEQ ID NO: 2202588 - RNA, 19 nt, Artificial Sequence
  Description of Artificial Sequence: Synthetic oligonucleotide
auaaagaacacgaaaugau

SEQ ID NO: 2202589 - RNA, 19 nt, Artificial Sequence
  Description of Artificial Sequence: Synthetic oligonucleotide
auugagauacacaguaaag

SEQ ID NO: 2202590 - RNA, 19 nt, Artificial Sequence
  Description of Artificial Sequence: Synthetic oligonucleotide
aguaaagcuuuuccuacca

SEQ ID NO: 2202591 - RNA, 19 nt, Artificial Sequence
  Description of Artificial Sequence: Synthetic oligonucleotide
aguaccuggaaacaaugau

SEQ ID NO: 2202592 - RNA, 19 nt, Artificial Sequence
  Description of Artificial Sequence: Synthetic oligonucleotide
uauauuuggugaaguucug

SEQ ID NO: 2202593 - RNA, 19 nt, Artificial Sequence
  Description of Artificial Sequence: Synthetic oligonucleotide
caaaucucaauguguuacc

SEQ ID NO: 2202594 - RNA, 19 nt, Artificial Sequence
  Description of Artificial Sequence: Synthetic oligonucleotide
auuuuacaguuuuaauacu

SEQ ID NO: 2202595 - RNA, 19 nt, Artificial Sequence
  Description of Artificial Sequence: Synthetic oligonucleotide
uuucuauugaaagaaugua

SEQ ID NO: 2202596 - RNA, 19 nt, Artificial Sequence
  Description of Artificial Sequence: Synthetic oligonucleotide
auuaugcacucuaucuacc

SEQ ID NO: 2202597 - RNA, 19 nt, Artificial Sequence
  Description of Artificial Sequence: Synthetic oligonucleotide
aguguugaagcugugaaau

SEQ ID NO: 2202598 - RNA, 19 nt, Artificial Sequence
  Description of Artificial Sequence: Synthetic oligonucleotide
ugaugauacaugccaugug

SEQ ID NO: 2202599 - RNA, 19 nt, Artificial Sequence
  Description of Artificial Sequence: Synthetic oligonucleotide
uuaauuacacuggauguua

SEQ ID NO: 2202600 - RNA, 19 nt, Artificial Sequence
  Description of Artificial Sequence: Synthetic oligonucleotide
aaaguaaccccuugcuuua

SEQ ID NO: 2202601 - RNA, 19 nt, Artificial Sequence
  Description of Artificial Sequence: Synthetic oligonucleotide
guaaguaaagcuuuuccua

SEQ ID NO: 2202602 - RNA, 19 nt, Artificial Sequence
  Description of Artificial Sequence: Synthetic oligonucleotide
guaggauguaaaguaaccc

SEQ ID NO: 2202603 - RNA, 19 nt, Artificial Sequence
  Description of Artificial Sequence: Synthetic oligonucleotide
uguccagcgucacauaaaa

SEQ ID NO: 2202604 - RNA, 19 nt, Artificial Sequence
  Description of Artificial Sequence: Synthetic oligonucleotide
agagcuuuggguuuucuuu

SEQ ID NO: 2202605 - RNA, 19 nt, Artificial Sequence
  Description of Artificial Sequence: Synthetic oligonucleotide
gaaauagcaugagaagcug

SEQ ID NO: 2202606 - RNA, 19 nt, Artificial Sequence
  Description of Artificial Sequence: Synthetic oligonucleotide
ugcuuuaauugagauacac

SEQ ID NO: 2202607 - RNA, 19 nt, Artificial Sequence
  Description of Artificial Sequence: Synthetic oligonucleotide
uaaugggacagugauuucu

SEQ ID NO: 2202608 - RNA, 19 nt, Artificial Sequence
  Description of Artificial Sequence: Synthetic oligonucleotide
auaucauaauacaaugaca

SEQ ID NO: 2202609 - RNA, 19 nt, Artificial Sequence
  Description of Artificial Sequence: Synthetic oligonucleotide
uuaugcacucuaucuaccu

SEQ ID NO: 2202610 - RNA, 19 nt, Artificial Sequence
  Description of Artificial Sequence: Synthetic oligonucleotide
aaggauaaugguguccaca

SEQ ID NO: 2202611 - RNA, 19 nt, Artificial Sequence
  Description of Artificial Sequence: Synthetic oligonucleotide
uguugaagcugugaaauua

SEQ ID NO: 2202612 - RNA, 19 nt, Artificial Sequence
  Description of Artificial Sequence: Synthetic oligonucleotide
cuaccaguccuuagguugg

SEQ ID NO: 2202613 - RNA, 19 nt, Artificial Sequence
  Description of Artificial Sequence: Synthetic oligonucleotide
gauguuuuaugcuucaguu

SEQ ID NO: 2202614 - RNA, 19 nt, Artificial Sequence
  Description of Artificial Sequence: Synthetic oligonucleotide
uaacugcgugcuuuaauug

SEQ ID NO: 2202615 - RNA, 19 nt, Artificial Sequence
  Description of Artificial Sequence: Synthetic oligonucleotide
aacucucuaaaaguuaauu

SEQ ID NO: 2202616 - RNA, 19 nt, Artificial Sequence
  Description of Artificial Sequence: Synthetic oligonucleotide
cgugcuuuaauugagauac

SEQ ID NO: 2202617 - RNA, 19 nt, Artificial Sequence
  Description of Artificial Sequence: Synthetic oligonucleotide
uaauugagauacacaguaa

SEQ ID NO: 2202618 - RNA, 19 nt, Artificial Sequence
  Description of Artificial Sequence: Synthetic oligonucleotide
gguagaaauagcaugagaa

SEQ ID NO: 2202619 - RNA, 19 nt, Artificial Sequence
  Description of Artificial Sequence: Synthetic oligonucleotide
ugguuaaaacaaacccuug

SEQ ID NO: 2202620 - RNA, 19 nt, Artificial Sequence
  Description of Artificial Sequence: Synthetic oligonucleotide
agaaugaaacuuaaaacuu

SEQ ID NO: 2202621 - RNA, 19 nt, Artificial Sequence
  Description of Artificial Sequence: Synthetic oligonucleotide
uguauauguugugaaaaua

SEQ ID NO: 2202622 - RNA, 19 nt, Artificial Sequence
  Description of Artificial Sequence: Synthetic oligonucleotide
gaacuaauaucuaaaagau

SEQ ID NO: 2202623 - RNA, 19 nt, Artificial Sequence
  Description of Artificial Sequence: Synthetic oligonucleotide
gauguuagagguaacaaau

SEQ ID NO: 2202624 - RNA, 19 nt, Artificial Sequence
  Description of Artificial Sequence: Synthetic oligonucleotide
uaaaacuucuuaguaggau

SEQ ID NO: 2202625 - RNA, 19 nt, Artificial Sequence
  Description of Artificial Sequence: Synthetic oligonucleotide
ggugguuauaaagaacacg

SEQ ID NO: 2202626 - RNA, 19 nt, Artificial Sequence
  Description of Artificial Sequence: Synthetic oligonucleotide
uuuuccuaccaguccuuag

SEQ ID NO: 2202627 - RNA, 19 nt, Artificial Sequence
  Description of Artificial Sequence: Synthetic oligonucleotide
uguguuaccuuagagcuuu

SEQ ID NO: 2202628 - RNA, 19 nt, Artificial Sequence
  Description of Artificial Sequence: Synthetic oligonucleotide
aaguguugaagcugugaaa

SEQ ID NO: 2202629 - RNA, 19 nt, Artificial Sequence
  Description of Artificial Sequence: Synthetic oligonucleotide
cuguguuugauguuaauua

SEQ ID NO: 2202630 - RNA, 19 nt, Artificial Sequence
  Description of Artificial Sequence: Synthetic oligonucleotide
gguaaagaaaauguccagc

SEQ ID NO: 2202631 - RNA, 19 nt, Artificial Sequence
  Description of Artificial Sequence: Synthetic oligonucleotide
ucauauauuuggugaaguu

SEQ ID NO: 2202632 - RNA, 19 nt, Artificial Sequence
  Description of Artificial Sequence: Synthetic oligonucleotide
cacuccagaacuaauaucu

SEQ ID NO: 2202633 - RNA, 19 nt, Artificial Sequence
  Description of Artificial Sequence: Synthetic oligonucleotide
guugaagcugugaaauuag

SEQ ID NO: 2202634 - RNA, 19 nt, Artificial Sequence
  Description of Artificial Sequence: Synthetic oligonucleotide
guaccuggaaacaaugaug

SEQ ID NO: 2202635 - RNA, 19 nt, Artificial Sequence
  Description of Artificial Sequence: Synthetic oligonucleotide
gguuauaaagaacacgaaa

SEQ ID NO: 2202636 - RNA, 19 nt, Artificial Sequence
  Description of Artificial Sequence: Synthetic oligonucleotide
auauguugugaaaauagaa

SEQ ID NO: 2202637 - RNA, 19 nt, Artificial Sequence
  Description of Artificial Sequence: Synthetic oligonucleotide
auauuaugauacucaagua

SEQ ID NO: 2202638 - RNA, 19 nt, Artificial Sequence
  Description of Artificial Sequence: Synthetic oligonucleotide
cuugguuaaaacaaacccu

SEQ ID NO: 2202639 - RNA, 19 nt, Artificial Sequence
  Description of Artificial Sequence: Synthetic oligonucleotide
auuaagucauauauuuggu

SEQ ID NO: 2202640 - RNA, 19 nt, Artificial Sequence
  Description of Artificial Sequence: Synthetic oligonucleotide
uucuguauauguugugaaa

SEQ ID NO: 2202641 - RNA, 19 nt, Artificial Sequence
  Description of Artificial Sequence: Synthetic oligonucleotide
auuuggugaaguucuguau

SEQ ID NO: 2202642 - RNA, 19 nt, Artificial Sequence
  Description of Artificial Sequence: Synthetic oligonucleotide
aaacccuuggguaaagaaa

SEQ ID NO: 2202643 - RNA, 19 nt, Artificial Sequence
  Description of Artificial Sequence: Synthetic oligonucleotide
aaagagaaccaaaucucaa

SEQ ID NO: 2202644 - RNA, 19 nt, Artificial Sequence
  Description of Artificial Sequence: Synthetic oligonucleotide
caaaauaaugggacaguga

SEQ ID NO: 2202645 - RNA, 19 nt, Artificial Sequence
  Description of Artificial Sequence: Synthetic oligonucleotide
cgucacauaaaagagaacc

SEQ ID NO: 2202646 - RNA, 19 nt, Artificial Sequence
  Description of Artificial Sequence: Synthetic oligonucleotide
ugguuauaaagaacacgaa

SEQ ID NO: 2202647 - RNA, 19 nt, Artificial Sequence
  Description of Artificial Sequence: Synthetic oligonucleotide
agauaaguguugaagcugu

SEQ ID NO: 2202648 - RNA, 19 nt, Artificial Sequence
  Description of Artificial Sequence: Synthetic oligonucleotide
aacauaacugcgugcuuua

SEQ ID NO: 2202649 - RNA, 19 nt, Artificial Sequence
  Description of Artificial Sequence: Synthetic oligonucleotide
agucauauauuuggugaag

SEQ ID NO: 2202650 - RNA, 19 nt, Artificial Sequence
  Description of Artificial Sequence: Synthetic oligonucleotide
uaaauguuacaguguuggu

SEQ ID NO: 2202651 - RNA, 19 nt, Artificial Sequence
  Description of Artificial Sequence: Synthetic oligonucleotide
guuggugcauuuauguaug

SEQ ID NO: 2202652 - RNA, 19 nt, Artificial Sequence
  Description of Artificial Sequence: Synthetic oligonucleotide
uaugcacucuaucuaccuc

SEQ ID NO: 2202653 - RNA, 19 nt, Artificial Sequence
  Description of Artificial Sequence: Synthetic oligonucleotide
uguuaccuuagagcuuugg

SEQ ID NO: 2202654 - RNA, 19 nt, Artificial Sequence
  Description of Artificial Sequence: Synthetic oligonucleotide
gugcauuuauguauggaug

SEQ ID NO: 2202655 - RNA, 19 nt, Artificial Sequence
  Description of Artificial Sequence: Synthetic oligonucleotide
aauuaggugugcacaauua

SEQ ID NO: 2202656 - RNA, 19 nt, Artificial Sequence
  Description of Artificial Sequence: Synthetic oligonucleotide
agaaaauguccagcgucac

SEQ ID NO: 2202657 - RNA, 19 nt, Artificial Sequence
  Description of Artificial Sequence: Synthetic oligonucleotide
uuccuaccaguccuuaggu

SEQ ID NO: 2202658 - RNA, 19 nt, Artificial Sequence
  Description of Artificial Sequence: Synthetic oligonucleotide
gugaaauuaggugugcaca

SEQ ID NO: 2202659 - RNA, 19 nt, Artificial Sequence
  Description of Artificial Sequence: Synthetic oligonucleotide
acauauuaugauacucaag

SEQ ID NO: 2202660 - RNA, 19 nt, Artificial Sequence
  Description of Artificial Sequence: Synthetic oligonucleotide
uccaguaccuggaaacaau

SEQ ID NO: 2202661 - RNA, 19 nt, Artificial Sequence
  Description of Artificial Sequence: Synthetic oligonucleotide
ugcaaaauaaugggacagu

SEQ ID NO: 2202662 - RNA, 19 nt, Artificial Sequence
  Description of Artificial Sequence: Synthetic oligonucleotide
acaguaaagcaguaauaua

SEQ ID NO: 2202663 - RNA, 19 nt, Artificial Sequence
  Description of Artificial Sequence: Synthetic oligonucleotide
guaaagcuuuuccuaccag

SEQ ID NO: 2202664 - RNA, 19 nt, Artificial Sequence
  Description of Artificial Sequence: Synthetic oligonucleotide
gaaagaguaaguaaagcuu

SEQ ID NO: 2202665 - RNA, 19 nt, Artificial Sequence
  Description of Artificial Sequence: Synthetic oligonucleotide
ccaggaacaccccaaaacc

SEQ ID NO: 2202666 - RNA, 19 nt, Artificial Sequence
  Description of Artificial Sequence: Synthetic oligonucleotide
aggauguaaaguaaccccu

SEQ ID NO: 2202667 - RNA, 19 nt, Artificial Sequence
  Description of Artificial Sequence: Synthetic oligonucleotide
auaaugggacagugauuuc

SEQ ID NO: 2202668 - RNA, 19 nt, Artificial Sequence
  Description of Artificial Sequence: Synthetic oligonucleotide
aacacgaaaugauguccaa

SEQ ID NO: 2202669 - RNA, 19 nt, Artificial Sequence
  Description of Artificial Sequence: Synthetic oligonucleotide
aguaagaauccaguaccug

SEQ ID NO: 2202670 - RNA, 19 nt, Artificial Sequence
  Description of Artificial Sequence: Synthetic oligonucleotide
uaacauaacugcgugcuuu

SEQ ID NO: 2202671 - RNA, 19 nt, Artificial Sequence
  Description of Artificial Sequence: Synthetic oligonucleotide
guauggaugugugugugug

SEQ ID NO: 2202672 - RNA, 19 nt, Artificial Sequence
  Description of Artificial Sequence: Synthetic oligonucleotide
gacagugauuucuauugaa

SEQ ID NO: 2202673 - RNA, 19 nt, Artificial Sequence
  Description of Artificial Sequence: Synthetic oligonucleotide
gaacaccccaaaaccaaag

SEQ ID NO: 2202674 - RNA, 19 nt, Artificial Sequence
  Description of Artificial Sequence: Synthetic oligonucleotide
uggugguuauaaagaacac

SEQ ID NO: 2202675 - RNA, 19 nt, Artificial Sequence
  Description of Artificial Sequence: Synthetic oligonucleotide
uggauguuagagguaacaa

SEQ ID NO: 2202676 - RNA, 19 nt, Artificial Sequence
  Description of Artificial Sequence: Synthetic oligonucleotide
aacuaauaucuaaaagaua

SEQ ID NO: 2202677 - RNA, 19 nt, Artificial Sequence
  Description of Artificial Sequence: Synthetic oligonucleotide
agcgucacauaaaagagaa

SEQ ID NO: 2202678 - RNA, 19 nt, Artificial Sequence
  Description of Artificial Sequence: Synthetic oligonucleotide
uaucuaccucugauuuuag

SEQ ID NO: 2202679 - RNA, 19 nt, Artificial Sequence
  Description of Artificial Sequence: Synthetic oligonucleotide
ccuaccaguccuuagguug

SEQ ID NO: 2202680 - RNA, 19 nt, Artificial Sequence
  Description of Artificial Sequence: Synthetic oligonucleotide
gaaaauguccagcgucaca

SEQ ID NO: 2202681 - RNA, 19 nt, Artificial Sequence
  Description of Artificial Sequence: Synthetic oligonucleotide
acucaaguaagaauccagu

SEQ ID NO: 2202682 - RNA, 19 nt, Artificial Sequence
  Description of Artificial Sequence: Synthetic oligonucleotide
auguuuuaugcuucaguua

SEQ ID NO: 2202683 - RNA, 19 nt, Artificial Sequence
  Description of Artificial Sequence: Synthetic oligonucleotide
auaaguguugaagcuguga

SEQ ID NO: 2202684 - RNA, 19 nt, Artificial Sequence
  Description of Artificial Sequence: Synthetic oligonucleotide
cuucuuaguaggauguaaa

SEQ ID NO: 2202685 - RNA, 19 nt, Artificial Sequence
  Description of Artificial Sequence: Synthetic oligonucleotide
augugauguuuuaugcuuc

SEQ ID NO: 2202686 - RNA, 19 nt, Artificial Sequence
  Description of Artificial Sequence: Synthetic oligonucleotide
gugcacaauuaccaggaac

SEQ ID NO: 2202687 - RNA, 19 nt, Artificial Sequence
  Description of Artificial Sequence: Synthetic oligonucleotide
auggaugugugugugugug

SEQ ID NO: 2202688 - RNA, 19 nt, Artificial Sequence
  Description of Artificial Sequence: Synthetic oligonucleotide
accccaaaaccaaagugag

SEQ ID NO: 2202689 - RNA, 19 nt, Artificial Sequence
  Description of Artificial Sequence: Synthetic oligonucleotide
uacauugauuaugauuuua

SEQ ID NO: 2202690 - RNA, 19 nt, Artificial Sequence
  Description of Artificial Sequence: Synthetic oligonucleotide
ugcgugcuuuaauugagau

SEQ ID NO: 2202691 - RNA, 19 nt, Artificial Sequence
  Description of Artificial Sequence: Synthetic oligonucleotide
uuaccaggaacaccccaaa

SEQ ID NO: 2202692 - RNA, 19 nt, Artificial Sequence
  Description of Artificial Sequence: Synthetic oligonucleotide
uauggaugugugugugugu

SEQ ID NO: 2202693 - RNA, 19 nt, Artificial Sequence
  Description of Artificial Sequence: Synthetic oligonucleotide
ccaaaucucaauguguuac

SEQ ID NO: 2202694 - RNA, 19 nt, Artificial Sequence
  Description of Artificial Sequence: Synthetic oligonucleotide
aaacaaacccuuggguaaa

SEQ ID NO: 2202695 - RNA, 19 nt, Artificial Sequence
  Description of Artificial Sequence: Synthetic oligonucleotide
acugcgugcuuuaauugag

SEQ ID NO: 2202696 - RNA, 19 nt, Artificial Sequence
  Description of Artificial Sequence: Synthetic oligonucleotide
auauuuggugaaguucugu

SEQ ID NO: 2202697 - RNA, 19 nt, Artificial Sequence
  Description of Artificial Sequence: Synthetic oligonucleotide
aacaaacccuuggguaaag

SEQ ID NO: 2202698 - RNA, 19 nt, Artificial Sequence
  Description of Artificial Sequence: Synthetic oligonucleotide
gcaaaauaaugggacagug

SEQ ID NO: 2202699 - RNA, 19 nt, Artificial Sequence
  Description of Artificial Sequence: Synthetic oligonucleotide
ucuaucuaccucugauuuu

SEQ ID NO: 2202700 - RNA, 19 nt, Artificial Sequence
  Description of Artificial Sequence: Synthetic oligonucleotide
augugugugugugugugug

SEQ ID NO: 2202701 - RNA, 19 nt, Artificial Sequence
  Description of Artificial Sequence: Synthetic oligonucleotide
agugagguagaaauagcau

SEQ ID NO: 2202702 - RNA, 19 nt, Artificial Sequence
  Description of Artificial Sequence: Synthetic oligonucleotide
acuucuuaguaggauguaa

SEQ ID NO: 2202703 - RNA, 19 nt, Artificial Sequence
  Description of Artificial Sequence: Synthetic oligonucleotide
agcugugaaauuaggugug

SEQ ID NO: 2202704 - RNA, 19 nt, Artificial Sequence
  Description of Artificial Sequence: Synthetic oligonucleotide
acaaaauuaugcacucuau

SEQ ID NO: 2202705 - RNA, 19 nt, Artificial Sequence
  Description of Artificial Sequence: Synthetic oligonucleotide
gugugcacaauuaccagga

SEQ ID NO: 2202706 - RNA, 19 nt, Artificial Sequence
  Description of Artificial Sequence: Synthetic oligonucleotide
cuuuggguuuucuuuugga

SEQ ID NO: 2202707 - RNA, 19 nt, Artificial Sequence
  Description of Artificial Sequence: Synthetic oligonucleotide
cacacaacagauaaguguu

SEQ ID NO: 2202708 - RNA, 19 nt, Artificial Sequence
  Description of Artificial Sequence: Synthetic oligonucleotide
ggauguuagagguaacaaa

SEQ ID NO: 2202709 - RNA, 19 nt, Artificial Sequence
  Description of Artificial Sequence: Synthetic oligonucleotide
caaacccuuggguaaagaa

SEQ ID NO: 2202710 - RNA, 19 nt, Artificial Sequence
  Description of Artificial Sequence: Synthetic oligonucleotide
aucuaccucugauuuuaga

SEQ ID NO: 2202711 - RNA, 19 nt, Artificial Sequence
  Description of Artificial Sequence: Synthetic oligonucleotide
acgaaaugauguccaaauu

SEQ ID NO: 2202712 - RNA, 19 nt, Artificial Sequence
  Description of Artificial Sequence: Synthetic oligonucleotide
auuaccaggaacaccccaa

SEQ ID NO: 2202713 - RNA, 19 nt, Artificial Sequence
  Description of Artificial Sequence: Synthetic oligonucleotide
cuaucuaccucugauuuua

SEQ ID NO: 2202714 - RNA, 19 nt, Artificial Sequence
  Description of Artificial Sequence: Synthetic oligonucleotide
ggugaaguucuguauaugu

SEQ ID NO: 2202715 - RNA, 19 nt, Artificial Sequence
  Description of Artificial Sequence: Synthetic oligonucleotide
auagcaugagaagcugugu

SEQ ID NO: 2202716 - RNA, 19 nt, Artificial Sequence
  Description of Artificial Sequence: Synthetic oligonucleotide
ugugugugugugugugugu

SEQ ID NO: 2202717 - RNA, 19 nt, Artificial Sequence
  Description of Artificial Sequence: Synthetic oligonucleotide
gauaaguguugaagcugug

SEQ ID NO: 2202718 - RNA, 19 nt, Artificial Sequence
  Description of Artificial Sequence: Synthetic oligonucleotide
uuuaugcuucaguuacauu

SEQ ID NO: 2202719 - RNA, 19 nt, Artificial Sequence
  Description of Artificial Sequence: Synthetic oligonucleotide
cuccagaacuaauaucuaa

SEQ ID NO: 2202720 - RNA, 19 nt, Artificial Sequence
  Description of Artificial Sequence: Synthetic oligonucleotide
auacaugccaugugauguu

SEQ ID NO: 2202721 - RNA, 19 nt, Artificial Sequence
  Description of Artificial Sequence: Synthetic oligonucleotide
cacgaaaugauguccaaau

SEQ ID NO: 2202722 - RNA, 19 nt, Artificial Sequence
  Description of Artificial Sequence: Synthetic oligonucleotide
caauaaagcucucagcuuu

SEQ ID NO: 2202723 - RNA, 19 nt, Artificial Sequence
  Description of Artificial Sequence: Synthetic oligonucleotide
auucacuccagaacuaaua

SEQ ID NO: 2202724 - RNA, 19 nt, Artificial Sequence
  Description of Artificial Sequence: Synthetic oligonucleotide
caugugauguuuuaugcuu

SEQ ID NO: 2202725 - RNA, 19 nt, Artificial Sequence
  Description of Artificial Sequence: Synthetic oligonucleotide
aaacucucuaaaaguuaau

SEQ ID NO: 2202726 - RNA, 19 nt, Artificial Sequence
  Description of Artificial Sequence: Synthetic oligonucleotide
ugugcacaauuaccaggaa

SEQ ID NO: 2202727 - RNA, 19 nt, Artificial Sequence
  Description of Artificial Sequence: Synthetic oligonucleotide
agauucacuccagaacuaa

SEQ ID NO: 2202728 - RNA, 19 nt, Artificial Sequence
  Description of Artificial Sequence: Synthetic oligonucleotide
uggaaacaaugaugauaca

SEQ ID NO: 2202729 - RNA, 19 nt, Artificial Sequence
  Description of Artificial Sequence: Synthetic oligonucleotide
gugugugugugugugugug

SEQ ID NO: 2202730 - RNA, 19 nt, Artificial Sequence
  Description of Artificial Sequence: Synthetic oligonucleotide
caauauuaagucauauauu

SEQ ID NO: 2202731 - RNA, 19 nt, Artificial Sequence
  Description of Artificial Sequence: Synthetic oligonucleotide
guccacacaacagauaagu

SEQ ID NO: 2202732 - RNA, 19 nt, Artificial Sequence
  Description of Artificial Sequence: Synthetic oligonucleotide
auguccaaauuaugcuuaa

SEQ ID NO: 2202733 - RNA, 19 nt, Artificial Sequence
  Description of Artificial Sequence: Synthetic oligonucleotide
cucaauguguuaccuuaga

SEQ ID NO: 2202734 - RNA, 19 nt, Artificial Sequence
  Description of Artificial Sequence: Synthetic oligonucleotide
cacaacagauaaguguuga

SEQ ID NO: 2202735 - RNA, 19 nt, Artificial Sequence
  Description of Artificial Sequence: Synthetic oligonucleotide
cacaguaaagcaguaauau

SEQ ID NO: 2202736 - RNA, 19 nt, Artificial Sequence
  Description of Artificial Sequence: Synthetic oligonucleotide
auacacaguaaagcaguaa

SEQ ID NO: 2202737 - RNA, 19 nt, Artificial Sequence
  Description of Artificial Sequence: Synthetic oligonucleotide
cuggauguuagagguaaca

SEQ ID NO: 2202738 - RNA, 19 nt, Artificial Sequence
  Description of Artificial Sequence: Synthetic oligonucleotide
guuacaguguugguguuua

SEQ ID NO: 2202739 - RNA, 19 nt, Artificial Sequence
  Description of Artificial Sequence: Synthetic oligonucleotide
ggaugugugugugugugug

SEQ ID NO: 2202740 - RNA, 19 nt, Artificial Sequence
  Description of Artificial Sequence: Synthetic oligonucleotide
uggaugugugugugugugu

SEQ ID NO: 2202741 - RNA, 19 nt, Artificial Sequence
  Description of Artificial Sequence: Synthetic oligonucleotide
cucagcuuuuauucaaaua

SEQ ID NO: 2202742 - RNA, 19 nt, Artificial Sequence
  Description of Artificial Sequence: Synthetic oligonucleotide
gguuggugcauuuauguau

SEQ ID NO: 2202743 - RNA, 19 nt, Artificial Sequence
  Description of Artificial Sequence: Synthetic oligonucleotide
cagcgucacauaaaagaga

SEQ ID NO: 2202744 - RNA, 19 nt, Artificial Sequence
  Description of Artificial Sequence: Synthetic oligonucleotide
caguaccuggaaacaauga

SEQ ID NO: 2202745 - RNA, 19 nt, Artificial Sequence
  Description of Artificial Sequence: Synthetic oligonucleotide
caguccuuagguuggugca

SEQ ID NO: 2202746 - RNA, 19 nt, Artificial Sequence
  Description of Artificial Sequence: Synthetic oligonucleotide
gugauguuuuaugcuucag

SEQ ID NO: 2202747 - RNA, 19 nt, Artificial Sequence
  Description of Artificial Sequence: Synthetic oligonucleotide
ggaaacaaugaugauacau

SEQ ID NO: 2202748 - RNA, 19 nt, Artificial Sequence
  Description of Artificial Sequence: Synthetic oligonucleotide
acuggauguuagagguaac

SEQ ID NO: 2202749 - RNA, 19 nt, Artificial Sequence
  Description of Artificial Sequence: Synthetic oligonucleotide
acacaacagauaaguguug

SEQ ID NO: 2202750 - RNA, 19 nt, Artificial Sequence
  Description of Artificial Sequence: Synthetic oligonucleotide
aguaaccccuugcuuuaaa

SEQ ID NO: 2202751 - RNA, 19 nt, Artificial Sequence
  Description of Artificial Sequence: Synthetic oligonucleotide
cuuagguuggugcauuuau

SEQ ID NO: 2202752 - RNA, 19 nt, Artificial Sequence
  Description of Artificial Sequence: Synthetic oligonucleotide
augauacaugccaugugau

SEQ ID NO: 2202753 - RNA, 19 nt, Artificial Sequence
  Description of Artificial Sequence: Synthetic oligonucleotide
cuaccucugauuuuagaau

SEQ ID NO: 2202754 - RNA, 19 nt, Artificial Sequence
  Description of Artificial Sequence: Synthetic oligonucleotide
aacuucuuaguaggaugua

SEQ ID NO: 2202755 - RNA, 19 nt, Artificial Sequence
  Description of Artificial Sequence: Synthetic oligonucleotide
augagaagcuguguuugau

SEQ ID NO: 2202756 - RNA, 19 nt, Artificial Sequence
  Description of Artificial Sequence: Synthetic oligonucleotide
acacgaaaugauguccaaa

SEQ ID NO: 2202757 - RNA, 19 nt, Artificial Sequence
  Description of Artificial Sequence: Synthetic oligonucleotide
guuaauuacacuggauguu

SEQ ID NO: 2202758 - RNA, 19 nt, Artificial Sequence
  Description of Artificial Sequence: Synthetic oligonucleotide
cauuuauguauggaugugu

SEQ ID NO: 2202759 - RNA, 19 nt, Artificial Sequence
  Description of Artificial Sequence: Synthetic oligonucleotide
cucuaucuaccucugauuu

SEQ ID NO: 2202760 - RNA, 19 nt, Artificial Sequence
  Description of Artificial Sequence: Synthetic oligonucleotide
uuaauacuuggugguuaua

SEQ ID NO: 2202761 - RNA, 19 nt, Artificial Sequence
  Description of Artificial Sequence: Synthetic oligonucleotide
auguuagagguaacaaauu

SEQ ID NO: 2202762 - RNA, 19 nt, Artificial Sequence
  Description of Artificial Sequence: Synthetic oligonucleotide
guuuuaugcuucaguuaca

SEQ ID NO: 2202763 - RNA, 19 nt, Artificial Sequence
  Description of Artificial Sequence: Synthetic oligonucleotide
ccuuggguaaagaaaaugu

SEQ ID NO: 2202764 - RNA, 19 nt, Artificial Sequence
  Description of Artificial Sequence: Synthetic oligonucleotide
cuguauauguugugaaaau

SEQ ID NO: 2202765 - RNA, 19 nt, Artificial Sequence
  Description of Artificial Sequence: Synthetic oligonucleotide
gcauuuauguauggaugug

SEQ ID NO: 2202766 - RNA, 19 nt, Artificial Sequence
  Description of Artificial Sequence: Synthetic oligonucleotide
cacaacauauuaugauacu

SEQ ID NO: 2202767 - RNA, 19 nt, Artificial Sequence
  Description of Artificial Sequence: Synthetic oligonucleotide
uccuaccaguccuuagguu

SEQ ID NO: 2202768 - RNA, 19 nt, Artificial Sequence
  Description of Artificial Sequence: Synthetic oligonucleotide
cgaaaugauguccaaauua

SEQ ID NO: 2202769 - RNA, 19 nt, Artificial Sequence
  Description of Artificial Sequence: Synthetic oligonucleotide
ccagaacuaauaucuaaaa

SEQ ID NO: 2202770 - RNA, 19 nt, Artificial Sequence
  Description of Artificial Sequence: Synthetic oligonucleotide
auccaguaccuggaaacaa

SEQ ID NO: 2202771 - RNA, 19 nt, Artificial Sequence
  Description of Artificial Sequence: Synthetic oligonucleotide
gauuaugauuuuacaguuu

SEQ ID NO: 2202772 - RNA, 19 nt, Artificial Sequence
  Description of Artificial Sequence: Synthetic oligonucleotide
cccaaaaccaaagugaggu

SEQ ID NO: 2202773 - RNA, 19 nt, Artificial Sequence
  Description of Artificial Sequence: Synthetic oligonucleotide
uacaugccaugugauguuu

SEQ ID NO: 2202774 - RNA, 19 nt, Artificial Sequence
  Description of Artificial Sequence: Synthetic oligonucleotide
acaaacccuuggguaaaga

SEQ ID NO: 2202775 - RNA, 19 nt, Artificial Sequence
  Description of Artificial Sequence: Synthetic oligonucleotide
gaugugugugugugugugu

SEQ ID NO: 2202776 - RNA, 19 nt, Artificial Sequence
  Description of Artificial Sequence: Synthetic oligonucleotide
agcuguguuugauguuaau

SEQ ID NO: 2202777 - RNA, 19 nt, Artificial Sequence
  Description of Artificial Sequence: Synthetic oligonucleotide
ccacacaacagauaagugu

SEQ ID NO: 2202778 - RNA, 19 nt, Artificial Sequence
  Description of Artificial Sequence: Synthetic oligonucleotide
aguccuuagguuggugcau

SEQ ID NO: 2202779 - RNA, 19 nt, Artificial Sequence
  Description of Artificial Sequence: Synthetic oligonucleotide
ccccaaaaccaaagugagg

SEQ ID NO: 2202780 - RNA, 19 nt, Artificial Sequence
  Description of Artificial Sequence: Synthetic oligonucleotide
gaaauuaggugugcacaau

SEQ ID NO: 2202781 - RNA, 19 nt, Artificial Sequence
  Description of Artificial Sequence: Synthetic oligonucleotide
aaguaaccccuugcuuuaa

SEQ ID NO: 2202782 - RNA, 19 nt, Artificial Sequence
  Description of Artificial Sequence: Synthetic oligonucleotide
guaaccccuugcuuuaaau

SEQ ID NO: 2202783 - RNA, 19 nt, Artificial Sequence
  Description of Artificial Sequence: Synthetic oligonucleotide
uccuuagguuggugcauuu

SEQ ID NO: 2202784 - RNA, 19 nt, Artificial Sequence
  Description of Artificial Sequence: Synthetic oligonucleotide
auaaagcucucagcuuuua

SEQ ID NO: 2202785 - RNA, 19 nt, Artificial Sequence
  Description of Artificial Sequence: Synthetic oligonucleotide
auguuacaguguugguguu

SEQ ID NO: 2202786 - RNA, 19 nt, Artificial Sequence
  Description of Artificial Sequence: Synthetic oligonucleotide
gcugugaaauuaggugugc

SEQ ID NO: 2202787 - RNA, 19 nt, Artificial Sequence
  Description of Artificial Sequence: Synthetic oligonucleotide
cagauucacuccagaacua

SEQ ID NO: 2202788 - RNA, 19 nt, Artificial Sequence
  Description of Artificial Sequence: Synthetic oligonucleotide
cccuugcuuuaaaucuugg

SEQ ID NO: 2202789 - RNA, 19 nt, Artificial Sequence
  Description of Artificial Sequence: Synthetic oligonucleotide
gcacaauuaccaggaacac

SEQ ID NO: 2202790 - RNA, 19 nt, Artificial Sequence
  Description of Artificial Sequence: Synthetic oligonucleotide
gauucacuccagaacuaau

SEQ ID NO: 2202791 - RNA, 19 nt, Artificial Sequence
  Description of Artificial Sequence: Synthetic oligonucleotide
acauaacugcgugcuuuaa

SEQ ID NO: 2202792 - RNA, 19 nt, Artificial Sequence
  Description of Artificial Sequence: Synthetic oligonucleotide
acuccagaacuaauaucua

SEQ ID NO: 2202793 - RNA, 19 nt, Artificial Sequence
  Description of Artificial Sequence: Synthetic oligonucleotide
ccccuugcuuuaaaucuug

SEQ ID NO: 2202794 - RNA, 19 nt, Artificial Sequence
  Description of Artificial Sequence: Synthetic oligonucleotide
auguccagcgucacauaaa

SEQ ID NO: 2202795 - RNA, 19 nt, Artificial Sequence
  Description of Artificial Sequence: Synthetic oligonucleotide
accaguccuuagguuggug

SEQ ID NO: 2202796 - RNA, 19 nt, Artificial Sequence
  Description of Artificial Sequence: Synthetic oligonucleotide
auguguuaccuuagagcuu

SEQ ID NO: 2202797 - RNA, 19 nt, Artificial Sequence
  Description of Artificial Sequence: Synthetic oligonucleotide
accccuugcuuuaaaucuu

SEQ ID NO: 2202798 - RNA, 19 nt, Artificial Sequence
  Description of Artificial Sequence: Synthetic oligonucleotide
uaccaguccuuagguuggu

SEQ ID NO: 2202799 - RNA, 19 nt, Artificial Sequence
  Description of Artificial Sequence: Synthetic oligonucleotide
ccaaagugagguagaaaua

SEQ ID NO: 2202800 - RNA, 19 nt, Artificial Sequence
  Description of Artificial Sequence: Synthetic oligonucleotide
ggaacaccccaaaaccaaa

SEQ ID NO: 2202801 - RNA, 19 nt, Artificial Sequence
  Description of Artificial Sequence: Synthetic oligonucleotide
acaugccaugugauguuuu

SEQ ID NO: 2202802 - RNA, 19 nt, Artificial Sequence
  Description of Artificial Sequence: Synthetic oligonucleotide
ccaugugauguuuuaugcu

SEQ ID NO: 2202803 - RNA, 19 nt, Artificial Sequence
  Description of Artificial Sequence: Synthetic oligonucleotide
gugcuuuaauugagauaca

SEQ ID NO: 2202804 - RNA, 19 nt, Artificial Sequence
  Description of Artificial Sequence: Synthetic oligonucleotide
acccuuggguaaagaaaau

SEQ ID NO: 2202805 - RNA, 19 nt, Artificial Sequence
  Description of Artificial Sequence: Synthetic oligonucleotide
gcgugcuuuaauugagaua

SEQ ID NO: 2202806 - RNA, 19 nt, Artificial Sequence
  Description of Artificial Sequence: Synthetic oligonucleotide
gcuguguuugauguuaauu

SEQ ID NO: 2202807 - RNA, 19 nt, Artificial Sequence
  Description of Artificial Sequence: Synthetic oligonucleotide
guguuaccuuagagcuuug

SEQ ID NO: 2202808 - RNA, 19 nt, Artificial Sequence
  Description of Artificial Sequence: Synthetic oligonucleotide
ccaaaaccaaagugaggua

SEQ ID NO: 2202809 - RNA, 19 nt, Artificial Sequence
  Description of Artificial Sequence: Synthetic oligonucleotide
gcgucacauaaaagagaac

SEQ ID NO: 2202810 - RNA, 19 nt, Artificial Sequence
  Description of Artificial Sequence: Synthetic oligonucleotide
guccuuagguuggugcauu

SEQ ID NO: 2202811 - RNA, 19 nt, Artificial Sequence
  Description of Artificial Sequence: Synthetic oligonucleotide
ccuuagguuggugcauuua

SEQ ID NO: 2202812 - RNA, 19 nt, Artificial Sequence
  Description of Artificial Sequence: Synthetic oligonucleotide
ccuuagagcuuuggguuuu

SEQ ID NO: 2202813 - RNA, 19 nt, Artificial Sequence
  Description of Artificial Sequence: Synthetic oligonucleotide
gaagauucgagauucaggg

SEQ ID NO: 2202814 - RNA, 19 nt, Artificial Sequence
  Description of Artificial Sequence: Synthetic oligonucleotide
cuuguacccauuuagaugg

SEQ ID NO: 2202815 - RNA, 19 nt, Artificial Sequence
  Description of Artificial Sequence: Synthetic oligonucleotide
gaaagguuggccuugaggc

SEQ ID NO: 2202816 - RNA, 19 nt, Artificial Sequence
  Description of Artificial Sequence: Synthetic oligonucleotide
auugauuucaauguccacc

SEQ ID NO: 2202817 - RNA, 19 nt, Artificial Sequence
  Description of Artificial Sequence: Synthetic oligonucleotide
ucauacuagagcaucaaag

SEQ ID NO: 2202818 - RNA, 19 nt, Artificial Sequence
  Description of Artificial Sequence: Synthetic oligonucleotide
aacuuugaauacuucuggc

SEQ ID NO: 2202819 - RNA, 19 nt, Artificial Sequence
  Description of Artificial Sequence: Synthetic oligonucleotide
gaaguugcuguauucaggg

SEQ ID NO: 2202820 - RNA, 19 nt, Artificial Sequence
  Description of Artificial Sequence: Synthetic oligonucleotide
uacuagagcaucaaagucc

SEQ ID NO: 2202821 - RNA, 19 nt, Artificial Sequence
  Description of Artificial Sequence: Synthetic oligonucleotide
uuuagauggauuuuguggu

SEQ ID NO: 2202822 - RNA, 19 nt, Artificial Sequence
  Description of Artificial Sequence: Synthetic oligonucleotide
ugaagauucgagauucagg

SEQ ID NO: 2202823 - RNA, 19 nt, Artificial Sequence
  Description of Artificial Sequence: Synthetic oligonucleotide
gaugacaaggcccucaggc

SEQ ID NO: 2202824 - RNA, 19 nt, Artificial Sequence
  Description of Artificial Sequence: Synthetic oligonucleotide
uugacugugaagauucgag

SEQ ID NO: 2202825 - RNA, 19 nt, Artificial Sequence
  Description of Artificial Sequence: Synthetic oligonucleotide
uggauuuugugguagagac

SEQ ID NO: 2202826 - RNA, 19 nt, Artificial Sequence
  Description of Artificial Sequence: Synthetic oligonucleotide
auacuagagcaucaaaguc

SEQ ID NO: 2202827 - RNA, 19 nt, Artificial Sequence
  Description of Artificial Sequence: Synthetic oligonucleotide
agcaucaaaguccacaugu

SEQ ID NO: 2202828 - RNA, 19 nt, Artificial Sequence
  Description of Artificial Sequence: Synthetic oligonucleotide
gagacaacaagauggggcc

SEQ ID NO: 2202829 - RNA, 19 nt, Artificial Sequence
  Description of Artificial Sequence: Synthetic oligonucleotide
ucaaucaccucucugugga

SEQ ID NO: 2202830 - RNA, 19 nt, Artificial Sequence
  Description of Artificial Sequence: Synthetic oligonucleotide
ucaaccaccuccccgagcc

SEQ ID NO: 2202831 - RNA, 19 nt, Artificial Sequence
  Description of Artificial Sequence: Synthetic oligonucleotide
uugugguucuuuaugagcu

SEQ ID NO: 2202832 - RNA, 19 nt, Artificial Sequence
  Description of Artificial Sequence: Synthetic oligonucleotide
uucaugugcaaguccacgg

SEQ ID NO: 2202833 - RNA, 19 nt, Artificial Sequence
  Description of Artificial Sequence: Synthetic oligonucleotide
uuugugguucuuuaugagc

SEQ ID NO: 2202834 - RNA, 19 nt, Artificial Sequence
  Description of Artificial Sequence: Synthetic oligonucleotide
agaaagguuggccuugagg

SEQ ID NO: 2202835 - RNA, 19 nt, Artificial Sequence
  Description of Artificial Sequence: Synthetic oligonucleotide
aucaaaguccacauguggc

SEQ ID NO: 2202836 - RNA, 19 nt, Artificial Sequence
  Description of Artificial Sequence: Synthetic oligonucleotide
caacuuugaauacuucugg

SEQ ID NO: 2202837 - RNA, 19 nt, Artificial Sequence
  Description of Artificial Sequence: Synthetic oligonucleotide
acuuguacccauuuagaug

SEQ ID NO: 2202838 - RNA, 19 nt, Artificial Sequence
  Description of Artificial Sequence: Synthetic oligonucleotide
uuaggaagaccacagccac

SEQ ID NO: 2202839 - RNA, 19 nt, Artificial Sequence
  Description of Artificial Sequence: Synthetic oligonucleotide
ugcaaguaacccuugguga

SEQ ID NO: 2202840 - RNA, 19 nt, Artificial Sequence
  Description of Artificial Sequence: Synthetic oligonucleotide
aacuuguacccauuuagau

SEQ ID NO: 2202841 - RNA, 19 nt, Artificial Sequence
  Description of Artificial Sequence: Synthetic oligonucleotide
gauuugugguucuuuauga

SEQ ID NO: 2202842 - RNA, 19 nt, Artificial Sequence
  Description of Artificial Sequence: Synthetic oligonucleotide
ggaacuuguacccauuuag

SEQ ID NO: 2202843 - RNA, 19 nt, Artificial Sequence
  Description of Artificial Sequence: Synthetic oligonucleotide
gaugccgccacucaacgug

SEQ ID NO: 2202844 - RNA, 19 nt, Artificial Sequence
  Description of Artificial Sequence: Synthetic oligonucleotide
cuugccaaaucgcacgugg

SEQ ID NO: 2202845 - RNA, 19 nt, Artificial Sequence
  Description of Artificial Sequence: Synthetic oligonucleotide
cugagggaaagccugacag

SEQ ID NO: 2202846 - RNA, 19 nt, Artificial Sequence
  Description of Artificial Sequence: Synthetic oligonucleotide
agcauagaaagguuggccu

SEQ ID NO: 2202847 - RNA, 19 nt, Artificial Sequence
  Description of Artificial Sequence: Synthetic oligonucleotide
uuuaugagcuccugaacaa

SEQ ID NO: 2202848 - RNA, 19 nt, Artificial Sequence
  Description of Artificial Sequence: Synthetic oligonucleotide
gauuuugugguagagacua

SEQ ID NO: 2202849 - RNA, 19 nt, Artificial Sequence
  Description of Artificial Sequence: Synthetic oligonucleotide
ucuuucuccgcccagugau

SEQ ID NO: 2202850 - RNA, 19 nt, Artificial Sequence
  Description of Artificial Sequence: Synthetic oligonucleotide
ucgagauucagggaggccc

SEQ ID NO: 2202851 - RNA, 19 nt, Artificial Sequence
  Description of Artificial Sequence: Synthetic oligonucleotide
aagcucaaccaccuccccg

SEQ ID NO: 2202852 - RNA, 19 nt, Artificial Sequence
  Description of Artificial Sequence: Synthetic oligonucleotide
aauagcagaaguugcugua

SEQ ID NO: 2202853 - RNA, 19 nt, Artificial Sequence
  Description of Artificial Sequence: Synthetic oligonucleotide
uuucaugugcaaguccacg

SEQ ID NO: 2202854 - RNA, 19 nt, Artificial Sequence
  Description of Artificial Sequence: Synthetic oligonucleotide
gaagagaagcucaaccacc

SEQ ID NO: 2202855 - RNA, 19 nt, Artificial Sequence
  Description of Artificial Sequence: Synthetic oligonucleotide
ugagggaaagccugacagg

SEQ ID NO: 2202856 - RNA, 19 nt, Artificial Sequence
  Description of Artificial Sequence: Synthetic oligonucleotide
caugggaugggcgaggugc

SEQ ID NO: 2202857 - RNA, 19 nt, Artificial Sequence
  Description of Artificial Sequence: Synthetic oligonucleotide
uguauucaggguuggccag

SEQ ID NO: 2202858 - RNA, 19 nt, Artificial Sequence
  Description of Artificial Sequence: Synthetic oligonucleotide
ucuuuaugagcuccugaac

SEQ ID NO: 2202859 - RNA, 19 nt, Artificial Sequence
  Description of Artificial Sequence: Synthetic oligonucleotide
agcacaucgaugccgccac

SEQ ID NO: 2202860 - RNA, 19 nt, Artificial Sequence
  Description of Artificial Sequence: Synthetic oligonucleotide
uagagcaucaaaguccaca

SEQ ID NO: 2202861 - RNA, 19 nt, Artificial Sequence
  Description of Artificial Sequence: Synthetic oligonucleotide
caucauuuggccuguuccc

SEQ ID NO: 2202862 - RNA, 19 nt, Artificial Sequence
  Description of Artificial Sequence: Synthetic oligonucleotide
uucaccaccagcacaucga

SEQ ID NO: 2202863 - RNA, 19 nt, Artificial Sequence
  Description of Artificial Sequence: Synthetic oligonucleotide
aaagguuggccuugaggca

SEQ ID NO: 2202864 - RNA, 19 nt, Artificial Sequence
  Description of Artificial Sequence: Synthetic oligonucleotide
uagagacuaguaaugcccu

SEQ ID NO: 2202865 - RNA, 19 nt, Artificial Sequence
  Description of Artificial Sequence: Synthetic oligonucleotide
agacuaguaaugcccucac

SEQ ID NO: 2202866 - RNA, 19 nt, Artificial Sequence
  Description of Artificial Sequence: Synthetic oligonucleotide
cauuuagauggauuuugug

SEQ ID NO: 2202867 - RNA, 19 nt, Artificial Sequence
  Description of Artificial Sequence: Synthetic oligonucleotide
ugacugugaagauucgaga

SEQ ID NO: 2202868 - RNA, 19 nt, Artificial Sequence
  Description of Artificial Sequence: Synthetic oligonucleotide
uugugguagagacuaguaa

SEQ ID NO: 2202869 - RNA, 19 nt, Artificial Sequence
  Description of Artificial Sequence: Synthetic oligonucleotide
ucacucucaguacuggccu

SEQ ID NO: 2202870 - RNA, 19 nt, Artificial Sequence
  Description of Artificial Sequence: Synthetic oligonucleotide
ucacccacugcaaguaacc

SEQ ID NO: 2202871 - RNA, 19 nt, Artificial Sequence
  Description of Artificial Sequence: Synthetic oligonucleotide
gauucgagauucagggagg

SEQ ID NO: 2202872 - RNA, 19 nt, Artificial Sequence
  Description of Artificial Sequence: Synthetic oligonucleotide
cugaacaaggucuccccgg

SEQ ID NO: 2202873 - RNA, 19 nt, Artificial Sequence
  Description of Artificial Sequence: Synthetic oligonucleotide
accaccuucucccgugacc

SEQ ID NO: 2202874 - RNA, 19 nt, Artificial Sequence
  Description of Artificial Sequence: Synthetic oligonucleotide
accacagccacgcucgcuc

SEQ ID NO: 2202875 - RNA, 19 nt, Artificial Sequence
  Description of Artificial Sequence: Synthetic oligonucleotide
ucgaugccgccacucaacg

SEQ ID NO: 2202876 - RNA, 19 nt, Artificial Sequence
  Description of Artificial Sequence: Synthetic oligonucleotide
uuugugguagagacuagua

SEQ ID NO: 2202877 - RNA, 19 nt, Artificial Sequence
  Description of Artificial Sequence: Synthetic oligonucleotide
accccagcuugccaaaucg

SEQ ID NO: 2202878 - RNA, 19 nt, Artificial Sequence
  Description of Artificial Sequence: Synthetic oligonucleotide
aguuucaugugcaagucca

SEQ ID NO: 2202879 - RNA, 19 nt, Artificial Sequence
  Description of Artificial Sequence: Synthetic oligonucleotide
uagauggauuuugugguag

SEQ ID NO: 2202880 - RNA, 19 nt, Artificial Sequence
  Description of Artificial Sequence: Synthetic oligonucleotide
agaaguugcuguauucagg

SEQ ID NO: 2202881 - RNA, 19 nt, Artificial Sequence
  Description of Artificial Sequence: Synthetic oligonucleotide
cugcaaguaacccuuggug

SEQ ID NO: 2202882 - RNA, 19 nt, Artificial Sequence
  Description of Artificial Sequence: Synthetic oligonucleotide
uuugaauacuucuggcuuu

SEQ ID NO: 2202883 - RNA, 19 nt, Artificial Sequence
  Description of Artificial Sequence: Synthetic oligonucleotide
uacccauuuagauggauuu

SEQ ID NO: 2202884 - RNA, 19 nt, Artificial Sequence
  Description of Artificial Sequence: Synthetic oligonucleotide
uggaugucacucaggcagg

SEQ ID NO: 2202885 - RNA, 19 nt, Artificial Sequence
  Description of Artificial Sequence: Synthetic oligonucleotide
cagaaguugcuguauucag

SEQ ID NO: 2202886 - RNA, 19 nt, Artificial Sequence
  Description of Artificial Sequence: Synthetic oligonucleotide
ugugcuggggccucgcacc

SEQ ID NO: 2202887 - RNA, 19 nt, Artificial Sequence
  Description of Artificial Sequence: Synthetic oligonucleotide
cagcuugccaaaucgcacg

SEQ ID NO: 2202888 - RNA, 19 nt, Artificial Sequence
  Description of Artificial Sequence: Synthetic oligonucleotide
gauggauuuugugguagag

SEQ ID NO: 2202889 - RNA, 19 nt, Artificial Sequence
  Description of Artificial Sequence: Synthetic oligonucleotide
ugguagagacuaguaaugc

SEQ ID NO: 2202890 - RNA, 19 nt, Artificial Sequence
  Description of Artificial Sequence: Synthetic oligonucleotide
gaagggugagcaccggaag

SEQ ID NO: 2202891 - RNA, 19 nt, Artificial Sequence
  Description of Artificial Sequence: Synthetic oligonucleotide
aggcaggcaacuuugaaua

SEQ ID NO: 2202892 - RNA, 19 nt, Artificial Sequence
  Description of Artificial Sequence: Synthetic oligonucleotide
cucaaucaccucucugugg

SEQ ID NO: 2202893 - RNA, 19 nt, Artificial Sequence
  Description of Artificial Sequence: Synthetic oligonucleotide
cacaggugggaagagaagc

SEQ ID NO: 2202894 - RNA, 19 nt, Artificial Sequence
  Description of Artificial Sequence: Synthetic oligonucleotide
auucgagauucagggaggc

SEQ ID NO: 2202895 - RNA, 19 nt, Artificial Sequence
  Description of Artificial Sequence: Synthetic oligonucleotide
aagagaagcucaaccaccu

SEQ ID NO: 2202896 - RNA, 19 nt, Artificial Sequence
  Description of Artificial Sequence: Synthetic oligonucleotide
ugacaaggcccucaggcuc

SEQ ID NO: 2202897 - RNA, 19 nt, Artificial Sequence
  Description of Artificial Sequence: Synthetic oligonucleotide
uuuugugguagagacuagu

SEQ ID NO: 2202898 - RNA, 19 nt, Artificial Sequence
  Description of Artificial Sequence: Synthetic oligonucleotide
uaacccuuggugaggucag

SEQ ID NO: 2202899 - RNA, 19 nt, Artificial Sequence
  Description of Artificial Sequence: Synthetic oligonucleotide
aaucgcacguggaagggug

SEQ ID NO: 2202900 - RNA, 19 nt, Artificial Sequence
  Description of Artificial Sequence: Synthetic oligonucleotide
gagucugagggaaagccug

SEQ ID NO: 2202901 - RNA, 19 nt, Artificial Sequence
  Description of Artificial Sequence: Synthetic oligonucleotide
acugcaaguaacccuuggu

SEQ ID NO: 2202902 - RNA, 19 nt, Artificial Sequence
  Description of Artificial Sequence: Synthetic oligonucleotide
agggaggcccacuugucgg

SEQ ID NO: 2202903 - RNA, 19 nt, Artificial Sequence
  Description of Artificial Sequence: Synthetic oligonucleotide
aaccaccuccccgagccgc

SEQ ID NO: 2202904 - RNA, 19 nt, Artificial Sequence
  Description of Artificial Sequence: Synthetic oligonucleotide
aaagaaggccucgccacug

SEQ ID NO: 2202905 - RNA, 19 nt, Artificial Sequence
  Description of Artificial Sequence: Synthetic oligonucleotide
uggccuguucccaaaggca

SEQ ID NO: 2202906 - RNA, 19 nt, Artificial Sequence
  Description of Artificial Sequence: Synthetic oligonucleotide
acuagagcaucaaagucca

SEQ ID NO: 2202907 - RNA, 19 nt, Artificial Sequence
  Description of Artificial Sequence: Synthetic oligonucleotide
ucugagggaaagccugaca

SEQ ID NO: 2202908 - RNA, 19 nt, Artificial Sequence
  Description of Artificial Sequence: Synthetic oligonucleotide
gguagagacuaguaaugcc

SEQ ID NO: 2202909 - RNA, 19 nt, Artificial Sequence
  Description of Artificial Sequence: Synthetic oligonucleotide
guugcuguauucaggguug

SEQ ID NO: 2202910 - RNA, 19 nt, Artificial Sequence
  Description of Artificial Sequence: Synthetic oligonucleotide
agagacuaguaaugcccuc

SEQ ID NO: 2202911 - RNA, 19 nt, Artificial Sequence
  Description of Artificial Sequence: Synthetic oligonucleotide
ugaugacaaggcccucagg

SEQ ID NO: 2202912 - RNA, 19 nt, Artificial Sequence
  Description of Artificial Sequence: Synthetic oligonucleotide
ugagcaguacaggaacuug

SEQ ID NO: 2202913 - RNA, 19 nt, Artificial Sequence
  Description of Artificial Sequence: Synthetic oligonucleotide
acucucaguacuggccucc

SEQ ID NO: 2202914 - RNA, 19 nt, Artificial Sequence
  Description of Artificial Sequence: Synthetic oligonucleotide
ugugaagauucgagauuca

SEQ ID NO: 2202915 - RNA, 19 nt, Artificial Sequence
  Description of Artificial Sequence: Synthetic oligonucleotide
gugguagagacuaguaaug

SEQ ID NO: 2202916 - RNA, 19 nt, Artificial Sequence
  Description of Artificial Sequence: Synthetic oligonucleotide
cuguauucaggguuggcca

SEQ ID NO: 2202917 - RNA, 19 nt, Artificial Sequence
  Description of Artificial Sequence: Synthetic oligonucleotide
augacaaggcccucaggcu

SEQ ID NO: 2202918 - RNA, 19 nt, Artificial Sequence
  Description of Artificial Sequence: Synthetic oligonucleotide
ugccaaaucgcacguggaa

SEQ ID NO: 2202919 - RNA, 19 nt, Artificial Sequence
  Description of Artificial Sequence: Synthetic oligonucleotide
ccaaaucgcacguggaagg

SEQ ID NO: 2202920 - RNA, 19 nt, Artificial Sequence
  Description of Artificial Sequence: Synthetic oligonucleotide
gugaagauucgagauucag

SEQ ID NO: 2202921 - RNA, 19 nt, Artificial Sequence
  Description of Artificial Sequence: Synthetic oligonucleotide
uuagauggauuuuguggua

SEQ ID NO: 2202922 - RNA, 19 nt, Artificial Sequence
  Description of Artificial Sequence: Synthetic oligonucleotide
aaguaacccuuggugaggu

SEQ ID NO: 2202923 - RNA, 19 nt, Artificial Sequence
  Description of Artificial Sequence: Synthetic oligonucleotide
gaacuuguacccauuuaga

SEQ ID NO: 2202924 - RNA, 19 nt, Artificial Sequence
  Description of Artificial Sequence: Synthetic oligonucleotide
aaguugcuguauucagggu

SEQ ID NO: 2202925 - RNA, 19 nt, Artificial Sequence
  Description of Artificial Sequence: Synthetic oligonucleotide
ugacaggccuccccauggg

SEQ ID NO: 2202926 - RNA, 19 nt, Artificial Sequence
  Description of Artificial Sequence: Synthetic oligonucleotide
agacaacaagauggggccc

SEQ ID NO: 2202927 - RNA, 19 nt, Artificial Sequence
  Description of Artificial Sequence: Synthetic oligonucleotide
cugguacguggauuugugg

SEQ ID NO: 2202928 - RNA, 19 nt, Artificial Sequence
  Description of Artificial Sequence: Synthetic oligonucleotide
aggcucauacuagagcauc

SEQ ID NO: 2202929 - RNA, 19 nt, Artificial Sequence
  Description of Artificial Sequence: Synthetic oligonucleotide
caaguaacccuuggugagg

SEQ ID NO: 2202930 - RNA, 19 nt, Artificial Sequence
  Description of Artificial Sequence: Synthetic oligonucleotide
uggacaaagaaggccucgc

SEQ ID NO: 2202931 - RNA, 19 nt, Artificial Sequence
  Description of Artificial Sequence: Synthetic oligonucleotide
augcccucacucucaguac

SEQ ID NO: 2202932 - RNA, 19 nt, Artificial Sequence
  Description of Artificial Sequence: Synthetic oligonucleotide
gugaugacaaggcccucag

SEQ ID NO: 2202933 - RNA, 19 nt, Artificial Sequence
  Description of Artificial Sequence: Synthetic oligonucleotide
cauugauuucaauguccac

SEQ ID NO: 2202934 - RNA, 19 nt, Artificial Sequence
  Description of Artificial Sequence: Synthetic oligonucleotide
ugggcgaggugcacaggcg

SEQ ID NO: 2202935 - RNA, 19 nt, Artificial Sequence
  Description of Artificial Sequence: Synthetic oligonucleotide
gagacuaguaaugcccuca

SEQ ID NO: 2202936 - RNA, 19 nt, Artificial Sequence
  Description of Artificial Sequence: Synthetic oligonucleotide
gcaggcucauacuagagca

SEQ ID NO: 2202937 - RNA, 19 nt, Artificial Sequence
  Description of Artificial Sequence: Synthetic oligonucleotide
uggauuugugguucuuuau

SEQ ID NO: 2202938 - RNA, 19 nt, Artificial Sequence
  Description of Artificial Sequence: Synthetic oligonucleotide
gcugcugggagacaacaag

SEQ ID NO: 2202939 - RNA, 19 nt, Artificial Sequence
  Description of Artificial Sequence: Synthetic oligonucleotide
ugugcaaguccacgggcuc

SEQ ID NO: 2202940 - RNA, 19 nt, Artificial Sequence
  Description of Artificial Sequence: Synthetic oligonucleotide
uugccaaaucgcacgugga

SEQ ID NO: 2202941 - RNA, 19 nt, Artificial Sequence
  Description of Artificial Sequence: Synthetic oligonucleotide
guaaugcccucacucucag

SEQ ID NO: 2202942 - RNA, 19 nt, Artificial Sequence
  Description of Artificial Sequence: Synthetic oligonucleotide
agauggauuuugugguaga

SEQ ID NO: 2202943 - RNA, 19 nt, Artificial Sequence
  Description of Artificial Sequence: Synthetic oligonucleotide
aucgaugccgccacucaac

SEQ ID NO: 2202944 - RNA, 19 nt, Artificial Sequence
  Description of Artificial Sequence: Synthetic oligonucleotide
aagaaggccucgccacugu

SEQ ID NO: 2202945 - RNA, 19 nt, Artificial Sequence
  Description of Artificial Sequence: Synthetic oligonucleotide
cucacccacugcaaguaac

SEQ ID NO: 2202946 - RNA, 19 nt, Artificial Sequence
  Description of Artificial Sequence: Synthetic oligonucleotide
cuccauugauuucaauguc

SEQ ID NO: 2202947 - RNA, 19 nt, Artificial Sequence
  Description of Artificial Sequence: Synthetic oligonucleotide
aaaucgcacguggaagggu

SEQ ID NO: 2202948 - RNA, 19 nt, Artificial Sequence
  Description of Artificial Sequence: Synthetic oligonucleotide
guaacccuuggugagguca

SEQ ID NO: 2202949 - RNA, 19 nt, Artificial Sequence
  Description of Artificial Sequence: Synthetic oligonucleotide
gaaagccugacaggccucc

SEQ ID NO: 2202950 - RNA, 19 nt, Artificial Sequence
  Description of Artificial Sequence: Synthetic oligonucleotide
ugugguucuuuaugagcuc

SEQ ID NO: 2202951 - RNA, 19 nt, Artificial Sequence
  Description of Artificial Sequence: Synthetic oligonucleotide
aguaaugcccucacucuca

SEQ ID NO: 2202952 - RNA, 19 nt, Artificial Sequence
  Description of Artificial Sequence: Synthetic oligonucleotide
cagggaggcccacuugucg

SEQ ID NO: 2202953 - RNA, 19 nt, Artificial Sequence
  Description of Artificial Sequence: Synthetic oligonucleotide
ucauuuggccuguucccaa

SEQ ID NO: 2202954 - RNA, 19 nt, Artificial Sequence
  Description of Artificial Sequence: Synthetic oligonucleotide
cacugcaaguaacccuugg

SEQ ID NO: 2202955 - RNA, 19 nt, Artificial Sequence
  Description of Artificial Sequence: Synthetic oligonucleotide
gcuguauucaggguuggcc

SEQ ID NO: 2202956 - RNA, 19 nt, Artificial Sequence
  Description of Artificial Sequence: Synthetic oligonucleotide
gaagcucaaccaccucccc

SEQ ID NO: 2202957 - RNA, 19 nt, Artificial Sequence
  Description of Artificial Sequence: Synthetic oligonucleotide
ugcacaggcgaggaggcac

SEQ ID NO: 2202958 - RNA, 19 nt, Artificial Sequence
  Description of Artificial Sequence: Synthetic oligonucleotide
cuggacaaagaaggccucg

SEQ ID NO: 2202959 - RNA, 19 nt, Artificial Sequence
  Description of Artificial Sequence: Synthetic oligonucleotide
agggaaagccugacaggcc

SEQ ID NO: 2202960 - RNA, 19 nt, Artificial Sequence
  Description of Artificial Sequence: Synthetic oligonucleotide
aucauuuggccuguuccca

SEQ ID NO: 2202961 - RNA, 19 nt, Artificial Sequence
  Description of Artificial Sequence: Synthetic oligonucleotide
acgggcucuccauugauuu

SEQ ID NO: 2202962 - RNA, 19 nt, Artificial Sequence
  Description of Artificial Sequence: Synthetic oligonucleotide
guauucaggguuggccagg

SEQ ID NO: 2202963 - RNA, 19 nt, Artificial Sequence
  Description of Artificial Sequence: Synthetic oligonucleotide
cuaguaaugcccucacucu

SEQ ID NO: 2202964 - RNA, 19 nt, Artificial Sequence
  Description of Artificial Sequence: Synthetic oligonucleotide
cuuugaauacuucuggcuu

SEQ ID NO: 2202965 - RNA, 19 nt, Artificial Sequence
  Description of Artificial Sequence: Synthetic oligonucleotide
cucagaacuggaguccaug

SEQ ID NO: 2202966 - RNA, 19 nt, Artificial Sequence
  Description of Artificial Sequence: Synthetic oligonucleotide
ucuccgcccagugaugaca

SEQ ID NO: 2202967 - RNA, 19 nt, Artificial Sequence
  Description of Artificial Sequence: Synthetic oligonucleotide
uagcagaaguugcuguauu

SEQ ID NO: 2202968 - RNA, 19 nt, Artificial Sequence
  Description of Artificial Sequence: Synthetic oligonucleotide
ucccgugaccgcaggacac

SEQ ID NO: 2202969 - RNA, 19 nt, Artificial Sequence
  Description of Artificial Sequence: Synthetic oligonucleotide
agcuugccaaaucgcacgu

SEQ ID NO: 2202970 - RNA, 19 nt, Artificial Sequence
  Description of Artificial Sequence: Synthetic oligonucleotide
auagcagaaguugcuguau

SEQ ID NO: 2202971 - RNA, 19 nt, Artificial Sequence
  Description of Artificial Sequence: Synthetic oligonucleotide
uugcuguauucaggguugg

SEQ ID NO: 2202972 - RNA, 19 nt, Artificial Sequence
  Description of Artificial Sequence: Synthetic oligonucleotide
uccccgagccgcugguacg

SEQ ID NO: 2202973 - RNA, 19 nt, Artificial Sequence
  Description of Artificial Sequence: Synthetic oligonucleotide
caccagcacaucgaugccg

SEQ ID NO: 2202974 - RNA, 19 nt, Artificial Sequence
  Description of Artificial Sequence: Synthetic oligonucleotide
uccacgggcucuccauuga

SEQ ID NO: 2202975 - RNA, 19 nt, Artificial Sequence
  Description of Artificial Sequence: Synthetic oligonucleotide
augccgauggcccgugcug

SEQ ID NO: 2202976 - RNA, 19 nt, Artificial Sequence
  Description of Artificial Sequence: Synthetic oligonucleotide
aguaacccuuggugagguc

SEQ ID NO: 2202977 - RNA, 19 nt, Artificial Sequence
  Description of Artificial Sequence: Synthetic oligonucleotide
ggguugacugugaagauuc

SEQ ID NO: 2202978 - RNA, 19 nt, Artificial Sequence
  Description of Artificial Sequence: Synthetic oligonucleotide
gaccgcaggacaccccagc

SEQ ID NO: 2202979 - RNA, 19 nt, Artificial Sequence
  Description of Artificial Sequence: Synthetic oligonucleotide
ucgcucacccacugcaagu

SEQ ID NO: 2202980 - RNA, 19 nt, Artificial Sequence
  Description of Artificial Sequence: Synthetic oligonucleotide
cugcgccuggcuuuccucc

SEQ ID NO: 2202981 - RNA, 19 nt, Artificial Sequence
  Description of Artificial Sequence: Synthetic oligonucleotide
ucccgccaauagcagaagu

SEQ ID NO: 2202982 - RNA, 19 nt, Artificial Sequence
  Description of Artificial Sequence: Synthetic oligonucleotide
uugaauacuucuggcuuuu

SEQ ID NO: 2202983 - RNA, 19 nt, Artificial Sequence
  Description of Artificial Sequence: Synthetic oligonucleotide
ucucccgugaccgcaggac

SEQ ID NO: 2202984 - RNA, 19 nt, Artificial Sequence
  Description of Artificial Sequence: Synthetic oligonucleotide
uauucaggguuggccaggu

SEQ ID NO: 2202985 - RNA, 19 nt, Artificial Sequence
  Description of Artificial Sequence: Synthetic oligonucleotide
guggauuugugguucuuua

SEQ ID NO: 2202986 - RNA, 19 nt, Artificial Sequence
  Description of Artificial Sequence: Synthetic oligonucleotide
ggacaaagaaggccucgcc

SEQ ID NO: 2202987 - RNA, 19 nt, Artificial Sequence
  Description of Artificial Sequence: Synthetic oligonucleotide
agaccacagccacgcucgc

SEQ ID NO: 2202988 - RNA, 19 nt, Artificial Sequence
  Description of Artificial Sequence: Synthetic oligonucleotide
agggugagcaccggaagga

SEQ ID NO: 2202989 - RNA, 19 nt, Artificial Sequence
  Description of Artificial Sequence: Synthetic oligonucleotide
uucgagauucagggaggcc

SEQ ID NO: 2202990 - RNA, 19 nt, Artificial Sequence
  Description of Artificial Sequence: Synthetic oligonucleotide
aggcccacuugucgguagg

SEQ ID NO: 2202991 - RNA, 19 nt, Artificial Sequence
  Description of Artificial Sequence: Synthetic oligonucleotide
uacguggauuugugguucu

SEQ ID NO: 2202992 - RNA, 19 nt, Artificial Sequence
  Description of Artificial Sequence: Synthetic oligonucleotide
cccauuuagauggauuuug

SEQ ID NO: 2202993 - RNA, 19 nt, Artificial Sequence
  Description of Artificial Sequence: Synthetic oligonucleotide
gccaaaucgcacguggaag

SEQ ID NO: 2202994 - RNA, 19 nt, Artificial Sequence
  Description of Artificial Sequence: Synthetic oligonucleotide
ggaugggcgaggugcacag

SEQ ID NO: 2202995 - RNA, 19 nt, Artificial Sequence
  Description of Artificial Sequence: Synthetic oligonucleotide
guacguggauuugugguuc

SEQ ID NO: 2202996 - RNA, 19 nt, Artificial Sequence
  Description of Artificial Sequence: Synthetic oligonucleotide
caauagcagaaguugcugu

SEQ ID NO: 2202997 - RNA, 19 nt, Artificial Sequence
  Description of Artificial Sequence: Synthetic oligonucleotide
gugaggucagccaugccga

SEQ ID NO: 2202998 - RNA, 19 nt, Artificial Sequence
  Description of Artificial Sequence: Synthetic oligonucleotide
ccauugauuucaaugucca

SEQ ID NO: 2202999 - RNA, 19 nt, Artificial Sequence
  Description of Artificial Sequence: Synthetic oligonucleotide
caaucaccucucuguggag

SEQ ID NO: 2203000 - RNA, 19 nt, Artificial Sequence
  Description of Artificial Sequence: Synthetic oligonucleotide
ugaccgcaggacaccccag

SEQ ID NO: 2203001 - RNA, 19 nt, Artificial Sequence
  Description of Artificial Sequence: Synthetic oligonucleotide
auuuugugguagagacuag

SEQ ID NO: 2203002 - RNA, 19 nt, Artificial Sequence
  Description of Artificial Sequence: Synthetic oligonucleotide
gauggcccgugcugagcag

SEQ ID NO: 2203003 - RNA, 19 nt, Artificial Sequence
  Description of Artificial Sequence: Synthetic oligonucleotide
accgcaggacaccccagcu

SEQ ID NO: 2203004 - RNA, 19 nt, Artificial Sequence
  Description of Artificial Sequence: Synthetic oligonucleotide
ccugaacaaggucuccccg

SEQ ID NO: 2203005 - RNA, 19 nt, Artificial Sequence
  Description of Artificial Sequence: Synthetic oligonucleotide
guccacgggcucuccauug

SEQ ID NO: 2203006 - RNA, 19 nt, Artificial Sequence
  Description of Artificial Sequence: Synthetic oligonucleotide
guuucaugugcaaguccac

SEQ ID NO: 2203007 - RNA, 19 nt, Artificial Sequence
  Description of Artificial Sequence: Synthetic oligonucleotide
uucucccgugaccgcagga

SEQ ID NO: 2203008 - RNA, 19 nt, Artificial Sequence
  Description of Artificial Sequence: Synthetic oligonucleotide
ugggagucugagggaaagc

SEQ ID NO: 2203009 - RNA, 19 nt, Artificial Sequence
  Description of Artificial Sequence: Synthetic oligonucleotide
cacccacugcaaguaaccc

SEQ ID NO: 2203010 - RNA, 19 nt, Artificial Sequence
  Description of Artificial Sequence: Synthetic oligonucleotide
ugcuguauucaggguuggc

SEQ ID NO: 2203011 - RNA, 19 nt, Artificial Sequence
  Description of Artificial Sequence: Synthetic oligonucleotide
caggccuccccaugggaug

SEQ ID NO: 2203012 - RNA, 19 nt, Artificial Sequence
  Description of Artificial Sequence: Synthetic oligonucleotide
gacaaggcccucaggcuca

SEQ ID NO: 2203013 - RNA, 19 nt, Artificial Sequence
  Description of Artificial Sequence: Synthetic oligonucleotide
gaggugcacaggcgaggag

SEQ ID NO: 2203014 - RNA, 19 nt, Artificial Sequence
  Description of Artificial Sequence: Synthetic oligonucleotide
ucgcacguggaagggugag

SEQ ID NO: 2203015 - RNA, 19 nt, Artificial Sequence
  Description of Artificial Sequence: Synthetic oligonucleotide
cugugcuggggccucgcac

SEQ ID NO: 2203016 - RNA, 19 nt, Artificial Sequence
  Description of Artificial Sequence: Synthetic oligonucleotide
ccagcuugccaaaucgcac

SEQ ID NO: 2203017 - RNA, 19 nt, Artificial Sequence
  Description of Artificial Sequence: Synthetic oligonucleotide
aggccuccccaugggaugg

SEQ ID NO: 2203018 - RNA, 19 nt, Artificial Sequence
  Description of Artificial Sequence: Synthetic oligonucleotide
gacaacaagauggggcccu

SEQ ID NO: 2203019 - RNA, 19 nt, Artificial Sequence
  Description of Artificial Sequence: Synthetic oligonucleotide
aggacaccccagcuugcca

SEQ ID NO: 2203020 - RNA, 19 nt, Artificial Sequence
  Description of Artificial Sequence: Synthetic oligonucleotide
ugccgauggcccgugcuga

SEQ ID NO: 2203021 - RNA, 19 nt, Artificial Sequence
  Description of Artificial Sequence: Synthetic oligonucleotide
gauucagggaggcccacuu

SEQ ID NO: 2203022 - RNA, 19 nt, Artificial Sequence
  Description of Artificial Sequence: Synthetic oligonucleotide
cuucucccgugaccgcagg

SEQ ID NO: 2203023 - RNA, 19 nt, Artificial Sequence
  Description of Artificial Sequence: Synthetic oligonucleotide
cuccccgagccgcugguac

SEQ ID NO: 2203024 - RNA, 19 nt, Artificial Sequence
  Description of Artificial Sequence: Synthetic oligonucleotide
gcccuuaggaagaccacag

SEQ ID NO: 2203025 - RNA, 19 nt, Artificial Sequence
  Description of Artificial Sequence: Synthetic oligonucleotide
gaugggcgaggugcacagg

SEQ ID NO: 2203026 - RNA, 19 nt, Artificial Sequence
  Description of Artificial Sequence: Synthetic oligonucleotide
uaaugcccucacucucagu

SEQ ID NO: 2203027 - RNA, 19 nt, Artificial Sequence
  Description of Artificial Sequence: Synthetic oligonucleotide
agcaguacaggaacuugua

SEQ ID NO: 2203028 - RNA, 19 nt, Artificial Sequence
  Description of Artificial Sequence: Synthetic oligonucleotide
caggacaccccagcuugcc

SEQ ID NO: 2203029 - RNA, 19 nt, Artificial Sequence
  Description of Artificial Sequence: Synthetic oligonucleotide
ccgccaauagcagaaguug

SEQ ID NO: 2203030 - RNA, 19 nt, Artificial Sequence
  Description of Artificial Sequence: Synthetic oligonucleotide
cuagagcaucaaaguccac

SEQ ID NO: 2203031 - RNA, 19 nt, Artificial Sequence
  Description of Artificial Sequence: Synthetic oligonucleotide
uucuccgcccagugaugac

SEQ ID NO: 2203032 - RNA, 19 nt, Artificial Sequence
  Description of Artificial Sequence: Synthetic oligonucleotide
gcugguacguggauuugug

SEQ ID NO: 2203033 - RNA, 19 nt, Artificial Sequence
  Description of Artificial Sequence: Synthetic oligonucleotide
cacucucaguacuggccuc

SEQ ID NO: 2203034 - RNA, 19 nt, Artificial Sequence
  Description of Artificial Sequence: Synthetic oligonucleotide
cacguggaagggugagcac

SEQ ID NO: 2203035 - RNA, 19 nt, Artificial Sequence
  Description of Artificial Sequence: Synthetic oligonucleotide
agucugagggaaagccuga

SEQ ID NO: 2203036 - RNA, 19 nt, Artificial Sequence
  Description of Artificial Sequence: Synthetic oligonucleotide
ugagcaccggaaggagcca

SEQ ID NO: 2203037 - RNA, 19 nt, Artificial Sequence
  Description of Artificial Sequence: Synthetic oligonucleotide
caggcaggcaacuuugaau

SEQ ID NO: 2203038 - RNA, 19 nt, Artificial Sequence
  Description of Artificial Sequence: Synthetic oligonucleotide
cagccacgcucgcucaccc

SEQ ID NO: 2203039 - RNA, 19 nt, Artificial Sequence
  Description of Artificial Sequence: Synthetic oligonucleotide
cacgcucgcucacccacug

SEQ ID NO: 2203040 - RNA, 19 nt, Artificial Sequence
  Description of Artificial Sequence: Synthetic oligonucleotide
acccauuuagauggauuuu

SEQ ID NO: 2203041 - RNA, 19 nt, Artificial Sequence
  Description of Artificial Sequence: Synthetic oligonucleotide
cucaggcucacuggcugug

SEQ ID NO: 2203042 - RNA, 19 nt, Artificial Sequence
  Description of Artificial Sequence: Synthetic oligonucleotide
ggcaggcaacuuugaauac

SEQ ID NO: 2203043 - RNA, 19 nt, Artificial Sequence
  Description of Artificial Sequence: Synthetic oligonucleotide
cauuuggccuguucccaaa

SEQ ID NO: 2203044 - RNA, 19 nt, Artificial Sequence
  Description of Artificial Sequence: Synthetic oligonucleotide
uccgcccagugaugacaag

SEQ ID NO: 2203045 - RNA, 19 nt, Artificial Sequence
  Description of Artificial Sequence: Synthetic oligonucleotide
acaggccuccccaugggau

SEQ ID NO: 2203046 - RNA, 19 nt, Artificial Sequence
  Description of Artificial Sequence: Synthetic oligonucleotide
gucugagggaaagccugac

SEQ ID NO: 2203047 - RNA, 19 nt, Artificial Sequence
  Description of Artificial Sequence: Synthetic oligonucleotide
cucuuucuccgcccaguga

SEQ ID NO: 2203048 - RNA, 19 nt, Artificial Sequence
  Description of Artificial Sequence: Synthetic oligonucleotide
cuccucuuucuccgcccag

SEQ ID NO: 2203049 - RNA, 19 nt, Artificial Sequence
  Description of Artificial Sequence: Synthetic oligonucleotide
gcacguggaagggugagca

SEQ ID NO: 2203050 - RNA, 19 nt, Artificial Sequence
  Description of Artificial Sequence: Synthetic oligonucleotide
ccgcccagugaugacaagg

SEQ ID NO: 2203051 - RNA, 19 nt, Artificial Sequence
  Description of Artificial Sequence: Synthetic oligonucleotide
ggggcccuuaggaagacca

SEQ ID NO: 2203052 - RNA, 19 nt, Artificial Sequence
  Description of Artificial Sequence: Synthetic oligonucleotide
cucaggcaggcaacuuuga

SEQ ID NO: 2203053 - RNA, 19 nt, Artificial Sequence
  Description of Artificial Sequence: Synthetic oligonucleotide
acaggcgaggaggcacguc

SEQ ID NO: 2203054 - RNA, 19 nt, Artificial Sequence
  Description of Artificial Sequence: Synthetic oligonucleotide
caggcgaggaggcacgucu

SEQ ID NO: 2203055 - RNA, 19 nt, Artificial Sequence
  Description of Artificial Sequence: Synthetic oligonucleotide
cgcccagugaugacaaggc

SEQ ID NO: 2203056 - RNA, 19 nt, Artificial Sequence
  Description of Artificial Sequence: Synthetic oligonucleotide
guggaagggugagcaccgg

SEQ ID NO: 2203057 - RNA, 19 nt, Artificial Sequence
  Description of Artificial Sequence: Synthetic oligonucleotide
caccccagcuugccaaauc

SEQ ID NO: 2203058 - RNA, 19 nt, Artificial Sequence
  Description of Artificial Sequence: Synthetic oligonucleotide
cccgugcugagcaguacag

SEQ ID NO: 2203059 - RNA, 19 nt, Artificial Sequence
  Description of Artificial Sequence: Synthetic oligonucleotide
gccacgcucgcucacccac

SEQ ID NO: 2203060 - RNA, 19 nt, Artificial Sequence
  Description of Artificial Sequence: Synthetic oligonucleotide
aggguuggccaggucugug

SEQ ID NO: 2203061 - RNA, 19 nt, Artificial Sequence
  Description of Artificial Sequence: Synthetic oligonucleotide
cccagcuugccaaaucgca

SEQ ID NO: 2203062 - RNA, 19 nt, Artificial Sequence
  Description of Artificial Sequence: Synthetic oligonucleotide
cccuuaggaagaccacagc

SEQ ID NO: 2203063 - RNA, 19 nt, Artificial Sequence
  Description of Artificial Sequence: Synthetic oligonucleotide
uggcccgugcugagcagua

SEQ ID NO: 2203064 - RNA, 19 nt, Artificial Sequence
  Description of Artificial Sequence: Synthetic oligonucleotide
cagcacaucgaugccgcca

SEQ ID NO: 2203065 - RNA, 19 nt, Artificial Sequence
  Description of Artificial Sequence: Synthetic oligonucleotide
caccggaaggagccaucug

SEQ ID NO: 2203066 - RNA, 19 nt, Artificial Sequence
  Description of Artificial Sequence: Synthetic oligonucleotide
ggcucauacuagagcauca

SEQ ID NO: 2203067 - RNA, 19 nt, Artificial Sequence
  Description of Artificial Sequence: Synthetic oligonucleotide
cuggggccucgcaccacag

SEQ ID NO: 2203068 - RNA, 19 nt, Artificial Sequence
  Description of Artificial Sequence: Synthetic oligonucleotide
ccggaaggagccaucuguc

SEQ ID NO: 2203069 - RNA, 19 nt, Artificial Sequence
  Description of Artificial Sequence: Synthetic oligonucleotide
gguacguggauuugugguu

SEQ ID NO: 2203070 - RNA, 19 nt, Artificial Sequence
  Description of Artificial Sequence: Synthetic oligonucleotide
gcacaggcgaggaggcacg

SEQ ID NO: 2203071 - RNA, 19 nt, Artificial Sequence
  Description of Artificial Sequence: Synthetic oligonucleotide
cuccgcccagugaugacaa

SEQ ID NO: 2203072 - RNA, 19 nt, Artificial Sequence
  Description of Artificial Sequence: Synthetic oligonucleotide
uggggcccuuaggaagacc

SEQ ID NO: 2203073 - RNA, 19 nt, Artificial Sequence
  Description of Artificial Sequence: Synthetic oligonucleotide
gccuugaggcagaaacagc

SEQ ID NO: 2203074 - RNA, 19 nt, Artificial Sequence
  Description of Artificial Sequence: Synthetic oligonucleotide
guacuggccuccaacuccu

SEQ ID NO: 2203075 - RNA, 19 nt, Artificial Sequence
  Description of Artificial Sequence: Synthetic oligonucleotide
cucccgccaauagcagaag

SEQ ID NO: 2203076 - RNA, 19 nt, Artificial Sequence
  Description of Artificial Sequence: Synthetic oligonucleotide
ggcgaggugcacaggcgag

SEQ ID NO: 2203077 - RNA, 19 nt, Artificial Sequence
  Description of Artificial Sequence: Synthetic oligonucleotide
ugggaugggcgaggugcac

SEQ ID NO: 2203078 - RNA, 19 nt, Artificial Sequence
  Description of Artificial Sequence: Synthetic oligonucleotide
gggcgaggugcacaggcga

SEQ ID NO: 2203079 - RNA, 19 nt, Artificial Sequence
  Description of Artificial Sequence: Synthetic oligonucleotide
aucgcacguggaaggguga

SEQ ID NO: 2203080 - RNA, 19 nt, Artificial Sequence
  Description of Artificial Sequence: Synthetic oligonucleotide
cacuugucgguaggcaaaa

SEQ ID NO: 2203081 - RNA, 19 nt, Artificial Sequence
  Description of Artificial Sequence: Synthetic oligonucleotide
gaggcacgucuuccucauc

SEQ ID NO: 2203082 - RNA, 19 nt, Artificial Sequence
  Description of Artificial Sequence: Synthetic oligonucleotide
cacuggcugugcccagcug

SEQ ID NO: 2203083 - RNA, 19 nt, Artificial Sequence
  Description of Artificial Sequence: Synthetic oligonucleotide
acaacaagauggggcccuu

SEQ ID NO: 2203084 - RNA, 19 nt, Artificial Sequence
  Description of Artificial Sequence: Synthetic oligonucleotide
ggggccucgcaccacaggu

SEQ ID NO: 2203085 - RNA, 19 nt, Artificial Sequence
  Description of Artificial Sequence: Synthetic oligonucleotide
gcucauacuagagcaucaa

SEQ ID NO: 2203086 - RNA, 19 nt, Artificial Sequence
  Description of Artificial Sequence: Synthetic oligonucleotide
gucacucaggcaggcaacu

SEQ ID NO: 2203087 - RNA, 19 nt, Artificial Sequence
  Description of Artificial Sequence: Synthetic oligonucleotide
gcauagaaagguuggccuu

SEQ ID NO: 2203088 - RNA, 19 nt, Artificial Sequence
  Description of Artificial Sequence: Synthetic oligonucleotide
ggcucccgccaauagcaga

SEQ ID NO: 2203089 - RNA, 19 nt, Artificial Sequence
  Description of Artificial Sequence: Synthetic oligonucleotide
ccgagccgcugguacgugg

SEQ ID NO: 2203090 - RNA, 19 nt, Artificial Sequence
  Description of Artificial Sequence: Synthetic oligonucleotide
gcccgugcugagcaguaca

SEQ ID NO: 2203091 - RNA, 19 nt, Artificial Sequence
  Description of Artificial Sequence: Synthetic oligonucleotide
ggcgaggaggcacgucuuc

SEQ ID NO: 2203092 - RNA, 19 nt, Artificial Sequence
  Description of Artificial Sequence: Synthetic oligonucleotide
ggauuuugugguagagacu

SEQ ID NO: 2203093 - RNA, 19 nt, Artificial Sequence
  Description of Artificial Sequence: Synthetic oligonucleotide
ccgugcugagcaguacagg

SEQ ID NO: 2203094 - RNA, 19 nt, Artificial Sequence
  Description of Artificial Sequence: Synthetic oligonucleotide
ggagucugagggaaagccu

SEQ ID NO: 2203095 - RNA, 19 nt, Artificial Sequence
  Description of Artificial Sequence: Synthetic oligonucleotide
gccgauggcccgugcugag

SEQ ID NO: 2203096 - RNA, 19 nt, Artificial Sequence
  Description of Artificial Sequence: Synthetic oligonucleotide
gcuugccaaaucgcacgug

SEQ ID NO: 2203097 - RNA, 19 nt, Artificial Sequence
  Description of Artificial Sequence: Synthetic oligonucleotide
agccgcugguacguggauu

SEQ ID NO: 2203098 - RNA, 19 nt, Artificial Sequence
  Description of Artificial Sequence: Synthetic oligonucleotide
caggcucauacuagagcau

SEQ ID NO: 2203099 - RNA, 19 nt, Artificial Sequence
  Description of Artificial Sequence: Synthetic oligonucleotide
cucccugcgccuggcuuuc

SEQ ID NO: 2203100 - RNA, 19 nt, Artificial Sequence
  Description of Artificial Sequence: Synthetic oligonucleotide
gggaugggcgaggugcaca

SEQ ID NO: 2203101 - RNA, 19 nt, Artificial Sequence
  Description of Artificial Sequence: Synthetic oligonucleotide
acaccccagcuugccaaau

SEQ ID NO: 2203102 - RNA, 19 nt, Artificial Sequence
  Description of Artificial Sequence: Synthetic oligonucleotide
ccacugcaaguaacccuug

SEQ ID NO: 2203103 - RNA, 19 nt, Artificial Sequence
  Description of Artificial Sequence: Synthetic oligonucleotide
cugagcaguacaggaacuu

SEQ ID NO: 2203104 - RNA, 19 nt, Artificial Sequence
  Description of Artificial Sequence: Synthetic oligonucleotide
cagugaugacaaggcccuc

SEQ ID NO: 2203105 - RNA, 19 nt, Artificial Sequence
  Description of Artificial Sequence: Synthetic oligonucleotide
ggcccacuugucgguaggc

SEQ ID NO: 2203106 - RNA, 19 nt, Artificial Sequence
  Description of Artificial Sequence: Synthetic oligonucleotide
ccagcacaucgaugccgcc

SEQ ID NO: 2203107 - RNA, 19 nt, Artificial Sequence
  Description of Artificial Sequence: Synthetic oligonucleotide
acguggauuugugguucuu

SEQ ID NO: 2203108 - RNA, 19 nt, Artificial Sequence
  Description of Artificial Sequence: Synthetic oligonucleotide
ggaggcacgucuuccucau

SEQ ID NO: 2203109 - RNA, 19 nt, Artificial Sequence
  Description of Artificial Sequence: Synthetic oligonucleotide
ccauggcauccucccugcg

SEQ ID NO: 2203110 - RNA, 19 nt, Artificial Sequence
  Description of Artificial Sequence: Synthetic oligonucleotide
gggccucgcaccacaggug

SEQ ID NO: 2203111 - RNA, 19 nt, Artificial Sequence
  Description of Artificial Sequence: Synthetic oligonucleotide
gccgcugguacguggauuu

SEQ ID NO: 2203112 - RNA, 19 nt, Artificial Sequence
  Description of Artificial Sequence: Synthetic oligonucleotide
gcaggacaccccagcuugc

SEQ ID NO: 2203113 - RNA, 19 nt, Artificial Sequence
  Description of Artificial Sequence: Synthetic oligonucleotide
gcucacccacugcaaguaa

SEQ ID NO: 2203114 - RNA, 19 nt, Artificial Sequence
  Description of Artificial Sequence: Synthetic oligonucleotide
cccgugaccgcaggacacc

SEQ ID NO: 2203115 - RNA, 19 nt, Artificial Sequence
  Description of Artificial Sequence: Synthetic oligonucleotide
cucgcaccacaggugggaa

SEQ ID NO: 2203116 - RNA, 19 nt, Artificial Sequence
  Description of Artificial Sequence: Synthetic oligonucleotide
ccgugaccgcaggacaccc

SEQ ID NO: 2203117 - RNA, 19 nt, Artificial Sequence
  Description of Artificial Sequence: Synthetic oligonucleotide
gccucgcaccacagguggg

SEQ ID NO: 2203118 - RNA, 19 nt, Artificial Sequence
  Description of Artificial Sequence: Synthetic oligonucleotide
gcaaguccacgggcucucc

SEQ ID NO: 2203119 - RNA, 19 nt, Artificial Sequence
  Description of Artificial Sequence: Synthetic oligonucleotide
gggcccuuaggaagaccac

SEQ ID NO: 2203120 - RNA, 19 nt, Artificial Sequence
  Description of Artificial Sequence: Synthetic oligonucleotide
cacgggcucuccauugauu

SEQ ID NO: 2203121 - RNA, 19 nt, Artificial Sequence
  Description of Artificial Sequence: Synthetic oligonucleotide
aggcgaggaggcacgucuu

SEQ ID NO: 2203122 - RNA, 19 nt, Artificial Sequence
  Description of Artificial Sequence: Synthetic oligonucleotide
caacaagauggggcccuua

SEQ ID NO: 2203123 - RNA, 19 nt, Artificial Sequence
  Description of Artificial Sequence: Synthetic oligonucleotide
ucccugcgccuggcuuucc

SEQ ID NO: 2203124 - RNA, 19 nt, Artificial Sequence
  Description of Artificial Sequence: Synthetic oligonucleotide
gggaggcccacuugucggu

SEQ ID NO: 2203125 - RNA, 19 nt, Artificial Sequence
  Description of Artificial Sequence: Synthetic oligonucleotide
gggguugacugugaagauu

SEQ ID NO: 2203126 - RNA, 19 nt, Artificial Sequence
  Description of Artificial Sequence: Synthetic oligonucleotide
gagccgcugguacguggau

SEQ ID NO: 2203127 - RNA, 19 nt, Artificial Sequence
  Description of Artificial Sequence: Synthetic oligonucleotide
cgcacguggaagggugagc

SEQ ID NO: 2203128 - RNA, 19 nt, Artificial Sequence
  Description of Artificial Sequence: Synthetic oligonucleotide
cccgccaauagcagaaguu

SEQ ID NO: 2203129 - RNA, 19 nt, Artificial Sequence
  Description of Artificial Sequence: Synthetic oligonucleotide
ggccuccccaugggauggg

SEQ ID NO: 2203130 - RNA, 19 nt, Artificial Sequence
  Description of Artificial Sequence: Synthetic oligonucleotide
gccuccccaugggaugggc

SEQ ID NO: 2203131 - RNA, 19 nt, Artificial Sequence
  Description of Artificial Sequence: Synthetic oligonucleotide
ccaugccgauggcccgugc

SEQ ID NO: 2203132 - RNA, 19 nt, Artificial Sequence
  Description of Artificial Sequence: Synthetic oligonucleotide
ggcccgugcugagcaguac

SEQ ID NO: 2203133 - RNA, 19 nt, Artificial Sequence
  Description of Artificial Sequence: Synthetic oligonucleotide
cgaggugcacaggcgagga

SEQ ID NO: 2203134 - RNA, 19 nt, Artificial Sequence
  Description of Artificial Sequence: Synthetic oligonucleotide
ggaggcccacuugucggua

SEQ ID NO: 2203135 - RNA, 19 nt, Artificial Sequence
  Description of Artificial Sequence: Synthetic oligonucleotide
caggguuggccaggucugu

SEQ ID NO: 2203136 - RNA, 19 nt, Artificial Sequence
  Description of Artificial Sequence: Synthetic oligonucleotide
ccucaggcucacuggcugu

SEQ ID NO: 2203137 - RNA, 19 nt, Artificial Sequence
  Description of Artificial Sequence: Synthetic oligonucleotide
ccgcugguacguggauuug

SEQ ID NO: 2203138 - RNA, 19 nt, Artificial Sequence
  Description of Artificial Sequence: Synthetic oligonucleotide
cacaggcgaggaggcacgu

SEQ ID NO: 2203139 - RNA, 19 nt, Artificial Sequence
  Description of Artificial Sequence: Synthetic oligonucleotide
cgcucacccacugcaagua

SEQ ID NO: 2203140 - RNA, 19 nt, Artificial Sequence
  Description of Artificial Sequence: Synthetic oligonucleotide
gcacaucgaugccgccacu

SEQ ID NO: 2203141 - RNA, 19 nt, Artificial Sequence
  Description of Artificial Sequence: Synthetic oligonucleotide
cccgagccgcugguacgug

SEQ ID NO: 2203142 - RNA, 19 nt, Artificial Sequence
  Description of Artificial Sequence: Synthetic oligonucleotide
cguggauuugugguucuuu

SEQ ID NO: 2203143 - RNA, 19 nt, Artificial Sequence
  Description of Artificial Sequence: Synthetic oligonucleotide
ccacgggcucuccauugau

SEQ ID NO: 2203144 - RNA, 19 nt, Artificial Sequence
  Description of Artificial Sequence: Synthetic oligonucleotide
cgcugguacguggauuugu

SEQ ID NO: 2203145 - RNA, 19 nt, Artificial Sequence
  Description of Artificial Sequence: Synthetic oligonucleotide
cgaugccgccacucaacgu

SEQ ID NO: 2203146 - RNA, 19 nt, Artificial Sequence
  Description of Artificial Sequence: Synthetic oligonucleotide
ccgcaggacaccccagcuu

SEQ ID NO: 2203147 - RNA, 19 nt, Artificial Sequence
  Description of Artificial Sequence: Synthetic oligonucleotide
ccccgagccgcugguacgu

SEQ ID NO: 2203148 - RNA, 19 nt, Artificial Sequence
  Description of Artificial Sequence: Synthetic oligonucleotide
aaggaauacuuucaguucc

SEQ ID NO: 2203149 - RNA, 19 nt, Artificial Sequence
  Description of Artificial Sequence: Synthetic oligonucleotide
gauauuaccaaucauuuug

SEQ ID NO: 2203150 - RNA, 19 nt, Artificial Sequence
  Description of Artificial Sequence: Synthetic oligonucleotide
ucaacaucaacucccaugg

SEQ ID NO: 2203151 - RNA, 19 nt, Artificial Sequence
  Description of Artificial Sequence: Synthetic oligonucleotide
uuagguuguuauuagaccg

SEQ ID NO: 2203152 - RNA, 19 nt, Artificial Sequence
  Description of Artificial Sequence: Synthetic oligonucleotide
uucaaauucaggcuauugg

SEQ ID NO: 2203153 - RNA, 19 nt, Artificial Sequence
  Description of Artificial Sequence: Synthetic oligonucleotide
gaugccauaaucuuucucc

SEQ ID NO: 2203154 - RNA, 19 nt, Artificial Sequence
  Description of Artificial Sequence: Synthetic oligonucleotide
uuuugaaagaccuucagaa

SEQ ID NO: 2203155 - RNA, 19 nt, Artificial Sequence
  Description of Artificial Sequence: Synthetic oligonucleotide
auuaagacuccucuaacac

SEQ ID NO: 2203156 - RNA, 19 nt, Artificial Sequence
  Description of Artificial Sequence: Synthetic oligonucleotide
aaaggaauucaggagaacg

SEQ ID NO: 2203157 - RNA, 19 nt, Artificial Sequence
  Description of Artificial Sequence: Synthetic oligonucleotide
aaugucugaugccauaauc

SEQ ID NO: 2203158 - RNA, 19 nt, Artificial Sequence
  Description of Artificial Sequence: Synthetic oligonucleotide
uuaccaaucauuuugucac

SEQ ID NO: 2203159 - RNA, 19 nt, Artificial Sequence
  Description of Artificial Sequence: Synthetic oligonucleotide
aaaacuacaaccauucugu

SEQ ID NO: 2203160 - RNA, 19 nt, Artificial Sequence
  Description of Artificial Sequence: Synthetic oligonucleotide
uagucaaucccacagagca

SEQ ID NO: 2203161 - RNA, 19 nt, Artificial Sequence
  Description of Artificial Sequence: Synthetic oligonucleotide
gaucccaccguuuugaaag

SEQ ID NO: 2203162 - RNA, 19 nt, Artificial Sequence
  Description of Artificial Sequence: Synthetic oligonucleotide
uaugauauuaccaaucauu

SEQ ID NO: 2203163 - RNA, 19 nt, Artificial Sequence
  Description of Artificial Sequence: Synthetic oligonucleotide
aauucuuuucuaauuuggc

SEQ ID NO: 2203164 - RNA, 19 nt, Artificial Sequence
  Description of Artificial Sequence: Synthetic oligonucleotide
uguucuauuuuaauaauuc

SEQ ID NO: 2203165 - RNA, 19 nt, Artificial Sequence
  Description of Artificial Sequence: Synthetic oligonucleotide
uuaauuaagacuccucuaa

SEQ ID NO: 2203166 - RNA, 19 nt, Artificial Sequence
  Description of Artificial Sequence: Synthetic oligonucleotide
uuuaauaauucuuuucuaa

SEQ ID NO: 2203167 - RNA, 19 nt, Artificial Sequence
  Description of Artificial Sequence: Synthetic oligonucleotide
aucauugugaccuaaggca

SEQ ID NO: 2203168 - RNA, 19 nt, Artificial Sequence
  Description of Artificial Sequence: Synthetic oligonucleotide
uaauuucaaugucugaugc

SEQ ID NO: 2203169 - RNA, 19 nt, Artificial Sequence
  Description of Artificial Sequence: Synthetic oligonucleotide
aauuucguguuauggcucg

SEQ ID NO: 2203170 - RNA, 19 nt, Artificial Sequence
  Description of Artificial Sequence: Synthetic oligonucleotide
aauuaagacuccucuaaca

SEQ ID NO: 2203171 - RNA, 19 nt, Artificial Sequence
  Description of Artificial Sequence: Synthetic oligonucleotide
uuuauucaaauucaggcua

SEQ ID NO: 2203172 - RNA, 19 nt, Artificial Sequence
  Description of Artificial Sequence: Synthetic oligonucleotide
gaguaaguugcucaguagg

SEQ ID NO: 2203173 - RNA, 19 nt, Artificial Sequence
  Description of Artificial Sequence: Synthetic oligonucleotide
aucauuuugucacuggcuc

SEQ ID NO: 2203174 - RNA, 19 nt, Artificial Sequence
  Description of Artificial Sequence: Synthetic oligonucleotide
aaucccacagagcagagga

SEQ ID NO: 2203175 - RNA, 19 nt, Artificial Sequence
  Description of Artificial Sequence: Synthetic oligonucleotide
ucaaauucaggcuauugga

SEQ ID NO: 2203176 - RNA, 19 nt, Artificial Sequence
  Description of Artificial Sequence: Synthetic oligonucleotide
aacaucaacucccauggug

SEQ ID NO: 2203177 - RNA, 19 nt, Artificial Sequence
  Description of Artificial Sequence: Synthetic oligonucleotide
acaaccauucuguuuauuc

SEQ ID NO: 2203178 - RNA, 19 nt, Artificial Sequence
  Description of Artificial Sequence: Synthetic oligonucleotide
uauauuauucuccaaguuu

SEQ ID NO: 2203179 - RNA, 19 nt, Artificial Sequence
  Description of Artificial Sequence: Synthetic oligonucleotide
aguuaauuaagacuccucu

SEQ ID NO: 2203180 - RNA, 19 nt, Artificial Sequence
  Description of Artificial Sequence: Synthetic oligonucleotide
uuuagguuguuauuagacc

SEQ ID NO: 2203181 - RNA, 19 nt, Artificial Sequence
  Description of Artificial Sequence: Synthetic oligonucleotide
uuauucuccaaguuuaggu

SEQ ID NO: 2203182 - RNA, 19 nt, Artificial Sequence
  Description of Artificial Sequence: Synthetic oligonucleotide
uuuguagccauccuguuaa

SEQ ID NO: 2203183 - RNA, 19 nt, Artificial Sequence
  Description of Artificial Sequence: Synthetic oligonucleotide
ugaucauugugaccuaagg

SEQ ID NO: 2203184 - RNA, 19 nt, Artificial Sequence
  Description of Artificial Sequence: Synthetic oligonucleotide
ucagaauuucguguuaugg

SEQ ID NO: 2203185 - RNA, 19 nt, Artificial Sequence
  Description of Artificial Sequence: Synthetic oligonucleotide
ucuuucguuagucaauccc

SEQ ID NO: 2203186 - RNA, 19 nt, Artificial Sequence
  Description of Artificial Sequence: Synthetic oligonucleotide
aaauucaggcuauuggaga

SEQ ID NO: 2203187 - RNA, 19 nt, Artificial Sequence
  Description of Artificial Sequence: Synthetic oligonucleotide
ucuauauuauucuccaagu

SEQ ID NO: 2203188 - RNA, 19 nt, Artificial Sequence
  Description of Artificial Sequence: Synthetic oligonucleotide
cucuauauuauucuccaag

SEQ ID NO: 2203189 - RNA, 19 nt, Artificial Sequence
  Description of Artificial Sequence: Synthetic oligonucleotide
acuacaaccauucuguuua

SEQ ID NO: 2203190 - RNA, 19 nt, Artificial Sequence
  Description of Artificial Sequence: Synthetic oligonucleotide
uauuggagaagguucuagg

SEQ ID NO: 2203191 - RNA, 19 nt, Artificial Sequence
  Description of Artificial Sequence: Synthetic oligonucleotide
gauaugauauuaccaauca

SEQ ID NO: 2203192 - RNA, 19 nt, Artificial Sequence
  Description of Artificial Sequence: Synthetic oligonucleotide
uucuguuuauucaaauuca

SEQ ID NO: 2203193 - RNA, 19 nt, Artificial Sequence
  Description of Artificial Sequence: Synthetic oligonucleotide
aggcauacuagucuccugc

SEQ ID NO: 2203194 - RNA, 19 nt, Artificial Sequence
  Description of Artificial Sequence: Synthetic oligonucleotide
ucguuagucaaucccacag

SEQ ID NO: 2203195 - RNA, 19 nt, Artificial Sequence
  Description of Artificial Sequence: Synthetic oligonucleotide
uucuauuuuaauaauucuu

SEQ ID NO: 2203196 - RNA, 19 nt, Artificial Sequence
  Description of Artificial Sequence: Synthetic oligonucleotide
gaucauugugaccuaaggc

SEQ ID NO: 2203197 - RNA, 19 nt, Artificial Sequence
  Description of Artificial Sequence: Synthetic oligonucleotide
ugauaugauauuaccaauc

SEQ ID NO: 2203198 - RNA, 19 nt, Artificial Sequence
  Description of Artificial Sequence: Synthetic oligonucleotide
agaauuucguguuauggcu

SEQ ID NO: 2203199 - RNA, 19 nt, Artificial Sequence
  Description of Artificial Sequence: Synthetic oligonucleotide
auuaccaaucauuuuguca

SEQ ID NO: 2203200 - RNA, 19 nt, Artificial Sequence
  Description of Artificial Sequence: Synthetic oligonucleotide
agaaggaauacuuucaguu

SEQ ID NO: 2203201 - RNA, 19 nt, Artificial Sequence
  Description of Artificial Sequence: Synthetic oligonucleotide
uuggagaagguucuaggag

SEQ ID NO: 2203202 - RNA, 19 nt, Artificial Sequence
  Description of Artificial Sequence: Synthetic oligonucleotide
auagaaggaauacuuucag

SEQ ID NO: 2203203 - RNA, 19 nt, Artificial Sequence
  Description of Artificial Sequence: Synthetic oligonucleotide
uugaaagaccuucagaauu

SEQ ID NO: 2203204 - RNA, 19 nt, Artificial Sequence
  Description of Artificial Sequence: Synthetic oligonucleotide
ucuaauuuggcuucauauc

SEQ ID NO: 2203205 - RNA, 19 nt, Artificial Sequence
  Description of Artificial Sequence: Synthetic oligonucleotide
uuggauagaaggaauacuu

SEQ ID NO: 2203206 - RNA, 19 nt, Artificial Sequence
  Description of Artificial Sequence: Synthetic oligonucleotide
uggagaagguucuaggagc

SEQ ID NO: 2203207 - RNA, 19 nt, Artificial Sequence
  Description of Artificial Sequence: Synthetic oligonucleotide
cuugauaugauauuaccaa

SEQ ID NO: 2203208 - RNA, 19 nt, Artificial Sequence
  Description of Artificial Sequence: Synthetic oligonucleotide
guuagucaaucccacagag

SEQ ID NO: 2203209 - RNA, 19 nt, Artificial Sequence
  Description of Artificial Sequence: Synthetic oligonucleotide
guuguuauuagaccgaaaa

SEQ ID NO: 2203210 - RNA, 19 nt, Artificial Sequence
  Description of Artificial Sequence: Synthetic oligonucleotide
cagaauuucguguuauggc

SEQ ID NO: 2203211 - RNA, 19 nt, Artificial Sequence
  Description of Artificial Sequence: Synthetic oligonucleotide
auuuauaauuucaaugucu

SEQ ID NO: 2203212 - RNA, 19 nt, Artificial Sequence
  Description of Artificial Sequence: Synthetic oligonucleotide
aacguuccaaaauauuuau

SEQ ID NO: 2203213 - RNA, 19 nt, Artificial Sequence
  Description of Artificial Sequence: Synthetic oligonucleotide
aauucaggcuauuggagaa

SEQ ID NO: 2203214 - RNA, 19 nt, Artificial Sequence
  Description of Artificial Sequence: Synthetic oligonucleotide
uauuauucuccaaguuuag

SEQ ID NO: 2203215 - RNA, 19 nt, Artificial Sequence
  Description of Artificial Sequence: Synthetic oligonucleotide
uaauaauucuuuucuaauu

SEQ ID NO: 2203216 - RNA, 19 nt, Artificial Sequence
  Description of Artificial Sequence: Synthetic oligonucleotide
caaauucaggcuauuggag

SEQ ID NO: 2203217 - RNA, 19 nt, Artificial Sequence
  Description of Artificial Sequence: Synthetic oligonucleotide
ugaccuaaggcauacuagu

SEQ ID NO: 2203218 - RNA, 19 nt, Artificial Sequence
  Description of Artificial Sequence: Synthetic oligonucleotide
uaauuaagacuccucuaac

SEQ ID NO: 2203219 - RNA, 19 nt, Artificial Sequence
  Description of Artificial Sequence: Synthetic oligonucleotide
aaaacuccaggcugucguc

SEQ ID NO: 2203220 - RNA, 19 nt, Artificial Sequence
  Description of Artificial Sequence: Synthetic oligonucleotide
uucguguuauggcucgugg

SEQ ID NO: 2203221 - RNA, 19 nt, Artificial Sequence
  Description of Artificial Sequence: Synthetic oligonucleotide
uggucaacagucugcagag

SEQ ID NO: 2203222 - RNA, 19 nt, Artificial Sequence
  Description of Artificial Sequence: Synthetic oligonucleotide
auuucaaugucugaugcca

SEQ ID NO: 2203223 - RNA, 19 nt, Artificial Sequence
  Description of Artificial Sequence: Synthetic oligonucleotide
accguuuugaaagaccuuc

SEQ ID NO: 2203224 - RNA, 19 nt, Artificial Sequence
  Description of Artificial Sequence: Synthetic oligonucleotide
gaauacuuucaguuccugc

SEQ ID NO: 2203225 - RNA, 19 nt, Artificial Sequence
  Description of Artificial Sequence: Synthetic oligonucleotide
ucuaacacuguucuauuuu

SEQ ID NO: 2203226 - RNA, 19 nt, Artificial Sequence
  Description of Artificial Sequence: Synthetic oligonucleotide
gaauucaggagaacguucc

SEQ ID NO: 2203227 - RNA, 19 nt, Artificial Sequence
  Description of Artificial Sequence: Synthetic oligonucleotide
gaaggaauacuuucaguuc

SEQ ID NO: 2203228 - RNA, 19 nt, Artificial Sequence
  Description of Artificial Sequence: Synthetic oligonucleotide
gaacucuauauuauucucc

SEQ ID NO: 2203229 - RNA, 19 nt, Artificial Sequence
  Description of Artificial Sequence: Synthetic oligonucleotide
aggaacucuauauuauucu

SEQ ID NO: 2203230 - RNA, 19 nt, Artificial Sequence
  Description of Artificial Sequence: Synthetic oligonucleotide
aaguuaauuaagacuccuc

SEQ ID NO: 2203231 - RNA, 19 nt, Artificial Sequence
  Description of Artificial Sequence: Synthetic oligonucleotide
caaucauuuugucacuggc

SEQ ID NO: 2203232 - RNA, 19 nt, Artificial Sequence
  Description of Artificial Sequence: Synthetic oligonucleotide
uuaagacuccucuaacacu

SEQ ID NO: 2203233 - RNA, 19 nt, Artificial Sequence
  Description of Artificial Sequence: Synthetic oligonucleotide
gauagaaggaauacuuuca

SEQ ID NO: 2203234 - RNA, 19 nt, Artificial Sequence
  Description of Artificial Sequence: Synthetic oligonucleotide
uccaaguuuagguuguuau

SEQ ID NO: 2203235 - RNA, 19 nt, Artificial Sequence
  Description of Artificial Sequence: Synthetic oligonucleotide
acuccucuaacacuguucu

SEQ ID NO: 2203236 - RNA, 19 nt, Artificial Sequence
  Description of Artificial Sequence: Synthetic oligonucleotide
aagaccuucagaauuucgu

SEQ ID NO: 2203237 - RNA, 19 nt, Artificial Sequence
  Description of Artificial Sequence: Synthetic oligonucleotide
ugaaagaccuucagaauuu

SEQ ID NO: 2203238 - RNA, 19 nt, Artificial Sequence
  Description of Artificial Sequence: Synthetic oligonucleotide
guuuagguuguuauuagac

SEQ ID NO: 2203239 - RNA, 19 nt, Artificial Sequence
  Description of Artificial Sequence: Synthetic oligonucleotide
ugaguaaguugcucaguag

SEQ ID NO: 2203240 - RNA, 19 nt, Artificial Sequence
  Description of Artificial Sequence: Synthetic oligonucleotide
uugaucauugugaccuaag

SEQ ID NO: 2203241 - RNA, 19 nt, Artificial Sequence
  Description of Artificial Sequence: Synthetic oligonucleotide
ugugaccuaaggcauacua

SEQ ID NO: 2203242 - RNA, 19 nt, Artificial Sequence
  Description of Artificial Sequence: Synthetic oligonucleotide
auuauucuccaaguuuagg

SEQ ID NO: 2203243 - RNA, 19 nt, Artificial Sequence
  Description of Artificial Sequence: Synthetic oligonucleotide
auugugaccuaaggcauac

SEQ ID NO: 2203244 - RNA, 19 nt, Artificial Sequence
  Description of Artificial Sequence: Synthetic oligonucleotide
agaccuucagaauuucgug

SEQ ID NO: 2203245 - RNA, 19 nt, Artificial Sequence
  Description of Artificial Sequence: Synthetic oligonucleotide
aaucauuuugucacuggcu

SEQ ID NO: 2203246 - RNA, 19 nt, Artificial Sequence
  Description of Artificial Sequence: Synthetic oligonucleotide
uuugaaagaccuucagaau

SEQ ID NO: 2203247 - RNA, 19 nt, Artificial Sequence
  Description of Artificial Sequence: Synthetic oligonucleotide
uucaggcuauuggagaagg

SEQ ID NO: 2203248 - RNA, 19 nt, Artificial Sequence
  Description of Artificial Sequence: Synthetic oligonucleotide
uugauaugauauuaccaau

SEQ ID NO: 2203249 - RNA, 19 nt, Artificial Sequence
  Description of Artificial Sequence: Synthetic oligonucleotide
uuucguuagucaaucccac

SEQ ID NO: 2203250 - RNA, 19 nt, Artificial Sequence
  Description of Artificial Sequence: Synthetic oligonucleotide
ucauuuugucacuggcucc

SEQ ID NO: 2203251 - RNA, 19 nt, Artificial Sequence
  Description of Artificial Sequence: Synthetic oligonucleotide
uuuacccguuugaucauug

SEQ ID NO: 2203252 - RNA, 19 nt, Artificial Sequence
  Description of Artificial Sequence: Synthetic oligonucleotide
ucguguuauggcucguggg

SEQ ID NO: 2203253 - RNA, 19 nt, Artificial Sequence
  Description of Artificial Sequence: Synthetic oligonucleotide
cacuguucuauuuuaauaa

SEQ ID NO: 2203254 - RNA, 19 nt, Artificial Sequence
  Description of Artificial Sequence: Synthetic oligonucleotide
cuuucguuagucaauccca

SEQ ID NO: 2203255 - RNA, 19 nt, Artificial Sequence
  Description of Artificial Sequence: Synthetic oligonucleotide
auauuauucuccaaguuua

SEQ ID NO: 2203256 - RNA, 19 nt, Artificial Sequence
  Description of Artificial Sequence: Synthetic oligonucleotide
aaggaauucaggagaacgu

SEQ ID NO: 2203257 - RNA, 19 nt, Artificial Sequence
  Description of Artificial Sequence: Synthetic oligonucleotide
uagguuguuauuagaccga

SEQ ID NO: 2203258 - RNA, 19 nt, Artificial Sequence
  Description of Artificial Sequence: Synthetic oligonucleotide
uacccguuugaucauugug

SEQ ID NO: 2203259 - RNA, 19 nt, Artificial Sequence
  Description of Artificial Sequence: Synthetic oligonucleotide
aacuacaaccauucuguuu

SEQ ID NO: 2203260 - RNA, 19 nt, Artificial Sequence
  Description of Artificial Sequence: Synthetic oligonucleotide
aauucaggagaacguucca

SEQ ID NO: 2203261 - RNA, 19 nt, Artificial Sequence
  Description of Artificial Sequence: Synthetic oligonucleotide
uccucuaacacuguucuau

SEQ ID NO: 2203262 - RNA, 19 nt, Artificial Sequence
  Description of Artificial Sequence: Synthetic oligonucleotide
aggagaacguuccaaaaua

SEQ ID NO: 2203263 - RNA, 19 nt, Artificial Sequence
  Description of Artificial Sequence: Synthetic oligonucleotide
uucaggagaacguuccaaa

SEQ ID NO: 2203264 - RNA, 19 nt, Artificial Sequence
  Description of Artificial Sequence: Synthetic oligonucleotide
uggugaguaaguugcucag

SEQ ID NO: 2203265 - RNA, 19 nt, Artificial Sequence
  Description of Artificial Sequence: Synthetic oligonucleotide
cuuuggauagaaggaauac

SEQ ID NO: 2203266 - RNA, 19 nt, Artificial Sequence
  Description of Artificial Sequence: Synthetic oligonucleotide
aguuuagguuguuauuaga

SEQ ID NO: 2203267 - RNA, 19 nt, Artificial Sequence
  Description of Artificial Sequence: Synthetic oligonucleotide
uagaaggaauacuuucagu

SEQ ID NO: 2203268 - RNA, 19 nt, Artificial Sequence
  Description of Artificial Sequence: Synthetic oligonucleotide
cccauggugaguaaguugc

SEQ ID NO: 2203269 - RNA, 19 nt, Artificial Sequence
  Description of Artificial Sequence: Synthetic oligonucleotide
agaacguuccaaaauauuu

SEQ ID NO: 2203270 - RNA, 19 nt, Artificial Sequence
  Description of Artificial Sequence: Synthetic oligonucleotide
ugcucauuuguagccaucc

SEQ ID NO: 2203271 - RNA, 19 nt, Artificial Sequence
  Description of Artificial Sequence: Synthetic oligonucleotide
aggcuauuggagaagguuc

SEQ ID NO: 2203272 - RNA, 19 nt, Artificial Sequence
  Description of Artificial Sequence: Synthetic oligonucleotide
acacuguucuauuuuaaua

SEQ ID NO: 2203273 - RNA, 19 nt, Artificial Sequence
  Description of Artificial Sequence: Synthetic oligonucleotide
acuguucuauuuuaauaau

SEQ ID NO: 2203274 - RNA, 19 nt, Artificial Sequence
  Description of Artificial Sequence: Synthetic oligonucleotide
uucagaauuucguguuaug

SEQ ID NO: 2203275 - RNA, 19 nt, Artificial Sequence
  Description of Artificial Sequence: Synthetic oligonucleotide
auaugauauuaccaaucau

SEQ ID NO: 2203276 - RNA, 19 nt, Artificial Sequence
  Description of Artificial Sequence: Synthetic oligonucleotide
augauauuaccaaucauuu

SEQ ID NO: 2203277 - RNA, 19 nt, Artificial Sequence
  Description of Artificial Sequence: Synthetic oligonucleotide
ucaacucccauggugagua

SEQ ID NO: 2203278 - RNA, 19 nt, Artificial Sequence
  Description of Artificial Sequence: Synthetic oligonucleotide
cuaaggcauacuagucucc

SEQ ID NO: 2203279 - RNA, 19 nt, Artificial Sequence
  Description of Artificial Sequence: Synthetic oligonucleotide
uggauagaaggaauacuuu

SEQ ID NO: 2203280 - RNA, 19 nt, Artificial Sequence
  Description of Artificial Sequence: Synthetic oligonucleotide
ugucugaugccauaaucuu

SEQ ID NO: 2203281 - RNA, 19 nt, Artificial Sequence
  Description of Artificial Sequence: Synthetic oligonucleotide
ugauauuaccaaucauuuu

SEQ ID NO: 2203282 - RNA, 19 nt, Artificial Sequence
  Description of Artificial Sequence: Synthetic oligonucleotide
ucuccuugccaugucaaca

SEQ ID NO: 2203283 - RNA, 19 nt, Artificial Sequence
  Description of Artificial Sequence: Synthetic oligonucleotide
guuaauuaagacuccucua

SEQ ID NO: 2203284 - RNA, 19 nt, Artificial Sequence
  Description of Artificial Sequence: Synthetic oligonucleotide
agcacuggucaacagucug

SEQ ID NO: 2203285 - RNA, 19 nt, Artificial Sequence
  Description of Artificial Sequence: Synthetic oligonucleotide
aaggcauacuagucuccug

SEQ ID NO: 2203286 - RNA, 19 nt, Artificial Sequence
  Description of Artificial Sequence: Synthetic oligonucleotide
auauuaccaaucauuuugu

SEQ ID NO: 2203287 - RNA, 19 nt, Artificial Sequence
  Description of Artificial Sequence: Synthetic oligonucleotide
uauuaccaaucauuuuguc

SEQ ID NO: 2203288 - RNA, 19 nt, Artificial Sequence
  Description of Artificial Sequence: Synthetic oligonucleotide
ugcagaggucuuucguuag

SEQ ID NO: 2203289 - RNA, 19 nt, Artificial Sequence
  Description of Artificial Sequence: Synthetic oligonucleotide
auacuagucuccugcaaaa

SEQ ID NO: 2203290 - RNA, 19 nt, Artificial Sequence
  Description of Artificial Sequence: Synthetic oligonucleotide
uccuuuggauagaaggaau

SEQ ID NO: 2203291 - RNA, 19 nt, Artificial Sequence
  Description of Artificial Sequence: Synthetic oligonucleotide
ucaaugucugaugccauaa

SEQ ID NO: 2203292 - RNA, 19 nt, Artificial Sequence
  Description of Artificial Sequence: Synthetic oligonucleotide
cuauuggagaagguucuag

SEQ ID NO: 2203293 - RNA, 19 nt, Artificial Sequence
  Description of Artificial Sequence: Synthetic oligonucleotide
ucaggagaacguuccaaaa

SEQ ID NO: 2203294 - RNA, 19 nt, Artificial Sequence
  Description of Artificial Sequence: Synthetic oligonucleotide
caggcugucgucuccuugc

SEQ ID NO: 2203295 - RNA, 19 nt, Artificial Sequence
  Description of Artificial Sequence: Synthetic oligonucleotide
aagguucuaggagcacugg

SEQ ID NO: 2203296 - RNA, 19 nt, Artificial Sequence
  Description of Artificial Sequence: Synthetic oligonucleotide
aguaaguugcucaguaggu

SEQ ID NO: 2203297 - RNA, 19 nt, Artificial Sequence
  Description of Artificial Sequence: Synthetic oligonucleotide
agaggaacucuauauuauu

SEQ ID NO: 2203298 - RNA, 19 nt, Artificial Sequence
  Description of Artificial Sequence: Synthetic oligonucleotide
gugaccuaaggcauacuag

SEQ ID NO: 2203299 - RNA, 19 nt, Artificial Sequence
  Description of Artificial Sequence: Synthetic oligonucleotide
uaaggcauacuagucuccu

SEQ ID NO: 2203300 - RNA, 19 nt, Artificial Sequence
  Description of Artificial Sequence: Synthetic oligonucleotide
guucuauuuuaauaauucu

SEQ ID NO: 2203301 - RNA, 19 nt, Artificial Sequence
  Description of Artificial Sequence: Synthetic oligonucleotide
uuucaaugucugaugccau

SEQ ID NO: 2203302 - RNA, 19 nt, Artificial Sequence
  Description of Artificial Sequence: Synthetic oligonucleotide
uucguuagucaaucccaca

SEQ ID NO: 2203303 - RNA, 19 nt, Artificial Sequence
  Description of Artificial Sequence: Synthetic oligonucleotide
uguuauggcucguggguau

SEQ ID NO: 2203304 - RNA, 19 nt, Artificial Sequence
  Description of Artificial Sequence: Synthetic oligonucleotide
ugaugccauaaucuuucuc

SEQ ID NO: 2203305 - RNA, 19 nt, Artificial Sequence
  Description of Artificial Sequence: Synthetic oligonucleotide
agaggucuuucguuaguca

SEQ ID NO: 2203306 - RNA, 19 nt, Artificial Sequence
  Description of Artificial Sequence: Synthetic oligonucleotide
aaacuacaaccauucuguu

SEQ ID NO: 2203307 - RNA, 19 nt, Artificial Sequence
  Description of Artificial Sequence: Synthetic oligonucleotide
gaauuucguguuauggcuc

SEQ ID NO: 2203308 - RNA, 19 nt, Artificial Sequence
  Description of Artificial Sequence: Synthetic oligonucleotide
gaacguuccaaaauauuua

SEQ ID NO: 2203309 - RNA, 19 nt, Artificial Sequence
  Description of Artificial Sequence: Synthetic oligonucleotide
ucuaggagcacuggucaac

SEQ ID NO: 2203310 - RNA, 19 nt, Artificial Sequence
  Description of Artificial Sequence: Synthetic oligonucleotide
caaguuuagguuguuauua

SEQ ID NO: 2203311 - RNA, 19 nt, Artificial Sequence
  Description of Artificial Sequence: Synthetic oligonucleotide
ggaacucuauauuauucuc

SEQ ID NO: 2203312 - RNA, 19 nt, Artificial Sequence
  Description of Artificial Sequence: Synthetic oligonucleotide
agcagaggaacucuauauu

SEQ ID NO: 2203313 - RNA, 19 nt, Artificial Sequence
  Description of Artificial Sequence: Synthetic oligonucleotide
acccguuugaucauuguga

SEQ ID NO: 2203314 - RNA, 19 nt, Artificial Sequence
  Description of Artificial Sequence: Synthetic oligonucleotide
accuucagaauuucguguu

SEQ ID NO: 2203315 - RNA, 19 nt, Artificial Sequence
  Description of Artificial Sequence: Synthetic oligonucleotide
cauacuagucuccugcaaa

SEQ ID NO: 2203316 - RNA, 19 nt, Artificial Sequence
  Description of Artificial Sequence: Synthetic oligonucleotide
uggguaucuugauaugaua

SEQ ID NO: 2203317 - RNA, 19 nt, Artificial Sequence
  Description of Artificial Sequence: Synthetic oligonucleotide
acagaucccaccguuuuga

SEQ ID NO: 2203318 - RNA, 19 nt, Artificial Sequence
  Description of Artificial Sequence: Synthetic oligonucleotide
ucccacagagcagaggaac

SEQ ID NO: 2203319 - RNA, 19 nt, Artificial Sequence
  Description of Artificial Sequence: Synthetic oligonucleotide
uuugaucauugugaccuaa

SEQ ID NO: 2203320 - RNA, 19 nt, Artificial Sequence
  Description of Artificial Sequence: Synthetic oligonucleotide
ucgucuccuugccauguca

SEQ ID NO: 2203321 - RNA, 19 nt, Artificial Sequence
  Description of Artificial Sequence: Synthetic oligonucleotide
aaacuccaggcugucgucu

SEQ ID NO: 2203322 - RNA, 19 nt, Artificial Sequence
  Description of Artificial Sequence: Synthetic oligonucleotide
gucaaucccacagagcaga

SEQ ID NO: 2203323 - RNA, 19 nt, Artificial Sequence
  Description of Artificial Sequence: Synthetic oligonucleotide
cacuggcuccuuuggauag

SEQ ID NO: 2203324 - RNA, 19 nt, Artificial Sequence
  Description of Artificial Sequence: Synthetic oligonucleotide
ugccauaaucuuucuccac

SEQ ID NO: 2203325 - RNA, 19 nt, Artificial Sequence
  Description of Artificial Sequence: Synthetic oligonucleotide
caucaacucccauggugag

SEQ ID NO: 2203326 - RNA, 19 nt, Artificial Sequence
  Description of Artificial Sequence: Synthetic oligonucleotide
aggcugucgucuccuugcc

SEQ ID NO: 2203327 - RNA, 19 nt, Artificial Sequence
  Description of Artificial Sequence: Synthetic oligonucleotide
gugaguaaguugcucagua

SEQ ID NO: 2203328 - RNA, 19 nt, Artificial Sequence
  Description of Artificial Sequence: Synthetic oligonucleotide
agagcagaggaacucuaua

SEQ ID NO: 2203329 - RNA, 19 nt, Artificial Sequence
  Description of Artificial Sequence: Synthetic oligonucleotide
uuucguguuauggcucgug

SEQ ID NO: 2203330 - RNA, 19 nt, Artificial Sequence
  Description of Artificial Sequence: Synthetic oligonucleotide
agguucuaggagcacuggu

SEQ ID NO: 2203331 - RNA, 19 nt, Artificial Sequence
  Description of Artificial Sequence: Synthetic oligonucleotide
gaccuucagaauuucgugu

SEQ ID NO: 2203332 - RNA, 19 nt, Artificial Sequence
  Description of Artificial Sequence: Synthetic oligonucleotide
guaaguugcucaguagguc

SEQ ID NO: 2203333 - RNA, 19 nt, Artificial Sequence
  Description of Artificial Sequence: Synthetic oligonucleotide
cguuccaaaauauuuauaa

SEQ ID NO: 2203334 - RNA, 19 nt, Artificial Sequence
  Description of Artificial Sequence: Synthetic oligonucleotide
aucuuucuccacagauccc

SEQ ID NO: 2203335 - RNA, 19 nt, Artificial Sequence
  Description of Artificial Sequence: Synthetic oligonucleotide
ucacuggcuccuuuggaua

SEQ ID NO: 2203336 - RNA, 19 nt, Artificial Sequence
  Description of Artificial Sequence: Synthetic oligonucleotide
ucaggcuauuggagaaggu

SEQ ID NO: 2203337 - RNA, 19 nt, Artificial Sequence
  Description of Artificial Sequence: Synthetic oligonucleotide
uuacccguuugaucauugu

SEQ ID NO: 2203338 - RNA, 19 nt, Artificial Sequence
  Description of Artificial Sequence: Synthetic oligonucleotide
auucaggcuauuggagaag

SEQ ID NO: 2203339 - RNA, 19 nt, Artificial Sequence
  Description of Artificial Sequence: Synthetic oligonucleotide
gucaacagucugcagaggu

SEQ ID NO: 2203340 - RNA, 19 nt, Artificial Sequence
  Description of Artificial Sequence: Synthetic oligonucleotide
gccauaaucuuucuccaca

SEQ ID NO: 2203341 - RNA, 19 nt, Artificial Sequence
  Description of Artificial Sequence: Synthetic oligonucleotide
gagcagaggaacucuauau

SEQ ID NO: 2203342 - RNA, 19 nt, Artificial Sequence
  Description of Artificial Sequence: Synthetic oligonucleotide
gacuccucuaacacuguuc

SEQ ID NO: 2203343 - RNA, 19 nt, Artificial Sequence
  Description of Artificial Sequence: Synthetic oligonucleotide
uguagccauccuguuaaaa

SEQ ID NO: 2203344 - RNA, 19 nt, Artificial Sequence
  Description of Artificial Sequence: Synthetic oligonucleotide
ucguggguaucuugauaug

SEQ ID NO: 2203345 - RNA, 19 nt, Artificial Sequence
  Description of Artificial Sequence: Synthetic oligonucleotide
guugcucaguagguccucg

SEQ ID NO: 2203346 - RNA, 19 nt, Artificial Sequence
  Description of Artificial Sequence: Synthetic oligonucleotide
uaggagcacuggucaacag

SEQ ID NO: 2203347 - RNA, 19 nt, Artificial Sequence
  Description of Artificial Sequence: Synthetic oligonucleotide
gucuuucguuagucaaucc

SEQ ID NO: 2203348 - RNA, 19 nt, Artificial Sequence
  Description of Artificial Sequence: Synthetic oligonucleotide
aggaauucaggagaacguu

SEQ ID NO: 2203349 - RNA, 19 nt, Artificial Sequence
  Description of Artificial Sequence: Synthetic oligonucleotide
caguagguccucguucucc

SEQ ID NO: 2203350 - RNA, 19 nt, Artificial Sequence
  Description of Artificial Sequence: Synthetic oligonucleotide
gaccuaaggcauacuaguc

SEQ ID NO: 2203351 - RNA, 19 nt, Artificial Sequence
  Description of Artificial Sequence: Synthetic oligonucleotide
auucaggagaacguuccaa

SEQ ID NO: 2203352 - RNA, 19 nt, Artificial Sequence
  Description of Artificial Sequence: Synthetic oligonucleotide
uucuaggagcacuggucaa

SEQ ID NO: 2203353 - RNA, 19 nt, Artificial Sequence
  Description of Artificial Sequence: Synthetic oligonucleotide
uuuugucacuggcuccuuu

SEQ ID NO: 2203354 - RNA, 19 nt, Artificial Sequence
  Description of Artificial Sequence: Synthetic oligonucleotide
cucguggguaucuugauau

SEQ ID NO: 2203355 - RNA, 19 nt, Artificial Sequence
  Description of Artificial Sequence: Synthetic oligonucleotide
auggcucguggguaucuug

SEQ ID NO: 2203356 - RNA, 19 nt, Artificial Sequence
  Description of Artificial Sequence: Synthetic oligonucleotide
uccugcucauuuguagcca

SEQ ID NO: 2203357 - RNA, 19 nt, Artificial Sequence
  Description of Artificial Sequence: Synthetic oligonucleotide
ggagcacuggucaacaguc

SEQ ID NO: 2203358 - RNA, 19 nt, Artificial Sequence
  Description of Artificial Sequence: Synthetic oligonucleotide
ugcucaguagguccucguu

SEQ ID NO: 2203359 - RNA, 19 nt, Artificial Sequence
  Description of Artificial Sequence: Synthetic oligonucleotide
gcagaggaacucuauauua

SEQ ID NO: 2203360 - RNA, 19 nt, Artificial Sequence
  Description of Artificial Sequence: Synthetic oligonucleotide
agaucccaccguuuugaaa

SEQ ID NO: 2203361 - RNA, 19 nt, Artificial Sequence
  Description of Artificial Sequence: Synthetic oligonucleotide
agucaaucccacagagcag

SEQ ID NO: 2203362 - RNA, 19 nt, Artificial Sequence
  Description of Artificial Sequence: Synthetic oligonucleotide
uuauggcucguggguaucu

SEQ ID NO: 2203363 - RNA, 19 nt, Artificial Sequence
  Description of Artificial Sequence: Synthetic oligonucleotide
uccacagaucccaccguuu

SEQ ID NO: 2203364 - RNA, 19 nt, Artificial Sequence
  Description of Artificial Sequence: Synthetic oligonucleotide
ugucgucuccuugccaugu

SEQ ID NO: 2203365 - RNA, 19 nt, Artificial Sequence
  Description of Artificial Sequence: Synthetic oligonucleotide
cacagaucccaccguuuug

SEQ ID NO: 2203366 - RNA, 19 nt, Artificial Sequence
  Description of Artificial Sequence: Synthetic oligonucleotide
aguugcucaguagguccuc

SEQ ID NO: 2203367 - RNA, 19 nt, Artificial Sequence
  Description of Artificial Sequence: Synthetic oligonucleotide
acucccauggugaguaagu

SEQ ID NO: 2203368 - RNA, 19 nt, Artificial Sequence
  Description of Artificial Sequence: Synthetic oligonucleotide
aggaauacuuucaguuccu

SEQ ID NO: 2203369 - RNA, 19 nt, Artificial Sequence
  Description of Artificial Sequence: Synthetic oligonucleotide
gguucuaggagcacugguc

SEQ ID NO: 2203370 - RNA, 19 nt, Artificial Sequence
  Description of Artificial Sequence: Synthetic oligonucleotide
ugucaacaucaacucccau

SEQ ID NO: 2203371 - RNA, 19 nt, Artificial Sequence
  Description of Artificial Sequence: Synthetic oligonucleotide
cucaguagguccucguucu

SEQ ID NO: 2203372 - RNA, 19 nt, Artificial Sequence
  Description of Artificial Sequence: Synthetic oligonucleotide
uauucaaauucaggcuauu

SEQ ID NO: 2203373 - RNA, 19 nt, Artificial Sequence
  Description of Artificial Sequence: Synthetic oligonucleotide
ggaauucaggagaacguuc

SEQ ID NO: 2203374 - RNA, 19 nt, Artificial Sequence
  Description of Artificial Sequence: Synthetic oligonucleotide
cagaggucuuucguuaguc

SEQ ID NO: 2203375 - RNA, 19 nt, Artificial Sequence
  Description of Artificial Sequence: Synthetic oligonucleotide
uccuugccaugucaacauc

SEQ ID NO: 2203376 - RNA, 19 nt, Artificial Sequence
  Description of Artificial Sequence: Synthetic oligonucleotide
cccguuugaucauugugac

SEQ ID NO: 2203377 - RNA, 19 nt, Artificial Sequence
  Description of Artificial Sequence: Synthetic oligonucleotide
ucaguagguccucguucuc

SEQ ID NO: 2203378 - RNA, 19 nt, Artificial Sequence
  Description of Artificial Sequence: Synthetic oligonucleotide
augucaacaucaacuccca

SEQ ID NO: 2203379 - RNA, 19 nt, Artificial Sequence
  Description of Artificial Sequence: Synthetic oligonucleotide
uugcucaguagguccucgu

SEQ ID NO: 2203380 - RNA, 19 nt, Artificial Sequence
  Description of Artificial Sequence: Synthetic oligonucleotide
uuuuacccguuugaucauu

SEQ ID NO: 2203381 - RNA, 19 nt, Artificial Sequence
  Description of Artificial Sequence: Synthetic oligonucleotide
cuauauuauucuccaaguu

SEQ ID NO: 2203382 - RNA, 19 nt, Artificial Sequence
  Description of Artificial Sequence: Synthetic oligonucleotide
gucuccuugccaugucaac

SEQ ID NO: 2203383 - RNA, 19 nt, Artificial Sequence
  Description of Artificial Sequence: Synthetic oligonucleotide
agguuguuauuagaccgaa

SEQ ID NO: 2203384 - RNA, 19 nt, Artificial Sequence
  Description of Artificial Sequence: Synthetic oligonucleotide
aucccaccguuuugaaaga

SEQ ID NO: 2203385 - RNA, 19 nt, Artificial Sequence
  Description of Artificial Sequence: Synthetic oligonucleotide
ggucuuucguuagucaauc

SEQ ID NO: 2203386 - RNA, 19 nt, Artificial Sequence
  Description of Artificial Sequence: Synthetic oligonucleotide
cuccuuuggauagaaggaa

SEQ ID NO: 2203387 - RNA, 19 nt, Artificial Sequence
  Description of Artificial Sequence: Synthetic oligonucleotide
cccaccguuuugaaagacc

SEQ ID NO: 2203388 - RNA, 19 nt, Artificial Sequence
  Description of Artificial Sequence: Synthetic oligonucleotide
cuguucuauuuuaauaauu

SEQ ID NO: 2203389 - RNA, 19 nt, Artificial Sequence
  Description of Artificial Sequence: Synthetic oligonucleotide
gcucaguagguccucguuc

SEQ ID NO: 2203390 - RNA, 19 nt, Artificial Sequence
  Description of Artificial Sequence: Synthetic oligonucleotide
cuaggagcacuggucaaca

SEQ ID NO: 2203391 - RNA, 19 nt, Artificial Sequence
  Description of Artificial Sequence: Synthetic oligonucleotide
aucaacucccauggugagu

SEQ ID NO: 2203392 - RNA, 19 nt, Artificial Sequence
  Description of Artificial Sequence: Synthetic oligonucleotide
cagaggaacucuauauuau

SEQ ID NO: 2203393 - RNA, 19 nt, Artificial Sequence
  Description of Artificial Sequence: Synthetic oligonucleotide
gcuccuuuggauagaagga

SEQ ID NO: 2203394 - RNA, 19 nt, Artificial Sequence
  Description of Artificial Sequence: Synthetic oligonucleotide
aggucuuucguuagucaau

SEQ ID NO: 2203395 - RNA, 19 nt, Artificial Sequence
  Description of Artificial Sequence: Synthetic oligonucleotide
gucacuggcuccuuuggau

SEQ ID NO: 2203396 - RNA, 19 nt, Artificial Sequence
  Description of Artificial Sequence: Synthetic oligonucleotide
ggagaagguucuaggagca

SEQ ID NO: 2203397 - RNA, 19 nt, Artificial Sequence
  Description of Artificial Sequence: Synthetic oligonucleotide
cugcagaggucuuucguua

SEQ ID NO: 2203398 - RNA, 19 nt, Artificial Sequence
  Description of Artificial Sequence: Synthetic oligonucleotide
gagaagguucuaggagcac

SEQ ID NO: 2203399 - RNA, 19 nt, Artificial Sequence
  Description of Artificial Sequence: Synthetic oligonucleotide
cauuuugucacuggcuccu

SEQ ID NO: 2203400 - RNA, 19 nt, Artificial Sequence
  Description of Artificial Sequence: Synthetic oligonucleotide
cacuggucaacagucugca

SEQ ID NO: 2203401 - RNA, 19 nt, Artificial Sequence
  Description of Artificial Sequence: Synthetic oligonucleotide
cugcucauuuguagccauc

SEQ ID NO: 2203402 - RNA, 19 nt, Artificial Sequence
  Description of Artificial Sequence: Synthetic oligonucleotide
cauugugaccuaaggcaua

SEQ ID NO: 2203403 - RNA, 19 nt, Artificial Sequence
  Description of Artificial Sequence: Synthetic oligonucleotide
cguuugaucauugugaccu

SEQ ID NO: 2203404 - RNA, 19 nt, Artificial Sequence
  Description of Artificial Sequence: Synthetic oligonucleotide
cugucgucuccuugccaug

SEQ ID NO: 2203405 - RNA, 19 nt, Artificial Sequence
  Description of Artificial Sequence: Synthetic oligonucleotide
cagucugcagaggucuuuc

SEQ ID NO: 2203406 - RNA, 19 nt, Artificial Sequence
  Description of Artificial Sequence: Synthetic oligonucleotide
uuguagccauccuguuaaa

SEQ ID NO: 2203407 - RNA, 19 nt, Artificial Sequence
  Description of Artificial Sequence: Synthetic oligonucleotide
ucccaccguuuugaaagac

SEQ ID NO: 2203408 - RNA, 19 nt, Artificial Sequence
  Description of Artificial Sequence: Synthetic oligonucleotide
gguaucuugauaugauauu

SEQ ID NO: 2203409 - RNA, 19 nt, Artificial Sequence
  Description of Artificial Sequence: Synthetic oligonucleotide
caacagucugcagaggucu

SEQ ID NO: 2203410 - RNA, 19 nt, Artificial Sequence
  Description of Artificial Sequence: Synthetic oligonucleotide
ggcauacuagucuccugca

SEQ ID NO: 2203411 - RNA, 19 nt, Artificial Sequence
  Description of Artificial Sequence: Synthetic oligonucleotide
caggagaacguuccaaaau

SEQ ID NO: 2203412 - RNA, 19 nt, Artificial Sequence
  Description of Artificial Sequence: Synthetic oligonucleotide
uacaaccauucuguuuauu

SEQ ID NO: 2203413 - RNA, 19 nt, Artificial Sequence
  Description of Artificial Sequence: Synthetic oligonucleotide
gagaacguuccaaaauauu

SEQ ID NO: 2203414 - RNA, 19 nt, Artificial Sequence
  Description of Artificial Sequence: Synthetic oligonucleotide
guuugaucauugugaccua

SEQ ID NO: 2203415 - RNA, 19 nt, Artificial Sequence
  Description of Artificial Sequence: Synthetic oligonucleotide
gucugcagaggucuuucgu

SEQ ID NO: 2203416 - RNA, 19 nt, Artificial Sequence
  Description of Artificial Sequence: Synthetic oligonucleotide
acguuccaaaauauuuaua

SEQ ID NO: 2203417 - RNA, 19 nt, Artificial Sequence
  Description of Artificial Sequence: Synthetic oligonucleotide
auuucguguuauggcucgu

SEQ ID NO: 2203418 - RNA, 19 nt, Artificial Sequence
  Description of Artificial Sequence: Synthetic oligonucleotide
guuauggcucguggguauc

SEQ ID NO: 2203419 - RNA, 19 nt, Artificial Sequence
  Description of Artificial Sequence: Synthetic oligonucleotide
ggucaacagucugcagagg

SEQ ID NO: 2203420 - RNA, 19 nt, Artificial Sequence
  Description of Artificial Sequence: Synthetic oligonucleotide
uauggcucguggguaucuu

SEQ ID NO: 2203421 - RNA, 19 nt, Artificial Sequence
  Description of Artificial Sequence: Synthetic oligonucleotide
cuccuugccaugucaacau

SEQ ID NO: 2203422 - RNA, 19 nt, Artificial Sequence
  Description of Artificial Sequence: Synthetic oligonucleotide
uugugaccuaaggcauacu

SEQ ID NO: 2203423 - RNA, 19 nt, Artificial Sequence
  Description of Artificial Sequence: Synthetic oligonucleotide
acuggcuccuuuggauaga

SEQ ID NO: 2203424 - RNA, 19 nt, Artificial Sequence
  Description of Artificial Sequence: Synthetic oligonucleotide
ccuuuggauagaaggaaua

SEQ ID NO: 2203425 - RNA, 19 nt, Artificial Sequence
  Description of Artificial Sequence: Synthetic oligonucleotide
guggguaucuugauaugau

SEQ ID NO: 2203426 - RNA, 19 nt, Artificial Sequence
  Description of Artificial Sequence: Synthetic oligonucleotide
ccaccguuuugaaagaccu

SEQ ID NO: 2203427 - RNA, 19 nt, Artificial Sequence
  Description of Artificial Sequence: Synthetic oligonucleotide
gcauacuagucuccugcaa

SEQ ID NO: 2203428 - RNA, 19 nt, Artificial Sequence
  Description of Artificial Sequence: Synthetic oligonucleotide
gucgucuccuugccauguc

SEQ ID NO: 2203429 - RNA, 19 nt, Artificial Sequence
  Description of Artificial Sequence: Synthetic oligonucleotide
cucuaacacuguucuauuu

SEQ ID NO: 2203430 - RNA, 19 nt, Artificial Sequence
  Description of Artificial Sequence: Synthetic oligonucleotide
ggcuauuggagaagguucu

SEQ ID NO: 2203431 - RNA, 19 nt, Artificial Sequence
  Description of Artificial Sequence: Synthetic oligonucleotide
gcugucgucuccuugccau

SEQ ID NO: 2203432 - RNA, 19 nt, Artificial Sequence
  Description of Artificial Sequence: Synthetic oligonucleotide
ccguuuugaaagaccuuca

SEQ ID NO: 2203433 - RNA, 19 nt, Artificial Sequence
  Description of Artificial Sequence: Synthetic oligonucleotide
caggcuauuggagaagguu

SEQ ID NO: 2203434 - RNA, 19 nt, Artificial Sequence
  Description of Artificial Sequence: Synthetic oligonucleotide
auuuugucacuggcuccuu

SEQ ID NO: 2203435 - RNA, 19 nt, Artificial Sequence
  Description of Artificial Sequence: Synthetic oligonucleotide
caguuccugcucauuugua

SEQ ID NO: 2203436 - RNA, 19 nt, Artificial Sequence
  Description of Artificial Sequence: Synthetic oligonucleotide
gucugaugccauaaucuuu

SEQ ID NO: 2203437 - RNA, 19 nt, Artificial Sequence
  Description of Artificial Sequence: Synthetic oligonucleotide
ccacagagcagaggaacuc

SEQ ID NO: 2203438 - RNA, 19 nt, Artificial Sequence
  Description of Artificial Sequence: Synthetic oligonucleotide
cguuagucaaucccacaga

SEQ ID NO: 2203439 - RNA, 19 nt, Artificial Sequence
  Description of Artificial Sequence: Synthetic oligonucleotide
cagagcagaggaacucuau

SEQ ID NO: 2203440 - RNA, 19 nt, Artificial Sequence
  Description of Artificial Sequence: Synthetic oligonucleotide
caaugucugaugccauaau

SEQ ID NO: 2203441 - RNA, 19 nt, Artificial Sequence
  Description of Artificial Sequence: Synthetic oligonucleotide
cugaugccauaaucuuucu

SEQ ID NO: 2203442 - RNA, 19 nt, Artificial Sequence
  Description of Artificial Sequence: Synthetic oligonucleotide
gguuguuauuagaccgaaa

SEQ ID NO: 2203443 - RNA, 19 nt, Artificial Sequence
  Description of Artificial Sequence: Synthetic oligonucleotide
gagcacuggucaacagucu

SEQ ID NO: 2203444 - RNA, 19 nt, Artificial Sequence
  Description of Artificial Sequence: Synthetic oligonucleotide
cguggguaucuugauauga

SEQ ID NO: 2203445 - RNA, 19 nt, Artificial Sequence
  Description of Artificial Sequence: Synthetic oligonucleotide
gcucguggguaucuugaua

SEQ ID NO: 2203446 - RNA, 19 nt, Artificial Sequence
  Description of Artificial Sequence: Synthetic oligonucleotide
cuccucuaacacuguucua

SEQ ID NO: 2203447 - RNA, 19 nt, Artificial Sequence
  Description of Artificial Sequence: Synthetic oligonucleotide
ggugaguaaguugcucagu

SEQ ID NO: 2203448 - RNA, 19 nt, Artificial Sequence
  Description of Artificial Sequence: Synthetic oligonucleotide
cguguuauggcucgugggu

SEQ ID NO: 2203449 - RNA, 19 nt, Artificial Sequence
  Description of Artificial Sequence: Synthetic oligonucleotide
cuacaaccauucuguuuau

SEQ ID NO: 2203450 - RNA, 19 nt, Artificial Sequence
  Description of Artificial Sequence: Synthetic oligonucleotide
ccaaguuuagguuguuauu

SEQ ID NO: 2203451 - RNA, 19 nt, Artificial Sequence
  Description of Artificial Sequence: Synthetic oligonucleotide
caacaucaacucccauggu

SEQ ID NO: 2203452 - RNA, 19 nt, Artificial Sequence
  Description of Artificial Sequence: Synthetic oligonucleotide
ggcugucgucuccuugcca

SEQ ID NO: 2203453 - RNA, 19 nt, Artificial Sequence
  Description of Artificial Sequence: Synthetic oligonucleotide
gcagaggucuuucguuagu

SEQ ID NO: 2203454 - RNA, 19 nt, Artificial Sequence
  Description of Artificial Sequence: Synthetic oligonucleotide
gcuauuggagaagguucua

SEQ ID NO: 2203455 - RNA, 19 nt, Artificial Sequence
  Description of Artificial Sequence: Synthetic oligonucleotide
caacucccauggugaguaa

SEQ ID NO: 2203456 - RNA, 19 nt, Artificial Sequence
  Description of Artificial Sequence: Synthetic oligonucleotide
cuuucaguuccugcucauu

SEQ ID NO: 2203457 - RNA, 19 nt, Artificial Sequence
  Description of Artificial Sequence: Synthetic oligonucleotide
caccguuuugaaagaccuu

SEQ ID NO: 2203458 - RNA, 19 nt, Artificial Sequence
  Description of Artificial Sequence: Synthetic oligonucleotide
cucccauggugaguaaguu

SEQ ID NO: 2203459 - RNA, 19 nt, Artificial Sequence
  Description of Artificial Sequence: Synthetic oligonucleotide
cgucuccuugccaugucaa

SEQ ID NO: 2203460 - RNA, 19 nt, Artificial Sequence
  Description of Artificial Sequence: Synthetic oligonucleotide
ggcucguggguaucuugau

SEQ ID NO: 2203461 - RNA, 19 nt, Artificial Sequence
  Description of Artificial Sequence: Synthetic oligonucleotide
ccucuaacacuguucuauu

SEQ ID NO: 2203462 - RNA, 19 nt, Artificial Sequence
  Description of Artificial Sequence: Synthetic oligonucleotide
ccugcucauuuguagccau

SEQ ID NO: 2203463 - RNA, 19 nt, Artificial Sequence
  Description of Artificial Sequence: Synthetic oligonucleotide
ccauggugaguaaguugcu

SEQ ID NO: 2203464 - RNA, 19 nt, Artificial Sequence
  Description of Artificial Sequence: Synthetic oligonucleotide
ccacagaucccaccguuuu

SEQ ID NO: 2203465 - RNA, 19 nt, Artificial Sequence
  Description of Artificial Sequence: Synthetic oligonucleotide
gaagcuuagaaguaguucg

SEQ ID NO: 2203466 - RNA, 19 nt, Artificial Sequence
  Description of Artificial Sequence: Synthetic oligonucleotide
aagauuaacugcuacagug

SEQ ID NO: 2203467 - RNA, 19 nt, Artificial Sequence
  Description of Artificial Sequence: Synthetic oligonucleotide
aauugcuaagcaguuaucc

SEQ ID NO: 2203468 - RNA, 19 nt, Artificial Sequence
  Description of Artificial Sequence: Synthetic oligonucleotide
aaguaguucgaguuugugc

SEQ ID NO: 2203469 - RNA, 19 nt, Artificial Sequence
  Description of Artificial Sequence: Synthetic oligonucleotide
aagaugucuaaacacauca

SEQ ID NO: 2203470 - RNA, 19 nt, Artificial Sequence
  Description of Artificial Sequence: Synthetic oligonucleotide
uaagcaguuauccugaaac

SEQ ID NO: 2203471 - RNA, 19 nt, Artificial Sequence
  Description of Artificial Sequence: Synthetic oligonucleotide
acugcuacagugcauaagg

SEQ ID NO: 2203472 - RNA, 19 nt, Artificial Sequence
  Description of Artificial Sequence: Synthetic oligonucleotide
aaaauugcuaagcaguuau

SEQ ID NO: 2203473 - RNA, 19 nt, Artificial Sequence
  Description of Artificial Sequence: Synthetic oligonucleotide
cuuacauccguuuugcugc

SEQ ID NO: 2203474 - RNA, 19 nt, Artificial Sequence
  Description of Artificial Sequence: Synthetic oligonucleotide
uccaaaauugcuaagcagu

SEQ ID NO: 2203475 - RNA, 19 nt, Artificial Sequence
  Description of Artificial Sequence: Synthetic oligonucleotide
uuaacaggaagcuuagaag

SEQ ID NO: 2203476 - RNA, 19 nt, Artificial Sequence
  Description of Artificial Sequence: Synthetic oligonucleotide
aaguaagauuaacugcuac

SEQ ID NO: 2203477 - RNA, 19 nt, Artificial Sequence
  Description of Artificial Sequence: Synthetic oligonucleotide
aguagcuccacuuucuggg

SEQ ID NO: 2203478 - RNA, 19 nt, Artificial Sequence
  Description of Artificial Sequence: Synthetic oligonucleotide
uugaggauacccuaagggg

SEQ ID NO: 2203479 - RNA, 19 nt, Artificial Sequence
  Description of Artificial Sequence: Synthetic oligonucleotide
gaugaagaugucuaaacac

SEQ ID NO: 2203480 - RNA, 19 nt, Artificial Sequence
  Description of Artificial Sequence: Synthetic oligonucleotide
aguaguucgaguuugugca

SEQ ID NO: 2203481 - RNA, 19 nt, Artificial Sequence
  Description of Artificial Sequence: Synthetic oligonucleotide
gaugucuaaacacaucagc

SEQ ID NO: 2203482 - RNA, 19 nt, Artificial Sequence
  Description of Artificial Sequence: Synthetic oligonucleotide
ucauugaaagccuucagcu

SEQ ID NO: 2203483 - RNA, 19 nt, Artificial Sequence
  Description of Artificial Sequence: Synthetic oligonucleotide
uaacaucaggaucugaacc

SEQ ID NO: 2203484 - RNA, 19 nt, Artificial Sequence
  Description of Artificial Sequence: Synthetic oligonucleotide
uaacaggaagcuuagaagu

SEQ ID NO: 2203485 - RNA, 19 nt, Artificial Sequence
  Description of Artificial Sequence: Synthetic oligonucleotide
cuugaggauacccuaaggg

SEQ ID NO: 2203486 - RNA, 19 nt, Artificial Sequence
  Description of Artificial Sequence: Synthetic oligonucleotide
uuggcaguuucauugaaag

SEQ ID NO: 2203487 - RNA, 19 nt, Artificial Sequence
  Description of Artificial Sequence: Synthetic oligonucleotide
ucuagcagcagcauggagu

SEQ ID NO: 2203488 - RNA, 19 nt, Artificial Sequence
  Description of Artificial Sequence: Synthetic oligonucleotide
auugaaagccuucagcuca

SEQ ID NO: 2203489 - RNA, 19 nt, Artificial Sequence
  Description of Artificial Sequence: Synthetic oligonucleotide
uuuggacuuaacaggaagc

SEQ ID NO: 2203490 - RNA, 19 nt, Artificial Sequence
  Description of Artificial Sequence: Synthetic oligonucleotide
uguaaaguuucuagcagca

SEQ ID NO: 2203491 - RNA, 19 nt, Artificial Sequence
  Description of Artificial Sequence: Synthetic oligonucleotide
uuauucagugguuuguagc

SEQ ID NO: 2203492 - RNA, 19 nt, Artificial Sequence
  Description of Artificial Sequence: Synthetic oligonucleotide
uuccccuuucaaaagaugc

SEQ ID NO: 2203493 - RNA, 19 nt, Artificial Sequence
  Description of Artificial Sequence: Synthetic oligonucleotide
ugcuuaaggaggaaccccg

SEQ ID NO: 2203494 - RNA, 19 nt, Artificial Sequence
  Description of Artificial Sequence: Synthetic oligonucleotide
uuguauuacaucucuaaaa

SEQ ID NO: 2203495 - RNA, 19 nt, Artificial Sequence
  Description of Artificial Sequence: Synthetic oligonucleotide
guaagauuaacugcuacag

SEQ ID NO: 2203496 - RNA, 19 nt, Artificial Sequence
  Description of Artificial Sequence: Synthetic oligonucleotide
uuagcacuggccaucguag

SEQ ID NO: 2203497 - RNA, 19 nt, Artificial Sequence
  Description of Artificial Sequence: Synthetic oligonucleotide
guuucuagcagcagcaugg

SEQ ID NO: 2203498 - RNA, 19 nt, Artificial Sequence
  Description of Artificial Sequence: Synthetic oligonucleotide
uuguaaaguuucuagcagc

SEQ ID NO: 2203499 - RNA, 19 nt, Artificial Sequence
  Description of Artificial Sequence: Synthetic oligonucleotide
ucaacuacccuaaguaaga

SEQ ID NO: 2203500 - RNA, 19 nt, Artificial Sequence
  Description of Artificial Sequence: Synthetic oligonucleotide
uauucagugguuuguagcu

SEQ ID NO: 2203501 - RNA, 19 nt, Artificial Sequence
  Description of Artificial Sequence: Synthetic oligonucleotide
uucuuuggacuuaacagga

SEQ ID NO: 2203502 - RNA, 19 nt, Artificial Sequence
  Description of Artificial Sequence: Synthetic oligonucleotide
aucuguaguagguucccgc

SEQ ID NO: 2203503 - RNA, 19 nt, Artificial Sequence
  Description of Artificial Sequence: Synthetic oligonucleotide
aguaagauuaacugcuaca

SEQ ID NO: 2203504 - RNA, 19 nt, Artificial Sequence
  Description of Artificial Sequence: Synthetic oligonucleotide
uucaaaagaugcucggcag

SEQ ID NO: 2203505 - RNA, 19 nt, Artificial Sequence
  Description of Artificial Sequence: Synthetic oligonucleotide
ugcaucuguggccaggccg

SEQ ID NO: 2203506 - RNA, 19 nt, Artificial Sequence
  Description of Artificial Sequence: Synthetic oligonucleotide
gaugccagggucccgaugc

SEQ ID NO: 2203507 - RNA, 19 nt, Artificial Sequence
  Description of Artificial Sequence: Synthetic oligonucleotide
agauuaacugcuacagugc

SEQ ID NO: 2203508 - RNA, 19 nt, Artificial Sequence
  Description of Artificial Sequence: Synthetic oligonucleotide
acaucaacuacccuaagua

SEQ ID NO: 2203509 - RNA, 19 nt, Artificial Sequence
  Description of Artificial Sequence: Synthetic oligonucleotide
guuauccugaaacuucucc

SEQ ID NO: 2203510 - RNA, 19 nt, Artificial Sequence
  Description of Artificial Sequence: Synthetic oligonucleotide
ucaaaagaugcucggcagc

SEQ ID NO: 2203511 - RNA, 19 nt, Artificial Sequence
  Description of Artificial Sequence: Synthetic oligonucleotide
cuaaguaagauuaacugcu

SEQ ID NO: 2203512 - RNA, 19 nt, Artificial Sequence
  Description of Artificial Sequence: Synthetic oligonucleotide
uggaugaagaugucuaaac

SEQ ID NO: 2203513 - RNA, 19 nt, Artificial Sequence
  Description of Artificial Sequence: Synthetic oligonucleotide
gaguuugugcaucuguggc

SEQ ID NO: 2203514 - RNA, 19 nt, Artificial Sequence
  Description of Artificial Sequence: Synthetic oligonucleotide
cuuuggacuuaacaggaag

SEQ ID NO: 2203515 - RNA, 19 nt, Artificial Sequence
  Description of Artificial Sequence: Synthetic oligonucleotide
guuuuggugacuuuuguaa

SEQ ID NO: 2203516 - RNA, 19 nt, Artificial Sequence
  Description of Artificial Sequence: Synthetic oligonucleotide
uuaaggaggaaccccguuc

SEQ ID NO: 2203517 - RNA, 19 nt, Artificial Sequence
  Description of Artificial Sequence: Synthetic oligonucleotide
ucuaaacacaucagcuucu

SEQ ID NO: 2203518 - RNA, 19 nt, Artificial Sequence
  Description of Artificial Sequence: Synthetic oligonucleotide
ugugaucuguaguagguuc

SEQ ID NO: 2203519 - RNA, 19 nt, Artificial Sequence
  Description of Artificial Sequence: Synthetic oligonucleotide
cuuuuguaacaucaggauc

SEQ ID NO: 2203520 - RNA, 19 nt, Artificial Sequence
  Description of Artificial Sequence: Synthetic oligonucleotide
uguaguagguucccgcugu

SEQ ID NO: 2203521 - RNA, 19 nt, Artificial Sequence
  Description of Artificial Sequence: Synthetic oligonucleotide
uacagugcauaagggaugg

SEQ ID NO: 2203522 - RNA, 19 nt, Artificial Sequence
  Description of Artificial Sequence: Synthetic oligonucleotide
uaagauuaacugcuacagu

SEQ ID NO: 2203523 - RNA, 19 nt, Artificial Sequence
  Description of Artificial Sequence: Synthetic oligonucleotide
uuuuggugacuuuuguaac

SEQ ID NO: 2203524 - RNA, 19 nt, Artificial Sequence
  Description of Artificial Sequence: Synthetic oligonucleotide
ucgaguuugugcaucugug

SEQ ID NO: 2203525 - RNA, 19 nt, Artificial Sequence
  Description of Artificial Sequence: Synthetic oligonucleotide
aucugaaccuccuggauga

SEQ ID NO: 2203526 - RNA, 19 nt, Artificial Sequence
  Description of Artificial Sequence: Synthetic oligonucleotide
uucagcucaccuuguaaag

SEQ ID NO: 2203527 - RNA, 19 nt, Artificial Sequence
  Description of Artificial Sequence: Synthetic oligonucleotide
ccuaaguaagauuaacugc

SEQ ID NO: 2203528 - RNA, 19 nt, Artificial Sequence
  Description of Artificial Sequence: Synthetic oligonucleotide
aaccccguuccacaucaac

SEQ ID NO: 2203529 - RNA, 19 nt, Artificial Sequence
  Description of Artificial Sequence: Synthetic oligonucleotide
aggacuacugugaagucac

SEQ ID NO: 2203530 - RNA, 19 nt, Artificial Sequence
  Description of Artificial Sequence: Synthetic oligonucleotide
aagaugcucggcagcaacc

SEQ ID NO: 2203531 - RNA, 19 nt, Artificial Sequence
  Description of Artificial Sequence: Synthetic oligonucleotide
gauuaacugcuacagugca

SEQ ID NO: 2203532 - RNA, 19 nt, Artificial Sequence
  Description of Artificial Sequence: Synthetic oligonucleotide
aucaacuacccuaaguaag

SEQ ID NO: 2203533 - RNA, 19 nt, Artificial Sequence
  Description of Artificial Sequence: Synthetic oligonucleotide
ucucgucuuguuuugguga

SEQ ID NO: 2203534 - RNA, 19 nt, Artificial Sequence
  Description of Artificial Sequence: Synthetic oligonucleotide
gacuuuuguaacaucagga

SEQ ID NO: 2203535 - RNA, 19 nt, Artificial Sequence
  Description of Artificial Sequence: Synthetic oligonucleotide
cuuaacaggaagcuuagaa

SEQ ID NO: 2203536 - RNA, 19 nt, Artificial Sequence
  Description of Artificial Sequence: Synthetic oligonucleotide
gucuaaacacaucagcuuc

SEQ ID NO: 2203537 - RNA, 19 nt, Artificial Sequence
  Description of Artificial Sequence: Synthetic oligonucleotide
uagaaguaguucgaguuug

SEQ ID NO: 2203538 - RNA, 19 nt, Artificial Sequence
  Description of Artificial Sequence: Synthetic oligonucleotide
uggcuugguccuuacaucc

SEQ ID NO: 2203539 - RNA, 19 nt, Artificial Sequence
  Description of Artificial Sequence: Synthetic oligonucleotide
ugggcagucugcuuaagga

SEQ ID NO: 2203540 - RNA, 19 nt, Artificial Sequence
  Description of Artificial Sequence: Synthetic oligonucleotide
aaagccuucagcucaccuu

SEQ ID NO: 2203541 - RNA, 19 nt, Artificial Sequence
  Description of Artificial Sequence: Synthetic oligonucleotide
ucgugugaucuguaguagg

SEQ ID NO: 2203542 - RNA, 19 nt, Artificial Sequence
  Description of Artificial Sequence: Synthetic oligonucleotide
cugagcagucugaaggugg

SEQ ID NO: 2203543 - RNA, 19 nt, Artificial Sequence
  Description of Artificial Sequence: Synthetic oligonucleotide
acuacccuaaguaagauua

SEQ ID NO: 2203544 - RNA, 19 nt, Artificial Sequence
  Description of Artificial Sequence: Synthetic oligonucleotide
uuaacugcuacagugcaua

SEQ ID NO: 2203545 - RNA, 19 nt, Artificial Sequence
  Description of Artificial Sequence: Synthetic oligonucleotide
cuacugugaagucacuggc

SEQ ID NO: 2203546 - RNA, 19 nt, Artificial Sequence
  Description of Artificial Sequence: Synthetic oligonucleotide
aagccgucuggccacacug

SEQ ID NO: 2203547 - RNA, 19 nt, Artificial Sequence
  Description of Artificial Sequence: Synthetic oligonucleotide
uuagaaguaguucgaguuu

SEQ ID NO: 2203548 - RNA, 19 nt, Artificial Sequence
  Description of Artificial Sequence: Synthetic oligonucleotide
aucucuaaaagcugcucca

SEQ ID NO: 2203549 - RNA, 19 nt, Artificial Sequence
  Description of Artificial Sequence: Synthetic oligonucleotide
ucacuugcgcauucucucg

SEQ ID NO: 2203550 - RNA, 19 nt, Artificial Sequence
  Description of Artificial Sequence: Synthetic oligonucleotide
uagguucccgcugugaugc

SEQ ID NO: 2203551 - RNA, 19 nt, Artificial Sequence
  Description of Artificial Sequence: Synthetic oligonucleotide
uucgaguuugugcaucugu

SEQ ID NO: 2203552 - RNA, 19 nt, Artificial Sequence
  Description of Artificial Sequence: Synthetic oligonucleotide
auuacaucucuaaaagcug

SEQ ID NO: 2203553 - RNA, 19 nt, Artificial Sequence
  Description of Artificial Sequence: Synthetic oligonucleotide
ugucuaaacacaucagcuu

SEQ ID NO: 2203554 - RNA, 19 nt, Artificial Sequence
  Description of Artificial Sequence: Synthetic oligonucleotide
ugccuuguauuacaucucu

SEQ ID NO: 2203555 - RNA, 19 nt, Artificial Sequence
  Description of Artificial Sequence: Synthetic oligonucleotide
guaacaucaggaucugaac

SEQ ID NO: 2203556 - RNA, 19 nt, Artificial Sequence
  Description of Artificial Sequence: Synthetic oligonucleotide
acuggcuugguccuuacau

SEQ ID NO: 2203557 - RNA, 19 nt, Artificial Sequence
  Description of Artificial Sequence: Synthetic oligonucleotide
ucucacuugcgcauucucu

SEQ ID NO: 2203558 - RNA, 19 nt, Artificial Sequence
  Description of Artificial Sequence: Synthetic oligonucleotide
augucuaaacacaucagcu

SEQ ID NO: 2203559 - RNA, 19 nt, Artificial Sequence
  Description of Artificial Sequence: Synthetic oligonucleotide
ugacugggccccaagcucc

SEQ ID NO: 2203560 - RNA, 19 nt, Artificial Sequence
  Description of Artificial Sequence: Synthetic oligonucleotide
ucugcuuaaggaggaaccc

SEQ ID NO: 2203561 - RNA, 19 nt, Artificial Sequence
  Description of Artificial Sequence: Synthetic oligonucleotide
uuggacuuaacaggaagcu

SEQ ID NO: 2203562 - RNA, 19 nt, Artificial Sequence
  Description of Artificial Sequence: Synthetic oligonucleotide
aaauugcuaagcaguuauc

SEQ ID NO: 2203563 - RNA, 19 nt, Artificial Sequence
  Description of Artificial Sequence: Synthetic oligonucleotide
aacgaauggggcugcgugu

SEQ ID NO: 2203564 - RNA, 19 nt, Artificial Sequence
  Description of Artificial Sequence: Synthetic oligonucleotide
uuguuuuggugacuuuugu

SEQ ID NO: 2203565 - RNA, 19 nt, Artificial Sequence
  Description of Artificial Sequence: Synthetic oligonucleotide
uuuaguuccuccucugguu

SEQ ID NO: 2203566 - RNA, 19 nt, Artificial Sequence
  Description of Artificial Sequence: Synthetic oligonucleotide
aaggugggcagucugcuua

SEQ ID NO: 2203567 - RNA, 19 nt, Artificial Sequence
  Description of Artificial Sequence: Synthetic oligonucleotide
aguucgugugaucuguagu

SEQ ID NO: 2203568 - RNA, 19 nt, Artificial Sequence
  Description of Artificial Sequence: Synthetic oligonucleotide
accuucaaggccuguaacu

SEQ ID NO: 2203569 - RNA, 19 nt, Artificial Sequence
  Description of Artificial Sequence: Synthetic oligonucleotide
uguuuuggugacuuuugua

SEQ ID NO: 2203570 - RNA, 19 nt, Artificial Sequence
  Description of Artificial Sequence: Synthetic oligonucleotide
uaaguaagauuaacugcua

SEQ ID NO: 2203571 - RNA, 19 nt, Artificial Sequence
  Description of Artificial Sequence: Synthetic oligonucleotide
cccuaaguaagauuaacug

SEQ ID NO: 2203572 - RNA, 19 nt, Artificial Sequence
  Description of Artificial Sequence: Synthetic oligonucleotide
cucacuugcgcauucucuc

SEQ ID NO: 2203573 - RNA, 19 nt, Artificial Sequence
  Description of Artificial Sequence: Synthetic oligonucleotide
guuugccccaggaagaagc

SEQ ID NO: 2203574 - RNA, 19 nt, Artificial Sequence
  Description of Artificial Sequence: Synthetic oligonucleotide
ugguguaacugcugguuga

SEQ ID NO: 2203575 - RNA, 19 nt, Artificial Sequence
  Description of Artificial Sequence: Synthetic oligonucleotide
uugcuuauucagugguuug

SEQ ID NO: 2203576 - RNA, 19 nt, Artificial Sequence
  Description of Artificial Sequence: Synthetic oligonucleotide
cauugaaagccuucagcuc

SEQ ID NO: 2203577 - RNA, 19 nt, Artificial Sequence
  Description of Artificial Sequence: Synthetic oligonucleotide
aacugcuacagugcauaag

SEQ ID NO: 2203578 - RNA, 19 nt, Artificial Sequence
  Description of Artificial Sequence: Synthetic oligonucleotide
gaguucgugugaucuguag

SEQ ID NO: 2203579 - RNA, 19 nt, Artificial Sequence
  Description of Artificial Sequence: Synthetic oligonucleotide
gugcauaagggauggugag

SEQ ID NO: 2203580 - RNA, 19 nt, Artificial Sequence
  Description of Artificial Sequence: Synthetic oligonucleotide
agucugcuuaaggaggaac

SEQ ID NO: 2203581 - RNA, 19 nt, Artificial Sequence
  Description of Artificial Sequence: Synthetic oligonucleotide
acaccgucuuagcacuggc

SEQ ID NO: 2203582 - RNA, 19 nt, Artificial Sequence
  Description of Artificial Sequence: Synthetic oligonucleotide
ugcgcauucucucgucuug

SEQ ID NO: 2203583 - RNA, 19 nt, Artificial Sequence
  Description of Artificial Sequence: Synthetic oligonucleotide
uucgugugaucuguaguag

SEQ ID NO: 2203584 - RNA, 19 nt, Artificial Sequence
  Description of Artificial Sequence: Synthetic oligonucleotide
uuuguaacaucaggaucug

SEQ ID NO: 2203585 - RNA, 19 nt, Artificial Sequence
  Description of Artificial Sequence: Synthetic oligonucleotide
aacuacccuaaguaagauu

SEQ ID NO: 2203586 - RNA, 19 nt, Artificial Sequence
  Description of Artificial Sequence: Synthetic oligonucleotide
ugccccaggaagaagccgu

SEQ ID NO: 2203587 - RNA, 19 nt, Artificial Sequence
  Description of Artificial Sequence: Synthetic oligonucleotide
cuaaggggcuuccucuggg

SEQ ID NO: 2203588 - RNA, 19 nt, Artificial Sequence
  Description of Artificial Sequence: Synthetic oligonucleotide
ucgcacaccgucuuagcac

SEQ ID NO: 2203589 - RNA, 19 nt, Artificial Sequence
  Description of Artificial Sequence: Synthetic oligonucleotide
caacgaauggggcugcgug

SEQ ID NO: 2203590 - RNA, 19 nt, Artificial Sequence
  Description of Artificial Sequence: Synthetic oligonucleotide
agaugcucggcagcaaccg

SEQ ID NO: 2203591 - RNA, 19 nt, Artificial Sequence
  Description of Artificial Sequence: Synthetic oligonucleotide
ugaucuguaguagguuccc

SEQ ID NO: 2203592 - RNA, 19 nt, Artificial Sequence
  Description of Artificial Sequence: Synthetic oligonucleotide
caguagcuccacuuucugg

SEQ ID NO: 2203593 - RNA, 19 nt, Artificial Sequence
  Description of Artificial Sequence: Synthetic oligonucleotide
uucuagcagcagcauggag

SEQ ID NO: 2203594 - RNA, 19 nt, Artificial Sequence
  Description of Artificial Sequence: Synthetic oligonucleotide
cuuagaaguaguucgaguu

SEQ ID NO: 2203595 - RNA, 19 nt, Artificial Sequence
  Description of Artificial Sequence: Synthetic oligonucleotide
auaagggauggugaguccu

SEQ ID NO: 2203596 - RNA, 19 nt, Artificial Sequence
  Description of Artificial Sequence: Synthetic oligonucleotide
ucggcaacgaauggggcug

SEQ ID NO: 2203597 - RNA, 19 nt, Artificial Sequence
  Description of Artificial Sequence: Synthetic oligonucleotide
aguucgaguuugugcaucu

SEQ ID NO: 2203598 - RNA, 19 nt, Artificial Sequence
  Description of Artificial Sequence: Synthetic oligonucleotide
auucucucgucuuguuuug

SEQ ID NO: 2203599 - RNA, 19 nt, Artificial Sequence
  Description of Artificial Sequence: Synthetic oligonucleotide
aggaucugaaccuccugga

SEQ ID NO: 2203600 - RNA, 19 nt, Artificial Sequence
  Description of Artificial Sequence: Synthetic oligonucleotide
ggugacuuuuguaacauca

SEQ ID NO: 2203601 - RNA, 19 nt, Artificial Sequence
  Description of Artificial Sequence: Synthetic oligonucleotide
ugugaugccagggucccga

SEQ ID NO: 2203602 - RNA, 19 nt, Artificial Sequence
  Description of Artificial Sequence: Synthetic oligonucleotide
uuuugcuuauucagugguu

SEQ ID NO: 2203603 - RNA, 19 nt, Artificial Sequence
  Description of Artificial Sequence: Synthetic oligonucleotide
ggaugaagaugucuaaaca

SEQ ID NO: 2203604 - RNA, 19 nt, Artificial Sequence
  Description of Artificial Sequence: Synthetic oligonucleotide
gaaguaguucgaguuugug

SEQ ID NO: 2203605 - RNA, 19 nt, Artificial Sequence
  Description of Artificial Sequence: Synthetic oligonucleotide
cauaagggauggugagucc

SEQ ID NO: 2203606 - RNA, 19 nt, Artificial Sequence
  Description of Artificial Sequence: Synthetic oligonucleotide
ggauggugaguccuugagg

SEQ ID NO: 2203607 - RNA, 19 nt, Artificial Sequence
  Description of Artificial Sequence: Synthetic oligonucleotide
uacccuaaguaagauuaac

SEQ ID NO: 2203608 - RNA, 19 nt, Artificial Sequence
  Description of Artificial Sequence: Synthetic oligonucleotide
ggaacuggagccuuucuuc

SEQ ID NO: 2203609 - RNA, 19 nt, Artificial Sequence
  Description of Artificial Sequence: Synthetic oligonucleotide
auucagugguuuguagcuc

SEQ ID NO: 2203610 - RNA, 19 nt, Artificial Sequence
  Description of Artificial Sequence: Synthetic oligonucleotide
cucgucuuguuuuggugac

SEQ ID NO: 2203611 - RNA, 19 nt, Artificial Sequence
  Description of Artificial Sequence: Synthetic oligonucleotide
aagcuuagaaguaguucga

SEQ ID NO: 2203612 - RNA, 19 nt, Artificial Sequence
  Description of Artificial Sequence: Synthetic oligonucleotide
uggaguucgugugaucugu

SEQ ID NO: 2203613 - RNA, 19 nt, Artificial Sequence
  Description of Artificial Sequence: Synthetic oligonucleotide
cuucagcucaccuuguaaa

SEQ ID NO: 2203614 - RNA, 19 nt, Artificial Sequence
  Description of Artificial Sequence: Synthetic oligonucleotide
ucucucgucuuguuuuggu

SEQ ID NO: 2203615 - RNA, 19 nt, Artificial Sequence
  Description of Artificial Sequence: Synthetic oligonucleotide
ucugguguaacugcugguu

SEQ ID NO: 2203616 - RNA, 19 nt, Artificial Sequence
  Description of Artificial Sequence: Synthetic oligonucleotide
ccuuacauccguuuugcug

SEQ ID NO: 2203617 - RNA, 19 nt, Artificial Sequence
  Description of Artificial Sequence: Synthetic oligonucleotide
cagugcauaagggauggug

SEQ ID NO: 2203618 - RNA, 19 nt, Artificial Sequence
  Description of Artificial Sequence: Synthetic oligonucleotide
uggccaucguagccgggcg

SEQ ID NO: 2203619 - RNA, 19 nt, Artificial Sequence
  Description of Artificial Sequence: Synthetic oligonucleotide
cucucgucuuguuuuggug

SEQ ID NO: 2203620 - RNA, 19 nt, Artificial Sequence
  Description of Artificial Sequence: Synthetic oligonucleotide
acccuaaguaagauuaacu

SEQ ID NO: 2203621 - RNA, 19 nt, Artificial Sequence
  Description of Artificial Sequence: Synthetic oligonucleotide
aggaggaaccccguuccac

SEQ ID NO: 2203622 - RNA, 19 nt, Artificial Sequence
  Description of Artificial Sequence: Synthetic oligonucleotide
ugaagucacuggcuugguc

SEQ ID NO: 2203623 - RNA, 19 nt, Artificial Sequence
  Description of Artificial Sequence: Synthetic oligonucleotide
cugguguaacugcugguug

SEQ ID NO: 2203624 - RNA, 19 nt, Artificial Sequence
  Description of Artificial Sequence: Synthetic oligonucleotide
uacccuaaggggcuuccuc

SEQ ID NO: 2203625 - RNA, 19 nt, Artificial Sequence
  Description of Artificial Sequence: Synthetic oligonucleotide
guccuuacauccguuuugc

SEQ ID NO: 2203626 - RNA, 19 nt, Artificial Sequence
  Description of Artificial Sequence: Synthetic oligonucleotide
aacaggaagcuuagaagua

SEQ ID NO: 2203627 - RNA, 19 nt, Artificial Sequence
  Description of Artificial Sequence: Synthetic oligonucleotide
aauggggcugcgugucgca

SEQ ID NO: 2203628 - RNA, 19 nt, Artificial Sequence
  Description of Artificial Sequence: Synthetic oligonucleotide
caucaacuacccuaaguaa

SEQ ID NO: 2203629 - RNA, 19 nt, Artificial Sequence
  Description of Artificial Sequence: Synthetic oligonucleotide
gguccuuacauccguuuug

SEQ ID NO: 2203630 - RNA, 19 nt, Artificial Sequence
  Description of Artificial Sequence: Synthetic oligonucleotide
auggaguucgugugaucug

SEQ ID NO: 2203631 - RNA, 19 nt, Artificial Sequence
  Description of Artificial Sequence: Synthetic oligonucleotide
acgaauggggcugcguguc

SEQ ID NO: 2203632 - RNA, 19 nt, Artificial Sequence
  Description of Artificial Sequence: Synthetic oligonucleotide
uucucucgucuuguuuugg

SEQ ID NO: 2203633 - RNA, 19 nt, Artificial Sequence
  Description of Artificial Sequence: Synthetic oligonucleotide
ugcucggcagcaaccgccc

SEQ ID NO: 2203634 - RNA, 19 nt, Artificial Sequence
  Description of Artificial Sequence: Synthetic oligonucleotide
ugggaguuugccccaggaa

SEQ ID NO: 2203635 - RNA, 19 nt, Artificial Sequence
  Description of Artificial Sequence: Synthetic oligonucleotide
cuggcuugguccuuacauc

SEQ ID NO: 2203636 - RNA, 19 nt, Artificial Sequence
  Description of Artificial Sequence: Synthetic oligonucleotide
gaugcucggcagcaaccgc

SEQ ID NO: 2203637 - RNA, 19 nt, Artificial Sequence
  Description of Artificial Sequence: Synthetic oligonucleotide
ugcauaagggauggugagu

SEQ ID NO: 2203638 - RNA, 19 nt, Artificial Sequence
  Description of Artificial Sequence: Synthetic oligonucleotide
caaaagaugcucggcagca

SEQ ID NO: 2203639 - RNA, 19 nt, Artificial Sequence
  Description of Artificial Sequence: Synthetic oligonucleotide
cuucuuucaacuucaacuu

SEQ ID NO: 2203640 - RNA, 19 nt, Artificial Sequence
  Description of Artificial Sequence: Synthetic oligonucleotide
gauacccuaaggggcuucc

SEQ ID NO: 2203641 - RNA, 19 nt, Artificial Sequence
  Description of Artificial Sequence: Synthetic oligonucleotide
ggcugcgugucgcacaccg

SEQ ID NO: 2203642 - RNA, 19 nt, Artificial Sequence
  Description of Artificial Sequence: Synthetic oligonucleotide
caggaagaagccgucuggc

SEQ ID NO: 2203643 - RNA, 19 nt, Artificial Sequence
  Description of Artificial Sequence: Synthetic oligonucleotide
aaggaggaaccccguucca

SEQ ID NO: 2203644 - RNA, 19 nt, Artificial Sequence
  Description of Artificial Sequence: Synthetic oligonucleotide
agcucucacuugcgcauuc

SEQ ID NO: 2203645 - RNA, 19 nt, Artificial Sequence
  Description of Artificial Sequence: Synthetic oligonucleotide
uaaggggcuuccucuggga

SEQ ID NO: 2203646 - RNA, 19 nt, Artificial Sequence
  Description of Artificial Sequence: Synthetic oligonucleotide
uucugguguaacugcuggu

SEQ ID NO: 2203647 - RNA, 19 nt, Artificial Sequence
  Description of Artificial Sequence: Synthetic oligonucleotide
ugguccuuacauccguuuu

SEQ ID NO: 2203648 - RNA, 19 nt, Artificial Sequence
  Description of Artificial Sequence: Synthetic oligonucleotide
uggugaguccuugaggaua

SEQ ID NO: 2203649 - RNA, 19 nt, Artificial Sequence
  Description of Artificial Sequence: Synthetic oligonucleotide
gucuuagcacuggccaucg

SEQ ID NO: 2203650 - RNA, 19 nt, Artificial Sequence
  Description of Artificial Sequence: Synthetic oligonucleotide
ugucgcacaccgucuuagc

SEQ ID NO: 2203651 - RNA, 19 nt, Artificial Sequence
  Description of Artificial Sequence: Synthetic oligonucleotide
ucucuaaaagcugcuccau

SEQ ID NO: 2203652 - RNA, 19 nt, Artificial Sequence
  Description of Artificial Sequence: Synthetic oligonucleotide
uuacauccguuuugcugcu

SEQ ID NO: 2203653 - RNA, 19 nt, Artificial Sequence
  Description of Artificial Sequence: Synthetic oligonucleotide
cuguaguagguucccgcug

SEQ ID NO: 2203654 - RNA, 19 nt, Artificial Sequence
  Description of Artificial Sequence: Synthetic oligonucleotide
uagcacuggccaucguagc

SEQ ID NO: 2203655 - RNA, 19 nt, Artificial Sequence
  Description of Artificial Sequence: Synthetic oligonucleotide
aggaaccccguuccacauc

SEQ ID NO: 2203656 - RNA, 19 nt, Artificial Sequence
  Description of Artificial Sequence: Synthetic oligonucleotide
ggaagcuuagaaguaguuc

SEQ ID NO: 2203657 - RNA, 19 nt, Artificial Sequence
  Description of Artificial Sequence: Synthetic oligonucleotide
ucaccuuguaaaguuucua

SEQ ID NO: 2203658 - RNA, 19 nt, Artificial Sequence
  Description of Artificial Sequence: Synthetic oligonucleotide
aaaagaugcucggcagcaa

SEQ ID NO: 2203659 - RNA, 19 nt, Artificial Sequence
  Description of Artificial Sequence: Synthetic oligonucleotide
cuuagcacuggccaucgua

SEQ ID NO: 2203660 - RNA, 19 nt, Artificial Sequence
  Description of Artificial Sequence: Synthetic oligonucleotide
ugggccccaagcuccagcu

SEQ ID NO: 2203661 - RNA, 19 nt, Artificial Sequence
  Description of Artificial Sequence: Synthetic oligonucleotide
gguuuguagcucuuccuga

SEQ ID NO: 2203662 - RNA, 19 nt, Artificial Sequence
  Description of Artificial Sequence: Synthetic oligonucleotide
caccgucuuagcacuggcc

SEQ ID NO: 2203663 - RNA, 19 nt, Artificial Sequence
  Description of Artificial Sequence: Synthetic oligonucleotide
gaauggggcugcgugucgc

SEQ ID NO: 2203664 - RNA, 19 nt, Artificial Sequence
  Description of Artificial Sequence: Synthetic oligonucleotide
ugaugccagggucccgaug

SEQ ID NO: 2203665 - RNA, 19 nt, Artificial Sequence
  Description of Artificial Sequence: Synthetic oligonucleotide
guagcucuuccugauguuc

SEQ ID NO: 2203666 - RNA, 19 nt, Artificial Sequence
  Description of Artificial Sequence: Synthetic oligonucleotide
cacuggccaucguagccgg

SEQ ID NO: 2203667 - RNA, 19 nt, Artificial Sequence
  Description of Artificial Sequence: Synthetic oligonucleotide
cuuggcaguuucauugaaa

SEQ ID NO: 2203668 - RNA, 19 nt, Artificial Sequence
  Description of Artificial Sequence: Synthetic oligonucleotide
uugguccuuacauccguuu

SEQ ID NO: 2203669 - RNA, 19 nt, Artificial Sequence
  Description of Artificial Sequence: Synthetic oligonucleotide
ggaaccccguuccacauca

SEQ ID NO: 2203670 - RNA, 19 nt, Artificial Sequence
  Description of Artificial Sequence: Synthetic oligonucleotide
aucguagccgggcggcuug

SEQ ID NO: 2203671 - RNA, 19 nt, Artificial Sequence
  Description of Artificial Sequence: Synthetic oligonucleotide
uaacugcuacagugcauaa

SEQ ID NO: 2203672 - RNA, 19 nt, Artificial Sequence
  Description of Artificial Sequence: Synthetic oligonucleotide
aaguuucuagcagcagcau

SEQ ID NO: 2203673 - RNA, 19 nt, Artificial Sequence
  Description of Artificial Sequence: Synthetic oligonucleotide
gcaguuauccugaaacuuc

SEQ ID NO: 2203674 - RNA, 19 nt, Artificial Sequence
  Description of Artificial Sequence: Synthetic oligonucleotide
gcauaagggauggugaguc

SEQ ID NO: 2203675 - RNA, 19 nt, Artificial Sequence
  Description of Artificial Sequence: Synthetic oligonucleotide
uaguucgaguuugugcauc

SEQ ID NO: 2203676 - RNA, 19 nt, Artificial Sequence
  Description of Artificial Sequence: Synthetic oligonucleotide
ccugauguucuucuugcug

SEQ ID NO: 2203677 - RNA, 19 nt, Artificial Sequence
  Description of Artificial Sequence: Synthetic oligonucleotide
uggacuuaacaggaagcuu

SEQ ID NO: 2203678 - RNA, 19 nt, Artificial Sequence
  Description of Artificial Sequence: Synthetic oligonucleotide
caccuucaaggccuguaac

SEQ ID NO: 2203679 - RNA, 19 nt, Artificial Sequence
  Description of Artificial Sequence: Synthetic oligonucleotide
uguagcucuuccugauguu

SEQ ID NO: 2203680 - RNA, 19 nt, Artificial Sequence
  Description of Artificial Sequence: Synthetic oligonucleotide
cacaccgucuuagcacugg

SEQ ID NO: 2203681 - RNA, 19 nt, Artificial Sequence
  Description of Artificial Sequence: Synthetic oligonucleotide
cuggccaucguagccgggc

SEQ ID NO: 2203682 - RNA, 19 nt, Artificial Sequence
  Description of Artificial Sequence: Synthetic oligonucleotide
ucaaggccuguaacucuuc

SEQ ID NO: 2203683 - RNA, 19 nt, Artificial Sequence
  Description of Artificial Sequence: Synthetic oligonucleotide
gucgcacaccgucuuagca

SEQ ID NO: 2203684 - RNA, 19 nt, Artificial Sequence
  Description of Artificial Sequence: Synthetic oligonucleotide
ccuuguauuacaucucuaa

SEQ ID NO: 2203685 - RNA, 19 nt, Artificial Sequence
  Description of Artificial Sequence: Synthetic oligonucleotide
ccuuuaguuccuccucugg

SEQ ID NO: 2203686 - RNA, 19 nt, Artificial Sequence
  Description of Artificial Sequence: Synthetic oligonucleotide
gugucgcacaccgucuuag

SEQ ID NO: 2203687 - RNA, 19 nt, Artificial Sequence
  Description of Artificial Sequence: Synthetic oligonucleotide
uccuuacauccguuuugcu

SEQ ID NO: 2203688 - RNA, 19 nt, Artificial Sequence
  Description of Artificial Sequence: Synthetic oligonucleotide
cauucucucgucuuguuuu

SEQ ID NO: 2203689 - RNA, 19 nt, Artificial Sequence
  Description of Artificial Sequence: Synthetic oligonucleotide
cuccaggacuacugugaag

SEQ ID NO: 2203690 - RNA, 19 nt, Artificial Sequence
  Description of Artificial Sequence: Synthetic oligonucleotide
cgaguuugugcaucugugg

SEQ ID NO: 2203691 - RNA, 19 nt, Artificial Sequence
  Description of Artificial Sequence: Synthetic oligonucleotide
auccguuuugcugcuccag

SEQ ID NO: 2203692 - RNA, 19 nt, Artificial Sequence
  Description of Artificial Sequence: Synthetic oligonucleotide
cauggaguucgugugaucu

SEQ ID NO: 2203693 - RNA, 19 nt, Artificial Sequence
  Description of Artificial Sequence: Synthetic oligonucleotide
accccguuccacaucaacu

SEQ ID NO: 2203694 - RNA, 19 nt, Artificial Sequence
  Description of Artificial Sequence: Synthetic oligonucleotide
guggccaggccgccgcucg

SEQ ID NO: 2203695 - RNA, 19 nt, Artificial Sequence
  Description of Artificial Sequence: Synthetic oligonucleotide
auuaacugcuacagugcau

SEQ ID NO: 2203696 - RNA, 19 nt, Artificial Sequence
  Description of Artificial Sequence: Synthetic oligonucleotide
ucccgcugugaugccaggg

SEQ ID NO: 2203697 - RNA, 19 nt, Artificial Sequence
  Description of Artificial Sequence: Synthetic oligonucleotide
uuguaacaucaggaucuga

SEQ ID NO: 2203698 - RNA, 19 nt, Artificial Sequence
  Description of Artificial Sequence: Synthetic oligonucleotide
cugcagcucucacuugcgc

SEQ ID NO: 2203699 - RNA, 19 nt, Artificial Sequence
  Description of Artificial Sequence: Synthetic oligonucleotide
guucccgcugugaugccag

SEQ ID NO: 2203700 - RNA, 19 nt, Artificial Sequence
  Description of Artificial Sequence: Synthetic oligonucleotide
agaaguaguucgaguuugu

SEQ ID NO: 2203701 - RNA, 19 nt, Artificial Sequence
  Description of Artificial Sequence: Synthetic oligonucleotide
cccgcaguccucuucuucc

SEQ ID NO: 2203702 - RNA, 19 nt, Artificial Sequence
  Description of Artificial Sequence: Synthetic oligonucleotide
aguuugccccaggaagaag

SEQ ID NO: 2203703 - RNA, 19 nt, Artificial Sequence
  Description of Artificial Sequence: Synthetic oligonucleotide
agccgucuggccacacugc

SEQ ID NO: 2203704 - RNA, 19 nt, Artificial Sequence
  Description of Artificial Sequence: Synthetic oligonucleotide
ccguuccacaucaacuacc

SEQ ID NO: 2203705 - RNA, 19 nt, Artificial Sequence
  Description of Artificial Sequence: Synthetic oligonucleotide
caggacuacugugaaguca

SEQ ID NO: 2203706 - RNA, 19 nt, Artificial Sequence
  Description of Artificial Sequence: Synthetic oligonucleotide
cacugccuuguauuacauc

SEQ ID NO: 2203707 - RNA, 19 nt, Artificial Sequence
  Description of Artificial Sequence: Synthetic oligonucleotide
ggaggaaccccguuccaca

SEQ ID NO: 2203708 - RNA, 19 nt, Artificial Sequence
  Description of Artificial Sequence: Synthetic oligonucleotide
cacaucaacuacccuaagu

SEQ ID NO: 2203709 - RNA, 19 nt, Artificial Sequence
  Description of Artificial Sequence: Synthetic oligonucleotide
gaggauacccuaaggggcu

SEQ ID NO: 2203710 - RNA, 19 nt, Artificial Sequence
  Description of Artificial Sequence: Synthetic oligonucleotide
ugaaagccuucagcucacc

SEQ ID NO: 2203711 - RNA, 19 nt, Artificial Sequence
  Description of Artificial Sequence: Synthetic oligonucleotide
cuugacugggccccaagcu

SEQ ID NO: 2203712 - RNA, 19 nt, Artificial Sequence
  Description of Artificial Sequence: Synthetic oligonucleotide
ggaguuugccccaggaaga

SEQ ID NO: 2203713 - RNA, 19 nt, Artificial Sequence
  Description of Artificial Sequence: Synthetic oligonucleotide
uugcgcauucucucgucuu

SEQ ID NO: 2203714 - RNA, 19 nt, Artificial Sequence
  Description of Artificial Sequence: Synthetic oligonucleotide
uucccgcugugaugccagg

SEQ ID NO: 2203715 - RNA, 19 nt, Artificial Sequence
  Description of Artificial Sequence: Synthetic oligonucleotide
acuuaacaggaagcuuaga

SEQ ID NO: 2203716 - RNA, 19 nt, Artificial Sequence
  Description of Artificial Sequence: Synthetic oligonucleotide
cuacccuaaguaagauuaa

SEQ ID NO: 2203717 - RNA, 19 nt, Artificial Sequence
  Description of Artificial Sequence: Synthetic oligonucleotide
ucuuagcacuggccaucgu

SEQ ID NO: 2203718 - RNA, 19 nt, Artificial Sequence
  Description of Artificial Sequence: Synthetic oligonucleotide
cuggaugaagaugucuaaa

SEQ ID NO: 2203719 - RNA, 19 nt, Artificial Sequence
  Description of Artificial Sequence: Synthetic oligonucleotide
gcaucuguggccaggccgc

SEQ ID NO: 2203720 - RNA, 19 nt, Artificial Sequence
  Description of Artificial Sequence: Synthetic oligonucleotide
cgcucggcaacgaaugggg

SEQ ID NO: 2203721 - RNA, 19 nt, Artificial Sequence
  Description of Artificial Sequence: Synthetic oligonucleotide
ucccugagucucugccagc

SEQ ID NO: 2203722 - RNA, 19 nt, Artificial Sequence
  Description of Artificial Sequence: Synthetic oligonucleotide
ccuaaggggcuuccucugg

SEQ ID NO: 2203723 - RNA, 19 nt, Artificial Sequence
  Description of Artificial Sequence: Synthetic oligonucleotide
ucgucuuguuuuggugacu

SEQ ID NO: 2203724 - RNA, 19 nt, Artificial Sequence
  Description of Artificial Sequence: Synthetic oligonucleotide
gaguuugccccaggaagaa

SEQ ID NO: 2203725 - RNA, 19 nt, Artificial Sequence
  Description of Artificial Sequence: Synthetic oligonucleotide
ggcuugguccuuacauccg

SEQ ID NO: 2203726 - RNA, 19 nt, Artificial Sequence
  Description of Artificial Sequence: Synthetic oligonucleotide
cugggaguuugccccagga

SEQ ID NO: 2203727 - RNA, 19 nt, Artificial Sequence
  Description of Artificial Sequence: Synthetic oligonucleotide
cucaccuuguaaaguuucu

SEQ ID NO: 2203728 - RNA, 19 nt, Artificial Sequence
  Description of Artificial Sequence: Synthetic oligonucleotide
aacugcugguugacagccu

SEQ ID NO: 2203729 - RNA, 19 nt, Artificial Sequence
  Description of Artificial Sequence: Synthetic oligonucleotide
aagaagccgucuggccaca

SEQ ID NO: 2203730 - RNA, 19 nt, Artificial Sequence
  Description of Artificial Sequence: Synthetic oligonucleotide
cucggcaacgaauggggcu

SEQ ID NO: 2203731 - RNA, 19 nt, Artificial Sequence
  Description of Artificial Sequence: Synthetic oligonucleotide
aggugggcagucugcuuaa

SEQ ID NO: 2203732 - RNA, 19 nt, Artificial Sequence
  Description of Artificial Sequence: Synthetic oligonucleotide
gcuuagaaguaguucgagu

SEQ ID NO: 2203733 - RNA, 19 nt, Artificial Sequence
  Description of Artificial Sequence: Synthetic oligonucleotide
gcugugaugccaggguccc

SEQ ID NO: 2203734 - RNA, 19 nt, Artificial Sequence
  Description of Artificial Sequence: Synthetic oligonucleotide
ggcggcuugacugggcccc

SEQ ID NO: 2203735 - RNA, 19 nt, Artificial Sequence
  Description of Artificial Sequence: Synthetic oligonucleotide
guagcuccacuuucugggu

SEQ ID NO: 2203736 - RNA, 19 nt, Artificial Sequence
  Description of Artificial Sequence: Synthetic oligonucleotide
gccgucuggccacacugcc

SEQ ID NO: 2203737 - RNA, 19 nt, Artificial Sequence
  Description of Artificial Sequence: Synthetic oligonucleotide
ggccaucguagccgggcgg

SEQ ID NO: 2203738 - RNA, 19 nt, Artificial Sequence
  Description of Artificial Sequence: Synthetic oligonucleotide
cagugguuuguagcucuuc

SEQ ID NO: 2203739 - RNA, 19 nt, Artificial Sequence
  Description of Artificial Sequence: Synthetic oligonucleotide
guguaacugcugguugaca

SEQ ID NO: 2203740 - RNA, 19 nt, Artificial Sequence
  Description of Artificial Sequence: Synthetic oligonucleotide
guccuugaggauacccuaa

SEQ ID NO: 2203741 - RNA, 19 nt, Artificial Sequence
  Description of Artificial Sequence: Synthetic oligonucleotide
cuugcgcauucucucgucu

SEQ ID NO: 2203742 - RNA, 19 nt, Artificial Sequence
  Description of Artificial Sequence: Synthetic oligonucleotide
cagcucaccuuguaaaguu

SEQ ID NO: 2203743 - RNA, 19 nt, Artificial Sequence
  Description of Artificial Sequence: Synthetic oligonucleotide
gaagccgucuggccacacu

SEQ ID NO: 2203744 - RNA, 19 nt, Artificial Sequence
  Description of Artificial Sequence: Synthetic oligonucleotide
gaggaaccccguuccacau

SEQ ID NO: 2203745 - RNA, 19 nt, Artificial Sequence
  Description of Artificial Sequence: Synthetic oligonucleotide
agcucaccuuguaaaguuu

SEQ ID NO: 2203746 - RNA, 19 nt, Artificial Sequence
  Description of Artificial Sequence: Synthetic oligonucleotide
acacugccuuguauuacau

SEQ ID NO: 2203747 - RNA, 19 nt, Artificial Sequence
  Description of Artificial Sequence: Synthetic oligonucleotide
ccgaugccugggcugaggc

SEQ ID NO: 2203748 - RNA, 19 nt, Artificial Sequence
  Description of Artificial Sequence: Synthetic oligonucleotide
guaguucgaguuugugcau

SEQ ID NO: 2203749 - RNA, 19 nt, Artificial Sequence
  Description of Artificial Sequence: Synthetic oligonucleotide
cccguuccacaucaacuac

SEQ ID NO: 2203750 - RNA, 19 nt, Artificial Sequence
  Description of Artificial Sequence: Synthetic oligonucleotide
ggcuugacugggccccaag

SEQ ID NO: 2203751 - RNA, 19 nt, Artificial Sequence
  Description of Artificial Sequence: Synthetic oligonucleotide
ggggcugcgugucgcacac

SEQ ID NO: 2203752 - RNA, 19 nt, Artificial Sequence
  Description of Artificial Sequence: Synthetic oligonucleotide
cugugaugccagggucccg

SEQ ID NO: 2203753 - RNA, 19 nt, Artificial Sequence
  Description of Artificial Sequence: Synthetic oligonucleotide
gucccgaugccugggcuga

SEQ ID NO: 2203754 - RNA, 19 nt, Artificial Sequence
  Description of Artificial Sequence: Synthetic oligonucleotide
cccuaaggggcuuccucug

SEQ ID NO: 2203755 - RNA, 19 nt, Artificial Sequence
  Description of Artificial Sequence: Synthetic oligonucleotide
cuuaaggaggaaccccguu

SEQ ID NO: 2203756 - RNA, 19 nt, Artificial Sequence
  Description of Artificial Sequence: Synthetic oligonucleotide
ugccagcuucugguguaac

SEQ ID NO: 2203757 - RNA, 19 nt, Artificial Sequence
  Description of Artificial Sequence: Synthetic oligonucleotide
gccaucguagccgggcggc

SEQ ID NO: 2203758 - RNA, 19 nt, Artificial Sequence
  Description of Artificial Sequence: Synthetic oligonucleotide
gggcugaggccuuugcucu

SEQ ID NO: 2203759 - RNA, 19 nt, Artificial Sequence
  Description of Artificial Sequence: Synthetic oligonucleotide
ccguuuugcugcuccagga

SEQ ID NO: 2203760 - RNA, 19 nt, Artificial Sequence
  Description of Artificial Sequence: Synthetic oligonucleotide
guuccacaucaacuacccu

SEQ ID NO: 2203761 - RNA, 19 nt, Artificial Sequence
  Description of Artificial Sequence: Synthetic oligonucleotide
ccgcucggcaacgaauggg

SEQ ID NO: 2203762 - RNA, 19 nt, Artificial Sequence
  Description of Artificial Sequence: Synthetic oligonucleotide
uacauccguuuugcugcuc

SEQ ID NO: 2203763 - RNA, 19 nt, Artificial Sequence
  Description of Artificial Sequence: Synthetic oligonucleotide
gcuugguccuuacauccgu

SEQ ID NO: 2203764 - RNA, 19 nt, Artificial Sequence
  Description of Artificial Sequence: Synthetic oligonucleotide
ggaucugaaccuccuggau

SEQ ID NO: 2203765 - RNA, 19 nt, Artificial Sequence
  Description of Artificial Sequence: Synthetic oligonucleotide
ggcaacgaauggggcugcg

SEQ ID NO: 2203766 - RNA, 19 nt, Artificial Sequence
  Description of Artificial Sequence: Synthetic oligonucleotide
gugaguccuugaggauacc

SEQ ID NO: 2203767 - RNA, 19 nt, Artificial Sequence
  Description of Artificial Sequence: Synthetic oligonucleotide
cuaaacacaucagcuucuu

SEQ ID NO: 2203768 - RNA, 19 nt, Artificial Sequence
  Description of Artificial Sequence: Synthetic oligonucleotide
gcuaagcaguuauccugaa

SEQ ID NO: 2203769 - RNA, 19 nt, Artificial Sequence
  Description of Artificial Sequence: Synthetic oligonucleotide
cacuugcgcauucucucgu

SEQ ID NO: 2203770 - RNA, 19 nt, Artificial Sequence
  Description of Artificial Sequence: Synthetic oligonucleotide
ccccguuccacaucaacua

SEQ ID NO: 2203771 - RNA, 19 nt, Artificial Sequence
  Description of Artificial Sequence: Synthetic oligonucleotide
guagccgggcggcuugacu

SEQ ID NO: 2203772 - RNA, 19 nt, Artificial Sequence
  Description of Artificial Sequence: Synthetic oligonucleotide
ccacaucaacuacccuaag

SEQ ID NO: 2203773 - RNA, 19 nt, Artificial Sequence
  Description of Artificial Sequence: Synthetic oligonucleotide
aggauacccuaaggggcuu

SEQ ID NO: 2203774 - RNA, 19 nt, Artificial Sequence
  Description of Artificial Sequence: Synthetic oligonucleotide
gcucggcaacgaauggggc

SEQ ID NO: 2203775 - RNA, 19 nt, Artificial Sequence
  Description of Artificial Sequence: Synthetic oligonucleotide
cgccgcucggcaacgaaug

SEQ ID NO: 2203776 - RNA, 19 nt, Artificial Sequence
  Description of Artificial Sequence: Synthetic oligonucleotide
cacuggcuugguccuuaca

SEQ ID NO: 2203777 - RNA, 19 nt, Artificial Sequence
  Description of Artificial Sequence: Synthetic oligonucleotide
cuugguccuuacauccguu

SEQ ID NO: 2203778 - RNA, 19 nt, Artificial Sequence
  Description of Artificial Sequence: Synthetic oligonucleotide
cgugugaucuguaguaggu

SEQ ID NO: 2203779 - RNA, 19 nt, Artificial Sequence
  Description of Artificial Sequence: Synthetic oligonucleotide
cgaauggggcugcgugucg

SEQ ID NO: 2203780 - RNA, 19 nt, Artificial Sequence
  Description of Artificial Sequence: Synthetic oligonucleotide
ccgcugugaugccaggguc

SEQ ID NO: 2203781 - RNA, 19 nt, Artificial Sequence
  Description of Artificial Sequence: Synthetic oligonucleotide
gugugaucuguaguagguu

SEQ ID NO: 2203782 - RNA, 19 nt, Artificial Sequence
  Description of Artificial Sequence: Synthetic oligonucleotide
caacuacccuaaguaagau

SEQ ID NO: 2203783 - RNA, 19 nt, Artificial Sequence
  Description of Artificial Sequence: Synthetic oligonucleotide
gguucccgcugugaugcca

SEQ ID NO: 2203784 - RNA, 19 nt, Artificial Sequence
  Description of Artificial Sequence: Synthetic oligonucleotide
cgaugccugggcugaggcc

SEQ ID NO: 2203785 - RNA, 19 nt, Artificial Sequence
  Description of Artificial Sequence: Synthetic oligonucleotide
cgucuuagcacuggccauc

SEQ ID NO: 2203786 - RNA, 19 nt, Artificial Sequence
  Description of Artificial Sequence: Synthetic oligonucleotide
ggauacccuaaggggcuuc

SEQ ID NO: 2203787 - RNA, 19 nt, Artificial Sequence
  Description of Artificial Sequence: Synthetic oligonucleotide
gcauucucucgucuuguuu

SEQ ID NO: 2203788 - RNA, 19 nt, Artificial Sequence
  Description of Artificial Sequence: Synthetic oligonucleotide
agucacuggcuugguccuu

SEQ ID NO: 2203789 - RNA, 19 nt, Artificial Sequence
  Description of Artificial Sequence: Synthetic oligonucleotide
cagucugaaggugggcagu

SEQ ID NO: 2203790 - RNA, 19 nt, Artificial Sequence
  Description of Artificial Sequence: Synthetic oligonucleotide
ccuccaggacuacugugaa

SEQ ID NO: 2203791 - RNA, 19 nt, Artificial Sequence
  Description of Artificial Sequence: Synthetic oligonucleotide
cgggcggcuugacugggcc

SEQ ID NO: 2203792 - RNA, 19 nt, Artificial Sequence
  Description of Artificial Sequence: Synthetic oligonucleotide
gucugaaggugggcagucu

SEQ ID NO: 2203793 - RNA, 19 nt, Artificial Sequence
  Description of Artificial Sequence: Synthetic oligonucleotide
cagucugcuuaaggaggaa

SEQ ID NO: 2203794 - RNA, 19 nt, Artificial Sequence
  Description of Artificial Sequence: Synthetic oligonucleotide
gaaccccguuccacaucaa

SEQ ID NO: 2203795 - RNA, 19 nt, Artificial Sequence
  Description of Artificial Sequence: Synthetic oligonucleotide
gccuuguauuacaucucua

SEQ ID NO: 2203796 - RNA, 19 nt, Artificial Sequence
  Description of Artificial Sequence: Synthetic oligonucleotide
ggaguucgugugaucugua

SEQ ID NO: 2203797 - RNA, 19 nt, Artificial Sequence
  Description of Artificial Sequence: Synthetic oligonucleotide
gcuuaaggaggaaccccgu

SEQ ID NO: 2203798 - RNA, 19 nt, Artificial Sequence
  Description of Artificial Sequence: Synthetic oligonucleotide
ccucugggaguuugcccca

SEQ ID NO: 2203799 - RNA, 19 nt, Artificial Sequence
  Description of Artificial Sequence: Synthetic oligonucleotide
cgcacaccgucuuagcacu

SEQ ID NO: 2203800 - RNA, 19 nt, Artificial Sequence
  Description of Artificial Sequence: Synthetic oligonucleotide
ggggcuuccucugggaguu

SEQ ID NO: 2203801 - RNA, 19 nt, Artificial Sequence
  Description of Artificial Sequence: Synthetic oligonucleotide
gugaugccagggucccgau

SEQ ID NO: 2203802 - RNA, 19 nt, Artificial Sequence
  Description of Artificial Sequence: Synthetic oligonucleotide
ccgggcggcuugacugggc

SEQ ID NO: 2203803 - RNA, 19 nt, Artificial Sequence
  Description of Artificial Sequence: Synthetic oligonucleotide
gcaacgaauggggcugcgu

SEQ ID NO: 2203804 - RNA, 19 nt, Artificial Sequence
  Description of Artificial Sequence: Synthetic oligonucleotide
gcgcauucucucgucuugu

SEQ ID NO: 2203805 - RNA, 19 nt, Artificial Sequence
  Description of Artificial Sequence: Synthetic oligonucleotide
ccuucagcucucccugagu

SEQ ID NO: 2203806 - RNA, 19 nt, Artificial Sequence
  Description of Artificial Sequence: Synthetic oligonucleotide
gccgccgcucggcaacgaa

SEQ ID NO: 2203807 - RNA, 19 nt, Artificial Sequence
  Description of Artificial Sequence: Synthetic oligonucleotide
ggacuacugugaagucacu

SEQ ID NO: 2203808 - RNA, 19 nt, Artificial Sequence
  Description of Artificial Sequence: Synthetic oligonucleotide
caucguagccgggcggcuu

SEQ ID NO: 2203809 - RNA, 19 nt, Artificial Sequence
  Description of Artificial Sequence: Synthetic oligonucleotide
cucccgcccgcaguccucu

SEQ ID NO: 2203810 - RNA, 19 nt, Artificial Sequence
  Description of Artificial Sequence: Synthetic oligonucleotide
gcgugucgcacaccgucuu

SEQ ID NO: 2203811 - RNA, 19 nt, Artificial Sequence
  Description of Artificial Sequence: Synthetic oligonucleotide
cggcaacgaauggggcugc

SEQ ID NO: 2203812 - RNA, 19 nt, Artificial Sequence
  Description of Artificial Sequence: Synthetic oligonucleotide
ccgucuggccacacugccu

SEQ ID NO: 2203813 - RNA, 19 nt, Artificial Sequence
  Description of Artificial Sequence: Synthetic oligonucleotide
gggcugcgugucgcacacc

SEQ ID NO: 2203814 - RNA, 19 nt, Artificial Sequence
  Description of Artificial Sequence: Synthetic oligonucleotide
ccgcccgcaguccucuucu

SEQ ID NO: 2203815 - RNA, 19 nt, Artificial Sequence
  Description of Artificial Sequence: Synthetic oligonucleotide
cgugucgcacaccgucuua

SEQ ID NO: 2203816 - RNA, 19 nt, Artificial Sequence
  Description of Artificial Sequence: Synthetic oligonucleotide
gcggcuugacugggcccca

SEQ ID NO: 2203817 - RNA, 19 nt, Artificial Sequence
  Description of Artificial Sequence: Synthetic oligonucleotide
gcugcgugucgcacaccgu

SEQ ID NO: 2203818 - RNA, 19 nt, Artificial Sequence
  Description of Artificial Sequence: Synthetic oligonucleotide
ccgccgcucggcaacgaau

SEQ ID NO: 2203819 - RNA, 19 nt, Artificial Sequence
  Description of Artificial Sequence: Synthetic oligonucleotide
cguagccgggcggcuugac

SEQ ID NO: 2203820 - RNA, 19 nt, Artificial Sequence
  Description of Artificial Sequence: Synthetic oligonucleotide
cgcauucucucgucuuguu

SEQ ID NO: 2203821 - RNA, 19 nt, Artificial Sequence
  Description of Artificial Sequence: Synthetic oligonucleotide
ccaucguagccgggcggcu

SEQ ID NO: 2203822 - RNA, 19 nt, Artificial Sequence
  Description of Artificial Sequence: Synthetic oligonucleotide
ugagaugauauucucaggc

SEQ ID NO: 2203823 - RNA, 19 nt, Artificial Sequence
  Description of Artificial Sequence: Synthetic oligonucleotide
aucauagacaggcacaucg

SEQ ID NO: 2203824 - RNA, 19 nt, Artificial Sequence
  Description of Artificial Sequence: Synthetic oligonucleotide
ucugagaugauauucucag

SEQ ID NO: 2203825 - RNA, 19 nt, Artificial Sequence
  Description of Artificial Sequence: Synthetic oligonucleotide
agaguagaggccuuggucg

SEQ ID NO: 2203826 - RNA, 19 nt, Artificial Sequence
  Description of Artificial Sequence: Synthetic oligonucleotide
auauucucaggcuuggcac

SEQ ID NO: 2203827 - RNA, 19 nt, Artificial Sequence
  Description of Artificial Sequence: Synthetic oligonucleotide
aauucagugaacgggaugu

SEQ ID NO: 2203828 - RNA, 19 nt, Artificial Sequence
  Description of Artificial Sequence: Synthetic oligonucleotide
acauguggcuacuaagggc

SEQ ID NO: 2203829 - RNA, 19 nt, Artificial Sequence
  Description of Artificial Sequence: Synthetic oligonucleotide
acgaauguaccacucuacc

SEQ ID NO: 2203830 - RNA, 19 nt, Artificial Sequence
  Description of Artificial Sequence: Synthetic oligonucleotide
ucgugagucuugaugaagg

SEQ ID NO: 2203831 - RNA, 19 nt, Artificial Sequence
  Description of Artificial Sequence: Synthetic oligonucleotide
gaauguaccacucuaccca

SEQ ID NO: 2203832 - RNA, 19 nt, Artificial Sequence
  Description of Artificial Sequence: Synthetic oligonucleotide
aauguaccacucuacccag

SEQ ID NO: 2203833 - RNA, 19 nt, Artificial Sequence
  Description of Artificial Sequence: Synthetic oligonucleotide
aaugucaaagaagguggcg

SEQ ID NO: 2203834 - RNA, 19 nt, Artificial Sequence
  Description of Artificial Sequence: Synthetic oligonucleotide
auccaguaacuucagcggc

SEQ ID NO: 2203835 - RNA, 19 nt, Artificial Sequence
  Description of Artificial Sequence: Synthetic oligonucleotide
ucggaaaagcuuaggggcg

SEQ ID NO: 2203836 - RNA, 19 nt, Artificial Sequence
  Description of Artificial Sequence: Synthetic oligonucleotide
ucauagacaggcacaucgg

SEQ ID NO: 2203837 - RNA, 19 nt, Artificial Sequence
  Description of Artificial Sequence: Synthetic oligonucleotide
cauccaguaacuucagcgg

SEQ ID NO: 2203838 - RNA, 19 nt, Artificial Sequence
  Description of Artificial Sequence: Synthetic oligonucleotide
uagaccacgacgugagugg

SEQ ID NO: 2203839 - RNA, 19 nt, Artificial Sequence
  Description of Artificial Sequence: Synthetic oligonucleotide
cuacuaagggcuuggacag

SEQ ID NO: 2203840 - RNA, 19 nt, Artificial Sequence
  Description of Artificial Sequence: Synthetic oligonucleotide
gcauccaguaacuucagcg

SEQ ID NO: 2203841 - RNA, 19 nt, Artificial Sequence
  Description of Artificial Sequence: Synthetic oligonucleotide
auuacggcccagcuugggc

SEQ ID NO: 2203842 - RNA, 19 nt, Artificial Sequence
  Description of Artificial Sequence: Synthetic oligonucleotide
ucggguuugccacacagga

SEQ ID NO: 2203843 - RNA, 19 nt, Artificial Sequence
  Description of Artificial Sequence: Synthetic oligonucleotide
ugugcguggaacucugcgg

SEQ ID NO: 2203844 - RNA, 19 nt, Artificial Sequence
  Description of Artificial Sequence: Synthetic oligonucleotide
gauauucucaggcuuggca

SEQ ID NO: 2203845 - RNA, 19 nt, Artificial Sequence
  Description of Artificial Sequence: Synthetic oligonucleotide
agcauguggucguagggcg

SEQ ID NO: 2203846 - RNA, 19 nt, Artificial Sequence
  Description of Artificial Sequence: Synthetic oligonucleotide
ugucaccugagcuguaccg

SEQ ID NO: 2203847 - RNA, 19 nt, Artificial Sequence
  Description of Artificial Sequence: Synthetic oligonucleotide
aacgggauguuuacugagc

SEQ ID NO: 2203848 - RNA, 19 nt, Artificial Sequence
  Description of Artificial Sequence: Synthetic oligonucleotide
caggaauucagugaacggg

SEQ ID NO: 2203849 - RNA, 19 nt, Artificial Sequence
  Description of Artificial Sequence: Synthetic oligonucleotide
uucgaugccaucucggggu

SEQ ID NO: 2203850 - RNA, 19 nt, Artificial Sequence
  Description of Artificial Sequence: Synthetic oligonucleotide
ucuucgaacuccugucgcg

SEQ ID NO: 2203851 - RNA, 19 nt, Artificial Sequence
  Description of Artificial Sequence: Synthetic oligonucleotide
ucguagaccacgacgugag

SEQ ID NO: 2203852 - RNA, 19 nt, Artificial Sequence
  Description of Artificial Sequence: Synthetic oligonucleotide
aacucugcgggcuucgggu

SEQ ID NO: 2203853 - RNA, 19 nt, Artificial Sequence
  Description of Artificial Sequence: Synthetic oligonucleotide
ugggcagguaccaggaugc

SEQ ID NO: 2203854 - RNA, 19 nt, Artificial Sequence
  Description of Artificial Sequence: Synthetic oligonucleotide
uguaccacucuacccagga

SEQ ID NO: 2203855 - RNA, 19 nt, Artificial Sequence
  Description of Artificial Sequence: Synthetic oligonucleotide
ucgcggagacuucagagcc

SEQ ID NO: 2203856 - RNA, 19 nt, Artificial Sequence
  Description of Artificial Sequence: Synthetic oligonucleotide
aguaacuucagcggcugcg

SEQ ID NO: 2203857 - RNA, 19 nt, Artificial Sequence
  Description of Artificial Sequence: Synthetic oligonucleotide
cauagacaggcacaucggg

SEQ ID NO: 2203858 - RNA, 19 nt, Artificial Sequence
  Description of Artificial Sequence: Synthetic oligonucleotide
agcuguaccguguccugcc

SEQ ID NO: 2203859 - RNA, 19 nt, Artificial Sequence
  Description of Artificial Sequence: Synthetic oligonucleotide
gugaacgggauguuuacug

SEQ ID NO: 2203860 - RNA, 19 nt, Artificial Sequence
  Description of Artificial Sequence: Synthetic oligonucleotide
uuaggggcggccauggccu

SEQ ID NO: 2203861 - RNA, 19 nt, Artificial Sequence
  Description of Artificial Sequence: Synthetic oligonucleotide
aaggcacggaacauccacc

SEQ ID NO: 2203862 - RNA, 19 nt, Artificial Sequence
  Description of Artificial Sequence: Synthetic oligonucleotide
uuggucgcugccaucguag

SEQ ID NO: 2203863 - RNA, 19 nt, Artificial Sequence
  Description of Artificial Sequence: Synthetic oligonucleotide
gaacgggauguuuacugag

SEQ ID NO: 2203864 - RNA, 19 nt, Artificial Sequence
  Description of Artificial Sequence: Synthetic oligonucleotide
gaaggcacggaacauccac

SEQ ID NO: 2203865 - RNA, 19 nt, Artificial Sequence
  Description of Artificial Sequence: Synthetic oligonucleotide
cugauuggcagguucuggc

SEQ ID NO: 2203866 - RNA, 19 nt, Artificial Sequence
  Description of Artificial Sequence: Synthetic oligonucleotide
ggguuugccacacaggaag

SEQ ID NO: 2203867 - RNA, 19 nt, Artificial Sequence
  Description of Artificial Sequence: Synthetic oligonucleotide
ucagugaacgggauguuua

SEQ ID NO: 2203868 - RNA, 19 nt, Artificial Sequence
  Description of Artificial Sequence: Synthetic oligonucleotide
ggagggaucuaacugugcg

SEQ ID NO: 2203869 - RNA, 19 nt, Artificial Sequence
  Description of Artificial Sequence: Synthetic oligonucleotide
ucuagccccuccuugguca

SEQ ID NO: 2203870 - RNA, 19 nt, Artificial Sequence
  Description of Artificial Sequence: Synthetic oligonucleotide
gcuacuaagggcuuggaca

SEQ ID NO: 2203871 - RNA, 19 nt, Artificial Sequence
  Description of Artificial Sequence: Synthetic oligonucleotide
ugaguggcagcacccacgc

SEQ ID NO: 2203872 - RNA, 19 nt, Artificial Sequence
  Description of Artificial Sequence: Synthetic oligonucleotide
gaauucagugaacgggaug

SEQ ID NO: 2203873 - RNA, 19 nt, Artificial Sequence
  Description of Artificial Sequence: Synthetic oligonucleotide
ugacaccggagccacaugu

SEQ ID NO: 2203874 - RNA, 19 nt, Artificial Sequence
  Description of Artificial Sequence: Synthetic oligonucleotide
ugaacgggauguuuacuga

SEQ ID NO: 2203875 - RNA, 19 nt, Artificial Sequence
  Description of Artificial Sequence: Synthetic oligonucleotide
uccaccaccuggaaacgcc

SEQ ID NO: 2203876 - RNA, 19 nt, Artificial Sequence
  Description of Artificial Sequence: Synthetic oligonucleotide
uuuacugagccagggauau

SEQ ID NO: 2203877 - RNA, 19 nt, Artificial Sequence
  Description of Artificial Sequence: Synthetic oligonucleotide
augaaggagggaucuaacu

SEQ ID NO: 2203878 - RNA, 19 nt, Artificial Sequence
  Description of Artificial Sequence: Synthetic oligonucleotide
cuuaggggcggccauggcc

SEQ ID NO: 2203879 - RNA, 19 nt, Artificial Sequence
  Description of Artificial Sequence: Synthetic oligonucleotide
gugcguggaacucugcggg

SEQ ID NO: 2203880 - RNA, 19 nt, Artificial Sequence
  Description of Artificial Sequence: Synthetic oligonucleotide
cuugccagagcugauuggc

SEQ ID NO: 2203881 - RNA, 19 nt, Artificial Sequence
  Description of Artificial Sequence: Synthetic oligonucleotide
augucaccugagcuguacc

SEQ ID NO: 2203882 - RNA, 19 nt, Artificial Sequence
  Description of Artificial Sequence: Synthetic oligonucleotide
gcugcaaugaucaauguca

SEQ ID NO: 2203883 - RNA, 19 nt, Artificial Sequence
  Description of Artificial Sequence: Synthetic oligonucleotide
gaagguggcgccugggaug

SEQ ID NO: 2203884 - RNA, 19 nt, Artificial Sequence
  Description of Artificial Sequence: Synthetic oligonucleotide
gcucggaaaagcuuagggg

SEQ ID NO: 2203885 - RNA, 19 nt, Artificial Sequence
  Description of Artificial Sequence: Synthetic oligonucleotide
caaugucaaagaagguggc

SEQ ID NO: 2203886 - RNA, 19 nt, Artificial Sequence
  Description of Artificial Sequence: Synthetic oligonucleotide
ucuugccagagcugauugg

SEQ ID NO: 2203887 - RNA, 19 nt, Artificial Sequence
  Description of Artificial Sequence: Synthetic oligonucleotide
gauguggcgcucuucgaac

SEQ ID NO: 2203888 - RNA, 19 nt, Artificial Sequence
  Description of Artificial Sequence: Synthetic oligonucleotide
aaaagcuuaggggcggcca

SEQ ID NO: 2203889 - RNA, 19 nt, Artificial Sequence
  Description of Artificial Sequence: Synthetic oligonucleotide
cugagaugauauucucagg

SEQ ID NO: 2203890 - RNA, 19 nt, Artificial Sequence
  Description of Artificial Sequence: Synthetic oligonucleotide
uuacggcccagcuugggca

SEQ ID NO: 2203891 - RNA, 19 nt, Artificial Sequence
  Description of Artificial Sequence: Synthetic oligonucleotide
gaaacgccgggccuccagg

SEQ ID NO: 2203892 - RNA, 19 nt, Artificial Sequence
  Description of Artificial Sequence: Synthetic oligonucleotide
gucgcugcaaugaucaaug

SEQ ID NO: 2203893 - RNA, 19 nt, Artificial Sequence
  Description of Artificial Sequence: Synthetic oligonucleotide
gacacgagagcucggaaaa

SEQ ID NO: 2203894 - RNA, 19 nt, Artificial Sequence
  Description of Artificial Sequence: Synthetic oligonucleotide
ugaugaaggagggaucuaa

SEQ ID NO: 2203895 - RNA, 19 nt, Artificial Sequence
  Description of Artificial Sequence: Synthetic oligonucleotide
cuuggcacgaauguaccac

SEQ ID NO: 2203896 - RNA, 19 nt, Artificial Sequence
  Description of Artificial Sequence: Synthetic oligonucleotide
guagucggcgaagugcucg

SEQ ID NO: 2203897 - RNA, 19 nt, Artificial Sequence
  Description of Artificial Sequence: Synthetic oligonucleotide
uugcccucugagaugauau

SEQ ID NO: 2203898 - RNA, 19 nt, Artificial Sequence
  Description of Artificial Sequence: Synthetic oligonucleotide
cucgcggagacuucagagc

SEQ ID NO: 2203899 - RNA, 19 nt, Artificial Sequence
  Description of Artificial Sequence: Synthetic oligonucleotide
uagacaggcacaucggguu

SEQ ID NO: 2203900 - RNA, 19 nt, Artificial Sequence
  Description of Artificial Sequence: Synthetic oligonucleotide
gccaucguagaccacgacg

SEQ ID NO: 2203901 - RNA, 19 nt, Artificial Sequence
  Description of Artificial Sequence: Synthetic oligonucleotide
gaaccggccagcugcgcgg

SEQ ID NO: 2203902 - RNA, 19 nt, Artificial Sequence
  Description of Artificial Sequence: Synthetic oligonucleotide
agggaucuaacugugcgug

SEQ ID NO: 2203903 - RNA, 19 nt, Artificial Sequence
  Description of Artificial Sequence: Synthetic oligonucleotide
gggauguuuacugagccag

SEQ ID NO: 2203904 - RNA, 19 nt, Artificial Sequence
  Description of Artificial Sequence: Synthetic oligonucleotide
ccacauguggcuacuaagg

SEQ ID NO: 2203905 - RNA, 19 nt, Artificial Sequence
  Description of Artificial Sequence: Synthetic oligonucleotide
uuucccuugcccucugaga

SEQ ID NO: 2203906 - RNA, 19 nt, Artificial Sequence
  Description of Artificial Sequence: Synthetic oligonucleotide
cacgaauguaccacucuac

SEQ ID NO: 2203907 - RNA, 19 nt, Artificial Sequence
  Description of Artificial Sequence: Synthetic oligonucleotide
gaacucugcgggcuucggg

SEQ ID NO: 2203908 - RNA, 19 nt, Artificial Sequence
  Description of Artificial Sequence: Synthetic oligonucleotide
ucaaagaagguggcgccug

SEQ ID NO: 2203909 - RNA, 19 nt, Artificial Sequence
  Description of Artificial Sequence: Synthetic oligonucleotide
auggccuccgggaugcucc

SEQ ID NO: 2203910 - RNA, 19 nt, Artificial Sequence
  Description of Artificial Sequence: Synthetic oligonucleotide
cugugcguggaacucugcg

SEQ ID NO: 2203911 - RNA, 19 nt, Artificial Sequence
  Description of Artificial Sequence: Synthetic oligonucleotide
ucaccugagcuguaccgug

SEQ ID NO: 2203912 - RNA, 19 nt, Artificial Sequence
  Description of Artificial Sequence: Synthetic oligonucleotide
cauguggcuacuaagggcu

SEQ ID NO: 2203913 - RNA, 19 nt, Artificial Sequence
  Description of Artificial Sequence: Synthetic oligonucleotide
guagaccacgacgugagug

SEQ ID NO: 2203914 - RNA, 19 nt, Artificial Sequence
  Description of Artificial Sequence: Synthetic oligonucleotide
aggaauucagugaacggga

SEQ ID NO: 2203915 - RNA, 19 nt, Artificial Sequence
  Description of Artificial Sequence: Synthetic oligonucleotide
gguucgaugccaucucggg

SEQ ID NO: 2203916 - RNA, 19 nt, Artificial Sequence
  Description of Artificial Sequence: Synthetic oligonucleotide
ucguagggcgaccuguggu

SEQ ID NO: 2203917 - RNA, 19 nt, Artificial Sequence
  Description of Artificial Sequence: Synthetic oligonucleotide
gucgcugccaucguagacc

SEQ ID NO: 2203918 - RNA, 19 nt, Artificial Sequence
  Description of Artificial Sequence: Synthetic oligonucleotide
uuggcacgaauguaccacu

SEQ ID NO: 2203919 - RNA, 19 nt, Artificial Sequence
  Description of Artificial Sequence: Synthetic oligonucleotide
agacacgagagcucggaaa

SEQ ID NO: 2203920 - RNA, 19 nt, Artificial Sequence
  Description of Artificial Sequence: Synthetic oligonucleotide
aggcacaucggguuugcca

SEQ ID NO: 2203921 - RNA, 19 nt, Artificial Sequence
  Description of Artificial Sequence: Synthetic oligonucleotide
uagucggcgaagugcucgg

SEQ ID NO: 2203922 - RNA, 19 nt, Artificial Sequence
  Description of Artificial Sequence: Synthetic oligonucleotide
cuuucccuugcccucugag

SEQ ID NO: 2203923 - RNA, 19 nt, Artificial Sequence
  Description of Artificial Sequence: Synthetic oligonucleotide
ugccggaucucuucugggc

SEQ ID NO: 2203924 - RNA, 19 nt, Artificial Sequence
  Description of Artificial Sequence: Synthetic oligonucleotide
gagaugauauucucaggcu

SEQ ID NO: 2203925 - RNA, 19 nt, Artificial Sequence
  Description of Artificial Sequence: Synthetic oligonucleotide
cacgagagcucggaaaagc

SEQ ID NO: 2203926 - RNA, 19 nt, Artificial Sequence
  Description of Artificial Sequence: Synthetic oligonucleotide
gcugccaucguagaccacg

SEQ ID NO: 2203927 - RNA, 19 nt, Artificial Sequence
  Description of Artificial Sequence: Synthetic oligonucleotide
uguggucgcugcaaugauc

SEQ ID NO: 2203928 - RNA, 19 nt, Artificial Sequence
  Description of Artificial Sequence: Synthetic oligonucleotide
gacuucagagccuccgcca

SEQ ID NO: 2203929 - RNA, 19 nt, Artificial Sequence
  Description of Artificial Sequence: Synthetic oligonucleotide
agcagcgacaccgagcggu

SEQ ID NO: 2203930 - RNA, 19 nt, Artificial Sequence
  Description of Artificial Sequence: Synthetic oligonucleotide
ggcacaucggguuugccac

SEQ ID NO: 2203931 - RNA, 19 nt, Artificial Sequence
  Description of Artificial Sequence: Synthetic oligonucleotide
ugcgcgggcguccaccacc

SEQ ID NO: 2203932 - RNA, 19 nt, Artificial Sequence
  Description of Artificial Sequence: Synthetic oligonucleotide
ggcgcuaggcagcaugugg

SEQ ID NO: 2203933 - RNA, 19 nt, Artificial Sequence
  Description of Artificial Sequence: Synthetic oligonucleotide
cucaggcuuggcacgaaug

SEQ ID NO: 2203934 - RNA, 19 nt, Artificial Sequence
  Description of Artificial Sequence: Synthetic oligonucleotide
aggcacggaacauccacca

SEQ ID NO: 2203935 - RNA, 19 nt, Artificial Sequence
  Description of Artificial Sequence: Synthetic oligonucleotide
uugccagagcugauuggca

SEQ ID NO: 2203936 - RNA, 19 nt, Artificial Sequence
  Description of Artificial Sequence: Synthetic oligonucleotide
accacgacgugaguggcag

SEQ ID NO: 2203937 - RNA, 19 nt, Artificial Sequence
  Description of Artificial Sequence: Synthetic oligonucleotide
aaacgccgggccuccaggu

SEQ ID NO: 2203938 - RNA, 19 nt, Artificial Sequence
  Description of Artificial Sequence: Synthetic oligonucleotide
cagguucgaugccaucucg

SEQ ID NO: 2203939 - RNA, 19 nt, Artificial Sequence
  Description of Artificial Sequence: Synthetic oligonucleotide
cuucgaacuccugucgcgc

SEQ ID NO: 2203940 - RNA, 19 nt, Artificial Sequence
  Description of Artificial Sequence: Synthetic oligonucleotide
cagugaacgggauguuuac

SEQ ID NO: 2203941 - RNA, 19 nt, Artificial Sequence
  Description of Artificial Sequence: Synthetic oligonucleotide
agaccacgacgugaguggc

SEQ ID NO: 2203942 - RNA, 19 nt, Artificial Sequence
  Description of Artificial Sequence: Synthetic oligonucleotide
gagccagggauauguccag

SEQ ID NO: 2203943 - RNA, 19 nt, Artificial Sequence
  Description of Artificial Sequence: Synthetic oligonucleotide
uccgccacccacugugcag

SEQ ID NO: 2203944 - RNA, 19 nt, Artificial Sequence
  Description of Artificial Sequence: Synthetic oligonucleotide
agacccgcggagcagagua

SEQ ID NO: 2203945 - RNA, 19 nt, Artificial Sequence
  Description of Artificial Sequence: Synthetic oligonucleotide
gaagugcucggcgcuaggc

SEQ ID NO: 2203946 - RNA, 19 nt, Artificial Sequence
  Description of Artificial Sequence: Synthetic oligonucleotide
gcguccaccaccuggaaac

SEQ ID NO: 2203947 - RNA, 19 nt, Artificial Sequence
  Description of Artificial Sequence: Synthetic oligonucleotide
gagagcucggaaaagcuua

SEQ ID NO: 2203948 - RNA, 19 nt, Artificial Sequence
  Description of Artificial Sequence: Synthetic oligonucleotide
aucguagaccacgacguga

SEQ ID NO: 2203949 - RNA, 19 nt, Artificial Sequence
  Description of Artificial Sequence: Synthetic oligonucleotide
agcagaguagaggccuugg

SEQ ID NO: 2203950 - RNA, 19 nt, Artificial Sequence
  Description of Artificial Sequence: Synthetic oligonucleotide
ggagacuucagagccuccg

SEQ ID NO: 2203951 - RNA, 19 nt, Artificial Sequence
  Description of Artificial Sequence: Synthetic oligonucleotide
ucucuagccccuccuuggu

SEQ ID NO: 2203952 - RNA, 19 nt, Artificial Sequence
  Description of Artificial Sequence: Synthetic oligonucleotide
cugggcucuucucuagccc

SEQ ID NO: 2203953 - RNA, 19 nt, Artificial Sequence
  Description of Artificial Sequence: Synthetic oligonucleotide
uucgaacuccugucgcgca

SEQ ID NO: 2203954 - RNA, 19 nt, Artificial Sequence
  Description of Artificial Sequence: Synthetic oligonucleotide
guggcuacuaagggcuugg

SEQ ID NO: 2203955 - RNA, 19 nt, Artificial Sequence
  Description of Artificial Sequence: Synthetic oligonucleotide
gacgugaguggcagcaccc

SEQ ID NO: 2203956 - RNA, 19 nt, Artificial Sequence
  Description of Artificial Sequence: Synthetic oligonucleotide
accguguccugccuggccu

SEQ ID NO: 2203957 - RNA, 19 nt, Artificial Sequence
  Description of Artificial Sequence: Synthetic oligonucleotide
acgccgggccuccagguuc

SEQ ID NO: 2203958 - RNA, 19 nt, Artificial Sequence
  Description of Artificial Sequence: Synthetic oligonucleotide
ggccuguuucuccuguugg

SEQ ID NO: 2203959 - RNA, 19 nt, Artificial Sequence
  Description of Artificial Sequence: Synthetic oligonucleotide
gucagaugucaccugagcu

SEQ ID NO: 2203960 - RNA, 19 nt, Artificial Sequence
  Description of Artificial Sequence: Synthetic oligonucleotide
aacuccugucgcgcauuac

SEQ ID NO: 2203961 - RNA, 19 nt, Artificial Sequence
  Description of Artificial Sequence: Synthetic oligonucleotide
cucgugagucuugaugaag

SEQ ID NO: 2203962 - RNA, 19 nt, Artificial Sequence
  Description of Artificial Sequence: Synthetic oligonucleotide
uguggcuacuaagggcuug

SEQ ID NO: 2203963 - RNA, 19 nt, Artificial Sequence
  Description of Artificial Sequence: Synthetic oligonucleotide
cgcauuacggcccagcuug

SEQ ID NO: 2203964 - RNA, 19 nt, Artificial Sequence
  Description of Artificial Sequence: Synthetic oligonucleotide
cugggucuuucccuugccc

SEQ ID NO: 2203965 - RNA, 19 nt, Artificial Sequence
  Description of Artificial Sequence: Synthetic oligonucleotide
ugugccccggaaccggcca

SEQ ID NO: 2203966 - RNA, 19 nt, Artificial Sequence
  Description of Artificial Sequence: Synthetic oligonucleotide
gaaaagcuuaggggcggcc

SEQ ID NO: 2203967 - RNA, 19 nt, Artificial Sequence
  Description of Artificial Sequence: Synthetic oligonucleotide
acaggcacaucggguuugc

SEQ ID NO: 2203968 - RNA, 19 nt, Artificial Sequence
  Description of Artificial Sequence: Synthetic oligonucleotide
ggucagaugucaccugagc

SEQ ID NO: 2203969 - RNA, 19 nt, Artificial Sequence
  Description of Artificial Sequence: Synthetic oligonucleotide
uggaacucugcgggcuucg

SEQ ID NO: 2203970 - RNA, 19 nt, Artificial Sequence
  Description of Artificial Sequence: Synthetic oligonucleotide
guagggcgaccuguggucg

SEQ ID NO: 2203971 - RNA, 19 nt, Artificial Sequence
  Description of Artificial Sequence: Synthetic oligonucleotide
uaccguguccugccuggcc

SEQ ID NO: 2203972 - RNA, 19 nt, Artificial Sequence
  Description of Artificial Sequence: Synthetic oligonucleotide
uccgggaugcuccgauugu

SEQ ID NO: 2203973 - RNA, 19 nt, Artificial Sequence
  Description of Artificial Sequence: Synthetic oligonucleotide
cuccgggaugcuccgauug

SEQ ID NO: 2203974 - RNA, 19 nt, Artificial Sequence
  Description of Artificial Sequence: Synthetic oligonucleotide
aggauguccucgugagucu

SEQ ID NO: 2203975 - RNA, 19 nt, Artificial Sequence
  Description of Artificial Sequence: Synthetic oligonucleotide
uacuaagggcuuggacagg

SEQ ID NO: 2203976 - RNA, 19 nt, Artificial Sequence
  Description of Artificial Sequence: Synthetic oligonucleotide
uguggcgcucuucgaacuc

SEQ ID NO: 2203977 - RNA, 19 nt, Artificial Sequence
  Description of Artificial Sequence: Synthetic oligonucleotide
uaccaggaugcauccagua

SEQ ID NO: 2203978 - RNA, 19 nt, Artificial Sequence
  Description of Artificial Sequence: Synthetic oligonucleotide
gcucgcggagacuucagag

SEQ ID NO: 2203979 - RNA, 19 nt, Artificial Sequence
  Description of Artificial Sequence: Synthetic oligonucleotide
gucguagggcgaccugugg

SEQ ID NO: 2203980 - RNA, 19 nt, Artificial Sequence
  Description of Artificial Sequence: Synthetic oligonucleotide
ggaaccggccagcugcgcg

SEQ ID NO: 2203981 - RNA, 19 nt, Artificial Sequence
  Description of Artificial Sequence: Synthetic oligonucleotide
ucggcgcuaggcagcaugu

SEQ ID NO: 2203982 - RNA, 19 nt, Artificial Sequence
  Description of Artificial Sequence: Synthetic oligonucleotide
cgaauguaccacucuaccc

SEQ ID NO: 2203983 - RNA, 19 nt, Artificial Sequence
  Description of Artificial Sequence: Synthetic oligonucleotide
guaccacucuacccaggag

SEQ ID NO: 2203984 - RNA, 19 nt, Artificial Sequence
  Description of Artificial Sequence: Synthetic oligonucleotide
cuucggguggcucuugcca

SEQ ID NO: 2203985 - RNA, 19 nt, Artificial Sequence
  Description of Artificial Sequence: Synthetic oligonucleotide
auguggcgcucuucgaacu

SEQ ID NO: 2203986 - RNA, 19 nt, Artificial Sequence
  Description of Artificial Sequence: Synthetic oligonucleotide
cucggcgcuaggcagcaug

SEQ ID NO: 2203987 - RNA, 19 nt, Artificial Sequence
  Description of Artificial Sequence: Synthetic oligonucleotide
uggucguagggcgaccugu

SEQ ID NO: 2203988 - RNA, 19 nt, Artificial Sequence
  Description of Artificial Sequence: Synthetic oligonucleotide
uggcacgaauguaccacuc

SEQ ID NO: 2203989 - RNA, 19 nt, Artificial Sequence
  Description of Artificial Sequence: Synthetic oligonucleotide
ucgggguuccggcucugug

SEQ ID NO: 2203990 - RNA, 19 nt, Artificial Sequence
  Description of Artificial Sequence: Synthetic oligonucleotide
uucagugaacgggauguuu

SEQ ID NO: 2203991 - RNA, 19 nt, Artificial Sequence
  Description of Artificial Sequence: Synthetic oligonucleotide
ugcguggaacucugcgggc

SEQ ID NO: 2203992 - RNA, 19 nt, Artificial Sequence
  Description of Artificial Sequence: Synthetic oligonucleotide
gugccggaucucuucuggg

SEQ ID NO: 2203993 - RNA, 19 nt, Artificial Sequence
  Description of Artificial Sequence: Synthetic oligonucleotide
gaucuaacugugcguggaa

SEQ ID NO: 2203994 - RNA, 19 nt, Artificial Sequence
  Description of Artificial Sequence: Synthetic oligonucleotide
agagcucggaaaagcuuag

SEQ ID NO: 2203995 - RNA, 19 nt, Artificial Sequence
  Description of Artificial Sequence: Synthetic oligonucleotide
agugaacgggauguuuacu

SEQ ID NO: 2203996 - RNA, 19 nt, Artificial Sequence
  Description of Artificial Sequence: Synthetic oligonucleotide
agcacccacgcccaggcuu

SEQ ID NO: 2203997 - RNA, 19 nt, Artificial Sequence
  Description of Artificial Sequence: Synthetic oligonucleotide
gagcucggaaaagcuuagg

SEQ ID NO: 2203998 - RNA, 19 nt, Artificial Sequence
  Description of Artificial Sequence: Synthetic oligonucleotide
gggaucuaacugugcgugg

SEQ ID NO: 2203999 - RNA, 19 nt, Artificial Sequence
  Description of Artificial Sequence: Synthetic oligonucleotide
cccggaaccggccagcugc

SEQ ID NO: 2204000 - RNA, 19 nt, Artificial Sequence
  Description of Artificial Sequence: Synthetic oligonucleotide
ccguccagcagcgacaccg

SEQ ID NO: 2204001 - RNA, 19 nt, Artificial Sequence
  Description of Artificial Sequence: Synthetic oligonucleotide
uguggucguagggcgaccu

SEQ ID NO: 2204002 - RNA, 19 nt, Artificial Sequence
  Description of Artificial Sequence: Synthetic oligonucleotide
gucuugaugaaggagggau

SEQ ID NO: 2204003 - RNA, 19 nt, Artificial Sequence
  Description of Artificial Sequence: Synthetic oligonucleotide
ccgauugugggccuguuuc

SEQ ID NO: 2204004 - RNA, 19 nt, Artificial Sequence
  Description of Artificial Sequence: Synthetic oligonucleotide
cauguggucguagggcgac

SEQ ID NO: 2204005 - RNA, 19 nt, Artificial Sequence
  Description of Artificial Sequence: Synthetic oligonucleotide
ugugggccuguuucuccug

SEQ ID NO: 2204006 - RNA, 19 nt, Artificial Sequence
  Description of Artificial Sequence: Synthetic oligonucleotide
cugcaaugaucaaugucaa

SEQ ID NO: 2204007 - RNA, 19 nt, Artificial Sequence
  Description of Artificial Sequence: Synthetic oligonucleotide
caucguagaccacgacgug

SEQ ID NO: 2204008 - RNA, 19 nt, Artificial Sequence
  Description of Artificial Sequence: Synthetic oligonucleotide
acgagagcucggaaaagcu

SEQ ID NO: 2204009 - RNA, 19 nt, Artificial Sequence
  Description of Artificial Sequence: Synthetic oligonucleotide
gguuugccacacaggaagg

SEQ ID NO: 2204010 - RNA, 19 nt, Artificial Sequence
  Description of Artificial Sequence: Synthetic oligonucleotide
gcuaggcagcauguggucg

SEQ ID NO: 2204011 - RNA, 19 nt, Artificial Sequence
  Description of Artificial Sequence: Synthetic oligonucleotide
gagggaucuaacugugcgu

SEQ ID NO: 2204012 - RNA, 19 nt, Artificial Sequence
  Description of Artificial Sequence: Synthetic oligonucleotide
gagcuguaccguguccugc

SEQ ID NO: 2204013 - RNA, 19 nt, Artificial Sequence
  Description of Artificial Sequence: Synthetic oligonucleotide
cauuacggcccagcuuggg

SEQ ID NO: 2204014 - RNA, 19 nt, Artificial Sequence
  Description of Artificial Sequence: Synthetic oligonucleotide
uguccugccuggccucacu

SEQ ID NO: 2204015 - RNA, 19 nt, Artificial Sequence
  Description of Artificial Sequence: Synthetic oligonucleotide
acacgagagcucggaaaag

SEQ ID NO: 2204016 - RNA, 19 nt, Artificial Sequence
  Description of Artificial Sequence: Synthetic oligonucleotide
cuagccccuccuuggucag

SEQ ID NO: 2204017 - RNA, 19 nt, Artificial Sequence
  Description of Artificial Sequence: Synthetic oligonucleotide
uggucgcugccaucguaga

SEQ ID NO: 2204018 - RNA, 19 nt, Artificial Sequence
  Description of Artificial Sequence: Synthetic oligonucleotide
acccacugugcagacacga

SEQ ID NO: 2204019 - RNA, 19 nt, Artificial Sequence
  Description of Artificial Sequence: Synthetic oligonucleotide
accgagcgguggccgaagg

SEQ ID NO: 2204020 - RNA, 19 nt, Artificial Sequence
  Description of Artificial Sequence: Synthetic oligonucleotide
uccgauugugggccuguuu

SEQ ID NO: 2204021 - RNA, 19 nt, Artificial Sequence
  Description of Artificial Sequence: Synthetic oligonucleotide
ggcuacuaagggcuuggac

SEQ ID NO: 2204022 - RNA, 19 nt, Artificial Sequence
  Description of Artificial Sequence: Synthetic oligonucleotide
ucggguggcucuugccaga

SEQ ID NO: 2204023 - RNA, 19 nt, Artificial Sequence
  Description of Artificial Sequence: Synthetic oligonucleotide
gccuccgccacccacugug

SEQ ID NO: 2204024 - RNA, 19 nt, Artificial Sequence
  Description of Artificial Sequence: Synthetic oligonucleotide
caucucgggguuccggcuc

SEQ ID NO: 2204025 - RNA, 19 nt, Artificial Sequence
  Description of Artificial Sequence: Synthetic oligonucleotide
uagggcgaccuguggucgc

SEQ ID NO: 2204026 - RNA, 19 nt, Artificial Sequence
  Description of Artificial Sequence: Synthetic oligonucleotide
guuuacugagccagggaua

SEQ ID NO: 2204027 - RNA, 19 nt, Artificial Sequence
  Description of Artificial Sequence: Synthetic oligonucleotide
uggccuccgggaugcuccg

SEQ ID NO: 2204028 - RNA, 19 nt, Artificial Sequence
  Description of Artificial Sequence: Synthetic oligonucleotide
acgacgugaguggcagcac

SEQ ID NO: 2204029 - RNA, 19 nt, Artificial Sequence
  Description of Artificial Sequence: Synthetic oligonucleotide
ugccaucguagaccacgac

SEQ ID NO: 2204030 - RNA, 19 nt, Artificial Sequence
  Description of Artificial Sequence: Synthetic oligonucleotide
cuguaccguguccugccug

SEQ ID NO: 2204031 - RNA, 19 nt, Artificial Sequence
  Description of Artificial Sequence: Synthetic oligonucleotide
gcgggcguccaccaccugg

SEQ ID NO: 2204032 - RNA, 19 nt, Artificial Sequence
  Description of Artificial Sequence: Synthetic oligonucleotide
ggaucuaacugugcgugga

SEQ ID NO: 2204033 - RNA, 19 nt, Artificial Sequence
  Description of Artificial Sequence: Synthetic oligonucleotide
ucugcgggcuucggguggc

SEQ ID NO: 2204034 - RNA, 19 nt, Artificial Sequence
  Description of Artificial Sequence: Synthetic oligonucleotide
ggauguggcgcucuucgaa

SEQ ID NO: 2204035 - RNA, 19 nt, Artificial Sequence
  Description of Artificial Sequence: Synthetic oligonucleotide
cacccacugugcagacacg

SEQ ID NO: 2204036 - RNA, 19 nt, Artificial Sequence
  Description of Artificial Sequence: Synthetic oligonucleotide
cuggaaacgccgggccucc

SEQ ID NO: 2204037 - RNA, 19 nt, Artificial Sequence
  Description of Artificial Sequence: Synthetic oligonucleotide
ucgcgcauuacggcccagc

SEQ ID NO: 2204038 - RNA, 19 nt, Artificial Sequence
  Description of Artificial Sequence: Synthetic oligonucleotide
gaggccuuggucgcugcca

SEQ ID NO: 2204039 - RNA, 19 nt, Artificial Sequence
  Description of Artificial Sequence: Synthetic oligonucleotide
gguggcgccugggaugugg

SEQ ID NO: 2204040 - RNA, 19 nt, Artificial Sequence
  Description of Artificial Sequence: Synthetic oligonucleotide
gccaucucgggguuccggc

SEQ ID NO: 2204041 - RNA, 19 nt, Artificial Sequence
  Description of Artificial Sequence: Synthetic oligonucleotide
cucuagccccuccuugguc

SEQ ID NO: 2204042 - RNA, 19 nt, Artificial Sequence
  Description of Artificial Sequence: Synthetic oligonucleotide
cuaggcagcauguggucgu

SEQ ID NO: 2204043 - RNA, 19 nt, Artificial Sequence
  Description of Artificial Sequence: Synthetic oligonucleotide
ucgaugccaucucgggguu

SEQ ID NO: 2204044 - RNA, 19 nt, Artificial Sequence
  Description of Artificial Sequence: Synthetic oligonucleotide
uuggcagguucuggcucag

SEQ ID NO: 2204045 - RNA, 19 nt, Artificial Sequence
  Description of Artificial Sequence: Synthetic oligonucleotide
gaggcucgcggagacuuca

SEQ ID NO: 2204046 - RNA, 19 nt, Artificial Sequence
  Description of Artificial Sequence: Synthetic oligonucleotide
gccucacugggucuuuccc

SEQ ID NO: 2204047 - RNA, 19 nt, Artificial Sequence
  Description of Artificial Sequence: Synthetic oligonucleotide
guggccgaaggcacggaac

SEQ ID NO: 2204048 - RNA, 19 nt, Artificial Sequence
  Description of Artificial Sequence: Synthetic oligonucleotide
ggcuuggcacgaauguacc

SEQ ID NO: 2204049 - RNA, 19 nt, Artificial Sequence
  Description of Artificial Sequence: Synthetic oligonucleotide
gagcgguggccgaaggcac

SEQ ID NO: 2204050 - RNA, 19 nt, Artificial Sequence
  Description of Artificial Sequence: Synthetic oligonucleotide
agcgguggccgaaggcacg

SEQ ID NO: 2204051 - RNA, 19 nt, Artificial Sequence
  Description of Artificial Sequence: Synthetic oligonucleotide
caucauagacaggcacauc

SEQ ID NO: 2204052 - RNA, 19 nt, Artificial Sequence
  Description of Artificial Sequence: Synthetic oligonucleotide
acccaggagccaucauaga

SEQ ID NO: 2204053 - RNA, 19 nt, Artificial Sequence
  Description of Artificial Sequence: Synthetic oligonucleotide
ccaucguagaccacgacgu

SEQ ID NO: 2204054 - RNA, 19 nt, Artificial Sequence
  Description of Artificial Sequence: Synthetic oligonucleotide
ggcacggaacauccaccag

SEQ ID NO: 2204055 - RNA, 19 nt, Artificial Sequence
  Description of Artificial Sequence: Synthetic oligonucleotide
cugccaucguagaccacga

SEQ ID NO: 2204056 - RNA, 19 nt, Artificial Sequence
  Description of Artificial Sequence: Synthetic oligonucleotide
cagaugucaccugagcugu

SEQ ID NO: 2204057 - RNA, 19 nt, Artificial Sequence
  Description of Artificial Sequence: Synthetic oligonucleotide
ucccgcguagucggcgaag

SEQ ID NO: 2204058 - RNA, 19 nt, Artificial Sequence
  Description of Artificial Sequence: Synthetic oligonucleotide
gcacgaauguaccacucua

SEQ ID NO: 2204059 - RNA, 19 nt, Artificial Sequence
  Description of Artificial Sequence: Synthetic oligonucleotide
gugacaccggagccacaug

SEQ ID NO: 2204060 - RNA, 19 nt, Artificial Sequence
  Description of Artificial Sequence: Synthetic oligonucleotide
cugcgaggcucgcggagac

SEQ ID NO: 2204061 - RNA, 19 nt, Artificial Sequence
  Description of Artificial Sequence: Synthetic oligonucleotide
aacaggugccggaucucuu

SEQ ID NO: 2204062 - RNA, 19 nt, Artificial Sequence
  Description of Artificial Sequence: Synthetic oligonucleotide
guggucguagggcgaccug

SEQ ID NO: 2204063 - RNA, 19 nt, Artificial Sequence
  Description of Artificial Sequence: Synthetic oligonucleotide
ggcgccugggauguggcgc

SEQ ID NO: 2204064 - RNA, 19 nt, Artificial Sequence
  Description of Artificial Sequence: Synthetic oligonucleotide
gaacuccugucgcgcauua

SEQ ID NO: 2204065 - RNA, 19 nt, Artificial Sequence
  Description of Artificial Sequence: Synthetic oligonucleotide
gacccgcggagcagaguag

SEQ ID NO: 2204066 - RNA, 19 nt, Artificial Sequence
  Description of Artificial Sequence: Synthetic oligonucleotide
acgugaguggcagcaccca

SEQ ID NO: 2204067 - RNA, 19 nt, Artificial Sequence
  Description of Artificial Sequence: Synthetic oligonucleotide
acaucggguuugccacaca

SEQ ID NO: 2204068 - RNA, 19 nt, Artificial Sequence
  Description of Artificial Sequence: Synthetic oligonucleotide
cuucccgcguagucggcga

SEQ ID NO: 2204069 - RNA, 19 nt, Artificial Sequence
  Description of Artificial Sequence: Synthetic oligonucleotide
cgggaugcuccgauugugg

SEQ ID NO: 2204070 - RNA, 19 nt, Artificial Sequence
  Description of Artificial Sequence: Synthetic oligonucleotide
uggcuacuaagggcuugga

SEQ ID NO: 2204071 - RNA, 19 nt, Artificial Sequence
  Description of Artificial Sequence: Synthetic oligonucleotide
ggucgcugccaucguagac

SEQ ID NO: 2204072 - RNA, 19 nt, Artificial Sequence
  Description of Artificial Sequence: Synthetic oligonucleotide
uucccgcguagucggcgaa

SEQ ID NO: 2204073 - RNA, 19 nt, Artificial Sequence
  Description of Artificial Sequence: Synthetic oligonucleotide
ugcuccgauugugggccug

SEQ ID NO: 2204074 - RNA, 19 nt, Artificial Sequence
  Description of Artificial Sequence: Synthetic oligonucleotide
acccgcggagcagaguaga

SEQ ID NO: 2204075 - RNA, 19 nt, Artificial Sequence
  Description of Artificial Sequence: Synthetic oligonucleotide
cgcguagucggcgaagugc

SEQ ID NO: 2204076 - RNA, 19 nt, Artificial Sequence
  Description of Artificial Sequence: Synthetic oligonucleotide
auucagugaacgggauguu

SEQ ID NO: 2204077 - RNA, 19 nt, Artificial Sequence
  Description of Artificial Sequence: Synthetic oligonucleotide
cccacugugcagacacgag

SEQ ID NO: 2204078 - RNA, 19 nt, Artificial Sequence
  Description of Artificial Sequence: Synthetic oligonucleotide
uggucgcugcaaugaucaa

SEQ ID NO: 2204079 - RNA, 19 nt, Artificial Sequence
  Description of Artificial Sequence: Synthetic oligonucleotide
ccugagcuguaccgugucc

SEQ ID NO: 2204080 - RNA, 19 nt, Artificial Sequence
  Description of Artificial Sequence: Synthetic oligonucleotide
ggaacucugcgggcuucgg

SEQ ID NO: 2204081 - RNA, 19 nt, Artificial Sequence
  Description of Artificial Sequence: Synthetic oligonucleotide
gcucugugccccggaaccg

SEQ ID NO: 2204082 - RNA, 19 nt, Artificial Sequence
  Description of Artificial Sequence: Synthetic oligonucleotide
cguagggcgaccugugguc

SEQ ID NO: 2204083 - RNA, 19 nt, Artificial Sequence
  Description of Artificial Sequence: Synthetic oligonucleotide
ggucguagggcgaccugug

SEQ ID NO: 2204084 - RNA, 19 nt, Artificial Sequence
  Description of Artificial Sequence: Synthetic oligonucleotide
gaccacgacgugaguggca

SEQ ID NO: 2204085 - RNA, 19 nt, Artificial Sequence
  Description of Artificial Sequence: Synthetic oligonucleotide
ccuguggucgcugcaauga

SEQ ID NO: 2204086 - RNA, 19 nt, Artificial Sequence
  Description of Artificial Sequence: Synthetic oligonucleotide
acccacgcccaggcuuccc

SEQ ID NO: 2204087 - RNA, 19 nt, Artificial Sequence
  Description of Artificial Sequence: Synthetic oligonucleotide
cgggguuccggcucugugc

SEQ ID NO: 2204088 - RNA, 19 nt, Artificial Sequence
  Description of Artificial Sequence: Synthetic oligonucleotide
gccgccguccagcagcgac

SEQ ID NO: 2204089 - RNA, 19 nt, Artificial Sequence
  Description of Artificial Sequence: Synthetic oligonucleotide
cggaaaagcuuaggggcgg

SEQ ID NO: 2204090 - RNA, 19 nt, Artificial Sequence
  Description of Artificial Sequence: Synthetic oligonucleotide
cagacacgagagcucggaa

SEQ ID NO: 2204091 - RNA, 19 nt, Artificial Sequence
  Description of Artificial Sequence: Synthetic oligonucleotide
cgacgugaguggcagcacc

SEQ ID NO: 2204092 - RNA, 19 nt, Artificial Sequence
  Description of Artificial Sequence: Synthetic oligonucleotide
ggcacgaauguaccacucu

SEQ ID NO: 2204093 - RNA, 19 nt, Artificial Sequence
  Description of Artificial Sequence: Synthetic oligonucleotide
ggcgaccuguggucgcugc

SEQ ID NO: 2204094 - RNA, 19 nt, Artificial Sequence
  Description of Artificial Sequence: Synthetic oligonucleotide
guaccguguccugccuggc

SEQ ID NO: 2204095 - RNA, 19 nt, Artificial Sequence
  Description of Artificial Sequence: Synthetic oligonucleotide
guggcgccugggauguggc

SEQ ID NO: 2204096 - RNA, 19 nt, Artificial Sequence
  Description of Artificial Sequence: Synthetic oligonucleotide
ccgcggagcagaguagagg

SEQ ID NO: 2204097 - RNA, 19 nt, Artificial Sequence
  Description of Artificial Sequence: Synthetic oligonucleotide
gcaggcugugacaccggag

SEQ ID NO: 2204098 - RNA, 19 nt, Artificial Sequence
  Description of Artificial Sequence: Synthetic oligonucleotide
uaggcagcauguggucgua

SEQ ID NO: 2204099 - RNA, 19 nt, Artificial Sequence
  Description of Artificial Sequence: Synthetic oligonucleotide
cugggauguggcgcucuuc

SEQ ID NO: 2204100 - RNA, 19 nt, Artificial Sequence
  Description of Artificial Sequence: Synthetic oligonucleotide
augcuccgauugugggccu

SEQ ID NO: 2204101 - RNA, 19 nt, Artificial Sequence
  Description of Artificial Sequence: Synthetic oligonucleotide
gcauuacggcccagcuugg

SEQ ID NO: 2204102 - RNA, 19 nt, Artificial Sequence
  Description of Artificial Sequence: Synthetic oligonucleotide
gccgaaggcacggaacauc

SEQ ID NO: 2204103 - RNA, 19 nt, Artificial Sequence
  Description of Artificial Sequence: Synthetic oligonucleotide
ggcugugacaccggagcca

SEQ ID NO: 2204104 - RNA, 19 nt, Artificial Sequence
  Description of Artificial Sequence: Synthetic oligonucleotide
ccuggaaacgccgggccuc

SEQ ID NO: 2204105 - RNA, 19 nt, Artificial Sequence
  Description of Artificial Sequence: Synthetic oligonucleotide
caggcacaucggguuugcc

SEQ ID NO: 2204106 - RNA, 19 nt, Artificial Sequence
  Description of Artificial Sequence: Synthetic oligonucleotide
gcgguggccgaaggcacgg

SEQ ID NO: 2204107 - RNA, 19 nt, Artificial Sequence
  Description of Artificial Sequence: Synthetic oligonucleotide
gguggccgaaggcacggaa

SEQ ID NO: 2204108 - RNA, 19 nt, Artificial Sequence
  Description of Artificial Sequence: Synthetic oligonucleotide
ccggaucucuucugggcuc

SEQ ID NO: 2204109 - RNA, 19 nt, Artificial Sequence
  Description of Artificial Sequence: Synthetic oligonucleotide
caggcuuggcacgaaugua

SEQ ID NO: 2204110 - RNA, 19 nt, Artificial Sequence
  Description of Artificial Sequence: Synthetic oligonucleotide
ugcgaggcucgcggagacu

SEQ ID NO: 2204111 - RNA, 19 nt, Artificial Sequence
  Description of Artificial Sequence: Synthetic oligonucleotide
guaccaggaugcauccagu

SEQ ID NO: 2204112 - RNA, 19 nt, Artificial Sequence
  Description of Artificial Sequence: Synthetic oligonucleotide
cagcagcgacaccgagcgg

SEQ ID NO: 2204113 - RNA, 19 nt, Artificial Sequence
  Description of Artificial Sequence: Synthetic oligonucleotide
cacucuacccaggagccau

SEQ ID NO: 2204114 - RNA, 19 nt, Artificial Sequence
  Description of Artificial Sequence: Synthetic oligonucleotide
ccggaaccggccagcugcg

SEQ ID NO: 2204115 - RNA, 19 nt, Artificial Sequence
  Description of Artificial Sequence: Synthetic oligonucleotide
cuccgccacccacugugca

SEQ ID NO: 2204116 - RNA, 19 nt, Artificial Sequence
  Description of Artificial Sequence: Synthetic oligonucleotide
gggauguggcgcucuucga

SEQ ID NO: 2204117 - RNA, 19 nt, Artificial Sequence
  Description of Artificial Sequence: Synthetic oligonucleotide
aggcucgcggagacuucag

SEQ ID NO: 2204118 - RNA, 19 nt, Artificial Sequence
  Description of Artificial Sequence: Synthetic oligonucleotide
gccggaucucuucugggcu

SEQ ID NO: 2204119 - RNA, 19 nt, Artificial Sequence
  Description of Artificial Sequence: Synthetic oligonucleotide
uaggggcggccauggccuc

SEQ ID NO: 2204120 - RNA, 19 nt, Artificial Sequence
  Description of Artificial Sequence: Synthetic oligonucleotide
ggcucgcggagacuucaga

SEQ ID NO: 2204121 - RNA, 19 nt, Artificial Sequence
  Description of Artificial Sequence: Synthetic oligonucleotide
caccgagcgguggccgaag

SEQ ID NO: 2204122 - RNA, 19 nt, Artificial Sequence
  Description of Artificial Sequence: Synthetic oligonucleotide
cgugagucuugaugaagga

SEQ ID NO: 2204123 - RNA, 19 nt, Artificial Sequence
  Description of Artificial Sequence: Synthetic oligonucleotide
caccugagcuguaccgugu

SEQ ID NO: 2204124 - RNA, 19 nt, Artificial Sequence
  Description of Artificial Sequence: Synthetic oligonucleotide
cccgcggagcagaguagag

SEQ ID NO: 2204125 - RNA, 19 nt, Artificial Sequence
  Description of Artificial Sequence: Synthetic oligonucleotide
ggcguccaccaccuggaaa

SEQ ID NO: 2204126 - RNA, 19 nt, Artificial Sequence
  Description of Artificial Sequence: Synthetic oligonucleotide
gcggagcagaguagaggcc

SEQ ID NO: 2204127 - RNA, 19 nt, Artificial Sequence
  Description of Artificial Sequence: Synthetic oligonucleotide
ccgagcgguggccgaaggc

SEQ ID NO: 2204128 - RNA, 19 nt, Artificial Sequence
  Description of Artificial Sequence: Synthetic oligonucleotide
ugcgggcuucggguggcuc

SEQ ID NO: 2204129 - RNA, 19 nt, Artificial Sequence
  Description of Artificial Sequence: Synthetic oligonucleotide
ggucgcugcaaugaucaau

SEQ ID NO: 2204130 - RNA, 19 nt, Artificial Sequence
  Description of Artificial Sequence: Synthetic oligonucleotide
ccuccgccacccacugugc

SEQ ID NO: 2204131 - RNA, 19 nt, Artificial Sequence
  Description of Artificial Sequence: Synthetic oligonucleotide
gccaguggcggaagccgcc

SEQ ID NO: 2204132 - RNA, 19 nt, Artificial Sequence
  Description of Artificial Sequence: Synthetic oligonucleotide
ccgggaugcuccgauugug

SEQ ID NO: 2204133 - RNA, 19 nt, Artificial Sequence
  Description of Artificial Sequence: Synthetic oligonucleotide
gcguagucggcgaagugcu

SEQ ID NO: 2204134 - RNA, 19 nt, Artificial Sequence
  Description of Artificial Sequence: Synthetic oligonucleotide
gcgacaccgagcgguggcc

SEQ ID NO: 2204135 - RNA, 19 nt, Artificial Sequence
  Description of Artificial Sequence: Synthetic oligonucleotide
ggaauucagugaacgggau

SEQ ID NO: 2204136 - RNA, 19 nt, Artificial Sequence
  Description of Artificial Sequence: Synthetic oligonucleotide
auguggcuacuaagggcuu

SEQ ID NO: 2204137 - RNA, 19 nt, Artificial Sequence
  Description of Artificial Sequence: Synthetic oligonucleotide
gcugcgaggcucgcggaga

SEQ ID NO: 2204138 - RNA, 19 nt, Artificial Sequence
  Description of Artificial Sequence: Synthetic oligonucleotide
gcacccacgcccaggcuuc

SEQ ID NO: 2204139 - RNA, 19 nt, Artificial Sequence
  Description of Artificial Sequence: Synthetic oligonucleotide
gcauguggucguagggcga

SEQ ID NO: 2204140 - RNA, 19 nt, Artificial Sequence
  Description of Artificial Sequence: Synthetic oligonucleotide
cgaagugcucggcgcuagg

SEQ ID NO: 2204141 - RNA, 19 nt, Artificial Sequence
  Description of Artificial Sequence: Synthetic oligonucleotide
cuguggucgcugcaaugau

SEQ ID NO: 2204142 - RNA, 19 nt, Artificial Sequence
  Description of Artificial Sequence: Synthetic oligonucleotide
ccucacugggucuuucccu

SEQ ID NO: 2204143 - RNA, 19 nt, Artificial Sequence
  Description of Artificial Sequence: Synthetic oligonucleotide
cggagccacauguggcuac

SEQ ID NO: 2204144 - RNA, 19 nt, Artificial Sequence
  Description of Artificial Sequence: Synthetic oligonucleotide
ccaucauagacaggcacau

SEQ ID NO: 2204145 - RNA, 19 nt, Artificial Sequence
  Description of Artificial Sequence: Synthetic oligonucleotide
cguccaccaccuggaaacg

SEQ ID NO: 2204146 - RNA, 19 nt, Artificial Sequence
  Description of Artificial Sequence: Synthetic oligonucleotide
cugugacaccggagccaca

SEQ ID NO: 2204147 - RNA, 19 nt, Artificial Sequence
  Description of Artificial Sequence: Synthetic oligonucleotide
gcgaccuguggucgcugca

SEQ ID NO: 2204148 - RNA, 19 nt, Artificial Sequence
  Description of Artificial Sequence: Synthetic oligonucleotide
cgggauguuuacugagcca

SEQ ID NO: 2204149 - RNA, 19 nt, Artificial Sequence
  Description of Artificial Sequence: Synthetic oligonucleotide
cacccacgcccaggcuucc

SEQ ID NO: 2204150 - RNA, 19 nt, Artificial Sequence
  Description of Artificial Sequence: Synthetic oligonucleotide
ccucgugagucuugaugaa

SEQ ID NO: 2204151 - RNA, 19 nt, Artificial Sequence
  Description of Artificial Sequence: Synthetic oligonucleotide
gagccacauguggcuacua

SEQ ID NO: 2204152 - RNA, 19 nt, Artificial Sequence
  Description of Artificial Sequence: Synthetic oligonucleotide
gucgcgcauuacggcccag

SEQ ID NO: 2204153 - RNA, 19 nt, Artificial Sequence
  Description of Artificial Sequence: Synthetic oligonucleotide
ccacgacgugaguggcagc

SEQ ID NO: 2204154 - RNA, 19 nt, Artificial Sequence
  Description of Artificial Sequence: Synthetic oligonucleotide
gccagcugcgcgggcgucc

SEQ ID NO: 2204155 - RNA, 19 nt, Artificial Sequence
  Description of Artificial Sequence: Synthetic oligonucleotide
cgacaccgagcgguggccg

SEQ ID NO: 2204156 - RNA, 19 nt, Artificial Sequence
  Description of Artificial Sequence: Synthetic oligonucleotide
ccguguccugccuggccuc

SEQ ID NO: 2204157 - RNA, 19 nt, Artificial Sequence
  Description of Artificial Sequence: Synthetic oligonucleotide
ccgcguagucggcgaagug

SEQ ID NO: 2204158 - RNA, 19 nt, Artificial Sequence
  Description of Artificial Sequence: Synthetic oligonucleotide
gcuguaccguguccugccu

SEQ ID NO: 2204159 - RNA, 19 nt, Artificial Sequence
  Description of Artificial Sequence: Synthetic oligonucleotide
ccgccguccagcagcgaca

SEQ ID NO: 2204160 - RNA, 19 nt, Artificial Sequence
  Description of Artificial Sequence: Synthetic oligonucleotide
gcguggaacucugcgggcu

SEQ ID NO: 2204161 - RNA, 19 nt, Artificial Sequence
  Description of Artificial Sequence: Synthetic oligonucleotide
ccgccacccacugugcaga

SEQ ID NO: 2204162 - RNA, 19 nt, Artificial Sequence
  Description of Artificial Sequence: Synthetic oligonucleotide
cgauugugggccuguuucu

SEQ ID NO: 2204163 - RNA, 19 nt, Artificial Sequence
  Description of Artificial Sequence: Synthetic oligonucleotide
gcgccugggauguggcgcu

SEQ ID NO: 2204164 - RNA, 19 nt, Artificial Sequence
  Description of Artificial Sequence: Synthetic oligonucleotide
cggcucugugccccggaac

SEQ ID NO: 2204165 - RNA, 19 nt, Artificial Sequence
  Description of Artificial Sequence: Synthetic oligonucleotide
ggcgaagugcucggcgcua

SEQ ID NO: 2204166 - RNA, 19 nt, Artificial Sequence
  Description of Artificial Sequence: Synthetic oligonucleotide
ccaucucgggguuccggcu

SEQ ID NO: 2204167 - RNA, 19 nt, Artificial Sequence
  Description of Artificial Sequence: Synthetic oligonucleotide
cggguuugccacacaggaa

SEQ ID NO: 2204168 - RNA, 19 nt, Artificial Sequence
  Description of Artificial Sequence: Synthetic oligonucleotide
gcgaggcucgcggagacuu

SEQ ID NO: 2204169 - RNA, 19 nt, Artificial Sequence
  Description of Artificial Sequence: Synthetic oligonucleotide
gccguccagcagcgacacc

SEQ ID NO: 2204170 - RNA, 19 nt, Artificial Sequence
  Description of Artificial Sequence: Synthetic oligonucleotide
gcgcauuacggcccagcuu

SEQ ID NO: 2204171 - RNA, 19 nt, Artificial Sequence
  Description of Artificial Sequence: Synthetic oligonucleotide
cagcggcugcgaggcucgc

SEQ ID NO: 2204172 - RNA, 19 nt, Artificial Sequence
  Description of Artificial Sequence: Synthetic oligonucleotide
gggcgaccuguggucgcug

SEQ ID NO: 2204173 - RNA, 19 nt, Artificial Sequence
  Description of Artificial Sequence: Synthetic oligonucleotide
cgagagcucggaaaagcuu

SEQ ID NO: 2204174 - RNA, 19 nt, Artificial Sequence
  Description of Artificial Sequence: Synthetic oligonucleotide
cgaggcucgcggagacuuc

SEQ ID NO: 2204175 - RNA, 19 nt, Artificial Sequence
  Description of Artificial Sequence: Synthetic oligonucleotide
caguggcggaagccgccgu

SEQ ID NO: 2204176 - RNA, 19 nt, Artificial Sequence
  Description of Artificial Sequence: Synthetic oligonucleotide
cgccguccagcagcgacac

SEQ ID NO: 2204177 - RNA, 19 nt, Artificial Sequence
  Description of Artificial Sequence: Synthetic oligonucleotide
gggcuucggguggcucuug

SEQ ID NO: 2204178 - RNA, 19 nt, Artificial Sequence
  Description of Artificial Sequence: Synthetic oligonucleotide
ccccggaaccggccagcug

SEQ ID NO: 2204179 - RNA, 19 nt, Artificial Sequence
  Description of Artificial Sequence: Synthetic oligonucleotide
gggcguccaccaccuggaa

SEQ ID NO: 2204180 - RNA, 19 nt, Artificial Sequence
  Description of Artificial Sequence: Synthetic oligonucleotide
ccacucuacccaggagcca

SEQ ID NO: 2204181 - RNA, 19 nt, Artificial Sequence
  Description of Artificial Sequence: Synthetic oligonucleotide
gcuccgauugugggccugu

SEQ ID NO: 2204182 - RNA, 19 nt, Artificial Sequence
  Description of Artificial Sequence: Synthetic oligonucleotide
cuucagcggcugcgaggcu

SEQ ID NO: 2204183 - RNA, 19 nt, Artificial Sequence
  Description of Artificial Sequence: Synthetic oligonucleotide
cgaccuguggucgcugcaa

SEQ ID NO: 2204184 - RNA, 19 nt, Artificial Sequence
  Description of Artificial Sequence: Synthetic oligonucleotide
cgcgcauuacggcccagcu

SEQ ID NO: 2204185 - RNA, 19 nt, Artificial Sequence
  Description of Artificial Sequence: Synthetic oligonucleotide
ccccuccuuggucaggaau

SEQ ID NO: 2204186 - RNA, 19 nt, Artificial Sequence
  Description of Artificial Sequence: Synthetic oligonucleotide
agccgccguccagcagcga

SEQ ID NO: 2204187 - RNA, 19 nt, Artificial Sequence
  Description of Artificial Sequence: Synthetic oligonucleotide
ggccgaaggcacggaacau

SEQ ID NO: 2204188 - RNA, 19 nt, Artificial Sequence
  Description of Artificial Sequence: Synthetic oligonucleotide
cagacccgcggagcagagu

SEQ ID NO: 2204189 - RNA, 19 nt, Artificial Sequence
  Description of Artificial Sequence: Synthetic oligonucleotide
ccggcucugugccccggaa

SEQ ID NO: 2204190 - RNA, 19 nt, Artificial Sequence
  Description of Artificial Sequence: Synthetic oligonucleotide
cgaugccaucucgggguuc

SEQ ID NO: 2204191 - RNA, 19 nt, Artificial Sequence
  Description of Artificial Sequence: Synthetic oligonucleotide
cggcgcuaggcagcaugug

SEQ ID NO: 2204192 - RNA, 19 nt, Artificial Sequence
  Description of Artificial Sequence: Synthetic oligonucleotide
cggaaccggccagcugcgc

SEQ ID NO: 2204193 - RNA, 19 nt, Artificial Sequence
  Description of Artificial Sequence: Synthetic oligonucleotide
ccggagccacauguggcua

SEQ ID NO: 2204194 - RNA, 19 nt, Artificial Sequence
  Description of Artificial Sequence: Synthetic oligonucleotide
cuccgauugugggccuguu

SEQ ID NO: 2204195 - RNA, 19 nt, Artificial Sequence
  Description of Artificial Sequence: Synthetic oligonucleotide
cgcugccaucguagaccac

SEQ ID NO: 2204196 - RNA, 19 nt, Artificial Sequence
  Description of Artificial Sequence: Synthetic oligonucleotide
cgcggagacuucagagccu

SEQ ID NO: 2204197 - RNA, 19 nt, Artificial Sequence
  Description of Artificial Sequence: Synthetic oligonucleotide
ggccuccgggaugcuccga

SEQ ID NO: 2204198 - RNA, 19 nt, Artificial Sequence
  Description of Artificial Sequence: Synthetic oligonucleotide
gcgcgggcguccaccaccu

SEQ ID NO: 2204199 - RNA, 19 nt, Artificial Sequence
  Description of Artificial Sequence: Synthetic oligonucleotide
cuggccucacugggucuuu

SEQ ID NO: 2204200 - RNA, 19 nt, Artificial Sequence
  Description of Artificial Sequence: Synthetic oligonucleotide
cguagaccacgacgugagu

SEQ ID NO: 2204201 - RNA, 19 nt, Artificial Sequence
  Description of Artificial Sequence: Synthetic oligonucleotide
cggaucucuucugggcucu

SEQ ID NO: 2204202 - RNA, 19 nt, Artificial Sequence
  Description of Artificial Sequence: Synthetic oligonucleotide
ccugggauguggcgcucuu

SEQ ID NO: 2204203 - RNA, 19 nt, Artificial Sequence
  Description of Artificial Sequence: Synthetic oligonucleotide
cggcgaagugcucggcgcu

SEQ ID NO: 2204204 - RNA, 19 nt, Artificial Sequence
  Description of Artificial Sequence: Synthetic oligonucleotide
ccuccgggaugcuccgauu

SEQ ID NO: 2204205 - RNA, 19 nt, Artificial Sequence
  Description of Artificial Sequence: Synthetic oligonucleotide
cgcccaggcuucccgcgua

SEQ ID NO: 2204206 - RNA, 19 nt, Artificial Sequence
  Description of Artificial Sequence: Synthetic oligonucleotide
cgaacuccugucgcgcauu

SEQ ID NO: 2204207 - RNA, 19 nt, Artificial Sequence
  Description of Artificial Sequence: Synthetic oligonucleotide
gcucggcgcuaggcagcau

SEQ ID NO: 2204208 - RNA, 19 nt, Artificial Sequence
  Description of Artificial Sequence: Synthetic oligonucleotide
gacaauugacguaugaacg

SEQ ID NO: 2204209 - RNA, 19 nt, Artificial Sequence
  Description of Artificial Sequence: Synthetic oligonucleotide
gaaaucauggccaagcagc

SEQ ID NO: 2204210 - RNA, 19 nt, Artificial Sequence
  Description of Artificial Sequence: Synthetic oligonucleotide
aguucauugacaauugacg

SEQ ID NO: 2204211 - RNA, 19 nt, Artificial Sequence
  Description of Artificial Sequence: Synthetic oligonucleotide
agaaacuucuuggaggugc

SEQ ID NO: 2204212 - RNA, 19 nt, Artificial Sequence
  Description of Artificial Sequence: Synthetic oligonucleotide
uuugcaacuggcuuugcag

SEQ ID NO: 2204213 - RNA, 19 nt, Artificial Sequence
  Description of Artificial Sequence: Synthetic oligonucleotide
guuuggucagcuuagaaac

SEQ ID NO: 2204214 - RNA, 19 nt, Artificial Sequence
  Description of Artificial Sequence: Synthetic oligonucleotide
ugacaauugacguaugaac

SEQ ID NO: 2204215 - RNA, 19 nt, Artificial Sequence
  Description of Artificial Sequence: Synthetic oligonucleotide
uuagaaacuucuuggaggu

SEQ ID NO: 2204216 - RNA, 19 nt, Artificial Sequence
  Description of Artificial Sequence: Synthetic oligonucleotide
gacguaugaacguccaugg

SEQ ID NO: 2204217 - RNA, 19 nt, Artificial Sequence
  Description of Artificial Sequence: Synthetic oligonucleotide
aguuccuccaucucagcgc

SEQ ID NO: 2204218 - RNA, 19 nt, Artificial Sequence
  Description of Artificial Sequence: Synthetic oligonucleotide
uccagaaccacuucaagcu

SEQ ID NO: 2204219 - RNA, 19 nt, Artificial Sequence
  Description of Artificial Sequence: Synthetic oligonucleotide
aauugacguaugaacgucc

SEQ ID NO: 2204220 - RNA, 19 nt, Artificial Sequence
  Description of Artificial Sequence: Synthetic oligonucleotide
agggcuacgccacagacuc

SEQ ID NO: 2204221 - RNA, 19 nt, Artificial Sequence
  Description of Artificial Sequence: Synthetic oligonucleotide
uguaucagcagcuuguuuu

SEQ ID NO: 2204222 - RNA, 19 nt, Artificial Sequence
  Description of Artificial Sequence: Synthetic oligonucleotide
aacgggacuacucuuauuu

SEQ ID NO: 2204223 - RNA, 19 nt, Artificial Sequence
  Description of Artificial Sequence: Synthetic oligonucleotide
accuguaaggccgucagcc

SEQ ID NO: 2204224 - RNA, 19 nt, Artificial Sequence
  Description of Artificial Sequence: Synthetic oligonucleotide
ugcacuuugaguucucggc

SEQ ID NO: 2204225 - RNA, 19 nt, Artificial Sequence
  Description of Artificial Sequence: Synthetic oligonucleotide
uucuuguagcccuuuaccc

SEQ ID NO: 2204226 - RNA, 19 nt, Artificial Sequence
  Description of Artificial Sequence: Synthetic oligonucleotide
aggauuuugccuguuugcc

SEQ ID NO: 2204227 - RNA, 19 nt, Artificial Sequence
  Description of Artificial Sequence: Synthetic oligonucleotide
ucuuccuuuugcaacuggc

SEQ ID NO: 2204228 - RNA, 19 nt, Artificial Sequence
  Description of Artificial Sequence: Synthetic oligonucleotide
uuugcuggaucuccaacug

SEQ ID NO: 2204229 - RNA, 19 nt, Artificial Sequence
  Description of Artificial Sequence: Synthetic oligonucleotide
aggagcacaaguuguuugg

SEQ ID NO: 2204230 - RNA, 19 nt, Artificial Sequence
  Description of Artificial Sequence: Synthetic oligonucleotide
acaauugacguaugaacgu

SEQ ID NO: 2204231 - RNA, 19 nt, Artificial Sequence
  Description of Artificial Sequence: Synthetic oligonucleotide
auagcugaaaucauggcca

SEQ ID NO: 2204232 - RNA, 19 nt, Artificial Sequence
  Description of Artificial Sequence: Synthetic oligonucleotide
aaguuguuuggucagcuua

SEQ ID NO: 2204233 - RNA, 19 nt, Artificial Sequence
  Description of Artificial Sequence: Synthetic oligonucleotide
gucaccauagcugaaauca

SEQ ID NO: 2204234 - RNA, 19 nt, Artificial Sequence
  Description of Artificial Sequence: Synthetic oligonucleotide
ugugccuccccucuccagg

SEQ ID NO: 2204235 - RNA, 19 nt, Artificial Sequence
  Description of Artificial Sequence: Synthetic oligonucleotide
aaagccagcguccucccga

SEQ ID NO: 2204236 - RNA, 19 nt, Artificial Sequence
  Description of Artificial Sequence: Synthetic oligonucleotide
ugacguaugaacguccaug

SEQ ID NO: 2204237 - RNA, 19 nt, Artificial Sequence
  Description of Artificial Sequence: Synthetic oligonucleotide
aaaaguggcagcagcaggu

SEQ ID NO: 2204238 - RNA, 19 nt, Artificial Sequence
  Description of Artificial Sequence: Synthetic oligonucleotide
ugcacgucaccauagcuga

SEQ ID NO: 2204239 - RNA, 19 nt, Artificial Sequence
  Description of Artificial Sequence: Synthetic oligonucleotide
uugaguucucggcaucggg

SEQ ID NO: 2204240 - RNA, 19 nt, Artificial Sequence
  Description of Artificial Sequence: Synthetic oligonucleotide
cuccagaaccacuucaagc

SEQ ID NO: 2204241 - RNA, 19 nt, Artificial Sequence
  Description of Artificial Sequence: Synthetic oligonucleotide
cauuucucuuuucugcugc

SEQ ID NO: 2204242 - RNA, 19 nt, Artificial Sequence
  Description of Artificial Sequence: Synthetic oligonucleotide
cuggcuuugcaguucauug

SEQ ID NO: 2204243 - RNA, 19 nt, Artificial Sequence
  Description of Artificial Sequence: Synthetic oligonucleotide
aaggucucgcauccuuugg

SEQ ID NO: 2204244 - RNA, 19 nt, Artificial Sequence
  Description of Artificial Sequence: Synthetic oligonucleotide
aaggccgucagccuuccca

SEQ ID NO: 2204245 - RNA, 19 nt, Artificial Sequence
  Description of Artificial Sequence: Synthetic oligonucleotide
agagggcuacgccacagac

SEQ ID NO: 2204246 - RNA, 19 nt, Artificial Sequence
  Description of Artificial Sequence: Synthetic oligonucleotide
auugacaauugacguauga

SEQ ID NO: 2204247 - RNA, 19 nt, Artificial Sequence
  Description of Artificial Sequence: Synthetic oligonucleotide
uuuacccucuccuccagcu

SEQ ID NO: 2204248 - RNA, 19 nt, Artificial Sequence
  Description of Artificial Sequence: Synthetic oligonucleotide
ucuuuucugcugcaacgcc

SEQ ID NO: 2204249 - RNA, 19 nt, Artificial Sequence
  Description of Artificial Sequence: Synthetic oligonucleotide
ucggcaucgggccugcaag

SEQ ID NO: 2204250 - RNA, 19 nt, Artificial Sequence
  Description of Artificial Sequence: Synthetic oligonucleotide
ugccuuucaggauuuugcc

SEQ ID NO: 2204251 - RNA, 19 nt, Artificial Sequence
  Description of Artificial Sequence: Synthetic oligonucleotide
caagcagcaggucucuccg

SEQ ID NO: 2204252 - RNA, 19 nt, Artificial Sequence
  Description of Artificial Sequence: Synthetic oligonucleotide
cuagaaccagcucugcuug

SEQ ID NO: 2204253 - RNA, 19 nt, Artificial Sequence
  Description of Artificial Sequence: Synthetic oligonucleotide
ugcaacgccuuguccaggg

SEQ ID NO: 2204254 - RNA, 19 nt, Artificial Sequence
  Description of Artificial Sequence: Synthetic oligonucleotide
caggauuuugccuguuugc

SEQ ID NO: 2204255 - RNA, 19 nt, Artificial Sequence
  Description of Artificial Sequence: Synthetic oligonucleotide
gaguucucggcaucgggcc

SEQ ID NO: 2204256 - RNA, 19 nt, Artificial Sequence
  Description of Artificial Sequence: Synthetic oligonucleotide
gauguccccgaguuucagg

SEQ ID NO: 2204257 - RNA, 19 nt, Artificial Sequence
  Description of Artificial Sequence: Synthetic oligonucleotide
uugacaauugacguaugaa

SEQ ID NO: 2204258 - RNA, 19 nt, Artificial Sequence
  Description of Artificial Sequence: Synthetic oligonucleotide
agcuuagaaacuucuugga

SEQ ID NO: 2204259 - RNA, 19 nt, Artificial Sequence
  Description of Artificial Sequence: Synthetic oligonucleotide
uuccauuccucgcugguaa

SEQ ID NO: 2204260 - RNA, 19 nt, Artificial Sequence
  Description of Artificial Sequence: Synthetic oligonucleotide
acguaugaacguccauggc

SEQ ID NO: 2204261 - RNA, 19 nt, Artificial Sequence
  Description of Artificial Sequence: Synthetic oligonucleotide
ucugccgaaaaguggcagc

SEQ ID NO: 2204262 - RNA, 19 nt, Artificial Sequence
  Description of Artificial Sequence: Synthetic oligonucleotide
uuuggucagcuuagaaacu

SEQ ID NO: 2204263 - RNA, 19 nt, Artificial Sequence
  Description of Artificial Sequence: Synthetic oligonucleotide
acguccauggcgaucuugc

SEQ ID NO: 2204264 - RNA, 19 nt, Artificial Sequence
  Description of Artificial Sequence: Synthetic oligonucleotide
augaagagggcuacgccac

SEQ ID NO: 2204265 - RNA, 19 nt, Artificial Sequence
  Description of Artificial Sequence: Synthetic oligonucleotide
acuuugaguucucggcauc

SEQ ID NO: 2204266 - RNA, 19 nt, Artificial Sequence
  Description of Artificial Sequence: Synthetic oligonucleotide
aaaucauggccaagcagca

SEQ ID NO: 2204267 - RNA, 19 nt, Artificial Sequence
  Description of Artificial Sequence: Synthetic oligonucleotide
ucucgcauccuuugguucu

SEQ ID NO: 2204268 - RNA, 19 nt, Artificial Sequence
  Description of Artificial Sequence: Synthetic oligonucleotide
guuucuuguagcccuuuac

SEQ ID NO: 2204269 - RNA, 19 nt, Artificial Sequence
  Description of Artificial Sequence: Synthetic oligonucleotide
aagcagcaggucucuccgc

SEQ ID NO: 2204270 - RNA, 19 nt, Artificial Sequence
  Description of Artificial Sequence: Synthetic oligonucleotide
uuccuuuugcaacuggcuu

SEQ ID NO: 2204271 - RNA, 19 nt, Artificial Sequence
  Description of Artificial Sequence: Synthetic oligonucleotide
uuugaguucucggcaucgg

SEQ ID NO: 2204272 - RNA, 19 nt, Artificial Sequence
  Description of Artificial Sequence: Synthetic oligonucleotide
cuuugaguucucggcaucg

SEQ ID NO: 2204273 - RNA, 19 nt, Artificial Sequence
  Description of Artificial Sequence: Synthetic oligonucleotide
aguuguuuggucagcuuag

SEQ ID NO: 2204274 - RNA, 19 nt, Artificial Sequence
  Description of Artificial Sequence: Synthetic oligonucleotide
cguaugaacguccauggcg

SEQ ID NO: 2204275 - RNA, 19 nt, Artificial Sequence
  Description of Artificial Sequence: Synthetic oligonucleotide
acuccagaaccacuucaag

SEQ ID NO: 2204276 - RNA, 19 nt, Artificial Sequence
  Description of Artificial Sequence: Synthetic oligonucleotide
aaguggcagcagcagguug

SEQ ID NO: 2204277 - RNA, 19 nt, Artificial Sequence
  Description of Artificial Sequence: Synthetic oligonucleotide
guaugaacguccauggcga

SEQ ID NO: 2204278 - RNA, 19 nt, Artificial Sequence
  Description of Artificial Sequence: Synthetic oligonucleotide
ucagaugaagagggcuacg

SEQ ID NO: 2204279 - RNA, 19 nt, Artificial Sequence
  Description of Artificial Sequence: Synthetic oligonucleotide
gcugaaaucauggccaagc

SEQ ID NO: 2204280 - RNA, 19 nt, Artificial Sequence
  Description of Artificial Sequence: Synthetic oligonucleotide
uuccucgcugguaacggga

SEQ ID NO: 2204281 - RNA, 19 nt, Artificial Sequence
  Description of Artificial Sequence: Synthetic oligonucleotide
auuccucgcugguaacggg

SEQ ID NO: 2204282 - RNA, 19 nt, Artificial Sequence
  Description of Artificial Sequence: Synthetic oligonucleotide
caucaggcggugauggaug

SEQ ID NO: 2204283 - RNA, 19 nt, Artificial Sequence
  Description of Artificial Sequence: Synthetic oligonucleotide
cauuccucgcugguaacgg

SEQ ID NO: 2204284 - RNA, 19 nt, Artificial Sequence
  Description of Artificial Sequence: Synthetic oligonucleotide
aaucauggccaagcagcag

SEQ ID NO: 2204285 - RNA, 19 nt, Artificial Sequence
  Description of Artificial Sequence: Synthetic oligonucleotide
gauguugccuuucaggauu

SEQ ID NO: 2204286 - RNA, 19 nt, Artificial Sequence
  Description of Artificial Sequence: Synthetic oligonucleotide
cuccaucaggcggugaugg

SEQ ID NO: 2204287 - RNA, 19 nt, Artificial Sequence
  Description of Artificial Sequence: Synthetic oligonucleotide
guaucagcagcuuguuuuc

SEQ ID NO: 2204288 - RNA, 19 nt, Artificial Sequence
  Description of Artificial Sequence: Synthetic oligonucleotide
uuugcaguucauugacaau

SEQ ID NO: 2204289 - RNA, 19 nt, Artificial Sequence
  Description of Artificial Sequence: Synthetic oligonucleotide
uuccccaggcggauguugc

SEQ ID NO: 2204290 - RNA, 19 nt, Artificial Sequence
  Description of Artificial Sequence: Synthetic oligonucleotide
agcucuguuccugcuggcc

SEQ ID NO: 2204291 - RNA, 19 nt, Artificial Sequence
  Description of Artificial Sequence: Synthetic oligonucleotide
cagccuucccagcaguucc

SEQ ID NO: 2204292 - RNA, 19 nt, Artificial Sequence
  Description of Artificial Sequence: Synthetic oligonucleotide
aagccagcguccucccgag

SEQ ID NO: 2204293 - RNA, 19 nt, Artificial Sequence
  Description of Artificial Sequence: Synthetic oligonucleotide
caaggucucgcauccuuug

SEQ ID NO: 2204294 - RNA, 19 nt, Artificial Sequence
  Description of Artificial Sequence: Synthetic oligonucleotide
caggcggugauggaugucc

SEQ ID NO: 2204295 - RNA, 19 nt, Artificial Sequence
  Description of Artificial Sequence: Synthetic oligonucleotide
caauugacguaugaacguc

SEQ ID NO: 2204296 - RNA, 19 nt, Artificial Sequence
  Description of Artificial Sequence: Synthetic oligonucleotide
aagagggcuacgccacaga

SEQ ID NO: 2204297 - RNA, 19 nt, Artificial Sequence
  Description of Artificial Sequence: Synthetic oligonucleotide
gaaccagcucugcuugagc

SEQ ID NO: 2204298 - RNA, 19 nt, Artificial Sequence
  Description of Artificial Sequence: Synthetic oligonucleotide
uccccgaguuucagggccg

SEQ ID NO: 2204299 - RNA, 19 nt, Artificial Sequence
  Description of Artificial Sequence: Synthetic oligonucleotide
agcgccgucuuucucuucu

SEQ ID NO: 2204300 - RNA, 19 nt, Artificial Sequence
  Description of Artificial Sequence: Synthetic oligonucleotide
gagcacaaguuguuugguc

SEQ ID NO: 2204301 - RNA, 19 nt, Artificial Sequence
  Description of Artificial Sequence: Synthetic oligonucleotide
gaagagggcuacgccacag

SEQ ID NO: 2204302 - RNA, 19 nt, Artificial Sequence
  Description of Artificial Sequence: Synthetic oligonucleotide
guuugcuggaucuccaacu

SEQ ID NO: 2204303 - RNA, 19 nt, Artificial Sequence
  Description of Artificial Sequence: Synthetic oligonucleotide
gauuuugccuguuugccuu

SEQ ID NO: 2204304 - RNA, 19 nt, Artificial Sequence
  Description of Artificial Sequence: Synthetic oligonucleotide
uggcaguggacuccagaac

SEQ ID NO: 2204305 - RNA, 19 nt, Artificial Sequence
  Description of Artificial Sequence: Synthetic oligonucleotide
uggucagcuuagaaacuuc

SEQ ID NO: 2204306 - RNA, 19 nt, Artificial Sequence
  Description of Artificial Sequence: Synthetic oligonucleotide
caggcucuucuucugcacc

SEQ ID NO: 2204307 - RNA, 19 nt, Artificial Sequence
  Description of Artificial Sequence: Synthetic oligonucleotide
agcagguugcacgucacca

SEQ ID NO: 2204308 - RNA, 19 nt, Artificial Sequence
  Description of Artificial Sequence: Synthetic oligonucleotide
uuggucagcuuagaaacuu

SEQ ID NO: 2204309 - RNA, 19 nt, Artificial Sequence
  Description of Artificial Sequence: Synthetic oligonucleotide
aggccgucagccuucccag

SEQ ID NO: 2204310 - RNA, 19 nt, Artificial Sequence
  Description of Artificial Sequence: Synthetic oligonucleotide
guacugagcugcuuugcca

SEQ ID NO: 2204311 - RNA, 19 nt, Artificial Sequence
  Description of Artificial Sequence: Synthetic oligonucleotide
aggucucgcauccuuuggu

SEQ ID NO: 2204312 - RNA, 19 nt, Artificial Sequence
  Description of Artificial Sequence: Synthetic oligonucleotide
ugaagagggcuacgccaca

SEQ ID NO: 2204313 - RNA, 19 nt, Artificial Sequence
  Description of Artificial Sequence: Synthetic oligonucleotide
auugacguaugaacgucca

SEQ ID NO: 2204314 - RNA, 19 nt, Artificial Sequence
  Description of Artificial Sequence: Synthetic oligonucleotide
cucagaugaagagggcuac

SEQ ID NO: 2204315 - RNA, 19 nt, Artificial Sequence
  Description of Artificial Sequence: Synthetic oligonucleotide
uuugccuugcgcgcgugcu

SEQ ID NO: 2204316 - RNA, 19 nt, Artificial Sequence
  Description of Artificial Sequence: Synthetic oligonucleotide
ugcaacuggcuuugcaguu

SEQ ID NO: 2204317 - RNA, 19 nt, Artificial Sequence
  Description of Artificial Sequence: Synthetic oligonucleotide
uccucgcugguaacgggac

SEQ ID NO: 2204318 - RNA, 19 nt, Artificial Sequence
  Description of Artificial Sequence: Synthetic oligonucleotide
cugaaaucauggccaagca

SEQ ID NO: 2204319 - RNA, 19 nt, Artificial Sequence
  Description of Artificial Sequence: Synthetic oligonucleotide
uagcugaaaucauggccaa

SEQ ID NO: 2204320 - RNA, 19 nt, Artificial Sequence
  Description of Artificial Sequence: Synthetic oligonucleotide
uugacguaugaacguccau

SEQ ID NO: 2204321 - RNA, 19 nt, Artificial Sequence
  Description of Artificial Sequence: Synthetic oligonucleotide
aggugccucaucuccuucu

SEQ ID NO: 2204322 - RNA, 19 nt, Artificial Sequence
  Description of Artificial Sequence: Synthetic oligonucleotide
caucccuggcuuugguuug

SEQ ID NO: 2204323 - RNA, 19 nt, Artificial Sequence
  Description of Artificial Sequence: Synthetic oligonucleotide
gucuuugccuccaggagca

SEQ ID NO: 2204324 - RNA, 19 nt, Artificial Sequence
  Description of Artificial Sequence: Synthetic oligonucleotide
cauugacaauugacguaug

SEQ ID NO: 2204325 - RNA, 19 nt, Artificial Sequence
  Description of Artificial Sequence: Synthetic oligonucleotide
uggugugcggugugccucc

SEQ ID NO: 2204326 - RNA, 19 nt, Artificial Sequence
  Description of Artificial Sequence: Synthetic oligonucleotide
agcuuccccaggcggaugu

SEQ ID NO: 2204327 - RNA, 19 nt, Artificial Sequence
  Description of Artificial Sequence: Synthetic oligonucleotide
aucaggcggugauggaugu

SEQ ID NO: 2204328 - RNA, 19 nt, Artificial Sequence
  Description of Artificial Sequence: Synthetic oligonucleotide
uuguagcccuuuacccucu

SEQ ID NO: 2204329 - RNA, 19 nt, Artificial Sequence
  Description of Artificial Sequence: Synthetic oligonucleotide
acgucaccauagcugaaau

SEQ ID NO: 2204330 - RNA, 19 nt, Artificial Sequence
  Description of Artificial Sequence: Synthetic oligonucleotide
ugccuugcgcgcgugcucc

SEQ ID NO: 2204331 - RNA, 19 nt, Artificial Sequence
  Description of Artificial Sequence: Synthetic oligonucleotide
ccaagcagcaggucucucc

SEQ ID NO: 2204332 - RNA, 19 nt, Artificial Sequence
  Description of Artificial Sequence: Synthetic oligonucleotide
aucucagcgccgucuuucu

SEQ ID NO: 2204333 - RNA, 19 nt, Artificial Sequence
  Description of Artificial Sequence: Synthetic oligonucleotide
uccaucucagcgccgucuu

SEQ ID NO: 2204334 - RNA, 19 nt, Artificial Sequence
  Description of Artificial Sequence: Synthetic oligonucleotide
gcugcaacgccuuguccag

SEQ ID NO: 2204335 - RNA, 19 nt, Artificial Sequence
  Description of Artificial Sequence: Synthetic oligonucleotide
gucucgcauccuuugguuc

SEQ ID NO: 2204336 - RNA, 19 nt, Artificial Sequence
  Description of Artificial Sequence: Synthetic oligonucleotide
ugguuugcuggaucuccaa

SEQ ID NO: 2204337 - RNA, 19 nt, Artificial Sequence
  Description of Artificial Sequence: Synthetic oligonucleotide
ugguaacgggacuacucuu

SEQ ID NO: 2204338 - RNA, 19 nt, Artificial Sequence
  Description of Artificial Sequence: Synthetic oligonucleotide
agcagcuuguuuucaucua

SEQ ID NO: 2204339 - RNA, 19 nt, Artificial Sequence
  Description of Artificial Sequence: Synthetic oligonucleotide
ugccagcaaaguccuccug

SEQ ID NO: 2204340 - RNA, 19 nt, Artificial Sequence
  Description of Artificial Sequence: Synthetic oligonucleotide
ugcaccuguaaggccguca

SEQ ID NO: 2204341 - RNA, 19 nt, Artificial Sequence
  Description of Artificial Sequence: Synthetic oligonucleotide
cuuccuuuugcaacuggcu

SEQ ID NO: 2204342 - RNA, 19 nt, Artificial Sequence
  Description of Artificial Sequence: Synthetic oligonucleotide
uaugaacguccauggcgau

SEQ ID NO: 2204343 - RNA, 19 nt, Artificial Sequence
  Description of Artificial Sequence: Synthetic oligonucleotide
gucugccgaaaaguggcag

SEQ ID NO: 2204344 - RNA, 19 nt, Artificial Sequence
  Description of Artificial Sequence: Synthetic oligonucleotide
ugccgaaaaguggcagcag

SEQ ID NO: 2204345 - RNA, 19 nt, Artificial Sequence
  Description of Artificial Sequence: Synthetic oligonucleotide
gguuugcuggaucuccaac

SEQ ID NO: 2204346 - RNA, 19 nt, Artificial Sequence
  Description of Artificial Sequence: Synthetic oligonucleotide
ggugauggauguccccgag

SEQ ID NO: 2204347 - RNA, 19 nt, Artificial Sequence
  Description of Artificial Sequence: Synthetic oligonucleotide
agguugcacgucaccauag

SEQ ID NO: 2204348 - RNA, 19 nt, Artificial Sequence
  Description of Artificial Sequence: Synthetic oligonucleotide
cgagucugccgaaaagugg

SEQ ID NO: 2204349 - RNA, 19 nt, Artificial Sequence
  Description of Artificial Sequence: Synthetic oligonucleotide
gguugcacgucaccauagc

SEQ ID NO: 2204350 - RNA, 19 nt, Artificial Sequence
  Description of Artificial Sequence: Synthetic oligonucleotide
gcggugauggauguccccg

SEQ ID NO: 2204351 - RNA, 19 nt, Artificial Sequence
  Description of Artificial Sequence: Synthetic oligonucleotide
uccaucaggcggugaugga

SEQ ID NO: 2204352 - RNA, 19 nt, Artificial Sequence
  Description of Artificial Sequence: Synthetic oligonucleotide
uuccuccaucucagcgccg

SEQ ID NO: 2204353 - RNA, 19 nt, Artificial Sequence
  Description of Artificial Sequence: Synthetic oligonucleotide
caaagccagcguccucccg

SEQ ID NO: 2204354 - RNA, 19 nt, Artificial Sequence
  Description of Artificial Sequence: Synthetic oligonucleotide
ggcuacgccacagacuccc

SEQ ID NO: 2204355 - RNA, 19 nt, Artificial Sequence
  Description of Artificial Sequence: Synthetic oligonucleotide
guugcacgucaccauagcu

SEQ ID NO: 2204356 - RNA, 19 nt, Artificial Sequence
  Description of Artificial Sequence: Synthetic oligonucleotide
cauggcgaucuugcugucc

SEQ ID NO: 2204357 - RNA, 19 nt, Artificial Sequence
  Description of Artificial Sequence: Synthetic oligonucleotide
uugcgcgcgugcuccagcu

SEQ ID NO: 2204358 - RNA, 19 nt, Artificial Sequence
  Description of Artificial Sequence: Synthetic oligonucleotide
uccccaggcggauguugcc

SEQ ID NO: 2204359 - RNA, 19 nt, Artificial Sequence
  Description of Artificial Sequence: Synthetic oligonucleotide
caacuggcuuugcaguuca

SEQ ID NO: 2204360 - RNA, 19 nt, Artificial Sequence
  Description of Artificial Sequence: Synthetic oligonucleotide
cugguaacgggacuacucu

SEQ ID NO: 2204361 - RNA, 19 nt, Artificial Sequence
  Description of Artificial Sequence: Synthetic oligonucleotide
aggcggugauggauguccc

SEQ ID NO: 2204362 - RNA, 19 nt, Artificial Sequence
  Description of Artificial Sequence: Synthetic oligonucleotide
cucuggugugcggugugcc

SEQ ID NO: 2204363 - RNA, 19 nt, Artificial Sequence
  Description of Artificial Sequence: Synthetic oligonucleotide
gugaggccgccaaagccag

SEQ ID NO: 2204364 - RNA, 19 nt, Artificial Sequence
  Description of Artificial Sequence: Synthetic oligonucleotide
aguggacuccagaaccacu

SEQ ID NO: 2204365 - RNA, 19 nt, Artificial Sequence
  Description of Artificial Sequence: Synthetic oligonucleotide
gcgugaggccgccaaagcc

SEQ ID NO: 2204366 - RNA, 19 nt, Artificial Sequence
  Description of Artificial Sequence: Synthetic oligonucleotide
acgggacuacucuuauuua

SEQ ID NO: 2204367 - RNA, 19 nt, Artificial Sequence
  Description of Artificial Sequence: Synthetic oligonucleotide
guuugccuugcgcgcgugc

SEQ ID NO: 2204368 - RNA, 19 nt, Artificial Sequence
  Description of Artificial Sequence: Synthetic oligonucleotide
ccgagucugccgaaaagug

SEQ ID NO: 2204369 - RNA, 19 nt, Artificial Sequence
  Description of Artificial Sequence: Synthetic oligonucleotide
cagcguccgcugcaggugc

SEQ ID NO: 2204370 - RNA, 19 nt, Artificial Sequence
  Description of Artificial Sequence: Synthetic oligonucleotide
cagcaggucucuccgcgug

SEQ ID NO: 2204371 - RNA, 19 nt, Artificial Sequence
  Description of Artificial Sequence: Synthetic oligonucleotide
acuggcuuugcaguucauu

SEQ ID NO: 2204372 - RNA, 19 nt, Artificial Sequence
  Description of Artificial Sequence: Synthetic oligonucleotide
ucagcgccgucuuucucuu

SEQ ID NO: 2204373 - RNA, 19 nt, Artificial Sequence
  Description of Artificial Sequence: Synthetic oligonucleotide
guuguuuggucagcuuaga

SEQ ID NO: 2204374 - RNA, 19 nt, Artificial Sequence
  Description of Artificial Sequence: Synthetic oligonucleotide
agcaggucucuccgcguga

SEQ ID NO: 2204375 - RNA, 19 nt, Artificial Sequence
  Description of Artificial Sequence: Synthetic oligonucleotide
cagcagguugcacgucacc

SEQ ID NO: 2204376 - RNA, 19 nt, Artificial Sequence
  Description of Artificial Sequence: Synthetic oligonucleotide
uaacgggacuacucuuauu

SEQ ID NO: 2204377 - RNA, 19 nt, Artificial Sequence
  Description of Artificial Sequence: Synthetic oligonucleotide
cucagcgccgucuuucucu

SEQ ID NO: 2204378 - RNA, 19 nt, Artificial Sequence
  Description of Artificial Sequence: Synthetic oligonucleotide
uugccuugcgcgcgugcuc

SEQ ID NO: 2204379 - RNA, 19 nt, Artificial Sequence
  Description of Artificial Sequence: Synthetic oligonucleotide
caccuguaaggccgucagc

SEQ ID NO: 2204380 - RNA, 19 nt, Artificial Sequence
  Description of Artificial Sequence: Synthetic oligonucleotide
cugccgaaaaguggcagca

SEQ ID NO: 2204381 - RNA, 19 nt, Artificial Sequence
  Description of Artificial Sequence: Synthetic oligonucleotide
gccuguuugccuugcgcgc

SEQ ID NO: 2204382 - RNA, 19 nt, Artificial Sequence
  Description of Artificial Sequence: Synthetic oligonucleotide
gacaaggucucgcauccuu

SEQ ID NO: 2204383 - RNA, 19 nt, Artificial Sequence
  Description of Artificial Sequence: Synthetic oligonucleotide
ccgccuguuucuuguagcc

SEQ ID NO: 2204384 - RNA, 19 nt, Artificial Sequence
  Description of Artificial Sequence: Synthetic oligonucleotide
ucucuccgcgugaggccgc

SEQ ID NO: 2204385 - RNA, 19 nt, Artificial Sequence
  Description of Artificial Sequence: Synthetic oligonucleotide
cuggugugcggugugccuc

SEQ ID NO: 2204386 - RNA, 19 nt, Artificial Sequence
  Description of Artificial Sequence: Synthetic oligonucleotide
ggucucuccgcgugaggcc

SEQ ID NO: 2204387 - RNA, 19 nt, Artificial Sequence
  Description of Artificial Sequence: Synthetic oligonucleotide
gcugguaacgggacuacuc

SEQ ID NO: 2204388 - RNA, 19 nt, Artificial Sequence
  Description of Artificial Sequence: Synthetic oligonucleotide
gccgccuguuucuuguagc

SEQ ID NO: 2204389 - RNA, 19 nt, Artificial Sequence
  Description of Artificial Sequence: Synthetic oligonucleotide
guccugugucuuugccucc

SEQ ID NO: 2204390 - RNA, 19 nt, Artificial Sequence
  Description of Artificial Sequence: Synthetic oligonucleotide
agaaccacuucaagcucau

SEQ ID NO: 2204391 - RNA, 19 nt, Artificial Sequence
  Description of Artificial Sequence: Synthetic oligonucleotide
ggauuuugccuguuugccu

SEQ ID NO: 2204392 - RNA, 19 nt, Artificial Sequence
  Description of Artificial Sequence: Synthetic oligonucleotide
guccucccgagcucuggug

SEQ ID NO: 2204393 - RNA, 19 nt, Artificial Sequence
  Description of Artificial Sequence: Synthetic oligonucleotide
ggcggauguugccuuucag

SEQ ID NO: 2204394 - RNA, 19 nt, Artificial Sequence
  Description of Artificial Sequence: Synthetic oligonucleotide
ccuguuugccuugcgcgcg

SEQ ID NO: 2204395 - RNA, 19 nt, Artificial Sequence
  Description of Artificial Sequence: Synthetic oligonucleotide
ccauuccucgcugguaacg

SEQ ID NO: 2204396 - RNA, 19 nt, Artificial Sequence
  Description of Artificial Sequence: Synthetic oligonucleotide
ugaggccgccaaagccagc

SEQ ID NO: 2204397 - RNA, 19 nt, Artificial Sequence
  Description of Artificial Sequence: Synthetic oligonucleotide
guaacgggacuacucuuau

SEQ ID NO: 2204398 - RNA, 19 nt, Artificial Sequence
  Description of Artificial Sequence: Synthetic oligonucleotide
cuuuugcaacuggcuuugc

SEQ ID NO: 2204399 - RNA, 19 nt, Artificial Sequence
  Description of Artificial Sequence: Synthetic oligonucleotide
gcuuuuccugcagcguccg

SEQ ID NO: 2204400 - RNA, 19 nt, Artificial Sequence
  Description of Artificial Sequence: Synthetic oligonucleotide
ucgcugguaacgggacuac

SEQ ID NO: 2204401 - RNA, 19 nt, Artificial Sequence
  Description of Artificial Sequence: Synthetic oligonucleotide
uguuugccuugcgcgcgug

SEQ ID NO: 2204402 - RNA, 19 nt, Artificial Sequence
  Description of Artificial Sequence: Synthetic oligonucleotide
guggccuggacaaggucuc

SEQ ID NO: 2204403 - RNA, 19 nt, Artificial Sequence
  Description of Artificial Sequence: Synthetic oligonucleotide
gguaacgggacuacucuua

SEQ ID NO: 2204404 - RNA, 19 nt, Artificial Sequence
  Description of Artificial Sequence: Synthetic oligonucleotide
uaaggccgucagccuuccc

SEQ ID NO: 2204405 - RNA, 19 nt, Artificial Sequence
  Description of Artificial Sequence: Synthetic oligonucleotide
cucccgagcucuggugugc

SEQ ID NO: 2204406 - RNA, 19 nt, Artificial Sequence
  Description of Artificial Sequence: Synthetic oligonucleotide
uccgcgugaggccgccaaa

SEQ ID NO: 2204407 - RNA, 19 nt, Artificial Sequence
  Description of Artificial Sequence: Synthetic oligonucleotide
guaaggccgucagccuucc

SEQ ID NO: 2204408 - RNA, 19 nt, Artificial Sequence
  Description of Artificial Sequence: Synthetic oligonucleotide
ccagaaccacuucaagcuc

SEQ ID NO: 2204409 - RNA, 19 nt, Artificial Sequence
  Description of Artificial Sequence: Synthetic oligonucleotide
cuuugccuccaggagcaca

SEQ ID NO: 2204410 - RNA, 19 nt, Artificial Sequence
  Description of Artificial Sequence: Synthetic oligonucleotide
cugcaacgccuuguccagg

SEQ ID NO: 2204411 - RNA, 19 nt, Artificial Sequence
  Description of Artificial Sequence: Synthetic oligonucleotide
cagguugcacgucaccaua

SEQ ID NO: 2204412 - RNA, 19 nt, Artificial Sequence
  Description of Artificial Sequence: Synthetic oligonucleotide
ccugcaagcuccccagcug

SEQ ID NO: 2204413 - RNA, 19 nt, Artificial Sequence
  Description of Artificial Sequence: Synthetic oligonucleotide
agcguccgcugcaggugcc

SEQ ID NO: 2204414 - RNA, 19 nt, Artificial Sequence
  Description of Artificial Sequence: Synthetic oligonucleotide
ggcggugauggaugucccc

SEQ ID NO: 2204415 - RNA, 19 nt, Artificial Sequence
  Description of Artificial Sequence: Synthetic oligonucleotide
uucucggcaucgggccugc

SEQ ID NO: 2204416 - RNA, 19 nt, Artificial Sequence
  Description of Artificial Sequence: Synthetic oligonucleotide
ccuccccucuccagggugg

SEQ ID NO: 2204417 - RNA, 19 nt, Artificial Sequence
  Description of Artificial Sequence: Synthetic oligonucleotide
cacuuugaguucucggcau

SEQ ID NO: 2204418 - RNA, 19 nt, Artificial Sequence
  Description of Artificial Sequence: Synthetic oligonucleotide
acgccuuguccagggccac

SEQ ID NO: 2204419 - RNA, 19 nt, Artificial Sequence
  Description of Artificial Sequence: Synthetic oligonucleotide
cucgcugguaacgggacua

SEQ ID NO: 2204420 - RNA, 19 nt, Artificial Sequence
  Description of Artificial Sequence: Synthetic oligonucleotide
cucgcauccuuugguucuc

SEQ ID NO: 2204421 - RNA, 19 nt, Artificial Sequence
  Description of Artificial Sequence: Synthetic oligonucleotide
cugcagcguccgcugcagg

SEQ ID NO: 2204422 - RNA, 19 nt, Artificial Sequence
  Description of Artificial Sequence: Synthetic oligonucleotide
gagggcuacgccacagacu

SEQ ID NO: 2204423 - RNA, 19 nt, Artificial Sequence
  Description of Artificial Sequence: Synthetic oligonucleotide
ggauguccccgaguuucag

SEQ ID NO: 2204424 - RNA, 19 nt, Artificial Sequence
  Description of Artificial Sequence: Synthetic oligonucleotide
gccgucagccuucccagca

SEQ ID NO: 2204425 - RNA, 19 nt, Artificial Sequence
  Description of Artificial Sequence: Synthetic oligonucleotide
ccucagaugaagagggcua

SEQ ID NO: 2204426 - RNA, 19 nt, Artificial Sequence
  Description of Artificial Sequence: Synthetic oligonucleotide
cucggcaucgggccugcaa

SEQ ID NO: 2204427 - RNA, 19 nt, Artificial Sequence
  Description of Artificial Sequence: Synthetic oligonucleotide
cuuccauuccucgcuggua

SEQ ID NO: 2204428 - RNA, 19 nt, Artificial Sequence
  Description of Artificial Sequence: Synthetic oligonucleotide
gcaggucucuccgcgugag

SEQ ID NO: 2204429 - RNA, 19 nt, Artificial Sequence
  Description of Artificial Sequence: Synthetic oligonucleotide
cagggccgccuguuucuug

SEQ ID NO: 2204430 - RNA, 19 nt, Artificial Sequence
  Description of Artificial Sequence: Synthetic oligonucleotide
ugcgcgcgugcuccagcuc

SEQ ID NO: 2204431 - RNA, 19 nt, Artificial Sequence
  Description of Artificial Sequence: Synthetic oligonucleotide
ccuuuacccucuccuccag

SEQ ID NO: 2204432 - RNA, 19 nt, Artificial Sequence
  Description of Artificial Sequence: Synthetic oligonucleotide
gugcuccuggugggcaucc

SEQ ID NO: 2204433 - RNA, 19 nt, Artificial Sequence
  Description of Artificial Sequence: Synthetic oligonucleotide
aggguggccuggacaaggu

SEQ ID NO: 2204434 - RNA, 19 nt, Artificial Sequence
  Description of Artificial Sequence: Synthetic oligonucleotide
gugugcggugugccucccc

SEQ ID NO: 2204435 - RNA, 19 nt, Artificial Sequence
  Description of Artificial Sequence: Synthetic oligonucleotide
gcuuugcaguucauugaca

SEQ ID NO: 2204436 - RNA, 19 nt, Artificial Sequence
  Description of Artificial Sequence: Synthetic oligonucleotide
aggccgccaaagccagcgu

SEQ ID NO: 2204437 - RNA, 19 nt, Artificial Sequence
  Description of Artificial Sequence: Synthetic oligonucleotide
ggccuggacaaggucucgc

SEQ ID NO: 2204438 - RNA, 19 nt, Artificial Sequence
  Description of Artificial Sequence: Synthetic oligonucleotide
cuccccucuccaggguggc

SEQ ID NO: 2204439 - RNA, 19 nt, Artificial Sequence
  Description of Artificial Sequence: Synthetic oligonucleotide
gccuccccucuccagggug

SEQ ID NO: 2204440 - RNA, 19 nt, Artificial Sequence
  Description of Artificial Sequence: Synthetic oligonucleotide
gcaacgccuuguccagggc

SEQ ID NO: 2204441 - RNA, 19 nt, Artificial Sequence
  Description of Artificial Sequence: Synthetic oligonucleotide
ccagcaguuccuccaucuc

SEQ ID NO: 2204442 - RNA, 19 nt, Artificial Sequence
  Description of Artificial Sequence: Synthetic oligonucleotide
ccccgagucugccgaaaag

SEQ ID NO: 2204443 - RNA, 19 nt, Artificial Sequence
  Description of Artificial Sequence: Synthetic oligonucleotide
caaguuguuuggucagcuu

SEQ ID NO: 2204444 - RNA, 19 nt, Artificial Sequence
  Description of Artificial Sequence: Synthetic oligonucleotide
gcgcgcgugcuccagcuca

SEQ ID NO: 2204445 - RNA, 19 nt, Artificial Sequence
  Description of Artificial Sequence: Synthetic oligonucleotide
ucagggccgccuguuucuu

SEQ ID NO: 2204446 - RNA, 19 nt, Artificial Sequence
  Description of Artificial Sequence: Synthetic oligonucleotide
cucuccgcgugaggccgcc

SEQ ID NO: 2204447 - RNA, 19 nt, Artificial Sequence
  Description of Artificial Sequence: Synthetic oligonucleotide
ucgggccugcaagcucccc

SEQ ID NO: 2204448 - RNA, 19 nt, Artificial Sequence
  Description of Artificial Sequence: Synthetic oligonucleotide
gugcggugugccuccccuc

SEQ ID NO: 2204449 - RNA, 19 nt, Artificial Sequence
  Description of Artificial Sequence: Synthetic oligonucleotide
gcgugcuccagcucagucu

SEQ ID NO: 2204450 - RNA, 19 nt, Artificial Sequence
  Description of Artificial Sequence: Synthetic oligonucleotide
ccucccgagcucuggugug

SEQ ID NO: 2204451 - RNA, 19 nt, Artificial Sequence
  Description of Artificial Sequence: Synthetic oligonucleotide
guuucagggccgccuguuu

SEQ ID NO: 2204452 - RNA, 19 nt, Artificial Sequence
  Description of Artificial Sequence: Synthetic oligonucleotide
cuccgcgugaggccgccaa

SEQ ID NO: 2204453 - RNA, 19 nt, Artificial Sequence
  Description of Artificial Sequence: Synthetic oligonucleotide
ggucucgcauccuuugguu

SEQ ID NO: 2204454 - RNA, 19 nt, Artificial Sequence
  Description of Artificial Sequence: Synthetic oligonucleotide
ggccgucagccuucccagc

SEQ ID NO: 2204455 - RNA, 19 nt, Artificial Sequence
  Description of Artificial Sequence: Synthetic oligonucleotide
ggagcacaaguuguuuggu

SEQ ID NO: 2204456 - RNA, 19 nt, Artificial Sequence
  Description of Artificial Sequence: Synthetic oligonucleotide
cuguaucagcagcuuguuu

SEQ ID NO: 2204457 - RNA, 19 nt, Artificial Sequence
  Description of Artificial Sequence: Synthetic oligonucleotide
gcguccucccgagcucugg

SEQ ID NO: 2204458 - RNA, 19 nt, Artificial Sequence
  Description of Artificial Sequence: Synthetic oligonucleotide
ccgcgugaggccgccaaag

SEQ ID NO: 2204459 - RNA, 19 nt, Artificial Sequence
  Description of Artificial Sequence: Synthetic oligonucleotide
cgcgugaggccgccaaagc

SEQ ID NO: 2204460 - RNA, 19 nt, Artificial Sequence
  Description of Artificial Sequence: Synthetic oligonucleotide
ccagcguccucccgagcuc

SEQ ID NO: 2204461 - RNA, 19 nt, Artificial Sequence
  Description of Artificial Sequence: Synthetic oligonucleotide
cggugugccuccccucucc

SEQ ID NO: 2204462 - RNA, 19 nt, Artificial Sequence
  Description of Artificial Sequence: Synthetic oligonucleotide
cagcuuccccaggcggaug

SEQ ID NO: 2204463 - RNA, 19 nt, Artificial Sequence
  Description of Artificial Sequence: Synthetic oligonucleotide
ucuccgcgugaggccgcca

SEQ ID NO: 2204464 - RNA, 19 nt, Artificial Sequence
  Description of Artificial Sequence: Synthetic oligonucleotide
cccgagcucuggugugcgg

SEQ ID NO: 2204465 - RNA, 19 nt, Artificial Sequence
  Description of Artificial Sequence: Synthetic oligonucleotide
cuguuugccuugcgcgcgu

SEQ ID NO: 2204466 - RNA, 19 nt, Artificial Sequence
  Description of Artificial Sequence: Synthetic oligonucleotide
gcuacgccacagacucccc

SEQ ID NO: 2204467 - RNA, 19 nt, Artificial Sequence
  Description of Artificial Sequence: Synthetic oligonucleotide
agcguccucccgagcucug

SEQ ID NO: 2204468 - RNA, 19 nt, Artificial Sequence
  Description of Artificial Sequence: Synthetic oligonucleotide
cagcgccgucuuucucuuc

SEQ ID NO: 2204469 - RNA, 19 nt, Artificial Sequence
  Description of Artificial Sequence: Synthetic oligonucleotide
cccgagucugccgaaaagu

SEQ ID NO: 2204470 - RNA, 19 nt, Artificial Sequence
  Description of Artificial Sequence: Synthetic oligonucleotide
ggugugcggugugccuccc

SEQ ID NO: 2204471 - RNA, 19 nt, Artificial Sequence
  Description of Artificial Sequence: Synthetic oligonucleotide
gccuccaggagcacaaguu

SEQ ID NO: 2204472 - RNA, 19 nt, Artificial Sequence
  Description of Artificial Sequence: Synthetic oligonucleotide
ucucggcaucgggccugca

SEQ ID NO: 2204473 - RNA, 19 nt, Artificial Sequence
  Description of Artificial Sequence: Synthetic oligonucleotide
cugcaccuguaaggccguc

SEQ ID NO: 2204474 - RNA, 19 nt, Artificial Sequence
  Description of Artificial Sequence: Synthetic oligonucleotide
ggcaucccuggcuuugguu

SEQ ID NO: 2204475 - RNA, 19 nt, Artificial Sequence
  Description of Artificial Sequence: Synthetic oligonucleotide
gcagcaggucucuccgcgu

SEQ ID NO: 2204476 - RNA, 19 nt, Artificial Sequence
  Description of Artificial Sequence: Synthetic oligonucleotide
cgcgugcuccagcucaguc

SEQ ID NO: 2204477 - RNA, 19 nt, Artificial Sequence
  Description of Artificial Sequence: Synthetic oligonucleotide
ccuugcgcgcgugcuccag

SEQ ID NO: 2204478 - RNA, 19 nt, Artificial Sequence
  Description of Artificial Sequence: Synthetic oligonucleotide
gcaggugccucaucuccuu

SEQ ID NO: 2204479 - RNA, 19 nt, Artificial Sequence
  Description of Artificial Sequence: Synthetic oligonucleotide
gggcuacgccacagacucc

SEQ ID NO: 2204480 - RNA, 19 nt, Artificial Sequence
  Description of Artificial Sequence: Synthetic oligonucleotide
gcggugugccuccccucuc

SEQ ID NO: 2204481 - RNA, 19 nt, Artificial Sequence
  Description of Artificial Sequence: Synthetic oligonucleotide
cagcguccucccgagcucu

SEQ ID NO: 2204482 - RNA, 19 nt, Artificial Sequence
  Description of Artificial Sequence: Synthetic oligonucleotide
ccugcuuuuccugcagcgu

SEQ ID NO: 2204483 - RNA, 19 nt, Artificial Sequence
  Description of Artificial Sequence: Synthetic oligonucleotide
ccccgaguuucagggccgc

SEQ ID NO: 2204484 - RNA, 19 nt, Artificial Sequence
  Description of Artificial Sequence: Synthetic oligonucleotide
ccaucaggcggugauggau

SEQ ID NO: 2204485 - RNA, 19 nt, Artificial Sequence
  Description of Artificial Sequence: Synthetic oligonucleotide
cccgaguuucagggccgcc

SEQ ID NO: 2204486 - RNA, 19 nt, Artificial Sequence
  Description of Artificial Sequence: Synthetic oligonucleotide
ccuccaucucagcgccguc

SEQ ID NO: 2204487 - RNA, 19 nt, Artificial Sequence
  Description of Artificial Sequence: Synthetic oligonucleotide
ccagagcucuguuccugcu

SEQ ID NO: 2204488 - RNA, 19 nt, Artificial Sequence
  Description of Artificial Sequence: Synthetic oligonucleotide
ccgaguuucagggccgccu

SEQ ID NO: 2204489 - RNA, 19 nt, Artificial Sequence
  Description of Artificial Sequence: Synthetic oligonucleotide
gccaagcagcaggucucuc

SEQ ID NO: 2204490 - RNA, 19 nt, Artificial Sequence
  Description of Artificial Sequence: Synthetic oligonucleotide
ggccaagcagcaggucucu

SEQ ID NO: 2204491 - RNA, 19 nt, Artificial Sequence
  Description of Artificial Sequence: Synthetic oligonucleotide
cuugagccugaagcugcuu

SEQ ID NO: 2204492 - RNA, 19 nt, Artificial Sequence
  Description of Artificial Sequence: Synthetic oligonucleotide
gggcaucccuggcuuuggu

SEQ ID NO: 2204493 - RNA, 19 nt, Artificial Sequence
  Description of Artificial Sequence: Synthetic oligonucleotide
gccuugcgcgcgugcucca

SEQ ID NO: 2204494 - RNA, 19 nt, Artificial Sequence
  Description of Artificial Sequence: Synthetic oligonucleotide
ggacaaggucucgcauccu

SEQ ID NO: 2204495 - RNA, 19 nt, Artificial Sequence
  Description of Artificial Sequence: Synthetic oligonucleotide
ccgagcucuggugugcggu

SEQ ID NO: 2204496 - RNA, 19 nt, Artificial Sequence
  Description of Artificial Sequence: Synthetic oligonucleotide
gggccgccuguuucuugua

SEQ ID NO: 2204497 - RNA, 19 nt, Artificial Sequence
  Description of Artificial Sequence: Synthetic oligonucleotide
ccaggagcacaaguuguuu

SEQ ID NO: 2204498 - RNA, 19 nt, Artificial Sequence
  Description of Artificial Sequence: Synthetic oligonucleotide
ccucgcugguaacgggacu

SEQ ID NO: 2204499 - RNA, 19 nt, Artificial Sequence
  Description of Artificial Sequence: Synthetic oligonucleotide
cgucagccuucccagcagu

SEQ ID NO: 2204500 - RNA, 19 nt, Artificial Sequence
  Description of Artificial Sequence: Synthetic oligonucleotide
cguccgcugcaggugccuc

SEQ ID NO: 2204501 - RNA, 19 nt, Artificial Sequence
  Description of Artificial Sequence: Synthetic oligonucleotide
ccccaggcggauguugccu

SEQ ID NO: 2204502 - RNA, 19 nt, Artificial Sequence
  Description of Artificial Sequence: Synthetic oligonucleotide
cguccucccgagcucuggu

SEQ ID NO: 2204503 - RNA, 19 nt, Artificial Sequence
  Description of Artificial Sequence: Synthetic oligonucleotide
gcgccgucuuucucuucuu

SEQ ID NO: 2204504 - RNA, 19 nt, Artificial Sequence
  Description of Artificial Sequence: Synthetic oligonucleotide
ccaucucagcgccgucuuu

SEQ ID NO: 2204505 - RNA, 19 nt, Artificial Sequence
  Description of Artificial Sequence: Synthetic oligonucleotide
uuuaauaugagccagcccc

SEQ ID NO: 2204506 - RNA, 19 nt, Artificial Sequence
  Description of Artificial Sequence: Synthetic oligonucleotide
ugcuccaacacccagagcg

SEQ ID NO: 2204507 - RNA, 19 nt, Artificial Sequence
  Description of Artificial Sequence: Synthetic oligonucleotide
gauagucucauccacaggg

SEQ ID NO: 2204508 - RNA, 19 nt, Artificial Sequence
  Description of Artificial Sequence: Synthetic oligonucleotide
auggucaagacuugucucc

SEQ ID NO: 2204509 - RNA, 19 nt, Artificial Sequence
  Description of Artificial Sequence: Synthetic oligonucleotide
aagggauagucucauccac

SEQ ID NO: 2204510 - RNA, 19 nt, Artificial Sequence
  Description of Artificial Sequence: Synthetic oligonucleotide
aacgcagcucaauuugccc

SEQ ID NO: 2204511 - RNA, 19 nt, Artificial Sequence
  Description of Artificial Sequence: Synthetic oligonucleotide
aaauaaccaccuuuaauau

SEQ ID NO: 2204512 - RNA, 19 nt, Artificial Sequence
  Description of Artificial Sequence: Synthetic oligonucleotide
ucggcuguacuucucaagg

SEQ ID NO: 2204513 - RNA, 19 nt, Artificial Sequence
  Description of Artificial Sequence: Synthetic oligonucleotide
aagagcaacccagaggcac

SEQ ID NO: 2204514 - RNA, 19 nt, Artificial Sequence
  Description of Artificial Sequence: Synthetic oligonucleotide
auuuugguaagugcgaguc

SEQ ID NO: 2204515 - RNA, 19 nt, Artificial Sequence
  Description of Artificial Sequence: Synthetic oligonucleotide
agacauuuugguaagugcg

SEQ ID NO: 2204516 - RNA, 19 nt, Artificial Sequence
  Description of Artificial Sequence: Synthetic oligonucleotide
acguugcucagguagaagg

SEQ ID NO: 2204517 - RNA, 19 nt, Artificial Sequence
  Description of Artificial Sequence: Synthetic oligonucleotide
agugucuucaguccuucac

SEQ ID NO: 2204518 - RNA, 19 nt, Artificial Sequence
  Description of Artificial Sequence: Synthetic oligonucleotide
auaaccaccuuuaauauga

SEQ ID NO: 2204519 - RNA, 19 nt, Artificial Sequence
  Description of Artificial Sequence: Synthetic oligonucleotide
aaagggauagucucaucca

SEQ ID NO: 2204520 - RNA, 19 nt, Artificial Sequence
  Description of Artificial Sequence: Synthetic oligonucleotide
uagacauuuugguaagugc

SEQ ID NO: 2204521 - RNA, 19 nt, Artificial Sequence
  Description of Artificial Sequence: Synthetic oligonucleotide
aaagaggcccugugcagac

SEQ ID NO: 2204522 - RNA, 19 nt, Artificial Sequence
  Description of Artificial Sequence: Synthetic oligonucleotide
aacauuggcacccgggcca

SEQ ID NO: 2204523 - RNA, 19 nt, Artificial Sequence
  Description of Artificial Sequence: Synthetic oligonucleotide
aaggugucguccauggccc

SEQ ID NO: 2204524 - RNA, 19 nt, Artificial Sequence
  Description of Artificial Sequence: Synthetic oligonucleotide
aauaugagccagccccuuc

SEQ ID NO: 2204525 - RNA, 19 nt, Artificial Sequence
  Description of Artificial Sequence: Synthetic oligonucleotide
gauaguccgcguuaguggc

SEQ ID NO: 2204526 - RNA, 19 nt, Artificial Sequence
  Description of Artificial Sequence: Synthetic oligonucleotide
ucaagguuguuccaggcau

SEQ ID NO: 2204527 - RNA, 19 nt, Artificial Sequence
  Description of Artificial Sequence: Synthetic oligonucleotide
aguggccgcggucaaagcc

SEQ ID NO: 2204528 - RNA, 19 nt, Artificial Sequence
  Description of Artificial Sequence: Synthetic oligonucleotide
aauuugcccacugguggcc

SEQ ID NO: 2204529 - RNA, 19 nt, Artificial Sequence
  Description of Artificial Sequence: Synthetic oligonucleotide
agcacguaggacucgcggc

SEQ ID NO: 2204530 - RNA, 19 nt, Artificial Sequence
  Description of Artificial Sequence: Synthetic oligonucleotide
ucgaucggcaccaggaagc

SEQ ID NO: 2204531 - RNA, 19 nt, Artificial Sequence
  Description of Artificial Sequence: Synthetic oligonucleotide
acauagacauuuugguaag

SEQ ID NO: 2204532 - RNA, 19 nt, Artificial Sequence
  Description of Artificial Sequence: Synthetic oligonucleotide
ugagguuuccagcucgagc

SEQ ID NO: 2204533 - RNA, 19 nt, Artificial Sequence
  Description of Artificial Sequence: Synthetic oligonucleotide
agauggucaagacuugucu

SEQ ID NO: 2204534 - RNA, 19 nt, Artificial Sequence
  Description of Artificial Sequence: Synthetic oligonucleotide
accuugaagaagugugugg

SEQ ID NO: 2204535 - RNA, 19 nt, Artificial Sequence
  Description of Artificial Sequence: Synthetic oligonucleotide
uuaauaugagccagccccu

SEQ ID NO: 2204536 - RNA, 19 nt, Artificial Sequence
  Description of Artificial Sequence: Synthetic oligonucleotide
auaggacuucccaucagcc

SEQ ID NO: 2204537 - RNA, 19 nt, Artificial Sequence
  Description of Artificial Sequence: Synthetic oligonucleotide
uguggggccacguugcuca

SEQ ID NO: 2204538 - RNA, 19 nt, Artificial Sequence
  Description of Artificial Sequence: Synthetic oligonucleotide
aaagccgcugccgcgauag

SEQ ID NO: 2204539 - RNA, 19 nt, Artificial Sequence
  Description of Artificial Sequence: Synthetic oligonucleotide
auaaccugguacuucacau

SEQ ID NO: 2204540 - RNA, 19 nt, Artificial Sequence
  Description of Artificial Sequence: Synthetic oligonucleotide
aggaacgcagcucaauuug

SEQ ID NO: 2204541 - RNA, 19 nt, Artificial Sequence
  Description of Artificial Sequence: Synthetic oligonucleotide
ugcagacauagacauuuug

SEQ ID NO: 2204542 - RNA, 19 nt, Artificial Sequence
  Description of Artificial Sequence: Synthetic oligonucleotide
uugaagaagugugugggca

SEQ ID NO: 2204543 - RNA, 19 nt, Artificial Sequence
  Description of Artificial Sequence: Synthetic oligonucleotide
uacuuggccagcucgccgg

SEQ ID NO: 2204544 - RNA, 19 nt, Artificial Sequence
  Description of Artificial Sequence: Synthetic oligonucleotide
ugcgagucaagcuucggcu

SEQ ID NO: 2204545 - RNA, 19 nt, Artificial Sequence
  Description of Artificial Sequence: Synthetic oligonucleotide
uuugguaagugcgagucaa

SEQ ID NO: 2204546 - RNA, 19 nt, Artificial Sequence
  Description of Artificial Sequence: Synthetic oligonucleotide
auagacauuuugguaagug

SEQ ID NO: 2204547 - RNA, 19 nt, Artificial Sequence
  Description of Artificial Sequence: Synthetic oligonucleotide
aucacauaggaacgcagcu

SEQ ID NO: 2204548 - RNA, 19 nt, Artificial Sequence
  Description of Artificial Sequence: Synthetic oligonucleotide
uccagcucgagccaggaua

SEQ ID NO: 2204549 - RNA, 19 nt, Artificial Sequence
  Description of Artificial Sequence: Synthetic oligonucleotide
cacagagucguccucucgg

SEQ ID NO: 2204550 - RNA, 19 nt, Artificial Sequence
  Description of Artificial Sequence: Synthetic oligonucleotide
agagucguccucucggaag

SEQ ID NO: 2204551 - RNA, 19 nt, Artificial Sequence
  Description of Artificial Sequence: Synthetic oligonucleotide
aagcgcuccaaagggauag

SEQ ID NO: 2204552 - RNA, 19 nt, Artificial Sequence
  Description of Artificial Sequence: Synthetic oligonucleotide
cuuuaauaugagccagccc

SEQ ID NO: 2204553 - RNA, 19 nt, Artificial Sequence
  Description of Artificial Sequence: Synthetic oligonucleotide
gcagacauagacauuuugg

SEQ ID NO: 2204554 - RNA, 19 nt, Artificial Sequence
  Description of Artificial Sequence: Synthetic oligonucleotide
cuugaagaagugugugggc

SEQ ID NO: 2204555 - RNA, 19 nt, Artificial Sequence
  Description of Artificial Sequence: Synthetic oligonucleotide
agcucaauuugcccacugg

SEQ ID NO: 2204556 - RNA, 19 nt, Artificial Sequence
  Description of Artificial Sequence: Synthetic oligonucleotide
acugguggccuccaggaug

SEQ ID NO: 2204557 - RNA, 19 nt, Artificial Sequence
  Description of Artificial Sequence: Synthetic oligonucleotide
acgggcaacauuggcaccc

SEQ ID NO: 2204558 - RNA, 19 nt, Artificial Sequence
  Description of Artificial Sequence: Synthetic oligonucleotide
uucugguugagauguggca

SEQ ID NO: 2204559 - RNA, 19 nt, Artificial Sequence
  Description of Artificial Sequence: Synthetic oligonucleotide
uaagugcgagucaagcuuc

SEQ ID NO: 2204560 - RNA, 19 nt, Artificial Sequence
  Description of Artificial Sequence: Synthetic oligonucleotide
uuuugguaagugcgaguca

SEQ ID NO: 2204561 - RNA, 19 nt, Artificial Sequence
  Description of Artificial Sequence: Synthetic oligonucleotide
guuaguggcacggugguac

SEQ ID NO: 2204562 - RNA, 19 nt, Artificial Sequence
  Description of Artificial Sequence: Synthetic oligonucleotide
agccccuucucccaguguc

SEQ ID NO: 2204563 - RNA, 19 nt, Artificial Sequence
  Description of Artificial Sequence: Synthetic oligonucleotide
uacgcaugcacagagucgu

SEQ ID NO: 2204564 - RNA, 19 nt, Artificial Sequence
  Description of Artificial Sequence: Synthetic oligonucleotide
gugucuucaguccuucacc

SEQ ID NO: 2204565 - RNA, 19 nt, Artificial Sequence
  Description of Artificial Sequence: Synthetic oligonucleotide
ucaagacuugucuccaaaa

SEQ ID NO: 2204566 - RNA, 19 nt, Artificial Sequence
  Description of Artificial Sequence: Synthetic oligonucleotide
caauuugcccacugguggc

SEQ ID NO: 2204567 - RNA, 19 nt, Artificial Sequence
  Description of Artificial Sequence: Synthetic oligonucleotide
auaugagccagccccuucu

SEQ ID NO: 2204568 - RNA, 19 nt, Artificial Sequence
  Description of Artificial Sequence: Synthetic oligonucleotide
agacauagacauuuuggua

SEQ ID NO: 2204569 - RNA, 19 nt, Artificial Sequence
  Description of Artificial Sequence: Synthetic oligonucleotide
guuguuccaggcauucugg

SEQ ID NO: 2204570 - RNA, 19 nt, Artificial Sequence
  Description of Artificial Sequence: Synthetic oligonucleotide
acauuuugguaagugcgag

SEQ ID NO: 2204571 - RNA, 19 nt, Artificial Sequence
  Description of Artificial Sequence: Synthetic oligonucleotide
acacccagagcgcaccgcg

SEQ ID NO: 2204572 - RNA, 19 nt, Artificial Sequence
  Description of Artificial Sequence: Synthetic oligonucleotide
uucggcuguacuucucaag

SEQ ID NO: 2204573 - RNA, 19 nt, Artificial Sequence
  Description of Artificial Sequence: Synthetic oligonucleotide
uuaguggcacggugguacg

SEQ ID NO: 2204574 - RNA, 19 nt, Artificial Sequence
  Description of Artificial Sequence: Synthetic oligonucleotide
ucaagcuucggcuguacuu

SEQ ID NO: 2204575 - RNA, 19 nt, Artificial Sequence
  Description of Artificial Sequence: Synthetic oligonucleotide
accuuuaauaugagccagc

SEQ ID NO: 2204576 - RNA, 19 nt, Artificial Sequence
  Description of Artificial Sequence: Synthetic oligonucleotide
ggcacaaagagcaacccag

SEQ ID NO: 2204577 - RNA, 19 nt, Artificial Sequence
  Description of Artificial Sequence: Synthetic oligonucleotide
gugguacgcaugcacagag

SEQ ID NO: 2204578 - RNA, 19 nt, Artificial Sequence
  Description of Artificial Sequence: Synthetic oligonucleotide
cacauaggaacgcagcuca

SEQ ID NO: 2204579 - RNA, 19 nt, Artificial Sequence
  Description of Artificial Sequence: Synthetic oligonucleotide
auaggaacgcagcucaauu

SEQ ID NO: 2204580 - RNA, 19 nt, Artificial Sequence
  Description of Artificial Sequence: Synthetic oligonucleotide
aaguggccgcggucaaagc

SEQ ID NO: 2204581 - RNA, 19 nt, Artificial Sequence
  Description of Artificial Sequence: Synthetic oligonucleotide
uaaccaccuuuaauaugag

SEQ ID NO: 2204582 - RNA, 19 nt, Artificial Sequence
  Description of Artificial Sequence: Synthetic oligonucleotide
ucgagccaggauauugggc

SEQ ID NO: 2204583 - RNA, 19 nt, Artificial Sequence
  Description of Artificial Sequence: Synthetic oligonucleotide
gggauagucucauccacag

SEQ ID NO: 2204584 - RNA, 19 nt, Artificial Sequence
  Description of Artificial Sequence: Synthetic oligonucleotide
aacacccagagcgcaccgc

SEQ ID NO: 2204585 - RNA, 19 nt, Artificial Sequence
  Description of Artificial Sequence: Synthetic oligonucleotide
agaggcacgcucaaugcuc

SEQ ID NO: 2204586 - RNA, 19 nt, Artificial Sequence
  Description of Artificial Sequence: Synthetic oligonucleotide
cucccagugucuucagucc

SEQ ID NO: 2204587 - RNA, 19 nt, Artificial Sequence
  Description of Artificial Sequence: Synthetic oligonucleotide
uugagauguggcaccugug

SEQ ID NO: 2204588 - RNA, 19 nt, Artificial Sequence
  Description of Artificial Sequence: Synthetic oligonucleotide
caacauuggcacccgggcc

SEQ ID NO: 2204589 - RNA, 19 nt, Artificial Sequence
  Description of Artificial Sequence: Synthetic oligonucleotide
caccuuuaauaugagccag

SEQ ID NO: 2204590 - RNA, 19 nt, Artificial Sequence
  Description of Artificial Sequence: Synthetic oligonucleotide
cauugggcaucacauagga

SEQ ID NO: 2204591 - RNA, 19 nt, Artificial Sequence
  Description of Artificial Sequence: Synthetic oligonucleotide
ucguccauggcccgcuggc

SEQ ID NO: 2204592 - RNA, 19 nt, Artificial Sequence
  Description of Artificial Sequence: Synthetic oligonucleotide
ucagcacguaggacucgcg

SEQ ID NO: 2204593 - RNA, 19 nt, Artificial Sequence
  Description of Artificial Sequence: Synthetic oligonucleotide
gaacgcagcucaauuugcc

SEQ ID NO: 2204594 - RNA, 19 nt, Artificial Sequence
  Description of Artificial Sequence: Synthetic oligonucleotide
cgcucaaugcucucgaucg

SEQ ID NO: 2204595 - RNA, 19 nt, Artificial Sequence
  Description of Artificial Sequence: Synthetic oligonucleotide
acauaggacuucccaucag

SEQ ID NO: 2204596 - RNA, 19 nt, Artificial Sequence
  Description of Artificial Sequence: Synthetic oligonucleotide
cuucacccucacuugcugc

SEQ ID NO: 2204597 - RNA, 19 nt, Artificial Sequence
  Description of Artificial Sequence: Synthetic oligonucleotide
caagcuucggcuguacuuc

SEQ ID NO: 2204598 - RNA, 19 nt, Artificial Sequence
  Description of Artificial Sequence: Synthetic oligonucleotide
ggccacguugcucagguag

SEQ ID NO: 2204599 - RNA, 19 nt, Artificial Sequence
  Description of Artificial Sequence: Synthetic oligonucleotide
guacuuggccagcucgccg

SEQ ID NO: 2204600 - RNA, 19 nt, Artificial Sequence
  Description of Artificial Sequence: Synthetic oligonucleotide
cacggagccucuccggucg

SEQ ID NO: 2204601 - RNA, 19 nt, Artificial Sequence
  Description of Artificial Sequence: Synthetic oligonucleotide
ucacauaggaacgcagcuc

SEQ ID NO: 2204602 - RNA, 19 nt, Artificial Sequence
  Description of Artificial Sequence: Synthetic oligonucleotide
cucgaucggcaccaggaag

SEQ ID NO: 2204603 - RNA, 19 nt, Artificial Sequence
  Description of Artificial Sequence: Synthetic oligonucleotide
guacgcaugcacagagucg

SEQ ID NO: 2204604 - RNA, 19 nt, Artificial Sequence
  Description of Artificial Sequence: Synthetic oligonucleotide
gguacgcaugcacagaguc

SEQ ID NO: 2204605 - RNA, 19 nt, Artificial Sequence
  Description of Artificial Sequence: Synthetic oligonucleotide
ucguccucucggaagucgc

SEQ ID NO: 2204606 - RNA, 19 nt, Artificial Sequence
  Description of Artificial Sequence: Synthetic oligonucleotide
cagacauagacauuuuggu

SEQ ID NO: 2204607 - RNA, 19 nt, Artificial Sequence
  Description of Artificial Sequence: Synthetic oligonucleotide
acccagagcgcaccgcgcg

SEQ ID NO: 2204608 - RNA, 19 nt, Artificial Sequence
  Description of Artificial Sequence: Synthetic oligonucleotide
accuguggggccacguugc

SEQ ID NO: 2204609 - RNA, 19 nt, Artificial Sequence
  Description of Artificial Sequence: Synthetic oligonucleotide
gcaacauuggcacccgggc

SEQ ID NO: 2204610 - RNA, 19 nt, Artificial Sequence
  Description of Artificial Sequence: Synthetic oligonucleotide
agagcaacccagaggcacg

SEQ ID NO: 2204611 - RNA, 19 nt, Artificial Sequence
  Description of Artificial Sequence: Synthetic oligonucleotide
caaguggccgcggucaaag

SEQ ID NO: 2204612 - RNA, 19 nt, Artificial Sequence
  Description of Artificial Sequence: Synthetic oligonucleotide
aucggcaccaggaagcgcu

SEQ ID NO: 2204613 - RNA, 19 nt, Artificial Sequence
  Description of Artificial Sequence: Synthetic oligonucleotide
aagcuucggcuguacuucu

SEQ ID NO: 2204614 - RNA, 19 nt, Artificial Sequence
  Description of Artificial Sequence: Synthetic oligonucleotide
gugcgagucaagcuucggc

SEQ ID NO: 2204615 - RNA, 19 nt, Artificial Sequence
  Description of Artificial Sequence: Synthetic oligonucleotide
ucucgaucggcaccaggaa

SEQ ID NO: 2204616 - RNA, 19 nt, Artificial Sequence
  Description of Artificial Sequence: Synthetic oligonucleotide
ucgccacggagccucuccg

SEQ ID NO: 2204617 - RNA, 19 nt, Artificial Sequence
  Description of Artificial Sequence: Synthetic oligonucleotide
guggccgcggucaaagccg

SEQ ID NO: 2204618 - RNA, 19 nt, Artificial Sequence
  Description of Artificial Sequence: Synthetic oligonucleotide
uccaaagggauagucucau

SEQ ID NO: 2204619 - RNA, 19 nt, Artificial Sequence
  Description of Artificial Sequence: Synthetic oligonucleotide
guaagugcgagucaagcuu

SEQ ID NO: 2204620 - RNA, 19 nt, Artificial Sequence
  Description of Artificial Sequence: Synthetic oligonucleotide
aagugcgagucaagcuucg

SEQ ID NO: 2204621 - RNA, 19 nt, Artificial Sequence
  Description of Artificial Sequence: Synthetic oligonucleotide
gaagucgcaggcgcugcgg

SEQ ID NO: 2204622 - RNA, 19 nt, Artificial Sequence
  Description of Artificial Sequence: Synthetic oligonucleotide
aagucgcaggcgcugcggu

SEQ ID NO: 2204623 - RNA, 19 nt, Artificial Sequence
  Description of Artificial Sequence: Synthetic oligonucleotide
ucgcugucccgucccgucg

SEQ ID NO: 2204624 - RNA, 19 nt, Artificial Sequence
  Description of Artificial Sequence: Synthetic oligonucleotide
gccaccacgggcaacauug

SEQ ID NO: 2204625 - RNA, 19 nt, Artificial Sequence
  Description of Artificial Sequence: Synthetic oligonucleotide
cacggugguacgcaugcac

SEQ ID NO: 2204626 - RNA, 19 nt, Artificial Sequence
  Description of Artificial Sequence: Synthetic oligonucleotide
acagagucguccucucgga

SEQ ID NO: 2204627 - RNA, 19 nt, Artificial Sequence
  Description of Artificial Sequence: Synthetic oligonucleotide
uggucaagacuugucucca

SEQ ID NO: 2204628 - RNA, 19 nt, Artificial Sequence
  Description of Artificial Sequence: Synthetic oligonucleotide
uccaacacccagagcgcac

SEQ ID NO: 2204629 - RNA, 19 nt, Artificial Sequence
  Description of Artificial Sequence: Synthetic oligonucleotide
agcucagcacguaggacuc

SEQ ID NO: 2204630 - RNA, 19 nt, Artificial Sequence
  Description of Artificial Sequence: Synthetic oligonucleotide
uccguccugggcaggaaaa

SEQ ID NO: 2204631 - RNA, 19 nt, Artificial Sequence
  Description of Artificial Sequence: Synthetic oligonucleotide
gagauggucaagacuuguc

SEQ ID NO: 2204632 - RNA, 19 nt, Artificial Sequence
  Description of Artificial Sequence: Synthetic oligonucleotide
cacauaggacuucccauca

SEQ ID NO: 2204633 - RNA, 19 nt, Artificial Sequence
  Description of Artificial Sequence: Synthetic oligonucleotide
cgauaguccgcguuagugg

SEQ ID NO: 2204634 - RNA, 19 nt, Artificial Sequence
  Description of Artificial Sequence: Synthetic oligonucleotide
agaggcccugugcagacau

SEQ ID NO: 2204635 - RNA, 19 nt, Artificial Sequence
  Description of Artificial Sequence: Synthetic oligonucleotide
uaugagccagccccuucuc

SEQ ID NO: 2204636 - RNA, 19 nt, Artificial Sequence
  Description of Artificial Sequence: Synthetic oligonucleotide
ggcacggugguacgcaugc

SEQ ID NO: 2204637 - RNA, 19 nt, Artificial Sequence
  Description of Artificial Sequence: Synthetic oligonucleotide
ugucccgucccgucgccgc

SEQ ID NO: 2204638 - RNA, 19 nt, Artificial Sequence
  Description of Artificial Sequence: Synthetic oligonucleotide
ccaauaaccugguacuuca

SEQ ID NO: 2204639 - RNA, 19 nt, Artificial Sequence
  Description of Artificial Sequence: Synthetic oligonucleotide
aggacucgcggcuccggag

SEQ ID NO: 2204640 - RNA, 19 nt, Artificial Sequence
  Description of Artificial Sequence: Synthetic oligonucleotide
ugguacgcaugcacagagu

SEQ ID NO: 2204641 - RNA, 19 nt, Artificial Sequence
  Description of Artificial Sequence: Synthetic oligonucleotide
gucaagacuugucuccaaa

SEQ ID NO: 2204642 - RNA, 19 nt, Artificial Sequence
  Description of Artificial Sequence: Synthetic oligonucleotide
gugugugggcacugcuacg

SEQ ID NO: 2204643 - RNA, 19 nt, Artificial Sequence
  Description of Artificial Sequence: Synthetic oligonucleotide
agucaagcuucggcuguac

SEQ ID NO: 2204644 - RNA, 19 nt, Artificial Sequence
  Description of Artificial Sequence: Synthetic oligonucleotide
ggcaacauuggcacccggg

SEQ ID NO: 2204645 - RNA, 19 nt, Artificial Sequence
  Description of Artificial Sequence: Synthetic oligonucleotide
ggucaaagccgcugccgcg

SEQ ID NO: 2204646 - RNA, 19 nt, Artificial Sequence
  Description of Artificial Sequence: Synthetic oligonucleotide
uccagcggugguuggcggc

SEQ ID NO: 2204647 - RNA, 19 nt, Artificial Sequence
  Description of Artificial Sequence: Synthetic oligonucleotide
caccuguggggccacguug

SEQ ID NO: 2204648 - RNA, 19 nt, Artificial Sequence
  Description of Artificial Sequence: Synthetic oligonucleotide
gcgcgcauggccuacagca

SEQ ID NO: 2204649 - RNA, 19 nt, Artificial Sequence
  Description of Artificial Sequence: Synthetic oligonucleotide
ucggaagucgcaggcgcug

SEQ ID NO: 2204650 - RNA, 19 nt, Artificial Sequence
  Description of Artificial Sequence: Synthetic oligonucleotide
uaguccgcguuaguggcac

SEQ ID NO: 2204651 - RNA, 19 nt, Artificial Sequence
  Description of Artificial Sequence: Synthetic oligonucleotide
agggauagucucauccaca

SEQ ID NO: 2204652 - RNA, 19 nt, Artificial Sequence
  Description of Artificial Sequence: Synthetic oligonucleotide
gucgccgucgccacggagc

SEQ ID NO: 2204653 - RNA, 19 nt, Artificial Sequence
  Description of Artificial Sequence: Synthetic oligonucleotide
agugcgagucaagcuucgg

SEQ ID NO: 2204654 - RNA, 19 nt, Artificial Sequence
  Description of Artificial Sequence: Synthetic oligonucleotide
cucucggaagucgcaggcg

SEQ ID NO: 2204655 - RNA, 19 nt, Artificial Sequence
  Description of Artificial Sequence: Synthetic oligonucleotide
augcacagagucguccucu

SEQ ID NO: 2204656 - RNA, 19 nt, Artificial Sequence
  Description of Artificial Sequence: Synthetic oligonucleotide
caacacccagagcgcaccg

SEQ ID NO: 2204657 - RNA, 19 nt, Artificial Sequence
  Description of Artificial Sequence: Synthetic oligonucleotide
gucgccacggagccucucc

SEQ ID NO: 2204658 - RNA, 19 nt, Artificial Sequence
  Description of Artificial Sequence: Synthetic oligonucleotide
ccacgggcaacauuggcac

SEQ ID NO: 2204659 - RNA, 19 nt, Artificial Sequence
  Description of Artificial Sequence: Synthetic oligonucleotide
aguggcacggugguacgca

SEQ ID NO: 2204660 - RNA, 19 nt, Artificial Sequence
  Description of Artificial Sequence: Synthetic oligonucleotide
guccgcguuaguggcacgg

SEQ ID NO: 2204661 - RNA, 19 nt, Artificial Sequence
  Description of Artificial Sequence: Synthetic oligonucleotide
gagucguccucucggaagu

SEQ ID NO: 2204662 - RNA, 19 nt, Artificial Sequence
  Description of Artificial Sequence: Synthetic oligonucleotide
uggcacggugguacgcaug

SEQ ID NO: 2204663 - RNA, 19 nt, Artificial Sequence
  Description of Artificial Sequence: Synthetic oligonucleotide
agguuuccagcucgagcca

SEQ ID NO: 2204664 - RNA, 19 nt, Artificial Sequence
  Description of Artificial Sequence: Synthetic oligonucleotide
caugcacagagucguccuc

SEQ ID NO: 2204665 - RNA, 19 nt, Artificial Sequence
  Description of Artificial Sequence: Synthetic oligonucleotide
cccguacuuggccagcucg

SEQ ID NO: 2204666 - RNA, 19 nt, Artificial Sequence
  Description of Artificial Sequence: Synthetic oligonucleotide
gucguccauggcccgcugg

SEQ ID NO: 2204667 - RNA, 19 nt, Artificial Sequence
  Description of Artificial Sequence: Synthetic oligonucleotide
cuccggucgcagcugcucc

SEQ ID NO: 2204668 - RNA, 19 nt, Artificial Sequence
  Description of Artificial Sequence: Synthetic oligonucleotide
cgggucguagcucagcacg

SEQ ID NO: 2204669 - RNA, 19 nt, Artificial Sequence
  Description of Artificial Sequence: Synthetic oligonucleotide
gcgauaguccgcguuagug

SEQ ID NO: 2204670 - RNA, 19 nt, Artificial Sequence
  Description of Artificial Sequence: Synthetic oligonucleotide
cucacuugcugccagcagu

SEQ ID NO: 2204671 - RNA, 19 nt, Artificial Sequence
  Description of Artificial Sequence: Synthetic oligonucleotide
ggaacgcagcucaauuugc

SEQ ID NO: 2204672 - RNA, 19 nt, Artificial Sequence
  Description of Artificial Sequence: Synthetic oligonucleotide
ucgccgguaccgcccgccg

SEQ ID NO: 2204673 - RNA, 19 nt, Artificial Sequence
  Description of Artificial Sequence: Synthetic oligonucleotide
augcucucgaucggcacca

SEQ ID NO: 2204674 - RNA, 19 nt, Artificial Sequence
  Description of Artificial Sequence: Synthetic oligonucleotide
gagcaacccagaggcacgc

SEQ ID NO: 2204675 - RNA, 19 nt, Artificial Sequence
  Description of Artificial Sequence: Synthetic oligonucleotide
accugguacuucacauagg

SEQ ID NO: 2204676 - RNA, 19 nt, Artificial Sequence
  Description of Artificial Sequence: Synthetic oligonucleotide
gcucaaugcucucgaucgg

SEQ ID NO: 2204677 - RNA, 19 nt, Artificial Sequence
  Description of Artificial Sequence: Synthetic oligonucleotide
gguaagugcgagucaagcu

SEQ ID NO: 2204678 - RNA, 19 nt, Artificial Sequence
  Description of Artificial Sequence: Synthetic oligonucleotide
uaauaugagccagccccuu

SEQ ID NO: 2204679 - RNA, 19 nt, Artificial Sequence
  Description of Artificial Sequence: Synthetic oligonucleotide
ggaagucgcaggcgcugcg

SEQ ID NO: 2204680 - RNA, 19 nt, Artificial Sequence
  Description of Artificial Sequence: Synthetic oligonucleotide
cgcguuaguggcacggugg

SEQ ID NO: 2204681 - RNA, 19 nt, Artificial Sequence
  Description of Artificial Sequence: Synthetic oligonucleotide
ucccgucgccgccagugcu

SEQ ID NO: 2204682 - RNA, 19 nt, Artificial Sequence
  Description of Artificial Sequence: Synthetic oligonucleotide
cuccagcggugguuggcgg

SEQ ID NO: 2204683 - RNA, 19 nt, Artificial Sequence
  Description of Artificial Sequence: Synthetic oligonucleotide
gcgagucaagcuucggcug

SEQ ID NO: 2204684 - RNA, 19 nt, Artificial Sequence
  Description of Artificial Sequence: Synthetic oligonucleotide
cacguugcucagguagaag

SEQ ID NO: 2204685 - RNA, 19 nt, Artificial Sequence
  Description of Artificial Sequence: Synthetic oligonucleotide
ucaaagccgcugccgcgau

SEQ ID NO: 2204686 - RNA, 19 nt, Artificial Sequence
  Description of Artificial Sequence: Synthetic oligonucleotide
cagcucgccgguaccgccc

SEQ ID NO: 2204687 - RNA, 19 nt, Artificial Sequence
  Description of Artificial Sequence: Synthetic oligonucleotide
cagcucaauuugcccacug

SEQ ID NO: 2204688 - RNA, 19 nt, Artificial Sequence
  Description of Artificial Sequence: Synthetic oligonucleotide
gcucagguagaaggugucg

SEQ ID NO: 2204689 - RNA, 19 nt, Artificial Sequence
  Description of Artificial Sequence: Synthetic oligonucleotide
gagccucuccggucgcagc

SEQ ID NO: 2204690 - RNA, 19 nt, Artificial Sequence
  Description of Artificial Sequence: Synthetic oligonucleotide
ggacucgcggcuccggagc

SEQ ID NO: 2204691 - RNA, 19 nt, Artificial Sequence
  Description of Artificial Sequence: Synthetic oligonucleotide
cacgggcaacauuggcacc

SEQ ID NO: 2204692 - RNA, 19 nt, Artificial Sequence
  Description of Artificial Sequence: Synthetic oligonucleotide
gucaaagccgcugccgcga

SEQ ID NO: 2204693 - RNA, 19 nt, Artificial Sequence
  Description of Artificial Sequence: Synthetic oligonucleotide
cauuuugguaagugcgagu

SEQ ID NO: 2204694 - RNA, 19 nt, Artificial Sequence
  Description of Artificial Sequence: Synthetic oligonucleotide
guaggacucgcggcuccgg

SEQ ID NO: 2204695 - RNA, 19 nt, Artificial Sequence
  Description of Artificial Sequence: Synthetic oligonucleotide
uaguggcacggugguacgc

SEQ ID NO: 2204696 - RNA, 19 nt, Artificial Sequence
  Description of Artificial Sequence: Synthetic oligonucleotide
gcucaauuugcccacuggu

SEQ ID NO: 2204697 - RNA, 19 nt, Artificial Sequence
  Description of Artificial Sequence: Synthetic oligonucleotide
gcacagagucguccucucg

SEQ ID NO: 2204698 - RNA, 19 nt, Artificial Sequence
  Description of Artificial Sequence: Synthetic oligonucleotide
gagcgcaccgcgcgugcgc

SEQ ID NO: 2204699 - RNA, 19 nt, Artificial Sequence
  Description of Artificial Sequence: Synthetic oligonucleotide
ugcgcgacgccgggcagcc

SEQ ID NO: 2204700 - RNA, 19 nt, Artificial Sequence
  Description of Artificial Sequence: Synthetic oligonucleotide
gagccagccccuucuccca

SEQ ID NO: 2204701 - RNA, 19 nt, Artificial Sequence
  Description of Artificial Sequence: Synthetic oligonucleotide
aguccgcguuaguggcacg

SEQ ID NO: 2204702 - RNA, 19 nt, Artificial Sequence
  Description of Artificial Sequence: Synthetic oligonucleotide
cacccagagcgcaccgcgc

SEQ ID NO: 2204703 - RNA, 19 nt, Artificial Sequence
  Description of Artificial Sequence: Synthetic oligonucleotide
gguuuccagcucgagccag

SEQ ID NO: 2204704 - RNA, 19 nt, Artificial Sequence
  Description of Artificial Sequence: Synthetic oligonucleotide
ugucguccauggcccgcug

SEQ ID NO: 2204705 - RNA, 19 nt, Artificial Sequence
  Description of Artificial Sequence: Synthetic oligonucleotide
agcgcaccgcgcgugcgcg

SEQ ID NO: 2204706 - RNA, 19 nt, Artificial Sequence
  Description of Artificial Sequence: Synthetic oligonucleotide
aggcacgcucaaugcucuc

SEQ ID NO: 2204707 - RNA, 19 nt, Artificial Sequence
  Description of Artificial Sequence: Synthetic oligonucleotide
ccucucggaagucgcaggc

SEQ ID NO: 2204708 - RNA, 19 nt, Artificial Sequence
  Description of Artificial Sequence: Synthetic oligonucleotide
guacuucacauaggacuuc

SEQ ID NO: 2204709 - RNA, 19 nt, Artificial Sequence
  Description of Artificial Sequence: Synthetic oligonucleotide
ugcgcgggucguagcucag

SEQ ID NO: 2204710 - RNA, 19 nt, Artificial Sequence
  Description of Artificial Sequence: Synthetic oligonucleotide
gaucggcaccaggaagcgc

SEQ ID NO: 2204711 - RNA, 19 nt, Artificial Sequence
  Description of Artificial Sequence: Synthetic oligonucleotide
gcuucggcuguacuucuca

SEQ ID NO: 2204712 - RNA, 19 nt, Artificial Sequence
  Description of Artificial Sequence: Synthetic oligonucleotide
ugccgcgauaguccgcguu

SEQ ID NO: 2204713 - RNA, 19 nt, Artificial Sequence
  Description of Artificial Sequence: Synthetic oligonucleotide
gucgcugucccgucccguc

SEQ ID NO: 2204714 - RNA, 19 nt, Artificial Sequence
  Description of Artificial Sequence: Synthetic oligonucleotide
agagcgcaccgcgcgugcg

SEQ ID NO: 2204715 - RNA, 19 nt, Artificial Sequence
  Description of Artificial Sequence: Synthetic oligonucleotide
aagaggcccugugcagaca

SEQ ID NO: 2204716 - RNA, 19 nt, Artificial Sequence
  Description of Artificial Sequence: Synthetic oligonucleotide
acgccgggcagcccguacu

SEQ ID NO: 2204717 - RNA, 19 nt, Artificial Sequence
  Description of Artificial Sequence: Synthetic oligonucleotide
gccgcugccgcgauagucc

SEQ ID NO: 2204718 - RNA, 19 nt, Artificial Sequence
  Description of Artificial Sequence: Synthetic oligonucleotide
gcuccagcggugguuggcg

SEQ ID NO: 2204719 - RNA, 19 nt, Artificial Sequence
  Description of Artificial Sequence: Synthetic oligonucleotide
gcaacccagaggcacgcuc

SEQ ID NO: 2204720 - RNA, 19 nt, Artificial Sequence
  Description of Artificial Sequence: Synthetic oligonucleotide
cugcacccagccccgcgcc

SEQ ID NO: 2204721 - RNA, 19 nt, Artificial Sequence
  Description of Artificial Sequence: Synthetic oligonucleotide
gugcgcgggucguagcuca

SEQ ID NO: 2204722 - RNA, 19 nt, Artificial Sequence
  Description of Artificial Sequence: Synthetic oligonucleotide
uggccuccaggaugagcac

SEQ ID NO: 2204723 - RNA, 19 nt, Artificial Sequence
  Description of Artificial Sequence: Synthetic oligonucleotide
uccgcguuaguggcacggu

SEQ ID NO: 2204724 - RNA, 19 nt, Artificial Sequence
  Description of Artificial Sequence: Synthetic oligonucleotide
agcuucggcuguacuucuc

SEQ ID NO: 2204725 - RNA, 19 nt, Artificial Sequence
  Description of Artificial Sequence: Synthetic oligonucleotide
auaguccgcguuaguggca

SEQ ID NO: 2204726 - RNA, 19 nt, Artificial Sequence
  Description of Artificial Sequence: Synthetic oligonucleotide
ccguacuuggccagcucgc

SEQ ID NO: 2204727 - RNA, 19 nt, Artificial Sequence
  Description of Artificial Sequence: Synthetic oligonucleotide
cagagcgcaccgcgcgugc

SEQ ID NO: 2204728 - RNA, 19 nt, Artificial Sequence
  Description of Artificial Sequence: Synthetic oligonucleotide
accgcgcgugcgcgggucg

SEQ ID NO: 2204729 - RNA, 19 nt, Artificial Sequence
  Description of Artificial Sequence: Synthetic oligonucleotide
ggcgcugcggucgccgucg

SEQ ID NO: 2204730 - RNA, 19 nt, Artificial Sequence
  Description of Artificial Sequence: Synthetic oligonucleotide
gguacuucacauaggacuu

SEQ ID NO: 2204731 - RNA, 19 nt, Artificial Sequence
  Description of Artificial Sequence: Synthetic oligonucleotide
gcucucgaucggcaccagg

SEQ ID NO: 2204732 - RNA, 19 nt, Artificial Sequence
  Description of Artificial Sequence: Synthetic oligonucleotide
agguuguuccaggcauucu

SEQ ID NO: 2204733 - RNA, 19 nt, Artificial Sequence
  Description of Artificial Sequence: Synthetic oligonucleotide
ggcaucacauaggaacgca

SEQ ID NO: 2204734 - RNA, 19 nt, Artificial Sequence
  Description of Artificial Sequence: Synthetic oligonucleotide
auugggcaucacauaggaa

SEQ ID NO: 2204735 - RNA, 19 nt, Artificial Sequence
  Description of Artificial Sequence: Synthetic oligonucleotide
cuucggcuguacuucucaa

SEQ ID NO: 2204736 - RNA, 19 nt, Artificial Sequence
  Description of Artificial Sequence: Synthetic oligonucleotide
aggcgcugcggucgccguc

SEQ ID NO: 2204737 - RNA, 19 nt, Artificial Sequence
  Description of Artificial Sequence: Synthetic oligonucleotide
cccugugcagacauagaca

SEQ ID NO: 2204738 - RNA, 19 nt, Artificial Sequence
  Description of Artificial Sequence: Synthetic oligonucleotide
gggcaucacauaggaacgc

SEQ ID NO: 2204739 - RNA, 19 nt, Artificial Sequence
  Description of Artificial Sequence: Synthetic oligonucleotide
agccccgucgcugucccgu

SEQ ID NO: 2204740 - RNA, 19 nt, Artificial Sequence
  Description of Artificial Sequence: Synthetic oligonucleotide
ccaacacccagagcgcacc

SEQ ID NO: 2204741 - RNA, 19 nt, Artificial Sequence
  Description of Artificial Sequence: Synthetic oligonucleotide
cucgccgguaccgcccgcc

SEQ ID NO: 2204742 - RNA, 19 nt, Artificial Sequence
  Description of Artificial Sequence: Synthetic oligonucleotide
gacgccgggcagcccguac

SEQ ID NO: 2204743 - RNA, 19 nt, Artificial Sequence
  Description of Artificial Sequence: Synthetic oligonucleotide
gugguuggcggcggcggcc

SEQ ID NO: 2204744 - RNA, 19 nt, Artificial Sequence
  Description of Artificial Sequence: Synthetic oligonucleotide
gaagcgcuccaaagggaua

SEQ ID NO: 2204745 - RNA, 19 nt, Artificial Sequence
  Description of Artificial Sequence: Synthetic oligonucleotide
ugggcacugcuacgugguu

SEQ ID NO: 2204746 - RNA, 19 nt, Artificial Sequence
  Description of Artificial Sequence: Synthetic oligonucleotide
ugauggccuugagguuucc

SEQ ID NO: 2204747 - RNA, 19 nt, Artificial Sequence
  Description of Artificial Sequence: Synthetic oligonucleotide
gaggcacgcucaaugcucu

SEQ ID NO: 2204748 - RNA, 19 nt, Artificial Sequence
  Description of Artificial Sequence: Synthetic oligonucleotide
cuccaacacccagagcgca

SEQ ID NO: 2204749 - RNA, 19 nt, Artificial Sequence
  Description of Artificial Sequence: Synthetic oligonucleotide
gcacgcucaaugcucucga

SEQ ID NO: 2204750 - RNA, 19 nt, Artificial Sequence
  Description of Artificial Sequence: Synthetic oligonucleotide
aagccgcugccgcgauagu

SEQ ID NO: 2204751 - RNA, 19 nt, Artificial Sequence
  Description of Artificial Sequence: Synthetic oligonucleotide
gccgguaccgcccgccggc

SEQ ID NO: 2204752 - RNA, 19 nt, Artificial Sequence
  Description of Artificial Sequence: Synthetic oligonucleotide
ggugguacgcaugcacaga

SEQ ID NO: 2204753 - RNA, 19 nt, Artificial Sequence
  Description of Artificial Sequence: Synthetic oligonucleotide
ggcuguacuucucaagguu

SEQ ID NO: 2204754 - RNA, 19 nt, Artificial Sequence
  Description of Artificial Sequence: Synthetic oligonucleotide
cggucaaagccgcugccgc

SEQ ID NO: 2204755 - RNA, 19 nt, Artificial Sequence
  Description of Artificial Sequence: Synthetic oligonucleotide
gucaagcuucggcuguacu

SEQ ID NO: 2204756 - RNA, 19 nt, Artificial Sequence
  Description of Artificial Sequence: Synthetic oligonucleotide
cggugguacgcaugcacag

SEQ ID NO: 2204757 - RNA, 19 nt, Artificial Sequence
  Description of Artificial Sequence: Synthetic oligonucleotide
cagaggcacgcucaaugcu

SEQ ID NO: 2204758 - RNA, 19 nt, Artificial Sequence
  Description of Artificial Sequence: Synthetic oligonucleotide
acgcaugcacagagucguc

SEQ ID NO: 2204759 - RNA, 19 nt, Artificial Sequence
  Description of Artificial Sequence: Synthetic oligonucleotide
ccaccacgggcaacauugg

SEQ ID NO: 2204760 - RNA, 19 nt, Artificial Sequence
  Description of Artificial Sequence: Synthetic oligonucleotide
gggcaacauuggcacccgg

SEQ ID NO: 2204761 - RNA, 19 nt, Artificial Sequence
  Description of Artificial Sequence: Synthetic oligonucleotide
ggccaaguggccgcgguca

SEQ ID NO: 2204762 - RNA, 19 nt, Artificial Sequence
  Description of Artificial Sequence: Synthetic oligonucleotide
acauaggaacgcagcucaa

SEQ ID NO: 2204763 - RNA, 19 nt, Artificial Sequence
  Description of Artificial Sequence: Synthetic oligonucleotide
cugucccgucccgucgccg

SEQ ID NO: 2204764 - RNA, 19 nt, Artificial Sequence
  Description of Artificial Sequence: Synthetic oligonucleotide
agcccguacuuggccagcu

SEQ ID NO: 2204765 - RNA, 19 nt, Artificial Sequence
  Description of Artificial Sequence: Synthetic oligonucleotide
ccagcucgccgguaccgcc

SEQ ID NO: 2204766 - RNA, 19 nt, Artificial Sequence
  Description of Artificial Sequence: Synthetic oligonucleotide
ggccagcucgccgguaccg

SEQ ID NO: 2204767 - RNA, 19 nt, Artificial Sequence
  Description of Artificial Sequence: Synthetic oligonucleotide
gucccgucccgucgccgcc

SEQ ID NO: 2204768 - RNA, 19 nt, Artificial Sequence
  Description of Artificial Sequence: Synthetic oligonucleotide
cagagucguccucucggaa

SEQ ID NO: 2204769 - RNA, 19 nt, Artificial Sequence
  Description of Artificial Sequence: Synthetic oligonucleotide
agcgcuccaaagggauagu

SEQ ID NO: 2204770 - RNA, 19 nt, Artificial Sequence
  Description of Artificial Sequence: Synthetic oligonucleotide
cauaggaacgcagcucaau

SEQ ID NO: 2204771 - RNA, 19 nt, Artificial Sequence
  Description of Artificial Sequence: Synthetic oligonucleotide
gagucaagcuucggcugua

SEQ ID NO: 2204772 - RNA, 19 nt, Artificial Sequence
  Description of Artificial Sequence: Synthetic oligonucleotide
gcggucgccgucgccacgg

SEQ ID NO: 2204773 - RNA, 19 nt, Artificial Sequence
  Description of Artificial Sequence: Synthetic oligonucleotide
ucaggccgacccgcagcgc

SEQ ID NO: 2204774 - RNA, 19 nt, Artificial Sequence
  Description of Artificial Sequence: Synthetic oligonucleotide
gcaugcacagagucguccu

SEQ ID NO: 2204775 - RNA, 19 nt, Artificial Sequence
  Description of Artificial Sequence: Synthetic oligonucleotide
gcaggcgcugcggucgccg

SEQ ID NO: 2204776 - RNA, 19 nt, Artificial Sequence
  Description of Artificial Sequence: Synthetic oligonucleotide
gcacguaggacucgcggcu

SEQ ID NO: 2204777 - RNA, 19 nt, Artificial Sequence
  Description of Artificial Sequence: Synthetic oligonucleotide
guggggccacguugcucag

SEQ ID NO: 2204778 - RNA, 19 nt, Artificial Sequence
  Description of Artificial Sequence: Synthetic oligonucleotide
gugggcacugcuacguggu

SEQ ID NO: 2204779 - RNA, 19 nt, Artificial Sequence
  Description of Artificial Sequence: Synthetic oligonucleotide
gacucgcggcuccggagcu

SEQ ID NO: 2204780 - RNA, 19 nt, Artificial Sequence
  Description of Artificial Sequence: Synthetic oligonucleotide
ggaagcgcuccaaagggau

SEQ ID NO: 2204781 - RNA, 19 nt, Artificial Sequence
  Description of Artificial Sequence: Synthetic oligonucleotide
ggggccacguugcucaggu

SEQ ID NO: 2204782 - RNA, 19 nt, Artificial Sequence
  Description of Artificial Sequence: Synthetic oligonucleotide
cgcgacgccgggcagcccg

SEQ ID NO: 2204783 - RNA, 19 nt, Artificial Sequence
  Description of Artificial Sequence: Synthetic oligonucleotide
ccgcugccgcgauaguccg

SEQ ID NO: 2204784 - RNA, 19 nt, Artificial Sequence
  Description of Artificial Sequence: Synthetic oligonucleotide
ggcacugcuacgugguuuu

SEQ ID NO: 2204785 - RNA, 19 nt, Artificial Sequence
  Description of Artificial Sequence: Synthetic oligonucleotide
gccgcggucaaagccgcug

SEQ ID NO: 2204786 - RNA, 19 nt, Artificial Sequence
  Description of Artificial Sequence: Synthetic oligonucleotide
ccgcggucaaagccgcugc

SEQ ID NO: 2204787 - RNA, 19 nt, Artificial Sequence
  Description of Artificial Sequence: Synthetic oligonucleotide
ggucgccgucgccacggag

SEQ ID NO: 2204788 - RNA, 19 nt, Artificial Sequence
  Description of Artificial Sequence: Synthetic oligonucleotide
ccucuccggucgcagcugc

SEQ ID NO: 2204789 - RNA, 19 nt, Artificial Sequence
  Description of Artificial Sequence: Synthetic oligonucleotide
cguacuuggccagcucgcc

SEQ ID NO: 2204790 - RNA, 19 nt, Artificial Sequence
  Description of Artificial Sequence: Synthetic oligonucleotide
gccgcgauaguccgcguua

SEQ ID NO: 2204791 - RNA, 19 nt, Artificial Sequence
  Description of Artificial Sequence: Synthetic oligonucleotide
cagcgcgggcggcucggcc

SEQ ID NO: 2204792 - RNA, 19 nt, Artificial Sequence
  Description of Artificial Sequence: Synthetic oligonucleotide
gccgucgccacggagccuc

SEQ ID NO: 2204793 - RNA, 19 nt, Artificial Sequence
  Description of Artificial Sequence: Synthetic oligonucleotide
cgaucggcaccaggaagcg

SEQ ID NO: 2204794 - RNA, 19 nt, Artificial Sequence
  Description of Artificial Sequence: Synthetic oligonucleotide
cccgucgcugucccguccc

SEQ ID NO: 2204795 - RNA, 19 nt, Artificial Sequence
  Description of Artificial Sequence: Synthetic oligonucleotide
cagcggugguuggcggcgg

SEQ ID NO: 2204796 - RNA, 19 nt, Artificial Sequence
  Description of Artificial Sequence: Synthetic oligonucleotide
ccgcguuaguggcacggug

SEQ ID NO: 2204797 - RNA, 19 nt, Artificial Sequence
  Description of Artificial Sequence: Synthetic oligonucleotide
gcguuaguggcacgguggu

SEQ ID NO: 2204798 - RNA, 19 nt, Artificial Sequence
  Description of Artificial Sequence: Synthetic oligonucleotide
gagcugcgcgacgccgggc

SEQ ID NO: 2204799 - RNA, 19 nt, Artificial Sequence
  Description of Artificial Sequence: Synthetic oligonucleotide
gcgggucguagcucagcac

SEQ ID NO: 2204800 - RNA, 19 nt, Artificial Sequence
  Description of Artificial Sequence: Synthetic oligonucleotide
ccguccugggcaggaaaag

SEQ ID NO: 2204801 - RNA, 19 nt, Artificial Sequence
  Description of Artificial Sequence: Synthetic oligonucleotide
cauuggcacccgggccagc

SEQ ID NO: 2204802 - RNA, 19 nt, Artificial Sequence
  Description of Artificial Sequence: Synthetic oligonucleotide
gcugucccgucccgucgcc

SEQ ID NO: 2204803 - RNA, 19 nt, Artificial Sequence
  Description of Artificial Sequence: Synthetic oligonucleotide
cccaucagccuccguccug

SEQ ID NO: 2204804 - RNA, 19 nt, Artificial Sequence
  Description of Artificial Sequence: Synthetic oligonucleotide
gcggugguuggcggcggcg

SEQ ID NO: 2204805 - RNA, 19 nt, Artificial Sequence
  Description of Artificial Sequence: Synthetic oligonucleotide
cacuugcugccagcaguga

SEQ ID NO: 2204806 - RNA, 19 nt, Artificial Sequence
  Description of Artificial Sequence: Synthetic oligonucleotide
gcgcuccaaagggauaguc

SEQ ID NO: 2204807 - RNA, 19 nt, Artificial Sequence
  Description of Artificial Sequence: Synthetic oligonucleotide
ccacggagccucuccgguc

SEQ ID NO: 2204808 - RNA, 19 nt, Artificial Sequence
  Description of Artificial Sequence: Synthetic oligonucleotide
ccgccggcccuccuggcag

SEQ ID NO: 2204809 - RNA, 19 nt, Artificial Sequence
  Description of Artificial Sequence: Synthetic oligonucleotide
ggcagcgcgggcggcucgg

SEQ ID NO: 2204810 - RNA, 19 nt, Artificial Sequence
  Description of Artificial Sequence: Synthetic oligonucleotide
acccagaggcacgcucaau

SEQ ID NO: 2204811 - RNA, 19 nt, Artificial Sequence
  Description of Artificial Sequence: Synthetic oligonucleotide
ccggagcugcgcgacgccg

SEQ ID NO: 2204812 - RNA, 19 nt, Artificial Sequence
  Description of Artificial Sequence: Synthetic oligonucleotide
ccgcgauaguccgcguuag

SEQ ID NO: 2204813 - RNA, 19 nt, Artificial Sequence
  Description of Artificial Sequence: Synthetic oligonucleotide
gccagcucgccgguaccgc

SEQ ID NO: 2204814 - RNA, 19 nt, Artificial Sequence
  Description of Artificial Sequence: Synthetic oligonucleotide
ccagagcgcaccgcgcgug

SEQ ID NO: 2204815 - RNA, 19 nt, Artificial Sequence
  Description of Artificial Sequence: Synthetic oligonucleotide
agcgcgcgcauggccuaca

SEQ ID NO: 2204816 - RNA, 19 nt, Artificial Sequence
  Description of Artificial Sequence: Synthetic oligonucleotide
cgucccgucgccgccagug

SEQ ID NO: 2204817 - RNA, 19 nt, Artificial Sequence
  Description of Artificial Sequence: Synthetic oligonucleotide
gguaccgcccgccggcccu

SEQ ID NO: 2204818 - RNA, 19 nt, Artificial Sequence
  Description of Artificial Sequence: Synthetic oligonucleotide
cccgucgccgccagugcuc

SEQ ID NO: 2204819 - RNA, 19 nt, Artificial Sequence
  Description of Artificial Sequence: Synthetic oligonucleotide
cagugauggccuugagguu

SEQ ID NO: 2204820 - RNA, 19 nt, Artificial Sequence
  Description of Artificial Sequence: Synthetic oligonucleotide
cgccacggagccucuccgg

SEQ ID NO: 2204821 - RNA, 19 nt, Artificial Sequence
  Description of Artificial Sequence: Synthetic oligonucleotide
gcgcgcgcauggccuacag

SEQ ID NO: 2204822 - RNA, 19 nt, Artificial Sequence
  Description of Artificial Sequence: Synthetic oligonucleotide
guggcacggugguacgcau

SEQ ID NO: 2204823 - RNA, 19 nt, Artificial Sequence
  Description of Artificial Sequence: Synthetic oligonucleotide
cgcggucaaagccgcugcc

SEQ ID NO: 2204824 - RNA, 19 nt, Artificial Sequence
  Description of Artificial Sequence: Synthetic oligonucleotide
gccacggagccucuccggu

SEQ ID NO: 2204825 - RNA, 19 nt, Artificial Sequence
  Description of Artificial Sequence: Synthetic oligonucleotide
cguugcucagguagaaggu

SEQ ID NO: 2204826 - RNA, 19 nt, Artificial Sequence
  Description of Artificial Sequence: Synthetic oligonucleotide
ccgcagcgcgcgcauggcc

SEQ ID NO: 2204827 - RNA, 19 nt, Artificial Sequence
  Description of Artificial Sequence: Synthetic oligonucleotide
cgcuccaaagggauagucu

SEQ ID NO: 2204828 - RNA, 19 nt, Artificial Sequence
  Description of Artificial Sequence: Synthetic oligonucleotide
ggucguagcucagcacgua

SEQ ID NO: 2204829 - RNA, 19 nt, Artificial Sequence
  Description of Artificial Sequence: Synthetic oligonucleotide
cgcugucccgucccgucgc

SEQ ID NO: 2204830 - RNA, 19 nt, Artificial Sequence
  Description of Artificial Sequence: Synthetic oligonucleotide
cacgcucaaugcucucgau

SEQ ID NO: 2204831 - RNA, 19 nt, Artificial Sequence
  Description of Artificial Sequence: Synthetic oligonucleotide
caccgcgcgugcgcggguc

SEQ ID NO: 2204832 - RNA, 19 nt, Artificial Sequence
  Description of Artificial Sequence: Synthetic oligonucleotide
caaagccgcugccgcgaua

SEQ ID NO: 2204833 - RNA, 19 nt, Artificial Sequence
  Description of Artificial Sequence: Synthetic oligonucleotide
cagcgcgcgcauggccuac

SEQ ID NO: 2204834 - RNA, 19 nt, Artificial Sequence
  Description of Artificial Sequence: Synthetic oligonucleotide
gaggcccugugcagacaua

SEQ ID NO: 2204835 - RNA, 19 nt, Artificial Sequence
  Description of Artificial Sequence: Synthetic oligonucleotide
ggcccugugcagacauaga

SEQ ID NO: 2204836 - RNA, 19 nt, Artificial Sequence
  Description of Artificial Sequence: Synthetic oligonucleotide
uaccgcccgccggcccucc

SEQ ID NO: 2204837 - RNA, 19 nt, Artificial Sequence
  Description of Artificial Sequence: Synthetic oligonucleotide
gccaaguggccgcggucaa

SEQ ID NO: 2204838 - RNA, 19 nt, Artificial Sequence
  Description of Artificial Sequence: Synthetic oligonucleotide
cagcagccccgucgcuguc

SEQ ID NO: 2204839 - RNA, 19 nt, Artificial Sequence
  Description of Artificial Sequence: Synthetic oligonucleotide
gcccguacuuggccagcuc

SEQ ID NO: 2204840 - RNA, 19 nt, Artificial Sequence
  Description of Artificial Sequence: Synthetic oligonucleotide
cgcugcacccagccccgcg

SEQ ID NO: 2204841 - RNA, 19 nt, Artificial Sequence
  Description of Artificial Sequence: Synthetic oligonucleotide
cggcucggccgccaccacg

SEQ ID NO: 2204842 - RNA, 19 nt, Artificial Sequence
  Description of Artificial Sequence: Synthetic oligonucleotide
cgcgggucguagcucagca

SEQ ID NO: 2204843 - RNA, 19 nt, Artificial Sequence
  Description of Artificial Sequence: Synthetic oligonucleotide
gcgugcgcgggucguagcu

SEQ ID NO: 2204844 - RNA, 19 nt, Artificial Sequence
  Description of Artificial Sequence: Synthetic oligonucleotide
gcgcaccgcgcgugcgcgg

SEQ ID NO: 2204845 - RNA, 19 nt, Artificial Sequence
  Description of Artificial Sequence: Synthetic oligonucleotide
gcgcgggucguagcucagc

SEQ ID NO: 2204846 - RNA, 19 nt, Artificial Sequence
  Description of Artificial Sequence: Synthetic oligonucleotide
cgcgcgcauggccuacagc

SEQ ID NO: 2204847 - RNA, 19 nt, Artificial Sequence
  Description of Artificial Sequence: Synthetic oligonucleotide
cgagucaagcuucggcugu

SEQ ID NO: 2204848 - RNA, 19 nt, Artificial Sequence
  Description of Artificial Sequence: Synthetic oligonucleotide
ccccgucgcugucccgucc

SEQ ID NO: 2204849 - RNA, 19 nt, Artificial Sequence
  Description of Artificial Sequence: Synthetic oligonucleotide
guaccgcccgccggcccuc

SEQ ID NO: 2204850 - RNA, 19 nt, Artificial Sequence
  Description of Artificial Sequence: Synthetic oligonucleotide
cguccucucggaagucgca

SEQ ID NO: 2204851 - RNA, 19 nt, Artificial Sequence
  Description of Artificial Sequence: Synthetic oligonucleotide
ccacguugcucagguagaa

SEQ ID NO: 2204852 - RNA, 19 nt, Artificial Sequence
  Description of Artificial Sequence: Synthetic oligonucleotide
gcagcgcgcgcauggccua

SEQ ID NO: 2204853 - RNA, 19 nt, Artificial Sequence
  Description of Artificial Sequence: Synthetic oligonucleotide
cgcaccgcgcgugcgcggg

SEQ ID NO: 2204854 - RNA, 19 nt, Artificial Sequence
  Description of Artificial Sequence: Synthetic oligonucleotide
gcccgcuggcuccagcggu

SEQ ID NO: 2204855 - RNA, 19 nt, Artificial Sequence
  Description of Artificial Sequence: Synthetic oligonucleotide
cgccgguaccgcccgccgg

SEQ ID NO: 2204856 - RNA, 19 nt, Artificial Sequence
  Description of Artificial Sequence: Synthetic oligonucleotide
cgcgcccagcgccaggguc

SEQ ID NO: 2204857 - RNA, 19 nt, Artificial Sequence
  Description of Artificial Sequence: Synthetic oligonucleotide
ccagugcucugccgcugca

SEQ ID NO: 2204858 - RNA, 19 nt, Artificial Sequence
  Description of Artificial Sequence: Synthetic oligonucleotide
gcacggugguacgcaugca

SEQ ID NO: 2204859 - RNA, 19 nt, Artificial Sequence
  Description of Artificial Sequence: Synthetic oligonucleotide
gcagcucaauuugcccacu

SEQ ID NO: 2204860 - RNA, 19 nt, Artificial Sequence
  Description of Artificial Sequence: Synthetic oligonucleotide
cgcugccgcgauaguccgc

SEQ ID NO: 2204861 - RNA, 19 nt, Artificial Sequence
  Description of Artificial Sequence: Synthetic oligonucleotide
gcggccaaguggccgcggu

SEQ ID NO: 2204862 - RNA, 19 nt, Artificial Sequence
  Description of Artificial Sequence: Synthetic oligonucleotide
cccgucccgucgccgccag

SEQ ID NO: 2204863 - RNA, 19 nt, Artificial Sequence
  Description of Artificial Sequence: Synthetic oligonucleotide
cagccccuucucccagugu

SEQ ID NO: 2204864 - RNA, 19 nt, Artificial Sequence
  Description of Artificial Sequence: Synthetic oligonucleotide
gcucgccgguaccgcccgc

SEQ ID NO: 2204865 - RNA, 19 nt, Artificial Sequence
  Description of Artificial Sequence: Synthetic oligonucleotide
gccccgucgcugucccguc

SEQ ID NO: 2204866 - RNA, 19 nt, Artificial Sequence
  Description of Artificial Sequence: Synthetic oligonucleotide
ccgguaccgcccgccggcc

SEQ ID NO: 2204867 - RNA, 19 nt, Artificial Sequence
  Description of Artificial Sequence: Synthetic oligonucleotide
gccgacccgcagcgcgcgc

SEQ ID NO: 2204868 - RNA, 19 nt, Artificial Sequence
  Description of Artificial Sequence: Synthetic oligonucleotide
gcaccuguggggccacguu

SEQ ID NO: 2204869 - RNA, 19 nt, Artificial Sequence
  Description of Artificial Sequence: Synthetic oligonucleotide
cgcagcgcgcgcauggccu

SEQ ID NO: 2204870 - RNA, 19 nt, Artificial Sequence
  Description of Artificial Sequence: Synthetic oligonucleotide
ccaaguggccgcggucaaa

SEQ ID NO: 2204871 - RNA, 19 nt, Artificial Sequence
  Description of Artificial Sequence: Synthetic oligonucleotide
cgguaccgcccgccggccc

SEQ ID NO: 2204872 - RNA, 19 nt, Artificial Sequence
  Description of Artificial Sequence: Synthetic oligonucleotide
cggucgcagcugcuccaac

SEQ ID NO: 2204873 - RNA, 19 nt, Artificial Sequence
  Description of Artificial Sequence: Synthetic oligonucleotide
gggccacguugcucaggua

SEQ ID NO: 2204874 - RNA, 19 nt, Artificial Sequence
  Description of Artificial Sequence: Synthetic oligonucleotide
cgccggcccuccuggcagc

SEQ ID NO: 2204875 - RNA, 19 nt, Artificial Sequence
  Description of Artificial Sequence: Synthetic oligonucleotide
gguuggcggcggcggccaa

SEQ ID NO: 2204876 - RNA, 19 nt, Artificial Sequence
  Description of Artificial Sequence: Synthetic oligonucleotide
cugccgcgauaguccgcgu

SEQ ID NO: 2204877 - RNA, 19 nt, Artificial Sequence
  Description of Artificial Sequence: Synthetic oligonucleotide
gcgccagggucaggccgac

SEQ ID NO: 2204878 - RNA, 19 nt, Artificial Sequence
  Description of Artificial Sequence: Synthetic oligonucleotide
ccggcccuccuggcagcgc

SEQ ID NO: 2204879 - RNA, 19 nt, Artificial Sequence
  Description of Artificial Sequence: Synthetic oligonucleotide
ccggucgcagcugcuccaa

SEQ ID NO: 2204880 - RNA, 19 nt, Artificial Sequence
  Description of Artificial Sequence: Synthetic oligonucleotide
gccccgcgcccagcgccag

SEQ ID NO: 2204881 - RNA, 19 nt, Artificial Sequence
  Description of Artificial Sequence: Synthetic oligonucleotide
cguuaguggcacgguggua

SEQ ID NO: 2204882 - RNA, 19 nt, Artificial Sequence
  Description of Artificial Sequence: Synthetic oligonucleotide
ccgcugcacccagccccgc

SEQ ID NO: 2204883 - RNA, 19 nt, Artificial Sequence
  Description of Artificial Sequence: Synthetic oligonucleotide
cgcgauaguccgcguuagu

SEQ ID NO: 2204884 - RNA, 19 nt, Artificial Sequence
  Description of Artificial Sequence: Synthetic oligonucleotide
cgggcggcucggccgccac

SEQ ID NO: 2204885 - RNA, 19 nt, Artificial Sequence
  Description of Artificial Sequence: Synthetic oligonucleotide
cggcuccggagcugcgcga

SEQ ID NO: 2204886 - RNA, 19 nt, Artificial Sequence
  Description of Artificial Sequence: Synthetic oligonucleotide
ccgucgccgccagugcucu

SEQ ID NO: 2204887 - RNA, 19 nt, Artificial Sequence
  Description of Artificial Sequence: Synthetic oligonucleotide
cgucgccacggagccucuc

SEQ ID NO: 2204888 - RNA, 19 nt, Artificial Sequence
  Description of Artificial Sequence: Synthetic oligonucleotide
gcaccgcgcgugcgcgggu

SEQ ID NO: 2204889 - RNA, 19 nt, Artificial Sequence
  Description of Artificial Sequence: Synthetic oligonucleotide
gcgcgacgccgggcagccc

SEQ ID NO: 2204890 - RNA, 19 nt, Artificial Sequence
  Description of Artificial Sequence: Synthetic oligonucleotide
cgucgcugucccgucccgu

SEQ ID NO: 2204891 - RNA, 19 nt, Artificial Sequence
  Description of Artificial Sequence: Synthetic oligonucleotide
ccgucgccacggagccucu

SEQ ID NO: 2204892 - RNA, 19 nt, Artificial Sequence
  Description of Artificial Sequence: Synthetic oligonucleotide
cgccaccacgggcaacauu

SEQ ID NO: 2204893 - RNA, 19 nt, Artificial Sequence
  Description of Artificial Sequence: Synthetic oligonucleotide
ccgcgcgugcgcgggucgu

SEQ ID NO: 2204894 - RNA, 19 nt, Artificial Sequence
  Description of Artificial Sequence: Synthetic oligonucleotide
cgcgcgugcgcgggucgua

SEQ ID NO: 2204895 - RNA, 19 nt, Artificial Sequence
  Description of Artificial Sequence: Synthetic oligonucleotide
ccgucccgucgccgccagu

SEQ ID NO: 2204896 - RNA, 19 nt, Artificial Sequence
  Description of Artificial Sequence: Synthetic oligonucleotide
cgacgccgggcagcccgua

SEQ ID NO: 2204897 - RNA, 19 nt, Artificial Sequence
  Description of Artificial Sequence: Synthetic oligonucleotide
ugugacaucuaacaaagag

SEQ ID NO: 2204898 - RNA, 19 nt, Artificial Sequence
  Description of Artificial Sequence: Synthetic oligonucleotide
acaucuaacaaagagacgg

SEQ ID NO: 2204899 - RNA, 19 nt, Artificial Sequence
  Description of Artificial Sequence: Synthetic oligonucleotide
uaugugacaucuaacaaag

SEQ ID NO: 2204900 - RNA, 19 nt, Artificial Sequence
  Description of Artificial Sequence: Synthetic oligonucleotide
acuguguucccguagaacc

SEQ ID NO: 2204901 - RNA, 19 nt, Artificial Sequence
  Description of Artificial Sequence: Synthetic oligonucleotide
ucuuuguagacaaaggcug

SEQ ID NO: 2204902 - RNA, 19 nt, Artificial Sequence
  Description of Artificial Sequence: Synthetic oligonucleotide
acuucugucuuuaauaugc

SEQ ID NO: 2204903 - RNA, 19 nt, Artificial Sequence
  Description of Artificial Sequence: Synthetic oligonucleotide
ucugccauacagaugaugc

SEQ ID NO: 2204904 - RNA, 19 nt, Artificial Sequence
  Description of Artificial Sequence: Synthetic oligonucleotide
aaccaaaaugcuucuuagc

SEQ ID NO: 2204905 - RNA, 19 nt, Artificial Sequence
  Description of Artificial Sequence: Synthetic oligonucleotide
uuuaauaugcgacauccuc

SEQ ID NO: 2204906 - RNA, 19 nt, Artificial Sequence
  Description of Artificial Sequence: Synthetic oligonucleotide
ucuuagggcaacuacacug

SEQ ID NO: 2204907 - RNA, 19 nt, Artificial Sequence
  Description of Artificial Sequence: Synthetic oligonucleotide
uuuugagagguucauuugc

SEQ ID NO: 2204908 - RNA, 19 nt, Artificial Sequence
  Description of Artificial Sequence: Synthetic oligonucleotide
uuaauaugcgacauccuca

SEQ ID NO: 2204909 - RNA, 19 nt, Artificial Sequence
  Description of Artificial Sequence: Synthetic oligonucleotide
cuuaacaccaaccacagca

SEQ ID NO: 2204910 - RNA, 19 nt, Artificial Sequence
  Description of Artificial Sequence: Synthetic oligonucleotide
ucugucuuuaauaugcgac

SEQ ID NO: 2204911 - RNA, 19 nt, Artificial Sequence
  Description of Artificial Sequence: Synthetic oligonucleotide
uguggauccauucuggcca

SEQ ID NO: 2204912 - RNA, 19 nt, Artificial Sequence
  Description of Artificial Sequence: Synthetic oligonucleotide
aagagagucacucgcaugu

SEQ ID NO: 2204913 - RNA, 19 nt, Artificial Sequence
  Description of Artificial Sequence: Synthetic oligonucleotide
agagacagacuucaccugc

SEQ ID NO: 2204914 - RNA, 19 nt, Artificial Sequence
  Description of Artificial Sequence: Synthetic oligonucleotide
ucugcaguuguccaacggg

SEQ ID NO: 2204915 - RNA, 19 nt, Artificial Sequence
  Description of Artificial Sequence: Synthetic oligonucleotide
aacaaagagacggggacac

SEQ ID NO: 2204916 - RNA, 19 nt, Artificial Sequence
  Description of Artificial Sequence: Synthetic oligonucleotide
uggacggugauacaacccg

SEQ ID NO: 2204917 - RNA, 19 nt, Artificial Sequence
  Description of Artificial Sequence: Synthetic oligonucleotide
ugcuacaaagucuuuguag

SEQ ID NO: 2204918 - RNA, 19 nt, Artificial Sequence
  Description of Artificial Sequence: Synthetic oligonucleotide
uguaguggagccaucaggu

SEQ ID NO: 2204919 - RNA, 19 nt, Artificial Sequence
  Description of Artificial Sequence: Synthetic oligonucleotide
gaaugugagaccuuggcuc

SEQ ID NO: 2204920 - RNA, 19 nt, Artificial Sequence
  Description of Artificial Sequence: Synthetic oligonucleotide
aaagugaaagggcugcuga

SEQ ID NO: 2204921 - RNA, 19 nt, Artificial Sequence
  Description of Artificial Sequence: Synthetic oligonucleotide
aagaacaucuuucugccau

SEQ ID NO: 2204922 - RNA, 19 nt, Artificial Sequence
  Description of Artificial Sequence: Synthetic oligonucleotide
uaauaugcgacauccucag

SEQ ID NO: 2204923 - RNA, 19 nt, Artificial Sequence
  Description of Artificial Sequence: Synthetic oligonucleotide
uucauuugcugccauuucc

SEQ ID NO: 2204924 - RNA, 19 nt, Artificial Sequence
  Description of Artificial Sequence: Synthetic oligonucleotide
uuagcucugacccuugaca

SEQ ID NO: 2204925 - RNA, 19 nt, Artificial Sequence
  Description of Artificial Sequence: Synthetic oligonucleotide
ugacagaagucuuagggca

SEQ ID NO: 2204926 - RNA, 19 nt, Artificial Sequence
  Description of Artificial Sequence: Synthetic oligonucleotide
aaagcaauggaggcucacc

SEQ ID NO: 2204927 - RNA, 19 nt, Artificial Sequence
  Description of Artificial Sequence: Synthetic oligonucleotide
caagguuccgccaugacug

SEQ ID NO: 2204928 - RNA, 19 nt, Artificial Sequence
  Description of Artificial Sequence: Synthetic oligonucleotide
cuugaagagagucacucgc

SEQ ID NO: 2204929 - RNA, 19 nt, Artificial Sequence
  Description of Artificial Sequence: Synthetic oligonucleotide
ucuaacaaagagacgggga

SEQ ID NO: 2204930 - RNA, 19 nt, Artificial Sequence
  Description of Artificial Sequence: Synthetic oligonucleotide
uuaacaccaaccacagcag

SEQ ID NO: 2204931 - RNA, 19 nt, Artificial Sequence
  Description of Artificial Sequence: Synthetic oligonucleotide
uugacagaagucuuagggc

SEQ ID NO: 2204932 - RNA, 19 nt, Artificial Sequence
  Description of Artificial Sequence: Synthetic oligonucleotide
ucuugugucucccacuccc

SEQ ID NO: 2204933 - RNA, 19 nt, Artificial Sequence
  Description of Artificial Sequence: Synthetic oligonucleotide
aagugaaagggcugcugac

SEQ ID NO: 2204934 - RNA, 19 nt, Artificial Sequence
  Description of Artificial Sequence: Synthetic oligonucleotide
uucccuuauucucuguggg

SEQ ID NO: 2204935 - RNA, 19 nt, Artificial Sequence
  Description of Artificial Sequence: Synthetic oligonucleotide
uuuuaguacaccugcuaca

SEQ ID NO: 2204936 - RNA, 19 nt, Artificial Sequence
  Description of Artificial Sequence: Synthetic oligonucleotide
cuaacaaagagacggggac

SEQ ID NO: 2204937 - RNA, 19 nt, Artificial Sequence
  Description of Artificial Sequence: Synthetic oligonucleotide
aaggcuaugugacaucuaa

SEQ ID NO: 2204938 - RNA, 19 nt, Artificial Sequence
  Description of Artificial Sequence: Synthetic oligonucleotide
aaugugagaccuuggcucu

SEQ ID NO: 2204939 - RNA, 19 nt, Artificial Sequence
  Description of Artificial Sequence: Synthetic oligonucleotide
uguccaacgggucugggca

SEQ ID NO: 2204940 - RNA, 19 nt, Artificial Sequence
  Description of Artificial Sequence: Synthetic oligonucleotide
aacgggucugggcagcagc

SEQ ID NO: 2204941 - RNA, 19 nt, Artificial Sequence
  Description of Artificial Sequence: Synthetic oligonucleotide
cugccauuucccaugaagg

SEQ ID NO: 2204942 - RNA, 19 nt, Artificial Sequence
  Description of Artificial Sequence: Synthetic oligonucleotide
uuugcugccauuucccaug

SEQ ID NO: 2204943 - RNA, 19 nt, Artificial Sequence
  Description of Artificial Sequence: Synthetic oligonucleotide
uguagacaaaggcugccag

SEQ ID NO: 2204944 - RNA, 19 nt, Artificial Sequence
  Description of Artificial Sequence: Synthetic oligonucleotide
auacagaugaugcaucgcu

SEQ ID NO: 2204945 - RNA, 19 nt, Artificial Sequence
  Description of Artificial Sequence: Synthetic oligonucleotide
aaaacugcccagaccaagg

SEQ ID NO: 2204946 - RNA, 19 nt, Artificial Sequence
  Description of Artificial Sequence: Synthetic oligonucleotide
auguaguggagccaucagg

SEQ ID NO: 2204947 - RNA, 19 nt, Artificial Sequence
  Description of Artificial Sequence: Synthetic oligonucleotide
gaauucgcugcccagggug

SEQ ID NO: 2204948 - RNA, 19 nt, Artificial Sequence
  Description of Artificial Sequence: Synthetic oligonucleotide
uuguggugaugucaguggg

SEQ ID NO: 2204949 - RNA, 19 nt, Artificial Sequence
  Description of Artificial Sequence: Synthetic oligonucleotide
caugaagggaaauguagug

SEQ ID NO: 2204950 - RNA, 19 nt, Artificial Sequence
  Description of Artificial Sequence: Synthetic oligonucleotide
uggaguagguacuugugca

SEQ ID NO: 2204951 - RNA, 19 nt, Artificial Sequence
  Description of Artificial Sequence: Synthetic oligonucleotide
uccccaaccaaaaugcuuc

SEQ ID NO: 2204952 - RNA, 19 nt, Artificial Sequence
  Description of Artificial Sequence: Synthetic oligonucleotide
uagcuaguggcccagcuga

SEQ ID NO: 2204953 - RNA, 19 nt, Artificial Sequence
  Description of Artificial Sequence: Synthetic oligonucleotide
uaugcgacauccucaguug

SEQ ID NO: 2204954 - RNA, 19 nt, Artificial Sequence
  Description of Artificial Sequence: Synthetic oligonucleotide
uacaccugcuacaaagucu

SEQ ID NO: 2204955 - RNA, 19 nt, Artificial Sequence
  Description of Artificial Sequence: Synthetic oligonucleotide
uaacaccaaccacagcagg

SEQ ID NO: 2204956 - RNA, 19 nt, Artificial Sequence
  Description of Artificial Sequence: Synthetic oligonucleotide
accuccccaaccaaaaugc

SEQ ID NO: 2204957 - RNA, 19 nt, Artificial Sequence
  Description of Artificial Sequence: Synthetic oligonucleotide
caaccaaaaugcuucuuag

SEQ ID NO: 2204958 - RNA, 19 nt, Artificial Sequence
  Description of Artificial Sequence: Synthetic oligonucleotide
agggcaacuacacuggggu

SEQ ID NO: 2204959 - RNA, 19 nt, Artificial Sequence
  Description of Artificial Sequence: Synthetic oligonucleotide
aaauguaguggagccauca

SEQ ID NO: 2204960 - RNA, 19 nt, Artificial Sequence
  Description of Artificial Sequence: Synthetic oligonucleotide
agacuuaacaccaaccaca

SEQ ID NO: 2204961 - RNA, 19 nt, Artificial Sequence
  Description of Artificial Sequence: Synthetic oligonucleotide
uagcucugacccuugacag

SEQ ID NO: 2204962 - RNA, 19 nt, Artificial Sequence
  Description of Artificial Sequence: Synthetic oligonucleotide
uuuaguacaccugcuacaa

SEQ ID NO: 2204963 - RNA, 19 nt, Artificial Sequence
  Description of Artificial Sequence: Synthetic oligonucleotide
caucuaacaaagagacggg

SEQ ID NO: 2204964 - RNA, 19 nt, Artificial Sequence
  Description of Artificial Sequence: Synthetic oligonucleotide
gaugcaaccuaggagccag

SEQ ID NO: 2204965 - RNA, 19 nt, Artificial Sequence
  Description of Artificial Sequence: Synthetic oligonucleotide
augcuucuuagcucugacc

SEQ ID NO: 2204966 - RNA, 19 nt, Artificial Sequence
  Description of Artificial Sequence: Synthetic oligonucleotide
aauucgcugcccagggugc

SEQ ID NO: 2204967 - RNA, 19 nt, Artificial Sequence
  Description of Artificial Sequence: Synthetic oligonucleotide
uaguggagccaucaggugu

SEQ ID NO: 2204968 - RNA, 19 nt, Artificial Sequence
  Description of Artificial Sequence: Synthetic oligonucleotide
agucuuagggcaacuacac

SEQ ID NO: 2204969 - RNA, 19 nt, Artificial Sequence
  Description of Artificial Sequence: Synthetic oligonucleotide
gaugcaucgcuggaguagg

SEQ ID NO: 2204970 - RNA, 19 nt, Artificial Sequence
  Description of Artificial Sequence: Synthetic oligonucleotide
cuucccuuauucucugugg

SEQ ID NO: 2204971 - RNA, 19 nt, Artificial Sequence
  Description of Artificial Sequence: Synthetic oligonucleotide
ugacccuugacagaagucu

SEQ ID NO: 2204972 - RNA, 19 nt, Artificial Sequence
  Description of Artificial Sequence: Synthetic oligonucleotide
auaugcgacauccucaguu

SEQ ID NO: 2204973 - RNA, 19 nt, Artificial Sequence
  Description of Artificial Sequence: Synthetic oligonucleotide
uacagaugaugcaucgcug

SEQ ID NO: 2204974 - RNA, 19 nt, Artificial Sequence
  Description of Artificial Sequence: Synthetic oligonucleotide
uacuugugcaugaggagcu

SEQ ID NO: 2204975 - RNA, 19 nt, Artificial Sequence
  Description of Artificial Sequence: Synthetic oligonucleotide
aggaauucgcugcccaggg

SEQ ID NO: 2204976 - RNA, 19 nt, Artificial Sequence
  Description of Artificial Sequence: Synthetic oligonucleotide
uugaagagagucacucgca

SEQ ID NO: 2204977 - RNA, 19 nt, Artificial Sequence
  Description of Artificial Sequence: Synthetic oligonucleotide
uuagggcaacuacacuggg

SEQ ID NO: 2204978 - RNA, 19 nt, Artificial Sequence
  Description of Artificial Sequence: Synthetic oligonucleotide
ucuggacggugauacaacc

SEQ ID NO: 2204979 - RNA, 19 nt, Artificial Sequence
  Description of Artificial Sequence: Synthetic oligonucleotide
ugcaugaggagcucaguac

SEQ ID NO: 2204980 - RNA, 19 nt, Artificial Sequence
  Description of Artificial Sequence: Synthetic oligonucleotide
aagucuuagggcaacuaca

SEQ ID NO: 2204981 - RNA, 19 nt, Artificial Sequence
  Description of Artificial Sequence: Synthetic oligonucleotide
agacagacuucaccugccc

SEQ ID NO: 2204982 - RNA, 19 nt, Artificial Sequence
  Description of Artificial Sequence: Synthetic oligonucleotide
aucuaacaaagagacgggg

SEQ ID NO: 2204983 - RNA, 19 nt, Artificial Sequence
  Description of Artificial Sequence: Synthetic oligonucleotide
accuggagcuguugaaggc

SEQ ID NO: 2204984 - RNA, 19 nt, Artificial Sequence
  Description of Artificial Sequence: Synthetic oligonucleotide
cuaugugacaucuaacaaa

SEQ ID NO: 2204985 - RNA, 19 nt, Artificial Sequence
  Description of Artificial Sequence: Synthetic oligonucleotide
aguuaugucucuggagacg

SEQ ID NO: 2204986 - RNA, 19 nt, Artificial Sequence
  Description of Artificial Sequence: Synthetic oligonucleotide
cuucugucuuuaauaugcg

SEQ ID NO: 2204987 - RNA, 19 nt, Artificial Sequence
  Description of Artificial Sequence: Synthetic oligonucleotide
aucuuucugccauacagau

SEQ ID NO: 2204988 - RNA, 19 nt, Artificial Sequence
  Description of Artificial Sequence: Synthetic oligonucleotide
uuuguagacaaaggcugcc

SEQ ID NO: 2204989 - RNA, 19 nt, Artificial Sequence
  Description of Artificial Sequence: Synthetic oligonucleotide
ugaugcaucgcuggaguag

SEQ ID NO: 2204990 - RNA, 19 nt, Artificial Sequence
  Description of Artificial Sequence: Synthetic oligonucleotide
gguagagacagacuucacc

SEQ ID NO: 2204991 - RNA, 19 nt, Artificial Sequence
  Description of Artificial Sequence: Synthetic oligonucleotide
ugucuugugucucccacuc

SEQ ID NO: 2204992 - RNA, 19 nt, Artificial Sequence
  Description of Artificial Sequence: Synthetic oligonucleotide
augcgacauccucaguugc

SEQ ID NO: 2204993 - RNA, 19 nt, Artificial Sequence
  Description of Artificial Sequence: Synthetic oligonucleotide
guacuugugcaugaggagc

SEQ ID NO: 2204994 - RNA, 19 nt, Artificial Sequence
  Description of Artificial Sequence: Synthetic oligonucleotide
cuggagacgcuucugcugc

SEQ ID NO: 2204995 - RNA, 19 nt, Artificial Sequence
  Description of Artificial Sequence: Synthetic oligonucleotide
gagacggggacaccugagg

SEQ ID NO: 2204996 - RNA, 19 nt, Artificial Sequence
  Description of Artificial Sequence: Synthetic oligonucleotide
caaaaugcuucuuagcucu

SEQ ID NO: 2204997 - RNA, 19 nt, Artificial Sequence
  Description of Artificial Sequence: Synthetic oligonucleotide
aaacugcccagaccaaggu

SEQ ID NO: 2204998 - RNA, 19 nt, Artificial Sequence
  Description of Artificial Sequence: Synthetic oligonucleotide
uugagagguucauuugcug

SEQ ID NO: 2204999 - RNA, 19 nt, Artificial Sequence
  Description of Artificial Sequence: Synthetic oligonucleotide
aguagguacuugugcauga

SEQ ID NO: 2205000 - RNA, 19 nt, Artificial Sequence
  Description of Artificial Sequence: Synthetic oligonucleotide
uucccaugaagggaaaugu

SEQ ID NO: 2205001 - RNA, 19 nt, Artificial Sequence
  Description of Artificial Sequence: Synthetic oligonucleotide
aagguuccgccaugacugg

SEQ ID NO: 2205002 - RNA, 19 nt, Artificial Sequence
  Description of Artificial Sequence: Synthetic oligonucleotide
ggcuaugugacaucuaaca

SEQ ID NO: 2205003 - RNA, 19 nt, Artificial Sequence
  Description of Artificial Sequence: Synthetic oligonucleotide
ggcaggaacacacccagag

SEQ ID NO: 2205004 - RNA, 19 nt, Artificial Sequence
  Description of Artificial Sequence: Synthetic oligonucleotide
uagagacagacuucaccug

SEQ ID NO: 2205005 - RNA, 19 nt, Artificial Sequence
  Description of Artificial Sequence: Synthetic oligonucleotide
cugucuuuaauaugcgaca

SEQ ID NO: 2205006 - RNA, 19 nt, Artificial Sequence
  Description of Artificial Sequence: Synthetic oligonucleotide
gaaacacugugguacucca

SEQ ID NO: 2205007 - RNA, 19 nt, Artificial Sequence
  Description of Artificial Sequence: Synthetic oligonucleotide
uaacaaagagacggggaca

SEQ ID NO: 2205008 - RNA, 19 nt, Artificial Sequence
  Description of Artificial Sequence: Synthetic oligonucleotide
ucccgcaggaauucgcugc

SEQ ID NO: 2205009 - RNA, 19 nt, Artificial Sequence
  Description of Artificial Sequence: Synthetic oligonucleotide
aagagacggggacaccuga

SEQ ID NO: 2205010 - RNA, 19 nt, Artificial Sequence
  Description of Artificial Sequence: Synthetic oligonucleotide
cuaguggcccagcugagac

SEQ ID NO: 2205011 - RNA, 19 nt, Artificial Sequence
  Description of Artificial Sequence: Synthetic oligonucleotide
cuguguucccguagaaccc

SEQ ID NO: 2205012 - RNA, 19 nt, Artificial Sequence
  Description of Artificial Sequence: Synthetic oligonucleotide
agcuggaugcccaggagac

SEQ ID NO: 2205013 - RNA, 19 nt, Artificial Sequence
  Description of Artificial Sequence: Synthetic oligonucleotide
auacaacccggucacugug

SEQ ID NO: 2205014 - RNA, 19 nt, Artificial Sequence
  Description of Artificial Sequence: Synthetic oligonucleotide
aacaucuuucugccauaca

SEQ ID NO: 2205015 - RNA, 19 nt, Artificial Sequence
  Description of Artificial Sequence: Synthetic oligonucleotide
cagaccuggaggcaggaac

SEQ ID NO: 2205016 - RNA, 19 nt, Artificial Sequence
  Description of Artificial Sequence: Synthetic oligonucleotide
agaaggcuaugugacaucu

SEQ ID NO: 2205017 - RNA, 19 nt, Artificial Sequence
  Description of Artificial Sequence: Synthetic oligonucleotide
aaccuaggagccagcaguc

SEQ ID NO: 2205018 - RNA, 19 nt, Artificial Sequence
  Description of Artificial Sequence: Synthetic oligonucleotide
gucccaguuaugucucugg

SEQ ID NO: 2205019 - RNA, 19 nt, Artificial Sequence
  Description of Artificial Sequence: Synthetic oligonucleotide
ucacucgcaugucuugugu

SEQ ID NO: 2205020 - RNA, 19 nt, Artificial Sequence
  Description of Artificial Sequence: Synthetic oligonucleotide
cuugugucucccacucccg

SEQ ID NO: 2205021 - RNA, 19 nt, Artificial Sequence
  Description of Artificial Sequence: Synthetic oligonucleotide
uuguccaacgggucugggc

SEQ ID NO: 2205022 - RNA, 19 nt, Artificial Sequence
  Description of Artificial Sequence: Synthetic oligonucleotide
guguggauccauucuggcc

SEQ ID NO: 2205023 - RNA, 19 nt, Artificial Sequence
  Description of Artificial Sequence: Synthetic oligonucleotide
acucgcaugucuugugucu

SEQ ID NO: 2205024 - RNA, 19 nt, Artificial Sequence
  Description of Artificial Sequence: Synthetic oligonucleotide
aaaugcuucuuagcucuga

SEQ ID NO: 2205025 - RNA, 19 nt, Artificial Sequence
  Description of Artificial Sequence: Synthetic oligonucleotide
ucccaguuaugucucugga

SEQ ID NO: 2205026 - RNA, 19 nt, Artificial Sequence
  Description of Artificial Sequence: Synthetic oligonucleotide
acggugauacaacccgguc

SEQ ID NO: 2205027 - RNA, 19 nt, Artificial Sequence
  Description of Artificial Sequence: Synthetic oligonucleotide
cccaugaagggaaauguag

SEQ ID NO: 2205028 - RNA, 19 nt, Artificial Sequence
  Description of Artificial Sequence: Synthetic oligonucleotide
ugccauacagaugaugcau

SEQ ID NO: 2205029 - RNA, 19 nt, Artificial Sequence
  Description of Artificial Sequence: Synthetic oligonucleotide
cuggacggugauacaaccc

SEQ ID NO: 2205030 - RNA, 19 nt, Artificial Sequence
  Description of Artificial Sequence: Synthetic oligonucleotide
aauaugcgacauccucagu

SEQ ID NO: 2205031 - RNA, 19 nt, Artificial Sequence
  Description of Artificial Sequence: Synthetic oligonucleotide
cucaguugcuccuggggug

SEQ ID NO: 2205032 - RNA, 19 nt, Artificial Sequence
  Description of Artificial Sequence: Synthetic oligonucleotide
gaugaugcaucgcuggagu

SEQ ID NO: 2205033 - RNA, 19 nt, Artificial Sequence
  Description of Artificial Sequence: Synthetic oligonucleotide
caauggaggcucacccugg

SEQ ID NO: 2205034 - RNA, 19 nt, Artificial Sequence
  Description of Artificial Sequence: Synthetic oligonucleotide
caguuaugucucuggagac

SEQ ID NO: 2205035 - RNA, 19 nt, Artificial Sequence
  Description of Artificial Sequence: Synthetic oligonucleotide
gaguagguacuugugcaug

SEQ ID NO: 2205036 - RNA, 19 nt, Artificial Sequence
  Description of Artificial Sequence: Synthetic oligonucleotide
ugcgacauccucaguugcu

SEQ ID NO: 2205037 - RNA, 19 nt, Artificial Sequence
  Description of Artificial Sequence: Synthetic oligonucleotide
uuguagacaaaggcugcca

SEQ ID NO: 2205038 - RNA, 19 nt, Artificial Sequence
  Description of Artificial Sequence: Synthetic oligonucleotide
aaagagacggggacaccug

SEQ ID NO: 2205039 - RNA, 19 nt, Artificial Sequence
  Description of Artificial Sequence: Synthetic oligonucleotide
caucuuucugccauacaga

SEQ ID NO: 2205040 - RNA, 19 nt, Artificial Sequence
  Description of Artificial Sequence: Synthetic oligonucleotide
gcuugaagagagucacucg

SEQ ID NO: 2205041 - RNA, 19 nt, Artificial Sequence
  Description of Artificial Sequence: Synthetic oligonucleotide
aucuggacggugauacaac

SEQ ID NO: 2205042 - RNA, 19 nt, Artificial Sequence
  Description of Artificial Sequence: Synthetic oligonucleotide
ugaaagcaauggaggcuca

SEQ ID NO: 2205043 - RNA, 19 nt, Artificial Sequence
  Description of Artificial Sequence: Synthetic oligonucleotide
guaccuggagcuguugaag

SEQ ID NO: 2205044 - RNA, 19 nt, Artificial Sequence
  Description of Artificial Sequence: Synthetic oligonucleotide
cucugcaguuguccaacgg

SEQ ID NO: 2205045 - RNA, 19 nt, Artificial Sequence
  Description of Artificial Sequence: Synthetic oligonucleotide
ugcaguuguccaacggguc

SEQ ID NO: 2205046 - RNA, 19 nt, Artificial Sequence
  Description of Artificial Sequence: Synthetic oligonucleotide
gagucacucgcaugucuug

SEQ ID NO: 2205047 - RNA, 19 nt, Artificial Sequence
  Description of Artificial Sequence: Synthetic oligonucleotide
uacaacccggucacugugu

SEQ ID NO: 2205048 - RNA, 19 nt, Artificial Sequence
  Description of Artificial Sequence: Synthetic oligonucleotide
agacggggacaccugaggu

SEQ ID NO: 2205049 - RNA, 19 nt, Artificial Sequence
  Description of Artificial Sequence: Synthetic oligonucleotide
ucccuuauucucugugggu

SEQ ID NO: 2205050 - RNA, 19 nt, Artificial Sequence
  Description of Artificial Sequence: Synthetic oligonucleotide
caggaauucgcugcccagg

SEQ ID NO: 2205051 - RNA, 19 nt, Artificial Sequence
  Description of Artificial Sequence: Synthetic oligonucleotide
gaacaucuuucugccauac

SEQ ID NO: 2205052 - RNA, 19 nt, Artificial Sequence
  Description of Artificial Sequence: Synthetic oligonucleotide
ggcaacuacacugggguag

SEQ ID NO: 2205053 - RNA, 19 nt, Artificial Sequence
  Description of Artificial Sequence: Synthetic oligonucleotide
gaucuggacggugauacaa

SEQ ID NO: 2205054 - RNA, 19 nt, Artificial Sequence
  Description of Artificial Sequence: Synthetic oligonucleotide
ucuuagcucugacccuuga

SEQ ID NO: 2205055 - RNA, 19 nt, Artificial Sequence
  Description of Artificial Sequence: Synthetic oligonucleotide
ugggguagagacagacuuc

SEQ ID NO: 2205056 - RNA, 19 nt, Artificial Sequence
  Description of Artificial Sequence: Synthetic oligonucleotide
accugcuacaaagucuuug

SEQ ID NO: 2205057 - RNA, 19 nt, Artificial Sequence
  Description of Artificial Sequence: Synthetic oligonucleotide
uuaguacaccugcuacaaa

SEQ ID NO: 2205058 - RNA, 19 nt, Artificial Sequence
  Description of Artificial Sequence: Synthetic oligonucleotide
aaggcugccagaaggcuau

SEQ ID NO: 2205059 - RNA, 19 nt, Artificial Sequence
  Description of Artificial Sequence: Synthetic oligonucleotide
uauucucuguggguuuuga

SEQ ID NO: 2205060 - RNA, 19 nt, Artificial Sequence
  Description of Artificial Sequence: Synthetic oligonucleotide
cugagguagcuaguggccc

SEQ ID NO: 2205061 - RNA, 19 nt, Artificial Sequence
  Description of Artificial Sequence: Synthetic oligonucleotide
accaagguuccgccaugac

SEQ ID NO: 2205062 - RNA, 19 nt, Artificial Sequence
  Description of Artificial Sequence: Synthetic oligonucleotide
ucccaugaagggaaaugua

SEQ ID NO: 2205063 - RNA, 19 nt, Artificial Sequence
  Description of Artificial Sequence: Synthetic oligonucleotide
acaaagagacggggacacc

SEQ ID NO: 2205064 - RNA, 19 nt, Artificial Sequence
  Description of Artificial Sequence: Synthetic oligonucleotide
guaguggagccaucaggug

SEQ ID NO: 2205065 - RNA, 19 nt, Artificial Sequence
  Description of Artificial Sequence: Synthetic oligonucleotide
aacugcccagaccaagguu

SEQ ID NO: 2205066 - RNA, 19 nt, Artificial Sequence
  Description of Artificial Sequence: Synthetic oligonucleotide
ccaguuaugucucuggaga

SEQ ID NO: 2205067 - RNA, 19 nt, Artificial Sequence
  Description of Artificial Sequence: Synthetic oligonucleotide
ucgcaugucuugugucucc

SEQ ID NO: 2205068 - RNA, 19 nt, Artificial Sequence
  Description of Artificial Sequence: Synthetic oligonucleotide
uucuuagcucugacccuug

SEQ ID NO: 2205069 - RNA, 19 nt, Artificial Sequence
  Description of Artificial Sequence: Synthetic oligonucleotide
gucuuuaauaugcgacauc

SEQ ID NO: 2205070 - RNA, 19 nt, Artificial Sequence
  Description of Artificial Sequence: Synthetic oligonucleotide
gucuuuguagacaaaggcu

SEQ ID NO: 2205071 - RNA, 19 nt, Artificial Sequence
  Description of Artificial Sequence: Synthetic oligonucleotide
caccugagguagcuagugg

SEQ ID NO: 2205072 - RNA, 19 nt, Artificial Sequence
  Description of Artificial Sequence: Synthetic oligonucleotide
aaaaugcuucuuagcucug

SEQ ID NO: 2205073 - RNA, 19 nt, Artificial Sequence
  Description of Artificial Sequence: Synthetic oligonucleotide
aaggcaaggcugaaagcaa

SEQ ID NO: 2205074 - RNA, 19 nt, Artificial Sequence
  Description of Artificial Sequence: Synthetic oligonucleotide
agacaaagugaaagggcug

SEQ ID NO: 2205075 - RNA, 19 nt, Artificial Sequence
  Description of Artificial Sequence: Synthetic oligonucleotide
accccaagcccucugcagu

SEQ ID NO: 2205076 - RNA, 19 nt, Artificial Sequence
  Description of Artificial Sequence: Synthetic oligonucleotide
gcaaggcugaaagcaaugg

SEQ ID NO: 2205077 - RNA, 19 nt, Artificial Sequence
  Description of Artificial Sequence: Synthetic oligonucleotide
ggaaacacugugguacucc

SEQ ID NO: 2205078 - RNA, 19 nt, Artificial Sequence
  Description of Artificial Sequence: Synthetic oligonucleotide
caaccuaggagccagcagu

SEQ ID NO: 2205079 - RNA, 19 nt, Artificial Sequence
  Description of Artificial Sequence: Synthetic oligonucleotide
aggcuaugugacaucuaac

SEQ ID NO: 2205080 - RNA, 19 nt, Artificial Sequence
  Description of Artificial Sequence: Synthetic oligonucleotide
gcccaggagacuuaacacc

SEQ ID NO: 2205081 - RNA, 19 nt, Artificial Sequence
  Description of Artificial Sequence: Synthetic oligonucleotide
accuaggagccagcagucc

SEQ ID NO: 2205082 - RNA, 19 nt, Artificial Sequence
  Description of Artificial Sequence: Synthetic oligonucleotide
guagguacuugugcaugag

SEQ ID NO: 2205083 - RNA, 19 nt, Artificial Sequence
  Description of Artificial Sequence: Synthetic oligonucleotide
ugcaaccuaggagccagca

SEQ ID NO: 2205084 - RNA, 19 nt, Artificial Sequence
  Description of Artificial Sequence: Synthetic oligonucleotide
ucuuuguggugaugucagu

SEQ ID NO: 2205085 - RNA, 19 nt, Artificial Sequence
  Description of Artificial Sequence: Synthetic oligonucleotide
uuauucucuguggguuuug

SEQ ID NO: 2205086 - RNA, 19 nt, Artificial Sequence
  Description of Artificial Sequence: Synthetic oligonucleotide
gguuuugagagguucauuu

SEQ ID NO: 2205087 - RNA, 19 nt, Artificial Sequence
  Description of Artificial Sequence: Synthetic oligonucleotide
cugcccagaccaagguucc

SEQ ID NO: 2205088 - RNA, 19 nt, Artificial Sequence
  Description of Artificial Sequence: Synthetic oligonucleotide
agaacaucuuucugccaua

SEQ ID NO: 2205089 - RNA, 19 nt, Artificial Sequence
  Description of Artificial Sequence: Synthetic oligonucleotide
cacugggguagagacagac

SEQ ID NO: 2205090 - RNA, 19 nt, Artificial Sequence
  Description of Artificial Sequence: Synthetic oligonucleotide
gucacucgcaugucuugug

SEQ ID NO: 2205091 - RNA, 19 nt, Artificial Sequence
  Description of Artificial Sequence: Synthetic oligonucleotide
auucgcugcccagggugcc

SEQ ID NO: 2205092 - RNA, 19 nt, Artificial Sequence
  Description of Artificial Sequence: Synthetic oligonucleotide
cugacccuugacagaaguc

SEQ ID NO: 2205093 - RNA, 19 nt, Artificial Sequence
  Description of Artificial Sequence: Synthetic oligonucleotide
gguguggauccauucuggc

SEQ ID NO: 2205094 - RNA, 19 nt, Artificial Sequence
  Description of Artificial Sequence: Synthetic oligonucleotide
ccugagguagcuaguggcc

SEQ ID NO: 2205095 - RNA, 19 nt, Artificial Sequence
  Description of Artificial Sequence: Synthetic oligonucleotide
agcucugacccuugacaga

SEQ ID NO: 2205096 - RNA, 19 nt, Artificial Sequence
  Description of Artificial Sequence: Synthetic oligonucleotide
gcuccgagcaccgacgcgg

SEQ ID NO: 2205097 - RNA, 19 nt, Artificial Sequence
  Description of Artificial Sequence: Synthetic oligonucleotide
cacucccgcaggaauucgc

SEQ ID NO: 2205098 - RNA, 19 nt, Artificial Sequence
  Description of Artificial Sequence: Synthetic oligonucleotide
guggaaugugagaccuugg

SEQ ID NO: 2205099 - RNA, 19 nt, Artificial Sequence
  Description of Artificial Sequence: Synthetic oligonucleotide
gcaucgcuggaguagguac

SEQ ID NO: 2205100 - RNA, 19 nt, Artificial Sequence
  Description of Artificial Sequence: Synthetic oligonucleotide
gcuaugugacaucuaacaa

SEQ ID NO: 2205101 - RNA, 19 nt, Artificial Sequence
  Description of Artificial Sequence: Synthetic oligonucleotide
agaccaagguuccgccaug

SEQ ID NO: 2205102 - RNA, 19 nt, Artificial Sequence
  Description of Artificial Sequence: Synthetic oligonucleotide
agaccuggaggcaggaaca

SEQ ID NO: 2205103 - RNA, 19 nt, Artificial Sequence
  Description of Artificial Sequence: Synthetic oligonucleotide
cauuugcugccauuuccca

SEQ ID NO: 2205104 - RNA, 19 nt, Artificial Sequence
  Description of Artificial Sequence: Synthetic oligonucleotide
gauccauucuggccaccca

SEQ ID NO: 2205105 - RNA, 19 nt, Artificial Sequence
  Description of Artificial Sequence: Synthetic oligonucleotide
gugcccagcgcuccgagca

SEQ ID NO: 2205106 - RNA, 19 nt, Artificial Sequence
  Description of Artificial Sequence: Synthetic oligonucleotide
cuaggagccagcaguccca

SEQ ID NO: 2205107 - RNA, 19 nt, Artificial Sequence
  Description of Artificial Sequence: Synthetic oligonucleotide
caccaaccacagcaggagc

SEQ ID NO: 2205108 - RNA, 19 nt, Artificial Sequence
  Description of Artificial Sequence: Synthetic oligonucleotide
ugaccuccccaaccaaaau

SEQ ID NO: 2205109 - RNA, 19 nt, Artificial Sequence
  Description of Artificial Sequence: Synthetic oligonucleotide
agucacucgcaugucuugu

SEQ ID NO: 2205110 - RNA, 19 nt, Artificial Sequence
  Description of Artificial Sequence: Synthetic oligonucleotide
acuugugcaugaggagcuc

SEQ ID NO: 2205111 - RNA, 19 nt, Artificial Sequence
  Description of Artificial Sequence: Synthetic oligonucleotide
cacucgcaugucuuguguc

SEQ ID NO: 2205112 - RNA, 19 nt, Artificial Sequence
  Description of Artificial Sequence: Synthetic oligonucleotide
uaguggcccagcugagaca

SEQ ID NO: 2205113 - RNA, 19 nt, Artificial Sequence
  Description of Artificial Sequence: Synthetic oligonucleotide
cagaaggcuaugugacauc

SEQ ID NO: 2205114 - RNA, 19 nt, Artificial Sequence
  Description of Artificial Sequence: Synthetic oligonucleotide
gagagucacucgcaugucu

SEQ ID NO: 2205115 - RNA, 19 nt, Artificial Sequence
  Description of Artificial Sequence: Synthetic oligonucleotide
ggucacuguguucccguag

SEQ ID NO: 2205116 - RNA, 19 nt, Artificial Sequence
  Description of Artificial Sequence: Synthetic oligonucleotide
agcgcuccgagcaccgacg

SEQ ID NO: 2205117 - RNA, 19 nt, Artificial Sequence
  Description of Artificial Sequence: Synthetic oligonucleotide
cuuuaauaugcgacauccu

SEQ ID NO: 2205118 - RNA, 19 nt, Artificial Sequence
  Description of Artificial Sequence: Synthetic oligonucleotide
gugcaugaggagcucagua

SEQ ID NO: 2205119 - RNA, 19 nt, Artificial Sequence
  Description of Artificial Sequence: Synthetic oligonucleotide
agagacggggacaccugag

SEQ ID NO: 2205120 - RNA, 19 nt, Artificial Sequence
  Description of Artificial Sequence: Synthetic oligonucleotide
acccggucacuguguuccc

SEQ ID NO: 2205121 - RNA, 19 nt, Artificial Sequence
  Description of Artificial Sequence: Synthetic oligonucleotide
cugggguagagacagacuu

SEQ ID NO: 2205122 - RNA, 19 nt, Artificial Sequence
  Description of Artificial Sequence: Synthetic oligonucleotide
gcaaccuaggagccagcag

SEQ ID NO: 2205123 - RNA, 19 nt, Artificial Sequence
  Description of Artificial Sequence: Synthetic oligonucleotide
ccccacgccagcuggaugc

SEQ ID NO: 2205124 - RNA, 19 nt, Artificial Sequence
  Description of Artificial Sequence: Synthetic oligonucleotide
agaagucuuagggcaacua

SEQ ID NO: 2205125 - RNA, 19 nt, Artificial Sequence
  Description of Artificial Sequence: Synthetic oligonucleotide
gaaauguaguggagccauc

SEQ ID NO: 2205126 - RNA, 19 nt, Artificial Sequence
  Description of Artificial Sequence: Synthetic oligonucleotide
gucuugugucucccacucc

SEQ ID NO: 2205127 - RNA, 19 nt, Artificial Sequence
  Description of Artificial Sequence: Synthetic oligonucleotide
gggguagagacagacuuca

SEQ ID NO: 2205128 - RNA, 19 nt, Artificial Sequence
  Description of Artificial Sequence: Synthetic oligonucleotide
uccaacgggucugggcagc

SEQ ID NO: 2205129 - RNA, 19 nt, Artificial Sequence
  Description of Artificial Sequence: Synthetic oligonucleotide
cuacacugggguagagaca

SEQ ID NO: 2205130 - RNA, 19 nt, Artificial Sequence
  Description of Artificial Sequence: Synthetic oligonucleotide
agcaccgacgcgggcagag

SEQ ID NO: 2205131 - RNA, 19 nt, Artificial Sequence
  Description of Artificial Sequence: Synthetic oligonucleotide
cagaugaugcaucgcugga

SEQ ID NO: 2205132 - RNA, 19 nt, Artificial Sequence
  Description of Artificial Sequence: Synthetic oligonucleotide
gacggggacaccugaggua

SEQ ID NO: 2205133 - RNA, 19 nt, Artificial Sequence
  Description of Artificial Sequence: Synthetic oligonucleotide
guccaacgggucugggcag

SEQ ID NO: 2205134 - RNA, 19 nt, Artificial Sequence
  Description of Artificial Sequence: Synthetic oligonucleotide
acaacccggucacuguguu

SEQ ID NO: 2205135 - RNA, 19 nt, Artificial Sequence
  Description of Artificial Sequence: Synthetic oligonucleotide
cuccgagcaccgacgcggg

SEQ ID NO: 2205136 - RNA, 19 nt, Artificial Sequence
  Description of Artificial Sequence: Synthetic oligonucleotide
ccuugacagaagucuuagg

SEQ ID NO: 2205137 - RNA, 19 nt, Artificial Sequence
  Description of Artificial Sequence: Synthetic oligonucleotide
ugcugaccuccccaaccaa

SEQ ID NO: 2205138 - RNA, 19 nt, Artificial Sequence
  Description of Artificial Sequence: Synthetic oligonucleotide
gugggucugaggcugugaa

SEQ ID NO: 2205139 - RNA, 19 nt, Artificial Sequence
  Description of Artificial Sequence: Synthetic oligonucleotide
augaugcaucgcuggagua

SEQ ID NO: 2205140 - RNA, 19 nt, Artificial Sequence
  Description of Artificial Sequence: Synthetic oligonucleotide
caaagagacggggacaccu

SEQ ID NO: 2205141 - RNA, 19 nt, Artificial Sequence
  Description of Artificial Sequence: Synthetic oligonucleotide
uggaaacacugugguacuc

SEQ ID NO: 2205142 - RNA, 19 nt, Artificial Sequence
  Description of Artificial Sequence: Synthetic oligonucleotide
guggauccauucuggccac

SEQ ID NO: 2205143 - RNA, 19 nt, Artificial Sequence
  Description of Artificial Sequence: Synthetic oligonucleotide
cagcuggaugcccaggaga

SEQ ID NO: 2205144 - RNA, 19 nt, Artificial Sequence
  Description of Artificial Sequence: Synthetic oligonucleotide
ggacggugauacaacccgg

SEQ ID NO: 2205145 - RNA, 19 nt, Artificial Sequence
  Description of Artificial Sequence: Synthetic oligonucleotide
cucgcaugucuugugucuc

SEQ ID NO: 2205146 - RNA, 19 nt, Artificial Sequence
  Description of Artificial Sequence: Synthetic oligonucleotide
ugcaucgcuggaguaggua

SEQ ID NO: 2205147 - RNA, 19 nt, Artificial Sequence
  Description of Artificial Sequence: Synthetic oligonucleotide
agguagcuaguggcccagc

SEQ ID NO: 2205148 - RNA, 19 nt, Artificial Sequence
  Description of Artificial Sequence: Synthetic oligonucleotide
cugcccaguaccuggagcu

SEQ ID NO: 2205149 - RNA, 19 nt, Artificial Sequence
  Description of Artificial Sequence: Synthetic oligonucleotide
ccauuucccaugaagggaa

SEQ ID NO: 2205150 - RNA, 19 nt, Artificial Sequence
  Description of Artificial Sequence: Synthetic oligonucleotide
ggauccauucuggccaccc

SEQ ID NO: 2205151 - RNA, 19 nt, Artificial Sequence
  Description of Artificial Sequence: Synthetic oligonucleotide
cugcugaccuccccaacca

SEQ ID NO: 2205152 - RNA, 19 nt, Artificial Sequence
  Description of Artificial Sequence: Synthetic oligonucleotide
guuguccaacgggucuggg

SEQ ID NO: 2205153 - RNA, 19 nt, Artificial Sequence
  Description of Artificial Sequence: Synthetic oligonucleotide
cugcaguuguccaacgggu

SEQ ID NO: 2205154 - RNA, 19 nt, Artificial Sequence
  Description of Artificial Sequence: Synthetic oligonucleotide
agguucauuugcugccauu

SEQ ID NO: 2205155 - RNA, 19 nt, Artificial Sequence
  Description of Artificial Sequence: Synthetic oligonucleotide
cucugacccuugacagaag

SEQ ID NO: 2205156 - RNA, 19 nt, Artificial Sequence
  Description of Artificial Sequence: Synthetic oligonucleotide
cuugugcaugaggagcuca

SEQ ID NO: 2205157 - RNA, 19 nt, Artificial Sequence
  Description of Artificial Sequence: Synthetic oligonucleotide
ggaaauguaguggagccau

SEQ ID NO: 2205158 - RNA, 19 nt, Artificial Sequence
  Description of Artificial Sequence: Synthetic oligonucleotide
acucccgcaggaauucgcu

SEQ ID NO: 2205159 - RNA, 19 nt, Artificial Sequence
  Description of Artificial Sequence: Synthetic oligonucleotide
gaccuggaggcaggaacac

SEQ ID NO: 2205160 - RNA, 19 nt, Artificial Sequence
  Description of Artificial Sequence: Synthetic oligonucleotide
ccaaccaaaaugcuucuua

SEQ ID NO: 2205161 - RNA, 19 nt, Artificial Sequence
  Description of Artificial Sequence: Synthetic oligonucleotide
gcucuuuguggugauguca

SEQ ID NO: 2205162 - RNA, 19 nt, Artificial Sequence
  Description of Artificial Sequence: Synthetic oligonucleotide
gaccaagguuccgccauga

SEQ ID NO: 2205163 - RNA, 19 nt, Artificial Sequence
  Description of Artificial Sequence: Synthetic oligonucleotide
uggagacgcuucugcugcu

SEQ ID NO: 2205164 - RNA, 19 nt, Artificial Sequence
  Description of Artificial Sequence: Synthetic oligonucleotide
gaugcccaggagacuuaac

SEQ ID NO: 2205165 - RNA, 19 nt, Artificial Sequence
  Description of Artificial Sequence: Synthetic oligonucleotide
cccagaccaagguuccgcc

SEQ ID NO: 2205166 - RNA, 19 nt, Artificial Sequence
  Description of Artificial Sequence: Synthetic oligonucleotide
cccuugacagaagucuuag

SEQ ID NO: 2205167 - RNA, 19 nt, Artificial Sequence
  Description of Artificial Sequence: Synthetic oligonucleotide
gaggcucacccuggaaaca

SEQ ID NO: 2205168 - RNA, 19 nt, Artificial Sequence
  Description of Artificial Sequence: Synthetic oligonucleotide
caagcccucugcaguuguc

SEQ ID NO: 2205169 - RNA, 19 nt, Artificial Sequence
  Description of Artificial Sequence: Synthetic oligonucleotide
guggggaucuggacgguga

SEQ ID NO: 2205170 - RNA, 19 nt, Artificial Sequence
  Description of Artificial Sequence: Synthetic oligonucleotide
agacuucaccugcccagua

SEQ ID NO: 2205171 - RNA, 19 nt, Artificial Sequence
  Description of Artificial Sequence: Synthetic oligonucleotide
auggaggcucacccuggaa

SEQ ID NO: 2205172 - RNA, 19 nt, Artificial Sequence
  Description of Artificial Sequence: Synthetic oligonucleotide
aggcaaggcugaaagcaau

SEQ ID NO: 2205173 - RNA, 19 nt, Artificial Sequence
  Description of Artificial Sequence: Synthetic oligonucleotide
ucucccacucccgcaggaa

SEQ ID NO: 2205174 - RNA, 19 nt, Artificial Sequence
  Description of Artificial Sequence: Synthetic oligonucleotide
gacggugauacaacccggu

SEQ ID NO: 2205175 - RNA, 19 nt, Artificial Sequence
  Description of Artificial Sequence: Synthetic oligonucleotide
aucgcuggaguagguacuu

SEQ ID NO: 2205176 - RNA, 19 nt, Artificial Sequence
  Description of Artificial Sequence: Synthetic oligonucleotide
augugacaucuaacaaaga

SEQ ID NO: 2205177 - RNA, 19 nt, Artificial Sequence
  Description of Artificial Sequence: Synthetic oligonucleotide
caacccggucacuguguuc

SEQ ID NO: 2205178 - RNA, 19 nt, Artificial Sequence
  Description of Artificial Sequence: Synthetic oligonucleotide
gcucugacccuugacagaa

SEQ ID NO: 2205179 - RNA, 19 nt, Artificial Sequence
  Description of Artificial Sequence: Synthetic oligonucleotide
cagggugcccagcgcuccg

SEQ ID NO: 2205180 - RNA, 19 nt, Artificial Sequence
  Description of Artificial Sequence: Synthetic oligonucleotide
caaccccaagcccucugca

SEQ ID NO: 2205181 - RNA, 19 nt, Artificial Sequence
  Description of Artificial Sequence: Synthetic oligonucleotide
cugcuacaaagucuuugua

SEQ ID NO: 2205182 - RNA, 19 nt, Artificial Sequence
  Description of Artificial Sequence: Synthetic oligonucleotide
gucuuagggcaacuacacu

SEQ ID NO: 2205183 - RNA, 19 nt, Artificial Sequence
  Description of Artificial Sequence: Synthetic oligonucleotide
caucgcuggaguagguacu

SEQ ID NO: 2205184 - RNA, 19 nt, Artificial Sequence
  Description of Artificial Sequence: Synthetic oligonucleotide
caacuacacugggguagag

SEQ ID NO: 2205185 - RNA, 19 nt, Artificial Sequence
  Description of Artificial Sequence: Synthetic oligonucleotide
ggaggcaggaacacaccca

SEQ ID NO: 2205186 - RNA, 19 nt, Artificial Sequence
  Description of Artificial Sequence: Synthetic oligonucleotide
gcaguuguccaacgggucu

SEQ ID NO: 2205187 - RNA, 19 nt, Artificial Sequence
  Description of Artificial Sequence: Synthetic oligonucleotide
uggauccauucuggccacc

SEQ ID NO: 2205188 - RNA, 19 nt, Artificial Sequence
  Description of Artificial Sequence: Synthetic oligonucleotide
uggagccaucaggugugga

SEQ ID NO: 2205189 - RNA, 19 nt, Artificial Sequence
  Description of Artificial Sequence: Synthetic oligonucleotide
gacgcgggcagagcuugca

SEQ ID NO: 2205190 - RNA, 19 nt, Artificial Sequence
  Description of Artificial Sequence: Synthetic oligonucleotide
ggagccaucagguguggau

SEQ ID NO: 2205191 - RNA, 19 nt, Artificial Sequence
  Description of Artificial Sequence: Synthetic oligonucleotide
gucucccacucccgcagga

SEQ ID NO: 2205192 - RNA, 19 nt, Artificial Sequence
  Description of Artificial Sequence: Synthetic oligonucleotide
gaaggcuaugugacaucua

SEQ ID NO: 2205193 - RNA, 19 nt, Artificial Sequence
  Description of Artificial Sequence: Synthetic oligonucleotide
cagaccaagguuccgccau

SEQ ID NO: 2205194 - RNA, 19 nt, Artificial Sequence
  Description of Artificial Sequence: Synthetic oligonucleotide
acccuugacagaagucuua

SEQ ID NO: 2205195 - RNA, 19 nt, Artificial Sequence
  Description of Artificial Sequence: Synthetic oligonucleotide
ggaguagguacuugugcau

SEQ ID NO: 2205196 - RNA, 19 nt, Artificial Sequence
  Description of Artificial Sequence: Synthetic oligonucleotide
gcccagaccaagguuccgc

SEQ ID NO: 2205197 - RNA, 19 nt, Artificial Sequence
  Description of Artificial Sequence: Synthetic oligonucleotide
gcccagcugagacagggaa

SEQ ID NO: 2205198 - RNA, 19 nt, Artificial Sequence
  Description of Artificial Sequence: Synthetic oligonucleotide
gcaacuacacugggguaga

SEQ ID NO: 2205199 - RNA, 19 nt, Artificial Sequence
  Description of Artificial Sequence: Synthetic oligonucleotide
acgcgggcagagcuugcaa

SEQ ID NO: 2205200 - RNA, 19 nt, Artificial Sequence
  Description of Artificial Sequence: Synthetic oligonucleotide
gcgacauccucaguugcuc

SEQ ID NO: 2205201 - RNA, 19 nt, Artificial Sequence
  Description of Artificial Sequence: Synthetic oligonucleotide
cuucuuagcucugacccuu

SEQ ID NO: 2205202 - RNA, 19 nt, Artificial Sequence
  Description of Artificial Sequence: Synthetic oligonucleotide
cuccccaaccaaaaugcuu

SEQ ID NO: 2205203 - RNA, 19 nt, Artificial Sequence
  Description of Artificial Sequence: Synthetic oligonucleotide
gguagcuaguggcccagcu

SEQ ID NO: 2205204 - RNA, 19 nt, Artificial Sequence
  Description of Artificial Sequence: Synthetic oligonucleotide
cggugauacaacccgguca

SEQ ID NO: 2205205 - RNA, 19 nt, Artificial Sequence
  Description of Artificial Sequence: Synthetic oligonucleotide
cucacccuggaaacacugu

SEQ ID NO: 2205206 - RNA, 19 nt, Artificial Sequence
  Description of Artificial Sequence: Synthetic oligonucleotide
gcgggcagagcuugcaaaa

SEQ ID NO: 2205207 - RNA, 19 nt, Artificial Sequence
  Description of Artificial Sequence: Synthetic oligonucleotide
gggguggaaugugagaccu

SEQ ID NO: 2205208 - RNA, 19 nt, Artificial Sequence
  Description of Artificial Sequence: Synthetic oligonucleotide
caacgggucugggcagcag

SEQ ID NO: 2205209 - RNA, 19 nt, Artificial Sequence
  Description of Artificial Sequence: Synthetic oligonucleotide
cuggaugcccaggagacuu

SEQ ID NO: 2205210 - RNA, 19 nt, Artificial Sequence
  Description of Artificial Sequence: Synthetic oligonucleotide
gcuucuuagcucugacccu

SEQ ID NO: 2205211 - RNA, 19 nt, Artificial Sequence
  Description of Artificial Sequence: Synthetic oligonucleotide
ccaagguuccgccaugacu

SEQ ID NO: 2205212 - RNA, 19 nt, Artificial Sequence
  Description of Artificial Sequence: Synthetic oligonucleotide
cccagcgcuccgagcaccg

SEQ ID NO: 2205213 - RNA, 19 nt, Artificial Sequence
  Description of Artificial Sequence: Synthetic oligonucleotide
augcaucgcuggaguaggu

SEQ ID NO: 2205214 - RNA, 19 nt, Artificial Sequence
  Description of Artificial Sequence: Synthetic oligonucleotide
gcugaccuccccaaccaaa

SEQ ID NO: 2205215 - RNA, 19 nt, Artificial Sequence
  Description of Artificial Sequence: Synthetic oligonucleotide
ggcugcugaccuccccaac

SEQ ID NO: 2205216 - RNA, 19 nt, Artificial Sequence
  Description of Artificial Sequence: Synthetic oligonucleotide
gcuaguggcccagcugaga

SEQ ID NO: 2205217 - RNA, 19 nt, Artificial Sequence
  Description of Artificial Sequence: Synthetic oligonucleotide
cagcuugaagagagucacu

SEQ ID NO: 2205218 - RNA, 19 nt, Artificial Sequence
  Description of Artificial Sequence: Synthetic oligonucleotide
agggugcccagcgcuccga

SEQ ID NO: 2205219 - RNA, 19 nt, Artificial Sequence
  Description of Artificial Sequence: Synthetic oligonucleotide
ccagaccaagguuccgcca

SEQ ID NO: 2205220 - RNA, 19 nt, Artificial Sequence
  Description of Artificial Sequence: Synthetic oligonucleotide
ccagggugcccagcgcucc

SEQ ID NO: 2205221 - RNA, 19 nt, Artificial Sequence
  Description of Artificial Sequence: Synthetic oligonucleotide
ggaauucgcugcccagggu

SEQ ID NO: 2205222 - RNA, 19 nt, Artificial Sequence
  Description of Artificial Sequence: Synthetic oligonucleotide
cccacucccgcaggaauuc

SEQ ID NO: 2205223 - RNA, 19 nt, Artificial Sequence
  Description of Artificial Sequence: Synthetic oligonucleotide
ggaugcccaggagacuuaa

SEQ ID NO: 2205224 - RNA, 19 nt, Artificial Sequence
  Description of Artificial Sequence: Synthetic oligonucleotide
cucccacucccgcaggaau

SEQ ID NO: 2205225 - RNA, 19 nt, Artificial Sequence
  Description of Artificial Sequence: Synthetic oligonucleotide
cccggucacuguguucccg

SEQ ID NO: 2205226 - RNA, 19 nt, Artificial Sequence
  Description of Artificial Sequence: Synthetic oligonucleotide
ccgacgcgggcagagcuug

SEQ ID NO: 2205227 - RNA, 19 nt, Artificial Sequence
  Description of Artificial Sequence: Synthetic oligonucleotide
ccacucccgcaggaauucg

SEQ ID NO: 2205228 - RNA, 19 nt, Artificial Sequence
  Description of Artificial Sequence: Synthetic oligonucleotide
gggcaacuacacuggggua

SEQ ID NO: 2205229 - RNA, 19 nt, Artificial Sequence
  Description of Artificial Sequence: Synthetic oligonucleotide
accgacgcgggcagagcuu

SEQ ID NO: 2205230 - RNA, 19 nt, Artificial Sequence
  Description of Artificial Sequence: Synthetic oligonucleotide
ccuuauucucuguggguuu

SEQ ID NO: 2205231 - RNA, 19 nt, Artificial Sequence
  Description of Artificial Sequence: Synthetic oligonucleotide
gugauacaacccggucacu

SEQ ID NO: 2205232 - RNA, 19 nt, Artificial Sequence
  Description of Artificial Sequence: Synthetic oligonucleotide
cuggagggguggggaucug

SEQ ID NO: 2205233 - RNA, 19 nt, Artificial Sequence
  Description of Artificial Sequence: Synthetic oligonucleotide
gccaucagguguggaucca

SEQ ID NO: 2205234 - RNA, 19 nt, Artificial Sequence
  Description of Artificial Sequence: Synthetic oligonucleotide
gcccagggugcccagcgcu

SEQ ID NO: 2205235 - RNA, 19 nt, Artificial Sequence
  Description of Artificial Sequence: Synthetic oligonucleotide
cccaagcccucugcaguug

SEQ ID NO: 2205236 - RNA, 19 nt, Artificial Sequence
  Description of Artificial Sequence: Synthetic oligonucleotide
cccuuauucucuguggguu

SEQ ID NO: 2205237 - RNA, 19 nt, Artificial Sequence
  Description of Artificial Sequence: Synthetic oligonucleotide
cgcuccgagcaccgacgcg

SEQ ID NO: 2205238 - RNA, 19 nt, Artificial Sequence
  Description of Artificial Sequence: Synthetic oligonucleotide
cccuggaaacacuguggua

SEQ ID NO: 2205239 - RNA, 19 nt, Artificial Sequence
  Description of Artificial Sequence: Synthetic oligonucleotide
ccgcaggaauucgcugccc

SEQ ID NO: 2205240 - RNA, 19 nt, Artificial Sequence
  Description of Artificial Sequence: Synthetic oligonucleotide
cccacgccagcuggaugcc

SEQ ID NO: 2205241 - RNA, 19 nt, Artificial Sequence
  Description of Artificial Sequence: Synthetic oligonucleotide
ggggaucuggacggugaua

SEQ ID NO: 2205242 - RNA, 19 nt, Artificial Sequence
  Description of Artificial Sequence: Synthetic oligonucleotide
ggguuuugagagguucauu

SEQ ID NO: 2205243 - RNA, 19 nt, Artificial Sequence
  Description of Artificial Sequence: Synthetic oligonucleotide
ccacgccagcuggaugccc

SEQ ID NO: 2205244 - RNA, 19 nt, Artificial Sequence
  Description of Artificial Sequence: Synthetic oligonucleotide
ccuccccaaccaaaaugcu

SEQ ID NO: 2205245 - RNA, 19 nt, Artificial Sequence
  Description of Artificial Sequence: Synthetic oligonucleotide
ccggucacuguguucccgu

SEQ ID NO: 2205246 - RNA, 19 nt, Artificial Sequence
  Description of Artificial Sequence: Synthetic oligonucleotide
ccaagcccucugcaguugu

SEQ ID NO: 2205247 - RNA, 19 nt, Artificial Sequence
  Description of Artificial Sequence: Synthetic oligonucleotide
gccuucccuuauucucugu

SEQ ID NO: 2205248 - RNA, 19 nt, Artificial Sequence
  Description of Artificial Sequence: Synthetic oligonucleotide
ccaacgggucugggcagca

SEQ ID NO: 2205249 - RNA, 19 nt, Artificial Sequence
  Description of Artificial Sequence: Synthetic oligonucleotide
ccaucagguguggauccau

SEQ ID NO: 2205250 - RNA, 19 nt, Artificial Sequence
  Description of Artificial Sequence: Synthetic oligonucleotide
ccccaagcccucugcaguu

SEQ ID NO: 2205251 - RNA, 19 nt, Artificial Sequence
  Description of Artificial Sequence: Synthetic oligonucleotide
cccaaccaaaaugcuucuu

SEQ ID NO: 2205252 - RNA, 19 nt, Artificial Sequence
  Description of Artificial Sequence: Synthetic oligonucleotide
uuaaguaaauucuucauag

SEQ ID NO: 2205253 - RNA, 19 nt, Artificial Sequence
  Description of Artificial Sequence: Synthetic oligonucleotide
aauggauauuaccaacucc

SEQ ID NO: 2205254 - RNA, 19 nt, Artificial Sequence
  Description of Artificial Sequence: Synthetic oligonucleotide
uucaguuuugaauugaugc

SEQ ID NO: 2205255 - RNA, 19 nt, Artificial Sequence
  Description of Artificial Sequence: Synthetic oligonucleotide
ucuuggaucauccauggag

SEQ ID NO: 2205256 - RNA, 19 nt, Artificial Sequence
  Description of Artificial Sequence: Synthetic oligonucleotide
aaguaaauucuucauagga

SEQ ID NO: 2205257 - RNA, 19 nt, Artificial Sequence
  Description of Artificial Sequence: Synthetic oligonucleotide
aaaguuuggcgacacagag

SEQ ID NO: 2205258 - RNA, 19 nt, Artificial Sequence
  Description of Artificial Sequence: Synthetic oligonucleotide
auugguggcuuucuuaugc

SEQ ID NO: 2205259 - RNA, 19 nt, Artificial Sequence
  Description of Artificial Sequence: Synthetic oligonucleotide
cauacucugccaaagaagg

SEQ ID NO: 2205260 - RNA, 19 nt, Artificial Sequence
  Description of Artificial Sequence: Synthetic oligonucleotide
ucuaccugcgguaaaagcc

SEQ ID NO: 2205261 - RNA, 19 nt, Artificial Sequence
  Description of Artificial Sequence: Synthetic oligonucleotide
ugagcuggaggccacaugg

SEQ ID NO: 2205262 - RNA, 19 nt, Artificial Sequence
  Description of Artificial Sequence: Synthetic oligonucleotide
uaaauucuucauaggaagg

SEQ ID NO: 2205263 - RNA, 19 nt, Artificial Sequence
  Description of Artificial Sequence: Synthetic oligonucleotide
accauagauuucuuaaacc

SEQ ID NO: 2205264 - RNA, 19 nt, Artificial Sequence
  Description of Artificial Sequence: Synthetic oligonucleotide
uguucuaucucacggaucu

SEQ ID NO: 2205265 - RNA, 19 nt, Artificial Sequence
  Description of Artificial Sequence: Synthetic oligonucleotide
ugaauugaugccuggauug

SEQ ID NO: 2205266 - RNA, 19 nt, Artificial Sequence
  Description of Artificial Sequence: Synthetic oligonucleotide
ucuuaaaccgcgcauaauc

SEQ ID NO: 2205267 - RNA, 19 nt, Artificial Sequence
  Description of Artificial Sequence: Synthetic oligonucleotide
uaucucacggaucugagcu

SEQ ID NO: 2205268 - RNA, 19 nt, Artificial Sequence
  Description of Artificial Sequence: Synthetic oligonucleotide
cauuauuccauacucugcc

SEQ ID NO: 2205269 - RNA, 19 nt, Artificial Sequence
  Description of Artificial Sequence: Synthetic oligonucleotide
aguuuggcgacacagagga

SEQ ID NO: 2205270 - RNA, 19 nt, Artificial Sequence
  Description of Artificial Sequence: Synthetic oligonucleotide
auagcguucuaccugggcg

SEQ ID NO: 2205271 - RNA, 19 nt, Artificial Sequence
  Description of Artificial Sequence: Synthetic oligonucleotide
uaaaagccgcuccagagcc

SEQ ID NO: 2205272 - RNA, 19 nt, Artificial Sequence
  Description of Artificial Sequence: Synthetic oligonucleotide
gauauuaccaacuccaggu

SEQ ID NO: 2205273 - RNA, 19 nt, Artificial Sequence
  Description of Artificial Sequence: Synthetic oligonucleotide
gacauagcguucuaccugg

SEQ ID NO: 2205274 - RNA, 19 nt, Artificial Sequence
  Description of Artificial Sequence: Synthetic oligonucleotide
auagauuucuuaaaccgcg

SEQ ID NO: 2205275 - RNA, 19 nt, Artificial Sequence
  Description of Artificial Sequence: Synthetic oligonucleotide
agaaacuucucuuucauuu

SEQ ID NO: 2205276 - RNA, 19 nt, Artificial Sequence
  Description of Artificial Sequence: Synthetic oligonucleotide
aauguuaaaugcuguccug

SEQ ID NO: 2205277 - RNA, 19 nt, Artificial Sequence
  Description of Artificial Sequence: Synthetic oligonucleotide
cauagauuucuuaaaccgc

SEQ ID NO: 2205278 - RNA, 19 nt, Artificial Sequence
  Description of Artificial Sequence: Synthetic oligonucleotide
uauugguagguuuccagag

SEQ ID NO: 2205279 - RNA, 19 nt, Artificial Sequence
  Description of Artificial Sequence: Synthetic oligonucleotide
ugaauggauauuaccaacu

SEQ ID NO: 2205280 - RNA, 19 nt, Artificial Sequence
  Description of Artificial Sequence: Synthetic oligonucleotide
aauucuucauaggaagguc

SEQ ID NO: 2205281 - RNA, 19 nt, Artificial Sequence
  Description of Artificial Sequence: Synthetic oligonucleotide
uucauuugggcauuggccu

SEQ ID NO: 2205282 - RNA, 19 nt, Artificial Sequence
  Description of Artificial Sequence: Synthetic oligonucleotide
uuaaaugcuguccugucuc

SEQ ID NO: 2205283 - RNA, 19 nt, Artificial Sequence
  Description of Artificial Sequence: Synthetic oligonucleotide
acucuguucuaucucacgg

SEQ ID NO: 2205284 - RNA, 19 nt, Artificial Sequence
  Description of Artificial Sequence: Synthetic oligonucleotide
auugguagguuuccagagc

SEQ ID NO: 2205285 - RNA, 19 nt, Artificial Sequence
  Description of Artificial Sequence: Synthetic oligonucleotide
cuuaaaccgcgcauaaucc

SEQ ID NO: 2205286 - RNA, 19 nt, Artificial Sequence
  Description of Artificial Sequence: Synthetic oligonucleotide
ugaauguuaaaugcugucc

SEQ ID NO: 2205287 - RNA, 19 nt, Artificial Sequence
  Description of Artificial Sequence: Synthetic oligonucleotide
augaauguuaaaugcuguc

SEQ ID NO: 2205288 - RNA, 19 nt, Artificial Sequence
  Description of Artificial Sequence: Synthetic oligonucleotide
agagcuauguucuuccucu

SEQ ID NO: 2205289 - RNA, 19 nt, Artificial Sequence
  Description of Artificial Sequence: Synthetic oligonucleotide
agaaaguuuggcgacacag

SEQ ID NO: 2205290 - RNA, 19 nt, Artificial Sequence
  Description of Artificial Sequence: Synthetic oligonucleotide
ccauagauuucuuaaaccg

SEQ ID NO: 2205291 - RNA, 19 nt, Artificial Sequence
  Description of Artificial Sequence: Synthetic oligonucleotide
uuucuuaugcucugggcug

SEQ ID NO: 2205292 - RNA, 19 nt, Artificial Sequence
  Description of Artificial Sequence: Synthetic oligonucleotide
uucccagugccgaagagcc

SEQ ID NO: 2205293 - RNA, 19 nt, Artificial Sequence
  Description of Artificial Sequence: Synthetic oligonucleotide
gauaccugcugugagcugg

SEQ ID NO: 2205294 - RNA, 19 nt, Artificial Sequence
  Description of Artificial Sequence: Synthetic oligonucleotide
caaaguuggccccaacucg

SEQ ID NO: 2205295 - RNA, 19 nt, Artificial Sequence
  Description of Artificial Sequence: Synthetic oligonucleotide
cuaccugcgguaaaagccg

SEQ ID NO: 2205296 - RNA, 19 nt, Artificial Sequence
  Description of Artificial Sequence: Synthetic oligonucleotide
uuugaauugaugccuggau

SEQ ID NO: 2205297 - RNA, 19 nt, Artificial Sequence
  Description of Artificial Sequence: Synthetic oligonucleotide
uucucuuucauuugggcau

SEQ ID NO: 2205298 - RNA, 19 nt, Artificial Sequence
  Description of Artificial Sequence: Synthetic oligonucleotide
uaaaccgcgcauaauccug

SEQ ID NO: 2205299 - RNA, 19 nt, Artificial Sequence
  Description of Artificial Sequence: Synthetic oligonucleotide
uccugauggccaaugaaug

SEQ ID NO: 2205300 - RNA, 19 nt, Artificial Sequence
  Description of Artificial Sequence: Synthetic oligonucleotide
uuauugguggcuuucuuau

SEQ ID NO: 2205301 - RNA, 19 nt, Artificial Sequence
  Description of Artificial Sequence: Synthetic oligonucleotide
uccucuuggaucauccaug

SEQ ID NO: 2205302 - RNA, 19 nt, Artificial Sequence
  Description of Artificial Sequence: Synthetic oligonucleotide
ugugauaccugcugugagc

SEQ ID NO: 2205303 - RNA, 19 nt, Artificial Sequence
  Description of Artificial Sequence: Synthetic oligonucleotide
cuuucauuugggcauuggc

SEQ ID NO: 2205304 - RNA, 19 nt, Artificial Sequence
  Description of Artificial Sequence: Synthetic oligonucleotide
aguguuggaacugugguca

SEQ ID NO: 2205305 - RNA, 19 nt, Artificial Sequence
  Description of Artificial Sequence: Synthetic oligonucleotide
auaggaagguccuauuggu

SEQ ID NO: 2205306 - RNA, 19 nt, Artificial Sequence
  Description of Artificial Sequence: Synthetic oligonucleotide
cucauaggaauccaggcuc

SEQ ID NO: 2205307 - RNA, 19 nt, Artificial Sequence
  Description of Artificial Sequence: Synthetic oligonucleotide
gccaaugaauguuaaaugc

SEQ ID NO: 2205308 - RNA, 19 nt, Artificial Sequence
  Description of Artificial Sequence: Synthetic oligonucleotide
uggauauuaccaacuccag

SEQ ID NO: 2205309 - RNA, 19 nt, Artificial Sequence
  Description of Artificial Sequence: Synthetic oligonucleotide
ucuaucucacggaucugag

SEQ ID NO: 2205310 - RNA, 19 nt, Artificial Sequence
  Description of Artificial Sequence: Synthetic oligonucleotide
cucuaagacagaucugacc

SEQ ID NO: 2205311 - RNA, 19 nt, Artificial Sequence
  Description of Artificial Sequence: Synthetic oligonucleotide
gaccacagaagaaaguuug

SEQ ID NO: 2205312 - RNA, 19 nt, Artificial Sequence
  Description of Artificial Sequence: Synthetic oligonucleotide
gaauccaggcucuucacca

SEQ ID NO: 2205313 - RNA, 19 nt, Artificial Sequence
  Description of Artificial Sequence: Synthetic oligonucleotide
uuuauugguggcuuucuua

SEQ ID NO: 2205314 - RNA, 19 nt, Artificial Sequence
  Description of Artificial Sequence: Synthetic oligonucleotide
aagugugauaccugcugug

SEQ ID NO: 2205315 - RNA, 19 nt, Artificial Sequence
  Description of Artificial Sequence: Synthetic oligonucleotide
uccagagcuauguucuucc

SEQ ID NO: 2205316 - RNA, 19 nt, Artificial Sequence
  Description of Artificial Sequence: Synthetic oligonucleotide
uguuuucguacuucgcagc

SEQ ID NO: 2205317 - RNA, 19 nt, Artificial Sequence
  Description of Artificial Sequence: Synthetic oligonucleotide
uuucguacuucgcagccac

SEQ ID NO: 2205318 - RNA, 19 nt, Artificial Sequence
  Description of Artificial Sequence: Synthetic oligonucleotide
auggccguuagcugcuucc

SEQ ID NO: 2205319 - RNA, 19 nt, Artificial Sequence
  Description of Artificial Sequence: Synthetic oligonucleotide
uagcguucuaccugggcgg

SEQ ID NO: 2205320 - RNA, 19 nt, Artificial Sequence
  Description of Artificial Sequence: Synthetic oligonucleotide
uuauuccauacucugccaa

SEQ ID NO: 2205321 - RNA, 19 nt, Artificial Sequence
  Description of Artificial Sequence: Synthetic oligonucleotide
cugaauggauauuaccaac

SEQ ID NO: 2205322 - RNA, 19 nt, Artificial Sequence
  Description of Artificial Sequence: Synthetic oligonucleotide
guaaaagccgcuccagagc

SEQ ID NO: 2205323 - RNA, 19 nt, Artificial Sequence
  Description of Artificial Sequence: Synthetic oligonucleotide
gaggcucuaagacagaucu

SEQ ID NO: 2205324 - RNA, 19 nt, Artificial Sequence
  Description of Artificial Sequence: Synthetic oligonucleotide
ucccaccagaauuuauugg

SEQ ID NO: 2205325 - RNA, 19 nt, Artificial Sequence
  Description of Artificial Sequence: Synthetic oligonucleotide
uuaaaccgcgcauaauccu

SEQ ID NO: 2205326 - RNA, 19 nt, Artificial Sequence
  Description of Artificial Sequence: Synthetic oligonucleotide
uccauacucugccaaagaa

SEQ ID NO: 2205327 - RNA, 19 nt, Artificial Sequence
  Description of Artificial Sequence: Synthetic oligonucleotide
uacucugccaaagaaggca

SEQ ID NO: 2205328 - RNA, 19 nt, Artificial Sequence
  Description of Artificial Sequence: Synthetic oligonucleotide
ucuguucuaucucacggau

SEQ ID NO: 2205329 - RNA, 19 nt, Artificial Sequence
  Description of Artificial Sequence: Synthetic oligonucleotide
uuguucucccaccagaauu

SEQ ID NO: 2205330 - RNA, 19 nt, Artificial Sequence
  Description of Artificial Sequence: Synthetic oligonucleotide
uagauuucuuaaaccgcgc

SEQ ID NO: 2205331 - RNA, 19 nt, Artificial Sequence
  Description of Artificial Sequence: Synthetic oligonucleotide
uugaauugaugccuggauu

SEQ ID NO: 2205332 - RNA, 19 nt, Artificial Sequence
  Description of Artificial Sequence: Synthetic oligonucleotide
uggccaaugaauguuaaau

SEQ ID NO: 2205333 - RNA, 19 nt, Artificial Sequence
  Description of Artificial Sequence: Synthetic oligonucleotide
guguuuucguacuucgcag

SEQ ID NO: 2205334 - RNA, 19 nt, Artificial Sequence
  Description of Artificial Sequence: Synthetic oligonucleotide
agcacugucagguuuccgu

SEQ ID NO: 2205335 - RNA, 19 nt, Artificial Sequence
  Description of Artificial Sequence: Synthetic oligonucleotide
aucagaaacuucucuuuca

SEQ ID NO: 2205336 - RNA, 19 nt, Artificial Sequence
  Description of Artificial Sequence: Synthetic oligonucleotide
accugaauggauauuacca

SEQ ID NO: 2205337 - RNA, 19 nt, Artificial Sequence
  Description of Artificial Sequence: Synthetic oligonucleotide
gacucuguucuaucucacg

SEQ ID NO: 2205338 - RNA, 19 nt, Artificial Sequence
  Description of Artificial Sequence: Synthetic oligonucleotide
uguggucaaaguuggcccc

SEQ ID NO: 2205339 - RNA, 19 nt, Artificial Sequence
  Description of Artificial Sequence: Synthetic oligonucleotide
aguaaauucuucauaggaa

SEQ ID NO: 2205340 - RNA, 19 nt, Artificial Sequence
  Description of Artificial Sequence: Synthetic oligonucleotide
ggaacuguggucaaaguug

SEQ ID NO: 2205341 - RNA, 19 nt, Artificial Sequence
  Description of Artificial Sequence: Synthetic oligonucleotide
ggauauuaccaacuccagg

SEQ ID NO: 2205342 - RNA, 19 nt, Artificial Sequence
  Description of Artificial Sequence: Synthetic oligonucleotide
cagaagaaaguuuggcgac

SEQ ID NO: 2205343 - RNA, 19 nt, Artificial Sequence
  Description of Artificial Sequence: Synthetic oligonucleotide
cagguguuuucguacuucg

SEQ ID NO: 2205344 - RNA, 19 nt, Artificial Sequence
  Description of Artificial Sequence: Synthetic oligonucleotide
uucuaccugcgguaaaagc

SEQ ID NO: 2205345 - RNA, 19 nt, Artificial Sequence
  Description of Artificial Sequence: Synthetic oligonucleotide
uaccugggcggcacgaacg

SEQ ID NO: 2205346 - RNA, 19 nt, Artificial Sequence
  Description of Artificial Sequence: Synthetic oligonucleotide
gagguguggcaccugaaug

SEQ ID NO: 2205347 - RNA, 19 nt, Artificial Sequence
  Description of Artificial Sequence: Synthetic oligonucleotide
acuaguguuggaacugugg

SEQ ID NO: 2205348 - RNA, 19 nt, Artificial Sequence
  Description of Artificial Sequence: Synthetic oligonucleotide
guuuucguacuucgcagcc

SEQ ID NO: 2205349 - RNA, 19 nt, Artificial Sequence
  Description of Artificial Sequence: Synthetic oligonucleotide
uuuugaauugaugccugga

SEQ ID NO: 2205350 - RNA, 19 nt, Artificial Sequence
  Description of Artificial Sequence: Synthetic oligonucleotide
uggaacuguggucaaaguu

SEQ ID NO: 2205351 - RNA, 19 nt, Artificial Sequence
  Description of Artificial Sequence: Synthetic oligonucleotide
gcugccaucucuuuaauca

SEQ ID NO: 2205352 - RNA, 19 nt, Artificial Sequence
  Description of Artificial Sequence: Synthetic oligonucleotide
uauccugauggccaaugaa

SEQ ID NO: 2205353 - RNA, 19 nt, Artificial Sequence
  Description of Artificial Sequence: Synthetic oligonucleotide
aaguuuggcgacacagagg

SEQ ID NO: 2205354 - RNA, 19 nt, Artificial Sequence
  Description of Artificial Sequence: Synthetic oligonucleotide
uucuaucucacggaucuga

SEQ ID NO: 2205355 - RNA, 19 nt, Artificial Sequence
  Description of Artificial Sequence: Synthetic oligonucleotide
acuucgcagccacagcacg

SEQ ID NO: 2205356 - RNA, 19 nt, Artificial Sequence
  Description of Artificial Sequence: Synthetic oligonucleotide
ucaccauagauuucuuaaa

SEQ ID NO: 2205357 - RNA, 19 nt, Artificial Sequence
  Description of Artificial Sequence: Synthetic oligonucleotide
uugggcauuggccuuguuc

SEQ ID NO: 2205358 - RNA, 19 nt, Artificial Sequence
  Description of Artificial Sequence: Synthetic oligonucleotide
uguuaaaugcuguccuguc

SEQ ID NO: 2205359 - RNA, 19 nt, Artificial Sequence
  Description of Artificial Sequence: Synthetic oligonucleotide
caccugaauggauauuacc

SEQ ID NO: 2205360 - RNA, 19 nt, Artificial Sequence
  Description of Artificial Sequence: Synthetic oligonucleotide
aaaguuggccccaacucgu

SEQ ID NO: 2205361 - RNA, 19 nt, Artificial Sequence
  Description of Artificial Sequence: Synthetic oligonucleotide
ugcgguaaaagccgcucca

SEQ ID NO: 2205362 - RNA, 19 nt, Artificial Sequence
  Description of Artificial Sequence: Synthetic oligonucleotide
aaaccgcgcauaauccugg

SEQ ID NO: 2205363 - RNA, 19 nt, Artificial Sequence
  Description of Artificial Sequence: Synthetic oligonucleotide
ucucccaccagaauuuauu

SEQ ID NO: 2205364 - RNA, 19 nt, Artificial Sequence
  Description of Artificial Sequence: Synthetic oligonucleotide
uguuccagcagaccuccgu

SEQ ID NO: 2205365 - RNA, 19 nt, Artificial Sequence
  Description of Artificial Sequence: Synthetic oligonucleotide
uucuuaugcucugggcugg

SEQ ID NO: 2205366 - RNA, 19 nt, Artificial Sequence
  Description of Artificial Sequence: Synthetic oligonucleotide
auuccauacucugccaaag

SEQ ID NO: 2205367 - RNA, 19 nt, Artificial Sequence
  Description of Artificial Sequence: Synthetic oligonucleotide
gaauugaugccuggauugc

SEQ ID NO: 2205368 - RNA, 19 nt, Artificial Sequence
  Description of Artificial Sequence: Synthetic oligonucleotide
cugccugaggcucuaagac

SEQ ID NO: 2205369 - RNA, 19 nt, Artificial Sequence
  Description of Artificial Sequence: Synthetic oligonucleotide
ucguacuucgcagccacag

SEQ ID NO: 2205370 - RNA, 19 nt, Artificial Sequence
  Description of Artificial Sequence: Synthetic oligonucleotide
uuccauacucugccaaaga

SEQ ID NO: 2205371 - RNA, 19 nt, Artificial Sequence
  Description of Artificial Sequence: Synthetic oligonucleotide
uguauccugauggccaaug

SEQ ID NO: 2205372 - RNA, 19 nt, Artificial Sequence
  Description of Artificial Sequence: Synthetic oligonucleotide
uguccgcgaccacagaaga

SEQ ID NO: 2205373 - RNA, 19 nt, Artificial Sequence
  Description of Artificial Sequence: Synthetic oligonucleotide
cuaucucacggaucugagc

SEQ ID NO: 2205374 - RNA, 19 nt, Artificial Sequence
  Description of Artificial Sequence: Synthetic oligonucleotide
guacuucgcagccacagca

SEQ ID NO: 2205375 - RNA, 19 nt, Artificial Sequence
  Description of Artificial Sequence: Synthetic oligonucleotide
agcagcaccgaucgugcuc

SEQ ID NO: 2205376 - RNA, 19 nt, Artificial Sequence
  Description of Artificial Sequence: Synthetic oligonucleotide
cuauugguagguuuccaga

SEQ ID NO: 2205377 - RNA, 19 nt, Artificial Sequence
  Description of Artificial Sequence: Synthetic oligonucleotide
cacguuguggguccaagug

SEQ ID NO: 2205378 - RNA, 19 nt, Artificial Sequence
  Description of Artificial Sequence: Synthetic oligonucleotide
acggacaccagcagcaccg

SEQ ID NO: 2205379 - RNA, 19 nt, Artificial Sequence
  Description of Artificial Sequence: Synthetic oligonucleotide
ucugaccacuuccugccga

SEQ ID NO: 2205380 - RNA, 19 nt, Artificial Sequence
  Description of Artificial Sequence: Synthetic oligonucleotide
ggccaaugaauguuaaaug

SEQ ID NO: 2205381 - RNA, 19 nt, Artificial Sequence
  Description of Artificial Sequence: Synthetic oligonucleotide
gaagaaaguuuggcgacac

SEQ ID NO: 2205382 - RNA, 19 nt, Artificial Sequence
  Description of Artificial Sequence: Synthetic oligonucleotide
ucucacggaucugagcugc

SEQ ID NO: 2205383 - RNA, 19 nt, Artificial Sequence
  Description of Artificial Sequence: Synthetic oligonucleotide
cucccaccagaauuuauug

SEQ ID NO: 2205384 - RNA, 19 nt, Artificial Sequence
  Description of Artificial Sequence: Synthetic oligonucleotide
aguuuugaauugaugccug

SEQ ID NO: 2205385 - RNA, 19 nt, Artificial Sequence
  Description of Artificial Sequence: Synthetic oligonucleotide
gguguuuucguacuucgca

SEQ ID NO: 2205386 - RNA, 19 nt, Artificial Sequence
  Description of Artificial Sequence: Synthetic oligonucleotide
auacucugccaaagaaggc

SEQ ID NO: 2205387 - RNA, 19 nt, Artificial Sequence
  Description of Artificial Sequence: Synthetic oligonucleotide
cuuucuuaugcucugggcu

SEQ ID NO: 2205388 - RNA, 19 nt, Artificial Sequence
  Description of Artificial Sequence: Synthetic oligonucleotide
auuucuuaaaccgcgcaua

SEQ ID NO: 2205389 - RNA, 19 nt, Artificial Sequence
  Description of Artificial Sequence: Synthetic oligonucleotide
aagaaaguuuggcgacaca

SEQ ID NO: 2205390 - RNA, 19 nt, Artificial Sequence
  Description of Artificial Sequence: Synthetic oligonucleotide
cuucgcagccacagcacgg

SEQ ID NO: 2205391 - RNA, 19 nt, Artificial Sequence
  Description of Artificial Sequence: Synthetic oligonucleotide
uccgcgaccacagaagaaa

SEQ ID NO: 2205392 - RNA, 19 nt, Artificial Sequence
  Description of Artificial Sequence: Synthetic oligonucleotide
ugccugaggcucuaagaca

SEQ ID NO: 2205393 - RNA, 19 nt, Artificial Sequence
  Description of Artificial Sequence: Synthetic oligonucleotide
aaccgcgcauaauccuggg

SEQ ID NO: 2205394 - RNA, 19 nt, Artificial Sequence
  Description of Artificial Sequence: Synthetic oligonucleotide
uuggaucauccauggaggu

SEQ ID NO: 2205395 - RNA, 19 nt, Artificial Sequence
  Description of Artificial Sequence: Synthetic oligonucleotide
agauguuccagcagaccuc

SEQ ID NO: 2205396 - RNA, 19 nt, Artificial Sequence
  Description of Artificial Sequence: Synthetic oligonucleotide
acguuguggguccaagugu

SEQ ID NO: 2205397 - RNA, 19 nt, Artificial Sequence
  Description of Artificial Sequence: Synthetic oligonucleotide
uuggccuuguucucccacc

SEQ ID NO: 2205398 - RNA, 19 nt, Artificial Sequence
  Description of Artificial Sequence: Synthetic oligonucleotide
ugcagcacugucagguuuc

SEQ ID NO: 2205399 - RNA, 19 nt, Artificial Sequence
  Description of Artificial Sequence: Synthetic oligonucleotide
gugugauaccugcugugag

SEQ ID NO: 2205400 - RNA, 19 nt, Artificial Sequence
  Description of Artificial Sequence: Synthetic oligonucleotide
cacugucagguuuccgugg

SEQ ID NO: 2205401 - RNA, 19 nt, Artificial Sequence
  Description of Artificial Sequence: Synthetic oligonucleotide
cuuccugccgacucuguuc

SEQ ID NO: 2205402 - RNA, 19 nt, Artificial Sequence
  Description of Artificial Sequence: Synthetic oligonucleotide
guggguccaagugugauac

SEQ ID NO: 2205403 - RNA, 19 nt, Artificial Sequence
  Description of Artificial Sequence: Synthetic oligonucleotide
uugcgagcggcuucuaccu

SEQ ID NO: 2205404 - RNA, 19 nt, Artificial Sequence
  Description of Artificial Sequence: Synthetic oligonucleotide
ugcucggggacauagcguu

SEQ ID NO: 2205405 - RNA, 19 nt, Artificial Sequence
  Description of Artificial Sequence: Synthetic oligonucleotide
aguuggccccaacucguuc

SEQ ID NO: 2205406 - RNA, 19 nt, Artificial Sequence
  Description of Artificial Sequence: Synthetic oligonucleotide
gcacgaacggccuugcgag

SEQ ID NO: 2205407 - RNA, 19 nt, Artificial Sequence
  Description of Artificial Sequence: Synthetic oligonucleotide
ccauacucugccaaagaag

SEQ ID NO: 2205408 - RNA, 19 nt, Artificial Sequence
  Description of Artificial Sequence: Synthetic oligonucleotide
ggggacauagcguucuacc

SEQ ID NO: 2205409 - RNA, 19 nt, Artificial Sequence
  Description of Artificial Sequence: Synthetic oligonucleotide
uacuucgcagccacagcac

SEQ ID NO: 2205410 - RNA, 19 nt, Artificial Sequence
  Description of Artificial Sequence: Synthetic oligonucleotide
accacagaagaaaguuugg

SEQ ID NO: 2205411 - RNA, 19 nt, Artificial Sequence
  Description of Artificial Sequence: Synthetic oligonucleotide
agugugauaccugcuguga

SEQ ID NO: 2205412 - RNA, 19 nt, Artificial Sequence
  Description of Artificial Sequence: Synthetic oligonucleotide
cauagcguucuaccugggc

SEQ ID NO: 2205413 - RNA, 19 nt, Artificial Sequence
  Description of Artificial Sequence: Synthetic oligonucleotide
agaauuuauugguggcuuu

SEQ ID NO: 2205414 - RNA, 19 nt, Artificial Sequence
  Description of Artificial Sequence: Synthetic oligonucleotide
agcggcuucuaccugcggu

SEQ ID NO: 2205415 - RNA, 19 nt, Artificial Sequence
  Description of Artificial Sequence: Synthetic oligonucleotide
uuuucguacuucgcagcca

SEQ ID NO: 2205416 - RNA, 19 nt, Artificial Sequence
  Description of Artificial Sequence: Synthetic oligonucleotide
acgaacggccuugcgagcg

SEQ ID NO: 2205417 - RNA, 19 nt, Artificial Sequence
  Description of Artificial Sequence: Synthetic oligonucleotide
auuuauugguggcuuucuu

SEQ ID NO: 2205418 - RNA, 19 nt, Artificial Sequence
  Description of Artificial Sequence: Synthetic oligonucleotide
uugguggcuuucuuaugcu

SEQ ID NO: 2205419 - RNA, 19 nt, Artificial Sequence
  Description of Artificial Sequence: Synthetic oligonucleotide
uguagacguguccgcgacc

SEQ ID NO: 2205420 - RNA, 19 nt, Artificial Sequence
  Description of Artificial Sequence: Synthetic oligonucleotide
uggaucauccauggaggug

SEQ ID NO: 2205421 - RNA, 19 nt, Artificial Sequence
  Description of Artificial Sequence: Synthetic oligonucleotide
uuggcgacacagaggacau

SEQ ID NO: 2205422 - RNA, 19 nt, Artificial Sequence
  Description of Artificial Sequence: Synthetic oligonucleotide
gugcuugcggcuguagacg

SEQ ID NO: 2205423 - RNA, 19 nt, Artificial Sequence
  Description of Artificial Sequence: Synthetic oligonucleotide
agguguauccugauggcca

SEQ ID NO: 2205424 - RNA, 19 nt, Artificial Sequence
  Description of Artificial Sequence: Synthetic oligonucleotide
agaagaaaguuuggcgaca

SEQ ID NO: 2205425 - RNA, 19 nt, Artificial Sequence
  Description of Artificial Sequence: Synthetic oligonucleotide
ugcggcuguagacgugucc

SEQ ID NO: 2205426 - RNA, 19 nt, Artificial Sequence
  Description of Artificial Sequence: Synthetic oligonucleotide
accuccgugcagcacuguc

SEQ ID NO: 2205427 - RNA, 19 nt, Artificial Sequence
  Description of Artificial Sequence: Synthetic oligonucleotide
uuggaacuguggucaaagu

SEQ ID NO: 2205428 - RNA, 19 nt, Artificial Sequence
  Description of Artificial Sequence: Synthetic oligonucleotide
uccugucuccauccaguca

SEQ ID NO: 2205429 - RNA, 19 nt, Artificial Sequence
  Description of Artificial Sequence: Synthetic oligonucleotide
auugaugccuggauugcca

SEQ ID NO: 2205430 - RNA, 19 nt, Artificial Sequence
  Description of Artificial Sequence: Synthetic oligonucleotide
ucagguguuuucguacuuc

SEQ ID NO: 2205431 - RNA, 19 nt, Artificial Sequence
  Description of Artificial Sequence: Synthetic oligonucleotide
aucgugcucggggacauag

SEQ ID NO: 2205432 - RNA, 19 nt, Artificial Sequence
  Description of Artificial Sequence: Synthetic oligonucleotide
uggccuuguucucccacca

SEQ ID NO: 2205433 - RNA, 19 nt, Artificial Sequence
  Description of Artificial Sequence: Synthetic oligonucleotide
gacguguccgcgaccacag

SEQ ID NO: 2205434 - RNA, 19 nt, Artificial Sequence
  Description of Artificial Sequence: Synthetic oligonucleotide
ccuauugguagguuuccag

SEQ ID NO: 2205435 - RNA, 19 nt, Artificial Sequence
  Description of Artificial Sequence: Synthetic oligonucleotide
accugggcggcacgaacgg

SEQ ID NO: 2205436 - RNA, 19 nt, Artificial Sequence
  Description of Artificial Sequence: Synthetic oligonucleotide
agcggcgaccauuauucca

SEQ ID NO: 2205437 - RNA, 19 nt, Artificial Sequence
  Description of Artificial Sequence: Synthetic oligonucleotide
uuguugcagcuucaguuuu

SEQ ID NO: 2205438 - RNA, 19 nt, Artificial Sequence
  Description of Artificial Sequence: Synthetic oligonucleotide
auccugauggccaaugaau

SEQ ID NO: 2205439 - RNA, 19 nt, Artificial Sequence
  Description of Artificial Sequence: Synthetic oligonucleotide
acaucgcugcgguggcgcc

SEQ ID NO: 2205440 - RNA, 19 nt, Artificial Sequence
  Description of Artificial Sequence: Synthetic oligonucleotide
ggugcuugcggcuguagac

SEQ ID NO: 2205441 - RNA, 19 nt, Artificial Sequence
  Description of Artificial Sequence: Synthetic oligonucleotide
ggcucuaagacagaucuga

SEQ ID NO: 2205442 - RNA, 19 nt, Artificial Sequence
  Description of Artificial Sequence: Synthetic oligonucleotide
uguggguccaagugugaua

SEQ ID NO: 2205443 - RNA, 19 nt, Artificial Sequence
  Description of Artificial Sequence: Synthetic oligonucleotide
uucauaggaagguccuauu

SEQ ID NO: 2205444 - RNA, 19 nt, Artificial Sequence
  Description of Artificial Sequence: Synthetic oligonucleotide
gacaucgcugcgguggcgc

SEQ ID NO: 2205445 - RNA, 19 nt, Artificial Sequence
  Description of Artificial Sequence: Synthetic oligonucleotide
aucugaccacuuccugccg

SEQ ID NO: 2205446 - RNA, 19 nt, Artificial Sequence
  Description of Artificial Sequence: Synthetic oligonucleotide
ugcuugcggcuguagacgu

SEQ ID NO: 2205447 - RNA, 19 nt, Artificial Sequence
  Description of Artificial Sequence: Synthetic oligonucleotide
ggaauccaggcucuucacc

SEQ ID NO: 2205448 - RNA, 19 nt, Artificial Sequence
  Description of Artificial Sequence: Synthetic oligonucleotide
accgcgcauaauccugggg

SEQ ID NO: 2205449 - RNA, 19 nt, Artificial Sequence
  Description of Artificial Sequence: Synthetic oligonucleotide
agcacggacaccagcagca

SEQ ID NO: 2205450 - RNA, 19 nt, Artificial Sequence
  Description of Artificial Sequence: Synthetic oligonucleotide
cugcgguaaaagccgcucc

SEQ ID NO: 2205451 - RNA, 19 nt, Artificial Sequence
  Description of Artificial Sequence: Synthetic oligonucleotide
aucucacggaucugagcug

SEQ ID NO: 2205452 - RNA, 19 nt, Artificial Sequence
  Description of Artificial Sequence: Synthetic oligonucleotide
cuaguguuggaacuguggu

SEQ ID NO: 2205453 - RNA, 19 nt, Artificial Sequence
  Description of Artificial Sequence: Synthetic oligonucleotide
uaccugcgguaaaagccgc

SEQ ID NO: 2205454 - RNA, 19 nt, Artificial Sequence
  Description of Artificial Sequence: Synthetic oligonucleotide
ugccgacucuguucuaucu

SEQ ID NO: 2205455 - RNA, 19 nt, Artificial Sequence
  Description of Artificial Sequence: Synthetic oligonucleotide
ugucagguuuccguggcuc

SEQ ID NO: 2205456 - RNA, 19 nt, Artificial Sequence
  Description of Artificial Sequence: Synthetic oligonucleotide
gcaccgaucgugcucgggg

SEQ ID NO: 2205457 - RNA, 19 nt, Artificial Sequence
  Description of Artificial Sequence: Synthetic oligonucleotide
gcuuucuuaugcucugggc

SEQ ID NO: 2205458 - RNA, 19 nt, Artificial Sequence
  Description of Artificial Sequence: Synthetic oligonucleotide
guagacguguccgcgacca

SEQ ID NO: 2205459 - RNA, 19 nt, Artificial Sequence
  Description of Artificial Sequence: Synthetic oligonucleotide
cuguagacguguccgcgac

SEQ ID NO: 2205460 - RNA, 19 nt, Artificial Sequence
  Description of Artificial Sequence: Synthetic oligonucleotide
cagauguuccagcagaccu

SEQ ID NO: 2205461 - RNA, 19 nt, Artificial Sequence
  Description of Artificial Sequence: Synthetic oligonucleotide
cagagcuauguucuuccuc

SEQ ID NO: 2205462 - RNA, 19 nt, Artificial Sequence
  Description of Artificial Sequence: Synthetic oligonucleotide
agcguucuaccugggcggc

SEQ ID NO: 2205463 - RNA, 19 nt, Artificial Sequence
  Description of Artificial Sequence: Synthetic oligonucleotide
uuggccccaacucguucug

SEQ ID NO: 2205464 - RNA, 19 nt, Artificial Sequence
  Description of Artificial Sequence: Synthetic oligonucleotide
cagaucugaccacuuccug

SEQ ID NO: 2205465 - RNA, 19 nt, Artificial Sequence
  Description of Artificial Sequence: Synthetic oligonucleotide
acacguuguggguccaagu

SEQ ID NO: 2205466 - RNA, 19 nt, Artificial Sequence
  Description of Artificial Sequence: Synthetic oligonucleotide
cuucuaccugcgguaaaag

SEQ ID NO: 2205467 - RNA, 19 nt, Artificial Sequence
  Description of Artificial Sequence: Synthetic oligonucleotide
gccugaggcucuaagacag

SEQ ID NO: 2205468 - RNA, 19 nt, Artificial Sequence
  Description of Artificial Sequence: Synthetic oligonucleotide
cuguucuaucucacggauc

SEQ ID NO: 2205469 - RNA, 19 nt, Artificial Sequence
  Description of Artificial Sequence: Synthetic oligonucleotide
uccuauugguagguuucca

SEQ ID NO: 2205470 - RNA, 19 nt, Artificial Sequence
  Description of Artificial Sequence: Synthetic oligonucleotide
gcagcaccgaucgugcucg

SEQ ID NO: 2205471 - RNA, 19 nt, Artificial Sequence
  Description of Artificial Sequence: Synthetic oligonucleotide
uugccagcggcgaccauua

SEQ ID NO: 2205472 - RNA, 19 nt, Artificial Sequence
  Description of Artificial Sequence: Synthetic oligonucleotide
cugaccacuuccugccgac

SEQ ID NO: 2205473 - RNA, 19 nt, Artificial Sequence
  Description of Artificial Sequence: Synthetic oligonucleotide
ugauaccugcugugagcug

SEQ ID NO: 2205474 - RNA, 19 nt, Artificial Sequence
  Description of Artificial Sequence: Synthetic oligonucleotide
cuguccugucuccauccag

SEQ ID NO: 2205475 - RNA, 19 nt, Artificial Sequence
  Description of Artificial Sequence: Synthetic oligonucleotide
cacuaguguuggaacugug

SEQ ID NO: 2205476 - RNA, 19 nt, Artificial Sequence
  Description of Artificial Sequence: Synthetic oligonucleotide
guauccugauggccaauga

SEQ ID NO: 2205477 - RNA, 19 nt, Artificial Sequence
  Description of Artificial Sequence: Synthetic oligonucleotide
auggccaaugaauguuaaa

SEQ ID NO: 2205478 - RNA, 19 nt, Artificial Sequence
  Description of Artificial Sequence: Synthetic oligonucleotide
gcggcuguagacguguccg

SEQ ID NO: 2205479 - RNA, 19 nt, Artificial Sequence
  Description of Artificial Sequence: Synthetic oligonucleotide
uucucccaccagaauuuau

SEQ ID NO: 2205480 - RNA, 19 nt, Artificial Sequence
  Description of Artificial Sequence: Synthetic oligonucleotide
ggcucagguguuuucguac

SEQ ID NO: 2205481 - RNA, 19 nt, Artificial Sequence
  Description of Artificial Sequence: Synthetic oligonucleotide
cuugcuucuuguugcagcu

SEQ ID NO: 2205482 - RNA, 19 nt, Artificial Sequence
  Description of Artificial Sequence: Synthetic oligonucleotide
agguuuccguggcucaggu

SEQ ID NO: 2205483 - RNA, 19 nt, Artificial Sequence
  Description of Artificial Sequence: Synthetic oligonucleotide
cagcagaccuccgugcagc

SEQ ID NO: 2205484 - RNA, 19 nt, Artificial Sequence
  Description of Artificial Sequence: Synthetic oligonucleotide
cagucaagcucuggaacac

SEQ ID NO: 2205485 - RNA, 19 nt, Artificial Sequence
  Description of Artificial Sequence: Synthetic oligonucleotide
cauuugggcauuggccuug

SEQ ID NO: 2205486 - RNA, 19 nt, Artificial Sequence
  Description of Artificial Sequence: Synthetic oligonucleotide
ccugcacuaguguuggaac

SEQ ID NO: 2205487 - RNA, 19 nt, Artificial Sequence
  Description of Artificial Sequence: Synthetic oligonucleotide
guccuauugguagguuucc

SEQ ID NO: 2205488 - RNA, 19 nt, Artificial Sequence
  Description of Artificial Sequence: Synthetic oligonucleotide
cuaccugggcggcacgaac

SEQ ID NO: 2205489 - RNA, 19 nt, Artificial Sequence
  Description of Artificial Sequence: Synthetic oligonucleotide
ucgugcucggggacauagc

SEQ ID NO: 2205490 - RNA, 19 nt, Artificial Sequence
  Description of Artificial Sequence: Synthetic oligonucleotide
auugccagcggcgaccauu

SEQ ID NO: 2205491 - RNA, 19 nt, Artificial Sequence
  Description of Artificial Sequence: Synthetic oligonucleotide
uuguggguccaagugugau

SEQ ID NO: 2205492 - RNA, 19 nt, Artificial Sequence
  Description of Artificial Sequence: Synthetic oligonucleotide
uucguacuucgcagccaca

SEQ ID NO: 2205493 - RNA, 19 nt, Artificial Sequence
  Description of Artificial Sequence: Synthetic oligonucleotide
agacguguccgcgaccaca

SEQ ID NO: 2205494 - RNA, 19 nt, Artificial Sequence
  Description of Artificial Sequence: Synthetic oligonucleotide
gguccuauugguagguuuc

SEQ ID NO: 2205495 - RNA, 19 nt, Artificial Sequence
  Description of Artificial Sequence: Synthetic oligonucleotide
ggcacgaacggccuugcga

SEQ ID NO: 2205496 - RNA, 19 nt, Artificial Sequence
  Description of Artificial Sequence: Synthetic oligonucleotide
ggagaucagaaacuucucu

SEQ ID NO: 2205497 - RNA, 19 nt, Artificial Sequence
  Description of Artificial Sequence: Synthetic oligonucleotide
cgaccauuauuccauacuc

SEQ ID NO: 2205498 - RNA, 19 nt, Artificial Sequence
  Description of Artificial Sequence: Synthetic oligonucleotide
uuuccagagcuauguucuu

SEQ ID NO: 2205499 - RNA, 19 nt, Artificial Sequence
  Description of Artificial Sequence: Synthetic oligonucleotide
uccgugcagcacugucagg

SEQ ID NO: 2205500 - RNA, 19 nt, Artificial Sequence
  Description of Artificial Sequence: Synthetic oligonucleotide
ugguagguuuccagagcua

SEQ ID NO: 2205501 - RNA, 19 nt, Artificial Sequence
  Description of Artificial Sequence: Synthetic oligonucleotide
uggcucagguguuuucgua

SEQ ID NO: 2205502 - RNA, 19 nt, Artificial Sequence
  Description of Artificial Sequence: Synthetic oligonucleotide
uggccguuagcugcuuccc

SEQ ID NO: 2205503 - RNA, 19 nt, Artificial Sequence
  Description of Artificial Sequence: Synthetic oligonucleotide
ccaccagaauuuauuggug

SEQ ID NO: 2205504 - RNA, 19 nt, Artificial Sequence
  Description of Artificial Sequence: Synthetic oligonucleotide
ugcgagcggcuucuaccug

SEQ ID NO: 2205505 - RNA, 19 nt, Artificial Sequence
  Description of Artificial Sequence: Synthetic oligonucleotide
ucuuaugcucugggcuggc

SEQ ID NO: 2205506 - RNA, 19 nt, Artificial Sequence
  Description of Artificial Sequence: Synthetic oligonucleotide
uuuccguggcucagguguu

SEQ ID NO: 2205507 - RNA, 19 nt, Artificial Sequence
  Description of Artificial Sequence: Synthetic oligonucleotide
uucuaccugggcggcacga

SEQ ID NO: 2205508 - RNA, 19 nt, Artificial Sequence
  Description of Artificial Sequence: Synthetic oligonucleotide
guucuaccugggcggcacg

SEQ ID NO: 2205509 - RNA, 19 nt, Artificial Sequence
  Description of Artificial Sequence: Synthetic oligonucleotide
ccugaauggauauuaccaa

SEQ ID NO: 2205510 - RNA, 19 nt, Artificial Sequence
  Description of Artificial Sequence: Synthetic oligonucleotide
ccagcagcaccgaucgugc

SEQ ID NO: 2205511 - RNA, 19 nt, Artificial Sequence
  Description of Artificial Sequence: Synthetic oligonucleotide
ccagguguauccugauggc

SEQ ID NO: 2205512 - RNA, 19 nt, Artificial Sequence
  Description of Artificial Sequence: Synthetic oligonucleotide
acuuccugccgacucuguu

SEQ ID NO: 2205513 - RNA, 19 nt, Artificial Sequence
  Description of Artificial Sequence: Synthetic oligonucleotide
ccaaugaauguuaaaugcu

SEQ ID NO: 2205514 - RNA, 19 nt, Artificial Sequence
  Description of Artificial Sequence: Synthetic oligonucleotide
caagugugauaccugcugu

SEQ ID NO: 2205515 - RNA, 19 nt, Artificial Sequence
  Description of Artificial Sequence: Synthetic oligonucleotide
cucacggaucugagcugcc

SEQ ID NO: 2205516 - RNA, 19 nt, Artificial Sequence
  Description of Artificial Sequence: Synthetic oligonucleotide
gaucauccauggaggugug

SEQ ID NO: 2205517 - RNA, 19 nt, Artificial Sequence
  Description of Artificial Sequence: Synthetic oligonucleotide
cacgaacggccuugcgagc

SEQ ID NO: 2205518 - RNA, 19 nt, Artificial Sequence
  Description of Artificial Sequence: Synthetic oligonucleotide
uggguccaagugugauacc

SEQ ID NO: 2205519 - RNA, 19 nt, Artificial Sequence
  Description of Artificial Sequence: Synthetic oligonucleotide
gcucuggaacacguugugg

SEQ ID NO: 2205520 - RNA, 19 nt, Artificial Sequence
  Description of Artificial Sequence: Synthetic oligonucleotide
gugccgaagagcccucauc

SEQ ID NO: 2205521 - RNA, 19 nt, Artificial Sequence
  Description of Artificial Sequence: Synthetic oligonucleotide
gaagguccuauugguaggu

SEQ ID NO: 2205522 - RNA, 19 nt, Artificial Sequence
  Description of Artificial Sequence: Synthetic oligonucleotide
agugccgaagagcccucau

SEQ ID NO: 2205523 - RNA, 19 nt, Artificial Sequence
  Description of Artificial Sequence: Synthetic oligonucleotide
ggcaccugaauggauauua

SEQ ID NO: 2205524 - RNA, 19 nt, Artificial Sequence
  Description of Artificial Sequence: Synthetic oligonucleotide
gcgagcggcuucuaccugc

SEQ ID NO: 2205525 - RNA, 19 nt, Artificial Sequence
  Description of Artificial Sequence: Synthetic oligonucleotide
ucuaccugggcggcacgaa

SEQ ID NO: 2205526 - RNA, 19 nt, Artificial Sequence
  Description of Artificial Sequence: Synthetic oligonucleotide
gcuggccagauguuccagc

SEQ ID NO: 2205527 - RNA, 19 nt, Artificial Sequence
  Description of Artificial Sequence: Synthetic oligonucleotide
acauagcguucuaccuggg

SEQ ID NO: 2205528 - RNA, 19 nt, Artificial Sequence
  Description of Artificial Sequence: Synthetic oligonucleotide
cugccgacucuguucuauc

SEQ ID NO: 2205529 - RNA, 19 nt, Artificial Sequence
  Description of Artificial Sequence: Synthetic oligonucleotide
uggccccaacucguucugg

SEQ ID NO: 2205530 - RNA, 19 nt, Artificial Sequence
  Description of Artificial Sequence: Synthetic oligonucleotide
cagcggcgaccauuauucc

SEQ ID NO: 2205531 - RNA, 19 nt, Artificial Sequence
  Description of Artificial Sequence: Synthetic oligonucleotide
gccccaacucguucugggg

SEQ ID NO: 2205532 - RNA, 19 nt, Artificial Sequence
  Description of Artificial Sequence: Synthetic oligonucleotide
agcaccgaucgugcucggg

SEQ ID NO: 2205533 - RNA, 19 nt, Artificial Sequence
  Description of Artificial Sequence: Synthetic oligonucleotide
cuucauaggaagguccuau

SEQ ID NO: 2205534 - RNA, 19 nt, Artificial Sequence
  Description of Artificial Sequence: Synthetic oligonucleotide
gaacggccuugcgagcggc

SEQ ID NO: 2205535 - RNA, 19 nt, Artificial Sequence
  Description of Artificial Sequence: Synthetic oligonucleotide
uagacguguccgcgaccac

SEQ ID NO: 2205536 - RNA, 19 nt, Artificial Sequence
  Description of Artificial Sequence: Synthetic oligonucleotide
gguguauccugauggccaa

SEQ ID NO: 2205537 - RNA, 19 nt, Artificial Sequence
  Description of Artificial Sequence: Synthetic oligonucleotide
gagcggcuucuaccugcgg

SEQ ID NO: 2205538 - RNA, 19 nt, Artificial Sequence
  Description of Artificial Sequence: Synthetic oligonucleotide
ggcgaccauuauuccauac

SEQ ID NO: 2205539 - RNA, 19 nt, Artificial Sequence
  Description of Artificial Sequence: Synthetic oligonucleotide
cugcacuaguguuggaacu

SEQ ID NO: 2205540 - RNA, 19 nt, Artificial Sequence
  Description of Artificial Sequence: Synthetic oligonucleotide
ucgcagccacagcacggac

SEQ ID NO: 2205541 - RNA, 19 nt, Artificial Sequence
  Description of Artificial Sequence: Synthetic oligonucleotide
gggacauagcguucuaccu

SEQ ID NO: 2205542 - RNA, 19 nt, Artificial Sequence
  Description of Artificial Sequence: Synthetic oligonucleotide
cccaccagaauuuauuggu

SEQ ID NO: 2205543 - RNA, 19 nt, Artificial Sequence
  Description of Artificial Sequence: Synthetic oligonucleotide
agcccucaucuggaucugg

SEQ ID NO: 2205544 - RNA, 19 nt, Artificial Sequence
  Description of Artificial Sequence: Synthetic oligonucleotide
aagguccuauugguagguu

SEQ ID NO: 2205545 - RNA, 19 nt, Artificial Sequence
  Description of Artificial Sequence: Synthetic oligonucleotide
ccgacucuguucuaucuca

SEQ ID NO: 2205546 - RNA, 19 nt, Artificial Sequence
  Description of Artificial Sequence: Synthetic oligonucleotide
ugaccacuuccugccgacu

SEQ ID NO: 2205547 - RNA, 19 nt, Artificial Sequence
  Description of Artificial Sequence: Synthetic oligonucleotide
caccgaucgugcucgggga

SEQ ID NO: 2205548 - RNA, 19 nt, Artificial Sequence
  Description of Artificial Sequence: Synthetic oligonucleotide
cauggccguuagcugcuuc

SEQ ID NO: 2205549 - RNA, 19 nt, Artificial Sequence
  Description of Artificial Sequence: Synthetic oligonucleotide
ggaucuggcucugccugag

SEQ ID NO: 2205550 - RNA, 19 nt, Artificial Sequence
  Description of Artificial Sequence: Synthetic oligonucleotide
gcuguagacguguccgcga

SEQ ID NO: 2205551 - RNA, 19 nt, Artificial Sequence
  Description of Artificial Sequence: Synthetic oligonucleotide
gcgguaaaagccgcuccag

SEQ ID NO: 2205552 - RNA, 19 nt, Artificial Sequence
  Description of Artificial Sequence: Synthetic oligonucleotide
gcgaccauuauuccauacu

SEQ ID NO: 2205553 - RNA, 19 nt, Artificial Sequence
  Description of Artificial Sequence: Synthetic oligonucleotide
gguguggcaccugaaugga

SEQ ID NO: 2205554 - RNA, 19 nt, Artificial Sequence
  Description of Artificial Sequence: Synthetic oligonucleotide
ccguuagcugcuucccagc

SEQ ID NO: 2205555 - RNA, 19 nt, Artificial Sequence
  Description of Artificial Sequence: Synthetic oligonucleotide
gcuucccagcuucccagug

SEQ ID NO: 2205556 - RNA, 19 nt, Artificial Sequence
  Description of Artificial Sequence: Synthetic oligonucleotide
aggcucuaagacagaucug

SEQ ID NO: 2205557 - RNA, 19 nt, Artificial Sequence
  Description of Artificial Sequence: Synthetic oligonucleotide
cagaauuuauugguggcuu

SEQ ID NO: 2205558 - RNA, 19 nt, Artificial Sequence
  Description of Artificial Sequence: Synthetic oligonucleotide
gccgacucuguucuaucuc

SEQ ID NO: 2205559 - RNA, 19 nt, Artificial Sequence
  Description of Artificial Sequence: Synthetic oligonucleotide
aaguuggccccaacucguu

SEQ ID NO: 2205560 - RNA, 19 nt, Artificial Sequence
  Description of Artificial Sequence: Synthetic oligonucleotide
uaccugcugugagcuggag

SEQ ID NO: 2205561 - RNA, 19 nt, Artificial Sequence
  Description of Artificial Sequence: Synthetic oligonucleotide
gcucuaagacagaucugac

SEQ ID NO: 2205562 - RNA, 19 nt, Artificial Sequence
  Description of Artificial Sequence: Synthetic oligonucleotide
cuugcggcuguagacgugu

SEQ ID NO: 2205563 - RNA, 19 nt, Artificial Sequence
  Description of Artificial Sequence: Synthetic oligonucleotide
ggccacauggccguuagcu

SEQ ID NO: 2205564 - RNA, 19 nt, Artificial Sequence
  Description of Artificial Sequence: Synthetic oligonucleotide
ccgcgaccacagaagaaag

SEQ ID NO: 2205565 - RNA, 19 nt, Artificial Sequence
  Description of Artificial Sequence: Synthetic oligonucleotide
guuguggguccaaguguga

SEQ ID NO: 2205566 - RNA, 19 nt, Artificial Sequence
  Description of Artificial Sequence: Synthetic oligonucleotide
ucggggacauagcguucua

SEQ ID NO: 2205567 - RNA, 19 nt, Artificial Sequence
  Description of Artificial Sequence: Synthetic oligonucleotide
guggcaccugaauggauau

SEQ ID NO: 2205568 - RNA, 19 nt, Artificial Sequence
  Description of Artificial Sequence: Synthetic oligonucleotide
gcuucuaccugcgguaaaa

SEQ ID NO: 2205569 - RNA, 19 nt, Artificial Sequence
  Description of Artificial Sequence: Synthetic oligonucleotide
gcaccugaauggauauuac

SEQ ID NO: 2205570 - RNA, 19 nt, Artificial Sequence
  Description of Artificial Sequence: Synthetic oligonucleotide
aacggccuugcgagcggcu

SEQ ID NO: 2205571 - RNA, 19 nt, Artificial Sequence
  Description of Artificial Sequence: Synthetic oligonucleotide
cguacuucgcagccacagc

SEQ ID NO: 2205572 - RNA, 19 nt, Artificial Sequence
  Description of Artificial Sequence: Synthetic oligonucleotide
uccguggcucagguguuuu

SEQ ID NO: 2205573 - RNA, 19 nt, Artificial Sequence
  Description of Artificial Sequence: Synthetic oligonucleotide
cuuguucucccaccagaau

SEQ ID NO: 2205574 - RNA, 19 nt, Artificial Sequence
  Description of Artificial Sequence: Synthetic oligonucleotide
ggcggcacgaacggccuug

SEQ ID NO: 2205575 - RNA, 19 nt, Artificial Sequence
  Description of Artificial Sequence: Synthetic oligonucleotide
gcucagguguuuucguacu

SEQ ID NO: 2205576 - RNA, 19 nt, Artificial Sequence
  Description of Artificial Sequence: Synthetic oligonucleotide
ggagguguggcaccugaau

SEQ ID NO: 2205577 - RNA, 19 nt, Artificial Sequence
  Description of Artificial Sequence: Synthetic oligonucleotide
ccugcgguaaaagccgcuc

SEQ ID NO: 2205578 - RNA, 19 nt, Artificial Sequence
  Description of Artificial Sequence: Synthetic oligonucleotide
gcccucaucuggaucuggc

SEQ ID NO: 2205579 - RNA, 19 nt, Artificial Sequence
  Description of Artificial Sequence: Synthetic oligonucleotide
guuuggcgacacagaggac

SEQ ID NO: 2205580 - RNA, 19 nt, Artificial Sequence
  Description of Artificial Sequence: Synthetic oligonucleotide
accugcgguaaaagccgcu

SEQ ID NO: 2205581 - RNA, 19 nt, Artificial Sequence
  Description of Artificial Sequence: Synthetic oligonucleotide
cgagcggcuucuaccugcg

SEQ ID NO: 2205582 - RNA, 19 nt, Artificial Sequence
  Description of Artificial Sequence: Synthetic oligonucleotide
acguguccgcgaccacaga

SEQ ID NO: 2205583 - RNA, 19 nt, Artificial Sequence
  Description of Artificial Sequence: Synthetic oligonucleotide
ccugauggccaaugaaugu

SEQ ID NO: 2205584 - RNA, 19 nt, Artificial Sequence
  Description of Artificial Sequence: Synthetic oligonucleotide
gaacacguuguggguccaa

SEQ ID NO: 2205585 - RNA, 19 nt, Artificial Sequence
  Description of Artificial Sequence: Synthetic oligonucleotide
gcgaccacagaagaaaguu

SEQ ID NO: 2205586 - RNA, 19 nt, Artificial Sequence
  Description of Artificial Sequence: Synthetic oligonucleotide
gccugcacuaguguuggaa

SEQ ID NO: 2205587 - RNA, 19 nt, Artificial Sequence
  Description of Artificial Sequence: Synthetic oligonucleotide
uggcaccugaauggauauu

SEQ ID NO: 2205588 - RNA, 19 nt, Artificial Sequence
  Description of Artificial Sequence: Synthetic oligonucleotide
ccuugcgagcggcuucuac

SEQ ID NO: 2205589 - RNA, 19 nt, Artificial Sequence
  Description of Artificial Sequence: Synthetic oligonucleotide
cagcaccgaucgugcucgg

SEQ ID NO: 2205590 - RNA, 19 nt, Artificial Sequence
  Description of Artificial Sequence: Synthetic oligonucleotide
cucggggacauagcguucu

SEQ ID NO: 2205591 - RNA, 19 nt, Artificial Sequence
  Description of Artificial Sequence: Synthetic oligonucleotide
uuccguggcucagguguuu

SEQ ID NO: 2205592 - RNA, 19 nt, Artificial Sequence
  Description of Artificial Sequence: Synthetic oligonucleotide
cugaggcucuaagacagau

SEQ ID NO: 2205593 - RNA, 19 nt, Artificial Sequence
  Description of Artificial Sequence: Synthetic oligonucleotide
ggauugccagcggcgacca

SEQ ID NO: 2205594 - RNA, 19 nt, Artificial Sequence
  Description of Artificial Sequence: Synthetic oligonucleotide
gcugcgguggcgccauaga

SEQ ID NO: 2205595 - RNA, 19 nt, Artificial Sequence
  Description of Artificial Sequence: Synthetic oligonucleotide
augcucugggcuggccaga

SEQ ID NO: 2205596 - RNA, 19 nt, Artificial Sequence
  Description of Artificial Sequence: Synthetic oligonucleotide
ggacaucgcugcgguggcg

SEQ ID NO: 2205597 - RNA, 19 nt, Artificial Sequence
  Description of Artificial Sequence: Synthetic oligonucleotide
cacggaucugagcugccau

SEQ ID NO: 2205598 - RNA, 19 nt, Artificial Sequence
  Description of Artificial Sequence: Synthetic oligonucleotide
gcgacacagaggacaucgc

SEQ ID NO: 2205599 - RNA, 19 nt, Artificial Sequence
  Description of Artificial Sequence: Synthetic oligonucleotide
uggcgacacagaggacauc

SEQ ID NO: 2205600 - RNA, 19 nt, Artificial Sequence
  Description of Artificial Sequence: Synthetic oligonucleotide
acggccuugcgagcggcuu

SEQ ID NO: 2205601 - RNA, 19 nt, Artificial Sequence
  Description of Artificial Sequence: Synthetic oligonucleotide
ugccagcggcgaccauuau

SEQ ID NO: 2205602 - RNA, 19 nt, Artificial Sequence
  Description of Artificial Sequence: Synthetic oligonucleotide
cguucuaccugggcggcac

SEQ ID NO: 2205603 - RNA, 19 nt, Artificial Sequence
  Description of Artificial Sequence: Synthetic oligonucleotide
guccgcgaccacagaagaa

SEQ ID NO: 2205604 - RNA, 19 nt, Artificial Sequence
  Description of Artificial Sequence: Synthetic oligonucleotide
cgaacggccuugcgagcgg

SEQ ID NO: 2205605 - RNA, 19 nt, Artificial Sequence
  Description of Artificial Sequence: Synthetic oligonucleotide
gcagccagccugcacuagu

SEQ ID NO: 2205606 - RNA, 19 nt, Artificial Sequence
  Description of Artificial Sequence: Synthetic oligonucleotide
ccuggauugccagcggcga

SEQ ID NO: 2205607 - RNA, 19 nt, Artificial Sequence
  Description of Artificial Sequence: Synthetic oligonucleotide
gcggcgaccauuauuccau

SEQ ID NO: 2205608 - RNA, 19 nt, Artificial Sequence
  Description of Artificial Sequence: Synthetic oligonucleotide
ggcuucuaccugcgguaaa

SEQ ID NO: 2205609 - RNA, 19 nt, Artificial Sequence
  Description of Artificial Sequence: Synthetic oligonucleotide
cucagguguuuucguacuu

SEQ ID NO: 2205610 - RNA, 19 nt, Artificial Sequence
  Description of Artificial Sequence: Synthetic oligonucleotide
gugcucggggacauagcgu

SEQ ID NO: 2205611 - RNA, 19 nt, Artificial Sequence
  Description of Artificial Sequence: Synthetic oligonucleotide
caucgcugcgguggcgcca

SEQ ID NO: 2205612 - RNA, 19 nt, Artificial Sequence
  Description of Artificial Sequence: Synthetic oligonucleotide
gcuugcggcuguagacgug

SEQ ID NO: 2205613 - RNA, 19 nt, Artificial Sequence
  Description of Artificial Sequence: Synthetic oligonucleotide
cguguccgcgaccacagaa

SEQ ID NO: 2205614 - RNA, 19 nt, Artificial Sequence
  Description of Artificial Sequence: Synthetic oligonucleotide
gcucugggcuggccagaug

SEQ ID NO: 2205615 - RNA, 19 nt, Artificial Sequence
  Description of Artificial Sequence: Synthetic oligonucleotide
ggaacacguugugggucca

SEQ ID NO: 2205616 - RNA, 19 nt, Artificial Sequence
  Description of Artificial Sequence: Synthetic oligonucleotide
ccugaggcucuaagacaga

SEQ ID NO: 2205617 - RNA, 19 nt, Artificial Sequence
  Description of Artificial Sequence: Synthetic oligonucleotide
ccagugccgaagagcccuc

SEQ ID NO: 2205618 - RNA, 19 nt, Artificial Sequence
  Description of Artificial Sequence: Synthetic oligonucleotide
gccagccugcacuaguguu

SEQ ID NO: 2205619 - RNA, 19 nt, Artificial Sequence
  Description of Artificial Sequence: Synthetic oligonucleotide
cagugccgaagagcccuca

SEQ ID NO: 2205620 - RNA, 19 nt, Artificial Sequence
  Description of Artificial Sequence: Synthetic oligonucleotide
cccagugccgaagagcccu

SEQ ID NO: 2205621 - RNA, 19 nt, Artificial Sequence
  Description of Artificial Sequence: Synthetic oligonucleotide
cacuuccugccgacucugu

SEQ ID NO: 2205622 - RNA, 19 nt, Artificial Sequence
  Description of Artificial Sequence: Synthetic oligonucleotide
gccgcuggugcuugcggcu

SEQ ID NO: 2205623 - RNA, 19 nt, Artificial Sequence
  Description of Artificial Sequence: Synthetic oligonucleotide
gaucgugcucggggacaua

SEQ ID NO: 2205624 - RNA, 19 nt, Artificial Sequence
  Description of Artificial Sequence: Synthetic oligonucleotide
gcggcacgaacggccuugc

SEQ ID NO: 2205625 - RNA, 19 nt, Artificial Sequence
  Description of Artificial Sequence: Synthetic oligonucleotide
gccagcggcgaccauuauu

SEQ ID NO: 2205626 - RNA, 19 nt, Artificial Sequence
  Description of Artificial Sequence: Synthetic oligonucleotide
cagcagcaccgaucgugcu

SEQ ID NO: 2205627 - RNA, 19 nt, Artificial Sequence
  Description of Artificial Sequence: Synthetic oligonucleotide
cggggacauagcguucuac

SEQ ID NO: 2205628 - RNA, 19 nt, Artificial Sequence
  Description of Artificial Sequence: Synthetic oligonucleotide
gcucggggacauagcguuc

SEQ ID NO: 2205629 - RNA, 19 nt, Artificial Sequence
  Description of Artificial Sequence: Synthetic oligonucleotide
guguggcaccugaauggau

SEQ ID NO: 2205630 - RNA, 19 nt, Artificial Sequence
  Description of Artificial Sequence: Synthetic oligonucleotide
gauugccagcggcgaccau

SEQ ID NO: 2205631 - RNA, 19 nt, Artificial Sequence
  Description of Artificial Sequence: Synthetic oligonucleotide
ccgaucgugcucggggaca

SEQ ID NO: 2205632 - RNA, 19 nt, Artificial Sequence
  Description of Artificial Sequence: Synthetic oligonucleotide
ccagagcuauguucuuccu

SEQ ID NO: 2205633 - RNA, 19 nt, Artificial Sequence
  Description of Artificial Sequence: Synthetic oligonucleotide
guguauccugauggccaau

SEQ ID NO: 2205634 - RNA, 19 nt, Artificial Sequence
  Description of Artificial Sequence: Synthetic oligonucleotide
ggccuugcgagcggcuucu

SEQ ID NO: 2205635 - RNA, 19 nt, Artificial Sequence
  Description of Artificial Sequence: Synthetic oligonucleotide
cgaccacagaagaaaguuu

SEQ ID NO: 2205636 - RNA, 19 nt, Artificial Sequence
  Description of Artificial Sequence: Synthetic oligonucleotide
cggcacgaacggccuugcg

SEQ ID NO: 2205637 - RNA, 19 nt, Artificial Sequence
  Description of Artificial Sequence: Synthetic oligonucleotide
cggccuugcgagcggcuuc

SEQ ID NO: 2205638 - RNA, 19 nt, Artificial Sequence
  Description of Artificial Sequence: Synthetic oligonucleotide
gaccuccgugcagcacugu

SEQ ID NO: 2205639 - RNA, 19 nt, Artificial Sequence
  Description of Artificial Sequence: Synthetic oligonucleotide
cgcgaccacagaagaaagu

SEQ ID NO: 2205640 - RNA, 19 nt, Artificial Sequence
  Description of Artificial Sequence: Synthetic oligonucleotide
gcguucuaccugggcggca

SEQ ID NO: 2205641 - RNA, 19 nt, Artificial Sequence
  Description of Artificial Sequence: Synthetic oligonucleotide
ccugccgacucuguucuau

SEQ ID NO: 2205642 - RNA, 19 nt, Artificial Sequence
  Description of Artificial Sequence: Synthetic oligonucleotide
caccagcagcaccgaucgu

SEQ ID NO: 2205643 - RNA, 19 nt, Artificial Sequence
  Description of Artificial Sequence: Synthetic oligonucleotide
cggcuucuaccugcgguaa

SEQ ID NO: 2205644 - RNA, 19 nt, Artificial Sequence
  Description of Artificial Sequence: Synthetic oligonucleotide
cgugcagcacugucagguu

SEQ ID NO: 2205645 - RNA, 19 nt, Artificial Sequence
  Description of Artificial Sequence: Synthetic oligonucleotide
cggcgaccauuauuccaua

SEQ ID NO: 2205646 - RNA, 19 nt, Artificial Sequence
  Description of Artificial Sequence: Synthetic oligonucleotide
cgaucgugcucggggacau

SEQ ID NO: 2205647 - RNA, 19 nt, Artificial Sequence
  Description of Artificial Sequence: Synthetic oligonucleotide
gccuugcgagcggcuucua

SEQ ID NO: 2205648 - RNA, 19 nt, Artificial Sequence
  Description of Artificial Sequence: Synthetic oligonucleotide
aggcuuagccuucacaggc

SEQ ID NO: 2205649 - RNA, 19 nt, Artificial Sequence
  Description of Artificial Sequence: Synthetic oligonucleotide
agcagggucuuucugacac

SEQ ID NO: 2205650 - RNA, 19 nt, Artificial Sequence
  Description of Artificial Sequence: Synthetic oligonucleotide
uugaacgacgccaaggcca

SEQ ID NO: 2205651 - RNA, 19 nt, Artificial Sequence
  Description of Artificial Sequence: Synthetic oligonucleotide
agacucuucaccugccucc

SEQ ID NO: 2205652 - RNA, 19 nt, Artificial Sequence
  Description of Artificial Sequence: Synthetic oligonucleotide
uguagugggcgugaaaacg

SEQ ID NO: 2205653 - RNA, 19 nt, Artificial Sequence
  Description of Artificial Sequence: Synthetic oligonucleotide
ucggguaggagcagaagcg

SEQ ID NO: 2205654 - RNA, 19 nt, Artificial Sequence
  Description of Artificial Sequence: Synthetic oligonucleotide
aacgcagcgggucaccagg

SEQ ID NO: 2205655 - RNA, 19 nt, Artificial Sequence
  Description of Artificial Sequence: Synthetic oligonucleotide
ucugcgaucuucuccagga

SEQ ID NO: 2205656 - RNA, 19 nt, Artificial Sequence
  Description of Artificial Sequence: Synthetic oligonucleotide
cacugagcgauguaguggg

SEQ ID NO: 2205657 - RNA, 19 nt, Artificial Sequence
  Description of Artificial Sequence: Synthetic oligonucleotide
cacacgccaauccagaggc

SEQ ID NO: 2205658 - RNA, 19 nt, Artificial Sequence
  Description of Artificial Sequence: Synthetic oligonucleotide
gagaccagguccugaaggg

SEQ ID NO: 2205659 - RNA, 19 nt, Artificial Sequence
  Description of Artificial Sequence: Synthetic oligonucleotide
uccugcuggcgcuugaacg

SEQ ID NO: 2205660 - RNA, 19 nt, Artificial Sequence
  Description of Artificial Sequence: Synthetic oligonucleotide
ucugacacugguucccagg

SEQ ID NO: 2205661 - RNA, 19 nt, Artificial Sequence
  Description of Artificial Sequence: Synthetic oligonucleotide
aacgacgccaaggccaggc

SEQ ID NO: 2205662 - RNA, 19 nt, Artificial Sequence
  Description of Artificial Sequence: Synthetic oligonucleotide
agaagcgggaggcccaggc

SEQ ID NO: 2205663 - RNA, 19 nt, Artificial Sequence
  Description of Artificial Sequence: Synthetic oligonucleotide
cugcccauuagccuggccg

SEQ ID NO: 2205664 - RNA, 19 nt, Artificial Sequence
  Description of Artificial Sequence: Synthetic oligonucleotide
uuggcaaccuccaccacca

SEQ ID NO: 2205665 - RNA, 19 nt, Artificial Sequence
  Description of Artificial Sequence: Synthetic oligonucleotide
guuugaaggcccuggcugg

SEQ ID NO: 2205666 - RNA, 19 nt, Artificial Sequence
  Description of Artificial Sequence: Synthetic oligonucleotide
ugaacgacgccaaggccag

SEQ ID NO: 2205667 - RNA, 19 nt, Artificial Sequence
  Description of Artificial Sequence: Synthetic oligonucleotide
ugcgaucuucuccaggagc

SEQ ID NO: 2205668 - RNA, 19 nt, Artificial Sequence
  Description of Artificial Sequence: Synthetic oligonucleotide
gauguagugggcgugaaaa

SEQ ID NO: 2205669 - RNA, 19 nt, Artificial Sequence
  Description of Artificial Sequence: Synthetic oligonucleotide
ugaauccugcuccagcuuc

SEQ ID NO: 2205670 - RNA, 19 nt, Artificial Sequence
  Description of Artificial Sequence: Synthetic oligonucleotide
auguagugggcgugaaaac

SEQ ID NO: 2205671 - RNA, 19 nt, Artificial Sequence
  Description of Artificial Sequence: Synthetic oligonucleotide
agccuucacaggccgaggc

SEQ ID NO: 2205672 - RNA, 19 nt, Artificial Sequence
  Description of Artificial Sequence: Synthetic oligonucleotide
ggcgugaaaacgcagcggg

SEQ ID NO: 2205673 - RNA, 19 nt, Artificial Sequence
  Description of Artificial Sequence: Synthetic oligonucleotide
uucaucggccccugaaucc

SEQ ID NO: 2205674 - RNA, 19 nt, Artificial Sequence
  Description of Artificial Sequence: Synthetic oligonucleotide
cagucuuuggacugcacac

SEQ ID NO: 2205675 - RNA, 19 nt, Artificial Sequence
  Description of Artificial Sequence: Synthetic oligonucleotide
guuggcaaccuccaccacc

SEQ ID NO: 2205676 - RNA, 19 nt, Artificial Sequence
  Description of Artificial Sequence: Synthetic oligonucleotide
gaagcagggucuuucugac

SEQ ID NO: 2205677 - RNA, 19 nt, Artificial Sequence
  Description of Artificial Sequence: Synthetic oligonucleotide
uuagccuucacaggccgag

SEQ ID NO: 2205678 - RNA, 19 nt, Artificial Sequence
  Description of Artificial Sequence: Synthetic oligonucleotide
ugaagacucuucaccugcc

SEQ ID NO: 2205679 - RNA, 19 nt, Artificial Sequence
  Description of Artificial Sequence: Synthetic oligonucleotide
ucggcugccaacgagcucu

SEQ ID NO: 2205680 - RNA, 19 nt, Artificial Sequence
  Description of Artificial Sequence: Synthetic oligonucleotide
auuagccuggccgucauca

SEQ ID NO: 2205681 - RNA, 19 nt, Artificial Sequence
  Description of Artificial Sequence: Synthetic oligonucleotide
gucaccaccaaacuuccca

SEQ ID NO: 2205682 - RNA, 19 nt, Artificial Sequence
  Description of Artificial Sequence: Synthetic oligonucleotide
agucuuuggacugcacacg

SEQ ID NO: 2205683 - RNA, 19 nt, Artificial Sequence
  Description of Artificial Sequence: Synthetic oligonucleotide
ugacacugguucccaggcg

SEQ ID NO: 2205684 - RNA, 19 nt, Artificial Sequence
  Description of Artificial Sequence: Synthetic oligonucleotide
cugacgagcgucacggcgc

SEQ ID NO: 2205685 - RNA, 19 nt, Artificial Sequence
  Description of Artificial Sequence: Synthetic oligonucleotide
gucaucaguggucucgccc

SEQ ID NO: 2205686 - RNA, 19 nt, Artificial Sequence
  Description of Artificial Sequence: Synthetic oligonucleotide
ugccaacgagcucugcucc

SEQ ID NO: 2205687 - RNA, 19 nt, Artificial Sequence
  Description of Artificial Sequence: Synthetic oligonucleotide
ucuuuggacugcacacgcc

SEQ ID NO: 2205688 - RNA, 19 nt, Artificial Sequence
  Description of Artificial Sequence: Synthetic oligonucleotide
cuugaacgacgccaaggcc

SEQ ID NO: 2205689 - RNA, 19 nt, Artificial Sequence
  Description of Artificial Sequence: Synthetic oligonucleotide
aaacgcagcgggucaccag

SEQ ID NO: 2205690 - RNA, 19 nt, Artificial Sequence
  Description of Artificial Sequence: Synthetic oligonucleotide
gagguguagaccaccuucc

SEQ ID NO: 2205691 - RNA, 19 nt, Artificial Sequence
  Description of Artificial Sequence: Synthetic oligonucleotide
ugagcgauguagugggcgu

SEQ ID NO: 2205692 - RNA, 19 nt, Artificial Sequence
  Description of Artificial Sequence: Synthetic oligonucleotide
guagugggcgugaaaacgc

SEQ ID NO: 2205693 - RNA, 19 nt, Artificial Sequence
  Description of Artificial Sequence: Synthetic oligonucleotide
gaagcgggaggcccaggcg

SEQ ID NO: 2205694 - RNA, 19 nt, Artificial Sequence
  Description of Artificial Sequence: Synthetic oligonucleotide
ccuaucucggccaggagcc

SEQ ID NO: 2205695 - RNA, 19 nt, Artificial Sequence
  Description of Artificial Sequence: Synthetic oligonucleotide
gcuugaacgacgccaaggc

SEQ ID NO: 2205696 - RNA, 19 nt, Artificial Sequence
  Description of Artificial Sequence: Synthetic oligonucleotide
gaagccucucucccacagg

SEQ ID NO: 2205697 - RNA, 19 nt, Artificial Sequence
  Description of Artificial Sequence: Synthetic oligonucleotide
cuuuggacugcacacgcca

SEQ ID NO: 2205698 - RNA, 19 nt, Artificial Sequence
  Description of Artificial Sequence: Synthetic oligonucleotide
agagaagcagggucuuucu

SEQ ID NO: 2205699 - RNA, 19 nt, Artificial Sequence
  Description of Artificial Sequence: Synthetic oligonucleotide
uuugaaggcccuggcuggg

SEQ ID NO: 2205700 - RNA, 19 nt, Artificial Sequence
  Description of Artificial Sequence: Synthetic oligonucleotide
ggauagaccaggaagucac

SEQ ID NO: 2205701 - RNA, 19 nt, Artificial Sequence
  Description of Artificial Sequence: Synthetic oligonucleotide
cugagcgauguagugggcg

SEQ ID NO: 2205702 - RNA, 19 nt, Artificial Sequence
  Description of Artificial Sequence: Synthetic oligonucleotide
cuggaaacucugcuccugc

SEQ ID NO: 2205703 - RNA, 19 nt, Artificial Sequence
  Description of Artificial Sequence: Synthetic oligonucleotide
cuucaucggccccugaauc

SEQ ID NO: 2205704 - RNA, 19 nt, Artificial Sequence
  Description of Artificial Sequence: Synthetic oligonucleotide
agcgucacggcgccuaucu

SEQ ID NO: 2205705 - RNA, 19 nt, Artificial Sequence
  Description of Artificial Sequence: Synthetic oligonucleotide
uagugggcgugaaaacgca

SEQ ID NO: 2205706 - RNA, 19 nt, Artificial Sequence
  Description of Artificial Sequence: Synthetic oligonucleotide
gggucaccccguuugaagg

SEQ ID NO: 2205707 - RNA, 19 nt, Artificial Sequence
  Description of Artificial Sequence: Synthetic oligonucleotide
ugcgcugaggaagaagccu

SEQ ID NO: 2205708 - RNA, 19 nt, Artificial Sequence
  Description of Artificial Sequence: Synthetic oligonucleotide
uuuggacugcacacgccaa

SEQ ID NO: 2205709 - RNA, 19 nt, Artificial Sequence
  Description of Artificial Sequence: Synthetic oligonucleotide
uucgcuuccaccggcuucu

SEQ ID NO: 2205710 - RNA, 19 nt, Artificial Sequence
  Description of Artificial Sequence: Synthetic oligonucleotide
ugcccauuagccuggccgu

SEQ ID NO: 2205711 - RNA, 19 nt, Artificial Sequence
  Description of Artificial Sequence: Synthetic oligonucleotide
ucaccaggauagaccagga

SEQ ID NO: 2205712 - RNA, 19 nt, Artificial Sequence
  Description of Artificial Sequence: Synthetic oligonucleotide
uggcgcuugaacgacgcca

SEQ ID NO: 2205713 - RNA, 19 nt, Artificial Sequence
  Description of Artificial Sequence: Synthetic oligonucleotide
cuguagcgcagcucguggg

SEQ ID NO: 2205714 - RNA, 19 nt, Artificial Sequence
  Description of Artificial Sequence: Synthetic oligonucleotide
aaaacgcagcgggucacca

SEQ ID NO: 2205715 - RNA, 19 nt, Artificial Sequence
  Description of Artificial Sequence: Synthetic oligonucleotide
uaucucggccaggagccgg

SEQ ID NO: 2205716 - RNA, 19 nt, Artificial Sequence
  Description of Artificial Sequence: Synthetic oligonucleotide
augcggccagucuuuggac

SEQ ID NO: 2205717 - RNA, 19 nt, Artificial Sequence
  Description of Artificial Sequence: Synthetic oligonucleotide
gcugacgagcgucacggcg

SEQ ID NO: 2205718 - RNA, 19 nt, Artificial Sequence
  Description of Artificial Sequence: Synthetic oligonucleotide
acgacgccaaggccaggcc

SEQ ID NO: 2205719 - RNA, 19 nt, Artificial Sequence
  Description of Artificial Sequence: Synthetic oligonucleotide
gugaaaacgcagcggguca

SEQ ID NO: 2205720 - RNA, 19 nt, Artificial Sequence
  Description of Artificial Sequence: Synthetic oligonucleotide
guaggagcagaagcgggag

SEQ ID NO: 2205721 - RNA, 19 nt, Artificial Sequence
  Description of Artificial Sequence: Synthetic oligonucleotide
cugccaacgagcucugcuc

SEQ ID NO: 2205722 - RNA, 19 nt, Artificial Sequence
  Description of Artificial Sequence: Synthetic oligonucleotide
ugaaggcccuggcugggga

SEQ ID NO: 2205723 - RNA, 19 nt, Artificial Sequence
  Description of Artificial Sequence: Synthetic oligonucleotide
ugcuggcgcuugaacgacg

SEQ ID NO: 2205724 - RNA, 19 nt, Artificial Sequence
  Description of Artificial Sequence: Synthetic oligonucleotide
guagaugcuguagcgcagc

SEQ ID NO: 2205725 - RNA, 19 nt, Artificial Sequence
  Description of Artificial Sequence: Synthetic oligonucleotide
uggaugagcagggcugacc

SEQ ID NO: 2205726 - RNA, 19 nt, Artificial Sequence
  Description of Artificial Sequence: Synthetic oligonucleotide
ugacgagcgucacggcgcc

SEQ ID NO: 2205727 - RNA, 19 nt, Artificial Sequence
  Description of Artificial Sequence: Synthetic oligonucleotide
gauagaccaggaagucacc

SEQ ID NO: 2205728 - RNA, 19 nt, Artificial Sequence
  Description of Artificial Sequence: Synthetic oligonucleotide
ucucacgggccucggcugc

SEQ ID NO: 2205729 - RNA, 19 nt, Artificial Sequence
  Description of Artificial Sequence: Synthetic oligonucleotide
caccgugcggccccgaccc

SEQ ID NO: 2205730 - RNA, 19 nt, Artificial Sequence
  Description of Artificial Sequence: Synthetic oligonucleotide
uggaaacucugcuccugcu

SEQ ID NO: 2205731 - RNA, 19 nt, Artificial Sequence
  Description of Artificial Sequence: Synthetic oligonucleotide
gcuuagccuucacaggccg

SEQ ID NO: 2205732 - RNA, 19 nt, Artificial Sequence
  Description of Artificial Sequence: Synthetic oligonucleotide
cuuccaccggcuucuuggc

SEQ ID NO: 2205733 - RNA, 19 nt, Artificial Sequence
  Description of Artificial Sequence: Synthetic oligonucleotide
aacgagcucugcuccugga

SEQ ID NO: 2205734 - RNA, 19 nt, Artificial Sequence
  Description of Artificial Sequence: Synthetic oligonucleotide
ggaaacucugcuccugcug

SEQ ID NO: 2205735 - RNA, 19 nt, Artificial Sequence
  Description of Artificial Sequence: Synthetic oligonucleotide
uucugacacugguucccag

SEQ ID NO: 2205736 - RNA, 19 nt, Artificial Sequence
  Description of Artificial Sequence: Synthetic oligonucleotide
ugaaaacgcagcgggucac

SEQ ID NO: 2205737 - RNA, 19 nt, Artificial Sequence
  Description of Artificial Sequence: Synthetic oligonucleotide
gcugcgcugaggaagaagc

SEQ ID NO: 2205738 - RNA, 19 nt, Artificial Sequence
  Description of Artificial Sequence: Synthetic oligonucleotide
gccuaucucggccaggagc

SEQ ID NO: 2205739 - RNA, 19 nt, Artificial Sequence
  Description of Artificial Sequence: Synthetic oligonucleotide
ucggcgccccacaccagcg

SEQ ID NO: 2205740 - RNA, 19 nt, Artificial Sequence
  Description of Artificial Sequence: Synthetic oligonucleotide
gucacggcgccuaucucgg

SEQ ID NO: 2205741 - RNA, 19 nt, Artificial Sequence
  Description of Artificial Sequence: Synthetic oligonucleotide
uuggacugcacacgccaau

SEQ ID NO: 2205742 - RNA, 19 nt, Artificial Sequence
  Description of Artificial Sequence: Synthetic oligonucleotide
acugguucccaggcggccg

SEQ ID NO: 2205743 - RNA, 19 nt, Artificial Sequence
  Description of Artificial Sequence: Synthetic oligonucleotide
agggcgcccaccgugcggc

SEQ ID NO: 2205744 - RNA, 19 nt, Artificial Sequence
  Description of Artificial Sequence: Synthetic oligonucleotide
cuggccgucaucagugguc

SEQ ID NO: 2205745 - RNA, 19 nt, Artificial Sequence
  Description of Artificial Sequence: Synthetic oligonucleotide
ucaucggccccugaauccu

SEQ ID NO: 2205746 - RNA, 19 nt, Artificial Sequence
  Description of Artificial Sequence: Synthetic oligonucleotide
cucugcgaucuucuccagg

SEQ ID NO: 2205747 - RNA, 19 nt, Artificial Sequence
  Description of Artificial Sequence: Synthetic oligonucleotide
gaaaacgcagcgggucacc

SEQ ID NO: 2205748 - RNA, 19 nt, Artificial Sequence
  Description of Artificial Sequence: Synthetic oligonucleotide
ccaauccagaggcuuagcc

SEQ ID NO: 2205749 - RNA, 19 nt, Artificial Sequence
  Description of Artificial Sequence: Synthetic oligonucleotide
gaugagcagggcugaccug

SEQ ID NO: 2205750 - RNA, 19 nt, Artificial Sequence
  Description of Artificial Sequence: Synthetic oligonucleotide
aagaagccucucucccaca

SEQ ID NO: 2205751 - RNA, 19 nt, Artificial Sequence
  Description of Artificial Sequence: Synthetic oligonucleotide
ucaccccguuugaaggccc

SEQ ID NO: 2205752 - RNA, 19 nt, Artificial Sequence
  Description of Artificial Sequence: Synthetic oligonucleotide
uguagaccaccuucccauc

SEQ ID NO: 2205753 - RNA, 19 nt, Artificial Sequence
  Description of Artificial Sequence: Synthetic oligonucleotide
ccuggcaguggccagcugg

SEQ ID NO: 2205754 - RNA, 19 nt, Artificial Sequence
  Description of Artificial Sequence: Synthetic oligonucleotide
gcuguagcgcagcucgugg

SEQ ID NO: 2205755 - RNA, 19 nt, Artificial Sequence
  Description of Artificial Sequence: Synthetic oligonucleotide
cagagaagcagggucuuuc

SEQ ID NO: 2205756 - RNA, 19 nt, Artificial Sequence
  Description of Artificial Sequence: Synthetic oligonucleotide
ggagcuucgcuuccaccgg

SEQ ID NO: 2205757 - RNA, 19 nt, Artificial Sequence
  Description of Artificial Sequence: Synthetic oligonucleotide
ggcggcccagcacugagcg

SEQ ID NO: 2205758 - RNA, 19 nt, Artificial Sequence
  Description of Artificial Sequence: Synthetic oligonucleotide
ucggcggcccagcacugag

SEQ ID NO: 2205759 - RNA, 19 nt, Artificial Sequence
  Description of Artificial Sequence: Synthetic oligonucleotide
gcacacgccaauccagagg

SEQ ID NO: 2205760 - RNA, 19 nt, Artificial Sequence
  Description of Artificial Sequence: Synthetic oligonucleotide
guagaccaccuucccauca

SEQ ID NO: 2205761 - RNA, 19 nt, Artificial Sequence
  Description of Artificial Sequence: Synthetic oligonucleotide
gauggggucgucggcggcc

SEQ ID NO: 2205762 - RNA, 19 nt, Artificial Sequence
  Description of Artificial Sequence: Synthetic oligonucleotide
cugcgcugaggaagaagcc

SEQ ID NO: 2205763 - RNA, 19 nt, Artificial Sequence
  Description of Artificial Sequence: Synthetic oligonucleotide
caccaccaaacuucccagc

SEQ ID NO: 2205764 - RNA, 19 nt, Artificial Sequence
  Description of Artificial Sequence: Synthetic oligonucleotide
caggcgcgaguucuggcgg

SEQ ID NO: 2205765 - RNA, 19 nt, Artificial Sequence
  Description of Artificial Sequence: Synthetic oligonucleotide
uugaaggcccuggcugggg

SEQ ID NO: 2205766 - RNA, 19 nt, Artificial Sequence
  Description of Artificial Sequence: Synthetic oligonucleotide
caacgagcucugcuccugg

SEQ ID NO: 2205767 - RNA, 19 nt, Artificial Sequence
  Description of Artificial Sequence: Synthetic oligonucleotide
cacggcgccuaucucggcc

SEQ ID NO: 2205768 - RNA, 19 nt, Artificial Sequence
  Description of Artificial Sequence: Synthetic oligonucleotide
gcacugagcgauguagugg

SEQ ID NO: 2205769 - RNA, 19 nt, Artificial Sequence
  Description of Artificial Sequence: Synthetic oligonucleotide
ugcuguagcgcagcucgug

SEQ ID NO: 2205770 - RNA, 19 nt, Artificial Sequence
  Description of Artificial Sequence: Synthetic oligonucleotide
gcuggggagaugaagacuc

SEQ ID NO: 2205771 - RNA, 19 nt, Artificial Sequence
  Description of Artificial Sequence: Synthetic oligonucleotide
gagcuucgcuuccaccggc

SEQ ID NO: 2205772 - RNA, 19 nt, Artificial Sequence
  Description of Artificial Sequence: Synthetic oligonucleotide
uuggccuucaucggccccu

SEQ ID NO: 2205773 - RNA, 19 nt, Artificial Sequence
  Description of Artificial Sequence: Synthetic oligonucleotide
uggccgucaucaguggucu

SEQ ID NO: 2205774 - RNA, 19 nt, Artificial Sequence
  Description of Artificial Sequence: Synthetic oligonucleotide
ggggucaccccguuugaag

SEQ ID NO: 2205775 - RNA, 19 nt, Artificial Sequence
  Description of Artificial Sequence: Synthetic oligonucleotide
uucuggcggggcccgcggg

SEQ ID NO: 2205776 - RNA, 19 nt, Artificial Sequence
  Description of Artificial Sequence: Synthetic oligonucleotide
ggcuuccucggguaggagc

SEQ ID NO: 2205777 - RNA, 19 nt, Artificial Sequence
  Description of Artificial Sequence: Synthetic oligonucleotide
agccuggccgucaucagug

SEQ ID NO: 2205778 - RNA, 19 nt, Artificial Sequence
  Description of Artificial Sequence: Synthetic oligonucleotide
cuucgcuuccaccggcuuc

SEQ ID NO: 2205779 - RNA, 19 nt, Artificial Sequence
  Description of Artificial Sequence: Synthetic oligonucleotide
caaacuucccagcugcgcu

SEQ ID NO: 2205780 - RNA, 19 nt, Artificial Sequence
  Description of Artificial Sequence: Synthetic oligonucleotide
caggauagaccaggaaguc

SEQ ID NO: 2205781 - RNA, 19 nt, Artificial Sequence
  Description of Artificial Sequence: Synthetic oligonucleotide
cucggcgccccacaccagc

SEQ ID NO: 2205782 - RNA, 19 nt, Artificial Sequence
  Description of Artificial Sequence: Synthetic oligonucleotide
gccgucaucaguggucucg

SEQ ID NO: 2205783 - RNA, 19 nt, Artificial Sequence
  Description of Artificial Sequence: Synthetic oligonucleotide
aggagccgggcuuccucgg

SEQ ID NO: 2205784 - RNA, 19 nt, Artificial Sequence
  Description of Artificial Sequence: Synthetic oligonucleotide
uccccuggggagcuucgcu

SEQ ID NO: 2205785 - RNA, 19 nt, Artificial Sequence
  Description of Artificial Sequence: Synthetic oligonucleotide
ggacugcacacgccaaucc

SEQ ID NO: 2205786 - RNA, 19 nt, Artificial Sequence
  Description of Artificial Sequence: Synthetic oligonucleotide
ggcagccuggcccucugcg

SEQ ID NO: 2205787 - RNA, 19 nt, Artificial Sequence
  Description of Artificial Sequence: Synthetic oligonucleotide
acugagcgauguagugggc

SEQ ID NO: 2205788 - RNA, 19 nt, Artificial Sequence
  Description of Artificial Sequence: Synthetic oligonucleotide
gcgcugacgagcgucacgg

SEQ ID NO: 2205789 - RNA, 19 nt, Artificial Sequence
  Description of Artificial Sequence: Synthetic oligonucleotide
gggacggccagcaugcggc

SEQ ID NO: 2205790 - RNA, 19 nt, Artificial Sequence
  Description of Artificial Sequence: Synthetic oligonucleotide
ucgugggcgggacggccag

SEQ ID NO: 2205791 - RNA, 19 nt, Artificial Sequence
  Description of Artificial Sequence: Synthetic oligonucleotide
uagccuucacaggccgagg

SEQ ID NO: 2205792 - RNA, 19 nt, Artificial Sequence
  Description of Artificial Sequence: Synthetic oligonucleotide
auggggucgucggcggccc

SEQ ID NO: 2205793 - RNA, 19 nt, Artificial Sequence
  Description of Artificial Sequence: Synthetic oligonucleotide
cuuggccuucaucggcccc

SEQ ID NO: 2205794 - RNA, 19 nt, Artificial Sequence
  Description of Artificial Sequence: Synthetic oligonucleotide
aguucuggcggggcccgcg

SEQ ID NO: 2205795 - RNA, 19 nt, Artificial Sequence
  Description of Artificial Sequence: Synthetic oligonucleotide
accaaacuucccagcugcg

SEQ ID NO: 2205796 - RNA, 19 nt, Artificial Sequence
  Description of Artificial Sequence: Synthetic oligonucleotide
cuucccagcugcgcugagg

SEQ ID NO: 2205797 - RNA, 19 nt, Artificial Sequence
  Description of Artificial Sequence: Synthetic oligonucleotide
cgucacggcgccuaucucg

SEQ ID NO: 2205798 - RNA, 19 nt, Artificial Sequence
  Description of Artificial Sequence: Synthetic oligonucleotide
aggcgcgaguucuggcggg

SEQ ID NO: 2205799 - RNA, 19 nt, Artificial Sequence
  Description of Artificial Sequence: Synthetic oligonucleotide
ggucaccccguuugaaggc

SEQ ID NO: 2205800 - RNA, 19 nt, Artificial Sequence
  Description of Artificial Sequence: Synthetic oligonucleotide
gucaccccguuugaaggcc

SEQ ID NO: 2205801 - RNA, 19 nt, Artificial Sequence
  Description of Artificial Sequence: Synthetic oligonucleotide
cugcgaucuucuccaggag

SEQ ID NO: 2205802 - RNA, 19 nt, Artificial Sequence
  Description of Artificial Sequence: Synthetic oligonucleotide
cagcucgugggcgggacgg

SEQ ID NO: 2205803 - RNA, 19 nt, Artificial Sequence
  Description of Artificial Sequence: Synthetic oligonucleotide
agcuccugacgccgggucu

SEQ ID NO: 2205804 - RNA, 19 nt, Artificial Sequence
  Description of Artificial Sequence: Synthetic oligonucleotide
acgagcucugcuccuggaa

SEQ ID NO: 2205805 - RNA, 19 nt, Artificial Sequence
  Description of Artificial Sequence: Synthetic oligonucleotide
ggggauggggucgucggcg

SEQ ID NO: 2205806 - RNA, 19 nt, Artificial Sequence
  Description of Artificial Sequence: Synthetic oligonucleotide
guucuggcggggcccgcgg

SEQ ID NO: 2205807 - RNA, 19 nt, Artificial Sequence
  Description of Artificial Sequence: Synthetic oligonucleotide
gguagaugcuguagcgcag

SEQ ID NO: 2205808 - RNA, 19 nt, Artificial Sequence
  Description of Artificial Sequence: Synthetic oligonucleotide
acggcgccuaucucggcca

SEQ ID NO: 2205809 - RNA, 19 nt, Artificial Sequence
  Description of Artificial Sequence: Synthetic oligonucleotide
cugcacacgccaauccaga

SEQ ID NO: 2205810 - RNA, 19 nt, Artificial Sequence
  Description of Artificial Sequence: Synthetic oligonucleotide
agggucuuucugacacugg

SEQ ID NO: 2205811 - RNA, 19 nt, Artificial Sequence
  Description of Artificial Sequence: Synthetic oligonucleotide
agcgauguagugggcguga

SEQ ID NO: 2205812 - RNA, 19 nt, Artificial Sequence
  Description of Artificial Sequence: Synthetic oligonucleotide
gggauggggucgucggcgg

SEQ ID NO: 2205813 - RNA, 19 nt, Artificial Sequence
  Description of Artificial Sequence: Synthetic oligonucleotide
cuaucucggccaggagccg

SEQ ID NO: 2205814 - RNA, 19 nt, Artificial Sequence
  Description of Artificial Sequence: Synthetic oligonucleotide
cuuagccuucacaggccga

SEQ ID NO: 2205815 - RNA, 19 nt, Artificial Sequence
  Description of Artificial Sequence: Synthetic oligonucleotide
ccaggauagaccaggaagu

SEQ ID NO: 2205816 - RNA, 19 nt, Artificial Sequence
  Description of Artificial Sequence: Synthetic oligonucleotide
ucucucccacaggucccgg

SEQ ID NO: 2205817 - RNA, 19 nt, Artificial Sequence
  Description of Artificial Sequence: Synthetic oligonucleotide
ggcgcugacgagcgucacg

SEQ ID NO: 2205818 - RNA, 19 nt, Artificial Sequence
  Description of Artificial Sequence: Synthetic oligonucleotide
uggggagaugaagacucuu

SEQ ID NO: 2205819 - RNA, 19 nt, Artificial Sequence
  Description of Artificial Sequence: Synthetic oligonucleotide
ggcgggacggccagcaugc

SEQ ID NO: 2205820 - RNA, 19 nt, Artificial Sequence
  Description of Artificial Sequence: Synthetic oligonucleotide
gcugcggggauccgggcgc

SEQ ID NO: 2205821 - RNA, 19 nt, Artificial Sequence
  Description of Artificial Sequence: Synthetic oligonucleotide
aggcccaggcgcgaguucu

SEQ ID NO: 2205822 - RNA, 19 nt, Artificial Sequence
  Description of Artificial Sequence: Synthetic oligonucleotide
agggagguguagaccaccu

SEQ ID NO: 2205823 - RNA, 19 nt, Artificial Sequence
  Description of Artificial Sequence: Synthetic oligonucleotide
cccugaauccugcuccagc

SEQ ID NO: 2205824 - RNA, 19 nt, Artificial Sequence
  Description of Artificial Sequence: Synthetic oligonucleotide
ggggagaugaagacucuuc

SEQ ID NO: 2205825 - RNA, 19 nt, Artificial Sequence
  Description of Artificial Sequence: Synthetic oligonucleotide
ccaaacuucccagcugcgc

SEQ ID NO: 2205826 - RNA, 19 nt, Artificial Sequence
  Description of Artificial Sequence: Synthetic oligonucleotide
gggcgugaaaacgcagcgg

SEQ ID NO: 2205827 - RNA, 19 nt, Artificial Sequence
  Description of Artificial Sequence: Synthetic oligonucleotide
ccagucuuuggacugcaca

SEQ ID NO: 2205828 - RNA, 19 nt, Artificial Sequence
  Description of Artificial Sequence: Synthetic oligonucleotide
agcucgugggcgggacggc

SEQ ID NO: 2205829 - RNA, 19 nt, Artificial Sequence
  Description of Artificial Sequence: Synthetic oligonucleotide
ccugcuggcgcuugaacga

SEQ ID NO: 2205830 - RNA, 19 nt, Artificial Sequence
  Description of Artificial Sequence: Synthetic oligonucleotide
ccugacgccgggucucacg

SEQ ID NO: 2205831 - RNA, 19 nt, Artificial Sequence
  Description of Artificial Sequence: Synthetic oligonucleotide
ggagccgggcuuccucggg

SEQ ID NO: 2205832 - RNA, 19 nt, Artificial Sequence
  Description of Artificial Sequence: Synthetic oligonucleotide
ggcuuagccuucacaggcc

SEQ ID NO: 2205833 - RNA, 19 nt, Artificial Sequence
  Description of Artificial Sequence: Synthetic oligonucleotide
gaauccugcuccagcuucu

SEQ ID NO: 2205834 - RNA, 19 nt, Artificial Sequence
  Description of Artificial Sequence: Synthetic oligonucleotide
ccaccagcauccucccggg

SEQ ID NO: 2205835 - RNA, 19 nt, Artificial Sequence
  Description of Artificial Sequence: Synthetic oligonucleotide
agcaugcggccagucuuug

SEQ ID NO: 2205836 - RNA, 19 nt, Artificial Sequence
  Description of Artificial Sequence: Synthetic oligonucleotide
cugcuggcgcuugaacgac

SEQ ID NO: 2205837 - RNA, 19 nt, Artificial Sequence
  Description of Artificial Sequence: Synthetic oligonucleotide
cgugaaaacgcagcggguc

SEQ ID NO: 2205838 - RNA, 19 nt, Artificial Sequence
  Description of Artificial Sequence: Synthetic oligonucleotide
cagggcgcccaccgugcgg

SEQ ID NO: 2205839 - RNA, 19 nt, Artificial Sequence
  Description of Artificial Sequence: Synthetic oligonucleotide
gggcgggacggccagcaug

SEQ ID NO: 2205840 - RNA, 19 nt, Artificial Sequence
  Description of Artificial Sequence: Synthetic oligonucleotide
gucgucggcggcccagcac

SEQ ID NO: 2205841 - RNA, 19 nt, Artificial Sequence
  Description of Artificial Sequence: Synthetic oligonucleotide
ucggccccugaauccugcu

SEQ ID NO: 2205842 - RNA, 19 nt, Artificial Sequence
  Description of Artificial Sequence: Synthetic oligonucleotide
ucacggcgccuaucucggc

SEQ ID NO: 2205843 - RNA, 19 nt, Artificial Sequence
  Description of Artificial Sequence: Synthetic oligonucleotide
ccguuggcaaccuccacca

SEQ ID NO: 2205844 - RNA, 19 nt, Artificial Sequence
  Description of Artificial Sequence: Synthetic oligonucleotide
cauuagccuggccgucauc

SEQ ID NO: 2205845 - RNA, 19 nt, Artificial Sequence
  Description of Artificial Sequence: Synthetic oligonucleotide
gcggccguuggcaaccucc

SEQ ID NO: 2205846 - RNA, 19 nt, Artificial Sequence
  Description of Artificial Sequence: Synthetic oligonucleotide
accgccucggcgccccaca

SEQ ID NO: 2205847 - RNA, 19 nt, Artificial Sequence
  Description of Artificial Sequence: Synthetic oligonucleotide
gcuggcgcuugaacgacgc

SEQ ID NO: 2205848 - RNA, 19 nt, Artificial Sequence
  Description of Artificial Sequence: Synthetic oligonucleotide
gccucggcugccaacgagc

SEQ ID NO: 2205849 - RNA, 19 nt, Artificial Sequence
  Description of Artificial Sequence: Synthetic oligonucleotide
gaacgacgccaaggccagg

SEQ ID NO: 2205850 - RNA, 19 nt, Artificial Sequence
  Description of Artificial Sequence: Synthetic oligonucleotide
gccucggcgccccacacca

SEQ ID NO: 2205851 - RNA, 19 nt, Artificial Sequence
  Description of Artificial Sequence: Synthetic oligonucleotide
ggucucacgggccucggcu

SEQ ID NO: 2205852 - RNA, 19 nt, Artificial Sequence
  Description of Artificial Sequence: Synthetic oligonucleotide
cccguuugaaggcccuggc

SEQ ID NO: 2205853 - RNA, 19 nt, Artificial Sequence
  Description of Artificial Sequence: Synthetic oligonucleotide
cagcucacugcaggcuggc

SEQ ID NO: 2205854 - RNA, 19 nt, Artificial Sequence
  Description of Artificial Sequence: Synthetic oligonucleotide
ggccucggcugccaacgag

SEQ ID NO: 2205855 - RNA, 19 nt, Artificial Sequence
  Description of Artificial Sequence: Synthetic oligonucleotide
uggcugcggggauccgggc

SEQ ID NO: 2205856 - RNA, 19 nt, Artificial Sequence
  Description of Artificial Sequence: Synthetic oligonucleotide
cucgugggcgggacggcca

SEQ ID NO: 2205857 - RNA, 19 nt, Artificial Sequence
  Description of Artificial Sequence: Synthetic oligonucleotide
cagcacugagcgauguagu

SEQ ID NO: 2205858 - RNA, 19 nt, Artificial Sequence
  Description of Artificial Sequence: Synthetic oligonucleotide
acgagcgucacggcgccua

SEQ ID NO: 2205859 - RNA, 19 nt, Artificial Sequence
  Description of Artificial Sequence: Synthetic oligonucleotide
ccugaauccugcuccagcu

SEQ ID NO: 2205860 - RNA, 19 nt, Artificial Sequence
  Description of Artificial Sequence: Synthetic oligonucleotide
agcuucgcuuccaccggcu

SEQ ID NO: 2205861 - RNA, 19 nt, Artificial Sequence
  Description of Artificial Sequence: Synthetic oligonucleotide
gcagcucgugggcgggacg

SEQ ID NO: 2205862 - RNA, 19 nt, Artificial Sequence
  Description of Artificial Sequence: Synthetic oligonucleotide
gacgccaaggccaggccau

SEQ ID NO: 2205863 - RNA, 19 nt, Artificial Sequence
  Description of Artificial Sequence: Synthetic oligonucleotide
gcgcugaggaagaagccuc

SEQ ID NO: 2205864 - RNA, 19 nt, Artificial Sequence
  Description of Artificial Sequence: Synthetic oligonucleotide
gggauccgggcgcggggcg

SEQ ID NO: 2205865 - RNA, 19 nt, Artificial Sequence
  Description of Artificial Sequence: Synthetic oligonucleotide
gccuggccgucaucagugg

SEQ ID NO: 2205866 - RNA, 19 nt, Artificial Sequence
  Description of Artificial Sequence: Synthetic oligonucleotide
ccagcgagcggccguuggc

SEQ ID NO: 2205867 - RNA, 19 nt, Artificial Sequence
  Description of Artificial Sequence: Synthetic oligonucleotide
cggguaggagcagaagcgg

SEQ ID NO: 2205868 - RNA, 19 nt, Artificial Sequence
  Description of Artificial Sequence: Synthetic oligonucleotide
ccccguuugaaggcccugg

SEQ ID NO: 2205869 - RNA, 19 nt, Artificial Sequence
  Description of Artificial Sequence: Synthetic oligonucleotide
ccuggggagcuucgcuucc

SEQ ID NO: 2205870 - RNA, 19 nt, Artificial Sequence
  Description of Artificial Sequence: Synthetic oligonucleotide
agccgggcuuccucgggua

SEQ ID NO: 2205871 - RNA, 19 nt, Artificial Sequence
  Description of Artificial Sequence: Synthetic oligonucleotide
acgccaauccagaggcuua

SEQ ID NO: 2205872 - RNA, 19 nt, Artificial Sequence
  Description of Artificial Sequence: Synthetic oligonucleotide
ucacgggccucggcugcca

SEQ ID NO: 2205873 - RNA, 19 nt, Artificial Sequence
  Description of Artificial Sequence: Synthetic oligonucleotide
ugcggggauccgggcgcgg

SEQ ID NO: 2205874 - RNA, 19 nt, Artificial Sequence
  Description of Artificial Sequence: Synthetic oligonucleotide
cagcgagcggccguuggca

SEQ ID NO: 2205875 - RNA, 19 nt, Artificial Sequence
  Description of Artificial Sequence: Synthetic oligonucleotide
accccguuugaaggcccug

SEQ ID NO: 2205876 - RNA, 19 nt, Artificial Sequence
  Description of Artificial Sequence: Synthetic oligonucleotide
cuccccuggggagcuucgc

SEQ ID NO: 2205877 - RNA, 19 nt, Artificial Sequence
  Description of Artificial Sequence: Synthetic oligonucleotide
ggcgcgaguucuggcgggg

SEQ ID NO: 2205878 - RNA, 19 nt, Artificial Sequence
  Description of Artificial Sequence: Synthetic oligonucleotide
ccaacgagcucugcuccug

SEQ ID NO: 2205879 - RNA, 19 nt, Artificial Sequence
  Description of Artificial Sequence: Synthetic oligonucleotide
cugcggggauccgggcgcg

SEQ ID NO: 2205880 - RNA, 19 nt, Artificial Sequence
  Description of Artificial Sequence: Synthetic oligonucleotide
acaccagcgagcggccguu

SEQ ID NO: 2205881 - RNA, 19 nt, Artificial Sequence
  Description of Artificial Sequence: Synthetic oligonucleotide
cacaggccgaggccuggca

SEQ ID NO: 2205882 - RNA, 19 nt, Artificial Sequence
  Description of Artificial Sequence: Synthetic oligonucleotide
agcgggucaccaggauaga

SEQ ID NO: 2205883 - RNA, 19 nt, Artificial Sequence
  Description of Artificial Sequence: Synthetic oligonucleotide
gacggccagcaugcggcca

SEQ ID NO: 2205884 - RNA, 19 nt, Artificial Sequence
  Description of Artificial Sequence: Synthetic oligonucleotide
acgccaaggccaggccaug

SEQ ID NO: 2205885 - RNA, 19 nt, Artificial Sequence
  Description of Artificial Sequence: Synthetic oligonucleotide
uggggucgucggcggccca

SEQ ID NO: 2205886 - RNA, 19 nt, Artificial Sequence
  Description of Artificial Sequence: Synthetic oligonucleotide
gccgggcuuccucggguag

SEQ ID NO: 2205887 - RNA, 19 nt, Artificial Sequence
  Description of Artificial Sequence: Synthetic oligonucleotide
gggcgcggggcgcugacga

SEQ ID NO: 2205888 - RNA, 19 nt, Artificial Sequence
  Description of Artificial Sequence: Synthetic oligonucleotide
ccaggagccgggcuuccuc

SEQ ID NO: 2205889 - RNA, 19 nt, Artificial Sequence
  Description of Artificial Sequence: Synthetic oligonucleotide
gaguucuggcggggcccgc

SEQ ID NO: 2205890 - RNA, 19 nt, Artificial Sequence
  Description of Artificial Sequence: Synthetic oligonucleotide
ccaccgugcggccccgacc

SEQ ID NO: 2205891 - RNA, 19 nt, Artificial Sequence
  Description of Artificial Sequence: Synthetic oligonucleotide
gcgggucaccaggauagac

SEQ ID NO: 2205892 - RNA, 19 nt, Artificial Sequence
  Description of Artificial Sequence: Synthetic oligonucleotide
gggucucacgggccucggc

SEQ ID NO: 2205893 - RNA, 19 nt, Artificial Sequence
  Description of Artificial Sequence: Synthetic oligonucleotide
gccaauccagaggcuuagc

SEQ ID NO: 2205894 - RNA, 19 nt, Artificial Sequence
  Description of Artificial Sequence: Synthetic oligonucleotide
acacgccaauccagaggcu

SEQ ID NO: 2205895 - RNA, 19 nt, Artificial Sequence
  Description of Artificial Sequence: Synthetic oligonucleotide
ggggauccgggcgcggggc

SEQ ID NO: 2205896 - RNA, 19 nt, Artificial Sequence
  Description of Artificial Sequence: Synthetic oligonucleotide
cgggccucggcugccaacg

SEQ ID NO: 2205897 - RNA, 19 nt, Artificial Sequence
  Description of Artificial Sequence: Synthetic oligonucleotide
acgcagcgggucaccagga

SEQ ID NO: 2205898 - RNA, 19 nt, Artificial Sequence
  Description of Artificial Sequence: Synthetic oligonucleotide
gcgccuaucucggccagga

SEQ ID NO: 2205899 - RNA, 19 nt, Artificial Sequence
  Description of Artificial Sequence: Synthetic oligonucleotide
cacgccaauccagaggcuu

SEQ ID NO: 2205900 - RNA, 19 nt, Artificial Sequence
  Description of Artificial Sequence: Synthetic oligonucleotide
uccugacgccgggucucac

SEQ ID NO: 2205901 - RNA, 19 nt, Artificial Sequence
  Description of Artificial Sequence: Synthetic oligonucleotide
gcuccugacgccgggucuc

SEQ ID NO: 2205902 - RNA, 19 nt, Artificial Sequence
  Description of Artificial Sequence: Synthetic oligonucleotide
cgcgaguucuggcggggcc

SEQ ID NO: 2205903 - RNA, 19 nt, Artificial Sequence
  Description of Artificial Sequence: Synthetic oligonucleotide
ccucugcgaucuucuccag

SEQ ID NO: 2205904 - RNA, 19 nt, Artificial Sequence
  Description of Artificial Sequence: Synthetic oligonucleotide
gcgagcggccguuggcaac

SEQ ID NO: 2205905 - RNA, 19 nt, Artificial Sequence
  Description of Artificial Sequence: Synthetic oligonucleotide
gagcgucacggcgccuauc

SEQ ID NO: 2205906 - RNA, 19 nt, Artificial Sequence
  Description of Artificial Sequence: Synthetic oligonucleotide
gcggggauccgggcgcggg

SEQ ID NO: 2205907 - RNA, 19 nt, Artificial Sequence
  Description of Artificial Sequence: Synthetic oligonucleotide
ggcgcggggcgcugacgag

SEQ ID NO: 2205908 - RNA, 19 nt, Artificial Sequence
  Description of Artificial Sequence: Synthetic oligonucleotide
ccgggcuuccucggguagg

SEQ ID NO: 2205909 - RNA, 19 nt, Artificial Sequence
  Description of Artificial Sequence: Synthetic oligonucleotide
gcgcccaccgugcggcccc

SEQ ID NO: 2205910 - RNA, 19 nt, Artificial Sequence
  Description of Artificial Sequence: Synthetic oligonucleotide
cgagcucugcuccuggaaa

SEQ ID NO: 2205911 - RNA, 19 nt, Artificial Sequence
  Description of Artificial Sequence: Synthetic oligonucleotide
cgucaucaguggucucgcc

SEQ ID NO: 2205912 - RNA, 19 nt, Artificial Sequence
  Description of Artificial Sequence: Synthetic oligonucleotide
ggggucgucggcggcccag

SEQ ID NO: 2205913 - RNA, 19 nt, Artificial Sequence
  Description of Artificial Sequence: Synthetic oligonucleotide
ggauccgggcgcggggcgc

SEQ ID NO: 2205914 - RNA, 19 nt, Artificial Sequence
  Description of Artificial Sequence: Synthetic oligonucleotide
ccgggucucacgggccucg

SEQ ID NO: 2205915 - RNA, 19 nt, Artificial Sequence
  Description of Artificial Sequence: Synthetic oligonucleotide
ggcuggggagaugaagacu

SEQ ID NO: 2205916 - RNA, 19 nt, Artificial Sequence
  Description of Artificial Sequence: Synthetic oligonucleotide
cgccaauccagaggcuuag

SEQ ID NO: 2205917 - RNA, 19 nt, Artificial Sequence
  Description of Artificial Sequence: Synthetic oligonucleotide
cagcaugcggccagucuuu

SEQ ID NO: 2205918 - RNA, 19 nt, Artificial Sequence
  Description of Artificial Sequence: Synthetic oligonucleotide
ccagcaugcggccagucuu

SEQ ID NO: 2205919 - RNA, 19 nt, Artificial Sequence
  Description of Artificial Sequence: Synthetic oligonucleotide
caccagcauccucccggga

SEQ ID NO: 2205920 - RNA, 19 nt, Artificial Sequence
  Description of Artificial Sequence: Synthetic oligonucleotide
ggggcgcugacgagcguca

SEQ ID NO: 2205921 - RNA, 19 nt, Artificial Sequence
  Description of Artificial Sequence: Synthetic oligonucleotide
cccauuagccuggccguca

SEQ ID NO: 2205922 - RNA, 19 nt, Artificial Sequence
  Description of Artificial Sequence: Synthetic oligonucleotide
ccuucaucggccccugaau

SEQ ID NO: 2205923 - RNA, 19 nt, Artificial Sequence
  Description of Artificial Sequence: Synthetic oligonucleotide
caccccguuugaaggcccu

SEQ ID NO: 2205924 - RNA, 19 nt, Artificial Sequence
  Description of Artificial Sequence: Synthetic oligonucleotide
gauccgggcgcggggcgcu

SEQ ID NO: 2205925 - RNA, 19 nt, Artificial Sequence
  Description of Artificial Sequence: Synthetic oligonucleotide
caccagcgagcggccguug

SEQ ID NO: 2205926 - RNA, 19 nt, Artificial Sequence
  Description of Artificial Sequence: Synthetic oligonucleotide
gggucgucggcggcccagc

SEQ ID NO: 2205927 - RNA, 19 nt, Artificial Sequence
  Description of Artificial Sequence: Synthetic oligonucleotide
ggucgucggcggcccagca

SEQ ID NO: 2205928 - RNA, 19 nt, Artificial Sequence
  Description of Artificial Sequence: Synthetic oligonucleotide
gucggcggcccagcacuga

SEQ ID NO: 2205929 - RNA, 19 nt, Artificial Sequence
  Description of Artificial Sequence: Synthetic oligonucleotide
gccaacgagcucugcuccu

SEQ ID NO: 2205930 - RNA, 19 nt, Artificial Sequence
  Description of Artificial Sequence: Synthetic oligonucleotide
gccagucuuuggacugcac

SEQ ID NO: 2205931 - RNA, 19 nt, Artificial Sequence
  Description of Artificial Sequence: Synthetic oligonucleotide
ccacaccagcgagcggccg

SEQ ID NO: 2205932 - RNA, 19 nt, Artificial Sequence
  Description of Artificial Sequence: Synthetic oligonucleotide
gccccacaccagcgagcgg

SEQ ID NO: 2205933 - RNA, 19 nt, Artificial Sequence
  Description of Artificial Sequence: Synthetic oligonucleotide
ggcccagcacugagcgaug

SEQ ID NO: 2205934 - RNA, 19 nt, Artificial Sequence
  Description of Artificial Sequence: Synthetic oligonucleotide
gcgucacggcgccuaucuc

SEQ ID NO: 2205935 - RNA, 19 nt, Artificial Sequence
  Description of Artificial Sequence: Synthetic oligonucleotide
cgacgccaaggccaggcca

SEQ ID NO: 2205936 - RNA, 19 nt, Artificial Sequence
  Description of Artificial Sequence: Synthetic oligonucleotide
ggcccaggcgcgaguucug

SEQ ID NO: 2205937 - RNA, 19 nt, Artificial Sequence
  Description of Artificial Sequence: Synthetic oligonucleotide
ccguuugaaggcccuggcu

SEQ ID NO: 2205938 - RNA, 19 nt, Artificial Sequence
  Description of Artificial Sequence: Synthetic oligonucleotide
gcgcgaguucuggcggggc

SEQ ID NO: 2205939 - RNA, 19 nt, Artificial Sequence
  Description of Artificial Sequence: Synthetic oligonucleotide
cguuggcaaccuccaccac

SEQ ID NO: 2205940 - RNA, 19 nt, Artificial Sequence
  Description of Artificial Sequence: Synthetic oligonucleotide
ggccgucaucaguggucuc

SEQ ID NO: 2205941 - RNA, 19 nt, Artificial Sequence
  Description of Artificial Sequence: Synthetic oligonucleotide
gcgauguagugggcgugaa

SEQ ID NO: 2205942 - RNA, 19 nt, Artificial Sequence
  Description of Artificial Sequence: Synthetic oligonucleotide
ggccaggagccgggcuucc

SEQ ID NO: 2205943 - RNA, 19 nt, Artificial Sequence
  Description of Artificial Sequence: Synthetic oligonucleotide
caccggcuucuuggccuuc

SEQ ID NO: 2205944 - RNA, 19 nt, Artificial Sequence
  Description of Artificial Sequence: Synthetic oligonucleotide
gggccucggcugccaacga

SEQ ID NO: 2205945 - RNA, 19 nt, Artificial Sequence
  Description of Artificial Sequence: Synthetic oligonucleotide
gcgggacggccagcaugcg

SEQ ID NO: 2205946 - RNA, 19 nt, Artificial Sequence
  Description of Artificial Sequence: Synthetic oligonucleotide
cacgggccucggcugccaa

SEQ ID NO: 2205947 - RNA, 19 nt, Artificial Sequence
  Description of Artificial Sequence: Synthetic oligonucleotide
auccgggcgcggggcgcug

SEQ ID NO: 2205948 - RNA, 19 nt, Artificial Sequence
  Description of Artificial Sequence: Synthetic oligonucleotide
cggcggcccagcacugagc

SEQ ID NO: 2205949 - RNA, 19 nt, Artificial Sequence
  Description of Artificial Sequence: Synthetic oligonucleotide
cgauguagugggcgugaaa

SEQ ID NO: 2205950 - RNA, 19 nt, Artificial Sequence
  Description of Artificial Sequence: Synthetic oligonucleotide
cgccuaucucggccaggag

SEQ ID NO: 2205951 - RNA, 19 nt, Artificial Sequence
  Description of Artificial Sequence: Synthetic oligonucleotide
cggccguuggcaaccucca

SEQ ID NO: 2205952 - RNA, 19 nt, Artificial Sequence
  Description of Artificial Sequence: Synthetic oligonucleotide
ggagcuccugacgccgggu

SEQ ID NO: 2205953 - RNA, 19 nt, Artificial Sequence
  Description of Artificial Sequence: Synthetic oligonucleotide
cggggcgcugacgagcguc

SEQ ID NO: 2205954 - RNA, 19 nt, Artificial Sequence
  Description of Artificial Sequence: Synthetic oligonucleotide
cgccucggcgccccacacc

SEQ ID NO: 2205955 - RNA, 19 nt, Artificial Sequence
  Description of Artificial Sequence: Synthetic oligonucleotide
ggccuucaucggccccuga

SEQ ID NO: 2205956 - RNA, 19 nt, Artificial Sequence
  Description of Artificial Sequence: Synthetic oligonucleotide
gggcgcugacgagcgucac

SEQ ID NO: 2205957 - RNA, 19 nt, Artificial Sequence
  Description of Artificial Sequence: Synthetic oligonucleotide
gggcgcccaccgugcggcc

SEQ ID NO: 2205958 - RNA, 19 nt, Artificial Sequence
  Description of Artificial Sequence: Synthetic oligonucleotide
gcuucgcuuccaccggcuu

SEQ ID NO: 2205959 - RNA, 19 nt, Artificial Sequence
  Description of Artificial Sequence: Synthetic oligonucleotide
gccuggcccucugcgaucu

SEQ ID NO: 2205960 - RNA, 19 nt, Artificial Sequence
  Description of Artificial Sequence: Synthetic oligonucleotide
ccuggccgucaucaguggu

SEQ ID NO: 2205961 - RNA, 19 nt, Artificial Sequence
  Description of Artificial Sequence: Synthetic oligonucleotide
ccgccucggcgccccacac

SEQ ID NO: 2205962 - RNA, 19 nt, Artificial Sequence
  Description of Artificial Sequence: Synthetic oligonucleotide
cgucggcggcccagcacug

SEQ ID NO: 2205963 - RNA, 19 nt, Artificial Sequence
  Description of Artificial Sequence: Synthetic oligonucleotide
gacgagcgucacggcgccu

SEQ ID NO: 2205964 - RNA, 19 nt, Artificial Sequence
  Description of Artificial Sequence: Synthetic oligonucleotide
ggaggcccaggcgcgaguu

SEQ ID NO: 2205965 - RNA, 19 nt, Artificial Sequence
  Description of Artificial Sequence: Synthetic oligonucleotide
ccauuagccuggccgucau

SEQ ID NO: 2205966 - RNA, 19 nt, Artificial Sequence
  Description of Artificial Sequence: Synthetic oligonucleotide
gcccgcggggcagggcgcc

SEQ ID NO: 2205967 - RNA, 19 nt, Artificial Sequence
  Description of Artificial Sequence: Synthetic oligonucleotide
cagcugcgcugaggaagaa

SEQ ID NO: 2205968 - RNA, 19 nt, Artificial Sequence
  Description of Artificial Sequence: Synthetic oligonucleotide
cggcgccuaucucggccag

SEQ ID NO: 2205969 - RNA, 19 nt, Artificial Sequence
  Description of Artificial Sequence: Synthetic oligonucleotide
gccgggucucacgggccuc

SEQ ID NO: 2205970 - RNA, 19 nt, Artificial Sequence
  Description of Artificial Sequence: Synthetic oligonucleotide
cggcugccaacgagcucug

SEQ ID NO: 2205971 - RNA, 19 nt, Artificial Sequence
  Description of Artificial Sequence: Synthetic oligonucleotide
gcccagcacugagcgaugu

SEQ ID NO: 2205972 - RNA, 19 nt, Artificial Sequence
  Description of Artificial Sequence: Synthetic oligonucleotide
ccccuggggagcuucgcuu

SEQ ID NO: 2205973 - RNA, 19 nt, Artificial Sequence
  Description of Artificial Sequence: Synthetic oligonucleotide
cggcccagcacugagcgau

SEQ ID NO: 2205974 - RNA, 19 nt, Artificial Sequence
  Description of Artificial Sequence: Synthetic oligonucleotide
cgggucucacgggccucgg

SEQ ID NO: 2205975 - RNA, 19 nt, Artificial Sequence
  Description of Artificial Sequence: Synthetic oligonucleotide
gcggggcagggcgcccacc

SEQ ID NO: 2205976 - RNA, 19 nt, Artificial Sequence
  Description of Artificial Sequence: Synthetic oligonucleotide
ccgggcgcggggcgcugac

SEQ ID NO: 2205977 - RNA, 19 nt, Artificial Sequence
  Description of Artificial Sequence: Synthetic oligonucleotide
cgggaggcccaggcgcgag

SEQ ID NO: 2205978 - RNA, 19 nt, Artificial Sequence
  Description of Artificial Sequence: Synthetic oligonucleotide
ggcggccggcagagaccag

SEQ ID NO: 2205979 - RNA, 19 nt, Artificial Sequence
  Description of Artificial Sequence: Synthetic oligonucleotide
cccgcggggcagggcgccc

SEQ ID NO: 2205980 - RNA, 19 nt, Artificial Sequence
  Description of Artificial Sequence: Synthetic oligonucleotide
gcgcagcucgugggcggga

SEQ ID NO: 2205981 - RNA, 19 nt, Artificial Sequence
  Description of Artificial Sequence: Synthetic oligonucleotide
cggcgccccacaccagcga

SEQ ID NO: 2205982 - RNA, 19 nt, Artificial Sequence
  Description of Artificial Sequence: Synthetic oligonucleotide
ccggcuucuuggccuucau

SEQ ID NO: 2205983 - RNA, 19 nt, Artificial Sequence
  Description of Artificial Sequence: Synthetic oligonucleotide
cgcccaccgugcggccccg

SEQ ID NO: 2205984 - RNA, 19 nt, Artificial Sequence
  Description of Artificial Sequence: Synthetic oligonucleotide
cgcagcgggucaccaggau

SEQ ID NO: 2205985 - RNA, 19 nt, Artificial Sequence
  Description of Artificial Sequence: Synthetic oligonucleotide
gcggggcgcugacgagcgu

SEQ ID NO: 2205986 - RNA, 19 nt, Artificial Sequence
  Description of Artificial Sequence: Synthetic oligonucleotide
cgagcgucacggcgccuau

SEQ ID NO: 2205987 - RNA, 19 nt, Artificial Sequence
  Description of Artificial Sequence: Synthetic oligonucleotide
cccaggcggccggcagaga

SEQ ID NO: 2205988 - RNA, 19 nt, Artificial Sequence
  Description of Artificial Sequence: Synthetic oligonucleotide
uucuucaacuugaugaggg

SEQ ID NO: 2205989 - RNA, 19 nt, Artificial Sequence
  Description of Artificial Sequence: Synthetic oligonucleotide
cuuggcauaaaauuccugc

SEQ ID NO: 2205990 - RNA, 19 nt, Artificial Sequence
  Description of Artificial Sequence: Synthetic oligonucleotide
uuagaggcagagaugaggc

SEQ ID NO: 2205991 - RNA, 19 nt, Artificial Sequence
  Description of Artificial Sequence: Synthetic oligonucleotide
uaaaauuccugcugcgugg

SEQ ID NO: 2205992 - RNA, 19 nt, Artificial Sequence
  Description of Artificial Sequence: Synthetic oligonucleotide
agcuacacgaggcucaggc

SEQ ID NO: 2205993 - RNA, 19 nt, Artificial Sequence
  Description of Artificial Sequence: Synthetic oligonucleotide
auucuuggcauaaaauucc

SEQ ID NO: 2205994 - RNA, 19 nt, Artificial Sequence
  Description of Artificial Sequence: Synthetic oligonucleotide
uuaggcugccacaagcugg

SEQ ID NO: 2205995 - RNA, 19 nt, Artificial Sequence
  Description of Artificial Sequence: Synthetic oligonucleotide
auaaaauuccugcugcgug

SEQ ID NO: 2205996 - RNA, 19 nt, Artificial Sequence
  Description of Artificial Sequence: Synthetic oligonucleotide
uccaguuucacuccugagc

SEQ ID NO: 2205997 - RNA, 19 nt, Artificial Sequence
  Description of Artificial Sequence: Synthetic oligonucleotide
aguuccucguauuugcccg

SEQ ID NO: 2205998 - RNA, 19 nt, Artificial Sequence
  Description of Artificial Sequence: Synthetic oligonucleotide
aguuggaagccucucagag

SEQ ID NO: 2205999 - RNA, 19 nt, Artificial Sequence
  Description of Artificial Sequence: Synthetic oligonucleotide
agcccacugccuuagaggc

SEQ ID NO: 2206000 - RNA, 19 nt, Artificial Sequence
  Description of Artificial Sequence: Synthetic oligonucleotide
uucaacuugaugagggaca

SEQ ID NO: 2206001 - RNA, 19 nt, Artificial Sequence
  Description of Artificial Sequence: Synthetic oligonucleotide
aauccauggugucucuguc

SEQ ID NO: 2206002 - RNA, 19 nt, Artificial Sequence
  Description of Artificial Sequence: Synthetic oligonucleotide
accuuaggcugccacaagc

SEQ ID NO: 2206003 - RNA, 19 nt, Artificial Sequence
  Description of Artificial Sequence: Synthetic oligonucleotide
ugaauucuuggcauaaaau

SEQ ID NO: 2206004 - RNA, 19 nt, Artificial Sequence
  Description of Artificial Sequence: Synthetic oligonucleotide
uucauaagaucugugcaag

SEQ ID NO: 2206005 - RNA, 19 nt, Artificial Sequence
  Description of Artificial Sequence: Synthetic oligonucleotide
uuugcgaagcuccccaagc

SEQ ID NO: 2206006 - RNA, 19 nt, Artificial Sequence
  Description of Artificial Sequence: Synthetic oligonucleotide
aagaguugaggauccucuc

SEQ ID NO: 2206007 - RNA, 19 nt, Artificial Sequence
  Description of Artificial Sequence: Synthetic oligonucleotide
aguaguucacgaguugagc

SEQ ID NO: 2206008 - RNA, 19 nt, Artificial Sequence
  Description of Artificial Sequence: Synthetic oligonucleotide
uugccagauagcuacacga

SEQ ID NO: 2206009 - RNA, 19 nt, Artificial Sequence
  Description of Artificial Sequence: Synthetic oligonucleotide
cuuagaggcagagaugagg

SEQ ID NO: 2206010 - RNA, 19 nt, Artificial Sequence
  Description of Artificial Sequence: Synthetic oligonucleotide
cucucauugacagugcggg

SEQ ID NO: 2206011 - RNA, 19 nt, Artificial Sequence
  Description of Artificial Sequence: Synthetic oligonucleotide
acuccacuaacuguguggc

SEQ ID NO: 2206012 - RNA, 19 nt, Artificial Sequence
  Description of Artificial Sequence: Synthetic oligonucleotide
agugcgggagcacuccugc

SEQ ID NO: 2206013 - RNA, 19 nt, Artificial Sequence
  Description of Artificial Sequence: Synthetic oligonucleotide
cagcuuuuaccuuaggcug

SEQ ID NO: 2206014 - RNA, 19 nt, Artificial Sequence
  Description of Artificial Sequence: Synthetic oligonucleotide
ucaugugagcagacgauga

SEQ ID NO: 2206015 - RNA, 19 nt, Artificial Sequence
  Description of Artificial Sequence: Synthetic oligonucleotide
ugaacuucggggagcuggg

SEQ ID NO: 2206016 - RNA, 19 nt, Artificial Sequence
  Description of Artificial Sequence: Synthetic oligonucleotide
uaguaguucacgaguugag

SEQ ID NO: 2206017 - RNA, 19 nt, Artificial Sequence
  Description of Artificial Sequence: Synthetic oligonucleotide
ugugcaagaguugaggauc

SEQ ID NO: 2206018 - RNA, 19 nt, Artificial Sequence
  Description of Artificial Sequence: Synthetic oligonucleotide
auugccagauagcuacacg

SEQ ID NO: 2206019 - RNA, 19 nt, Artificial Sequence
  Description of Artificial Sequence: Synthetic oligonucleotide
uuggcauaaaauuccugcu

SEQ ID NO: 2206020 - RNA, 19 nt, Artificial Sequence
  Description of Artificial Sequence: Synthetic oligonucleotide
cacgaguugagcuggguag

SEQ ID NO: 2206021 - RNA, 19 nt, Artificial Sequence
  Description of Artificial Sequence: Synthetic oligonucleotide
uccacgauuuccuucugca

SEQ ID NO: 2206022 - RNA, 19 nt, Artificial Sequence
  Description of Artificial Sequence: Synthetic oligonucleotide
aagacucgcaccugugucu

SEQ ID NO: 2206023 - RNA, 19 nt, Artificial Sequence
  Description of Artificial Sequence: Synthetic oligonucleotide
aucucaugugagcagacga

SEQ ID NO: 2206024 - RNA, 19 nt, Artificial Sequence
  Description of Artificial Sequence: Synthetic oligonucleotide
uccugagcucucauggcgg

SEQ ID NO: 2206025 - RNA, 19 nt, Artificial Sequence
  Description of Artificial Sequence: Synthetic oligonucleotide
ucaacuugaugagggacag

SEQ ID NO: 2206026 - RNA, 19 nt, Artificial Sequence
  Description of Artificial Sequence: Synthetic oligonucleotide
aggacuaugcuugucagcu

SEQ ID NO: 2206027 - RNA, 19 nt, Artificial Sequence
  Description of Artificial Sequence: Synthetic oligonucleotide
cugaacaccucagagggcc

SEQ ID NO: 2206028 - RNA, 19 nt, Artificial Sequence
  Description of Artificial Sequence: Synthetic oligonucleotide
uacacgaggcucaggcacg

SEQ ID NO: 2206029 - RNA, 19 nt, Artificial Sequence
  Description of Artificial Sequence: Synthetic oligonucleotide
ucauugacagugcgggagc

SEQ ID NO: 2206030 - RNA, 19 nt, Artificial Sequence
  Description of Artificial Sequence: Synthetic oligonucleotide
ugccagauagcuacacgag

SEQ ID NO: 2206031 - RNA, 19 nt, Artificial Sequence
  Description of Artificial Sequence: Synthetic oligonucleotide
auagugcuguuugcgaagc

SEQ ID NO: 2206032 - RNA, 19 nt, Artificial Sequence
  Description of Artificial Sequence: Synthetic oligonucleotide
guacauagugcuguuugcg

SEQ ID NO: 2206033 - RNA, 19 nt, Artificial Sequence
  Description of Artificial Sequence: Synthetic oligonucleotide
acgaggcucaggcacgacc

SEQ ID NO: 2206034 - RNA, 19 nt, Artificial Sequence
  Description of Artificial Sequence: Synthetic oligonucleotide
uaguucacgaguugagcug

SEQ ID NO: 2206035 - RNA, 19 nt, Artificial Sequence
  Description of Artificial Sequence: Synthetic oligonucleotide
aggccggagaaauccaugg

SEQ ID NO: 2206036 - RNA, 19 nt, Artificial Sequence
  Description of Artificial Sequence: Synthetic oligonucleotide
cugaacuucggggagcugg

SEQ ID NO: 2206037 - RNA, 19 nt, Artificial Sequence
  Description of Artificial Sequence: Synthetic oligonucleotide
cuugcccauugccagauag

SEQ ID NO: 2206038 - RNA, 19 nt, Artificial Sequence
  Description of Artificial Sequence: Synthetic oligonucleotide
ugugucuccaucuccugcu

SEQ ID NO: 2206039 - RNA, 19 nt, Artificial Sequence
  Description of Artificial Sequence: Synthetic oligonucleotide
aucugugcaagaguugagg

SEQ ID NO: 2206040 - RNA, 19 nt, Artificial Sequence
  Description of Artificial Sequence: Synthetic oligonucleotide
aguucacgaguugagcugg

SEQ ID NO: 2206041 - RNA, 19 nt, Artificial Sequence
  Description of Artificial Sequence: Synthetic oligonucleotide
cucaauccuccgcacagcg

SEQ ID NO: 2206042 - RNA, 19 nt, Artificial Sequence
  Description of Artificial Sequence: Synthetic oligonucleotide
uaugcuugucagcuuuuac

SEQ ID NO: 2206043 - RNA, 19 nt, Artificial Sequence
  Description of Artificial Sequence: Synthetic oligonucleotide
agcuggguagacaccaucc

SEQ ID NO: 2206044 - RNA, 19 nt, Artificial Sequence
  Description of Artificial Sequence: Synthetic oligonucleotide
ucuuggcauaaaauuccug

SEQ ID NO: 2206045 - RNA, 19 nt, Artificial Sequence
  Description of Artificial Sequence: Synthetic oligonucleotide
agcuuuuaccuuaggcugc

SEQ ID NO: 2206046 - RNA, 19 nt, Artificial Sequence
  Description of Artificial Sequence: Synthetic oligonucleotide
gaguuccucguauuugccc

SEQ ID NO: 2206047 - RNA, 19 nt, Artificial Sequence
  Description of Artificial Sequence: Synthetic oligonucleotide
cucauugacagugcgggag

SEQ ID NO: 2206048 - RNA, 19 nt, Artificial Sequence
  Description of Artificial Sequence: Synthetic oligonucleotide
agaucugugcaagaguuga

SEQ ID NO: 2206049 - RNA, 19 nt, Artificial Sequence
  Description of Artificial Sequence: Synthetic oligonucleotide
accucagagggccuaguag

SEQ ID NO: 2206050 - RNA, 19 nt, Artificial Sequence
  Description of Artificial Sequence: Synthetic oligonucleotide
uguguggcuccccagccca

SEQ ID NO: 2206051 - RNA, 19 nt, Artificial Sequence
  Description of Artificial Sequence: Synthetic oligonucleotide
agugcuguuugcgaagcuc

SEQ ID NO: 2206052 - RNA, 19 nt, Artificial Sequence
  Description of Artificial Sequence: Synthetic oligonucleotide
ugcgggagcacuccugcag

SEQ ID NO: 2206053 - RNA, 19 nt, Artificial Sequence
  Description of Artificial Sequence: Synthetic oligonucleotide
ucagccgacuccacuaacu

SEQ ID NO: 2206054 - RNA, 19 nt, Artificial Sequence
  Description of Artificial Sequence: Synthetic oligonucleotide
uugcgaagcuccccaagcc

SEQ ID NO: 2206055 - RNA, 19 nt, Artificial Sequence
  Description of Artificial Sequence: Synthetic oligonucleotide
ucuucaacuugaugaggga

SEQ ID NO: 2206056 - RNA, 19 nt, Artificial Sequence
  Description of Artificial Sequence: Synthetic oligonucleotide
aguuucacuccugagcucu

SEQ ID NO: 2206057 - RNA, 19 nt, Artificial Sequence
  Description of Artificial Sequence: Synthetic oligonucleotide
cuccugagcucucauggcg

SEQ ID NO: 2206058 - RNA, 19 nt, Artificial Sequence
  Description of Artificial Sequence: Synthetic oligonucleotide
uccacuaacuguguggcuc

SEQ ID NO: 2206059 - RNA, 19 nt, Artificial Sequence
  Description of Artificial Sequence: Synthetic oligonucleotide
uuugcccgugugaagcacc

SEQ ID NO: 2206060 - RNA, 19 nt, Artificial Sequence
  Description of Artificial Sequence: Synthetic oligonucleotide
caauccuccgcacagcguc

SEQ ID NO: 2206061 - RNA, 19 nt, Artificial Sequence
  Description of Artificial Sequence: Synthetic oligonucleotide
ccagauagcuacacgaggc

SEQ ID NO: 2206062 - RNA, 19 nt, Artificial Sequence
  Description of Artificial Sequence: Synthetic oligonucleotide
auuugguggaggccaccac

SEQ ID NO: 2206063 - RNA, 19 nt, Artificial Sequence
  Description of Artificial Sequence: Synthetic oligonucleotide
agauagcuacacgaggcuc

SEQ ID NO: 2206064 - RNA, 19 nt, Artificial Sequence
  Description of Artificial Sequence: Synthetic oligonucleotide
gauagcuacacgaggcuca

SEQ ID NO: 2206065 - RNA, 19 nt, Artificial Sequence
  Description of Artificial Sequence: Synthetic oligonucleotide
acauagugcuguuugcgaa

SEQ ID NO: 2206066 - RNA, 19 nt, Artificial Sequence
  Description of Artificial Sequence: Synthetic oligonucleotide
aauccuccgcacagcgucc

SEQ ID NO: 2206067 - RNA, 19 nt, Artificial Sequence
  Description of Artificial Sequence: Synthetic oligonucleotide
ugcccauugccagauagcu

SEQ ID NO: 2206068 - RNA, 19 nt, Artificial Sequence
  Description of Artificial Sequence: Synthetic oligonucleotide
uugguggaggccaccacgu

SEQ ID NO: 2206069 - RNA, 19 nt, Artificial Sequence
  Description of Artificial Sequence: Synthetic oligonucleotide
gcauaaaauuccugcugcg

SEQ ID NO: 2206070 - RNA, 19 nt, Artificial Sequence
  Description of Artificial Sequence: Synthetic oligonucleotide
agcuccccaagccgcacgc

SEQ ID NO: 2206071 - RNA, 19 nt, Artificial Sequence
  Description of Artificial Sequence: Synthetic oligonucleotide
cacgauuuccuucugcaga

SEQ ID NO: 2206072 - RNA, 19 nt, Artificial Sequence
  Description of Artificial Sequence: Synthetic oligonucleotide
ugccuuagaggcagagaug

SEQ ID NO: 2206073 - RNA, 19 nt, Artificial Sequence
  Description of Artificial Sequence: Synthetic oligonucleotide
guaguucacgaguugagcu

SEQ ID NO: 2206074 - RNA, 19 nt, Artificial Sequence
  Description of Artificial Sequence: Synthetic oligonucleotide
cuuaggcugccacaagcug

SEQ ID NO: 2206075 - RNA, 19 nt, Artificial Sequence
  Description of Artificial Sequence: Synthetic oligonucleotide
cuugguggcugaacuucgg

SEQ ID NO: 2206076 - RNA, 19 nt, Artificial Sequence
  Description of Artificial Sequence: Synthetic oligonucleotide
caagacucgcaccuguguc

SEQ ID NO: 2206077 - RNA, 19 nt, Artificial Sequence
  Description of Artificial Sequence: Synthetic oligonucleotide
uugucagccgacuccacua

SEQ ID NO: 2206078 - RNA, 19 nt, Artificial Sequence
  Description of Artificial Sequence: Synthetic oligonucleotide
ugucaaccauggcuccuag

SEQ ID NO: 2206079 - RNA, 19 nt, Artificial Sequence
  Description of Artificial Sequence: Synthetic oligonucleotide
aagaucugugcaagaguug

SEQ ID NO: 2206080 - RNA, 19 nt, Artificial Sequence
  Description of Artificial Sequence: Synthetic oligonucleotide
ucacgaguugagcugggua

SEQ ID NO: 2206081 - RNA, 19 nt, Artificial Sequence
  Description of Artificial Sequence: Synthetic oligonucleotide
guuugcgaagcuccccaag

SEQ ID NO: 2206082 - RNA, 19 nt, Artificial Sequence
  Description of Artificial Sequence: Synthetic oligonucleotide
cuugucagcuuuuaccuua

SEQ ID NO: 2206083 - RNA, 19 nt, Artificial Sequence
  Description of Artificial Sequence: Synthetic oligonucleotide
gccagauagcuacacgagg

SEQ ID NO: 2206084 - RNA, 19 nt, Artificial Sequence
  Description of Artificial Sequence: Synthetic oligonucleotide
caucacaaggagccggaug

SEQ ID NO: 2206085 - RNA, 19 nt, Artificial Sequence
  Description of Artificial Sequence: Synthetic oligonucleotide
agggccuaguaguucacga

SEQ ID NO: 2206086 - RNA, 19 nt, Artificial Sequence
  Description of Artificial Sequence: Synthetic oligonucleotide
acuaacuguguggcucccc

SEQ ID NO: 2206087 - RNA, 19 nt, Artificial Sequence
  Description of Artificial Sequence: Synthetic oligonucleotide
cuaguaguucacgaguuga

SEQ ID NO: 2206088 - RNA, 19 nt, Artificial Sequence
  Description of Artificial Sequence: Synthetic oligonucleotide
gauggccuucauaagaucu

SEQ ID NO: 2206089 - RNA, 19 nt, Artificial Sequence
  Description of Artificial Sequence: Synthetic oligonucleotide
cucaugugagcagacgaug

SEQ ID NO: 2206090 - RNA, 19 nt, Artificial Sequence
  Description of Artificial Sequence: Synthetic oligonucleotide
auuugcccgugugaagcac

SEQ ID NO: 2206091 - RNA, 19 nt, Artificial Sequence
  Description of Artificial Sequence: Synthetic oligonucleotide
ucacuccugagcucucaug

SEQ ID NO: 2206092 - RNA, 19 nt, Artificial Sequence
  Description of Artificial Sequence: Synthetic oligonucleotide
uaacuguguggcuccccag

SEQ ID NO: 2206093 - RNA, 19 nt, Artificial Sequence
  Description of Artificial Sequence: Synthetic oligonucleotide
gcagacgaugaguuccucg

SEQ ID NO: 2206094 - RNA, 19 nt, Artificial Sequence
  Description of Artificial Sequence: Synthetic oligonucleotide
ucgaucugcuccuggccug

SEQ ID NO: 2206095 - RNA, 19 nt, Artificial Sequence
  Description of Artificial Sequence: Synthetic oligonucleotide
ggagcacuccugcaggcgg

SEQ ID NO: 2206096 - RNA, 19 nt, Artificial Sequence
  Description of Artificial Sequence: Synthetic oligonucleotide
gaucugugcaagaguugag

SEQ ID NO: 2206097 - RNA, 19 nt, Artificial Sequence
  Description of Artificial Sequence: Synthetic oligonucleotide
aaauuccugcugcguggcu

SEQ ID NO: 2206098 - RNA, 19 nt, Artificial Sequence
  Description of Artificial Sequence: Synthetic oligonucleotide
ucaauccuccgcacagcgu

SEQ ID NO: 2206099 - RNA, 19 nt, Artificial Sequence
  Description of Artificial Sequence: Synthetic oligonucleotide
ucucauugacagugcggga

SEQ ID NO: 2206100 - RNA, 19 nt, Artificial Sequence
  Description of Artificial Sequence: Synthetic oligonucleotide
uaccuuaggcugccacaag

SEQ ID NO: 2206101 - RNA, 19 nt, Artificial Sequence
  Description of Artificial Sequence: Synthetic oligonucleotide
ggucaucacaaggagccgg

SEQ ID NO: 2206102 - RNA, 19 nt, Artificial Sequence
  Description of Artificial Sequence: Synthetic oligonucleotide
gccggagaaauccauggug

SEQ ID NO: 2206103 - RNA, 19 nt, Artificial Sequence
  Description of Artificial Sequence: Synthetic oligonucleotide
agaaauccauggugucucu

SEQ ID NO: 2206104 - RNA, 19 nt, Artificial Sequence
  Description of Artificial Sequence: Synthetic oligonucleotide
caccccggccaguacauag

SEQ ID NO: 2206105 - RNA, 19 nt, Artificial Sequence
  Description of Artificial Sequence: Synthetic oligonucleotide
auagcuacacgaggcucag

SEQ ID NO: 2206106 - RNA, 19 nt, Artificial Sequence
  Description of Artificial Sequence: Synthetic oligonucleotide
ugucagccgacuccacuaa

SEQ ID NO: 2206107 - RNA, 19 nt, Artificial Sequence
  Description of Artificial Sequence: Synthetic oligonucleotide
agacucgcaccugugucuc

SEQ ID NO: 2206108 - RNA, 19 nt, Artificial Sequence
  Description of Artificial Sequence: Synthetic oligonucleotide
uugcccgugugaagcacca

SEQ ID NO: 2206109 - RNA, 19 nt, Artificial Sequence
  Description of Artificial Sequence: Synthetic oligonucleotide
aggcucaggcacgaccacc

SEQ ID NO: 2206110 - RNA, 19 nt, Artificial Sequence
  Description of Artificial Sequence: Synthetic oligonucleotide
ugaggcccucaguccaccg

SEQ ID NO: 2206111 - RNA, 19 nt, Artificial Sequence
  Description of Artificial Sequence: Synthetic oligonucleotide
gagggccuaguaguucacg

SEQ ID NO: 2206112 - RNA, 19 nt, Artificial Sequence
  Description of Artificial Sequence: Synthetic oligonucleotide
ggacaggccggagaaaucc

SEQ ID NO: 2206113 - RNA, 19 nt, Artificial Sequence
  Description of Artificial Sequence: Synthetic oligonucleotide
aggcccucaguccaccgug

SEQ ID NO: 2206114 - RNA, 19 nt, Artificial Sequence
  Description of Artificial Sequence: Synthetic oligonucleotide
gaguuggaagccucucaga

SEQ ID NO: 2206115 - RNA, 19 nt, Artificial Sequence
  Description of Artificial Sequence: Synthetic oligonucleotide
cagagggccuaguaguuca

SEQ ID NO: 2206116 - RNA, 19 nt, Artificial Sequence
  Description of Artificial Sequence: Synthetic oligonucleotide
cagccgacuccacuaacug

SEQ ID NO: 2206117 - RNA, 19 nt, Artificial Sequence
  Description of Artificial Sequence: Synthetic oligonucleotide
uguccucaauccuccgcac

SEQ ID NO: 2206118 - RNA, 19 nt, Artificial Sequence
  Description of Artificial Sequence: Synthetic oligonucleotide
cuccaguuucacuccugag

SEQ ID NO: 2206119 - RNA, 19 nt, Artificial Sequence
  Description of Artificial Sequence: Synthetic oligonucleotide
ccuucauaagaucugugca

SEQ ID NO: 2206120 - RNA, 19 nt, Artificial Sequence
  Description of Artificial Sequence: Synthetic oligonucleotide
cugauuugguggaggccac

SEQ ID NO: 2206121 - RNA, 19 nt, Artificial Sequence
  Description of Artificial Sequence: Synthetic oligonucleotide
gugcaagaguugaggaucc

SEQ ID NO: 2206122 - RNA, 19 nt, Artificial Sequence
  Description of Artificial Sequence: Synthetic oligonucleotide
agccgacuccacuaacugu

SEQ ID NO: 2206123 - RNA, 19 nt, Artificial Sequence
  Description of Artificial Sequence: Synthetic oligonucleotide
ucauggcgggccugguuca

SEQ ID NO: 2206124 - RNA, 19 nt, Artificial Sequence
  Description of Artificial Sequence: Synthetic oligonucleotide
cuguuugcgaagcucccca

SEQ ID NO: 2206125 - RNA, 19 nt, Artificial Sequence
  Description of Artificial Sequence: Synthetic oligonucleotide
cauugccagauagcuacac

SEQ ID NO: 2206126 - RNA, 19 nt, Artificial Sequence
  Description of Artificial Sequence: Synthetic oligonucleotide
uggcgggccugguucauca

SEQ ID NO: 2206127 - RNA, 19 nt, Artificial Sequence
  Description of Artificial Sequence: Synthetic oligonucleotide
uccucucauucaccuccag

SEQ ID NO: 2206128 - RNA, 19 nt, Artificial Sequence
  Description of Artificial Sequence: Synthetic oligonucleotide
cucguauuugcccguguga

SEQ ID NO: 2206129 - RNA, 19 nt, Artificial Sequence
  Description of Artificial Sequence: Synthetic oligonucleotide
gacgaugaguuccucguau

SEQ ID NO: 2206130 - RNA, 19 nt, Artificial Sequence
  Description of Artificial Sequence: Synthetic oligonucleotide
uguuugcgaagcuccccaa

SEQ ID NO: 2206131 - RNA, 19 nt, Artificial Sequence
  Description of Artificial Sequence: Synthetic oligonucleotide
gccgcccucucauugacag

SEQ ID NO: 2206132 - RNA, 19 nt, Artificial Sequence
  Description of Artificial Sequence: Synthetic oligonucleotide
gacuaugcuugucagcuuu

SEQ ID NO: 2206133 - RNA, 19 nt, Artificial Sequence
  Description of Artificial Sequence: Synthetic oligonucleotide
caaccauggcuccuagcuc

SEQ ID NO: 2206134 - RNA, 19 nt, Artificial Sequence
  Description of Artificial Sequence: Synthetic oligonucleotide
acaaggagccggauggccu

SEQ ID NO: 2206135 - RNA, 19 nt, Artificial Sequence
  Description of Artificial Sequence: Synthetic oligonucleotide
gugucucuguccucgaucu

SEQ ID NO: 2206136 - RNA, 19 nt, Artificial Sequence
  Description of Artificial Sequence: Synthetic oligonucleotide
gaguugaggauccucucau

SEQ ID NO: 2206137 - RNA, 19 nt, Artificial Sequence
  Description of Artificial Sequence: Synthetic oligonucleotide
ucagagggccuaguaguuc

SEQ ID NO: 2206138 - RNA, 19 nt, Artificial Sequence
  Description of Artificial Sequence: Synthetic oligonucleotide
cucaguccaccgugaauuc

SEQ ID NO: 2206139 - RNA, 19 nt, Artificial Sequence
  Description of Artificial Sequence: Synthetic oligonucleotide
ugauuugguggaggccacc

SEQ ID NO: 2206140 - RNA, 19 nt, Artificial Sequence
  Description of Artificial Sequence: Synthetic oligonucleotide
cuccuggccugauuuggug

SEQ ID NO: 2206141 - RNA, 19 nt, Artificial Sequence
  Description of Artificial Sequence: Synthetic oligonucleotide
uccccaagccgcacgcgcu

SEQ ID NO: 2206142 - RNA, 19 nt, Artificial Sequence
  Description of Artificial Sequence: Synthetic oligonucleotide
cugccuuagaggcagagau

SEQ ID NO: 2206143 - RNA, 19 nt, Artificial Sequence
  Description of Artificial Sequence: Synthetic oligonucleotide
uggcuccuagcuccucuug

SEQ ID NO: 2206144 - RNA, 19 nt, Artificial Sequence
  Description of Artificial Sequence: Synthetic oligonucleotide
gggccuaguaguucacgag

SEQ ID NO: 2206145 - RNA, 19 nt, Artificial Sequence
  Description of Artificial Sequence: Synthetic oligonucleotide
acgcgcucugccuccagug

SEQ ID NO: 2206146 - RNA, 19 nt, Artificial Sequence
  Description of Artificial Sequence: Synthetic oligonucleotide
uagugcuguuugcgaagcu

SEQ ID NO: 2206147 - RNA, 19 nt, Artificial Sequence
  Description of Artificial Sequence: Synthetic oligonucleotide
acgaugaguuccucguauu

SEQ ID NO: 2206148 - RNA, 19 nt, Artificial Sequence
  Description of Artificial Sequence: Synthetic oligonucleotide
cagacgaugaguuccucgu

SEQ ID NO: 2206149 - RNA, 19 nt, Artificial Sequence
  Description of Artificial Sequence: Synthetic oligonucleotide
ggaggucaucacaaggagc

SEQ ID NO: 2206150 - RNA, 19 nt, Artificial Sequence
  Description of Artificial Sequence: Synthetic oligonucleotide
uuccucaccuggugucccc

SEQ ID NO: 2206151 - RNA, 19 nt, Artificial Sequence
  Description of Artificial Sequence: Synthetic oligonucleotide
aguugaggauccucucauu

SEQ ID NO: 2206152 - RNA, 19 nt, Artificial Sequence
  Description of Artificial Sequence: Synthetic oligonucleotide
uccucguauuugcccgugu

SEQ ID NO: 2206153 - RNA, 19 nt, Artificial Sequence
  Description of Artificial Sequence: Synthetic oligonucleotide
gcuccuagcuccucuugcc

SEQ ID NO: 2206154 - RNA, 19 nt, Artificial Sequence
  Description of Artificial Sequence: Synthetic oligonucleotide
cauaaaauuccugcugcgu

SEQ ID NO: 2206155 - RNA, 19 nt, Artificial Sequence
  Description of Artificial Sequence: Synthetic oligonucleotide
acgaguugagcuggguaga

SEQ ID NO: 2206156 - RNA, 19 nt, Artificial Sequence
  Description of Artificial Sequence: Synthetic oligonucleotide
gugagcagacgaugaguuc

SEQ ID NO: 2206157 - RNA, 19 nt, Artificial Sequence
  Description of Artificial Sequence: Synthetic oligonucleotide
ccacuaacuguguggcucc

SEQ ID NO: 2206158 - RNA, 19 nt, Artificial Sequence
  Description of Artificial Sequence: Synthetic oligonucleotide
caauggcugcagagguggc

SEQ ID NO: 2206159 - RNA, 19 nt, Artificial Sequence
  Description of Artificial Sequence: Synthetic oligonucleotide
cuuccucaccugguguccc

SEQ ID NO: 2206160 - RNA, 19 nt, Artificial Sequence
  Description of Artificial Sequence: Synthetic oligonucleotide
gcccgugugaagcaccacc

SEQ ID NO: 2206161 - RNA, 19 nt, Artificial Sequence
  Description of Artificial Sequence: Synthetic oligonucleotide
ggccugauuugguggaggc

SEQ ID NO: 2206162 - RNA, 19 nt, Artificial Sequence
  Description of Artificial Sequence: Synthetic oligonucleotide
caucaccccggccaguaca

SEQ ID NO: 2206163 - RNA, 19 nt, Artificial Sequence
  Description of Artificial Sequence: Synthetic oligonucleotide
uucacgaguugagcugggu

SEQ ID NO: 2206164 - RNA, 19 nt, Artificial Sequence
  Description of Artificial Sequence: Synthetic oligonucleotide
acguuggccgcccucucau

SEQ ID NO: 2206165 - RNA, 19 nt, Artificial Sequence
  Description of Artificial Sequence: Synthetic oligonucleotide
ccugauuugguggaggcca

SEQ ID NO: 2206166 - RNA, 19 nt, Artificial Sequence
  Description of Artificial Sequence: Synthetic oligonucleotide
uuucugggccaaggguggc

SEQ ID NO: 2206167 - RNA, 19 nt, Artificial Sequence
  Description of Artificial Sequence: Synthetic oligonucleotide
ccuaguaguucacgaguug

SEQ ID NO: 2206168 - RNA, 19 nt, Artificial Sequence
  Description of Artificial Sequence: Synthetic oligonucleotide
agagggccuaguaguucac

SEQ ID NO: 2206169 - RNA, 19 nt, Artificial Sequence
  Description of Artificial Sequence: Synthetic oligonucleotide
agacgaugaguuccucgua

SEQ ID NO: 2206170 - RNA, 19 nt, Artificial Sequence
  Description of Artificial Sequence: Synthetic oligonucleotide
caacuugaugagggacagg

SEQ ID NO: 2206171 - RNA, 19 nt, Artificial Sequence
  Description of Artificial Sequence: Synthetic oligonucleotide
uggccgcccucucauugac

SEQ ID NO: 2206172 - RNA, 19 nt, Artificial Sequence
  Description of Artificial Sequence: Synthetic oligonucleotide
aggugaggacuaugcuugu

SEQ ID NO: 2206173 - RNA, 19 nt, Artificial Sequence
  Description of Artificial Sequence: Synthetic oligonucleotide
uuccucguauuugcccgug

SEQ ID NO: 2206174 - RNA, 19 nt, Artificial Sequence
  Description of Artificial Sequence: Synthetic oligonucleotide
guucacgaguugagcuggg

SEQ ID NO: 2206175 - RNA, 19 nt, Artificial Sequence
  Description of Artificial Sequence: Synthetic oligonucleotide
gucaucacaaggagccgga

SEQ ID NO: 2206176 - RNA, 19 nt, Artificial Sequence
  Description of Artificial Sequence: Synthetic oligonucleotide
caguuucacuccugagcuc

SEQ ID NO: 2206177 - RNA, 19 nt, Artificial Sequence
  Description of Artificial Sequence: Synthetic oligonucleotide
accaccuugucagccgacu

SEQ ID NO: 2206178 - RNA, 19 nt, Artificial Sequence
  Description of Artificial Sequence: Synthetic oligonucleotide
gcuuuuaccuuaggcugcc

SEQ ID NO: 2206179 - RNA, 19 nt, Artificial Sequence
  Description of Artificial Sequence: Synthetic oligonucleotide
guccucaauccuccgcaca

SEQ ID NO: 2206180 - RNA, 19 nt, Artificial Sequence
  Description of Artificial Sequence: Synthetic oligonucleotide
cgugugaagcaccaccuug

SEQ ID NO: 2206181 - RNA, 19 nt, Artificial Sequence
  Description of Artificial Sequence: Synthetic oligonucleotide
ccacgauuuccuucugcag

SEQ ID NO: 2206182 - RNA, 19 nt, Artificial Sequence
  Description of Artificial Sequence: Synthetic oligonucleotide
gacucgcaccugugucucc

SEQ ID NO: 2206183 - RNA, 19 nt, Artificial Sequence
  Description of Artificial Sequence: Synthetic oligonucleotide
agcagacgaugaguuccuc

SEQ ID NO: 2206184 - RNA, 19 nt, Artificial Sequence
  Description of Artificial Sequence: Synthetic oligonucleotide
cacugccuuagaggcagag

SEQ ID NO: 2206185 - RNA, 19 nt, Artificial Sequence
  Description of Artificial Sequence: Synthetic oligonucleotide
gucagccgacuccacuaac

SEQ ID NO: 2206186 - RNA, 19 nt, Artificial Sequence
  Description of Artificial Sequence: Synthetic oligonucleotide
cccucucauugacagugcg

SEQ ID NO: 2206187 - RNA, 19 nt, Artificial Sequence
  Description of Artificial Sequence: Synthetic oligonucleotide
gaacuucggggagcugggc

SEQ ID NO: 2206188 - RNA, 19 nt, Artificial Sequence
  Description of Artificial Sequence: Synthetic oligonucleotide
ugcaagaguugaggauccu

SEQ ID NO: 2206189 - RNA, 19 nt, Artificial Sequence
  Description of Artificial Sequence: Synthetic oligonucleotide
ucgcaccugugucuccauc

SEQ ID NO: 2206190 - RNA, 19 nt, Artificial Sequence
  Description of Artificial Sequence: Synthetic oligonucleotide
gcuggguucuuccucaccu

SEQ ID NO: 2206191 - RNA, 19 nt, Artificial Sequence
  Description of Artificial Sequence: Synthetic oligonucleotide
uagcuacacgaggcucagg

SEQ ID NO: 2206192 - RNA, 19 nt, Artificial Sequence
  Description of Artificial Sequence: Synthetic oligonucleotide
gugugaagcaccaccuugu

SEQ ID NO: 2206193 - RNA, 19 nt, Artificial Sequence
  Description of Artificial Sequence: Synthetic oligonucleotide
auggugucucuguccucga

SEQ ID NO: 2206194 - RNA, 19 nt, Artificial Sequence
  Description of Artificial Sequence: Synthetic oligonucleotide
ucaucacaaggagccggau

SEQ ID NO: 2206195 - RNA, 19 nt, Artificial Sequence
  Description of Artificial Sequence: Synthetic oligonucleotide
ccaccagccauccugcuga

SEQ ID NO: 2206196 - RNA, 19 nt, Artificial Sequence
  Description of Artificial Sequence: Synthetic oligonucleotide
uccucaccuggugucccca

SEQ ID NO: 2206197 - RNA, 19 nt, Artificial Sequence
  Description of Artificial Sequence: Synthetic oligonucleotide
ccucguauuugcccgugug

SEQ ID NO: 2206198 - RNA, 19 nt, Artificial Sequence
  Description of Artificial Sequence: Synthetic oligonucleotide
gaagcuccccaagccgcac

SEQ ID NO: 2206199 - RNA, 19 nt, Artificial Sequence
  Description of Artificial Sequence: Synthetic oligonucleotide
ccugcugcguggcugcccc

SEQ ID NO: 2206200 - RNA, 19 nt, Artificial Sequence
  Description of Artificial Sequence: Synthetic oligonucleotide
cucgaucugcuccuggccu

SEQ ID NO: 2206201 - RNA, 19 nt, Artificial Sequence
  Description of Artificial Sequence: Synthetic oligonucleotide
cagauagcuacacgaggcu

SEQ ID NO: 2206202 - RNA, 19 nt, Artificial Sequence
  Description of Artificial Sequence: Synthetic oligonucleotide
ggccuaguaguucacgagu

SEQ ID NO: 2206203 - RNA, 19 nt, Artificial Sequence
  Description of Artificial Sequence: Synthetic oligonucleotide
agccgcacgcgcucugccu

SEQ ID NO: 2206204 - RNA, 19 nt, Artificial Sequence
  Description of Artificial Sequence: Synthetic oligonucleotide
gcuguuugcgaagcucccc

SEQ ID NO: 2206205 - RNA, 19 nt, Artificial Sequence
  Description of Artificial Sequence: Synthetic oligonucleotide
caagccgcacgcgcucugc

SEQ ID NO: 2206206 - RNA, 19 nt, Artificial Sequence
  Description of Artificial Sequence: Synthetic oligonucleotide
cugugcaagaguugaggau

SEQ ID NO: 2206207 - RNA, 19 nt, Artificial Sequence
  Description of Artificial Sequence: Synthetic oligonucleotide
gggagcacuccugcaggcg

SEQ ID NO: 2206208 - RNA, 19 nt, Artificial Sequence
  Description of Artificial Sequence: Synthetic oligonucleotide
cacuaacuguguggcuccc

SEQ ID NO: 2206209 - RNA, 19 nt, Artificial Sequence
  Description of Artificial Sequence: Synthetic oligonucleotide
cauugacagugcgggagca

SEQ ID NO: 2206210 - RNA, 19 nt, Artificial Sequence
  Description of Artificial Sequence: Synthetic oligonucleotide
agcguccucaauggcugca

SEQ ID NO: 2206211 - RNA, 19 nt, Artificial Sequence
  Description of Artificial Sequence: Synthetic oligonucleotide
cuggccugauuugguggag

SEQ ID NO: 2206212 - RNA, 19 nt, Artificial Sequence
  Description of Artificial Sequence: Synthetic oligonucleotide
ccuuagaggcagagaugag

SEQ ID NO: 2206213 - RNA, 19 nt, Artificial Sequence
  Description of Artificial Sequence: Synthetic oligonucleotide
acaggccggagaaauccau

SEQ ID NO: 2206214 - RNA, 19 nt, Artificial Sequence
  Description of Artificial Sequence: Synthetic oligonucleotide
auggcgggccugguucauc

SEQ ID NO: 2206215 - RNA, 19 nt, Artificial Sequence
  Description of Artificial Sequence: Synthetic oligonucleotide
ugguggaggccaccacguu

SEQ ID NO: 2206216 - RNA, 19 nt, Artificial Sequence
  Description of Artificial Sequence: Synthetic oligonucleotide
gcucucauggcgggccugg

SEQ ID NO: 2206217 - RNA, 19 nt, Artificial Sequence
  Description of Artificial Sequence: Synthetic oligonucleotide
gcuacacgaggcucaggca

SEQ ID NO: 2206218 - RNA, 19 nt, Artificial Sequence
  Description of Artificial Sequence: Synthetic oligonucleotide
aucaccccggccaguacau

SEQ ID NO: 2206219 - RNA, 19 nt, Artificial Sequence
  Description of Artificial Sequence: Synthetic oligonucleotide
gccgcucuccacgauuucc

SEQ ID NO: 2206220 - RNA, 19 nt, Artificial Sequence
  Description of Artificial Sequence: Synthetic oligonucleotide
acacgaggcucaggcacga

SEQ ID NO: 2206221 - RNA, 19 nt, Artificial Sequence
  Description of Artificial Sequence: Synthetic oligonucleotide
ugccgcucuccacgauuuc

SEQ ID NO: 2206222 - RNA, 19 nt, Artificial Sequence
  Description of Artificial Sequence: Synthetic oligonucleotide
ccucagagggccuaguagu

SEQ ID NO: 2206223 - RNA, 19 nt, Artificial Sequence
  Description of Artificial Sequence: Synthetic oligonucleotide
ccggagaaauccauggugu

SEQ ID NO: 2206224 - RNA, 19 nt, Artificial Sequence
  Description of Artificial Sequence: Synthetic oligonucleotide
gcgggccugguucaucaug

SEQ ID NO: 2206225 - RNA, 19 nt, Artificial Sequence
  Description of Artificial Sequence: Synthetic oligonucleotide
ggcuggguucuuccucacc

SEQ ID NO: 2206226 - RNA, 19 nt, Artificial Sequence
  Description of Artificial Sequence: Synthetic oligonucleotide
cuccaagacucgcaccugu

SEQ ID NO: 2206227 - RNA, 19 nt, Artificial Sequence
  Description of Artificial Sequence: Synthetic oligonucleotide
cgaccaccagccauccugc

SEQ ID NO: 2206228 - RNA, 19 nt, Artificial Sequence
  Description of Artificial Sequence: Synthetic oligonucleotide
cacguuggccgcccucuca

SEQ ID NO: 2206229 - RNA, 19 nt, Artificial Sequence
  Description of Artificial Sequence: Synthetic oligonucleotide
gagcagacgaugaguuccu

SEQ ID NO: 2206230 - RNA, 19 nt, Artificial Sequence
  Description of Artificial Sequence: Synthetic oligonucleotide
ccggccaguacauagugcu

SEQ ID NO: 2206231 - RNA, 19 nt, Artificial Sequence
  Description of Artificial Sequence: Synthetic oligonucleotide
guuccucguauuugcccgu

SEQ ID NO: 2206232 - RNA, 19 nt, Artificial Sequence
  Description of Artificial Sequence: Synthetic oligonucleotide
caguccaccgugaauucuu

SEQ ID NO: 2206233 - RNA, 19 nt, Artificial Sequence
  Description of Artificial Sequence: Synthetic oligonucleotide
gccugauuugguggaggcc

SEQ ID NO: 2206234 - RNA, 19 nt, Artificial Sequence
  Description of Artificial Sequence: Synthetic oligonucleotide
guuucacuccugagcucuc

SEQ ID NO: 2206235 - RNA, 19 nt, Artificial Sequence
  Description of Artificial Sequence: Synthetic oligonucleotide
accccggccaguacauagu

SEQ ID NO: 2206236 - RNA, 19 nt, Artificial Sequence
  Description of Artificial Sequence: Synthetic oligonucleotide
cccggccaguacauagugc

SEQ ID NO: 2206237 - RNA, 19 nt, Artificial Sequence
  Description of Artificial Sequence: Synthetic oligonucleotide
agcucucauggcgggccug

SEQ ID NO: 2206238 - RNA, 19 nt, Artificial Sequence
  Description of Artificial Sequence: Synthetic oligonucleotide
uccuccgcacagcguccuc

SEQ ID NO: 2206239 - RNA, 19 nt, Artificial Sequence
  Description of Artificial Sequence: Synthetic oligonucleotide
cuggguagacaccauccuu

SEQ ID NO: 2206240 - RNA, 19 nt, Artificial Sequence
  Description of Artificial Sequence: Synthetic oligonucleotide
ggugaggacuaugcuuguc

SEQ ID NO: 2206241 - RNA, 19 nt, Artificial Sequence
  Description of Artificial Sequence: Synthetic oligonucleotide
gcuggguagacaccauccu

SEQ ID NO: 2206242 - RNA, 19 nt, Artificial Sequence
  Description of Artificial Sequence: Synthetic oligonucleotide
ugggucggcuggguucuuc

SEQ ID NO: 2206243 - RNA, 19 nt, Artificial Sequence
  Description of Artificial Sequence: Synthetic oligonucleotide
ggaggccaccacguuggcc

SEQ ID NO: 2206244 - RNA, 19 nt, Artificial Sequence
  Description of Artificial Sequence: Synthetic oligonucleotide
cucagagggccuaguaguu

SEQ ID NO: 2206245 - RNA, 19 nt, Artificial Sequence
  Description of Artificial Sequence: Synthetic oligonucleotide
ccucaauggcugcagaggu

SEQ ID NO: 2206246 - RNA, 19 nt, Artificial Sequence
  Description of Artificial Sequence: Synthetic oligonucleotide
cuugucaaccauggcuccu

SEQ ID NO: 2206247 - RNA, 19 nt, Artificial Sequence
  Description of Artificial Sequence: Synthetic oligonucleotide
gguucaucauguccucaau

SEQ ID NO: 2206248 - RNA, 19 nt, Artificial Sequence
  Description of Artificial Sequence: Synthetic oligonucleotide
ccuuaggcugccacaagcu

SEQ ID NO: 2206249 - RNA, 19 nt, Artificial Sequence
  Description of Artificial Sequence: Synthetic oligonucleotide
gugcgggagcacuccugca

SEQ ID NO: 2206250 - RNA, 19 nt, Artificial Sequence
  Description of Artificial Sequence: Synthetic oligonucleotide
cuuuuaccuuaggcugcca

SEQ ID NO: 2206251 - RNA, 19 nt, Artificial Sequence
  Description of Artificial Sequence: Synthetic oligonucleotide
ccccggccaguacauagug

SEQ ID NO: 2206252 - RNA, 19 nt, Artificial Sequence
  Description of Artificial Sequence: Synthetic oligonucleotide
gcugguugucuggccuggg

SEQ ID NO: 2206253 - RNA, 19 nt, Artificial Sequence
  Description of Artificial Sequence: Synthetic oligonucleotide
ucggggagcugggcugggu

SEQ ID NO: 2206254 - RNA, 19 nt, Artificial Sequence
  Description of Artificial Sequence: Synthetic oligonucleotide
caaggagccggauggccuu

SEQ ID NO: 2206255 - RNA, 19 nt, Artificial Sequence
  Description of Artificial Sequence: Synthetic oligonucleotide
gcacgaccaccagccaucc

SEQ ID NO: 2206256 - RNA, 19 nt, Artificial Sequence
  Description of Artificial Sequence: Synthetic oligonucleotide
ccucaguccaccgugaauu

SEQ ID NO: 2206257 - RNA, 19 nt, Artificial Sequence
  Description of Artificial Sequence: Synthetic oligonucleotide
cugccgcucuccacgauuu

SEQ ID NO: 2206258 - RNA, 19 nt, Artificial Sequence
  Description of Artificial Sequence: Synthetic oligonucleotide
ggccggagaaauccauggu

SEQ ID NO: 2206259 - RNA, 19 nt, Artificial Sequence
  Description of Artificial Sequence: Synthetic oligonucleotide
gggacaggccggagaaauc

SEQ ID NO: 2206260 - RNA, 19 nt, Artificial Sequence
  Description of Artificial Sequence: Synthetic oligonucleotide
ucaccccggccaguacaua

SEQ ID NO: 2206261 - RNA, 19 nt, Artificial Sequence
  Description of Artificial Sequence: Synthetic oligonucleotide
cgacuccacuaacugugug

SEQ ID NO: 2206262 - RNA, 19 nt, Artificial Sequence
  Description of Artificial Sequence: Synthetic oligonucleotide
cugcagagguggcagccau

SEQ ID NO: 2206263 - RNA, 19 nt, Artificial Sequence
  Description of Artificial Sequence: Synthetic oligonucleotide
ggguagacaccauccuuuu

SEQ ID NO: 2206264 - RNA, 19 nt, Artificial Sequence
  Description of Artificial Sequence: Synthetic oligonucleotide
cccgugugaagcaccaccu

SEQ ID NO: 2206265 - RNA, 19 nt, Artificial Sequence
  Description of Artificial Sequence: Synthetic oligonucleotide
cacgaggcucaggcacgac

SEQ ID NO: 2206266 - RNA, 19 nt, Artificial Sequence
  Description of Artificial Sequence: Synthetic oligonucleotide
ccgugaauucuuggcauaa

SEQ ID NO: 2206267 - RNA, 19 nt, Artificial Sequence
  Description of Artificial Sequence: Synthetic oligonucleotide
ccaagacucgcaccugugu

SEQ ID NO: 2206268 - RNA, 19 nt, Artificial Sequence
  Description of Artificial Sequence: Synthetic oligonucleotide
guguggcuccccagcccac

SEQ ID NO: 2206269 - RNA, 19 nt, Artificial Sequence
  Description of Artificial Sequence: Synthetic oligonucleotide
cggccaguacauagugcug

SEQ ID NO: 2206270 - RNA, 19 nt, Artificial Sequence
  Description of Artificial Sequence: Synthetic oligonucleotide
ccucucauucaccuccagu

SEQ ID NO: 2206271 - RNA, 19 nt, Artificial Sequence
  Description of Artificial Sequence: Synthetic oligonucleotide
gccuaguaguucacgaguu

SEQ ID NO: 2206272 - RNA, 19 nt, Artificial Sequence
  Description of Artificial Sequence: Synthetic oligonucleotide
ccaagccgcacgcgcucug

SEQ ID NO: 2206273 - RNA, 19 nt, Artificial Sequence
  Description of Artificial Sequence: Synthetic oligonucleotide
caccagccauccugcugaa

SEQ ID NO: 2206274 - RNA, 19 nt, Artificial Sequence
  Description of Artificial Sequence: Synthetic oligonucleotide
ccccaagccgcacgcgcuc

SEQ ID NO: 2206275 - RNA, 19 nt, Artificial Sequence
  Description of Artificial Sequence: Synthetic oligonucleotide
ggguucuuccucaccuggu

SEQ ID NO: 2206276 - RNA, 19 nt, Artificial Sequence
  Description of Artificial Sequence: Synthetic oligonucleotide
cggauggccuucauaagau

SEQ ID NO: 2206277 - RNA, 19 nt, Artificial Sequence
  Description of Artificial Sequence: Synthetic oligonucleotide
ggacuaugcuugucagcuu

SEQ ID NO: 2206278 - RNA, 19 nt, Artificial Sequence
  Description of Artificial Sequence: Synthetic oligonucleotide
ggggcuaugcuggguuucu

SEQ ID NO: 2206279 - RNA, 19 nt, Artificial Sequence
  Description of Artificial Sequence: Synthetic oligonucleotide
ccccagcccacugccuuag

SEQ ID NO: 2206280 - RNA, 19 nt, Artificial Sequence
  Description of Artificial Sequence: Synthetic oligonucleotide
ggcccucaguccaccguga

SEQ ID NO: 2206281 - RNA, 19 nt, Artificial Sequence
  Description of Artificial Sequence: Synthetic oligonucleotide
gcccucaguccaccgugaa

SEQ ID NO: 2206282 - RNA, 19 nt, Artificial Sequence
  Description of Artificial Sequence: Synthetic oligonucleotide
cgugaauucuuggcauaaa

SEQ ID NO: 2206283 - RNA, 19 nt, Artificial Sequence
  Description of Artificial Sequence: Synthetic oligonucleotide
ccgacuccacuaacugugu

SEQ ID NO: 2206284 - RNA, 19 nt, Artificial Sequence
  Description of Artificial Sequence: Synthetic oligonucleotide
ggccgcccucucauugaca

SEQ ID NO: 2206285 - RNA, 19 nt, Artificial Sequence
  Description of Artificial Sequence: Synthetic oligonucleotide
cccaucaccccggccagua

SEQ ID NO: 2206286 - RNA, 19 nt, Artificial Sequence
  Description of Artificial Sequence: Synthetic oligonucleotide
cacgaccaccagccauccu

SEQ ID NO: 2206287 - RNA, 19 nt, Artificial Sequence
  Description of Artificial Sequence: Synthetic oligonucleotide
cucucauggcgggccuggu

SEQ ID NO: 2206288 - RNA, 19 nt, Artificial Sequence
  Description of Artificial Sequence: Synthetic oligonucleotide
cggcuggguucuuccucac

SEQ ID NO: 2206289 - RNA, 19 nt, Artificial Sequence
  Description of Artificial Sequence: Synthetic oligonucleotide
cauggcgggccugguucau

SEQ ID NO: 2206290 - RNA, 19 nt, Artificial Sequence
  Description of Artificial Sequence: Synthetic oligonucleotide
cccucaguccaccgugaau

SEQ ID NO: 2206291 - RNA, 19 nt, Artificial Sequence
  Description of Artificial Sequence: Synthetic oligonucleotide
ggcgggccugguucaucau

SEQ ID NO: 2206292 - RNA, 19 nt, Artificial Sequence
  Description of Artificial Sequence: Synthetic oligonucleotide
ccgugugaagcaccaccuu

SEQ ID NO: 2206293 - RNA, 19 nt, Artificial Sequence
  Description of Artificial Sequence: Synthetic oligonucleotide
cgcgcucugccuccagugu

SEQ ID NO: 2206294 - RNA, 19 nt, Artificial Sequence
  Description of Artificial Sequence: Synthetic oligonucleotide
cccagcccacugccuuaga

SEQ ID NO: 2206295 - RNA, 19 nt, Artificial Sequence
  Description of Artificial Sequence: Synthetic oligonucleotide
ccucaccugguguccccau

SEQ ID NO: 2206296 - RNA, 19 nt, Artificial Sequence
  Description of Artificial Sequence: Synthetic oligonucleotide
ccgcccucucauugacagu

SEQ ID NO: 2206297 - RNA, 19 nt, Artificial Sequence
  Description of Artificial Sequence: Synthetic oligonucleotide
cccaagccgcacgcgcucu

SEQ ID NO: 2206298 - RNA, 19 nt, Artificial Sequence
  Description of Artificial Sequence: Synthetic oligonucleotide
cgcacgcgcucugccucca

SEQ ID NO: 2206299 - RNA, 19 nt, Artificial Sequence
  Description of Artificial Sequence: Synthetic oligonucleotide
ccaccacguuggccgcccu

SEQ ID NO: 2206300 - RNA, 19 nt, Artificial Sequence
  Description of Artificial Sequence: Synthetic oligonucleotide
cguuggccgcccucucauu

SEQ ID NO: 2206301 - RNA, 19 nt, Artificial Sequence
  Description of Artificial Sequence: Synthetic oligonucleotide
ccccaucaccccggccagu

SEQ ID NO: 2206302 - RNA, 19 nt, Artificial Sequence
  Description of Artificial Sequence: Synthetic oligonucleotide
aaugguuuauaaucuaggc

SEQ ID NO: 2206303 - RNA, 19 nt, Artificial Sequence
  Description of Artificial Sequence: Synthetic oligonucleotide
uauauauauauauauaucu

SEQ ID NO: 2206304 - RNA, 19 nt, Artificial Sequence
  Description of Artificial Sequence: Synthetic oligonucleotide
uauauagguacucuuaagg

SEQ ID NO: 2206305 - RNA, 19 nt, Artificial Sequence
  Description of Artificial Sequence: Synthetic oligonucleotide
auaucuuuguuccagcugc

SEQ ID NO: 2206306 - RNA, 19 nt, Artificial Sequence
  Description of Artificial Sequence: Synthetic oligonucleotide
guuacuauggacaaggugg

SEQ ID NO: 2206307 - RNA, 19 nt, Artificial Sequence
  Description of Artificial Sequence: Synthetic oligonucleotide
uuuucuuacaagaacaugu

SEQ ID NO: 2206308 - RNA, 19 nt, Artificial Sequence
  Description of Artificial Sequence: Synthetic oligonucleotide
uauauauauauauauauau

SEQ ID NO: 2206309 - RNA, 19 nt, Artificial Sequence
  Description of Artificial Sequence: Synthetic oligonucleotide
ucuauauauauauauauau

SEQ ID NO: 2206310 - RNA, 19 nt, Artificial Sequence
  Description of Artificial Sequence: Synthetic oligonucleotide
uuuuauauugaaaccacug

SEQ ID NO: 2206311 - RNA, 19 nt, Artificial Sequence
  Description of Artificial Sequence: Synthetic oligonucleotide
uauuucaagaacuuuauaa

SEQ ID NO: 2206312 - RNA, 19 nt, Artificial Sequence
  Description of Artificial Sequence: Synthetic oligonucleotide
aaugaguggagguggaugg

SEQ ID NO: 2206313 - RNA, 19 nt, Artificial Sequence
  Description of Artificial Sequence: Synthetic oligonucleotide
uauaaucuaggcaugggag

SEQ ID NO: 2206314 - RNA, 19 nt, Artificial Sequence
  Description of Artificial Sequence: Synthetic oligonucleotide
aauauuugguuaaagcaac

SEQ ID NO: 2206315 - RNA, 19 nt, Artificial Sequence
  Description of Artificial Sequence: Synthetic oligonucleotide
acuuuauaaugacugaagg

SEQ ID NO: 2206316 - RNA, 19 nt, Artificial Sequence
  Description of Artificial Sequence: Synthetic oligonucleotide
auauguacuuaugugaacc

SEQ ID NO: 2206317 - RNA, 19 nt, Artificial Sequence
  Description of Artificial Sequence: Synthetic oligonucleotide
uacaucucaauguugauug

SEQ ID NO: 2206318 - RNA, 19 nt, Artificial Sequence
  Description of Artificial Sequence: Synthetic oligonucleotide
aaaccacugauguugcuac

SEQ ID NO: 2206319 - RNA, 19 nt, Artificial Sequence
  Description of Artificial Sequence: Synthetic oligonucleotide
uuuauauugaaaccacuga

SEQ ID NO: 2206320 - RNA, 19 nt, Artificial Sequence
  Description of Artificial Sequence: Synthetic oligonucleotide
ugauguauuuuacuguuag

SEQ ID NO: 2206321 - RNA, 19 nt, Artificial Sequence
  Description of Artificial Sequence: Synthetic oligonucleotide
gauaauggaaacuuguguc

SEQ ID NO: 2206322 - RNA, 19 nt, Artificial Sequence
  Description of Artificial Sequence: Synthetic oligonucleotide
aaugauauugcuaauguaa

SEQ ID NO: 2206323 - RNA, 19 nt, Artificial Sequence
  Description of Artificial Sequence: Synthetic oligonucleotide
uuauuuguugcauacuuug

SEQ ID NO: 2206324 - RNA, 19 nt, Artificial Sequence
  Description of Artificial Sequence: Synthetic oligonucleotide
uuuugugcacaugagaggg

SEQ ID NO: 2206325 - RNA, 19 nt, Artificial Sequence
  Description of Artificial Sequence: Synthetic oligonucleotide
cauuuugugcacaugagag

SEQ ID NO: 2206326 - RNA, 19 nt, Artificial Sequence
  Description of Artificial Sequence: Synthetic oligonucleotide
auuuguugcauacuuugac

SEQ ID NO: 2206327 - RNA, 19 nt, Artificial Sequence
  Description of Artificial Sequence: Synthetic oligonucleotide
uuucuuuuguauuucaaga

SEQ ID NO: 2206328 - RNA, 19 nt, Artificial Sequence
  Description of Artificial Sequence: Synthetic oligonucleotide
uuaugugaacccacaaugg

SEQ ID NO: 2206329 - RNA, 19 nt, Artificial Sequence
  Description of Artificial Sequence: Synthetic oligonucleotide
uauaaugacugaaggaaug

SEQ ID NO: 2206330 - RNA, 19 nt, Artificial Sequence
  Description of Artificial Sequence: Synthetic oligonucleotide
uguauuuuacuguuagcag

SEQ ID NO: 2206331 - RNA, 19 nt, Artificial Sequence
  Description of Artificial Sequence: Synthetic oligonucleotide
auugaaaccacugauguug

SEQ ID NO: 2206332 - RNA, 19 nt, Artificial Sequence
  Description of Artificial Sequence: Synthetic oligonucleotide
cuuaugugaacccacaaug

SEQ ID NO: 2206333 - RNA, 19 nt, Artificial Sequence
  Description of Artificial Sequence: Synthetic oligonucleotide
uauauauauauauaucuuu

SEQ ID NO: 2206334 - RNA, 19 nt, Artificial Sequence
  Description of Artificial Sequence: Synthetic oligonucleotide
uuauauugaaaccacugau

SEQ ID NO: 2206335 - RNA, 19 nt, Artificial Sequence
  Description of Artificial Sequence: Synthetic oligonucleotide
ucaagcugucuucagaacc

SEQ ID NO: 2206336 - RNA, 19 nt, Artificial Sequence
  Description of Artificial Sequence: Synthetic oligonucleotide
ucuuuuguauuucaagaac

SEQ ID NO: 2206337 - RNA, 19 nt, Artificial Sequence
  Description of Artificial Sequence: Synthetic oligonucleotide
auauauauauauauauauc

SEQ ID NO: 2206338 - RNA, 19 nt, Artificial Sequence
  Description of Artificial Sequence: Synthetic oligonucleotide
uuuacuguuagcagaguac

SEQ ID NO: 2206339 - RNA, 19 nt, Artificial Sequence
  Description of Artificial Sequence: Synthetic oligonucleotide
auaaucuaggcaugggagg

SEQ ID NO: 2206340 - RNA, 19 nt, Artificial Sequence
  Description of Artificial Sequence: Synthetic oligonucleotide
uauauauauauaucuuugu

SEQ ID NO: 2206341 - RNA, 19 nt, Artificial Sequence
  Description of Artificial Sequence: Synthetic oligonucleotide
aaucucaugcuucaugcca

SEQ ID NO: 2206342 - RNA, 19 nt, Artificial Sequence
  Description of Artificial Sequence: Synthetic oligonucleotide
uaaagcaacagauugugau

SEQ ID NO: 2206343 - RNA, 19 nt, Artificial Sequence
  Description of Artificial Sequence: Synthetic oligonucleotide
uuuugguacaucucaaugu

SEQ ID NO: 2206344 - RNA, 19 nt, Artificial Sequence
  Description of Artificial Sequence: Synthetic oligonucleotide
uauauauagguacucuuaa

SEQ ID NO: 2206345 - RNA, 19 nt, Artificial Sequence
  Description of Artificial Sequence: Synthetic oligonucleotide
uucuuacaagaacaugugg

SEQ ID NO: 2206346 - RNA, 19 nt, Artificial Sequence
  Description of Artificial Sequence: Synthetic oligonucleotide
auguacugagaccacuucc

SEQ ID NO: 2206347 - RNA, 19 nt, Artificial Sequence
  Description of Artificial Sequence: Synthetic oligonucleotide
aauguugauugcuuugacu

SEQ ID NO: 2206348 - RNA, 19 nt, Artificial Sequence
  Description of Artificial Sequence: Synthetic oligonucleotide
aaaucuguuuucuguaggu

SEQ ID NO: 2206349 - RNA, 19 nt, Artificial Sequence
  Description of Artificial Sequence: Synthetic oligonucleotide
uuucuuacaagaacaugug

SEQ ID NO: 2206350 - RNA, 19 nt, Artificial Sequence
  Description of Artificial Sequence: Synthetic oligonucleotide
gaaaaugauauugcuaaug

SEQ ID NO: 2206351 - RNA, 19 nt, Artificial Sequence
  Description of Artificial Sequence: Synthetic oligonucleotide
gauauugcuaauguaaguc

SEQ ID NO: 2206352 - RNA, 19 nt, Artificial Sequence
  Description of Artificial Sequence: Synthetic oligonucleotide
aacuuuauaaugacugaag

SEQ ID NO: 2206353 - RNA, 19 nt, Artificial Sequence
  Description of Artificial Sequence: Synthetic oligonucleotide
auauauauauauaucuuug

SEQ ID NO: 2206354 - RNA, 19 nt, Artificial Sequence
  Description of Artificial Sequence: Synthetic oligonucleotide
ugauuuauauguacuuaug

SEQ ID NO: 2206355 - RNA, 19 nt, Artificial Sequence
  Description of Artificial Sequence: Synthetic oligonucleotide
caaugguuuauaaucuagg

SEQ ID NO: 2206356 - RNA, 19 nt, Artificial Sequence
  Description of Artificial Sequence: Synthetic oligonucleotide
auauagguacucuuaagga

SEQ ID NO: 2206357 - RNA, 19 nt, Artificial Sequence
  Description of Artificial Sequence: Synthetic oligonucleotide
auuuugugcacaugagagg

SEQ ID NO: 2206358 - RNA, 19 nt, Artificial Sequence
  Description of Artificial Sequence: Synthetic oligonucleotide
uuugggaugauguauuuua

SEQ ID NO: 2206359 - RNA, 19 nt, Artificial Sequence
  Description of Artificial Sequence: Synthetic oligonucleotide
ugguacaucucaauguuga

SEQ ID NO: 2206360 - RNA, 19 nt, Artificial Sequence
  Description of Artificial Sequence: Synthetic oligonucleotide
auguauuuuacuguuagca

SEQ ID NO: 2206361 - RNA, 19 nt, Artificial Sequence
  Description of Artificial Sequence: Synthetic oligonucleotide
uauaucuuuguuccagcug

SEQ ID NO: 2206362 - RNA, 19 nt, Artificial Sequence
  Description of Artificial Sequence: Synthetic oligonucleotide
gagagugucuuguuucucg

SEQ ID NO: 2206363 - RNA, 19 nt, Artificial Sequence
  Description of Artificial Sequence: Synthetic oligonucleotide
ucauuuugugcacaugaga

SEQ ID NO: 2206364 - RNA, 19 nt, Artificial Sequence
  Description of Artificial Sequence: Synthetic oligonucleotide
uuguuucucgugaauaucu

SEQ ID NO: 2206365 - RNA, 19 nt, Artificial Sequence
  Description of Artificial Sequence: Synthetic oligonucleotide
aguccuaacaacaucugac

SEQ ID NO: 2206366 - RNA, 19 nt, Artificial Sequence
  Description of Artificial Sequence: Synthetic oligonucleotide
auauauaucuuuguuccag

SEQ ID NO: 2206367 - RNA, 19 nt, Artificial Sequence
  Description of Artificial Sequence: Synthetic oligonucleotide
cucgugaauaucuuucucc

SEQ ID NO: 2206368 - RNA, 19 nt, Artificial Sequence
  Description of Artificial Sequence: Synthetic oligonucleotide
ucaagaacuuuauaaugac

SEQ ID NO: 2206369 - RNA, 19 nt, Artificial Sequence
  Description of Artificial Sequence: Synthetic oligonucleotide
uguacugacagcucauucu

SEQ ID NO: 2206370 - RNA, 19 nt, Artificial Sequence
  Description of Artificial Sequence: Synthetic oligonucleotide
acagauugaauuucuuuug

SEQ ID NO: 2206371 - RNA, 19 nt, Artificial Sequence
  Description of Artificial Sequence: Synthetic oligonucleotide
gugaauaucuuucuccagc

SEQ ID NO: 2206372 - RNA, 19 nt, Artificial Sequence
  Description of Artificial Sequence: Synthetic oligonucleotide
uuagcagaguacccgcugg

SEQ ID NO: 2206373 - RNA, 19 nt, Artificial Sequence
  Description of Artificial Sequence: Synthetic oligonucleotide
uuuguugcauacuuugacu

SEQ ID NO: 2206374 - RNA, 19 nt, Artificial Sequence
  Description of Artificial Sequence: Synthetic oligonucleotide
uacagauugaauuucuuuu

SEQ ID NO: 2206375 - RNA, 19 nt, Artificial Sequence
  Description of Artificial Sequence: Synthetic oligonucleotide
uguacuuaugugaacccac

SEQ ID NO: 2206376 - RNA, 19 nt, Artificial Sequence
  Description of Artificial Sequence: Synthetic oligonucleotide
uuguugauuuauauguacu

SEQ ID NO: 2206377 - RNA, 19 nt, Artificial Sequence
  Description of Artificial Sequence: Synthetic oligonucleotide
acguacaaguccuaacaac

SEQ ID NO: 2206378 - RNA, 19 nt, Artificial Sequence
  Description of Artificial Sequence: Synthetic oligonucleotide
auauauauauaucuuuguu

SEQ ID NO: 2206379 - RNA, 19 nt, Artificial Sequence
  Description of Artificial Sequence: Synthetic oligonucleotide
uaugagagugucuuguuuc

SEQ ID NO: 2206380 - RNA, 19 nt, Artificial Sequence
  Description of Artificial Sequence: Synthetic oligonucleotide
auauauagguacucuuaag

SEQ ID NO: 2206381 - RNA, 19 nt, Artificial Sequence
  Description of Artificial Sequence: Synthetic oligonucleotide
uaugugaacccacaauggu

SEQ ID NO: 2206382 - RNA, 19 nt, Artificial Sequence
  Description of Artificial Sequence: Synthetic oligonucleotide
uauagguacucuuaaggau

SEQ ID NO: 2206383 - RNA, 19 nt, Artificial Sequence
  Description of Artificial Sequence: Synthetic oligonucleotide
auauugcuaauguaagucu

SEQ ID NO: 2206384 - RNA, 19 nt, Artificial Sequence
  Description of Artificial Sequence: Synthetic oligonucleotide
ugggauaauggaaacuugu

SEQ ID NO: 2206385 - RNA, 19 nt, Artificial Sequence
  Description of Artificial Sequence: Synthetic oligonucleotide
auaagauuugggaugaugu

SEQ ID NO: 2206386 - RNA, 19 nt, Artificial Sequence
  Description of Artificial Sequence: Synthetic oligonucleotide
augguggucauuuugugca

SEQ ID NO: 2206387 - RNA, 19 nt, Artificial Sequence
  Description of Artificial Sequence: Synthetic oligonucleotide
uguacugauuuuauugguc

SEQ ID NO: 2206388 - RNA, 19 nt, Artificial Sequence
  Description of Artificial Sequence: Synthetic oligonucleotide
uuacuguuagcagaguacc

SEQ ID NO: 2206389 - RNA, 19 nt, Artificial Sequence
  Description of Artificial Sequence: Synthetic oligonucleotide
uuugguacaucucaauguu

SEQ ID NO: 2206390 - RNA, 19 nt, Artificial Sequence
  Description of Artificial Sequence: Synthetic oligonucleotide
uucuuuuguauuucaagaa

SEQ ID NO: 2206391 - RNA, 19 nt, Artificial Sequence
  Description of Artificial Sequence: Synthetic oligonucleotide
guauuuuacuguuagcaga

SEQ ID NO: 2206392 - RNA, 19 nt, Artificial Sequence
  Description of Artificial Sequence: Synthetic oligonucleotide
acuugugucauugcgcugg

SEQ ID NO: 2206393 - RNA, 19 nt, Artificial Sequence
  Description of Artificial Sequence: Synthetic oligonucleotide
gaaacuugugucauugcgc

SEQ ID NO: 2206394 - RNA, 19 nt, Artificial Sequence
  Description of Artificial Sequence: Synthetic oligonucleotide
uuuuacuguuagcagagua

SEQ ID NO: 2206395 - RNA, 19 nt, Artificial Sequence
  Description of Artificial Sequence: Synthetic oligonucleotide
ggaaacuugugucauugcg

SEQ ID NO: 2206396 - RNA, 19 nt, Artificial Sequence
  Description of Artificial Sequence: Synthetic oligonucleotide
cuuuugguacaucucaaug

SEQ ID NO: 2206397 - RNA, 19 nt, Artificial Sequence
  Description of Artificial Sequence: Synthetic oligonucleotide
ugugaacccacaaugguuu

SEQ ID NO: 2206398 - RNA, 19 nt, Artificial Sequence
  Description of Artificial Sequence: Synthetic oligonucleotide
gaacauguggugguggagg

SEQ ID NO: 2206399 - RNA, 19 nt, Artificial Sequence
  Description of Artificial Sequence: Synthetic oligonucleotide
cuauggacaagguggaaug

SEQ ID NO: 2206400 - RNA, 19 nt, Artificial Sequence
  Description of Artificial Sequence: Synthetic oligonucleotide
uuuucgugcaacagaaaau

SEQ ID NO: 2206401 - RNA, 19 nt, Artificial Sequence
  Description of Artificial Sequence: Synthetic oligonucleotide
ucgugaauaucuuucucca

SEQ ID NO: 2206402 - RNA, 19 nt, Artificial Sequence
  Description of Artificial Sequence: Synthetic oligonucleotide
gauguauuuuacuguuagc

SEQ ID NO: 2206403 - RNA, 19 nt, Artificial Sequence
  Description of Artificial Sequence: Synthetic oligonucleotide
uuacuauggacaaggugga

SEQ ID NO: 2206404 - RNA, 19 nt, Artificial Sequence
  Description of Artificial Sequence: Synthetic oligonucleotide
agaaguccugauucgguuc

SEQ ID NO: 2206405 - RNA, 19 nt, Artificial Sequence
  Description of Artificial Sequence: Synthetic oligonucleotide
ugauauugcuaauguaagu

SEQ ID NO: 2206406 - RNA, 19 nt, Artificial Sequence
  Description of Artificial Sequence: Synthetic oligonucleotide
aagauuugggaugauguau

SEQ ID NO: 2206407 - RNA, 19 nt, Artificial Sequence
  Description of Artificial Sequence: Synthetic oligonucleotide
caagcugucuucagaaccc

SEQ ID NO: 2206408 - RNA, 19 nt, Artificial Sequence
  Description of Artificial Sequence: Synthetic oligonucleotide
uucauaagauuugggauga

SEQ ID NO: 2206409 - RNA, 19 nt, Artificial Sequence
  Description of Artificial Sequence: Synthetic oligonucleotide
uguugauuuauauguacuu

SEQ ID NO: 2206410 - RNA, 19 nt, Artificial Sequence
  Description of Artificial Sequence: Synthetic oligonucleotide
agaacuuuauaaugacuga

SEQ ID NO: 2206411 - RNA, 19 nt, Artificial Sequence
  Description of Artificial Sequence: Synthetic oligonucleotide
ugagagggcugccuuuucg

SEQ ID NO: 2206412 - RNA, 19 nt, Artificial Sequence
  Description of Artificial Sequence: Synthetic oligonucleotide
ugaugggaaaaucuguuuu

SEQ ID NO: 2206413 - RNA, 19 nt, Artificial Sequence
  Description of Artificial Sequence: Synthetic oligonucleotide
uggucuuuucuuccaggcg

SEQ ID NO: 2206414 - RNA, 19 nt, Artificial Sequence
  Description of Artificial Sequence: Synthetic oligonucleotide
aaguccuaacaacaucuga

SEQ ID NO: 2206415 - RNA, 19 nt, Artificial Sequence
  Description of Artificial Sequence: Synthetic oligonucleotide
uauuggucuuuucuuccag

SEQ ID NO: 2206416 - RNA, 19 nt, Artificial Sequence
  Description of Artificial Sequence: Synthetic oligonucleotide
accacuuccuccaacguac

SEQ ID NO: 2206417 - RNA, 19 nt, Artificial Sequence
  Description of Artificial Sequence: Synthetic oligonucleotide
gcuguacugauuuuauugg

SEQ ID NO: 2206418 - RNA, 19 nt, Artificial Sequence
  Description of Artificial Sequence: Synthetic oligonucleotide
uuuauuuguugcauacuuu

SEQ ID NO: 2206419 - RNA, 19 nt, Artificial Sequence
  Description of Artificial Sequence: Synthetic oligonucleotide
agugucuuguuucucguga

SEQ ID NO: 2206420 - RNA, 19 nt, Artificial Sequence
  Description of Artificial Sequence: Synthetic oligonucleotide
agcacccacaucuauauau

SEQ ID NO: 2206421 - RNA, 19 nt, Artificial Sequence
  Description of Artificial Sequence: Synthetic oligonucleotide
aagaacaugugguggugga

SEQ ID NO: 2206422 - RNA, 19 nt, Artificial Sequence
  Description of Artificial Sequence: Synthetic oligonucleotide
aacagauugugaugggaaa

SEQ ID NO: 2206423 - RNA, 19 nt, Artificial Sequence
  Description of Artificial Sequence: Synthetic oligonucleotide
augauauugcuaauguaag

SEQ ID NO: 2206424 - RNA, 19 nt, Artificial Sequence
  Description of Artificial Sequence: Synthetic oligonucleotide
aacguacaaguccuaacaa

SEQ ID NO: 2206425 - RNA, 19 nt, Artificial Sequence
  Description of Artificial Sequence: Synthetic oligonucleotide
ggcuguacugauuuuauug

SEQ ID NO: 2206426 - RNA, 19 nt, Artificial Sequence
  Description of Artificial Sequence: Synthetic oligonucleotide
auugugaugggaaaaucug

SEQ ID NO: 2206427 - RNA, 19 nt, Artificial Sequence
  Description of Artificial Sequence: Synthetic oligonucleotide
ugauucgguucccagcacc

SEQ ID NO: 2206428 - RNA, 19 nt, Artificial Sequence
  Description of Artificial Sequence: Synthetic oligonucleotide
acaaguccuaacaacaucu

SEQ ID NO: 2206429 - RNA, 19 nt, Artificial Sequence
  Description of Artificial Sequence: Synthetic oligonucleotide
uauauguacuuaugugaac

SEQ ID NO: 2206430 - RNA, 19 nt, Artificial Sequence
  Description of Artificial Sequence: Synthetic oligonucleotide
cuaacaacaucugacuuuc

SEQ ID NO: 2206431 - RNA, 19 nt, Artificial Sequence
  Description of Artificial Sequence: Synthetic oligonucleotide
uauugcuaauguaagucuu

SEQ ID NO: 2206432 - RNA, 19 nt, Artificial Sequence
  Description of Artificial Sequence: Synthetic oligonucleotide
cuauauauauauauauaua

SEQ ID NO: 2206433 - RNA, 19 nt, Artificial Sequence
  Description of Artificial Sequence: Synthetic oligonucleotide
ucuuguuucucgugaauau

SEQ ID NO: 2206434 - RNA, 19 nt, Artificial Sequence
  Description of Artificial Sequence: Synthetic oligonucleotide
acaucucaauguugauugc

SEQ ID NO: 2206435 - RNA, 19 nt, Artificial Sequence
  Description of Artificial Sequence: Synthetic oligonucleotide
uaaucuaggcaugggagga

SEQ ID NO: 2206436 - RNA, 19 nt, Artificial Sequence
  Description of Artificial Sequence: Synthetic oligonucleotide
gauugaauuucuuuuguau

SEQ ID NO: 2206437 - RNA, 19 nt, Artificial Sequence
  Description of Artificial Sequence: Synthetic oligonucleotide
acaaugguuuauaaucuag

SEQ ID NO: 2206438 - RNA, 19 nt, Artificial Sequence
  Description of Artificial Sequence: Synthetic oligonucleotide
ucgugcaacagaaaaugau

SEQ ID NO: 2206439 - RNA, 19 nt, Artificial Sequence
  Description of Artificial Sequence: Synthetic oligonucleotide
caugcuucaugccaacuug

SEQ ID NO: 2206440 - RNA, 19 nt, Artificial Sequence
  Description of Artificial Sequence: Synthetic oligonucleotide
aagguggaaugaguggagg

SEQ ID NO: 2206441 - RNA, 19 nt, Artificial Sequence
  Description of Artificial Sequence: Synthetic oligonucleotide
ugugucauugcgcuggcuu

SEQ ID NO: 2206442 - RNA, 19 nt, Artificial Sequence
  Description of Artificial Sequence: Synthetic oligonucleotide
gauggcgugggauguacug

SEQ ID NO: 2206443 - RNA, 19 nt, Artificial Sequence
  Description of Artificial Sequence: Synthetic oligonucleotide
uacugagaccacuuccucc

SEQ ID NO: 2206444 - RNA, 19 nt, Artificial Sequence
  Description of Artificial Sequence: Synthetic oligonucleotide
acuuaugugaacccacaau

SEQ ID NO: 2206445 - RNA, 19 nt, Artificial Sequence
  Description of Artificial Sequence: Synthetic oligonucleotide
auauauauauauauauaua

SEQ ID NO: 2206446 - RNA, 19 nt, Artificial Sequence
  Description of Artificial Sequence: Synthetic oligonucleotide
aagcucaaucucaugcuuc

SEQ ID NO: 2206447 - RNA, 19 nt, Artificial Sequence
  Description of Artificial Sequence: Synthetic oligonucleotide
uggcuuguugauuuauaug

SEQ ID NO: 2206448 - RNA, 19 nt, Artificial Sequence
  Description of Artificial Sequence: Synthetic oligonucleotide
uuguugcauacuuugacuu

SEQ ID NO: 2206449 - RNA, 19 nt, Artificial Sequence
  Description of Artificial Sequence: Synthetic oligonucleotide
ugcaaguucagguuuccau

SEQ ID NO: 2206450 - RNA, 19 nt, Artificial Sequence
  Description of Artificial Sequence: Synthetic oligonucleotide
guagguuuuauuuguugca

SEQ ID NO: 2206451 - RNA, 19 nt, Artificial Sequence
  Description of Artificial Sequence: Synthetic oligonucleotide
auauauauauauauaucuu

SEQ ID NO: 2206452 - RNA, 19 nt, Artificial Sequence
  Description of Artificial Sequence: Synthetic oligonucleotide
uucagaacccugcagcuuu

SEQ ID NO: 2206453 - RNA, 19 nt, Artificial Sequence
  Description of Artificial Sequence: Synthetic oligonucleotide
gaaugaguggagguggaug

SEQ ID NO: 2206454 - RNA, 19 nt, Artificial Sequence
  Description of Artificial Sequence: Synthetic oligonucleotide
uaagauuugggaugaugua

SEQ ID NO: 2206455 - RNA, 19 nt, Artificial Sequence
  Description of Artificial Sequence: Synthetic oligonucleotide
auggaaacuugugucauug

SEQ ID NO: 2206456 - RNA, 19 nt, Artificial Sequence
  Description of Artificial Sequence: Synthetic oligonucleotide
aguucagguuuccauggug

SEQ ID NO: 2206457 - RNA, 19 nt, Artificial Sequence
  Description of Artificial Sequence: Synthetic oligonucleotide
uggacaagguggaaugagu

SEQ ID NO: 2206458 - RNA, 19 nt, Artificial Sequence
  Description of Artificial Sequence: Synthetic oligonucleotide
uagguacucuuaaggaugu

SEQ ID NO: 2206459 - RNA, 19 nt, Artificial Sequence
  Description of Artificial Sequence: Synthetic oligonucleotide
aaucuaggcaugggaggac

SEQ ID NO: 2206460 - RNA, 19 nt, Artificial Sequence
  Description of Artificial Sequence: Synthetic oligonucleotide
caucuauauauauauauau

SEQ ID NO: 2206461 - RNA, 19 nt, Artificial Sequence
  Description of Artificial Sequence: Synthetic oligonucleotide
uucgugcaacagaaaauga

SEQ ID NO: 2206462 - RNA, 19 nt, Artificial Sequence
  Description of Artificial Sequence: Synthetic oligonucleotide
uaaugacugaaggaaugug

SEQ ID NO: 2206463 - RNA, 19 nt, Artificial Sequence
  Description of Artificial Sequence: Synthetic oligonucleotide
auaucuuucuccagcaacu

SEQ ID NO: 2206464 - RNA, 19 nt, Artificial Sequence
  Description of Artificial Sequence: Synthetic oligonucleotide
auaaugacugaaggaaugu

SEQ ID NO: 2206465 - RNA, 19 nt, Artificial Sequence
  Description of Artificial Sequence: Synthetic oligonucleotide
ugggaaaaucuguuuucug

SEQ ID NO: 2206466 - RNA, 19 nt, Artificial Sequence
  Description of Artificial Sequence: Synthetic oligonucleotide
cauaagauuugggaugaug

SEQ ID NO: 2206467 - RNA, 19 nt, Artificial Sequence
  Description of Artificial Sequence: Synthetic oligonucleotide
cuguuagcagaguacccgc

SEQ ID NO: 2206468 - RNA, 19 nt, Artificial Sequence
  Description of Artificial Sequence: Synthetic oligonucleotide
caacguacaaguccuaaca

SEQ ID NO: 2206469 - RNA, 19 nt, Artificial Sequence
  Description of Artificial Sequence: Synthetic oligonucleotide
agauugugaugggaaaauc

SEQ ID NO: 2206470 - RNA, 19 nt, Artificial Sequence
  Description of Artificial Sequence: Synthetic oligonucleotide
ugaugcaaguucagguuuc

SEQ ID NO: 2206471 - RNA, 19 nt, Artificial Sequence
  Description of Artificial Sequence: Synthetic oligonucleotide
gaacuuuauaaugacugaa

SEQ ID NO: 2206472 - RNA, 19 nt, Artificial Sequence
  Description of Artificial Sequence: Synthetic oligonucleotide
guugccgaaggccuaugag

SEQ ID NO: 2206473 - RNA, 19 nt, Artificial Sequence
  Description of Artificial Sequence: Synthetic oligonucleotide
uccugauucgguucccagc

SEQ ID NO: 2206474 - RNA, 19 nt, Artificial Sequence
  Description of Artificial Sequence: Synthetic oligonucleotide
augugcugccuucauaaga

SEQ ID NO: 2206475 - RNA, 19 nt, Artificial Sequence
  Description of Artificial Sequence: Synthetic oligonucleotide
cacaucuauauauauauau

SEQ ID NO: 2206476 - RNA, 19 nt, Artificial Sequence
  Description of Artificial Sequence: Synthetic oligonucleotide
uacuuaugugaacccacaa

SEQ ID NO: 2206477 - RNA, 19 nt, Artificial Sequence
  Description of Artificial Sequence: Synthetic oligonucleotide
gauguacugagaccacuuc

SEQ ID NO: 2206478 - RNA, 19 nt, Artificial Sequence
  Description of Artificial Sequence: Synthetic oligonucleotide
uccuaacaacaucugacuu

SEQ ID NO: 2206479 - RNA, 19 nt, Artificial Sequence
  Description of Artificial Sequence: Synthetic oligonucleotide
augagagugucuuguuucu

SEQ ID NO: 2206480 - RNA, 19 nt, Artificial Sequence
  Description of Artificial Sequence: Synthetic oligonucleotide
gaugugcugccuucauaag

SEQ ID NO: 2206481 - RNA, 19 nt, Artificial Sequence
  Description of Artificial Sequence: Synthetic oligonucleotide
agcaacagauugugauggg

SEQ ID NO: 2206482 - RNA, 19 nt, Artificial Sequence
  Description of Artificial Sequence: Synthetic oligonucleotide
uggcgugggauguacugag

SEQ ID NO: 2206483 - RNA, 19 nt, Artificial Sequence
  Description of Artificial Sequence: Synthetic oligonucleotide
agauugaauuucuuuugua

SEQ ID NO: 2206484 - RNA, 19 nt, Artificial Sequence
  Description of Artificial Sequence: Synthetic oligonucleotide
gguuacuauggacaaggug

SEQ ID NO: 2206485 - RNA, 19 nt, Artificial Sequence
  Description of Artificial Sequence: Synthetic oligonucleotide
guuagcagaguacccgcug

SEQ ID NO: 2206486 - RNA, 19 nt, Artificial Sequence
  Description of Artificial Sequence: Synthetic oligonucleotide
uguuagcagaguacccgcu

SEQ ID NO: 2206487 - RNA, 19 nt, Artificial Sequence
  Description of Artificial Sequence: Synthetic oligonucleotide
gauugugaugggaaaaucu

SEQ ID NO: 2206488 - RNA, 19 nt, Artificial Sequence
  Description of Artificial Sequence: Synthetic oligonucleotide
uguugcauacuuugacuua

SEQ ID NO: 2206489 - RNA, 19 nt, Artificial Sequence
  Description of Artificial Sequence: Synthetic oligonucleotide
aucuauauauauauauaua

SEQ ID NO: 2206490 - RNA, 19 nt, Artificial Sequence
  Description of Artificial Sequence: Synthetic oligonucleotide
caagguggaaugaguggag

SEQ ID NO: 2206491 - RNA, 19 nt, Artificial Sequence
  Description of Artificial Sequence: Synthetic oligonucleotide
guacugauuuuauuggucu

SEQ ID NO: 2206492 - RNA, 19 nt, Artificial Sequence
  Description of Artificial Sequence: Synthetic oligonucleotide
gauucgguucccagcaccc

SEQ ID NO: 2206493 - RNA, 19 nt, Artificial Sequence
  Description of Artificial Sequence: Synthetic oligonucleotide
ggucuuuucuuccaggcga

SEQ ID NO: 2206494 - RNA, 19 nt, Artificial Sequence
  Description of Artificial Sequence: Synthetic oligonucleotide
acaucuauauauauauaua

SEQ ID NO: 2206495 - RNA, 19 nt, Artificial Sequence
  Description of Artificial Sequence: Synthetic oligonucleotide
caagaacaugugguggugg

SEQ ID NO: 2206496 - RNA, 19 nt, Artificial Sequence
  Description of Artificial Sequence: Synthetic oligonucleotide
uagguuuuauuuguugcau

SEQ ID NO: 2206497 - RNA, 19 nt, Artificial Sequence
  Description of Artificial Sequence: Synthetic oligonucleotide
uugugcacaugagagggcu

SEQ ID NO: 2206498 - RNA, 19 nt, Artificial Sequence
  Description of Artificial Sequence: Synthetic oligonucleotide
gucauuuugugcacaugag

SEQ ID NO: 2206499 - RNA, 19 nt, Artificial Sequence
  Description of Artificial Sequence: Synthetic oligonucleotide
uauugaaaccacugauguu

SEQ ID NO: 2206500 - RNA, 19 nt, Artificial Sequence
  Description of Artificial Sequence: Synthetic oligonucleotide
acuauggacaagguggaau

SEQ ID NO: 2206501 - RNA, 19 nt, Artificial Sequence
  Description of Artificial Sequence: Synthetic oligonucleotide
ugaugggauaauggaaacu

SEQ ID NO: 2206502 - RNA, 19 nt, Artificial Sequence
  Description of Artificial Sequence: Synthetic oligonucleotide
gguacucuuaaggaugugc

SEQ ID NO: 2206503 - RNA, 19 nt, Artificial Sequence
  Description of Artificial Sequence: Synthetic oligonucleotide
uggaaacuugugucauugc

SEQ ID NO: 2206504 - RNA, 19 nt, Artificial Sequence
  Description of Artificial Sequence: Synthetic oligonucleotide
ugcgcuggcuuguugauuu

SEQ ID NO: 2206505 - RNA, 19 nt, Artificial Sequence
  Description of Artificial Sequence: Synthetic oligonucleotide
agagugucuuguuucucgu

SEQ ID NO: 2206506 - RNA, 19 nt, Artificial Sequence
  Description of Artificial Sequence: Synthetic oligonucleotide
caaguccuaacaacaucug

SEQ ID NO: 2206507 - RNA, 19 nt, Artificial Sequence
  Description of Artificial Sequence: Synthetic oligonucleotide
uggugguuacuauggacaa

SEQ ID NO: 2206508 - RNA, 19 nt, Artificial Sequence
  Description of Artificial Sequence: Synthetic oligonucleotide
uccaggcgagcaaugauuu

SEQ ID NO: 2206509 - RNA, 19 nt, Artificial Sequence
  Description of Artificial Sequence: Synthetic oligonucleotide
cugccuucauaagauuugg

SEQ ID NO: 2206510 - RNA, 19 nt, Artificial Sequence
  Description of Artificial Sequence: Synthetic oligonucleotide
ucugacuuucuuacagauu

SEQ ID NO: 2206511 - RNA, 19 nt, Artificial Sequence
  Description of Artificial Sequence: Synthetic oligonucleotide
aaguccugauucgguuccc

SEQ ID NO: 2206512 - RNA, 19 nt, Artificial Sequence
  Description of Artificial Sequence: Synthetic oligonucleotide
augggaaaaucuguuuucu

SEQ ID NO: 2206513 - RNA, 19 nt, Artificial Sequence
  Description of Artificial Sequence: Synthetic oligonucleotide
uucgguucccagcacccac

SEQ ID NO: 2206514 - RNA, 19 nt, Artificial Sequence
  Description of Artificial Sequence: Synthetic oligonucleotide
uguuucucgugaauaucuu

SEQ ID NO: 2206515 - RNA, 19 nt, Artificial Sequence
  Description of Artificial Sequence: Synthetic oligonucleotide
gaugggauaauggaaacuu

SEQ ID NO: 2206516 - RNA, 19 nt, Artificial Sequence
  Description of Artificial Sequence: Synthetic oligonucleotide
caauguugauugcuuugac

SEQ ID NO: 2206517 - RNA, 19 nt, Artificial Sequence
  Description of Artificial Sequence: Synthetic oligonucleotide
gaugcaaguucagguuucc

SEQ ID NO: 2206518 - RNA, 19 nt, Artificial Sequence
  Description of Artificial Sequence: Synthetic oligonucleotide
cuggugaugcaaguucagg

SEQ ID NO: 2206519 - RNA, 19 nt, Artificial Sequence
  Description of Artificial Sequence: Synthetic oligonucleotide
agguggaaugaguggaggu

SEQ ID NO: 2206520 - RNA, 19 nt, Artificial Sequence
  Description of Artificial Sequence: Synthetic oligonucleotide
agguggauggcgugggaug

SEQ ID NO: 2206521 - RNA, 19 nt, Artificial Sequence
  Description of Artificial Sequence: Synthetic oligonucleotide
caacagauugugaugggaa

SEQ ID NO: 2206522 - RNA, 19 nt, Artificial Sequence
  Description of Artificial Sequence: Synthetic oligonucleotide
gugucauugcgcuggcuug

SEQ ID NO: 2206523 - RNA, 19 nt, Artificial Sequence
  Description of Artificial Sequence: Synthetic oligonucleotide
caacuuugaugggauaaug

SEQ ID NO: 2206524 - RNA, 19 nt, Artificial Sequence
  Description of Artificial Sequence: Synthetic oligonucleotide
ggaugugcugccuucauaa

SEQ ID NO: 2206525 - RNA, 19 nt, Artificial Sequence
  Description of Artificial Sequence: Synthetic oligonucleotide
auguacuuaugugaaccca

SEQ ID NO: 2206526 - RNA, 19 nt, Artificial Sequence
  Description of Artificial Sequence: Synthetic oligonucleotide
ugugcacaugagagggcug

SEQ ID NO: 2206527 - RNA, 19 nt, Artificial Sequence
  Description of Artificial Sequence: Synthetic oligonucleotide
gaaaccacugauguugcua

SEQ ID NO: 2206528 - RNA, 19 nt, Artificial Sequence
  Description of Artificial Sequence: Synthetic oligonucleotide
acagauugugaugggaaaa

SEQ ID NO: 2206529 - RNA, 19 nt, Artificial Sequence
  Description of Artificial Sequence: Synthetic oligonucleotide
gagugucuuguuucucgug

SEQ ID NO: 2206530 - RNA, 19 nt, Artificial Sequence
  Description of Artificial Sequence: Synthetic oligonucleotide
cauugcgcuggcuuguuga

SEQ ID NO: 2206531 - RNA, 19 nt, Artificial Sequence
  Description of Artificial Sequence: Synthetic oligonucleotide
uaaggaugugcugccuuca

SEQ ID NO: 2206532 - RNA, 19 nt, Artificial Sequence
  Description of Artificial Sequence: Synthetic oligonucleotide
aaggaugugcugccuucau

SEQ ID NO: 2206533 - RNA, 19 nt, Artificial Sequence
  Description of Artificial Sequence: Synthetic oligonucleotide
acaagaacaugugguggug

SEQ ID NO: 2206534 - RNA, 19 nt, Artificial Sequence
  Description of Artificial Sequence: Synthetic oligonucleotide
ggauaauggaaacuugugu

SEQ ID NO: 2206535 - RNA, 19 nt, Artificial Sequence
  Description of Artificial Sequence: Synthetic oligonucleotide
uacugauuuuauuggucuu

SEQ ID NO: 2206536 - RNA, 19 nt, Artificial Sequence
  Description of Artificial Sequence: Synthetic oligonucleotide
agguuuuauuuguugcaua

SEQ ID NO: 2206537 - RNA, 19 nt, Artificial Sequence
  Description of Artificial Sequence: Synthetic oligonucleotide
ugguuacuauggacaaggu

SEQ ID NO: 2206538 - RNA, 19 nt, Artificial Sequence
  Description of Artificial Sequence: Synthetic oligonucleotide
ugcuucaugccaacuugua

SEQ ID NO: 2206539 - RNA, 19 nt, Artificial Sequence
  Description of Artificial Sequence: Synthetic oligonucleotide
uacccgcuggucuugcaga

SEQ ID NO: 2206540 - RNA, 19 nt, Artificial Sequence
  Description of Artificial Sequence: Synthetic oligonucleotide
guacccgcuggucuugcag

SEQ ID NO: 2206541 - RNA, 19 nt, Artificial Sequence
  Description of Artificial Sequence: Synthetic oligonucleotide
gacuuucuuacagauugaa

SEQ ID NO: 2206542 - RNA, 19 nt, Artificial Sequence
  Description of Artificial Sequence: Synthetic oligonucleotide
acccacaaugguuuauaau

SEQ ID NO: 2206543 - RNA, 19 nt, Artificial Sequence
  Description of Artificial Sequence: Synthetic oligonucleotide
agauuugggaugauguauu

SEQ ID NO: 2206544 - RNA, 19 nt, Artificial Sequence
  Description of Artificial Sequence: Synthetic oligonucleotide
gggaaaaucuguuuucugu

SEQ ID NO: 2206545 - RNA, 19 nt, Artificial Sequence
  Description of Artificial Sequence: Synthetic oligonucleotide
ucauugcgcuggcuuguug

SEQ ID NO: 2206546 - RNA, 19 nt, Artificial Sequence
  Description of Artificial Sequence: Synthetic oligonucleotide
uccaacguacaaguccuaa

SEQ ID NO: 2206547 - RNA, 19 nt, Artificial Sequence
  Description of Artificial Sequence: Synthetic oligonucleotide
ggacaagguggaaugagug

SEQ ID NO: 2206548 - RNA, 19 nt, Artificial Sequence
  Description of Artificial Sequence: Synthetic oligonucleotide
ucgguucccagcacccaca

SEQ ID NO: 2206549 - RNA, 19 nt, Artificial Sequence
  Description of Artificial Sequence: Synthetic oligonucleotide
uagcagaguacccgcuggu

SEQ ID NO: 2206550 - RNA, 19 nt, Artificial Sequence
  Description of Artificial Sequence: Synthetic oligonucleotide
gggauaauggaaacuugug

SEQ ID NO: 2206551 - RNA, 19 nt, Artificial Sequence
  Description of Artificial Sequence: Synthetic oligonucleotide
caucugacuuucuuacaga

SEQ ID NO: 2206552 - RNA, 19 nt, Artificial Sequence
  Description of Artificial Sequence: Synthetic oligonucleotide
gugcacaugagagggcugc

SEQ ID NO: 2206553 - RNA, 19 nt, Artificial Sequence
  Description of Artificial Sequence: Synthetic oligonucleotide
ggaauguguuuucaaaaua

SEQ ID NO: 2206554 - RNA, 19 nt, Artificial Sequence
  Description of Artificial Sequence: Synthetic oligonucleotide
aggccuaugagagugucuu

SEQ ID NO: 2206555 - RNA, 19 nt, Artificial Sequence
  Description of Artificial Sequence: Synthetic oligonucleotide
agcagaguacccgcugguc

SEQ ID NO: 2206556 - RNA, 19 nt, Artificial Sequence
  Description of Artificial Sequence: Synthetic oligonucleotide
cguacaaguccuaacaaca

SEQ ID NO: 2206557 - RNA, 19 nt, Artificial Sequence
  Description of Artificial Sequence: Synthetic oligonucleotide
guccuaacaacaucugacu

SEQ ID NO: 2206558 - RNA, 19 nt, Artificial Sequence
  Description of Artificial Sequence: Synthetic oligonucleotide
ugggauguacugagaccac

SEQ ID NO: 2206559 - RNA, 19 nt, Artificial Sequence
  Description of Artificial Sequence: Synthetic oligonucleotide
caggcgagcaaugauuuca

SEQ ID NO: 2206560 - RNA, 19 nt, Artificial Sequence
  Description of Artificial Sequence: Synthetic oligonucleotide
ucuaggcaugggaggacau

SEQ ID NO: 2206561 - RNA, 19 nt, Artificial Sequence
  Description of Artificial Sequence: Synthetic oligonucleotide
agaccacuuccuccaacgu

SEQ ID NO: 2206562 - RNA, 19 nt, Artificial Sequence
  Description of Artificial Sequence: Synthetic oligonucleotide
aagcugucuucagaacccu

SEQ ID NO: 2206563 - RNA, 19 nt, Artificial Sequence
  Description of Artificial Sequence: Synthetic oligonucleotide
guacuuaugugaacccaca

SEQ ID NO: 2206564 - RNA, 19 nt, Artificial Sequence
  Description of Artificial Sequence: Synthetic oligonucleotide
gacugaaggaauguguuuu

SEQ ID NO: 2206565 - RNA, 19 nt, Artificial Sequence
  Description of Artificial Sequence: Synthetic oligonucleotide
ugguggucauuuugugcac

SEQ ID NO: 2206566 - RNA, 19 nt, Artificial Sequence
  Description of Artificial Sequence: Synthetic oligonucleotide
guacugagaccacuuccuc

SEQ ID NO: 2206567 - RNA, 19 nt, Artificial Sequence
  Description of Artificial Sequence: Synthetic oligonucleotide
augugaacccacaaugguu

SEQ ID NO: 2206568 - RNA, 19 nt, Artificial Sequence
  Description of Artificial Sequence: Synthetic oligonucleotide
guacucuuaaggaugugcu

SEQ ID NO: 2206569 - RNA, 19 nt, Artificial Sequence
  Description of Artificial Sequence: Synthetic oligonucleotide
gaaggccuaugagaguguc

SEQ ID NO: 2206570 - RNA, 19 nt, Artificial Sequence
  Description of Artificial Sequence: Synthetic oligonucleotide
aucucaauguugauugcuu

SEQ ID NO: 2206571 - RNA, 19 nt, Artificial Sequence
  Description of Artificial Sequence: Synthetic oligonucleotide
ugaacccacaaugguuuau

SEQ ID NO: 2206572 - RNA, 19 nt, Artificial Sequence
  Description of Artificial Sequence: Synthetic oligonucleotide
auuuuacuguuagcagagu

SEQ ID NO: 2206573 - RNA, 19 nt, Artificial Sequence
  Description of Artificial Sequence: Synthetic oligonucleotide
auuugggaugauguauuuu

SEQ ID NO: 2206574 - RNA, 19 nt, Artificial Sequence
  Description of Artificial Sequence: Synthetic oligonucleotide
aaggccuaugagagugucu

SEQ ID NO: 2206575 - RNA, 19 nt, Artificial Sequence
  Description of Artificial Sequence: Synthetic oligonucleotide
ugagagugucuuguuucuc

SEQ ID NO: 2206576 - RNA, 19 nt, Artificial Sequence
  Description of Artificial Sequence: Synthetic oligonucleotide
uggauggcgugggauguac

SEQ ID NO: 2206577 - RNA, 19 nt, Artificial Sequence
  Description of Artificial Sequence: Synthetic oligonucleotide
cagauugaauuucuuuugu

SEQ ID NO: 2206578 - RNA, 19 nt, Artificial Sequence
  Description of Artificial Sequence: Synthetic oligonucleotide
ccaacguacaaguccuaac

SEQ ID NO: 2206579 - RNA, 19 nt, Artificial Sequence
  Description of Artificial Sequence: Synthetic oligonucleotide
gaacccacaaugguuuaua

SEQ ID NO: 2206580 - RNA, 19 nt, Artificial Sequence
  Description of Artificial Sequence: Synthetic oligonucleotide
acaugagagggcugccuuu

SEQ ID NO: 2206581 - RNA, 19 nt, Artificial Sequence
  Description of Artificial Sequence: Synthetic oligonucleotide
uuuguuccagcugccucau

SEQ ID NO: 2206582 - RNA, 19 nt, Artificial Sequence
  Description of Artificial Sequence: Synthetic oligonucleotide
agcugccucauggcuguac

SEQ ID NO: 2206583 - RNA, 19 nt, Artificial Sequence
  Description of Artificial Sequence: Synthetic oligonucleotide
auggcgugggauguacuga

SEQ ID NO: 2206584 - RNA, 19 nt, Artificial Sequence
  Description of Artificial Sequence: Synthetic oligonucleotide
cuguacugauuuuauuggu

SEQ ID NO: 2206585 - RNA, 19 nt, Artificial Sequence
  Description of Artificial Sequence: Synthetic oligonucleotide
ccugauucgguucccagca

SEQ ID NO: 2206586 - RNA, 19 nt, Artificial Sequence
  Description of Artificial Sequence: Synthetic oligonucleotide
gccaacuuguacugacagc

SEQ ID NO: 2206587 - RNA, 19 nt, Artificial Sequence
  Description of Artificial Sequence: Synthetic oligonucleotide
cugaaggaauguguuuuca

SEQ ID NO: 2206588 - RNA, 19 nt, Artificial Sequence
  Description of Artificial Sequence: Synthetic oligonucleotide
auggcuguacugauuuuau

SEQ ID NO: 2206589 - RNA, 19 nt, Artificial Sequence
  Description of Artificial Sequence: Synthetic oligonucleotide
gagagggcugccuuuucgu

SEQ ID NO: 2206590 - RNA, 19 nt, Artificial Sequence
  Description of Artificial Sequence: Synthetic oligonucleotide
gauuugggaugauguauuu

SEQ ID NO: 2206591 - RNA, 19 nt, Artificial Sequence
  Description of Artificial Sequence: Synthetic oligonucleotide
gcgugggauguacugagac

SEQ ID NO: 2206592 - RNA, 19 nt, Artificial Sequence
  Description of Artificial Sequence: Synthetic oligonucleotide
cauggcuguacugauuuua

SEQ ID NO: 2206593 - RNA, 19 nt, Artificial Sequence
  Description of Artificial Sequence: Synthetic oligonucleotide
uggcuguacugauuuuauu

SEQ ID NO: 2206594 - RNA, 19 nt, Artificial Sequence
  Description of Artificial Sequence: Synthetic oligonucleotide
accacugauguugcuacuu

SEQ ID NO: 2206595 - RNA, 19 nt, Artificial Sequence
  Description of Artificial Sequence: Synthetic oligonucleotide
acuuguacugacagcucau

SEQ ID NO: 2206596 - RNA, 19 nt, Artificial Sequence
  Description of Artificial Sequence: Synthetic oligonucleotide
cucauggcuguacugauuu

SEQ ID NO: 2206597 - RNA, 19 nt, Artificial Sequence
  Description of Artificial Sequence: Synthetic oligonucleotide
cugccucauggcuguacug

SEQ ID NO: 2206598 - RNA, 19 nt, Artificial Sequence
  Description of Artificial Sequence: Synthetic oligonucleotide
ucagaacccugcagcuuuu

SEQ ID NO: 2206599 - RNA, 19 nt, Artificial Sequence
  Description of Artificial Sequence: Synthetic oligonucleotide
cugauucgguucccagcac

SEQ ID NO: 2206600 - RNA, 19 nt, Artificial Sequence
  Description of Artificial Sequence: Synthetic oligonucleotide
agaguacccgcuggucuug

SEQ ID NO: 2206601 - RNA, 19 nt, Artificial Sequence
  Description of Artificial Sequence: Synthetic oligonucleotide
ggugguuacuauggacaag

SEQ ID NO: 2206602 - RNA, 19 nt, Artificial Sequence
  Description of Artificial Sequence: Synthetic oligonucleotide
acccacaucuauauauaua

SEQ ID NO: 2206603 - RNA, 19 nt, Artificial Sequence
  Description of Artificial Sequence: Synthetic oligonucleotide
uacuauggacaagguggaa

SEQ ID NO: 2206604 - RNA, 19 nt, Artificial Sequence
  Description of Artificial Sequence: Synthetic oligonucleotide
augauguauuuuacuguua

SEQ ID NO: 2206605 - RNA, 19 nt, Artificial Sequence
  Description of Artificial Sequence: Synthetic oligonucleotide
ucauggcuguacugauuuu

SEQ ID NO: 2206606 - RNA, 19 nt, Artificial Sequence
  Description of Artificial Sequence: Synthetic oligonucleotide
cgugggauguacugagacc

SEQ ID NO: 2206607 - RNA, 19 nt, Artificial Sequence
  Description of Artificial Sequence: Synthetic oligonucleotide
aguccugauucgguuccca

SEQ ID NO: 2206608 - RNA, 19 nt, Artificial Sequence
  Description of Artificial Sequence: Synthetic oligonucleotide
caucucaauguugauugcu

SEQ ID NO: 2206609 - RNA, 19 nt, Artificial Sequence
  Description of Artificial Sequence: Synthetic oligonucleotide
cgugaauaucuuucuccag

SEQ ID NO: 2206610 - RNA, 19 nt, Artificial Sequence
  Description of Artificial Sequence: Synthetic oligonucleotide
ggugaugcaaguucagguu

SEQ ID NO: 2206611 - RNA, 19 nt, Artificial Sequence
  Description of Artificial Sequence: Synthetic oligonucleotide
augccaacuuguacugaca

SEQ ID NO: 2206612 - RNA, 19 nt, Artificial Sequence
  Description of Artificial Sequence: Synthetic oligonucleotide
ccaugguggucauuuugug

SEQ ID NO: 2206613 - RNA, 19 nt, Artificial Sequence
  Description of Artificial Sequence: Synthetic oligonucleotide
gccuuuucgugcaacagaa

SEQ ID NO: 2206614 - RNA, 19 nt, Artificial Sequence
  Description of Artificial Sequence: Synthetic oligonucleotide
aguacccgcuggucuugca

SEQ ID NO: 2206615 - RNA, 19 nt, Artificial Sequence
  Description of Artificial Sequence: Synthetic oligonucleotide
gcgagcaaugauuucauuu

SEQ ID NO: 2206616 - RNA, 19 nt, Artificial Sequence
  Description of Artificial Sequence: Synthetic oligonucleotide
auucgguucccagcaccca

SEQ ID NO: 2206617 - RNA, 19 nt, Artificial Sequence
  Description of Artificial Sequence: Synthetic oligonucleotide
cgugcaacagaaaaugaua

SEQ ID NO: 2206618 - RNA, 19 nt, Artificial Sequence
  Description of Artificial Sequence: Synthetic oligonucleotide
cuaugagagugucuuguuu

SEQ ID NO: 2206619 - RNA, 19 nt, Artificial Sequence
  Description of Artificial Sequence: Synthetic oligonucleotide
acccgcuggucuugcagaa

SEQ ID NO: 2206620 - RNA, 19 nt, Artificial Sequence
  Description of Artificial Sequence: Synthetic oligonucleotide
uggcuaugguggagcuggu

SEQ ID NO: 2206621 - RNA, 19 nt, Artificial Sequence
  Description of Artificial Sequence: Synthetic oligonucleotide
gcagaguacccgcuggucu

SEQ ID NO: 2206622 - RNA, 19 nt, Artificial Sequence
  Description of Artificial Sequence: Synthetic oligonucleotide
agguacucuuaaggaugug

SEQ ID NO: 2206623 - RNA, 19 nt, Artificial Sequence
  Description of Artificial Sequence: Synthetic oligonucleotide
cagauugugaugggaaaau

SEQ ID NO: 2206624 - RNA, 19 nt, Artificial Sequence
  Description of Artificial Sequence: Synthetic oligonucleotide
aggcgagcaaugauuucau

SEQ ID NO: 2206625 - RNA, 19 nt, Artificial Sequence
  Description of Artificial Sequence: Synthetic oligonucleotide
ggccuaugagagugucuug

SEQ ID NO: 2206626 - RNA, 19 nt, Artificial Sequence
  Description of Artificial Sequence: Synthetic oligonucleotide
uugugucauugcgcuggcu

SEQ ID NO: 2206627 - RNA, 19 nt, Artificial Sequence
  Description of Artificial Sequence: Synthetic oligonucleotide
cagaaguccugauucgguu

SEQ ID NO: 2206628 - RNA, 19 nt, Artificial Sequence
  Description of Artificial Sequence: Synthetic oligonucleotide
gugaacccacaaugguuua

SEQ ID NO: 2206629 - RNA, 19 nt, Artificial Sequence
  Description of Artificial Sequence: Synthetic oligonucleotide
aggcaacuuugaugggaua

SEQ ID NO: 2206630 - RNA, 19 nt, Artificial Sequence
  Description of Artificial Sequence: Synthetic oligonucleotide
ccuaacaacaucugacuuu

SEQ ID NO: 2206631 - RNA, 19 nt, Artificial Sequence
  Description of Artificial Sequence: Synthetic oligonucleotide
gcuuuugguacaucucaau

SEQ ID NO: 2206632 - RNA, 19 nt, Artificial Sequence
  Description of Artificial Sequence: Synthetic oligonucleotide
gccuaugagagugucuugu

SEQ ID NO: 2206633 - RNA, 19 nt, Artificial Sequence
  Description of Artificial Sequence: Synthetic oligonucleotide
uugcgcuggcuuguugauu

SEQ ID NO: 2206634 - RNA, 19 nt, Artificial Sequence
  Description of Artificial Sequence: Synthetic oligonucleotide
cuuccaggcgagcaaugau

SEQ ID NO: 2206635 - RNA, 19 nt, Artificial Sequence
  Description of Artificial Sequence: Synthetic oligonucleotide
gagguggauggcgugggau

SEQ ID NO: 2206636 - RNA, 19 nt, Artificial Sequence
  Description of Artificial Sequence: Synthetic oligonucleotide
cacugauguugcuacuuuu

SEQ ID NO: 2206637 - RNA, 19 nt, Artificial Sequence
  Description of Artificial Sequence: Synthetic oligonucleotide
gguacaucucaauguugau

SEQ ID NO: 2206638 - RNA, 19 nt, Artificial Sequence
  Description of Artificial Sequence: Synthetic oligonucleotide
cagaguacccgcuggucuu

SEQ ID NO: 2206639 - RNA, 19 nt, Artificial Sequence
  Description of Artificial Sequence: Synthetic oligonucleotide
cacaugagagggcugccuu

SEQ ID NO: 2206640 - RNA, 19 nt, Artificial Sequence
  Description of Artificial Sequence: Synthetic oligonucleotide
ggcuaugguggagcuggug

SEQ ID NO: 2206641 - RNA, 19 nt, Artificial Sequence
  Description of Artificial Sequence: Synthetic oligonucleotide
ccacaucuauauauauaua

SEQ ID NO: 2206642 - RNA, 19 nt, Artificial Sequence
  Description of Artificial Sequence: Synthetic oligonucleotide
gcugccucauggcuguacu

SEQ ID NO: 2206643 - RNA, 19 nt, Artificial Sequence
  Description of Artificial Sequence: Synthetic oligonucleotide
ccagcacccacaucuauau

SEQ ID NO: 2206644 - RNA, 19 nt, Artificial Sequence
  Description of Artificial Sequence: Synthetic oligonucleotide
gguggauggcgugggaugu

SEQ ID NO: 2206645 - RNA, 19 nt, Artificial Sequence
  Description of Artificial Sequence: Synthetic oligonucleotide
gcaacuuugaugggauaau

SEQ ID NO: 2206646 - RNA, 19 nt, Artificial Sequence
  Description of Artificial Sequence: Synthetic oligonucleotide
cuuguacugacagcucauu

SEQ ID NO: 2206647 - RNA, 19 nt, Artificial Sequence
  Description of Artificial Sequence: Synthetic oligonucleotide
ggauguacugagaccacuu

SEQ ID NO: 2206648 - RNA, 19 nt, Artificial Sequence
  Description of Artificial Sequence: Synthetic oligonucleotide
gcagaaguccugauucggu

SEQ ID NO: 2206649 - RNA, 19 nt, Artificial Sequence
  Description of Artificial Sequence: Synthetic oligonucleotide
caugagagggcugccuuuu

SEQ ID NO: 2206650 - RNA, 19 nt, Artificial Sequence
  Description of Artificial Sequence: Synthetic oligonucleotide
gggauguacugagaccacu

SEQ ID NO: 2206651 - RNA, 19 nt, Artificial Sequence
  Description of Artificial Sequence: Synthetic oligonucleotide
cucaugcuucaugccaacu

SEQ ID NO: 2206652 - RNA, 19 nt, Artificial Sequence
  Description of Artificial Sequence: Synthetic oligonucleotide
cuccaacguacaaguccua

SEQ ID NO: 2206653 - RNA, 19 nt, Artificial Sequence
  Description of Artificial Sequence: Synthetic oligonucleotide
cagcacccacaucuauaua

SEQ ID NO: 2206654 - RNA, 19 nt, Artificial Sequence
  Description of Artificial Sequence: Synthetic oligonucleotide
gccucauggcuguacugau

SEQ ID NO: 2206655 - RNA, 19 nt, Artificial Sequence
  Description of Artificial Sequence: Synthetic oligonucleotide
ggcgugggauguacugaga

SEQ ID NO: 2206656 - RNA, 19 nt, Artificial Sequence
  Description of Artificial Sequence: Synthetic oligonucleotide
ggaaugaguggagguggau

SEQ ID NO: 2206657 - RNA, 19 nt, Artificial Sequence
  Description of Artificial Sequence: Synthetic oligonucleotide
ccuaugagagugucuuguu

SEQ ID NO: 2206658 - RNA, 19 nt, Artificial Sequence
  Description of Artificial Sequence: Synthetic oligonucleotide
gcacaugagagggcugccu

SEQ ID NO: 2206659 - RNA, 19 nt, Artificial Sequence
  Description of Artificial Sequence: Synthetic oligonucleotide
cccgcuggucuugcagaag

SEQ ID NO: 2206660 - RNA, 19 nt, Artificial Sequence
  Description of Artificial Sequence: Synthetic oligonucleotide
gccgaaggccuaugagagu

SEQ ID NO: 2206661 - RNA, 19 nt, Artificial Sequence
  Description of Artificial Sequence: Synthetic oligonucleotide
gcuguugccgaaggccuau

SEQ ID NO: 2206662 - RNA, 19 nt, Artificial Sequence
  Description of Artificial Sequence: Synthetic oligonucleotide
gucauugcgcuggcuuguu

SEQ ID NO: 2206663 - RNA, 19 nt, Artificial Sequence
  Description of Artificial Sequence: Synthetic oligonucleotide
ggcgagcaaugauuucauu

SEQ ID NO: 2206664 - RNA, 19 nt, Artificial Sequence
  Description of Artificial Sequence: Synthetic oligonucleotide
ccacugauguugcuacuuu

SEQ ID NO: 2206665 - RNA, 19 nt, Artificial Sequence
  Description of Artificial Sequence: Synthetic oligonucleotide
ggauggcgugggauguacu

SEQ ID NO: 2206666 - RNA, 19 nt, Artificial Sequence
  Description of Artificial Sequence: Synthetic oligonucleotide
gcgcuggcuuguugauuua

SEQ ID NO: 2206667 - RNA, 19 nt, Artificial Sequence
  Description of Artificial Sequence: Synthetic oligonucleotide
cauguaauaacuccuaacc

SEQ ID NO: 2206668 - RNA, 19 nt, Artificial Sequence
  Description of Artificial Sequence: Synthetic oligonucleotide
accaauauggcacccaccc

SEQ ID NO: 2206669 - RNA, 19 nt, Artificial Sequence
  Description of Artificial Sequence: Synthetic oligonucleotide
aaagaugauuccuguagac

SEQ ID NO: 2206670 - RNA, 19 nt, Artificial Sequence
  Description of Artificial Sequence: Synthetic oligonucleotide
auaggcuugcuuuucaccc

SEQ ID NO: 2206671 - RNA, 19 nt, Artificial Sequence
  Description of Artificial Sequence: Synthetic oligonucleotide
aaggaaauucuccaacccg

SEQ ID NO: 2206672 - RNA, 19 nt, Artificial Sequence
  Description of Artificial Sequence: Synthetic oligonucleotide
uuaggggcaucaaagaucc

SEQ ID NO: 2206673 - RNA, 19 nt, Artificial Sequence
  Description of Artificial Sequence: Synthetic oligonucleotide
acaaagaugauuccuguag

SEQ ID NO: 2206674 - RNA, 19 nt, Artificial Sequence
  Description of Artificial Sequence: Synthetic oligonucleotide
acaaggaaauucuccaacc

SEQ ID NO: 2206675 - RNA, 19 nt, Artificial Sequence
  Description of Artificial Sequence: Synthetic oligonucleotide
gaagaguucacguaccacc

SEQ ID NO: 2206676 - RNA, 19 nt, Artificial Sequence
  Description of Artificial Sequence: Synthetic oligonucleotide
uguaauaacuccuaaccuc

SEQ ID NO: 2206677 - RNA, 19 nt, Artificial Sequence
  Description of Artificial Sequence: Synthetic oligonucleotide
agccuugucucccagaugg

SEQ ID NO: 2206678 - RNA, 19 nt, Artificial Sequence
  Description of Artificial Sequence: Synthetic oligonucleotide
aaaaguaccuuuauugucu

SEQ ID NO: 2206679 - RNA, 19 nt, Artificial Sequence
  Description of Artificial Sequence: Synthetic oligonucleotide
gcuaggaugacucaggcgg

SEQ ID NO: 2206680 - RNA, 19 nt, Artificial Sequence
  Description of Artificial Sequence: Synthetic oligonucleotide
gaaggcggaacuuaggggc

SEQ ID NO: 2206681 - RNA, 19 nt, Artificial Sequence
  Description of Artificial Sequence: Synthetic oligonucleotide
gauuccuguagacucgugg

SEQ ID NO: 2206682 - RNA, 19 nt, Artificial Sequence
  Description of Artificial Sequence: Synthetic oligonucleotide
aauaacaguggcuggcuca

SEQ ID NO: 2206683 - RNA, 19 nt, Artificial Sequence
  Description of Artificial Sequence: Synthetic oligonucleotide
ugggcgacgaucaugagcu

SEQ ID NO: 2206684 - RNA, 19 nt, Artificial Sequence
  Description of Artificial Sequence: Synthetic oligonucleotide
uugcuuuucaccccaaucu

SEQ ID NO: 2206685 - RNA, 19 nt, Artificial Sequence
  Description of Artificial Sequence: Synthetic oligonucleotide
agugauagggcugggacgc

SEQ ID NO: 2206686 - RNA, 19 nt, Artificial Sequence
  Description of Artificial Sequence: Synthetic oligonucleotide
uucacguaccaccaguucc

SEQ ID NO: 2206687 - RNA, 19 nt, Artificial Sequence
  Description of Artificial Sequence: Synthetic oligonucleotide
uccacaaagaugauuccug

SEQ ID NO: 2206688 - RNA, 19 nt, Artificial Sequence
  Description of Artificial Sequence: Synthetic oligonucleotide
acucgugggccucaggucc

SEQ ID NO: 2206689 - RNA, 19 nt, Artificial Sequence
  Description of Artificial Sequence: Synthetic oligonucleotide
ucugaaguuaggcugcacu

SEQ ID NO: 2206690 - RNA, 19 nt, Artificial Sequence
  Description of Artificial Sequence: Synthetic oligonucleotide
acgaucaugagcugggcuc

SEQ ID NO: 2206691 - RNA, 19 nt, Artificial Sequence
  Description of Artificial Sequence: Synthetic oligonucleotide
caguggaucugccagauag

SEQ ID NO: 2206692 - RNA, 19 nt, Artificial Sequence
  Description of Artificial Sequence: Synthetic oligonucleotide
guaauaacuccuaaccucc

SEQ ID NO: 2206693 - RNA, 19 nt, Artificial Sequence
  Description of Artificial Sequence: Synthetic oligonucleotide
ucauguaauaacuccuaac

SEQ ID NO: 2206694 - RNA, 19 nt, Artificial Sequence
  Description of Artificial Sequence: Synthetic oligonucleotide
ugaaggcggaacuuagggg

SEQ ID NO: 2206695 - RNA, 19 nt, Artificial Sequence
  Description of Artificial Sequence: Synthetic oligonucleotide
gugaaggcggaacuuaggg

SEQ ID NO: 2206696 - RNA, 19 nt, Artificial Sequence
  Description of Artificial Sequence: Synthetic oligonucleotide
acuguaaaggaggauggcg

SEQ ID NO: 2206697 - RNA, 19 nt, Artificial Sequence
  Description of Artificial Sequence: Synthetic oligonucleotide
uaaaggaggauggcgauug

SEQ ID NO: 2206698 - RNA, 19 nt, Artificial Sequence
  Description of Artificial Sequence: Synthetic oligonucleotide
acgucuaccaucccaggcg

SEQ ID NO: 2206699 - RNA, 19 nt, Artificial Sequence
  Description of Artificial Sequence: Synthetic oligonucleotide
ugcugucgcagccaggagg

SEQ ID NO: 2206700 - RNA, 19 nt, Artificial Sequence
  Description of Artificial Sequence: Synthetic oligonucleotide
accuuuauugucuuuagua

SEQ ID NO: 2206701 - RNA, 19 nt, Artificial Sequence
  Description of Artificial Sequence: Synthetic oligonucleotide
uuugugcccaggaaguccc

SEQ ID NO: 2206702 - RNA, 19 nt, Artificial Sequence
  Description of Artificial Sequence: Synthetic oligonucleotide
uaggaaguuagucccaggu

SEQ ID NO: 2206703 - RNA, 19 nt, Artificial Sequence
  Description of Artificial Sequence: Synthetic oligonucleotide
gaagacaaggaagucauca

SEQ ID NO: 2206704 - RNA, 19 nt, Artificial Sequence
  Description of Artificial Sequence: Synthetic oligonucleotide
ugaaguuaggcugcacugg

SEQ ID NO: 2206705 - RNA, 19 nt, Artificial Sequence
  Description of Artificial Sequence: Synthetic oligonucleotide
gacaaggaaauucuccaac

SEQ ID NO: 2206706 - RNA, 19 nt, Artificial Sequence
  Description of Artificial Sequence: Synthetic oligonucleotide
gauaggcuugcuuuucacc

SEQ ID NO: 2206707 - RNA, 19 nt, Artificial Sequence
  Description of Artificial Sequence: Synthetic oligonucleotide
uguaggacacuggagaaga

SEQ ID NO: 2206708 - RNA, 19 nt, Artificial Sequence
  Description of Artificial Sequence: Synthetic oligonucleotide
ugcccaauaacaguggcug

SEQ ID NO: 2206709 - RNA, 19 nt, Artificial Sequence
  Description of Artificial Sequence: Synthetic oligonucleotide
gaugauuccuguagacucg

SEQ ID NO: 2206710 - RNA, 19 nt, Artificial Sequence
  Description of Artificial Sequence: Synthetic oligonucleotide
ucacguaccaccaguuccc

SEQ ID NO: 2206711 - RNA, 19 nt, Artificial Sequence
  Description of Artificial Sequence: Synthetic oligonucleotide
ucuccuguaggacacugga

SEQ ID NO: 2206712 - RNA, 19 nt, Artificial Sequence
  Description of Artificial Sequence: Synthetic oligonucleotide
auaacuccuaaccuccucu

SEQ ID NO: 2206713 - RNA, 19 nt, Artificial Sequence
  Description of Artificial Sequence: Synthetic oligonucleotide
ugcuuuucaccccaaucug

SEQ ID NO: 2206714 - RNA, 19 nt, Artificial Sequence
  Description of Artificial Sequence: Synthetic oligonucleotide
auggcgauuguagaggagg

SEQ ID NO: 2206715 - RNA, 19 nt, Artificial Sequence
  Description of Artificial Sequence: Synthetic oligonucleotide
caaggaaauucuccaaccc

SEQ ID NO: 2206716 - RNA, 19 nt, Artificial Sequence
  Description of Artificial Sequence: Synthetic oligonucleotide
cucauugcaagcgaugccc

SEQ ID NO: 2206717 - RNA, 19 nt, Artificial Sequence
  Description of Artificial Sequence: Synthetic oligonucleotide
uauggccgagugaaggcgg

SEQ ID NO: 2206718 - RNA, 19 nt, Artificial Sequence
  Description of Artificial Sequence: Synthetic oligonucleotide
acugcuaccugcuccuggg

SEQ ID NO: 2206719 - RNA, 19 nt, Artificial Sequence
  Description of Artificial Sequence: Synthetic oligonucleotide
aagaugauuccuguagacu

SEQ ID NO: 2206720 - RNA, 19 nt, Artificial Sequence
  Description of Artificial Sequence: Synthetic oligonucleotide
agauaggcuugcuuuucac

SEQ ID NO: 2206721 - RNA, 19 nt, Artificial Sequence
  Description of Artificial Sequence: Synthetic oligonucleotide
ugguuugacaaggaaauuc

SEQ ID NO: 2206722 - RNA, 19 nt, Artificial Sequence
  Description of Artificial Sequence: Synthetic oligonucleotide
acuggagaagaguucacgu

SEQ ID NO: 2206723 - RNA, 19 nt, Artificial Sequence
  Description of Artificial Sequence: Synthetic oligonucleotide
uccucugaaguuaggcugc

SEQ ID NO: 2206724 - RNA, 19 nt, Artificial Sequence
  Description of Artificial Sequence: Synthetic oligonucleotide
aggaagucccgguaggaag

SEQ ID NO: 2206725 - RNA, 19 nt, Artificial Sequence
  Description of Artificial Sequence: Synthetic oligonucleotide
aguuaggcugcacuggaca

SEQ ID NO: 2206726 - RNA, 19 nt, Artificial Sequence
  Description of Artificial Sequence: Synthetic oligonucleotide
cugaaguuaggcugcacug

SEQ ID NO: 2206727 - RNA, 19 nt, Artificial Sequence
  Description of Artificial Sequence: Synthetic oligonucleotide
gaugcccaauaacaguggc

SEQ ID NO: 2206728 - RNA, 19 nt, Artificial Sequence
  Description of Artificial Sequence: Synthetic oligonucleotide
aucuguagcucccugcugu

SEQ ID NO: 2206729 - RNA, 19 nt, Artificial Sequence
  Description of Artificial Sequence: Synthetic oligonucleotide
guuagucccagguucagga

SEQ ID NO: 2206730 - RNA, 19 nt, Artificial Sequence
  Description of Artificial Sequence: Synthetic oligonucleotide
caagguaugcgguggcacg

SEQ ID NO: 2206731 - RNA, 19 nt, Artificial Sequence
  Description of Artificial Sequence: Synthetic oligonucleotide
ugaccaauauggcacccac

SEQ ID NO: 2206732 - RNA, 19 nt, Artificial Sequence
  Description of Artificial Sequence: Synthetic oligonucleotide
acgcuaggaugacucaggc

SEQ ID NO: 2206733 - RNA, 19 nt, Artificial Sequence
  Description of Artificial Sequence: Synthetic oligonucleotide
ugcgguggcacguucaccu

SEQ ID NO: 2206734 - RNA, 19 nt, Artificial Sequence
  Description of Artificial Sequence: Synthetic oligonucleotide
gaugccaccagagcacagg

SEQ ID NO: 2206735 - RNA, 19 nt, Artificial Sequence
  Description of Artificial Sequence: Synthetic oligonucleotide
gcugaggugagcuggaugc

SEQ ID NO: 2206736 - RNA, 19 nt, Artificial Sequence
  Description of Artificial Sequence: Synthetic oligonucleotide
uccuaaccuccucugaagu

SEQ ID NO: 2206737 - RNA, 19 nt, Artificial Sequence
  Description of Artificial Sequence: Synthetic oligonucleotide
ggacacaacagcaggaggg

SEQ ID NO: 2206738 - RNA, 19 nt, Artificial Sequence
  Description of Artificial Sequence: Synthetic oligonucleotide
ugggacgcuaggaugacuc

SEQ ID NO: 2206739 - RNA, 19 nt, Artificial Sequence
  Description of Artificial Sequence: Synthetic oligonucleotide
cucuacugcuaccugcucc

SEQ ID NO: 2206740 - RNA, 19 nt, Artificial Sequence
  Description of Artificial Sequence: Synthetic oligonucleotide
guaccuuuauugucuuuag

SEQ ID NO: 2206741 - RNA, 19 nt, Artificial Sequence
  Description of Artificial Sequence: Synthetic oligonucleotide
gaaguuaggcugcacugga

SEQ ID NO: 2206742 - RNA, 19 nt, Artificial Sequence
  Description of Artificial Sequence: Synthetic oligonucleotide
uggcacguucaccucauca

SEQ ID NO: 2206743 - RNA, 19 nt, Artificial Sequence
  Description of Artificial Sequence: Synthetic oligonucleotide
gacauggaacucugcacug

SEQ ID NO: 2206744 - RNA, 19 nt, Artificial Sequence
  Description of Artificial Sequence: Synthetic oligonucleotide
gacacuggagaagaguuca

SEQ ID NO: 2206745 - RNA, 19 nt, Artificial Sequence
  Description of Artificial Sequence: Synthetic oligonucleotide
cuguaaaggaggauggcga

SEQ ID NO: 2206746 - RNA, 19 nt, Artificial Sequence
  Description of Artificial Sequence: Synthetic oligonucleotide
uccuguagucucuguaccc

SEQ ID NO: 2206747 - RNA, 19 nt, Artificial Sequence
  Description of Artificial Sequence: Synthetic oligonucleotide
aggauggcgccuuuggcug

SEQ ID NO: 2206748 - RNA, 19 nt, Artificial Sequence
  Description of Artificial Sequence: Synthetic oligonucleotide
gacgcuaggaugacucagg

SEQ ID NO: 2206749 - RNA, 19 nt, Artificial Sequence
  Description of Artificial Sequence: Synthetic oligonucleotide
agacucgugggccucaggu

SEQ ID NO: 2206750 - RNA, 19 nt, Artificial Sequence
  Description of Artificial Sequence: Synthetic oligonucleotide
aacuccuaaccuccucuga

SEQ ID NO: 2206751 - RNA, 19 nt, Artificial Sequence
  Description of Artificial Sequence: Synthetic oligonucleotide
ucauugcaagcgaugccca

SEQ ID NO: 2206752 - RNA, 19 nt, Artificial Sequence
  Description of Artificial Sequence: Synthetic oligonucleotide
cuaggaugacucaggcggg

SEQ ID NO: 2206753 - RNA, 19 nt, Artificial Sequence
  Description of Artificial Sequence: Synthetic oligonucleotide
uccaugguuugacaaggaa

SEQ ID NO: 2206754 - RNA, 19 nt, Artificial Sequence
  Description of Artificial Sequence: Synthetic oligonucleotide
ucuccacaaagaugauucc

SEQ ID NO: 2206755 - RNA, 19 nt, Artificial Sequence
  Description of Artificial Sequence: Synthetic oligonucleotide
uuauugucuuuaguagcug

SEQ ID NO: 2206756 - RNA, 19 nt, Artificial Sequence
  Description of Artificial Sequence: Synthetic oligonucleotide
caggguugggucuguagcc

SEQ ID NO: 2206757 - RNA, 19 nt, Artificial Sequence
  Description of Artificial Sequence: Synthetic oligonucleotide
gcuggcucaagguaugcgg

SEQ ID NO: 2206758 - RNA, 19 nt, Artificial Sequence
  Description of Artificial Sequence: Synthetic oligonucleotide
caugguuugacaaggaaau

SEQ ID NO: 2206759 - RNA, 19 nt, Artificial Sequence
  Description of Artificial Sequence: Synthetic oligonucleotide
caucccaggcgccucagcc

SEQ ID NO: 2206760 - RNA, 19 nt, Artificial Sequence
  Description of Artificial Sequence: Synthetic oligonucleotide
caccccaaucuguagcucc

SEQ ID NO: 2206761 - RNA, 19 nt, Artificial Sequence
  Description of Artificial Sequence: Synthetic oligonucleotide
aaguuaggcugcacuggac

SEQ ID NO: 2206762 - RNA, 19 nt, Artificial Sequence
  Description of Artificial Sequence: Synthetic oligonucleotide
caguaauggucuugucucc

SEQ ID NO: 2206763 - RNA, 19 nt, Artificial Sequence
  Description of Artificial Sequence: Synthetic oligonucleotide
guauggccgagugaaggcg

SEQ ID NO: 2206764 - RNA, 19 nt, Artificial Sequence
  Description of Artificial Sequence: Synthetic oligonucleotide
gcugugaccaauauggcac

SEQ ID NO: 2206765 - RNA, 19 nt, Artificial Sequence
  Description of Artificial Sequence: Synthetic oligonucleotide
caaagaugauuccuguaga

SEQ ID NO: 2206766 - RNA, 19 nt, Artificial Sequence
  Description of Artificial Sequence: Synthetic oligonucleotide
uaugcgguggcacguucac

SEQ ID NO: 2206767 - RNA, 19 nt, Artificial Sequence
  Description of Artificial Sequence: Synthetic oligonucleotide
cuccuaaccuccucugaag

SEQ ID NO: 2206768 - RNA, 19 nt, Artificial Sequence
  Description of Artificial Sequence: Synthetic oligonucleotide
ccacucauguaauaacucc

SEQ ID NO: 2206769 - RNA, 19 nt, Artificial Sequence
  Description of Artificial Sequence: Synthetic oligonucleotide
gauuguagaggaggauggc

SEQ ID NO: 2206770 - RNA, 19 nt, Artificial Sequence
  Description of Artificial Sequence: Synthetic oligonucleotide
guaggaaguuagucccagg

SEQ ID NO: 2206771 - RNA, 19 nt, Artificial Sequence
  Description of Artificial Sequence: Synthetic oligonucleotide
uggcgauuguagaggagga

SEQ ID NO: 2206772 - RNA, 19 nt, Artificial Sequence
  Description of Artificial Sequence: Synthetic oligonucleotide
acuccuaaccuccucugaa

SEQ ID NO: 2206773 - RNA, 19 nt, Artificial Sequence
  Description of Artificial Sequence: Synthetic oligonucleotide
ucaagguaugcgguggcac

SEQ ID NO: 2206774 - RNA, 19 nt, Artificial Sequence
  Description of Artificial Sequence: Synthetic oligonucleotide
gagaagaguucacguacca

SEQ ID NO: 2206775 - RNA, 19 nt, Artificial Sequence
  Description of Artificial Sequence: Synthetic oligonucleotide
gugggcgacgaucaugagc

SEQ ID NO: 2206776 - RNA, 19 nt, Artificial Sequence
  Description of Artificial Sequence: Synthetic oligonucleotide
gguccaugguuugacaagg

SEQ ID NO: 2206777 - RNA, 19 nt, Artificial Sequence
  Description of Artificial Sequence: Synthetic oligonucleotide
acauggaacucugcacugg

SEQ ID NO: 2206778 - RNA, 19 nt, Artificial Sequence
  Description of Artificial Sequence: Synthetic oligonucleotide
gauggcaguaauggucuug

SEQ ID NO: 2206779 - RNA, 19 nt, Artificial Sequence
  Description of Artificial Sequence: Synthetic oligonucleotide
guuugugcccaggaagucc

SEQ ID NO: 2206780 - RNA, 19 nt, Artificial Sequence
  Description of Artificial Sequence: Synthetic oligonucleotide
cugugaccaauauggcacc

SEQ ID NO: 2206781 - RNA, 19 nt, Artificial Sequence
  Description of Artificial Sequence: Synthetic oligonucleotide
gagugaaggcggaacuuag

SEQ ID NO: 2206782 - RNA, 19 nt, Artificial Sequence
  Description of Artificial Sequence: Synthetic oligonucleotide
ugcuaccugcuccugggac

SEQ ID NO: 2206783 - RNA, 19 nt, Artificial Sequence
  Description of Artificial Sequence: Synthetic oligonucleotide
agaguucacguaccaccag

SEQ ID NO: 2206784 - RNA, 19 nt, Artificial Sequence
  Description of Artificial Sequence: Synthetic oligonucleotide
caccaguuccccagggagg

SEQ ID NO: 2206785 - RNA, 19 nt, Artificial Sequence
  Description of Artificial Sequence: Synthetic oligonucleotide
ucaucagcugugaccaaua

SEQ ID NO: 2206786 - RNA, 19 nt, Artificial Sequence
  Description of Artificial Sequence: Synthetic oligonucleotide
ccaguuugugcccaggaag

SEQ ID NO: 2206787 - RNA, 19 nt, Artificial Sequence
  Description of Artificial Sequence: Synthetic oligonucleotide
cacgucuaccaucccaggc

SEQ ID NO: 2206788 - RNA, 19 nt, Artificial Sequence
  Description of Artificial Sequence: Synthetic oligonucleotide
aaguuagucccagguucag

SEQ ID NO: 2206789 - RNA, 19 nt, Artificial Sequence
  Description of Artificial Sequence: Synthetic oligonucleotide
ccgguaggaaguuaguccc

SEQ ID NO: 2206790 - RNA, 19 nt, Artificial Sequence
  Description of Artificial Sequence: Synthetic oligonucleotide
agugaaggcggaacuuagg

SEQ ID NO: 2206791 - RNA, 19 nt, Artificial Sequence
  Description of Artificial Sequence: Synthetic oligonucleotide
uugcaagcgaugcccaaua

SEQ ID NO: 2206792 - RNA, 19 nt, Artificial Sequence
  Description of Artificial Sequence: Synthetic oligonucleotide
aagguaugcgguggcacgu

SEQ ID NO: 2206793 - RNA, 19 nt, Artificial Sequence
  Description of Artificial Sequence: Synthetic oligonucleotide
augccaguauggccgagug

SEQ ID NO: 2206794 - RNA, 19 nt, Artificial Sequence
  Description of Artificial Sequence: Synthetic oligonucleotide
gggcaucaaagauccaggg

SEQ ID NO: 2206795 - RNA, 19 nt, Artificial Sequence
  Description of Artificial Sequence: Synthetic oligonucleotide
cgauuguagaggaggaugg

SEQ ID NO: 2206796 - RNA, 19 nt, Artificial Sequence
  Description of Artificial Sequence: Synthetic oligonucleotide
gauagggcugggacgcuag

SEQ ID NO: 2206797 - RNA, 19 nt, Artificial Sequence
  Description of Artificial Sequence: Synthetic oligonucleotide
ucuaccaucccaggcgccu

SEQ ID NO: 2206798 - RNA, 19 nt, Artificial Sequence
  Description of Artificial Sequence: Synthetic oligonucleotide
gcuggucucauugcaagcg

SEQ ID NO: 2206799 - RNA, 19 nt, Artificial Sequence
  Description of Artificial Sequence: Synthetic oligonucleotide
cccgguaggaaguuagucc

SEQ ID NO: 2206800 - RNA, 19 nt, Artificial Sequence
  Description of Artificial Sequence: Synthetic oligonucleotide
uggcgccuuuggcugaagg

SEQ ID NO: 2206801 - RNA, 19 nt, Artificial Sequence
  Description of Artificial Sequence: Synthetic oligonucleotide
aguuugugcccaggaaguc

SEQ ID NO: 2206802 - RNA, 19 nt, Artificial Sequence
  Description of Artificial Sequence: Synthetic oligonucleotide
agucccgguaggaaguuag

SEQ ID NO: 2206803 - RNA, 19 nt, Artificial Sequence
  Description of Artificial Sequence: Synthetic oligonucleotide
ucaggguccaugguuugac

SEQ ID NO: 2206804 - RNA, 19 nt, Artificial Sequence
  Description of Artificial Sequence: Synthetic oligonucleotide
guucaggagcagcuguggc

SEQ ID NO: 2206805 - RNA, 19 nt, Artificial Sequence
  Description of Artificial Sequence: Synthetic oligonucleotide
gggucuguagccuugucuc

SEQ ID NO: 2206806 - RNA, 19 nt, Artificial Sequence
  Description of Artificial Sequence: Synthetic oligonucleotide
gaggauggcgccuuuggcu

SEQ ID NO: 2206807 - RNA, 19 nt, Artificial Sequence
  Description of Artificial Sequence: Synthetic oligonucleotide
aggaaguuagucccagguu

SEQ ID NO: 2206808 - RNA, 19 nt, Artificial Sequence
  Description of Artificial Sequence: Synthetic oligonucleotide
aggguccaugguuugacaa

SEQ ID NO: 2206809 - RNA, 19 nt, Artificial Sequence
  Description of Artificial Sequence: Synthetic oligonucleotide
cagugggcgacgaucauga

SEQ ID NO: 2206810 - RNA, 19 nt, Artificial Sequence
  Description of Artificial Sequence: Synthetic oligonucleotide
uggcucaagguaugcggug

SEQ ID NO: 2206811 - RNA, 19 nt, Artificial Sequence
  Description of Artificial Sequence: Synthetic oligonucleotide
ggcgccuuuggcugaaggg

SEQ ID NO: 2206812 - RNA, 19 nt, Artificial Sequence
  Description of Artificial Sequence: Synthetic oligonucleotide
cuccuguaggacacuggag

SEQ ID NO: 2206813 - RNA, 19 nt, Artificial Sequence
  Description of Artificial Sequence: Synthetic oligonucleotide
ugugcccaggaagucccgg

SEQ ID NO: 2206814 - RNA, 19 nt, Artificial Sequence
  Description of Artificial Sequence: Synthetic oligonucleotide
accccaaucuguagcuccc

SEQ ID NO: 2206815 - RNA, 19 nt, Artificial Sequence
  Description of Artificial Sequence: Synthetic oligonucleotide
ugagagcggcgcaggaaga

SEQ ID NO: 2206816 - RNA, 19 nt, Artificial Sequence
  Description of Artificial Sequence: Synthetic oligonucleotide
gaggugagcuggaugccag

SEQ ID NO: 2206817 - RNA, 19 nt, Artificial Sequence
  Description of Artificial Sequence: Synthetic oligonucleotide
ucccaggcgccucagccac

SEQ ID NO: 2206818 - RNA, 19 nt, Artificial Sequence
  Description of Artificial Sequence: Synthetic oligonucleotide
ggaugacucaggcgggacg

SEQ ID NO: 2206819 - RNA, 19 nt, Artificial Sequence
  Description of Artificial Sequence: Synthetic oligonucleotide
gacacaacagcaggaggga

SEQ ID NO: 2206820 - RNA, 19 nt, Artificial Sequence
  Description of Artificial Sequence: Synthetic oligonucleotide
ugauuccuguagacucgug

SEQ ID NO: 2206821 - RNA, 19 nt, Artificial Sequence
  Description of Artificial Sequence: Synthetic oligonucleotide
aucaugagcugggcucagc

SEQ ID NO: 2206822 - RNA, 19 nt, Artificial Sequence
  Description of Artificial Sequence: Synthetic oligonucleotide
uccaggcacgucuaccauc

SEQ ID NO: 2206823 - RNA, 19 nt, Artificial Sequence
  Description of Artificial Sequence: Synthetic oligonucleotide
ugucgcagccaggaggcug

SEQ ID NO: 2206824 - RNA, 19 nt, Artificial Sequence
  Description of Artificial Sequence: Synthetic oligonucleotide
guaauggucuugucuccuc

SEQ ID NO: 2206825 - RNA, 19 nt, Artificial Sequence
  Description of Artificial Sequence: Synthetic oligonucleotide
uagacucgugggccucagg

SEQ ID NO: 2206826 - RNA, 19 nt, Artificial Sequence
  Description of Artificial Sequence: Synthetic oligonucleotide
ggguccaugguuugacaag

SEQ ID NO: 2206827 - RNA, 19 nt, Artificial Sequence
  Description of Artificial Sequence: Synthetic oligonucleotide
agggcugggacgcuaggau

SEQ ID NO: 2206828 - RNA, 19 nt, Artificial Sequence
  Description of Artificial Sequence: Synthetic oligonucleotide
cucccagauggcaguaaug

SEQ ID NO: 2206829 - RNA, 19 nt, Artificial Sequence
  Description of Artificial Sequence: Synthetic oligonucleotide
gcaucaaagauccaggguu

SEQ ID NO: 2206830 - RNA, 19 nt, Artificial Sequence
  Description of Artificial Sequence: Synthetic oligonucleotide
gcgauuguagaggaggaug

SEQ ID NO: 2206831 - RNA, 19 nt, Artificial Sequence
  Description of Artificial Sequence: Synthetic oligonucleotide
ugcaagcgaugcccaauaa

SEQ ID NO: 2206832 - RNA, 19 nt, Artificial Sequence
  Description of Artificial Sequence: Synthetic oligonucleotide
ucuguacccucugugucuc

SEQ ID NO: 2206833 - RNA, 19 nt, Artificial Sequence
  Description of Artificial Sequence: Synthetic oligonucleotide
cgacuguaaaggaggaugg

SEQ ID NO: 2206834 - RNA, 19 nt, Artificial Sequence
  Description of Artificial Sequence: Synthetic oligonucleotide
aguggcuggcucaagguau

SEQ ID NO: 2206835 - RNA, 19 nt, Artificial Sequence
  Description of Artificial Sequence: Synthetic oligonucleotide
gaccaguuugugcccagga

SEQ ID NO: 2206836 - RNA, 19 nt, Artificial Sequence
  Description of Artificial Sequence: Synthetic oligonucleotide
gguaggaaguuagucccag

SEQ ID NO: 2206837 - RNA, 19 nt, Artificial Sequence
  Description of Artificial Sequence: Synthetic oligonucleotide
gaccaauauggcacccacc

SEQ ID NO: 2206838 - RNA, 19 nt, Artificial Sequence
  Description of Artificial Sequence: Synthetic oligonucleotide
ggaacuuaggggcaucaaa

SEQ ID NO: 2206839 - RNA, 19 nt, Artificial Sequence
  Description of Artificial Sequence: Synthetic oligonucleotide
uugugcccaggaagucccg

SEQ ID NO: 2206840 - RNA, 19 nt, Artificial Sequence
  Description of Artificial Sequence: Synthetic oligonucleotide
guucacguaccaccaguuc

SEQ ID NO: 2206841 - RNA, 19 nt, Artificial Sequence
  Description of Artificial Sequence: Synthetic oligonucleotide
gcgaugcccaauaacagug

SEQ ID NO: 2206842 - RNA, 19 nt, Artificial Sequence
  Description of Artificial Sequence: Synthetic oligonucleotide
uagccuugucucccagaug

SEQ ID NO: 2206843 - RNA, 19 nt, Artificial Sequence
  Description of Artificial Sequence: Synthetic oligonucleotide
ccgacuguaaaggaggaug

SEQ ID NO: 2206844 - RNA, 19 nt, Artificial Sequence
  Description of Artificial Sequence: Synthetic oligonucleotide
aucugccagauaggcuugc

SEQ ID NO: 2206845 - RNA, 19 nt, Artificial Sequence
  Description of Artificial Sequence: Synthetic oligonucleotide
accaguuccccagggaggu

SEQ ID NO: 2206846 - RNA, 19 nt, Artificial Sequence
  Description of Artificial Sequence: Synthetic oligonucleotide
ugccaguauggccgaguga

SEQ ID NO: 2206847 - RNA, 19 nt, Artificial Sequence
  Description of Artificial Sequence: Synthetic oligonucleotide
gaguucacguaccaccagu

SEQ ID NO: 2206848 - RNA, 19 nt, Artificial Sequence
  Description of Artificial Sequence: Synthetic oligonucleotide
cuaaccuccucugaaguua

SEQ ID NO: 2206849 - RNA, 19 nt, Artificial Sequence
  Description of Artificial Sequence: Synthetic oligonucleotide
ggcacgucuaccaucccag

SEQ ID NO: 2206850 - RNA, 19 nt, Artificial Sequence
  Description of Artificial Sequence: Synthetic oligonucleotide
aaggcggaacuuaggggca

SEQ ID NO: 2206851 - RNA, 19 nt, Artificial Sequence
  Description of Artificial Sequence: Synthetic oligonucleotide
ggcgggacgucccagcacc

SEQ ID NO: 2206852 - RNA, 19 nt, Artificial Sequence
  Description of Artificial Sequence: Synthetic oligonucleotide
ggagaagaguucacguacc

SEQ ID NO: 2206853 - RNA, 19 nt, Artificial Sequence
  Description of Artificial Sequence: Synthetic oligonucleotide
cuguagucucuguacccuc

SEQ ID NO: 2206854 - RNA, 19 nt, Artificial Sequence
  Description of Artificial Sequence: Synthetic oligonucleotide
acucauguaauaacuccua

SEQ ID NO: 2206855 - RNA, 19 nt, Artificial Sequence
  Description of Artificial Sequence: Synthetic oligonucleotide
uggaccaguuugugcccag

SEQ ID NO: 2206856 - RNA, 19 nt, Artificial Sequence
  Description of Artificial Sequence: Synthetic oligonucleotide
uggaugccaguauggccga

SEQ ID NO: 2206857 - RNA, 19 nt, Artificial Sequence
  Description of Artificial Sequence: Synthetic oligonucleotide
ggaucugccagauaggcuu

SEQ ID NO: 2206858 - RNA, 19 nt, Artificial Sequence
  Description of Artificial Sequence: Synthetic oligonucleotide
ggcucaagguaugcggugg

SEQ ID NO: 2206859 - RNA, 19 nt, Artificial Sequence
  Description of Artificial Sequence: Synthetic oligonucleotide
agcucuacugcuaccugcu

SEQ ID NO: 2206860 - RNA, 19 nt, Artificial Sequence
  Description of Artificial Sequence: Synthetic oligonucleotide
gcaagcgaugcccaauaac

SEQ ID NO: 2206861 - RNA, 19 nt, Artificial Sequence
  Description of Artificial Sequence: Synthetic oligonucleotide
ucccgguaggaaguuaguc

SEQ ID NO: 2206862 - RNA, 19 nt, Artificial Sequence
  Description of Artificial Sequence: Synthetic oligonucleotide
augauuccuguagacucgu

SEQ ID NO: 2206863 - RNA, 19 nt, Artificial Sequence
  Description of Artificial Sequence: Synthetic oligonucleotide
ggcgacgaucaugagcugg

SEQ ID NO: 2206864 - RNA, 19 nt, Artificial Sequence
  Description of Artificial Sequence: Synthetic oligonucleotide
gaugacucaggcgggacgu

SEQ ID NO: 2206865 - RNA, 19 nt, Artificial Sequence
  Description of Artificial Sequence: Synthetic oligonucleotide
cuggagaagaguucacgua

SEQ ID NO: 2206866 - RNA, 19 nt, Artificial Sequence
  Description of Artificial Sequence: Synthetic oligonucleotide
uguagacucgugggccuca

SEQ ID NO: 2206867 - RNA, 19 nt, Artificial Sequence
  Description of Artificial Sequence: Synthetic oligonucleotide
uaccaucccaggcgccuca

SEQ ID NO: 2206868 - RNA, 19 nt, Artificial Sequence
  Description of Artificial Sequence: Synthetic oligonucleotide
gaguugugcccacaucucu

SEQ ID NO: 2206869 - RNA, 19 nt, Artificial Sequence
  Description of Artificial Sequence: Synthetic oligonucleotide
gguuugacaaggaaauucu

SEQ ID NO: 2206870 - RNA, 19 nt, Artificial Sequence
  Description of Artificial Sequence: Synthetic oligonucleotide
aggcgggacgucccagcac

SEQ ID NO: 2206871 - RNA, 19 nt, Artificial Sequence
  Description of Artificial Sequence: Synthetic oligonucleotide
ccaccaguuccccagggag

SEQ ID NO: 2206872 - RNA, 19 nt, Artificial Sequence
  Description of Artificial Sequence: Synthetic oligonucleotide
augcgguggcacguucacc

SEQ ID NO: 2206873 - RNA, 19 nt, Artificial Sequence
  Description of Artificial Sequence: Synthetic oligonucleotide
cccaauaacaguggcuggc

SEQ ID NO: 2206874 - RNA, 19 nt, Artificial Sequence
  Description of Artificial Sequence: Synthetic oligonucleotide
caguuugugcccaggaagu

SEQ ID NO: 2206875 - RNA, 19 nt, Artificial Sequence
  Description of Artificial Sequence: Synthetic oligonucleotide
gacgaucaugagcugggcu

SEQ ID NO: 2206876 - RNA, 19 nt, Artificial Sequence
  Description of Artificial Sequence: Synthetic oligonucleotide
ucccagguucaggagcagc

SEQ ID NO: 2206877 - RNA, 19 nt, Artificial Sequence
  Description of Artificial Sequence: Synthetic oligonucleotide
cuguagcucccugcugucg

SEQ ID NO: 2206878 - RNA, 19 nt, Artificial Sequence
  Description of Artificial Sequence: Synthetic oligonucleotide
gcgacgaucaugagcuggg

SEQ ID NO: 2206879 - RNA, 19 nt, Artificial Sequence
  Description of Artificial Sequence: Synthetic oligonucleotide
gacucaggcgggacguccc

SEQ ID NO: 2206880 - RNA, 19 nt, Artificial Sequence
  Description of Artificial Sequence: Synthetic oligonucleotide
cucgugggccucagguccc

SEQ ID NO: 2206881 - RNA, 19 nt, Artificial Sequence
  Description of Artificial Sequence: Synthetic oligonucleotide
guagccuugucucccagau

SEQ ID NO: 2206882 - RNA, 19 nt, Artificial Sequence
  Description of Artificial Sequence: Synthetic oligonucleotide
cagauaggcuugcuuuuca

SEQ ID NO: 2206883 - RNA, 19 nt, Artificial Sequence
  Description of Artificial Sequence: Synthetic oligonucleotide
gcugucgcagccaggaggc

SEQ ID NO: 2206884 - RNA, 19 nt, Artificial Sequence
  Description of Artificial Sequence: Synthetic oligonucleotide
cacaaagaugauuccugua

SEQ ID NO: 2206885 - RNA, 19 nt, Artificial Sequence
  Description of Artificial Sequence: Synthetic oligonucleotide
gaucaugagcugggcucag

SEQ ID NO: 2206886 - RNA, 19 nt, Artificial Sequence
  Description of Artificial Sequence: Synthetic oligonucleotide
augcccaauaacaguggcu

SEQ ID NO: 2206887 - RNA, 19 nt, Artificial Sequence
  Description of Artificial Sequence: Synthetic oligonucleotide
ccaugguuugacaaggaaa

SEQ ID NO: 2206888 - RNA, 19 nt, Artificial Sequence
  Description of Artificial Sequence: Synthetic oligonucleotide
acgucccagcacccgacug

SEQ ID NO: 2206889 - RNA, 19 nt, Artificial Sequence
  Description of Artificial Sequence: Synthetic oligonucleotide
cccacucauguaauaacuc

SEQ ID NO: 2206890 - RNA, 19 nt, Artificial Sequence
  Description of Artificial Sequence: Synthetic oligonucleotide
gcgcuggucucauugcaag

SEQ ID NO: 2206891 - RNA, 19 nt, Artificial Sequence
  Description of Artificial Sequence: Synthetic oligonucleotide
gagagcggcgcaggaagac

SEQ ID NO: 2206892 - RNA, 19 nt, Artificial Sequence
  Description of Artificial Sequence: Synthetic oligonucleotide
guaggacacuggagaagag

SEQ ID NO: 2206893 - RNA, 19 nt, Artificial Sequence
  Description of Artificial Sequence: Synthetic oligonucleotide
gcccaauaacaguggcugg

SEQ ID NO: 2206894 - RNA, 19 nt, Artificial Sequence
  Description of Artificial Sequence: Synthetic oligonucleotide
gagguucagggugcccucc

SEQ ID NO: 2206895 - RNA, 19 nt, Artificial Sequence
  Description of Artificial Sequence: Synthetic oligonucleotide
ggacgcuaggaugacucag

SEQ ID NO: 2206896 - RNA, 19 nt, Artificial Sequence
  Description of Artificial Sequence: Synthetic oligonucleotide
aguucacguaccaccaguu

SEQ ID NO: 2206897 - RNA, 19 nt, Artificial Sequence
  Description of Artificial Sequence: Synthetic oligonucleotide
gcgccuuuggcugaagggc

SEQ ID NO: 2206898 - RNA, 19 nt, Artificial Sequence
  Description of Artificial Sequence: Synthetic oligonucleotide
agugggcgacgaucaugag

SEQ ID NO: 2206899 - RNA, 19 nt, Artificial Sequence
  Description of Artificial Sequence: Synthetic oligonucleotide
ccagcacccgacuguaaag

SEQ ID NO: 2206900 - RNA, 19 nt, Artificial Sequence
  Description of Artificial Sequence: Synthetic oligonucleotide
aggcagugggcgacgauca

SEQ ID NO: 2206901 - RNA, 19 nt, Artificial Sequence
  Description of Artificial Sequence: Synthetic oligonucleotide
gcuaccugcuccugggaca

SEQ ID NO: 2206902 - RNA, 19 nt, Artificial Sequence
  Description of Artificial Sequence: Synthetic oligonucleotide
guuaggcugcacuggacau

SEQ ID NO: 2206903 - RNA, 19 nt, Artificial Sequence
  Description of Artificial Sequence: Synthetic oligonucleotide
ccaauauggcacccacccc

SEQ ID NO: 2206904 - RNA, 19 nt, Artificial Sequence
  Description of Artificial Sequence: Synthetic oligonucleotide
ugauagggcugggacgcua

SEQ ID NO: 2206905 - RNA, 19 nt, Artificial Sequence
  Description of Artificial Sequence: Synthetic oligonucleotide
acucaggcgggacguccca

SEQ ID NO: 2206906 - RNA, 19 nt, Artificial Sequence
  Description of Artificial Sequence: Synthetic oligonucleotide
gugaccaauauggcaccca

SEQ ID NO: 2206907 - RNA, 19 nt, Artificial Sequence
  Description of Artificial Sequence: Synthetic oligonucleotide
augguuugacaaggaaauu

SEQ ID NO: 2206908 - RNA, 19 nt, Artificial Sequence
  Description of Artificial Sequence: Synthetic oligonucleotide
cacguaccaccaguucccc

SEQ ID NO: 2206909 - RNA, 19 nt, Artificial Sequence
  Description of Artificial Sequence: Synthetic oligonucleotide
augacucaggcgggacguc

SEQ ID NO: 2206910 - RNA, 19 nt, Artificial Sequence
  Description of Artificial Sequence: Synthetic oligonucleotide
gcucaagguaugcgguggc

SEQ ID NO: 2206911 - RNA, 19 nt, Artificial Sequence
  Description of Artificial Sequence: Synthetic oligonucleotide
cuugucuccuccaggcagu

SEQ ID NO: 2206912 - RNA, 19 nt, Artificial Sequence
  Description of Artificial Sequence: Synthetic oligonucleotide
gggcugggacgcuaggaug

SEQ ID NO: 2206913 - RNA, 19 nt, Artificial Sequence
  Description of Artificial Sequence: Synthetic oligonucleotide
auggaacucugcacuggcu

SEQ ID NO: 2206914 - RNA, 19 nt, Artificial Sequence
  Description of Artificial Sequence: Synthetic oligonucleotide
guaugcgguggcacguuca

SEQ ID NO: 2206915 - RNA, 19 nt, Artificial Sequence
  Description of Artificial Sequence: Synthetic oligonucleotide
uggcaguaauggucuuguc

SEQ ID NO: 2206916 - RNA, 19 nt, Artificial Sequence
  Description of Artificial Sequence: Synthetic oligonucleotide
guagcucccugcugucgca

SEQ ID NO: 2206917 - RNA, 19 nt, Artificial Sequence
  Description of Artificial Sequence: Synthetic oligonucleotide
ggaggacacaacagcagga

SEQ ID NO: 2206918 - RNA, 19 nt, Artificial Sequence
  Description of Artificial Sequence: Synthetic oligonucleotide
gcacgucuaccaucccagg

SEQ ID NO: 2206919 - RNA, 19 nt, Artificial Sequence
  Description of Artificial Sequence: Synthetic oligonucleotide
guagacucgugggccucag

SEQ ID NO: 2206920 - RNA, 19 nt, Artificial Sequence
  Description of Artificial Sequence: Synthetic oligonucleotide
aggagcagcuguggcugag

SEQ ID NO: 2206921 - RNA, 19 nt, Artificial Sequence
  Description of Artificial Sequence: Synthetic oligonucleotide
ggcaucaaagauccagggu

SEQ ID NO: 2206922 - RNA, 19 nt, Artificial Sequence
  Description of Artificial Sequence: Synthetic oligonucleotide
cauugcaagcgaugcccaa

SEQ ID NO: 2206923 - RNA, 19 nt, Artificial Sequence
  Description of Artificial Sequence: Synthetic oligonucleotide
cuccacaaagaugauuccu

SEQ ID NO: 2206924 - RNA, 19 nt, Artificial Sequence
  Description of Artificial Sequence: Synthetic oligonucleotide
gucgcagccaggaggcuga

SEQ ID NO: 2206925 - RNA, 19 nt, Artificial Sequence
  Description of Artificial Sequence: Synthetic oligonucleotide
gagcggcgcaggaagacaa

SEQ ID NO: 2206926 - RNA, 19 nt, Artificial Sequence
  Description of Artificial Sequence: Synthetic oligonucleotide
cacaucucugucuccugua

SEQ ID NO: 2206927 - RNA, 19 nt, Artificial Sequence
  Description of Artificial Sequence: Synthetic oligonucleotide
gaugccaguauggccgagu

SEQ ID NO: 2206928 - RNA, 19 nt, Artificial Sequence
  Description of Artificial Sequence: Synthetic oligonucleotide
ugcccuccaggcacgucua

SEQ ID NO: 2206929 - RNA, 19 nt, Artificial Sequence
  Description of Artificial Sequence: Synthetic oligonucleotide
ggcugggacgcuaggauga

SEQ ID NO: 2206930 - RNA, 19 nt, Artificial Sequence
  Description of Artificial Sequence: Synthetic oligonucleotide
cuguacccucugugucucc

SEQ ID NO: 2206931 - RNA, 19 nt, Artificial Sequence
  Description of Artificial Sequence: Synthetic oligonucleotide
cagcuguggcugaggugag

SEQ ID NO: 2206932 - RNA, 19 nt, Artificial Sequence
  Description of Artificial Sequence: Synthetic oligonucleotide
gguugggucuguagccuug

SEQ ID NO: 2206933 - RNA, 19 nt, Artificial Sequence
  Description of Artificial Sequence: Synthetic oligonucleotide
cucaagguaugcgguggca

SEQ ID NO: 2206934 - RNA, 19 nt, Artificial Sequence
  Description of Artificial Sequence: Synthetic oligonucleotide
gguaugcgguggcacguuc

SEQ ID NO: 2206935 - RNA, 19 nt, Artificial Sequence
  Description of Artificial Sequence: Synthetic oligonucleotide
gcucccugcugucgcagcc

SEQ ID NO: 2206936 - RNA, 19 nt, Artificial Sequence
  Description of Artificial Sequence: Synthetic oligonucleotide
cgucuaccaucccaggcgc

SEQ ID NO: 2206937 - RNA, 19 nt, Artificial Sequence
  Description of Artificial Sequence: Synthetic oligonucleotide
cucugaaguuaggcugcac

SEQ ID NO: 2206938 - RNA, 19 nt, Artificial Sequence
  Description of Artificial Sequence: Synthetic oligonucleotide
cugcugucgcagccaggag

SEQ ID NO: 2206939 - RNA, 19 nt, Artificial Sequence
  Description of Artificial Sequence: Synthetic oligonucleotide
agaucuccuguaggacacu

SEQ ID NO: 2206940 - RNA, 19 nt, Artificial Sequence
  Description of Artificial Sequence: Synthetic oligonucleotide
caggguccaugguuugaca

SEQ ID NO: 2206941 - RNA, 19 nt, Artificial Sequence
  Description of Artificial Sequence: Synthetic oligonucleotide
gcccgcgcuggucucauug

SEQ ID NO: 2206942 - RNA, 19 nt, Artificial Sequence
  Description of Artificial Sequence: Synthetic oligonucleotide
cgcuaggaugacucaggcg

SEQ ID NO: 2206943 - RNA, 19 nt, Artificial Sequence
  Description of Artificial Sequence: Synthetic oligonucleotide
ggaccaguuugugcccagg

SEQ ID NO: 2206944 - RNA, 19 nt, Artificial Sequence
  Description of Artificial Sequence: Synthetic oligonucleotide
aagucccgguaggaaguua

SEQ ID NO: 2206945 - RNA, 19 nt, Artificial Sequence
  Description of Artificial Sequence: Synthetic oligonucleotide
acccgacuguaaaggagga

SEQ ID NO: 2206946 - RNA, 19 nt, Artificial Sequence
  Description of Artificial Sequence: Synthetic oligonucleotide
agggugcccuccaggcacg

SEQ ID NO: 2206947 - RNA, 19 nt, Artificial Sequence
  Description of Artificial Sequence: Synthetic oligonucleotide
cucaggcgggacgucccag

SEQ ID NO: 2206948 - RNA, 19 nt, Artificial Sequence
  Description of Artificial Sequence: Synthetic oligonucleotide
gucuaccaucccaggcgcc

SEQ ID NO: 2206949 - RNA, 19 nt, Artificial Sequence
  Description of Artificial Sequence: Synthetic oligonucleotide
ccaccugcugagagcggcg

SEQ ID NO: 2206950 - RNA, 19 nt, Artificial Sequence
  Description of Artificial Sequence: Synthetic oligonucleotide
cuaccaucccaggcgccuc

SEQ ID NO: 2206951 - RNA, 19 nt, Artificial Sequence
  Description of Artificial Sequence: Synthetic oligonucleotide
gugagcuggaugccaguau

SEQ ID NO: 2206952 - RNA, 19 nt, Artificial Sequence
  Description of Artificial Sequence: Synthetic oligonucleotide
ggccugagguucagggugc

SEQ ID NO: 2206953 - RNA, 19 nt, Artificial Sequence
  Description of Artificial Sequence: Synthetic oligonucleotide
cucaggguccaugguuuga

SEQ ID NO: 2206954 - RNA, 19 nt, Artificial Sequence
  Description of Artificial Sequence: Synthetic oligonucleotide
gggacgucccagcacccga

SEQ ID NO: 2206955 - RNA, 19 nt, Artificial Sequence
  Description of Artificial Sequence: Synthetic oligonucleotide
gccuuuggcugaagggcag

SEQ ID NO: 2206956 - RNA, 19 nt, Artificial Sequence
  Description of Artificial Sequence: Synthetic oligonucleotide
auggccgagugaaggcgga

SEQ ID NO: 2206957 - RNA, 19 nt, Artificial Sequence
  Description of Artificial Sequence: Synthetic oligonucleotide
gggacgcuaggaugacuca

SEQ ID NO: 2206958 - RNA, 19 nt, Artificial Sequence
  Description of Artificial Sequence: Synthetic oligonucleotide
ggccgagugaaggcggaac

SEQ ID NO: 2206959 - RNA, 19 nt, Artificial Sequence
  Description of Artificial Sequence: Synthetic oligonucleotide
gacgucccagcacccgacu

SEQ ID NO: 2206960 - RNA, 19 nt, Artificial Sequence
  Description of Artificial Sequence: Synthetic oligonucleotide
gagcugggcucagcucuac

SEQ ID NO: 2206961 - RNA, 19 nt, Artificial Sequence
  Description of Artificial Sequence: Synthetic oligonucleotide
cgcuggucucauugcaagc

SEQ ID NO: 2206962 - RNA, 19 nt, Artificial Sequence
  Description of Artificial Sequence: Synthetic oligonucleotide
uggcucugcccgcgcuggu

SEQ ID NO: 2206963 - RNA, 19 nt, Artificial Sequence
  Description of Artificial Sequence: Synthetic oligonucleotide
cccgcgcuggucucauugc

SEQ ID NO: 2206964 - RNA, 19 nt, Artificial Sequence
  Description of Artificial Sequence: Synthetic oligonucleotide
ccagguucaggagcagcug

SEQ ID NO: 2206965 - RNA, 19 nt, Artificial Sequence
  Description of Artificial Sequence: Synthetic oligonucleotide
aggcggaacuuaggggcau

SEQ ID NO: 2206966 - RNA, 19 nt, Artificial Sequence
  Description of Artificial Sequence: Synthetic oligonucleotide
caucagcugugaccaauau

SEQ ID NO: 2206967 - RNA, 19 nt, Artificial Sequence
  Description of Artificial Sequence: Synthetic oligonucleotide
cugcuaccugcuccuggga

SEQ ID NO: 2206968 - RNA, 19 nt, Artificial Sequence
  Description of Artificial Sequence: Synthetic oligonucleotide
cucugcccgcgcuggucuc

SEQ ID NO: 2206969 - RNA, 19 nt, Artificial Sequence
  Description of Artificial Sequence: Synthetic oligonucleotide
ccuugucucccagauggca

SEQ ID NO: 2206970 - RNA, 19 nt, Artificial Sequence
  Description of Artificial Sequence: Synthetic oligonucleotide
agguaugcgguggcacguu

SEQ ID NO: 2206971 - RNA, 19 nt, Artificial Sequence
  Description of Artificial Sequence: Synthetic oligonucleotide
caccucaggguccaugguu

SEQ ID NO: 2206972 - RNA, 19 nt, Artificial Sequence
  Description of Artificial Sequence: Synthetic oligonucleotide
ccagggagguccuugugcu

SEQ ID NO: 2206973 - RNA, 19 nt, Artificial Sequence
  Description of Artificial Sequence: Synthetic oligonucleotide
ucgcagccaggaggcugag

SEQ ID NO: 2206974 - RNA, 19 nt, Artificial Sequence
  Description of Artificial Sequence: Synthetic oligonucleotide
gcucuacugcuaccugcuc

SEQ ID NO: 2206975 - RNA, 19 nt, Artificial Sequence
  Description of Artificial Sequence: Synthetic oligonucleotide
ggacgucccagcacccgac

SEQ ID NO: 2206976 - RNA, 19 nt, Artificial Sequence
  Description of Artificial Sequence: Synthetic oligonucleotide
guggcacguucaccucauc

SEQ ID NO: 2206977 - RNA, 19 nt, Artificial Sequence
  Description of Artificial Sequence: Synthetic oligonucleotide
cccagcacccgacuguaaa

SEQ ID NO: 2206978 - RNA, 19 nt, Artificial Sequence
  Description of Artificial Sequence: Synthetic oligonucleotide
gaagucccgguaggaaguu

SEQ ID NO: 2206979 - RNA, 19 nt, Artificial Sequence
  Description of Artificial Sequence: Synthetic oligonucleotide
gcggaacuuaggggcauca

SEQ ID NO: 2206980 - RNA, 19 nt, Artificial Sequence
  Description of Artificial Sequence: Synthetic oligonucleotide
gcugggacgcuaggaugac

SEQ ID NO: 2206981 - RNA, 19 nt, Artificial Sequence
  Description of Artificial Sequence: Synthetic oligonucleotide
ggaugccaguauggccgag

SEQ ID NO: 2206982 - RNA, 19 nt, Artificial Sequence
  Description of Artificial Sequence: Synthetic oligonucleotide
ccaauaacaguggcuggcu

SEQ ID NO: 2206983 - RNA, 19 nt, Artificial Sequence
  Description of Artificial Sequence: Synthetic oligonucleotide
cgaucaugagcugggcuca

SEQ ID NO: 2206984 - RNA, 19 nt, Artificial Sequence
  Description of Artificial Sequence: Synthetic oligonucleotide
gauccaggguugggucugu

SEQ ID NO: 2206985 - RNA, 19 nt, Artificial Sequence
  Description of Artificial Sequence: Synthetic oligonucleotide
gggcgacgaucaugagcug

SEQ ID NO: 2206986 - RNA, 19 nt, Artificial Sequence
  Description of Artificial Sequence: Synthetic oligonucleotide
cccagauggcaguaauggu

SEQ ID NO: 2206987 - RNA, 19 nt, Artificial Sequence
  Description of Artificial Sequence: Synthetic oligonucleotide
gccugagguucagggugcc

SEQ ID NO: 2206988 - RNA, 19 nt, Artificial Sequence
  Description of Artificial Sequence: Synthetic oligonucleotide
gcgguggcacguucaccuc

SEQ ID NO: 2206989 - RNA, 19 nt, Artificial Sequence
  Description of Artificial Sequence: Synthetic oligonucleotide
gcuugcuuuucaccccaau

SEQ ID NO: 2206990 - RNA, 19 nt, Artificial Sequence
  Description of Artificial Sequence: Synthetic oligonucleotide
gucccgguaggaaguuagu

SEQ ID NO: 2206991 - RNA, 19 nt, Artificial Sequence
  Description of Artificial Sequence: Synthetic oligonucleotide
cgacgaucaugagcugggc

SEQ ID NO: 2206992 - RNA, 19 nt, Artificial Sequence
  Description of Artificial Sequence: Synthetic oligonucleotide
ggcucugcccgcgcugguc

SEQ ID NO: 2206993 - RNA, 19 nt, Artificial Sequence
  Description of Artificial Sequence: Synthetic oligonucleotide
cgagugaaggcggaacuua

SEQ ID NO: 2206994 - RNA, 19 nt, Artificial Sequence
  Description of Artificial Sequence: Synthetic oligonucleotide
cgguaggaaguuaguccca

SEQ ID NO: 2206995 - RNA, 19 nt, Artificial Sequence
  Description of Artificial Sequence: Synthetic oligonucleotide
ccgcgcuggucucauugca

SEQ ID NO: 2206996 - RNA, 19 nt, Artificial Sequence
  Description of Artificial Sequence: Synthetic oligonucleotide
gguggcacguucaccucau

SEQ ID NO: 2206997 - RNA, 19 nt, Artificial Sequence
  Description of Artificial Sequence: Synthetic oligonucleotide
gugauagggcugggacgcu

SEQ ID NO: 2206998 - RNA, 19 nt, Artificial Sequence
  Description of Artificial Sequence: Synthetic oligonucleotide
gcgggacgucccagcaccc

SEQ ID NO: 2206999 - RNA, 19 nt, Artificial Sequence
  Description of Artificial Sequence: Synthetic oligonucleotide
ccucugaaguuaggcugca

SEQ ID NO: 2207000 - RNA, 19 nt, Artificial Sequence
  Description of Artificial Sequence: Synthetic oligonucleotide
cccaggcgccucagccacc

SEQ ID NO: 2207001 - RNA, 19 nt, Artificial Sequence
  Description of Artificial Sequence: Synthetic oligonucleotide
cugggacgcuaggaugacu

SEQ ID NO: 2207002 - RNA, 19 nt, Artificial Sequence
  Description of Artificial Sequence: Synthetic oligonucleotide
ccaccagagcacagggccu

SEQ ID NO: 2207003 - RNA, 19 nt, Artificial Sequence
  Description of Artificial Sequence: Synthetic oligonucleotide
ggguugggucuguagccuu

SEQ ID NO: 2207004 - RNA, 19 nt, Artificial Sequence
  Description of Artificial Sequence: Synthetic oligonucleotide
aggcugcacuggacaugga

SEQ ID NO: 2207005 - RNA, 19 nt, Artificial Sequence
  Description of Artificial Sequence: Synthetic oligonucleotide
ugcccgcgcuggucucauu

SEQ ID NO: 2207006 - RNA, 19 nt, Artificial Sequence
  Description of Artificial Sequence: Synthetic oligonucleotide
gggcagaguugugcccaca

SEQ ID NO: 2207007 - RNA, 19 nt, Artificial Sequence
  Description of Artificial Sequence: Synthetic oligonucleotide
ccaguggaucugccagaua

SEQ ID NO: 2207008 - RNA, 19 nt, Artificial Sequence
  Description of Artificial Sequence: Synthetic oligonucleotide
cugucgcagccaggaggcu

SEQ ID NO: 2207009 - RNA, 19 nt, Artificial Sequence
  Description of Artificial Sequence: Synthetic oligonucleotide
cggaacuuaggggcaucaa

SEQ ID NO: 2207010 - RNA, 19 nt, Artificial Sequence
  Description of Artificial Sequence: Synthetic oligonucleotide
ccgagugaaggcggaacuu

SEQ ID NO: 2207011 - RNA, 19 nt, Artificial Sequence
  Description of Artificial Sequence: Synthetic oligonucleotide
cccgacuguaaaggaggau

SEQ ID NO: 2207012 - RNA, 19 nt, Artificial Sequence
  Description of Artificial Sequence: Synthetic oligonucleotide
cugcccgcgcuggucucau

SEQ ID NO: 2207013 - RNA, 19 nt, Artificial Sequence
  Description of Artificial Sequence: Synthetic oligonucleotide
aacuaagauccccacaggc

SEQ ID NO: 2207014 - RNA, 19 nt, Artificial Sequence
  Description of Artificial Sequence: Synthetic oligonucleotide
gaaacuaagauccccacag

SEQ ID NO: 2207015 - RNA, 19 nt, Artificial Sequence
  Description of Artificial Sequence: Synthetic oligonucleotide
aacuugaugaaucucccag

SEQ ID NO: 2207016 - RNA, 19 nt, Artificial Sequence
  Description of Artificial Sequence: Synthetic oligonucleotide
cugcuggaaacuaagaucc

SEQ ID NO: 2207017 - RNA, 19 nt, Artificial Sequence
  Description of Artificial Sequence: Synthetic oligonucleotide
agcuggaugauccugaucu

SEQ ID NO: 2207018 - RNA, 19 nt, Artificial Sequence
  Description of Artificial Sequence: Synthetic oligonucleotide
acuugaugaaucucccagc

SEQ ID NO: 2207019 - RNA, 19 nt, Artificial Sequence
  Description of Artificial Sequence: Synthetic oligonucleotide
acaaagaacuugaugaauc

SEQ ID NO: 2207020 - RNA, 19 nt, Artificial Sequence
  Description of Artificial Sequence: Synthetic oligonucleotide
guaagucugggucaucugg

SEQ ID NO: 2207021 - RNA, 19 nt, Artificial Sequence
  Description of Artificial Sequence: Synthetic oligonucleotide
gaagccguaagucuggguc

SEQ ID NO: 2207022 - RNA, 19 nt, Artificial Sequence
  Description of Artificial Sequence: Synthetic oligonucleotide
gugaagacaauuccauggg

SEQ ID NO: 2207023 - RNA, 19 nt, Artificial Sequence
  Description of Artificial Sequence: Synthetic oligonucleotide
auggucggccaucacaggc

SEQ ID NO: 2207024 - RNA, 19 nt, Artificial Sequence
  Description of Artificial Sequence: Synthetic oligonucleotide
ucuccggcgauucauggcc

SEQ ID NO: 2207025 - RNA, 19 nt, Artificial Sequence
  Description of Artificial Sequence: Synthetic oligonucleotide
aggaaccucacucugugag

SEQ ID NO: 2207026 - RNA, 19 nt, Artificial Sequence
  Description of Artificial Sequence: Synthetic oligonucleotide
gaaucucccagcuccaggc

SEQ ID NO: 2207027 - RNA, 19 nt, Artificial Sequence
  Description of Artificial Sequence: Synthetic oligonucleotide
agaagcucccuguacuugg

SEQ ID NO: 2207028 - RNA, 19 nt, Artificial Sequence
  Description of Artificial Sequence: Synthetic oligonucleotide
cuaagauccccacaggcug

SEQ ID NO: 2207029 - RNA, 19 nt, Artificial Sequence
  Description of Artificial Sequence: Synthetic oligonucleotide
cacgugguaggcaaggccg

SEQ ID NO: 2207030 - RNA, 19 nt, Artificial Sequence
  Description of Artificial Sequence: Synthetic oligonucleotide
ugaaucucccagcuccagg

SEQ ID NO: 2207031 - RNA, 19 nt, Artificial Sequence
  Description of Artificial Sequence: Synthetic oligonucleotide
gacaauuccaugggcaucc

SEQ ID NO: 2207032 - RNA, 19 nt, Artificial Sequence
  Description of Artificial Sequence: Synthetic oligonucleotide
cacucugugagcugaagag

SEQ ID NO: 2207033 - RNA, 19 nt, Artificial Sequence
  Description of Artificial Sequence: Synthetic oligonucleotide
acggccagccaccagcucc

SEQ ID NO: 2207034 - RNA, 19 nt, Artificial Sequence
  Description of Artificial Sequence: Synthetic oligonucleotide
uaagauccccacaggcugg

SEQ ID NO: 2207035 - RNA, 19 nt, Artificial Sequence
  Description of Artificial Sequence: Synthetic oligonucleotide
ucugacaggagaagcuccc

SEQ ID NO: 2207036 - RNA, 19 nt, Artificial Sequence
  Description of Artificial Sequence: Synthetic oligonucleotide
agcuggugggcacacaguc

SEQ ID NO: 2207037 - RNA, 19 nt, Artificial Sequence
  Description of Artificial Sequence: Synthetic oligonucleotide
gguccuguagucuucagug

SEQ ID NO: 2207038 - RNA, 19 nt, Artificial Sequence
  Description of Artificial Sequence: Synthetic oligonucleotide
ugguaggcaaggccgagcc

SEQ ID NO: 2207039 - RNA, 19 nt, Artificial Sequence
  Description of Artificial Sequence: Synthetic oligonucleotide
cugaguagagccuggcgcc

SEQ ID NO: 2207040 - RNA, 19 nt, Artificial Sequence
  Description of Artificial Sequence: Synthetic oligonucleotide
gccuuaaggacucuggucc

SEQ ID NO: 2207041 - RNA, 19 nt, Artificial Sequence
  Description of Artificial Sequence: Synthetic oligonucleotide
caucacaggccuuaaggac

SEQ ID NO: 2207042 - RNA, 19 nt, Artificial Sequence
  Description of Artificial Sequence: Synthetic oligonucleotide
ucacucugugagcugaaga

SEQ ID NO: 2207043 - RNA, 19 nt, Artificial Sequence
  Description of Artificial Sequence: Synthetic oligonucleotide
uggcuucacacccacagaa

SEQ ID NO: 2207044 - RNA, 19 nt, Artificial Sequence
  Description of Artificial Sequence: Synthetic oligonucleotide
aggucaugcacgugguagg

SEQ ID NO: 2207045 - RNA, 19 nt, Artificial Sequence
  Description of Artificial Sequence: Synthetic oligonucleotide
gccaucacaggccuuaagg

SEQ ID NO: 2207046 - RNA, 19 nt, Artificial Sequence
  Description of Artificial Sequence: Synthetic oligonucleotide
aagccguaagucuggguca

SEQ ID NO: 2207047 - RNA, 19 nt, Artificial Sequence
  Description of Artificial Sequence: Synthetic oligonucleotide
uccuguagucuucagugaa

SEQ ID NO: 2207048 - RNA, 19 nt, Artificial Sequence
  Description of Artificial Sequence: Synthetic oligonucleotide
ucucccagcuccaggcacg

SEQ ID NO: 2207049 - RNA, 19 nt, Artificial Sequence
  Description of Artificial Sequence: Synthetic oligonucleotide
ucaugcacgugguaggcaa

SEQ ID NO: 2207050 - RNA, 19 nt, Artificial Sequence
  Description of Artificial Sequence: Synthetic oligonucleotide
cuccucagcgcgaugggcg

SEQ ID NO: 2207051 - RNA, 19 nt, Artificial Sequence
  Description of Artificial Sequence: Synthetic oligonucleotide
ugaagaguccaggagucga

SEQ ID NO: 2207052 - RNA, 19 nt, Artificial Sequence
  Description of Artificial Sequence: Synthetic oligonucleotide
uucccuauccccuccggca

SEQ ID NO: 2207053 - RNA, 19 nt, Artificial Sequence
  Description of Artificial Sequence: Synthetic oligonucleotide
agcgcguccucgaacagcc

SEQ ID NO: 2207054 - RNA, 19 nt, Artificial Sequence
  Description of Artificial Sequence: Synthetic oligonucleotide
ggucaucugguccugcugg

SEQ ID NO: 2207055 - RNA, 19 nt, Artificial Sequence
  Description of Artificial Sequence: Synthetic oligonucleotide
acauggucggccaucacag

SEQ ID NO: 2207056 - RNA, 19 nt, Artificial Sequence
  Description of Artificial Sequence: Synthetic oligonucleotide
cucugacaggagaagcucc

SEQ ID NO: 2207057 - RNA, 19 nt, Artificial Sequence
  Description of Artificial Sequence: Synthetic oligonucleotide
cacagaagcccagagcugc

SEQ ID NO: 2207058 - RNA, 19 nt, Artificial Sequence
  Description of Artificial Sequence: Synthetic oligonucleotide
gaaggaggguuccagagcu

SEQ ID NO: 2207059 - RNA, 19 nt, Artificial Sequence
  Description of Artificial Sequence: Synthetic oligonucleotide
uaucuggcaggcgaaggag

SEQ ID NO: 2207060 - RNA, 19 nt, Artificial Sequence
  Description of Artificial Sequence: Synthetic oligonucleotide
aggacucugguccuguagu

SEQ ID NO: 2207061 - RNA, 19 nt, Artificial Sequence
  Description of Artificial Sequence: Synthetic oligonucleotide
uggaaacuaagauccccac

SEQ ID NO: 2207062 - RNA, 19 nt, Artificial Sequence
  Description of Artificial Sequence: Synthetic oligonucleotide
caggccuuaaggacucugg

SEQ ID NO: 2207063 - RNA, 19 nt, Artificial Sequence
  Description of Artificial Sequence: Synthetic oligonucleotide
uggaugauccugaucucuc

SEQ ID NO: 2207064 - RNA, 19 nt, Artificial Sequence
  Description of Artificial Sequence: Synthetic oligonucleotide
gaguccaggagucgacucc

SEQ ID NO: 2207065 - RNA, 19 nt, Artificial Sequence
  Description of Artificial Sequence: Synthetic oligonucleotide
cacagcgcagcucaggcug

SEQ ID NO: 2207066 - RNA, 19 nt, Artificial Sequence
  Description of Artificial Sequence: Synthetic oligonucleotide
uggagccccagcuugcagc

SEQ ID NO: 2207067 - RNA, 19 nt, Artificial Sequence
  Description of Artificial Sequence: Synthetic oligonucleotide
uggucggccaucacaggcc

SEQ ID NO: 2207068 - RNA, 19 nt, Artificial Sequence
  Description of Artificial Sequence: Synthetic oligonucleotide
caggagucgacuccucacg

SEQ ID NO: 2207069 - RNA, 19 nt, Artificial Sequence
  Description of Artificial Sequence: Synthetic oligonucleotide
uguagucuucagugaagac

SEQ ID NO: 2207070 - RNA, 19 nt, Artificial Sequence
  Description of Artificial Sequence: Synthetic oligonucleotide
ugcaggucggccagcgucc

SEQ ID NO: 2207071 - RNA, 19 nt, Artificial Sequence
  Description of Artificial Sequence: Synthetic oligonucleotide
cuccucacguaucuggcag

SEQ ID NO: 2207072 - RNA, 19 nt, Artificial Sequence
  Description of Artificial Sequence: Synthetic oligonucleotide
acuaagauccccacaggcu

SEQ ID NO: 2207073 - RNA, 19 nt, Artificial Sequence
  Description of Artificial Sequence: Synthetic oligonucleotide
caggggauccgccugcgcg

SEQ ID NO: 2207074 - RNA, 19 nt, Artificial Sequence
  Description of Artificial Sequence: Synthetic oligonucleotide
gaggacuccagcguucacc

SEQ ID NO: 2207075 - RNA, 19 nt, Artificial Sequence
  Description of Artificial Sequence: Synthetic oligonucleotide
uccucacguaucuggcagg

SEQ ID NO: 2207076 - RNA, 19 nt, Artificial Sequence
  Description of Artificial Sequence: Synthetic oligonucleotide
aucacaggccuuaaggacu

SEQ ID NO: 2207077 - RNA, 19 nt, Artificial Sequence
  Description of Artificial Sequence: Synthetic oligonucleotide
uggcuccucagcgcgaugg

SEQ ID NO: 2207078 - RNA, 19 nt, Artificial Sequence
  Description of Artificial Sequence: Synthetic oligonucleotide
cagcaucucggacagugag

SEQ ID NO: 2207079 - RNA, 19 nt, Artificial Sequence
  Description of Artificial Sequence: Synthetic oligonucleotide
accccgaaggccuccgacg

SEQ ID NO: 2207080 - RNA, 19 nt, Artificial Sequence
  Description of Artificial Sequence: Synthetic oligonucleotide
uccucagcgcgaugggcgg

SEQ ID NO: 2207081 - RNA, 19 nt, Artificial Sequence
  Description of Artificial Sequence: Synthetic oligonucleotide
ccagcguucaccaggugcg

SEQ ID NO: 2207082 - RNA, 19 nt, Artificial Sequence
  Description of Artificial Sequence: Synthetic oligonucleotide
uucccggugacccgcucag

SEQ ID NO: 2207083 - RNA, 19 nt, Artificial Sequence
  Description of Artificial Sequence: Synthetic oligonucleotide
aagauccccacaggcuggg

SEQ ID NO: 2207084 - RNA, 19 nt, Artificial Sequence
  Description of Artificial Sequence: Synthetic oligonucleotide
ggaccuucgccccaggagc

SEQ ID NO: 2207085 - RNA, 19 nt, Artificial Sequence
  Description of Artificial Sequence: Synthetic oligonucleotide
uccgcagcaugcugaguag

SEQ ID NO: 2207086 - RNA, 19 nt, Artificial Sequence
  Description of Artificial Sequence: Synthetic oligonucleotide
gagcacggaggccaggaac

SEQ ID NO: 2207087 - RNA, 19 nt, Artificial Sequence
  Description of Artificial Sequence: Synthetic oligonucleotide
uacuuggcccuccgcagca

SEQ ID NO: 2207088 - RNA, 19 nt, Artificial Sequence
  Description of Artificial Sequence: Synthetic oligonucleotide
aagaguccaggagucgacu

SEQ ID NO: 2207089 - RNA, 19 nt, Artificial Sequence
  Description of Artificial Sequence: Synthetic oligonucleotide
agcgcgaugggcggcagcg

SEQ ID NO: 2207090 - RNA, 19 nt, Artificial Sequence
  Description of Artificial Sequence: Synthetic oligonucleotide
guaucuggcaggcgaagga

SEQ ID NO: 2207091 - RNA, 19 nt, Artificial Sequence
  Description of Artificial Sequence: Synthetic oligonucleotide
uuaaggacucugguccugu

SEQ ID NO: 2207092 - RNA, 19 nt, Artificial Sequence
  Description of Artificial Sequence: Synthetic oligonucleotide
cugggcuccaaugagguca

SEQ ID NO: 2207093 - RNA, 19 nt, Artificial Sequence
  Description of Artificial Sequence: Synthetic oligonucleotide
aggugcgugaucuccgggu

SEQ ID NO: 2207094 - RNA, 19 nt, Artificial Sequence
  Description of Artificial Sequence: Synthetic oligonucleotide
agccucacugccgacgggg

SEQ ID NO: 2207095 - RNA, 19 nt, Artificial Sequence
  Description of Artificial Sequence: Synthetic oligonucleotide
caaagaacuugaugaaucu

SEQ ID NO: 2207096 - RNA, 19 nt, Artificial Sequence
  Description of Artificial Sequence: Synthetic oligonucleotide
aggccuuaaggacucuggu

SEQ ID NO: 2207097 - RNA, 19 nt, Artificial Sequence
  Description of Artificial Sequence: Synthetic oligonucleotide
agcaucucggacagugagg

SEQ ID NO: 2207098 - RNA, 19 nt, Artificial Sequence
  Description of Artificial Sequence: Synthetic oligonucleotide
cuucccuauccccuccggc

SEQ ID NO: 2207099 - RNA, 19 nt, Artificial Sequence
  Description of Artificial Sequence: Synthetic oligonucleotide
ucccuauccccuccggcac

SEQ ID NO: 2207100 - RNA, 19 nt, Artificial Sequence
  Description of Artificial Sequence: Synthetic oligonucleotide
agugaggacuccagcguuc

SEQ ID NO: 2207101 - RNA, 19 nt, Artificial Sequence
  Description of Artificial Sequence: Synthetic oligonucleotide
cacauggucggccaucaca

SEQ ID NO: 2207102 - RNA, 19 nt, Artificial Sequence
  Description of Artificial Sequence: Synthetic oligonucleotide
uccggcgauucauggcccg

SEQ ID NO: 2207103 - RNA, 19 nt, Artificial Sequence
  Description of Artificial Sequence: Synthetic oligonucleotide
caccuggcuccucagcgcg

SEQ ID NO: 2207104 - RNA, 19 nt, Artificial Sequence
  Description of Artificial Sequence: Synthetic oligonucleotide
aggagucgacuccucacgu

SEQ ID NO: 2207105 - RNA, 19 nt, Artificial Sequence
  Description of Artificial Sequence: Synthetic oligonucleotide
ugcgugaucuccggguccc

SEQ ID NO: 2207106 - RNA, 19 nt, Artificial Sequence
  Description of Artificial Sequence: Synthetic oligonucleotide
ucucucccugcuccugaag

SEQ ID NO: 2207107 - RNA, 19 nt, Artificial Sequence
  Description of Artificial Sequence: Synthetic oligonucleotide
guacuuggcccuccgcagc

SEQ ID NO: 2207108 - RNA, 19 nt, Artificial Sequence
  Description of Artificial Sequence: Synthetic oligonucleotide
acugccgacggggaccuuc

SEQ ID NO: 2207109 - RNA, 19 nt, Artificial Sequence
  Description of Artificial Sequence: Synthetic oligonucleotide
gacaggagaagcucccugu

SEQ ID NO: 2207110 - RNA, 19 nt, Artificial Sequence
  Description of Artificial Sequence: Synthetic oligonucleotide
ggcuccuggcuucacaccc

SEQ ID NO: 2207111 - RNA, 19 nt, Artificial Sequence
  Description of Artificial Sequence: Synthetic oligonucleotide
caggagaagcucccuguac

SEQ ID NO: 2207112 - RNA, 19 nt, Artificial Sequence
  Description of Artificial Sequence: Synthetic oligonucleotide
ugaguagagccuggcgccc

SEQ ID NO: 2207113 - RNA, 19 nt, Artificial Sequence
  Description of Artificial Sequence: Synthetic oligonucleotide
cugcaggucggccagcguc

SEQ ID NO: 2207114 - RNA, 19 nt, Artificial Sequence
  Description of Artificial Sequence: Synthetic oligonucleotide
ggaaacuaagauccccaca

SEQ ID NO: 2207115 - RNA, 19 nt, Artificial Sequence
  Description of Artificial Sequence: Synthetic oligonucleotide
ugguccugcuggaaacuaa

SEQ ID NO: 2207116 - RNA, 19 nt, Artificial Sequence
  Description of Artificial Sequence: Synthetic oligonucleotide
gaucucucccugcuccuga

SEQ ID NO: 2207117 - RNA, 19 nt, Artificial Sequence
  Description of Artificial Sequence: Synthetic oligonucleotide
agcacggaggccaggaacu

SEQ ID NO: 2207118 - RNA, 19 nt, Artificial Sequence
  Description of Artificial Sequence: Synthetic oligonucleotide
uccaccgccucgcgcgccg

SEQ ID NO: 2207119 - RNA, 19 nt, Artificial Sequence
  Description of Artificial Sequence: Synthetic oligonucleotide
ggaaccucacucugugagc

SEQ ID NO: 2207120 - RNA, 19 nt, Artificial Sequence
  Description of Artificial Sequence: Synthetic oligonucleotide
cauggucggccaucacagg

SEQ ID NO: 2207121 - RNA, 19 nt, Artificial Sequence
  Description of Artificial Sequence: Synthetic oligonucleotide
gcuggaaacuaagaucccc

SEQ ID NO: 2207122 - RNA, 19 nt, Artificial Sequence
  Description of Artificial Sequence: Synthetic oligonucleotide
ugaagccguaagucugggu

SEQ ID NO: 2207123 - RNA, 19 nt, Artificial Sequence
  Description of Artificial Sequence: Synthetic oligonucleotide
caugcacgugguaggcaag

SEQ ID NO: 2207124 - RNA, 19 nt, Artificial Sequence
  Description of Artificial Sequence: Synthetic oligonucleotide
ugaucuccgggucccugaa

SEQ ID NO: 2207125 - RNA, 19 nt, Artificial Sequence
  Description of Artificial Sequence: Synthetic oligonucleotide
cuguagucuucagugaaga

SEQ ID NO: 2207126 - RNA, 19 nt, Artificial Sequence
  Description of Artificial Sequence: Synthetic oligonucleotide
auucccggugacccgcuca

SEQ ID NO: 2207127 - RNA, 19 nt, Artificial Sequence
  Description of Artificial Sequence: Synthetic oligonucleotide
ugcgcccgcccucagggga

SEQ ID NO: 2207128 - RNA, 19 nt, Artificial Sequence
  Description of Artificial Sequence: Synthetic oligonucleotide
gaugaaucucccagcucca

SEQ ID NO: 2207129 - RNA, 19 nt, Artificial Sequence
  Description of Artificial Sequence: Synthetic oligonucleotide
gggaccuucgccccaggag

SEQ ID NO: 2207130 - RNA, 19 nt, Artificial Sequence
  Description of Artificial Sequence: Synthetic oligonucleotide
gucuccggcgauucauggc

SEQ ID NO: 2207131 - RNA, 19 nt, Artificial Sequence
  Description of Artificial Sequence: Synthetic oligonucleotide
cugccgacggggaccuucg

SEQ ID NO: 2207132 - RNA, 19 nt, Artificial Sequence
  Description of Artificial Sequence: Synthetic oligonucleotide
ucggacagugaggacucca

SEQ ID NO: 2207133 - RNA, 19 nt, Artificial Sequence
  Description of Artificial Sequence: Synthetic oligonucleotide
uucaccccgaaggccuccg

SEQ ID NO: 2207134 - RNA, 19 nt, Artificial Sequence
  Description of Artificial Sequence: Synthetic oligonucleotide
caccaggugcgugaucucc

SEQ ID NO: 2207135 - RNA, 19 nt, Artificial Sequence
  Description of Artificial Sequence: Synthetic oligonucleotide
accucacucugugagcuga

SEQ ID NO: 2207136 - RNA, 19 nt, Artificial Sequence
  Description of Artificial Sequence: Synthetic oligonucleotide
ugcacgugguaggcaaggc

SEQ ID NO: 2207137 - RNA, 19 nt, Artificial Sequence
  Description of Artificial Sequence: Synthetic oligonucleotide
caaggccgagccucacugc

SEQ ID NO: 2207138 - RNA, 19 nt, Artificial Sequence
  Description of Artificial Sequence: Synthetic oligonucleotide
agccuggcgcccuuugaca

SEQ ID NO: 2207139 - RNA, 19 nt, Artificial Sequence
  Description of Artificial Sequence: Synthetic oligonucleotide
gagucgacuccucacguau

SEQ ID NO: 2207140 - RNA, 19 nt, Artificial Sequence
  Description of Artificial Sequence: Synthetic oligonucleotide
acggaggccaggaacuucu

SEQ ID NO: 2207141 - RNA, 19 nt, Artificial Sequence
  Description of Artificial Sequence: Synthetic oligonucleotide
cuggcgcccuuugacaaag

SEQ ID NO: 2207142 - RNA, 19 nt, Artificial Sequence
  Description of Artificial Sequence: Synthetic oligonucleotide
gcauccaagucaaagccca

SEQ ID NO: 2207143 - RNA, 19 nt, Artificial Sequence
  Description of Artificial Sequence: Synthetic oligonucleotide
gacgccaggcgccgucucc

SEQ ID NO: 2207144 - RNA, 19 nt, Artificial Sequence
  Description of Artificial Sequence: Synthetic oligonucleotide
cccuuugacaaagaacuug

SEQ ID NO: 2207145 - RNA, 19 nt, Artificial Sequence
  Description of Artificial Sequence: Synthetic oligonucleotide
agcacauggucggccauca

SEQ ID NO: 2207146 - RNA, 19 nt, Artificial Sequence
  Description of Artificial Sequence: Synthetic oligonucleotide
ucaggggauccgccugcgc

SEQ ID NO: 2207147 - RNA, 19 nt, Artificial Sequence
  Description of Artificial Sequence: Synthetic oligonucleotide
uccugaucucucccugcuc

SEQ ID NO: 2207148 - RNA, 19 nt, Artificial Sequence
  Description of Artificial Sequence: Synthetic oligonucleotide
ucggccaucacaggccuua

SEQ ID NO: 2207149 - RNA, 19 nt, Artificial Sequence
  Description of Artificial Sequence: Synthetic oligonucleotide
ggcauccaagucaaagccc

SEQ ID NO: 2207150 - RNA, 19 nt, Artificial Sequence
  Description of Artificial Sequence: Synthetic oligonucleotide
ccgacggggaccuucgccc

SEQ ID NO: 2207151 - RNA, 19 nt, Artificial Sequence
  Description of Artificial Sequence: Synthetic oligonucleotide
agucgacuccucacguauc

SEQ ID NO: 2207152 - RNA, 19 nt, Artificial Sequence
  Description of Artificial Sequence: Synthetic oligonucleotide
gugcgugaucuccgggucc

SEQ ID NO: 2207153 - RNA, 19 nt, Artificial Sequence
  Description of Artificial Sequence: Synthetic oligonucleotide
ggccuuaaggacucugguc

SEQ ID NO: 2207154 - RNA, 19 nt, Artificial Sequence
  Description of Artificial Sequence: Synthetic oligonucleotide
cuguacaccuggcuccuca

SEQ ID NO: 2207155 - RNA, 19 nt, Artificial Sequence
  Description of Artificial Sequence: Synthetic oligonucleotide
cuccggcgauucauggccc

SEQ ID NO: 2207156 - RNA, 19 nt, Artificial Sequence
  Description of Artificial Sequence: Synthetic oligonucleotide
cgacuccucacguaucugg

SEQ ID NO: 2207157 - RNA, 19 nt, Artificial Sequence
  Description of Artificial Sequence: Synthetic oligonucleotide
aggcgaaggaggguuccag

SEQ ID NO: 2207158 - RNA, 19 nt, Artificial Sequence
  Description of Artificial Sequence: Synthetic oligonucleotide
cucacucugugagcugaag

SEQ ID NO: 2207159 - RNA, 19 nt, Artificial Sequence
  Description of Artificial Sequence: Synthetic oligonucleotide
acuccagcguucaccaggu

SEQ ID NO: 2207160 - RNA, 19 nt, Artificial Sequence
  Description of Artificial Sequence: Synthetic oligonucleotide
ucgacuccucacguaucug

SEQ ID NO: 2207161 - RNA, 19 nt, Artificial Sequence
  Description of Artificial Sequence: Synthetic oligonucleotide
uggcacccauucccgguga

SEQ ID NO: 2207162 - RNA, 19 nt, Artificial Sequence
  Description of Artificial Sequence: Synthetic oligonucleotide
caggugcgugaucuccggg

SEQ ID NO: 2207163 - RNA, 19 nt, Artificial Sequence
  Description of Artificial Sequence: Synthetic oligonucleotide
gcugaagaguccaggaguc

SEQ ID NO: 2207164 - RNA, 19 nt, Artificial Sequence
  Description of Artificial Sequence: Synthetic oligonucleotide
gacccgcucagccguccag

SEQ ID NO: 2207165 - RNA, 19 nt, Artificial Sequence
  Description of Artificial Sequence: Synthetic oligonucleotide
caggagcucugacaggaga

SEQ ID NO: 2207166 - RNA, 19 nt, Artificial Sequence
  Description of Artificial Sequence: Synthetic oligonucleotide
cucacguaucuggcaggcg

SEQ ID NO: 2207167 - RNA, 19 nt, Artificial Sequence
  Description of Artificial Sequence: Synthetic oligonucleotide
ugaggacuccagcguucac

SEQ ID NO: 2207168 - RNA, 19 nt, Artificial Sequence
  Description of Artificial Sequence: Synthetic oligonucleotide
acguaucuggcaggcgaag

SEQ ID NO: 2207169 - RNA, 19 nt, Artificial Sequence
  Description of Artificial Sequence: Synthetic oligonucleotide
cguccugucgggcagcagg

SEQ ID NO: 2207170 - RNA, 19 nt, Artificial Sequence
  Description of Artificial Sequence: Synthetic oligonucleotide
aggucggccagcguccugu

SEQ ID NO: 2207171 - RNA, 19 nt, Artificial Sequence
  Description of Artificial Sequence: Synthetic oligonucleotide
aaggaggguuccagagcug

SEQ ID NO: 2207172 - RNA, 19 nt, Artificial Sequence
  Description of Artificial Sequence: Synthetic oligonucleotide
cgcccuuugacaaagaacu

SEQ ID NO: 2207173 - RNA, 19 nt, Artificial Sequence
  Description of Artificial Sequence: Synthetic oligonucleotide
ggcagcgcguccucgaaca

SEQ ID NO: 2207174 - RNA, 19 nt, Artificial Sequence
  Description of Artificial Sequence: Synthetic oligonucleotide
ccugcgcccgcccucaggg

SEQ ID NO: 2207175 - RNA, 19 nt, Artificial Sequence
  Description of Artificial Sequence: Synthetic oligonucleotide
uggcaggcgaaggaggguu

SEQ ID NO: 2207176 - RNA, 19 nt, Artificial Sequence
  Description of Artificial Sequence: Synthetic oligonucleotide
ucacugccgacggggaccu

SEQ ID NO: 2207177 - RNA, 19 nt, Artificial Sequence
  Description of Artificial Sequence: Synthetic oligonucleotide
ucagccguccaggggcagc

SEQ ID NO: 2207178 - RNA, 19 nt, Artificial Sequence
  Description of Artificial Sequence: Synthetic oligonucleotide
gagccucacugccgacggg

SEQ ID NO: 2207179 - RNA, 19 nt, Artificial Sequence
  Description of Artificial Sequence: Synthetic oligonucleotide
gucgacuccucacguaucu

SEQ ID NO: 2207180 - RNA, 19 nt, Artificial Sequence
  Description of Artificial Sequence: Synthetic oligonucleotide
cugcagcgcacacagcgca

SEQ ID NO: 2207181 - RNA, 19 nt, Artificial Sequence
  Description of Artificial Sequence: Synthetic oligonucleotide
ugacccgcucagccgucca

SEQ ID NO: 2207182 - RNA, 19 nt, Artificial Sequence
  Description of Artificial Sequence: Synthetic oligonucleotide
ccaccccagcacauggucg

SEQ ID NO: 2207183 - RNA, 19 nt, Artificial Sequence
  Description of Artificial Sequence: Synthetic oligonucleotide
guccugucgggcagcaggc

SEQ ID NO: 2207184 - RNA, 19 nt, Artificial Sequence
  Description of Artificial Sequence: Synthetic oligonucleotide
cccagcaucucggacagug

SEQ ID NO: 2207185 - RNA, 19 nt, Artificial Sequence
  Description of Artificial Sequence: Synthetic oligonucleotide
gucggccagcguccugucg

SEQ ID NO: 2207186 - RNA, 19 nt, Artificial Sequence
  Description of Artificial Sequence: Synthetic oligonucleotide
cagccguccaggggcagcg

SEQ ID NO: 2207187 - RNA, 19 nt, Artificial Sequence
  Description of Artificial Sequence: Synthetic oligonucleotide
ccucgaacagcccgcgggg

SEQ ID NO: 2207188 - RNA, 19 nt, Artificial Sequence
  Description of Artificial Sequence: Synthetic oligonucleotide
gugguaggcaaggccgagc

SEQ ID NO: 2207189 - RNA, 19 nt, Artificial Sequence
  Description of Artificial Sequence: Synthetic oligonucleotide
ggugcgugaucuccggguc

SEQ ID NO: 2207190 - RNA, 19 nt, Artificial Sequence
  Description of Artificial Sequence: Synthetic oligonucleotide
caccccgaaggccuccgac

SEQ ID NO: 2207191 - RNA, 19 nt, Artificial Sequence
  Description of Artificial Sequence: Synthetic oligonucleotide
gauccgccugcgcgggccc

SEQ ID NO: 2207192 - RNA, 19 nt, Artificial Sequence
  Description of Artificial Sequence: Synthetic oligonucleotide
accggcuccuggcuucaca

SEQ ID NO: 2207193 - RNA, 19 nt, Artificial Sequence
  Description of Artificial Sequence: Synthetic oligonucleotide
caucucggacagugaggac

SEQ ID NO: 2207194 - RNA, 19 nt, Artificial Sequence
  Description of Artificial Sequence: Synthetic oligonucleotide
uccgacgccaggcgccguc

SEQ ID NO: 2207195 - RNA, 19 nt, Artificial Sequence
  Description of Artificial Sequence: Synthetic oligonucleotide
cucaggggauccgccugcg

SEQ ID NO: 2207196 - RNA, 19 nt, Artificial Sequence
  Description of Artificial Sequence: Synthetic oligonucleotide
guccucgaacagcccgcgg

SEQ ID NO: 2207197 - RNA, 19 nt, Artificial Sequence
  Description of Artificial Sequence: Synthetic oligonucleotide
cacguaucuggcaggcgaa

SEQ ID NO: 2207198 - RNA, 19 nt, Artificial Sequence
  Description of Artificial Sequence: Synthetic oligonucleotide
agcguucaccaggugcgug

SEQ ID NO: 2207199 - RNA, 19 nt, Artificial Sequence
  Description of Artificial Sequence: Synthetic oligonucleotide
ggcagcgcuuccaggaacc

SEQ ID NO: 2207200 - RNA, 19 nt, Artificial Sequence
  Description of Artificial Sequence: Synthetic oligonucleotide
gggucccugaagccguaag

SEQ ID NO: 2207201 - RNA, 19 nt, Artificial Sequence
  Description of Artificial Sequence: Synthetic oligonucleotide
gugaggacuccagcguuca

SEQ ID NO: 2207202 - RNA, 19 nt, Artificial Sequence
  Description of Artificial Sequence: Synthetic oligonucleotide
cccggugacccgcucagcc

SEQ ID NO: 2207203 - RNA, 19 nt, Artificial Sequence
  Description of Artificial Sequence: Synthetic oligonucleotide
cucccagcuccaggcacgg

SEQ ID NO: 2207204 - RNA, 19 nt, Artificial Sequence
  Description of Artificial Sequence: Synthetic oligonucleotide
ccaggugcgugaucuccgg

SEQ ID NO: 2207205 - RNA, 19 nt, Artificial Sequence
  Description of Artificial Sequence: Synthetic oligonucleotide
aggccgagccucacugccg

SEQ ID NO: 2207206 - RNA, 19 nt, Artificial Sequence
  Description of Artificial Sequence: Synthetic oligonucleotide
ccaggcacggccagccacc

SEQ ID NO: 2207207 - RNA, 19 nt, Artificial Sequence
  Description of Artificial Sequence: Synthetic oligonucleotide
gaugggcggcagcgcgucc

SEQ ID NO: 2207208 - RNA, 19 nt, Artificial Sequence
  Description of Artificial Sequence: Synthetic oligonucleotide
ucaccccgaaggccuccga

SEQ ID NO: 2207209 - RNA, 19 nt, Artificial Sequence
  Description of Artificial Sequence: Synthetic oligonucleotide
caaucccaccuucccuauc

SEQ ID NO: 2207210 - RNA, 19 nt, Artificial Sequence
  Description of Artificial Sequence: Synthetic oligonucleotide
caaugaggucaugcacgug

SEQ ID NO: 2207211 - RNA, 19 nt, Artificial Sequence
  Description of Artificial Sequence: Synthetic oligonucleotide
cuucaccccgaaggccucc

SEQ ID NO: 2207212 - RNA, 19 nt, Artificial Sequence
  Description of Artificial Sequence: Synthetic oligonucleotide
cagcuggaugauccugauc

SEQ ID NO: 2207213 - RNA, 19 nt, Artificial Sequence
  Description of Artificial Sequence: Synthetic oligonucleotide
aguagagccuggcgcccuu

SEQ ID NO: 2207214 - RNA, 19 nt, Artificial Sequence
  Description of Artificial Sequence: Synthetic oligonucleotide
acagaagcccagagcugca

SEQ ID NO: 2207215 - RNA, 19 nt, Artificial Sequence
  Description of Artificial Sequence: Synthetic oligonucleotide
ugggagcacggaggccagg

SEQ ID NO: 2207216 - RNA, 19 nt, Artificial Sequence
  Description of Artificial Sequence: Synthetic oligonucleotide
ucgccccaggagcucugac

SEQ ID NO: 2207217 - RNA, 19 nt, Artificial Sequence
  Description of Artificial Sequence: Synthetic oligonucleotide
gccgacggggaccuucgcc

SEQ ID NO: 2207218 - RNA, 19 nt, Artificial Sequence
  Description of Artificial Sequence: Synthetic oligonucleotide
ccggugacccgcucagccg

SEQ ID NO: 2207219 - RNA, 19 nt, Artificial Sequence
  Description of Artificial Sequence: Synthetic oligonucleotide
ccccgaaggccuccgacgc

SEQ ID NO: 2207220 - RNA, 19 nt, Artificial Sequence
  Description of Artificial Sequence: Synthetic oligonucleotide
ccucacguaucuggcaggc

SEQ ID NO: 2207221 - RNA, 19 nt, Artificial Sequence
  Description of Artificial Sequence: Synthetic oligonucleotide
caggaaccucacucuguga

SEQ ID NO: 2207222 - RNA, 19 nt, Artificial Sequence
  Description of Artificial Sequence: Synthetic oligonucleotide
cgcguccucgaacagcccg

SEQ ID NO: 2207223 - RNA, 19 nt, Artificial Sequence
  Description of Artificial Sequence: Synthetic oligonucleotide
ggcgaaggaggguuccaga

SEQ ID NO: 2207224 - RNA, 19 nt, Artificial Sequence
  Description of Artificial Sequence: Synthetic oligonucleotide
cgagccucacugccgacgg

SEQ ID NO: 2207225 - RNA, 19 nt, Artificial Sequence
  Description of Artificial Sequence: Synthetic oligonucleotide
gcguucaccaggugcguga

SEQ ID NO: 2207226 - RNA, 19 nt, Artificial Sequence
  Description of Artificial Sequence: Synthetic oligonucleotide
ggccaucacaggccuuaag

SEQ ID NO: 2207227 - RNA, 19 nt, Artificial Sequence
  Description of Artificial Sequence: Synthetic oligonucleotide
accuucgccccaggagcuc

SEQ ID NO: 2207228 - RNA, 19 nt, Artificial Sequence
  Description of Artificial Sequence: Synthetic oligonucleotide
gcgcccuuugacaaagaac

SEQ ID NO: 2207229 - RNA, 19 nt, Artificial Sequence
  Description of Artificial Sequence: Synthetic oligonucleotide
ccggcuccuggcuucacac

SEQ ID NO: 2207230 - RNA, 19 nt, Artificial Sequence
  Description of Artificial Sequence: Synthetic oligonucleotide
cuucgccccaggagcucug

SEQ ID NO: 2207231 - RNA, 19 nt, Artificial Sequence
  Description of Artificial Sequence: Synthetic oligonucleotide
cguaucuggcaggcgaagg

SEQ ID NO: 2207232 - RNA, 19 nt, Artificial Sequence
  Description of Artificial Sequence: Synthetic oligonucleotide
ugccgacggggaccuucgc

SEQ ID NO: 2207233 - RNA, 19 nt, Artificial Sequence
  Description of Artificial Sequence: Synthetic oligonucleotide
cgucuccggcgauucaugg

SEQ ID NO: 2207234 - RNA, 19 nt, Artificial Sequence
  Description of Artificial Sequence: Synthetic oligonucleotide
cagcacauggucggccauc

SEQ ID NO: 2207235 - RNA, 19 nt, Artificial Sequence
  Description of Artificial Sequence: Synthetic oligonucleotide
uggcgcccuuugacaaaga

SEQ ID NO: 2207236 - RNA, 19 nt, Artificial Sequence
  Description of Artificial Sequence: Synthetic oligonucleotide
acggggaccuucgccccag

SEQ ID NO: 2207237 - RNA, 19 nt, Artificial Sequence
  Description of Artificial Sequence: Synthetic oligonucleotide
uggcccuccgcagcaugcu

SEQ ID NO: 2207238 - RNA, 19 nt, Artificial Sequence
  Description of Artificial Sequence: Synthetic oligonucleotide
cacggaggccaggaacuuc

SEQ ID NO: 2207239 - RNA, 19 nt, Artificial Sequence
  Description of Artificial Sequence: Synthetic oligonucleotide
uccugucgggcagcaggcu

SEQ ID NO: 2207240 - RNA, 19 nt, Artificial Sequence
  Description of Artificial Sequence: Synthetic oligonucleotide
gccuggcacccauucccgg

SEQ ID NO: 2207241 - RNA, 19 nt, Artificial Sequence
  Description of Artificial Sequence: Synthetic oligonucleotide
cugcgcccgcccucagggg

SEQ ID NO: 2207242 - RNA, 19 nt, Artificial Sequence
  Description of Artificial Sequence: Synthetic oligonucleotide
ggucccugaagccguaagu

SEQ ID NO: 2207243 - RNA, 19 nt, Artificial Sequence
  Description of Artificial Sequence: Synthetic oligonucleotide
ggcgcccuuugacaaagaa

SEQ ID NO: 2207244 - RNA, 19 nt, Artificial Sequence
  Description of Artificial Sequence: Synthetic oligonucleotide
ccuucccuauccccuccgg

SEQ ID NO: 2207245 - RNA, 19 nt, Artificial Sequence
  Description of Artificial Sequence: Synthetic oligonucleotide
ugggcggcagcgcguccuc

SEQ ID NO: 2207246 - RNA, 19 nt, Artificial Sequence
  Description of Artificial Sequence: Synthetic oligonucleotide
agcgcagcucaggcuggag

SEQ ID NO: 2207247 - RNA, 19 nt, Artificial Sequence
  Description of Artificial Sequence: Synthetic oligonucleotide
ggcaccggcuccuggcuuc

SEQ ID NO: 2207248 - RNA, 19 nt, Artificial Sequence
  Description of Artificial Sequence: Synthetic oligonucleotide
ggauccgccugcgcgggcc

SEQ ID NO: 2207249 - RNA, 19 nt, Artificial Sequence
  Description of Artificial Sequence: Synthetic oligonucleotide
agccguccaggggcagcgc

SEQ ID NO: 2207250 - RNA, 19 nt, Artificial Sequence
  Description of Artificial Sequence: Synthetic oligonucleotide
cugucgggcagcaggcugu

SEQ ID NO: 2207251 - RNA, 19 nt, Artificial Sequence
  Description of Artificial Sequence: Synthetic oligonucleotide
cuccggcaccggcuccugg

SEQ ID NO: 2207252 - RNA, 19 nt, Artificial Sequence
  Description of Artificial Sequence: Synthetic oligonucleotide
ccuauccccuccggcaccg

SEQ ID NO: 2207253 - RNA, 19 nt, Artificial Sequence
  Description of Artificial Sequence: Synthetic oligonucleotide
cccgcucagccguccaggg

SEQ ID NO: 2207254 - RNA, 19 nt, Artificial Sequence
  Description of Artificial Sequence: Synthetic oligonucleotide
auccgccugcgcgggcccc

SEQ ID NO: 2207255 - RNA, 19 nt, Artificial Sequence
  Description of Artificial Sequence: Synthetic oligonucleotide
aggcacggccagccaccag

SEQ ID NO: 2207256 - RNA, 19 nt, Artificial Sequence
  Description of Artificial Sequence: Synthetic oligonucleotide
cucggacagugaggacucc

SEQ ID NO: 2207257 - RNA, 19 nt, Artificial Sequence
  Description of Artificial Sequence: Synthetic oligonucleotide
ccgagccucacugccgacg

SEQ ID NO: 2207258 - RNA, 19 nt, Artificial Sequence
  Description of Artificial Sequence: Synthetic oligonucleotide
gggcagcgcuuccaggaac

SEQ ID NO: 2207259 - RNA, 19 nt, Artificial Sequence
  Description of Artificial Sequence: Synthetic oligonucleotide
gugacccgcucagccgucc

SEQ ID NO: 2207260 - RNA, 19 nt, Artificial Sequence
  Description of Artificial Sequence: Synthetic oligonucleotide
cauucccggugacccgcuc

SEQ ID NO: 2207261 - RNA, 19 nt, Artificial Sequence
  Description of Artificial Sequence: Synthetic oligonucleotide
cgcgaugggcggcagcgcg

SEQ ID NO: 2207262 - RNA, 19 nt, Artificial Sequence
  Description of Artificial Sequence: Synthetic oligonucleotide
cagcgcuuccaggaaccuc

SEQ ID NO: 2207263 - RNA, 19 nt, Artificial Sequence
  Description of Artificial Sequence: Synthetic oligonucleotide
ggccgagccucacugccga

SEQ ID NO: 2207264 - RNA, 19 nt, Artificial Sequence
  Description of Artificial Sequence: Synthetic oligonucleotide
ccaaugaggucaugcacgu

SEQ ID NO: 2207265 - RNA, 19 nt, Artificial Sequence
  Description of Artificial Sequence: Synthetic oligonucleotide
cucgcgcgccgacccugcg

SEQ ID NO: 2207266 - RNA, 19 nt, Artificial Sequence
  Description of Artificial Sequence: Synthetic oligonucleotide
cccuguacuuggcccuccg

SEQ ID NO: 2207267 - RNA, 19 nt, Artificial Sequence
  Description of Artificial Sequence: Synthetic oligonucleotide
gccugcgcgggccccggcg

SEQ ID NO: 2207268 - RNA, 19 nt, Artificial Sequence
  Description of Artificial Sequence: Synthetic oligonucleotide
ugucgggcagcaggcugua

SEQ ID NO: 2207269 - RNA, 19 nt, Artificial Sequence
  Description of Artificial Sequence: Synthetic oligonucleotide
gaccuucgccccaggagcu

SEQ ID NO: 2207270 - RNA, 19 nt, Artificial Sequence
  Description of Artificial Sequence: Synthetic oligonucleotide
gcguccucgaacagcccgc

SEQ ID NO: 2207271 - RNA, 19 nt, Artificial Sequence
  Description of Artificial Sequence: Synthetic oligonucleotide
ucccggugacccgcucagc

SEQ ID NO: 2207272 - RNA, 19 nt, Artificial Sequence
  Description of Artificial Sequence: Synthetic oligonucleotide
cucagcgcgaugggcggca

SEQ ID NO: 2207273 - RNA, 19 nt, Artificial Sequence
  Description of Artificial Sequence: Synthetic oligonucleotide
ccgucuccggcgauucaug

SEQ ID NO: 2207274 - RNA, 19 nt, Artificial Sequence
  Description of Artificial Sequence: Synthetic oligonucleotide
ggcccuccgcagcaugcug

SEQ ID NO: 2207275 - RNA, 19 nt, Artificial Sequence
  Description of Artificial Sequence: Synthetic oligonucleotide
cuggcuccucagcgcgaug

SEQ ID NO: 2207276 - RNA, 19 nt, Artificial Sequence
  Description of Artificial Sequence: Synthetic oligonucleotide
cccuauccccuccggcacc

SEQ ID NO: 2207277 - RNA, 19 nt, Artificial Sequence
  Description of Artificial Sequence: Synthetic oligonucleotide
cucagccguccaggggcag

SEQ ID NO: 2207278 - RNA, 19 nt, Artificial Sequence
  Description of Artificial Sequence: Synthetic oligonucleotide
ggucggccaucacaggccu

SEQ ID NO: 2207279 - RNA, 19 nt, Artificial Sequence
  Description of Artificial Sequence: Synthetic oligonucleotide
caggcgaaggaggguucca

SEQ ID NO: 2207280 - RNA, 19 nt, Artificial Sequence
  Description of Artificial Sequence: Synthetic oligonucleotide
cacggccagccaccagcuc

SEQ ID NO: 2207281 - RNA, 19 nt, Artificial Sequence
  Description of Artificial Sequence: Synthetic oligonucleotide
caggucggccagcguccug

SEQ ID NO: 2207282 - RNA, 19 nt, Artificial Sequence
  Description of Artificial Sequence: Synthetic oligonucleotide
ggggaccuucgccccagga

SEQ ID NO: 2207283 - RNA, 19 nt, Artificial Sequence
  Description of Artificial Sequence: Synthetic oligonucleotide
cccgaaggccuccgacgcc

SEQ ID NO: 2207284 - RNA, 19 nt, Artificial Sequence
  Description of Artificial Sequence: Synthetic oligonucleotide
cuccaccgccucgcgcgcc

SEQ ID NO: 2207285 - RNA, 19 nt, Artificial Sequence
  Description of Artificial Sequence: Synthetic oligonucleotide
ggggcagcgcuuccaggaa

SEQ ID NO: 2207286 - RNA, 19 nt, Artificial Sequence
  Description of Artificial Sequence: Synthetic oligonucleotide
gcccgccgccgcuucaccc

SEQ ID NO: 2207287 - RNA, 19 nt, Artificial Sequence
  Description of Artificial Sequence: Synthetic oligonucleotide
ccggcgauucauggcccgg

SEQ ID NO: 2207288 - RNA, 19 nt, Artificial Sequence
  Description of Artificial Sequence: Synthetic oligonucleotide
gccaggcgccgucuccggc

SEQ ID NO: 2207289 - RNA, 19 nt, Artificial Sequence
  Description of Artificial Sequence: Synthetic oligonucleotide
cuccaggcacggccagcca

SEQ ID NO: 2207290 - RNA, 19 nt, Artificial Sequence
  Description of Artificial Sequence: Synthetic oligonucleotide
gguaggcaaggccgagccu

SEQ ID NO: 2207291 - RNA, 19 nt, Artificial Sequence
  Description of Artificial Sequence: Synthetic oligonucleotide
accuggcuccucagcgcga

SEQ ID NO: 2207292 - RNA, 19 nt, Artificial Sequence
  Description of Artificial Sequence: Synthetic oligonucleotide
gcacauggucggccaucac

SEQ ID NO: 2207293 - RNA, 19 nt, Artificial Sequence
  Description of Artificial Sequence: Synthetic oligonucleotide
acccugcgcccgcccucag

SEQ ID NO: 2207294 - RNA, 19 nt, Artificial Sequence
  Description of Artificial Sequence: Synthetic oligonucleotide
gcccuccgcagcaugcuga

SEQ ID NO: 2207295 - RNA, 19 nt, Artificial Sequence
  Description of Artificial Sequence: Synthetic oligonucleotide
ggcaaggccgagccucacu

SEQ ID NO: 2207296 - RNA, 19 nt, Artificial Sequence
  Description of Artificial Sequence: Synthetic oligonucleotide
ccucgcgcgccgacccugc

SEQ ID NO: 2207297 - RNA, 19 nt, Artificial Sequence
  Description of Artificial Sequence: Synthetic oligonucleotide
caggcacggccagccacca

SEQ ID NO: 2207298 - RNA, 19 nt, Artificial Sequence
  Description of Artificial Sequence: Synthetic oligonucleotide
caccgccucgcgcgccgac

SEQ ID NO: 2207299 - RNA, 19 nt, Artificial Sequence
  Description of Artificial Sequence: Synthetic oligonucleotide
cgugguaggcaaggccgag

SEQ ID NO: 2207300 - RNA, 19 nt, Artificial Sequence
  Description of Artificial Sequence: Synthetic oligonucleotide
ccguaagucugggucaucu

SEQ ID NO: 2207301 - RNA, 19 nt, Artificial Sequence
  Description of Artificial Sequence: Synthetic oligonucleotide
cggccagcguccugucggg

SEQ ID NO: 2207302 - RNA, 19 nt, Artificial Sequence
  Description of Artificial Sequence: Synthetic oligonucleotide
ggucggccagcguccuguc

SEQ ID NO: 2207303 - RNA, 19 nt, Artificial Sequence
  Description of Artificial Sequence: Synthetic oligonucleotide
gucgggcagcaggcuguac

SEQ ID NO: 2207304 - RNA, 19 nt, Artificial Sequence
  Description of Artificial Sequence: Synthetic oligonucleotide
gcuucaccccgaaggccuc

SEQ ID NO: 2207305 - RNA, 19 nt, Artificial Sequence
  Description of Artificial Sequence: Synthetic oligonucleotide
gggauccgccugcgcgggc

SEQ ID NO: 2207306 - RNA, 19 nt, Artificial Sequence
  Description of Artificial Sequence: Synthetic oligonucleotide
ccuggcacccauucccggu

SEQ ID NO: 2207307 - RNA, 19 nt, Artificial Sequence
  Description of Artificial Sequence: Synthetic oligonucleotide
ccgcccucaggggauccgc

SEQ ID NO: 2207308 - RNA, 19 nt, Artificial Sequence
  Description of Artificial Sequence: Synthetic oligonucleotide
gccucgcgcgccgacccug

SEQ ID NO: 2207309 - RNA, 19 nt, Artificial Sequence
  Description of Artificial Sequence: Synthetic oligonucleotide
cugcaccaccccagcacau

SEQ ID NO: 2207310 - RNA, 19 nt, Artificial Sequence
  Description of Artificial Sequence: Synthetic oligonucleotide
ggugacccgcucagccguc

SEQ ID NO: 2207311 - RNA, 19 nt, Artificial Sequence
  Description of Artificial Sequence: Synthetic oligonucleotide
gccucacugccgacgggga

SEQ ID NO: 2207312 - RNA, 19 nt, Artificial Sequence
  Description of Artificial Sequence: Synthetic oligonucleotide
ccuggcgcccuuugacaaa

SEQ ID NO: 2207313 - RNA, 19 nt, Artificial Sequence
  Description of Artificial Sequence: Synthetic oligonucleotide
cagcgcagcucaggcugga

SEQ ID NO: 2207314 - RNA, 19 nt, Artificial Sequence
  Description of Artificial Sequence: Synthetic oligonucleotide
cccgcccucaggggauccg

SEQ ID NO: 2207315 - RNA, 19 nt, Artificial Sequence
  Description of Artificial Sequence: Synthetic oligonucleotide
gccguccaggggcagcgcu

SEQ ID NO: 2207316 - RNA, 19 nt, Artificial Sequence
  Description of Artificial Sequence: Synthetic oligonucleotide
gccgagccucacugccgac

SEQ ID NO: 2207317 - RNA, 19 nt, Artificial Sequence
  Description of Artificial Sequence: Synthetic oligonucleotide
gcgccgucuccggcgauuc

SEQ ID NO: 2207318 - RNA, 19 nt, Artificial Sequence
  Description of Artificial Sequence: Synthetic oligonucleotide
aggcgccgucuccggcgau

SEQ ID NO: 2207319 - RNA, 19 nt, Artificial Sequence
  Description of Artificial Sequence: Synthetic oligonucleotide
ccgcagcaugcugaguaga

SEQ ID NO: 2207320 - RNA, 19 nt, Artificial Sequence
  Description of Artificial Sequence: Synthetic oligonucleotide
caccggcuccuggcuucac

SEQ ID NO: 2207321 - RNA, 19 nt, Artificial Sequence
  Description of Artificial Sequence: Synthetic oligonucleotide
gcgcgaugggcggcagcgc

SEQ ID NO: 2207322 - RNA, 19 nt, Artificial Sequence
  Description of Artificial Sequence: Synthetic oligonucleotide
cgaugggcggcagcgcguc

SEQ ID NO: 2207323 - RNA, 19 nt, Artificial Sequence
  Description of Artificial Sequence: Synthetic oligonucleotide
cagcguucaccaggugcgu

SEQ ID NO: 2207324 - RNA, 19 nt, Artificial Sequence
  Description of Artificial Sequence: Synthetic oligonucleotide
gccguaagucugggucauc

SEQ ID NO: 2207325 - RNA, 19 nt, Artificial Sequence
  Description of Artificial Sequence: Synthetic oligonucleotide
guagagccuggcgcccuuu

SEQ ID NO: 2207326 - RNA, 19 nt, Artificial Sequence
  Description of Artificial Sequence: Synthetic oligonucleotide
gcgcguccucgaacagccc

SEQ ID NO: 2207327 - RNA, 19 nt, Artificial Sequence
  Description of Artificial Sequence: Synthetic oligonucleotide
gcagcgcuuccaggaaccu

SEQ ID NO: 2207328 - RNA, 19 nt, Artificial Sequence
  Description of Artificial Sequence: Synthetic oligonucleotide
cggugacccgcucagccgu

SEQ ID NO: 2207329 - RNA, 19 nt, Artificial Sequence
  Description of Artificial Sequence: Synthetic oligonucleotide
cacaggccuuaaggacucu

SEQ ID NO: 2207330 - RNA, 19 nt, Artificial Sequence
  Description of Artificial Sequence: Synthetic oligonucleotide
ccuucgccccaggagcucu

SEQ ID NO: 2207331 - RNA, 19 nt, Artificial Sequence
  Description of Artificial Sequence: Synthetic oligonucleotide
gcgaugggcggcagcgcgu

SEQ ID NO: 2207332 - RNA, 19 nt, Artificial Sequence
  Description of Artificial Sequence: Synthetic oligonucleotide
gcaggucggccagcguccu

SEQ ID NO: 2207333 - RNA, 19 nt, Artificial Sequence
  Description of Artificial Sequence: Synthetic oligonucleotide
ccaccagcugggcuccaau

SEQ ID NO: 2207334 - RNA, 19 nt, Artificial Sequence
  Description of Artificial Sequence: Synthetic oligonucleotide
ccgccugcgcgggccccgg

SEQ ID NO: 2207335 - RNA, 19 nt, Artificial Sequence
  Description of Artificial Sequence: Synthetic oligonucleotide
ccggcaccggcuccuggcu

SEQ ID NO: 2207336 - RNA, 19 nt, Artificial Sequence
  Description of Artificial Sequence: Synthetic oligonucleotide
gucggccaucacaggccuu

SEQ ID NO: 2207337 - RNA, 19 nt, Artificial Sequence
  Description of Artificial Sequence: Synthetic oligonucleotide
ccuggcuccucagcgcgau

SEQ ID NO: 2207338 - RNA, 19 nt, Artificial Sequence
  Description of Artificial Sequence: Synthetic oligonucleotide
ggcgccgucuccggcgauu

SEQ ID NO: 2207339 - RNA, 19 nt, Artificial Sequence
  Description of Artificial Sequence: Synthetic oligonucleotide
ccguccaggggcagcgcuu

SEQ ID NO: 2207340 - RNA, 19 nt, Artificial Sequence
  Description of Artificial Sequence: Synthetic oligonucleotide
ccgacccugcgcccgcccu

SEQ ID NO: 2207341 - RNA, 19 nt, Artificial Sequence
  Description of Artificial Sequence: Synthetic oligonucleotide
cguucaccaggugcgugau

SEQ ID NO: 2207342 - RNA, 19 nt, Artificial Sequence
  Description of Artificial Sequence: Synthetic oligonucleotide
cuccgacgccaggcgccgu

SEQ ID NO: 2207343 - RNA, 19 nt, Artificial Sequence
  Description of Artificial Sequence: Synthetic oligonucleotide
cgccgucuccggcgauuca

SEQ ID NO: 2207344 - RNA, 19 nt, Artificial Sequence
  Description of Artificial Sequence: Synthetic oligonucleotide
ccgacgccaggcgccgucu

SEQ ID NO: 2207345 - RNA, 19 nt, Artificial Sequence
  Description of Artificial Sequence: Synthetic oligonucleotide
cggccaucacaggccuuaa

SEQ ID NO: 2207346 - RNA, 19 nt, Artificial Sequence
  Description of Artificial Sequence: Synthetic oligonucleotide
ccaccgccucgcgcgccga

SEQ ID NO: 2207347 - RNA, 19 nt, Artificial Sequence
  Description of Artificial Sequence: Synthetic oligonucleotide
cgggucccugaagccguaa

SEQ ID NO: 2207348 - RNA, 19 nt, Artificial Sequence
  Description of Artificial Sequence: Synthetic oligonucleotide
cgccgccgcuucaccccga

SEQ ID NO: 2207349 - RNA, 19 nt, Artificial Sequence
  Description of Artificial Sequence: Synthetic oligonucleotide
cggcaccggcuccuggcuu

SEQ ID NO: 2207350 - RNA, 19 nt, Artificial Sequence
  Description of Artificial Sequence: Synthetic oligonucleotide
cacugccgacggggaccuu

SEQ ID NO: 2207351 - RNA, 19 nt, Artificial Sequence
  Description of Artificial Sequence: Synthetic oligonucleotide
cgccucgcgcgccgacccu

SEQ ID NO: 2207352 - RNA, 19 nt, Artificial Sequence
  Description of Artificial Sequence: Synthetic oligonucleotide
aauguaaccagccuuaucc

SEQ ID NO: 2207353 - RNA, 19 nt, Artificial Sequence
  Description of Artificial Sequence: Synthetic oligonucleotide
aacauuuuggaauacagac

SEQ ID NO: 2207354 - RNA, 19 nt, Artificial Sequence
  Description of Artificial Sequence: Synthetic oligonucleotide
aauuugacaacuuaaggca

SEQ ID NO: 2207355 - RNA, 19 nt, Artificial Sequence
  Description of Artificial Sequence: Synthetic oligonucleotide
uaugcaauaaaacaaauau

SEQ ID NO: 2207356 - RNA, 19 nt, Artificial Sequence
  Description of Artificial Sequence: Synthetic oligonucleotide
uaauuugacaacuuaaggc

SEQ ID NO: 2207357 - RNA, 19 nt, Artificial Sequence
  Description of Artificial Sequence: Synthetic oligonucleotide
acuucguccaacuucagcc

SEQ ID NO: 2207358 - RNA, 19 nt, Artificial Sequence
  Description of Artificial Sequence: Synthetic oligonucleotide
auaugcauagacuuguuac

SEQ ID NO: 2207359 - RNA, 19 nt, Artificial Sequence
  Description of Artificial Sequence: Synthetic oligonucleotide
ucuaauuugacaacuuaag

SEQ ID NO: 2207360 - RNA, 19 nt, Artificial Sequence
  Description of Artificial Sequence: Synthetic oligonucleotide
cugaauaucaaauguaacc

SEQ ID NO: 2207361 - RNA, 19 nt, Artificial Sequence
  Description of Artificial Sequence: Synthetic oligonucleotide
ucaaaagauaccaacugag

SEQ ID NO: 2207362 - RNA, 19 nt, Artificial Sequence
  Description of Artificial Sequence: Synthetic oligonucleotide
uggauaauuacccacguug

SEQ ID NO: 2207363 - RNA, 19 nt, Artificial Sequence
  Description of Artificial Sequence: Synthetic oligonucleotide
uuucuuuggauaauuaccc

SEQ ID NO: 2207364 - RNA, 19 nt, Artificial Sequence
  Description of Artificial Sequence: Synthetic oligonucleotide
aacaaauaugcauagacuu

SEQ ID NO: 2207365 - RNA, 19 nt, Artificial Sequence
  Description of Artificial Sequence: Synthetic oligonucleotide
uggaauacagacaaggcug

SEQ ID NO: 2207366 - RNA, 19 nt, Artificial Sequence
  Description of Artificial Sequence: Synthetic oligonucleotide
ucuaucuuaguccucaaug

SEQ ID NO: 2207367 - RNA, 19 nt, Artificial Sequence
  Description of Artificial Sequence: Synthetic oligonucleotide
uuagcuuuaaaucugggua

SEQ ID NO: 2207368 - RNA, 19 nt, Artificial Sequence
  Description of Artificial Sequence: Synthetic oligonucleotide
agcagauccaucuuuaguc

SEQ ID NO: 2207369 - RNA, 19 nt, Artificial Sequence
  Description of Artificial Sequence: Synthetic oligonucleotide
aagguaugaagucauaggu

SEQ ID NO: 2207370 - RNA, 19 nt, Artificial Sequence
  Description of Artificial Sequence: Synthetic oligonucleotide
uuucuuaaaguccauuggc

SEQ ID NO: 2207371 - RNA, 19 nt, Artificial Sequence
  Description of Artificial Sequence: Synthetic oligonucleotide
auacguaaauguuguaugc

SEQ ID NO: 2207372 - RNA, 19 nt, Artificial Sequence
  Description of Artificial Sequence: Synthetic oligonucleotide
ugaauaucaaauguaacca

SEQ ID NO: 2207373 - RNA, 19 nt, Artificial Sequence
  Description of Artificial Sequence: Synthetic oligonucleotide
aagaacugaauaucaaaug

SEQ ID NO: 2207374 - RNA, 19 nt, Artificial Sequence
  Description of Artificial Sequence: Synthetic oligonucleotide
uggucuuuaaacuugcuca

SEQ ID NO: 2207375 - RNA, 19 nt, Artificial Sequence
  Description of Artificial Sequence: Synthetic oligonucleotide
auagucuucagucuucccg

SEQ ID NO: 2207376 - RNA, 19 nt, Artificial Sequence
  Description of Artificial Sequence: Synthetic oligonucleotide
gaagguaugaagucauagg

SEQ ID NO: 2207377 - RNA, 19 nt, Artificial Sequence
  Description of Artificial Sequence: Synthetic oligonucleotide
caacuuaaggcauugagac

SEQ ID NO: 2207378 - RNA, 19 nt, Artificial Sequence
  Description of Artificial Sequence: Synthetic oligonucleotide
cuaauuugacaacuuaagg

SEQ ID NO: 2207379 - RNA, 19 nt, Artificial Sequence
  Description of Artificial Sequence: Synthetic oligonucleotide
uucagauacguaaauguug

SEQ ID NO: 2207380 - RNA, 19 nt, Artificial Sequence
  Description of Artificial Sequence: Synthetic oligonucleotide
aucuuuagcaagcugaaug

SEQ ID NO: 2207381 - RNA, 19 nt, Artificial Sequence
  Description of Artificial Sequence: Synthetic oligonucleotide
aacuuaaggcauugagacc

SEQ ID NO: 2207382 - RNA, 19 nt, Artificial Sequence
  Description of Artificial Sequence: Synthetic oligonucleotide
uguuguaugcugaucgagg

SEQ ID NO: 2207383 - RNA, 19 nt, Artificial Sequence
  Description of Artificial Sequence: Synthetic oligonucleotide
uuuauucuaugcaauaaaa

SEQ ID NO: 2207384 - RNA, 19 nt, Artificial Sequence
  Description of Artificial Sequence: Synthetic oligonucleotide
ucuuaguccucaaugaugu

SEQ ID NO: 2207385 - RNA, 19 nt, Artificial Sequence
  Description of Artificial Sequence: Synthetic oligonucleotide
aagauaccaacugagcugg

SEQ ID NO: 2207386 - RNA, 19 nt, Artificial Sequence
  Description of Artificial Sequence: Synthetic oligonucleotide
uuuaaaucuggguagcugu

SEQ ID NO: 2207387 - RNA, 19 nt, Artificial Sequence
  Description of Artificial Sequence: Synthetic oligonucleotide
uucguuaucauaacgaauu

SEQ ID NO: 2207388 - RNA, 19 nt, Artificial Sequence
  Description of Artificial Sequence: Synthetic oligonucleotide
aguuagcuggucuuuaaac

SEQ ID NO: 2207389 - RNA, 19 nt, Artificial Sequence
  Description of Artificial Sequence: Synthetic oligonucleotide
uuauucuaugcaauaaaac

SEQ ID NO: 2207390 - RNA, 19 nt, Artificial Sequence
  Description of Artificial Sequence: Synthetic oligonucleotide
agauagacuuuuccaagcc

SEQ ID NO: 2207391 - RNA, 19 nt, Artificial Sequence
  Description of Artificial Sequence: Synthetic oligonucleotide
cuuggaagcuuucagauac

SEQ ID NO: 2207392 - RNA, 19 nt, Artificial Sequence
  Description of Artificial Sequence: Synthetic oligonucleotide
gaagcuuucagauacguaa

SEQ ID NO: 2207393 - RNA, 19 nt, Artificial Sequence
  Description of Artificial Sequence: Synthetic oligonucleotide
ucagauacguaaauguugu

SEQ ID NO: 2207394 - RNA, 19 nt, Artificial Sequence
  Description of Artificial Sequence: Synthetic oligonucleotide
uguagaaaaucgaagguau

SEQ ID NO: 2207395 - RNA, 19 nt, Artificial Sequence
  Description of Artificial Sequence: Synthetic oligonucleotide
ucuuuagucucuuggaagc

SEQ ID NO: 2207396 - RNA, 19 nt, Artificial Sequence
  Description of Artificial Sequence: Synthetic oligonucleotide
ucauuucguuaucauaacg

SEQ ID NO: 2207397 - RNA, 19 nt, Artificial Sequence
  Description of Artificial Sequence: Synthetic oligonucleotide
uucaucacuagauagacuu

SEQ ID NO: 2207398 - RNA, 19 nt, Artificial Sequence
  Description of Artificial Sequence: Synthetic oligonucleotide
gaugagaucacuucgucca

SEQ ID NO: 2207399 - RNA, 19 nt, Artificial Sequence
  Description of Artificial Sequence: Synthetic oligonucleotide
cuuuggauaauuacccacg

SEQ ID NO: 2207400 - RNA, 19 nt, Artificial Sequence
  Description of Artificial Sequence: Synthetic oligonucleotide
auaucaaauguaaccagcc

SEQ ID NO: 2207401 - RNA, 19 nt, Artificial Sequence
  Description of Artificial Sequence: Synthetic oligonucleotide
gacaacuuaaggcauugag

SEQ ID NO: 2207402 - RNA, 19 nt, Artificial Sequence
  Description of Artificial Sequence: Synthetic oligonucleotide
uuuccaagcaacauuaauu

SEQ ID NO: 2207403 - RNA, 19 nt, Artificial Sequence
  Description of Artificial Sequence: Synthetic oligonucleotide
aaguuuugcaucugggugu

SEQ ID NO: 2207404 - RNA, 19 nt, Artificial Sequence
  Description of Artificial Sequence: Synthetic oligonucleotide
ucuuucucaaaagauacca

SEQ ID NO: 2207405 - RNA, 19 nt, Artificial Sequence
  Description of Artificial Sequence: Synthetic oligonucleotide
acagacaaggcugagcggc

SEQ ID NO: 2207406 - RNA, 19 nt, Artificial Sequence
  Description of Artificial Sequence: Synthetic oligonucleotide
uuagcaagcugaauguaug

SEQ ID NO: 2207407 - RNA, 19 nt, Artificial Sequence
  Description of Artificial Sequence: Synthetic oligonucleotide
uguuugaaaauuagaauuu

SEQ ID NO: 2207408 - RNA, 19 nt, Artificial Sequence
  Description of Artificial Sequence: Synthetic oligonucleotide
ggcauugagaccuaauugg

SEQ ID NO: 2207409 - RNA, 19 nt, Artificial Sequence
  Description of Artificial Sequence: Synthetic oligonucleotide
uucuaauuugacaacuuaa

SEQ ID NO: 2207410 - RNA, 19 nt, Artificial Sequence
  Description of Artificial Sequence: Synthetic oligonucleotide
uucccaagacuucauuucg

SEQ ID NO: 2207411 - RNA, 19 nt, Artificial Sequence
  Description of Artificial Sequence: Synthetic oligonucleotide
uucuaugcaauaaaacaaa

SEQ ID NO: 2207412 - RNA, 19 nt, Artificial Sequence
  Description of Artificial Sequence: Synthetic oligonucleotide
aacuucagccauuugcucu

SEQ ID NO: 2207413 - RNA, 19 nt, Artificial Sequence
  Description of Artificial Sequence: Synthetic oligonucleotide
uuccaagcaacauuaauuc

SEQ ID NO: 2207414 - RNA, 19 nt, Artificial Sequence
  Description of Artificial Sequence: Synthetic oligonucleotide
uauccuuucuaauuugaca

SEQ ID NO: 2207415 - RNA, 19 nt, Artificial Sequence
  Description of Artificial Sequence: Synthetic oligonucleotide
uuccaagccucauuuauag

SEQ ID NO: 2207416 - RNA, 19 nt, Artificial Sequence
  Description of Artificial Sequence: Synthetic oligonucleotide
ucuuuagcaagcugaaugu

SEQ ID NO: 2207417 - RNA, 19 nt, Artificial Sequence
  Description of Artificial Sequence: Synthetic oligonucleotide
acuuaaggcauugagaccu

SEQ ID NO: 2207418 - RNA, 19 nt, Artificial Sequence
  Description of Artificial Sequence: Synthetic oligonucleotide
aaauguaaccagccuuauc

SEQ ID NO: 2207419 - RNA, 19 nt, Artificial Sequence
  Description of Artificial Sequence: Synthetic oligonucleotide
uagucuucagucuucccgg

SEQ ID NO: 2207420 - RNA, 19 nt, Artificial Sequence
  Description of Artificial Sequence: Synthetic oligonucleotide
uaucauaacgaauucuauc

SEQ ID NO: 2207421 - RNA, 19 nt, Artificial Sequence
  Description of Artificial Sequence: Synthetic oligonucleotide
uaauuacccacguuggaug

SEQ ID NO: 2207422 - RNA, 19 nt, Artificial Sequence
  Description of Artificial Sequence: Synthetic oligonucleotide
uaugcauagacuuguuaca

SEQ ID NO: 2207423 - RNA, 19 nt, Artificial Sequence
  Description of Artificial Sequence: Synthetic oligonucleotide
aacauuaauucucucuuuu

SEQ ID NO: 2207424 - RNA, 19 nt, Artificial Sequence
  Description of Artificial Sequence: Synthetic oligonucleotide
aucuuuagucucuuggaag

SEQ ID NO: 2207425 - RNA, 19 nt, Artificial Sequence
  Description of Artificial Sequence: Synthetic oligonucleotide
acuagauagacuuuuccaa

SEQ ID NO: 2207426 - RNA, 19 nt, Artificial Sequence
  Description of Artificial Sequence: Synthetic oligonucleotide
aaacaaauaugcauagacu

SEQ ID NO: 2207427 - RNA, 19 nt, Artificial Sequence
  Description of Artificial Sequence: Synthetic oligonucleotide
aagacuucauuucguuauc

SEQ ID NO: 2207428 - RNA, 19 nt, Artificial Sequence
  Description of Artificial Sequence: Synthetic oligonucleotide
ucuuuggauaauuacccac

SEQ ID NO: 2207429 - RNA, 19 nt, Artificial Sequence
  Description of Artificial Sequence: Synthetic oligonucleotide
uagaaaaucgaagguauga

SEQ ID NO: 2207430 - RNA, 19 nt, Artificial Sequence
  Description of Artificial Sequence: Synthetic oligonucleotide
uucuuuguaugcuuuccag

SEQ ID NO: 2207431 - RNA, 19 nt, Artificial Sequence
  Description of Artificial Sequence: Synthetic oligonucleotide
uuuagcaagcugaauguau

SEQ ID NO: 2207432 - RNA, 19 nt, Artificial Sequence
  Description of Artificial Sequence: Synthetic oligonucleotide
uaaucccagagacaacucc

SEQ ID NO: 2207433 - RNA, 19 nt, Artificial Sequence
  Description of Artificial Sequence: Synthetic oligonucleotide
auaacgaauucuaucaucu

SEQ ID NO: 2207434 - RNA, 19 nt, Artificial Sequence
  Description of Artificial Sequence: Synthetic oligonucleotide
aauuacccacguuggauga

SEQ ID NO: 2207435 - RNA, 19 nt, Artificial Sequence
  Description of Artificial Sequence: Synthetic oligonucleotide
auugagaccuaauugguuu

SEQ ID NO: 2207436 - RNA, 19 nt, Artificial Sequence
  Description of Artificial Sequence: Synthetic oligonucleotide
aauguuguaugcugaucga

SEQ ID NO: 2207437 - RNA, 19 nt, Artificial Sequence
  Description of Artificial Sequence: Synthetic oligonucleotide
auagacuuguuacauaauu

SEQ ID NO: 2207438 - RNA, 19 nt, Artificial Sequence
  Description of Artificial Sequence: Synthetic oligonucleotide
cauuucguuaucauaacga

SEQ ID NO: 2207439 - RNA, 19 nt, Artificial Sequence
  Description of Artificial Sequence: Synthetic oligonucleotide
aaggcauugagaccuaauu

SEQ ID NO: 2207440 - RNA, 19 nt, Artificial Sequence
  Description of Artificial Sequence: Synthetic oligonucleotide
uuuggauaauuacccacgu

SEQ ID NO: 2207441 - RNA, 19 nt, Artificial Sequence
  Description of Artificial Sequence: Synthetic oligonucleotide
acauguuugaaaauuagaa

SEQ ID NO: 2207442 - RNA, 19 nt, Artificial Sequence
  Description of Artificial Sequence: Synthetic oligonucleotide
uuucuaauuugacaacuua

SEQ ID NO: 2207443 - RNA, 19 nt, Artificial Sequence
  Description of Artificial Sequence: Synthetic oligonucleotide
acguaaauguuguaugcug

SEQ ID NO: 2207444 - RNA, 19 nt, Artificial Sequence
  Description of Artificial Sequence: Synthetic oligonucleotide
auagacuuuuccaagccuc

SEQ ID NO: 2207445 - RNA, 19 nt, Artificial Sequence
  Description of Artificial Sequence: Synthetic oligonucleotide
uuuauagucuucagucuuc

SEQ ID NO: 2207446 - RNA, 19 nt, Artificial Sequence
  Description of Artificial Sequence: Synthetic oligonucleotide
ugagcgucucacauugcgg

SEQ ID NO: 2207447 - RNA, 19 nt, Artificial Sequence
  Description of Artificial Sequence: Synthetic oligonucleotide
agacuuguuacauaauuuu

SEQ ID NO: 2207448 - RNA, 19 nt, Artificial Sequence
  Description of Artificial Sequence: Synthetic oligonucleotide
cuuagcgcgccccacagcc

SEQ ID NO: 2207449 - RNA, 19 nt, Artificial Sequence
  Description of Artificial Sequence: Synthetic oligonucleotide
uaugcuuuccagucugccc

SEQ ID NO: 2207450 - RNA, 19 nt, Artificial Sequence
  Description of Artificial Sequence: Synthetic oligonucleotide
ucuaacgagguccgaaagu

SEQ ID NO: 2207451 - RNA, 19 nt, Artificial Sequence
  Description of Artificial Sequence: Synthetic oligonucleotide
uuaucauaacgaauucuau

SEQ ID NO: 2207452 - RNA, 19 nt, Artificial Sequence
  Description of Artificial Sequence: Synthetic oligonucleotide
aggcauugagaccuaauug

SEQ ID NO: 2207453 - RNA, 19 nt, Artificial Sequence
  Description of Artificial Sequence: Synthetic oligonucleotide
gaauucuaucaucuuuagc

SEQ ID NO: 2207454 - RNA, 19 nt, Artificial Sequence
  Description of Artificial Sequence: Synthetic oligonucleotide
uucuaacgagguccgaaag

SEQ ID NO: 2207455 - RNA, 19 nt, Artificial Sequence
  Description of Artificial Sequence: Synthetic oligonucleotide
auugcggcggaugagauca

SEQ ID NO: 2207456 - RNA, 19 nt, Artificial Sequence
  Description of Artificial Sequence: Synthetic oligonucleotide
agaaacauguuugaaaauu

SEQ ID NO: 2207457 - RNA, 19 nt, Artificial Sequence
  Description of Artificial Sequence: Synthetic oligonucleotide
agcaagcugaauguaugcc

SEQ ID NO: 2207458 - RNA, 19 nt, Artificial Sequence
  Description of Artificial Sequence: Synthetic oligonucleotide
ucuucuuccgguaguuccc

SEQ ID NO: 2207459 - RNA, 19 nt, Artificial Sequence
  Description of Artificial Sequence: Synthetic oligonucleotide
cauaacgaauucuaucauc

SEQ ID NO: 2207460 - RNA, 19 nt, Artificial Sequence
  Description of Artificial Sequence: Synthetic oligonucleotide
uagacuuguuacauaauuu

SEQ ID NO: 2207461 - RNA, 19 nt, Artificial Sequence
  Description of Artificial Sequence: Synthetic oligonucleotide
acuuguuacauaauuuucu

SEQ ID NO: 2207462 - RNA, 19 nt, Artificial Sequence
  Description of Artificial Sequence: Synthetic oligonucleotide
cuuucaucacuagauagac

SEQ ID NO: 2207463 - RNA, 19 nt, Artificial Sequence
  Description of Artificial Sequence: Synthetic oligonucleotide
uuucguuaucauaacgaau

SEQ ID NO: 2207464 - RNA, 19 nt, Artificial Sequence
  Description of Artificial Sequence: Synthetic oligonucleotide
gguaguucccuccaugcgg

SEQ ID NO: 2207465 - RNA, 19 nt, Artificial Sequence
  Description of Artificial Sequence: Synthetic oligonucleotide
ucauagguuucuuuggaua

SEQ ID NO: 2207466 - RNA, 19 nt, Artificial Sequence
  Description of Artificial Sequence: Synthetic oligonucleotide
ugcccuaaaaucagcuuca

SEQ ID NO: 2207467 - RNA, 19 nt, Artificial Sequence
  Description of Artificial Sequence: Synthetic oligonucleotide
agcuuuaaaucuggguagc

SEQ ID NO: 2207468 - RNA, 19 nt, Artificial Sequence
  Description of Artificial Sequence: Synthetic oligonucleotide
ucaucuuuagcaagcugaa

SEQ ID NO: 2207469 - RNA, 19 nt, Artificial Sequence
  Description of Artificial Sequence: Synthetic oligonucleotide
caagcugaauguaugccug

SEQ ID NO: 2207470 - RNA, 19 nt, Artificial Sequence
  Description of Artificial Sequence: Synthetic oligonucleotide
cuaucuuaguccucaauga

SEQ ID NO: 2207471 - RNA, 19 nt, Artificial Sequence
  Description of Artificial Sequence: Synthetic oligonucleotide
augcuuuccagucugcccu

SEQ ID NO: 2207472 - RNA, 19 nt, Artificial Sequence
  Description of Artificial Sequence: Synthetic oligonucleotide
gagcgucucacauugcggc

SEQ ID NO: 2207473 - RNA, 19 nt, Artificial Sequence
  Description of Artificial Sequence: Synthetic oligonucleotide
cuuucagauacguaaaugu

SEQ ID NO: 2207474 - RNA, 19 nt, Artificial Sequence
  Description of Artificial Sequence: Synthetic oligonucleotide
uccagucugcccuaaaauc

SEQ ID NO: 2207475 - RNA, 19 nt, Artificial Sequence
  Description of Artificial Sequence: Synthetic oligonucleotide
uuaaaguccauuggcuaca

SEQ ID NO: 2207476 - RNA, 19 nt, Artificial Sequence
  Description of Artificial Sequence: Synthetic oligonucleotide
gucugagcgucucacauug

SEQ ID NO: 2207477 - RNA, 19 nt, Artificial Sequence
  Description of Artificial Sequence: Synthetic oligonucleotide
uagcuggucuuuaaacuug

SEQ ID NO: 2207478 - RNA, 19 nt, Artificial Sequence
  Description of Artificial Sequence: Synthetic oligonucleotide
accuaauugguuucuugug

SEQ ID NO: 2207479 - RNA, 19 nt, Artificial Sequence
  Description of Artificial Sequence: Synthetic oligonucleotide
acaaauaugcauagacuug

SEQ ID NO: 2207480 - RNA, 19 nt, Artificial Sequence
  Description of Artificial Sequence: Synthetic oligonucleotide
gauaauuacccacguugga

SEQ ID NO: 2207481 - RNA, 19 nt, Artificial Sequence
  Description of Artificial Sequence: Synthetic oligonucleotide
auaccaacugagcuggagu

SEQ ID NO: 2207482 - RNA, 19 nt, Artificial Sequence
  Description of Artificial Sequence: Synthetic oligonucleotide
cugagcgucucacauugcg

SEQ ID NO: 2207483 - RNA, 19 nt, Artificial Sequence
  Description of Artificial Sequence: Synthetic oligonucleotide
uuugcaucuggguguuuag

SEQ ID NO: 2207484 - RNA, 19 nt, Artificial Sequence
  Description of Artificial Sequence: Synthetic oligonucleotide
uagacuuuuccaagccuca

SEQ ID NO: 2207485 - RNA, 19 nt, Artificial Sequence
  Description of Artificial Sequence: Synthetic oligonucleotide
agauacguaaauguuguau

SEQ ID NO: 2207486 - RNA, 19 nt, Artificial Sequence
  Description of Artificial Sequence: Synthetic oligonucleotide
aauguaugccugccuuuca

SEQ ID NO: 2207487 - RNA, 19 nt, Artificial Sequence
  Description of Artificial Sequence: Synthetic oligonucleotide
uuucuaacgagguccgaaa

SEQ ID NO: 2207488 - RNA, 19 nt, Artificial Sequence
  Description of Artificial Sequence: Synthetic oligonucleotide
aaucccagagacaacucca

SEQ ID NO: 2207489 - RNA, 19 nt, Artificial Sequence
  Description of Artificial Sequence: Synthetic oligonucleotide
acaacuuaaggcauugaga

SEQ ID NO: 2207490 - RNA, 19 nt, Artificial Sequence
  Description of Artificial Sequence: Synthetic oligonucleotide
uggguagcuguucuguaga

SEQ ID NO: 2207491 - RNA, 19 nt, Artificial Sequence
  Description of Artificial Sequence: Synthetic oligonucleotide
uuuccagucugcccuaaaa

SEQ ID NO: 2207492 - RNA, 19 nt, Artificial Sequence
  Description of Artificial Sequence: Synthetic oligonucleotide
uagcaagcugaauguaugc

SEQ ID NO: 2207493 - RNA, 19 nt, Artificial Sequence
  Description of Artificial Sequence: Synthetic oligonucleotide
auaauuacccacguuggau

SEQ ID NO: 2207494 - RNA, 19 nt, Artificial Sequence
  Description of Artificial Sequence: Synthetic oligonucleotide
uuggaagcuuucagauacg

SEQ ID NO: 2207495 - RNA, 19 nt, Artificial Sequence
  Description of Artificial Sequence: Synthetic oligonucleotide
ggguguuuagcuuuaaauc

SEQ ID NO: 2207496 - RNA, 19 nt, Artificial Sequence
  Description of Artificial Sequence: Synthetic oligonucleotide
ggauaauuacccacguugg

SEQ ID NO: 2207497 - RNA, 19 nt, Artificial Sequence
  Description of Artificial Sequence: Synthetic oligonucleotide
agaccuaauugguuucuug

SEQ ID NO: 2207498 - RNA, 19 nt, Artificial Sequence
  Description of Artificial Sequence: Synthetic oligonucleotide
aucuuuggggccgacgacg

SEQ ID NO: 2207499 - RNA, 19 nt, Artificial Sequence
  Description of Artificial Sequence: Synthetic oligonucleotide
cucaaaagauaccaacuga

SEQ ID NO: 2207500 - RNA, 19 nt, Artificial Sequence
  Description of Artificial Sequence: Synthetic oligonucleotide
gucucuuggaagcuuucag

SEQ ID NO: 2207501 - RNA, 19 nt, Artificial Sequence
  Description of Artificial Sequence: Synthetic oligonucleotide
ucuuccgguaguucccucc

SEQ ID NO: 2207502 - RNA, 19 nt, Artificial Sequence
  Description of Artificial Sequence: Synthetic oligonucleotide
uuugacaacuuaaggcauu

SEQ ID NO: 2207503 - RNA, 19 nt, Artificial Sequence
  Description of Artificial Sequence: Synthetic oligonucleotide
uuucaucacuagauagacu

SEQ ID NO: 2207504 - RNA, 19 nt, Artificial Sequence
  Description of Artificial Sequence: Synthetic oligonucleotide
uccaagcaacauuaauucu

SEQ ID NO: 2207505 - RNA, 19 nt, Artificial Sequence
  Description of Artificial Sequence: Synthetic oligonucleotide
gguguuuagcuuuaaaucu

SEQ ID NO: 2207506 - RNA, 19 nt, Artificial Sequence
  Description of Artificial Sequence: Synthetic oligonucleotide
uuaaacuugcucagagcuu

SEQ ID NO: 2207507 - RNA, 19 nt, Artificial Sequence
  Description of Artificial Sequence: Synthetic oligonucleotide
uuuccaagccucauuuaua

SEQ ID NO: 2207508 - RNA, 19 nt, Artificial Sequence
  Description of Artificial Sequence: Synthetic oligonucleotide
uugccugacuucuuucuca

SEQ ID NO: 2207509 - RNA, 19 nt, Artificial Sequence
  Description of Artificial Sequence: Synthetic oligonucleotide
uuccagucugcccuaaaau

SEQ ID NO: 2207510 - RNA, 19 nt, Artificial Sequence
  Description of Artificial Sequence: Synthetic oligonucleotide
agcugaauguaugccugcc

SEQ ID NO: 2207511 - RNA, 19 nt, Artificial Sequence
  Description of Artificial Sequence: Synthetic oligonucleotide
ucguuaucauaacgaauuc

SEQ ID NO: 2207512 - RNA, 19 nt, Artificial Sequence
  Description of Artificial Sequence: Synthetic oligonucleotide
ucuuuggggccgacgacgc

SEQ ID NO: 2207513 - RNA, 19 nt, Artificial Sequence
  Description of Artificial Sequence: Synthetic oligonucleotide
uuugccugacuucuuucuc

SEQ ID NO: 2207514 - RNA, 19 nt, Artificial Sequence
  Description of Artificial Sequence: Synthetic oligonucleotide
ccaagcaacauuaauucuc

SEQ ID NO: 2207515 - RNA, 19 nt, Artificial Sequence
  Description of Artificial Sequence: Synthetic oligonucleotide
cuuauccuuucuaauuuga

SEQ ID NO: 2207516 - RNA, 19 nt, Artificial Sequence
  Description of Artificial Sequence: Synthetic oligonucleotide
cuugugccuaaucccagag

SEQ ID NO: 2207517 - RNA, 19 nt, Artificial Sequence
  Description of Artificial Sequence: Synthetic oligonucleotide
ccuaaaaucagcuucauau

SEQ ID NO: 2207518 - RNA, 19 nt, Artificial Sequence
  Description of Artificial Sequence: Synthetic oligonucleotide
cauagguuucuuuggauaa

SEQ ID NO: 2207519 - RNA, 19 nt, Artificial Sequence
  Description of Artificial Sequence: Synthetic oligonucleotide
uuagucucuuggaagcuuu

SEQ ID NO: 2207520 - RNA, 19 nt, Artificial Sequence
  Description of Artificial Sequence: Synthetic oligonucleotide
uacagacaaggcugagcgg

SEQ ID NO: 2207521 - RNA, 19 nt, Artificial Sequence
  Description of Artificial Sequence: Synthetic oligonucleotide
guguuuagcuuuaaaucug

SEQ ID NO: 2207522 - RNA, 19 nt, Artificial Sequence
  Description of Artificial Sequence: Synthetic oligonucleotide
uccuuucuaauuugacaac

SEQ ID NO: 2207523 - RNA, 19 nt, Artificial Sequence
  Description of Artificial Sequence: Synthetic oligonucleotide
agaaaaucgaagguaugaa

SEQ ID NO: 2207524 - RNA, 19 nt, Artificial Sequence
  Description of Artificial Sequence: Synthetic oligonucleotide
uguaugcuuuccagucugc

SEQ ID NO: 2207525 - RNA, 19 nt, Artificial Sequence
  Description of Artificial Sequence: Synthetic oligonucleotide
uuaaaucuggguagcuguu

SEQ ID NO: 2207526 - RNA, 19 nt, Artificial Sequence
  Description of Artificial Sequence: Synthetic oligonucleotide
guaugccugccuuucauca

SEQ ID NO: 2207527 - RNA, 19 nt, Artificial Sequence
  Description of Artificial Sequence: Synthetic oligonucleotide
acauuuuggaauacagaca

SEQ ID NO: 2207528 - RNA, 19 nt, Artificial Sequence
  Description of Artificial Sequence: Synthetic oligonucleotide
ccaagccucauuuauaguc

SEQ ID NO: 2207529 - RNA, 19 nt, Artificial Sequence
  Description of Artificial Sequence: Synthetic oligonucleotide
ggcggaugagaucacuucg

SEQ ID NO: 2207530 - RNA, 19 nt, Artificial Sequence
  Description of Artificial Sequence: Synthetic oligonucleotide
cuggguagcuguucuguag

SEQ ID NO: 2207531 - RNA, 19 nt, Artificial Sequence
  Description of Artificial Sequence: Synthetic oligonucleotide
ugagcggcgagggcaagcg

SEQ ID NO: 2207532 - RNA, 19 nt, Artificial Sequence
  Description of Artificial Sequence: Synthetic oligonucleotide
agccuuauccuuucuaauu

SEQ ID NO: 2207533 - RNA, 19 nt, Artificial Sequence
  Description of Artificial Sequence: Synthetic oligonucleotide
agcuggucuuuaaacuugc

SEQ ID NO: 2207534 - RNA, 19 nt, Artificial Sequence
  Description of Artificial Sequence: Synthetic oligonucleotide
ucccggagcagauccaucu

SEQ ID NO: 2207535 - RNA, 19 nt, Artificial Sequence
  Description of Artificial Sequence: Synthetic oligonucleotide
uugagaccuaauugguuuc

SEQ ID NO: 2207536 - RNA, 19 nt, Artificial Sequence
  Description of Artificial Sequence: Synthetic oligonucleotide
auguuguaugcugaucgag

SEQ ID NO: 2207537 - RNA, 19 nt, Artificial Sequence
  Description of Artificial Sequence: Synthetic oligonucleotide
ucagucuucccggagcaga

SEQ ID NO: 2207538 - RNA, 19 nt, Artificial Sequence
  Description of Artificial Sequence: Synthetic oligonucleotide
gaauguaugccugccuuuc

SEQ ID NO: 2207539 - RNA, 19 nt, Artificial Sequence
  Description of Artificial Sequence: Synthetic oligonucleotide
ggaacagcgccaucuuugg

SEQ ID NO: 2207540 - RNA, 19 nt, Artificial Sequence
  Description of Artificial Sequence: Synthetic oligonucleotide
gaccuaauugguuucuugu

SEQ ID NO: 2207541 - RNA, 19 nt, Artificial Sequence
  Description of Artificial Sequence: Synthetic oligonucleotide
uucuaucuuaguccucaau

SEQ ID NO: 2207542 - RNA, 19 nt, Artificial Sequence
  Description of Artificial Sequence: Synthetic oligonucleotide
uguaugccugccuuucauc

SEQ ID NO: 2207543 - RNA, 19 nt, Artificial Sequence
  Description of Artificial Sequence: Synthetic oligonucleotide
uguaaccagccuuauccuu

SEQ ID NO: 2207544 - RNA, 19 nt, Artificial Sequence
  Description of Artificial Sequence: Synthetic oligonucleotide
ggaugagaucacuucgucc

SEQ ID NO: 2207545 - RNA, 19 nt, Artificial Sequence
  Description of Artificial Sequence: Synthetic oligonucleotide
aacgagguccgaaaguuuu

SEQ ID NO: 2207546 - RNA, 19 nt, Artificial Sequence
  Description of Artificial Sequence: Synthetic oligonucleotide
uaccaacugagcuggaguu

SEQ ID NO: 2207547 - RNA, 19 nt, Artificial Sequence
  Description of Artificial Sequence: Synthetic oligonucleotide
gaacagcgccaucuuuggg

SEQ ID NO: 2207548 - RNA, 19 nt, Artificial Sequence
  Description of Artificial Sequence: Synthetic oligonucleotide
uaaggcauugagaccuaau

SEQ ID NO: 2207549 - RNA, 19 nt, Artificial Sequence
  Description of Artificial Sequence: Synthetic oligonucleotide
uugcucagagcuucuuugu

SEQ ID NO: 2207550 - RNA, 19 nt, Artificial Sequence
  Description of Artificial Sequence: Synthetic oligonucleotide
gcauagacuuguuacauaa

SEQ ID NO: 2207551 - RNA, 19 nt, Artificial Sequence
  Description of Artificial Sequence: Synthetic oligonucleotide
gauagacuuuuccaagccu

SEQ ID NO: 2207552 - RNA, 19 nt, Artificial Sequence
  Description of Artificial Sequence: Synthetic oligonucleotide
caagacuucauuucguuau

SEQ ID NO: 2207553 - RNA, 19 nt, Artificial Sequence
  Description of Artificial Sequence: Synthetic oligonucleotide
ugaauguaugccugccuuu

SEQ ID NO: 2207554 - RNA, 19 nt, Artificial Sequence
  Description of Artificial Sequence: Synthetic oligonucleotide
cacuucguccaacuucagc

SEQ ID NO: 2207555 - RNA, 19 nt, Artificial Sequence
  Description of Artificial Sequence: Synthetic oligonucleotide
uggaagcuuucagauacgu

SEQ ID NO: 2207556 - RNA, 19 nt, Artificial Sequence
  Description of Artificial Sequence: Synthetic oligonucleotide
uuggauaauuacccacguu

SEQ ID NO: 2207557 - RNA, 19 nt, Artificial Sequence
  Description of Artificial Sequence: Synthetic oligonucleotide
ugcauagacuuguuacaua

SEQ ID NO: 2207558 - RNA, 19 nt, Artificial Sequence
  Description of Artificial Sequence: Synthetic oligonucleotide
aagcuuucagauacguaaa

SEQ ID NO: 2207559 - RNA, 19 nt, Artificial Sequence
  Description of Artificial Sequence: Synthetic oligonucleotide
guuguaugcugaucgaggu

SEQ ID NO: 2207560 - RNA, 19 nt, Artificial Sequence
  Description of Artificial Sequence: Synthetic oligonucleotide
cuaaucccagagacaacuc

SEQ ID NO: 2207561 - RNA, 19 nt, Artificial Sequence
  Description of Artificial Sequence: Synthetic oligonucleotide
cagacaaggcugagcggcg

SEQ ID NO: 2207562 - RNA, 19 nt, Artificial Sequence
  Description of Artificial Sequence: Synthetic oligonucleotide
agcgccaucuuuggggccg

SEQ ID NO: 2207563 - RNA, 19 nt, Artificial Sequence
  Description of Artificial Sequence: Synthetic oligonucleotide
caagcaacauuaauucucu

SEQ ID NO: 2207564 - RNA, 19 nt, Artificial Sequence
  Description of Artificial Sequence: Synthetic oligonucleotide
ucaucacuagauagacuuu

SEQ ID NO: 2207565 - RNA, 19 nt, Artificial Sequence
  Description of Artificial Sequence: Synthetic oligonucleotide
agucugcccuaaaaucagc

SEQ ID NO: 2207566 - RNA, 19 nt, Artificial Sequence
  Description of Artificial Sequence: Synthetic oligonucleotide
gaugucugagcgucucaca

SEQ ID NO: 2207567 - RNA, 19 nt, Artificial Sequence
  Description of Artificial Sequence: Synthetic oligonucleotide
gguaugaagucauagguuu

SEQ ID NO: 2207568 - RNA, 19 nt, Artificial Sequence
  Description of Artificial Sequence: Synthetic oligonucleotide
auuugacaacuuaaggcau

SEQ ID NO: 2207569 - RNA, 19 nt, Artificial Sequence
  Description of Artificial Sequence: Synthetic oligonucleotide
uucguccaacuucagccau

SEQ ID NO: 2207570 - RNA, 19 nt, Artificial Sequence
  Description of Artificial Sequence: Synthetic oligonucleotide
auguaugccugccuuucau

SEQ ID NO: 2207571 - RNA, 19 nt, Artificial Sequence
  Description of Artificial Sequence: Synthetic oligonucleotide
agcggcgagggcaagcgac

SEQ ID NO: 2207572 - RNA, 19 nt, Artificial Sequence
  Description of Artificial Sequence: Synthetic oligonucleotide
augcauagacuuguuacau

SEQ ID NO: 2207573 - RNA, 19 nt, Artificial Sequence
  Description of Artificial Sequence: Synthetic oligonucleotide
caucuuuagucucuuggaa

SEQ ID NO: 2207574 - RNA, 19 nt, Artificial Sequence
  Description of Artificial Sequence: Synthetic oligonucleotide
ugcucagagcuucuuugua

SEQ ID NO: 2207575 - RNA, 19 nt, Artificial Sequence
  Description of Artificial Sequence: Synthetic oligonucleotide
caaggcugagcggcgaggg

SEQ ID NO: 2207576 - RNA, 19 nt, Artificial Sequence
  Description of Artificial Sequence: Synthetic oligonucleotide
uaaccagccuuauccuuuc

SEQ ID NO: 2207577 - RNA, 19 nt, Artificial Sequence
  Description of Artificial Sequence: Synthetic oligonucleotide
guaugcuuuccagucugcc

SEQ ID NO: 2207578 - RNA, 19 nt, Artificial Sequence
  Description of Artificial Sequence: Synthetic oligonucleotide
uaacgaauucuaucaucuu

SEQ ID NO: 2207579 - RNA, 19 nt, Artificial Sequence
  Description of Artificial Sequence: Synthetic oligonucleotide
cucacauugcggcggauga

SEQ ID NO: 2207580 - RNA, 19 nt, Artificial Sequence
  Description of Artificial Sequence: Synthetic oligonucleotide
uuuagucucuuggaagcuu

SEQ ID NO: 2207581 - RNA, 19 nt, Artificial Sequence
  Description of Artificial Sequence: Synthetic oligonucleotide
cgaaaguuuugcaucuggg

SEQ ID NO: 2207582 - RNA, 19 nt, Artificial Sequence
  Description of Artificial Sequence: Synthetic oligonucleotide
cuguagaaaaucgaaggua

SEQ ID NO: 2207583 - RNA, 19 nt, Artificial Sequence
  Description of Artificial Sequence: Synthetic oligonucleotide
caucuucuaucuuaguccu

SEQ ID NO: 2207584 - RNA, 19 nt, Artificial Sequence
  Description of Artificial Sequence: Synthetic oligonucleotide
ugagaucacuucguccaac

SEQ ID NO: 2207585 - RNA, 19 nt, Artificial Sequence
  Description of Artificial Sequence: Synthetic oligonucleotide
uccaagccucauuuauagu

SEQ ID NO: 2207586 - RNA, 19 nt, Artificial Sequence
  Description of Artificial Sequence: Synthetic oligonucleotide
aucgaagguaugaagucau

SEQ ID NO: 2207587 - RNA, 19 nt, Artificial Sequence
  Description of Artificial Sequence: Synthetic oligonucleotide
ucacauugcggcggaugag

SEQ ID NO: 2207588 - RNA, 19 nt, Artificial Sequence
  Description of Artificial Sequence: Synthetic oligonucleotide
uuacccacguuggaugaaa

SEQ ID NO: 2207589 - RNA, 19 nt, Artificial Sequence
  Description of Artificial Sequence: Synthetic oligonucleotide
aaauaugcauagacuuguu

SEQ ID NO: 2207590 - RNA, 19 nt, Artificial Sequence
  Description of Artificial Sequence: Synthetic oligonucleotide
uaacgagguccgaaaguuu

SEQ ID NO: 2207591 - RNA, 19 nt, Artificial Sequence
  Description of Artificial Sequence: Synthetic oligonucleotide
cuucguccaacuucagcca

SEQ ID NO: 2207592 - RNA, 19 nt, Artificial Sequence
  Description of Artificial Sequence: Synthetic oligonucleotide
ccgaaaguuuugcaucugg

SEQ ID NO: 2207593 - RNA, 19 nt, Artificial Sequence
  Description of Artificial Sequence: Synthetic oligonucleotide
ucuucccggagcagaucca

SEQ ID NO: 2207594 - RNA, 19 nt, Artificial Sequence
  Description of Artificial Sequence: Synthetic oligonucleotide
ucugagcgucucacauugc

SEQ ID NO: 2207595 - RNA, 19 nt, Artificial Sequence
  Description of Artificial Sequence: Synthetic oligonucleotide
caagccucauuuauagucu

SEQ ID NO: 2207596 - RNA, 19 nt, Artificial Sequence
  Description of Artificial Sequence: Synthetic oligonucleotide
uuagcgcgccccacagccc

SEQ ID NO: 2207597 - RNA, 19 nt, Artificial Sequence
  Description of Artificial Sequence: Synthetic oligonucleotide
cagagacaacuccaucuuc

SEQ ID NO: 2207598 - RNA, 19 nt, Artificial Sequence
  Description of Artificial Sequence: Synthetic oligonucleotide
agguaugaagucauagguu

SEQ ID NO: 2207599 - RNA, 19 nt, Artificial Sequence
  Description of Artificial Sequence: Synthetic oligonucleotide
ucacuucguccaacuucag

SEQ ID NO: 2207600 - RNA, 19 nt, Artificial Sequence
  Description of Artificial Sequence: Synthetic oligonucleotide
ugucugagcgucucacauu

SEQ ID NO: 2207601 - RNA, 19 nt, Artificial Sequence
  Description of Artificial Sequence: Synthetic oligonucleotide
agucucuuggaagcuuuca

SEQ ID NO: 2207602 - RNA, 19 nt, Artificial Sequence
  Description of Artificial Sequence: Synthetic oligonucleotide
ccuuauccuuucuaauuug

SEQ ID NO: 2207603 - RNA, 19 nt, Artificial Sequence
  Description of Artificial Sequence: Synthetic oligonucleotide
ugacaacuuaaggcauuga

SEQ ID NO: 2207604 - RNA, 19 nt, Artificial Sequence
  Description of Artificial Sequence: Synthetic oligonucleotide
uccgaaaguuuugcaucug

SEQ ID NO: 2207605 - RNA, 19 nt, Artificial Sequence
  Description of Artificial Sequence: Synthetic oligonucleotide
ucgaagguaugaagucaua

SEQ ID NO: 2207606 - RNA, 19 nt, Artificial Sequence
  Description of Artificial Sequence: Synthetic oligonucleotide
caagcgaccuccgcagccc

SEQ ID NO: 2207607 - RNA, 19 nt, Artificial Sequence
  Description of Artificial Sequence: Synthetic oligonucleotide
uuaaggcauugagaccuaa

SEQ ID NO: 2207608 - RNA, 19 nt, Artificial Sequence
  Description of Artificial Sequence: Synthetic oligonucleotide
uacccacguuggaugaaaa

SEQ ID NO: 2207609 - RNA, 19 nt, Artificial Sequence
  Description of Artificial Sequence: Synthetic oligonucleotide
augagaucacuucguccaa

SEQ ID NO: 2207610 - RNA, 19 nt, Artificial Sequence
  Description of Artificial Sequence: Synthetic oligonucleotide
agcgcccuuagcgcgcccc

SEQ ID NO: 2207611 - RNA, 19 nt, Artificial Sequence
  Description of Artificial Sequence: Synthetic oligonucleotide
gcaacauuaauucucucuu

SEQ ID NO: 2207612 - RNA, 19 nt, Artificial Sequence
  Description of Artificial Sequence: Synthetic oligonucleotide
cagccauuugcucuuccca

SEQ ID NO: 2207613 - RNA, 19 nt, Artificial Sequence
  Description of Artificial Sequence: Synthetic oligonucleotide
uuggggccgacgacgcgca

SEQ ID NO: 2207614 - RNA, 19 nt, Artificial Sequence
  Description of Artificial Sequence: Synthetic oligonucleotide
guccgaaaguuuugcaucu

SEQ ID NO: 2207615 - RNA, 19 nt, Artificial Sequence
  Description of Artificial Sequence: Synthetic oligonucleotide
ccaacugagcuggaguuag

SEQ ID NO: 2207616 - RNA, 19 nt, Artificial Sequence
  Description of Artificial Sequence: Synthetic oligonucleotide
accagccuuauccuuucua

SEQ ID NO: 2207617 - RNA, 19 nt, Artificial Sequence
  Description of Artificial Sequence: Synthetic oligonucleotide
ccucauuuauagucuucag

SEQ ID NO: 2207618 - RNA, 19 nt, Artificial Sequence
  Description of Artificial Sequence: Synthetic oligonucleotide
ccgguaguucccuccaugc

SEQ ID NO: 2207619 - RNA, 19 nt, Artificial Sequence
  Description of Artificial Sequence: Synthetic oligonucleotide
ggaauacagacaaggcuga

SEQ ID NO: 2207620 - RNA, 19 nt, Artificial Sequence
  Description of Artificial Sequence: Synthetic oligonucleotide
cacauugcggcggaugaga

SEQ ID NO: 2207621 - RNA, 19 nt, Artificial Sequence
  Description of Artificial Sequence: Synthetic oligonucleotide
cauugcggcggaugagauc

SEQ ID NO: 2207622 - RNA, 19 nt, Artificial Sequence
  Description of Artificial Sequence: Synthetic oligonucleotide
uggaguuagcuggucuuua

SEQ ID NO: 2207623 - RNA, 19 nt, Artificial Sequence
  Description of Artificial Sequence: Synthetic oligonucleotide
cgaagguaugaagucauag

SEQ ID NO: 2207624 - RNA, 19 nt, Artificial Sequence
  Description of Artificial Sequence: Synthetic oligonucleotide
cgaauucuaucaucuuuag

SEQ ID NO: 2207625 - RNA, 19 nt, Artificial Sequence
  Description of Artificial Sequence: Synthetic oligonucleotide
cuuuggggccgacgacgcg

SEQ ID NO: 2207626 - RNA, 19 nt, Artificial Sequence
  Description of Artificial Sequence: Synthetic oligonucleotide
gcaagcugaauguaugccu

SEQ ID NO: 2207627 - RNA, 19 nt, Artificial Sequence
  Description of Artificial Sequence: Synthetic oligonucleotide
gccgacgacgcgcaggccc

SEQ ID NO: 2207628 - RNA, 19 nt, Artificial Sequence
  Description of Artificial Sequence: Synthetic oligonucleotide
ucguccaacuucagccauu

SEQ ID NO: 2207629 - RNA, 19 nt, Artificial Sequence
  Description of Artificial Sequence: Synthetic oligonucleotide
acgacgcgcaggcccggcg

SEQ ID NO: 2207630 - RNA, 19 nt, Artificial Sequence
  Description of Artificial Sequence: Synthetic oligonucleotide
gcaagcgaccuccgcagcc

SEQ ID NO: 2207631 - RNA, 19 nt, Artificial Sequence
  Description of Artificial Sequence: Synthetic oligonucleotide
cuuccgguaguucccucca

SEQ ID NO: 2207632 - RNA, 19 nt, Artificial Sequence
  Description of Artificial Sequence: Synthetic oligonucleotide
cuaacgagguccgaaaguu

SEQ ID NO: 2207633 - RNA, 19 nt, Artificial Sequence
  Description of Artificial Sequence: Synthetic oligonucleotide
acgagguccgaaaguuuug

SEQ ID NO: 2207634 - RNA, 19 nt, Artificial Sequence
  Description of Artificial Sequence: Synthetic oligonucleotide
uucccggagcagauccauc

SEQ ID NO: 2207635 - RNA, 19 nt, Artificial Sequence
  Description of Artificial Sequence: Synthetic oligonucleotide
gacuuuuccaagccucauu

SEQ ID NO: 2207636 - RNA, 19 nt, Artificial Sequence
  Description of Artificial Sequence: Synthetic oligonucleotide
cuuuagcaagcugaaugua

SEQ ID NO: 2207637 - RNA, 19 nt, Artificial Sequence
  Description of Artificial Sequence: Synthetic oligonucleotide
uugguuucuugugccuaau

SEQ ID NO: 2207638 - RNA, 19 nt, Artificial Sequence
  Description of Artificial Sequence: Synthetic oligonucleotide
uccaugcggcugcaauuuu

SEQ ID NO: 2207639 - RNA, 19 nt, Artificial Sequence
  Description of Artificial Sequence: Synthetic oligonucleotide
ggaguuagcuggucuuuaa

SEQ ID NO: 2207640 - RNA, 19 nt, Artificial Sequence
  Description of Artificial Sequence: Synthetic oligonucleotide
gcgagggcaagcgaccucc

SEQ ID NO: 2207641 - RNA, 19 nt, Artificial Sequence
  Description of Artificial Sequence: Synthetic oligonucleotide
cauugagaccuaauugguu

SEQ ID NO: 2207642 - RNA, 19 nt, Artificial Sequence
  Description of Artificial Sequence: Synthetic oligonucleotide
uucuuccgguaguucccuc

SEQ ID NO: 2207643 - RNA, 19 nt, Artificial Sequence
  Description of Artificial Sequence: Synthetic oligonucleotide
guaaccagccuuauccuuu

SEQ ID NO: 2207644 - RNA, 19 nt, Artificial Sequence
  Description of Artificial Sequence: Synthetic oligonucleotide
agacaaggcugagcggcga

SEQ ID NO: 2207645 - RNA, 19 nt, Artificial Sequence
  Description of Artificial Sequence: Synthetic oligonucleotide
gggccgacgacgcgcaggc

SEQ ID NO: 2207646 - RNA, 19 nt, Artificial Sequence
  Description of Artificial Sequence: Synthetic oligonucleotide
ccagccuuauccuuucuaa

SEQ ID NO: 2207647 - RNA, 19 nt, Artificial Sequence
  Description of Artificial Sequence: Synthetic oligonucleotide
ucuggguguuuagcuuuaa

SEQ ID NO: 2207648 - RNA, 19 nt, Artificial Sequence
  Description of Artificial Sequence: Synthetic oligonucleotide
ugcggcggaugagaucacu

SEQ ID NO: 2207649 - RNA, 19 nt, Artificial Sequence
  Description of Artificial Sequence: Synthetic oligonucleotide
cccgagcgcccuuagcgcg

SEQ ID NO: 2207650 - RNA, 19 nt, Artificial Sequence
  Description of Artificial Sequence: Synthetic oligonucleotide
accaacugagcuggaguua

SEQ ID NO: 2207651 - RNA, 19 nt, Artificial Sequence
  Description of Artificial Sequence: Synthetic oligonucleotide
cgcccgagcgcccuuagcg

SEQ ID NO: 2207652 - RNA, 19 nt, Artificial Sequence
  Description of Artificial Sequence: Synthetic oligonucleotide
cuucuaucuuaguccucaa

SEQ ID NO: 2207653 - RNA, 19 nt, Artificial Sequence
  Description of Artificial Sequence: Synthetic oligonucleotide
caucacuagauagacuuuu

SEQ ID NO: 2207654 - RNA, 19 nt, Artificial Sequence
  Description of Artificial Sequence: Synthetic oligonucleotide
cuggguguuuagcuuuaaa

SEQ ID NO: 2207655 - RNA, 19 nt, Artificial Sequence
  Description of Artificial Sequence: Synthetic oligonucleotide
cauagacuuguuacauaau

SEQ ID NO: 2207656 - RNA, 19 nt, Artificial Sequence
  Description of Artificial Sequence: Synthetic oligonucleotide
ccuaaucccagagacaacu

SEQ ID NO: 2207657 - RNA, 19 nt, Artificial Sequence
  Description of Artificial Sequence: Synthetic oligonucleotide
acauugcggcggaugagau

SEQ ID NO: 2207658 - RNA, 19 nt, Artificial Sequence
  Description of Artificial Sequence: Synthetic oligonucleotide
cuuuagucucuuggaagcu

SEQ ID NO: 2207659 - RNA, 19 nt, Artificial Sequence
  Description of Artificial Sequence: Synthetic oligonucleotide
agcgaccuccgcagcccgc

SEQ ID NO: 2207660 - RNA, 19 nt, Artificial Sequence
  Description of Artificial Sequence: Synthetic oligonucleotide
gccuuauccuuucuaauuu

SEQ ID NO: 2207661 - RNA, 19 nt, Artificial Sequence
  Description of Artificial Sequence: Synthetic oligonucleotide
cagcgccaucuuuggggcc

SEQ ID NO: 2207662 - RNA, 19 nt, Artificial Sequence
  Description of Artificial Sequence: Synthetic oligonucleotide
gccaucuuuggggccgacg

SEQ ID NO: 2207663 - RNA, 19 nt, Artificial Sequence
  Description of Artificial Sequence: Synthetic oligonucleotide
agcgcccgagcgcccuuag

SEQ ID NO: 2207664 - RNA, 19 nt, Artificial Sequence
  Description of Artificial Sequence: Synthetic oligonucleotide
cagcccgcgcacagcucgg

SEQ ID NO: 2207665 - RNA, 19 nt, Artificial Sequence
  Description of Artificial Sequence: Synthetic oligonucleotide
cagauacguaaauguugua

SEQ ID NO: 2207666 - RNA, 19 nt, Artificial Sequence
  Description of Artificial Sequence: Synthetic oligonucleotide
cgguaguucccuccaugcg

SEQ ID NO: 2207667 - RNA, 19 nt, Artificial Sequence
  Description of Artificial Sequence: Synthetic oligonucleotide
gguagcuguucuguagaaa

SEQ ID NO: 2207668 - RNA, 19 nt, Artificial Sequence
  Description of Artificial Sequence: Synthetic oligonucleotide
gcauugagaccuaauuggu

SEQ ID NO: 2207669 - RNA, 19 nt, Artificial Sequence
  Description of Artificial Sequence: Synthetic oligonucleotide
cgagguccgaaaguuuugc

SEQ ID NO: 2207670 - RNA, 19 nt, Artificial Sequence
  Description of Artificial Sequence: Synthetic oligonucleotide
ccuuucuaauuugacaacu

SEQ ID NO: 2207671 - RNA, 19 nt, Artificial Sequence
  Description of Artificial Sequence: Synthetic oligonucleotide
ggcaagcgaccuccgcagc

SEQ ID NO: 2207672 - RNA, 19 nt, Artificial Sequence
  Description of Artificial Sequence: Synthetic oligonucleotide
gcccgagcgcccuuagcgc

SEQ ID NO: 2207673 - RNA, 19 nt, Artificial Sequence
  Description of Artificial Sequence: Synthetic oligonucleotide
uugcggcggaugagaucac

SEQ ID NO: 2207674 - RNA, 19 nt, Artificial Sequence
  Description of Artificial Sequence: Synthetic oligonucleotide
cagccuuauccuuucuaau

SEQ ID NO: 2207675 - RNA, 19 nt, Artificial Sequence
  Description of Artificial Sequence: Synthetic oligonucleotide
ggggccgacgacgcgcagg

SEQ ID NO: 2207676 - RNA, 19 nt, Artificial Sequence
  Description of Artificial Sequence: Synthetic oligonucleotide
cccuuagcgcgccccacag

SEQ ID NO: 2207677 - RNA, 19 nt, Artificial Sequence
  Description of Artificial Sequence: Synthetic oligonucleotide
aucuggguguuuagcuuua

SEQ ID NO: 2207678 - RNA, 19 nt, Artificial Sequence
  Description of Artificial Sequence: Synthetic oligonucleotide
ggguagcuguucuguagaa

SEQ ID NO: 2207679 - RNA, 19 nt, Artificial Sequence
  Description of Artificial Sequence: Synthetic oligonucleotide
uggggccgacgacgcgcag

SEQ ID NO: 2207680 - RNA, 19 nt, Artificial Sequence
  Description of Artificial Sequence: Synthetic oligonucleotide
ggaagcuuucagauacgua

SEQ ID NO: 2207681 - RNA, 19 nt, Artificial Sequence
  Description of Artificial Sequence: Synthetic oligonucleotide
gagcggcgagggcaagcga

SEQ ID NO: 2207682 - RNA, 19 nt, Artificial Sequence
  Description of Artificial Sequence: Synthetic oligonucleotide
agauaccaacugagcugga

SEQ ID NO: 2207683 - RNA, 19 nt, Artificial Sequence
  Description of Artificial Sequence: Synthetic oligonucleotide
gcuggaguuagcuggucuu

SEQ ID NO: 2207684 - RNA, 19 nt, Artificial Sequence
  Description of Artificial Sequence: Synthetic oligonucleotide
ccuuagcgcgccccacagc

SEQ ID NO: 2207685 - RNA, 19 nt, Artificial Sequence
  Description of Artificial Sequence: Synthetic oligonucleotide
cggcggaugagaucacuuc

SEQ ID NO: 2207686 - RNA, 19 nt, Artificial Sequence
  Description of Artificial Sequence: Synthetic oligonucleotide
gcuuuaaaucuggguagcu

SEQ ID NO: 2207687 - RNA, 19 nt, Artificial Sequence
  Description of Artificial Sequence: Synthetic oligonucleotide
cuucuuccgguaguucccu

SEQ ID NO: 2207688 - RNA, 19 nt, Artificial Sequence
  Description of Artificial Sequence: Synthetic oligonucleotide
ccgcgcacagcucggcccc

SEQ ID NO: 2207689 - RNA, 19 nt, Artificial Sequence
  Description of Artificial Sequence: Synthetic oligonucleotide
gcggcgagggcaagcgacc

SEQ ID NO: 2207690 - RNA, 19 nt, Artificial Sequence
  Description of Artificial Sequence: Synthetic oligonucleotide
cuccaugcggcugcaauuu

SEQ ID NO: 2207691 - RNA, 19 nt, Artificial Sequence
  Description of Artificial Sequence: Synthetic oligonucleotide
cguuaucauaacgaauucu

SEQ ID NO: 2207692 - RNA, 19 nt, Artificial Sequence
  Description of Artificial Sequence: Synthetic oligonucleotide
ggcgagggcaagcgaccuc

SEQ ID NO: 2207693 - RNA, 19 nt, Artificial Sequence
  Description of Artificial Sequence: Synthetic oligonucleotide
gccuaaucccagagacaac

SEQ ID NO: 2207694 - RNA, 19 nt, Artificial Sequence
  Description of Artificial Sequence: Synthetic oligonucleotide
gcccuuagcgcgccccaca

SEQ ID NO: 2207695 - RNA, 19 nt, Artificial Sequence
  Description of Artificial Sequence: Synthetic oligonucleotide
gagcgcccuuagcgcgccc

SEQ ID NO: 2207696 - RNA, 19 nt, Artificial Sequence
  Description of Artificial Sequence: Synthetic oligonucleotide
ccagagacaacuccaucuu

SEQ ID NO: 2207697 - RNA, 19 nt, Artificial Sequence
  Description of Artificial Sequence: Synthetic oligonucleotide
ccccgagcgcccgagcgcc

SEQ ID NO: 2207698 - RNA, 19 nt, Artificial Sequence
  Description of Artificial Sequence: Synthetic oligonucleotide
cgagggcaagcgaccuccg

SEQ ID NO: 2207699 - RNA, 19 nt, Artificial Sequence
  Description of Artificial Sequence: Synthetic oligonucleotide
gcccgcgcacagcucggcc

SEQ ID NO: 2207700 - RNA, 19 nt, Artificial Sequence
  Description of Artificial Sequence: Synthetic oligonucleotide
guaugcugaucgaggucuu

SEQ ID NO: 2207701 - RNA, 19 nt, Artificial Sequence
  Description of Artificial Sequence: Synthetic oligonucleotide
ucccuccaugcggcugcaa

SEQ ID NO: 2207702 - RNA, 19 nt, Artificial Sequence
  Description of Artificial Sequence: Synthetic oligonucleotide
ccacagccccuggaacagc

SEQ ID NO: 2207703 - RNA, 19 nt, Artificial Sequence
  Description of Artificial Sequence: Synthetic oligonucleotide
gcgcccgagcgcccuuagc

SEQ ID NO: 2207704 - RNA, 19 nt, Artificial Sequence
  Description of Artificial Sequence: Synthetic oligonucleotide
gcuggucuuuaaacuugcu

SEQ ID NO: 2207705 - RNA, 19 nt, Artificial Sequence
  Description of Artificial Sequence: Synthetic oligonucleotide
gcgcccuuagcgcgcccca

SEQ ID NO: 2207706 - RNA, 19 nt, Artificial Sequence
  Description of Artificial Sequence: Synthetic oligonucleotide
gagcgcccgagcgcccuua

SEQ ID NO: 2207707 - RNA, 19 nt, Artificial Sequence
  Description of Artificial Sequence: Synthetic oligonucleotide
ccggagcagauccaucuuu

SEQ ID NO: 2207708 - RNA, 19 nt, Artificial Sequence
  Description of Artificial Sequence: Synthetic oligonucleotide
cgagcgcccuuagcgcgcc

SEQ ID NO: 2207709 - RNA, 19 nt, Artificial Sequence
  Description of Artificial Sequence: Synthetic oligonucleotide
cccgagcgcccgagcgccc

SEQ ID NO: 2207710 - RNA, 19 nt, Artificial Sequence
  Description of Artificial Sequence: Synthetic oligonucleotide
gcucuucccaagacuucau

SEQ ID NO: 2207711 - RNA, 19 nt, Artificial Sequence
  Description of Artificial Sequence: Synthetic oligonucleotide
gcggcggaugagaucacuu

SEQ ID NO: 2207712 - RNA, 19 nt, Artificial Sequence
  Description of Artificial Sequence: Synthetic oligonucleotide
cgaccuccgcagcccgcgc

SEQ ID NO: 2207713 - RNA, 19 nt, Artificial Sequence
  Description of Artificial Sequence: Synthetic oligonucleotide
ggccgacgacgcgcaggcc

SEQ ID NO: 2207714 - RNA, 19 nt, Artificial Sequence
  Description of Artificial Sequence: Synthetic oligonucleotide
gccccuggaacagcgccau

SEQ ID NO: 2207715 - RNA, 19 nt, Artificial Sequence
  Description of Artificial Sequence: Synthetic oligonucleotide
gucucacauugcggcggau

SEQ ID NO: 2207716 - RNA, 19 nt, Artificial Sequence
  Description of Artificial Sequence: Synthetic oligonucleotide
cgcgccccacagccccugg

SEQ ID NO: 2207717 - RNA, 19 nt, Artificial Sequence
  Description of Artificial Sequence: Synthetic oligonucleotide
ccccuggaacagcgccauc

SEQ ID NO: 2207718 - RNA, 19 nt, Artificial Sequence
  Description of Artificial Sequence: Synthetic oligonucleotide
cgcagcccgcgcacagcuc

SEQ ID NO: 2207719 - RNA, 19 nt, Artificial Sequence
  Description of Artificial Sequence: Synthetic oligonucleotide
cguccaacuucagccauuu

SEQ ID NO: 2207720 - RNA, 19 nt, Artificial Sequence
  Description of Artificial Sequence: Synthetic oligonucleotide
cgcccuuagcgcgccccac

SEQ ID NO: 2207721 - RNA, 19 nt, Artificial Sequence
  Description of Artificial Sequence: Synthetic oligonucleotide
cccggagcagauccaucuu

SEQ ID NO: 2207722 - RNA, 19 nt, Artificial Sequence
  Description of Artificial Sequence: Synthetic oligonucleotide
ccgagcgcccgagcgcccu

SEQ ID NO: 2207723 - RNA, 19 nt, Artificial Sequence
  Description of Artificial Sequence: Synthetic oligonucleotide
cgagcgcccgagcgcccuu

SEQ ID NO: 2207724 - RNA, 19 nt, Artificial Sequence
  Description of Artificial Sequence: Synthetic oligonucleotide
aaaaccauaaaauucuuag

SEQ ID NO: 2207725 - RNA, 19 nt, Artificial Sequence
  Description of Artificial Sequence: Synthetic oligonucleotide
aaaaguuuaagaaugcagc

SEQ ID NO: 2207726 - RNA, 19 nt, Artificial Sequence
  Description of Artificial Sequence: Synthetic oligonucleotide
aaagcggugagguaaaccc

SEQ ID NO: 2207727 - RNA, 19 nt, Artificial Sequence
  Description of Artificial Sequence: Synthetic oligonucleotide
auaaaucuaggucauagcc

SEQ ID NO: 2207728 - RNA, 19 nt, Artificial Sequence
  Description of Artificial Sequence: Synthetic oligonucleotide
uuuacugggaacaugaaug

SEQ ID NO: 2207729 - RNA, 19 nt, Artificial Sequence
  Description of Artificial Sequence: Synthetic oligonucleotide
accaauaacuuuuaugucc

SEQ ID NO: 2207730 - RNA, 19 nt, Artificial Sequence
  Description of Artificial Sequence: Synthetic oligonucleotide
acaaaauaaaucuagguca

SEQ ID NO: 2207731 - RNA, 19 nt, Artificial Sequence
  Description of Artificial Sequence: Synthetic oligonucleotide
ucugauaaaaucuacaguc

SEQ ID NO: 2207732 - RNA, 19 nt, Artificial Sequence
  Description of Artificial Sequence: Synthetic oligonucleotide
aggaauacaaaauaaaucu

SEQ ID NO: 2207733 - RNA, 19 nt, Artificial Sequence
  Description of Artificial Sequence: Synthetic oligonucleotide
aagucuuucaguccugucc

SEQ ID NO: 2207734 - RNA, 19 nt, Artificial Sequence
  Description of Artificial Sequence: Synthetic oligonucleotide
aaaguugagagaucauccc

SEQ ID NO: 2207735 - RNA, 19 nt, Artificial Sequence
  Description of Artificial Sequence: Synthetic oligonucleotide
ucaacuugaacucucaucu

SEQ ID NO: 2207736 - RNA, 19 nt, Artificial Sequence
  Description of Artificial Sequence: Synthetic oligonucleotide
aauuauguccucaacaauc

SEQ ID NO: 2207737 - RNA, 19 nt, Artificial Sequence
  Description of Artificial Sequence: Synthetic oligonucleotide
auauccaacacuucgagag

SEQ ID NO: 2207738 - RNA, 19 nt, Artificial Sequence
  Description of Artificial Sequence: Synthetic oligonucleotide
ugcagauucaacuugaacu

SEQ ID NO: 2207739 - RNA, 19 nt, Artificial Sequence
  Description of Artificial Sequence: Synthetic oligonucleotide
acucauuauagucaagggc

SEQ ID NO: 2207740 - RNA, 19 nt, Artificial Sequence
  Description of Artificial Sequence: Synthetic oligonucleotide
aaauaaaucuaggucauag

SEQ ID NO: 2207741 - RNA, 19 nt, Artificial Sequence
  Description of Artificial Sequence: Synthetic oligonucleotide
aaguugagagaucaucccc

SEQ ID NO: 2207742 - RNA, 19 nt, Artificial Sequence
  Description of Artificial Sequence: Synthetic oligonucleotide
aaccauaaaauucuuagaa

SEQ ID NO: 2207743 - RNA, 19 nt, Artificial Sequence
  Description of Artificial Sequence: Synthetic oligonucleotide
uaaaguugagagaucaucc

SEQ ID NO: 2207744 - RNA, 19 nt, Artificial Sequence
  Description of Artificial Sequence: Synthetic oligonucleotide
aaccuuaaccauuuugggg

SEQ ID NO: 2207745 - RNA, 19 nt, Artificial Sequence
  Description of Artificial Sequence: Synthetic oligonucleotide
ucagcaaagaauuuauagc

SEQ ID NO: 2207746 - RNA, 19 nt, Artificial Sequence
  Description of Artificial Sequence: Synthetic oligonucleotide
acuauuucuauucagugcu

SEQ ID NO: 2207747 - RNA, 19 nt, Artificial Sequence
  Description of Artificial Sequence: Synthetic oligonucleotide
uguugacugaucauuacag

SEQ ID NO: 2207748 - RNA, 19 nt, Artificial Sequence
  Description of Artificial Sequence: Synthetic oligonucleotide
ucacuaaucacgacgcugg

SEQ ID NO: 2207749 - RNA, 19 nt, Artificial Sequence
  Description of Artificial Sequence: Synthetic oligonucleotide
aaauccucgacauagugau

SEQ ID NO: 2207750 - RNA, 19 nt, Artificial Sequence
  Description of Artificial Sequence: Synthetic oligonucleotide
ucuuucaugacaucucggg

SEQ ID NO: 2207751 - RNA, 19 nt, Artificial Sequence
  Description of Artificial Sequence: Synthetic oligonucleotide
aacccaacuagcuucgccg

SEQ ID NO: 2207752 - RNA, 19 nt, Artificial Sequence
  Description of Artificial Sequence: Synthetic oligonucleotide
cuuuucaccagcaagcuug

SEQ ID NO: 2207753 - RNA, 19 nt, Artificial Sequence
  Description of Artificial Sequence: Synthetic oligonucleotide
ugauucaaaucccugaagu

SEQ ID NO: 2207754 - RNA, 19 nt, Artificial Sequence
  Description of Artificial Sequence: Synthetic oligonucleotide
aagcuugcaaccuuaacca

SEQ ID NO: 2207755 - RNA, 19 nt, Artificial Sequence
  Description of Artificial Sequence: Synthetic oligonucleotide
uauagucaagggcauaucc

SEQ ID NO: 2207756 - RNA, 19 nt, Artificial Sequence
  Description of Artificial Sequence: Synthetic oligonucleotide
ugaaguacucauuauaguc

SEQ ID NO: 2207757 - RNA, 19 nt, Artificial Sequence
  Description of Artificial Sequence: Synthetic oligonucleotide
agucugauaaaaucuacag

SEQ ID NO: 2207758 - RNA, 19 nt, Artificial Sequence
  Description of Artificial Sequence: Synthetic oligonucleotide
aaucaagacauucuuucca

SEQ ID NO: 2207759 - RNA, 19 nt, Artificial Sequence
  Description of Artificial Sequence: Synthetic oligonucleotide
ugagagaucauccccacca

SEQ ID NO: 2207760 - RNA, 19 nt, Artificial Sequence
  Description of Artificial Sequence: Synthetic oligonucleotide
uguacuaagcagauggcug

SEQ ID NO: 2207761 - RNA, 19 nt, Artificial Sequence
  Description of Artificial Sequence: Synthetic oligonucleotide
ucuaucacuauuucuauuc

SEQ ID NO: 2207762 - RNA, 19 nt, Artificial Sequence
  Description of Artificial Sequence: Synthetic oligonucleotide
uccaacaacaaacuugucu

SEQ ID NO: 2207763 - RNA, 19 nt, Artificial Sequence
  Description of Artificial Sequence: Synthetic oligonucleotide
ugacugaucauuacaguag

SEQ ID NO: 2207764 - RNA, 19 nt, Artificial Sequence
  Description of Artificial Sequence: Synthetic oligonucleotide
caagcuugcaaccuuaacc

SEQ ID NO: 2207765 - RNA, 19 nt, Artificial Sequence
  Description of Artificial Sequence: Synthetic oligonucleotide
agugauuaggaauacaaaa

SEQ ID NO: 2207766 - RNA, 19 nt, Artificial Sequence
  Description of Artificial Sequence: Synthetic oligonucleotide
uuaagaaugcagcaacuga

SEQ ID NO: 2207767 - RNA, 19 nt, Artificial Sequence
  Description of Artificial Sequence: Synthetic oligonucleotide
auucaaaucccugaaguac

SEQ ID NO: 2207768 - RNA, 19 nt, Artificial Sequence
  Description of Artificial Sequence: Synthetic oligonucleotide
ugcagaacuagaaugcuug

SEQ ID NO: 2207769 - RNA, 19 nt, Artificial Sequence
  Description of Artificial Sequence: Synthetic oligonucleotide
ucaacaaucaagacauucu

SEQ ID NO: 2207770 - RNA, 19 nt, Artificial Sequence
  Description of Artificial Sequence: Synthetic oligonucleotide
uaagaaugcagcaacugac

SEQ ID NO: 2207771 - RNA, 19 nt, Artificial Sequence
  Description of Artificial Sequence: Synthetic oligonucleotide
ucaucacuaaucacgacgc

SEQ ID NO: 2207772 - RNA, 19 nt, Artificial Sequence
  Description of Artificial Sequence: Synthetic oligonucleotide
cucauuauagucaagggca

SEQ ID NO: 2207773 - RNA, 19 nt, Artificial Sequence
  Description of Artificial Sequence: Synthetic oligonucleotide
aaacccaacuagcuucgcc

SEQ ID NO: 2207774 - RNA, 19 nt, Artificial Sequence
  Description of Artificial Sequence: Synthetic oligonucleotide
ucucuuucaugacaucucg

SEQ ID NO: 2207775 - RNA, 19 nt, Artificial Sequence
  Description of Artificial Sequence: Synthetic oligonucleotide
cuaaucacgacgcuggggc

SEQ ID NO: 2207776 - RNA, 19 nt, Artificial Sequence
  Description of Artificial Sequence: Synthetic oligonucleotide
auacaaaauaaaucuaggu

SEQ ID NO: 2207777 - RNA, 19 nt, Artificial Sequence
  Description of Artificial Sequence: Synthetic oligonucleotide
ugagguaaacccaacuagc

SEQ ID NO: 2207778 - RNA, 19 nt, Artificial Sequence
  Description of Artificial Sequence: Synthetic oligonucleotide
accuuaaccauuuuggggu

SEQ ID NO: 2207779 - RNA, 19 nt, Artificial Sequence
  Description of Artificial Sequence: Synthetic oligonucleotide
aaugcagcaacugacauuu

SEQ ID NO: 2207780 - RNA, 19 nt, Artificial Sequence
  Description of Artificial Sequence: Synthetic oligonucleotide
uaaaucuaggucauagccu

SEQ ID NO: 2207781 - RNA, 19 nt, Artificial Sequence
  Description of Artificial Sequence: Synthetic oligonucleotide
aaaccauaaaauucuuaga

SEQ ID NO: 2207782 - RNA, 19 nt, Artificial Sequence
  Description of Artificial Sequence: Synthetic oligonucleotide
uuacugggaacaugaaugg

SEQ ID NO: 2207783 - RNA, 19 nt, Artificial Sequence
  Description of Artificial Sequence: Synthetic oligonucleotide
aaugcuugguaauuuuacu

SEQ ID NO: 2207784 - RNA, 19 nt, Artificial Sequence
  Description of Artificial Sequence: Synthetic oligonucleotide
accauaaaauucuuagaag

SEQ ID NO: 2207785 - RNA, 19 nt, Artificial Sequence
  Description of Artificial Sequence: Synthetic oligonucleotide
uuaccagugucaauuaugu

SEQ ID NO: 2207786 - RNA, 19 nt, Artificial Sequence
  Description of Artificial Sequence: Synthetic oligonucleotide
augggaauggaucuaucac

SEQ ID NO: 2207787 - RNA, 19 nt, Artificial Sequence
  Description of Artificial Sequence: Synthetic oligonucleotide
gaaagcagaguuugcauug

SEQ ID NO: 2207788 - RNA, 19 nt, Artificial Sequence
  Description of Artificial Sequence: Synthetic oligonucleotide
ucuuagaagguucaugcaa

SEQ ID NO: 2207789 - RNA, 19 nt, Artificial Sequence
  Description of Artificial Sequence: Synthetic oligonucleotide
uugaacucucaucuuaggc

SEQ ID NO: 2207790 - RNA, 19 nt, Artificial Sequence
  Description of Artificial Sequence: Synthetic oligonucleotide
uacucauuauagucaaggg

SEQ ID NO: 2207791 - RNA, 19 nt, Artificial Sequence
  Description of Artificial Sequence: Synthetic oligonucleotide
agaguuugcauuguuuuac

SEQ ID NO: 2207792 - RNA, 19 nt, Artificial Sequence
  Description of Artificial Sequence: Synthetic oligonucleotide
ucaucaucacuaaucacga

SEQ ID NO: 2207793 - RNA, 19 nt, Artificial Sequence
  Description of Artificial Sequence: Synthetic oligonucleotide
ucacuauuucuauucagug

SEQ ID NO: 2207794 - RNA, 19 nt, Artificial Sequence
  Description of Artificial Sequence: Synthetic oligonucleotide
auauccaacaacaaacuug

SEQ ID NO: 2207795 - RNA, 19 nt, Artificial Sequence
  Description of Artificial Sequence: Synthetic oligonucleotide
ugcuuuaauguaauccagc

SEQ ID NO: 2207796 - RNA, 19 nt, Artificial Sequence
  Description of Artificial Sequence: Synthetic oligonucleotide
uucaaaucccugaaguacu

SEQ ID NO: 2207797 - RNA, 19 nt, Artificial Sequence
  Description of Artificial Sequence: Synthetic oligonucleotide
ugauaaaaucuacagucau

SEQ ID NO: 2207798 - RNA, 19 nt, Artificial Sequence
  Description of Artificial Sequence: Synthetic oligonucleotide
aauaugauucaaaucccug

SEQ ID NO: 2207799 - RNA, 19 nt, Artificial Sequence
  Description of Artificial Sequence: Synthetic oligonucleotide
auaacuuuuauguccccug

SEQ ID NO: 2207800 - RNA, 19 nt, Artificial Sequence
  Description of Artificial Sequence: Synthetic oligonucleotide
uuuaagaaugcagcaacug

SEQ ID NO: 2207801 - RNA, 19 nt, Artificial Sequence
  Description of Artificial Sequence: Synthetic oligonucleotide
uguuuuaccagugucaauu

SEQ ID NO: 2207802 - RNA, 19 nt, Artificial Sequence
  Description of Artificial Sequence: Synthetic oligonucleotide
acuuuuauguccccuguug

SEQ ID NO: 2207803 - RNA, 19 nt, Artificial Sequence
  Description of Artificial Sequence: Synthetic oligonucleotide
aucaagacauucuuuccag

SEQ ID NO: 2207804 - RNA, 19 nt, Artificial Sequence
  Description of Artificial Sequence: Synthetic oligonucleotide
gugagguaaacccaacuag

SEQ ID NO: 2207805 - RNA, 19 nt, Artificial Sequence
  Description of Artificial Sequence: Synthetic oligonucleotide
ugcaaccuuaaccauuuug

SEQ ID NO: 2207806 - RNA, 19 nt, Artificial Sequence
  Description of Artificial Sequence: Synthetic oligonucleotide
ucggcaacgggucacagac

SEQ ID NO: 2207807 - RNA, 19 nt, Artificial Sequence
  Description of Artificial Sequence: Synthetic oligonucleotide
agcaaagaauuuauagccc

SEQ ID NO: 2207808 - RNA, 19 nt, Artificial Sequence
  Description of Artificial Sequence: Synthetic oligonucleotide
auaaacaccuuuuccaaau

SEQ ID NO: 2207809 - RNA, 19 nt, Artificial Sequence
  Description of Artificial Sequence: Synthetic oligonucleotide
gauaaaaucuacagucaug

SEQ ID NO: 2207810 - RNA, 19 nt, Artificial Sequence
  Description of Artificial Sequence: Synthetic oligonucleotide
aagggcauauccaacaaca

SEQ ID NO: 2207811 - RNA, 19 nt, Artificial Sequence
  Description of Artificial Sequence: Synthetic oligonucleotide
aaguacucauuauagucaa

SEQ ID NO: 2207812 - RNA, 19 nt, Artificial Sequence
  Description of Artificial Sequence: Synthetic oligonucleotide
cacuauuucuauucagugc

SEQ ID NO: 2207813 - RNA, 19 nt, Artificial Sequence
  Description of Artificial Sequence: Synthetic oligonucleotide
aauaacuuuuauguccccu

SEQ ID NO: 2207814 - RNA, 19 nt, Artificial Sequence
  Description of Artificial Sequence: Synthetic oligonucleotide
uuaggcuuuguauuuggcu

SEQ ID NO: 2207815 - RNA, 19 nt, Artificial Sequence
  Description of Artificial Sequence: Synthetic oligonucleotide
gacggaaucggucggcugg

SEQ ID NO: 2207816 - RNA, 19 nt, Artificial Sequence
  Description of Artificial Sequence: Synthetic oligonucleotide
ucaucuuaggcuuuguauu

SEQ ID NO: 2207817 - RNA, 19 nt, Artificial Sequence
  Description of Artificial Sequence: Synthetic oligonucleotide
aaccauuuugggguuguac

SEQ ID NO: 2207818 - RNA, 19 nt, Artificial Sequence
  Description of Artificial Sequence: Synthetic oligonucleotide
aaauaugauucaaaucccu

SEQ ID NO: 2207819 - RNA, 19 nt, Artificial Sequence
  Description of Artificial Sequence: Synthetic oligonucleotide
uugacugaucauuacagua

SEQ ID NO: 2207820 - RNA, 19 nt, Artificial Sequence
  Description of Artificial Sequence: Synthetic oligonucleotide
acaaagucuggccuauauc

SEQ ID NO: 2207821 - RNA, 19 nt, Artificial Sequence
  Description of Artificial Sequence: Synthetic oligonucleotide
uauucagugcuuuaaugua

SEQ ID NO: 2207822 - RNA, 19 nt, Artificial Sequence
  Description of Artificial Sequence: Synthetic oligonucleotide
aacaaagucuggccuauau

SEQ ID NO: 2207823 - RNA, 19 nt, Artificial Sequence
  Description of Artificial Sequence: Synthetic oligonucleotide
gaaguacucauuauaguca

SEQ ID NO: 2207824 - RNA, 19 nt, Artificial Sequence
  Description of Artificial Sequence: Synthetic oligonucleotide
uucaacuugaacucucauc

SEQ ID NO: 2207825 - RNA, 19 nt, Artificial Sequence
  Description of Artificial Sequence: Synthetic oligonucleotide
uucccaguuucacuaauga

SEQ ID NO: 2207826 - RNA, 19 nt, Artificial Sequence
  Description of Artificial Sequence: Synthetic oligonucleotide
uuauguccccuguugacug

SEQ ID NO: 2207827 - RNA, 19 nt, Artificial Sequence
  Description of Artificial Sequence: Synthetic oligonucleotide
cagugcuuuaauguaaucc

SEQ ID NO: 2207828 - RNA, 19 nt, Artificial Sequence
  Description of Artificial Sequence: Synthetic oligonucleotide
agaacuagaaugcuuggua

SEQ ID NO: 2207829 - RNA, 19 nt, Artificial Sequence
  Description of Artificial Sequence: Synthetic oligonucleotide
cacaaauaugauucaaauc

SEQ ID NO: 2207830 - RNA, 19 nt, Artificial Sequence
  Description of Artificial Sequence: Synthetic oligonucleotide
caaucaagacauucuuucc

SEQ ID NO: 2207831 - RNA, 19 nt, Artificial Sequence
  Description of Artificial Sequence: Synthetic oligonucleotide
aguuucacuaaugacacaa

SEQ ID NO: 2207832 - RNA, 19 nt, Artificial Sequence
  Description of Artificial Sequence: Synthetic oligonucleotide
uuuuauguccccuguugac

SEQ ID NO: 2207833 - RNA, 19 nt, Artificial Sequence
  Description of Artificial Sequence: Synthetic oligonucleotide
gaaucggucggcuggcggg

SEQ ID NO: 2207834 - RNA, 19 nt, Artificial Sequence
  Description of Artificial Sequence: Synthetic oligonucleotide
aacuagaaugcuugguaau

SEQ ID NO: 2207835 - RNA, 19 nt, Artificial Sequence
  Description of Artificial Sequence: Synthetic oligonucleotide
auagugauuaggaauacaa

SEQ ID NO: 2207836 - RNA, 19 nt, Artificial Sequence
  Description of Artificial Sequence: Synthetic oligonucleotide
aauggaucuaucacuauuu

SEQ ID NO: 2207837 - RNA, 19 nt, Artificial Sequence
  Description of Artificial Sequence: Synthetic oligonucleotide
ugcagcaacugacauuucu

SEQ ID NO: 2207838 - RNA, 19 nt, Artificial Sequence
  Description of Artificial Sequence: Synthetic oligonucleotide
auggaucuaucacuauuuc

SEQ ID NO: 2207839 - RNA, 19 nt, Artificial Sequence
  Description of Artificial Sequence: Synthetic oligonucleotide
gguaaacccaacuagcuuc

SEQ ID NO: 2207840 - RNA, 19 nt, Artificial Sequence
  Description of Artificial Sequence: Synthetic oligonucleotide
uguccauaaucacuccaug

SEQ ID NO: 2207841 - RNA, 19 nt, Artificial Sequence
  Description of Artificial Sequence: Synthetic oligonucleotide
gcaaagaauuuauagcccc

SEQ ID NO: 2207842 - RNA, 19 nt, Artificial Sequence
  Description of Artificial Sequence: Synthetic oligonucleotide
uucaguccuguccauaauc

SEQ ID NO: 2207843 - RNA, 19 nt, Artificial Sequence
  Description of Artificial Sequence: Synthetic oligonucleotide
cugcgggucgccaugacgg

SEQ ID NO: 2207844 - RNA, 19 nt, Artificial Sequence
  Description of Artificial Sequence: Synthetic oligonucleotide
uauauccaacacuucgaga

SEQ ID NO: 2207845 - RNA, 19 nt, Artificial Sequence
  Description of Artificial Sequence: Synthetic oligonucleotide
uuucccaguuucacuaaug

SEQ ID NO: 2207846 - RNA, 19 nt, Artificial Sequence
  Description of Artificial Sequence: Synthetic oligonucleotide
uggaucuaucacuauuucu

SEQ ID NO: 2207847 - RNA, 19 nt, Artificial Sequence
  Description of Artificial Sequence: Synthetic oligonucleotide
ggcauauccaacaacaaac

SEQ ID NO: 2207848 - RNA, 19 nt, Artificial Sequence
  Description of Artificial Sequence: Synthetic oligonucleotide
uagugauuaggaauacaaa

SEQ ID NO: 2207849 - RNA, 19 nt, Artificial Sequence
  Description of Artificial Sequence: Synthetic oligonucleotide
uuuauguccccuguugacu

SEQ ID NO: 2207850 - RNA, 19 nt, Artificial Sequence
  Description of Artificial Sequence: Synthetic oligonucleotide
uaacuuuuauguccccugu

SEQ ID NO: 2207851 - RNA, 19 nt, Artificial Sequence
  Description of Artificial Sequence: Synthetic oligonucleotide
auaaaauucuuagaagguu

SEQ ID NO: 2207852 - RNA, 19 nt, Artificial Sequence
  Description of Artificial Sequence: Synthetic oligonucleotide
cuugaacucucaucuuagg

SEQ ID NO: 2207853 - RNA, 19 nt, Artificial Sequence
  Description of Artificial Sequence: Synthetic oligonucleotide
augaaugggacuccucgug

SEQ ID NO: 2207854 - RNA, 19 nt, Artificial Sequence
  Description of Artificial Sequence: Synthetic oligonucleotide
aaacuugucuggaauuuca

SEQ ID NO: 2207855 - RNA, 19 nt, Artificial Sequence
  Description of Artificial Sequence: Synthetic oligonucleotide
agcggugugaggaggaagc

SEQ ID NO: 2207856 - RNA, 19 nt, Artificial Sequence
  Description of Artificial Sequence: Synthetic oligonucleotide
ccaauaacuuuuauguccc

SEQ ID NO: 2207857 - RNA, 19 nt, Artificial Sequence
  Description of Artificial Sequence: Synthetic oligonucleotide
cucgacauagugauuagga

SEQ ID NO: 2207858 - RNA, 19 nt, Artificial Sequence
  Description of Artificial Sequence: Synthetic oligonucleotide
auuauagucaagggcauau

SEQ ID NO: 2207859 - RNA, 19 nt, Artificial Sequence
  Description of Artificial Sequence: Synthetic oligonucleotide
gaguuugcauuguuuuacc

SEQ ID NO: 2207860 - RNA, 19 nt, Artificial Sequence
  Description of Artificial Sequence: Synthetic oligonucleotide
gacauagugauuaggaaua

SEQ ID NO: 2207861 - RNA, 19 nt, Artificial Sequence
  Description of Artificial Sequence: Synthetic oligonucleotide
ugacaucucgggcaagucu

SEQ ID NO: 2207862 - RNA, 19 nt, Artificial Sequence
  Description of Artificial Sequence: Synthetic oligonucleotide
gaacuagaaugcuugguaa

SEQ ID NO: 2207863 - RNA, 19 nt, Artificial Sequence
  Description of Artificial Sequence: Synthetic oligonucleotide
cugggaacaugaaugggac

SEQ ID NO: 2207864 - RNA, 19 nt, Artificial Sequence
  Description of Artificial Sequence: Synthetic oligonucleotide
aagaaugcagcaacugaca

SEQ ID NO: 2207865 - RNA, 19 nt, Artificial Sequence
  Description of Artificial Sequence: Synthetic oligonucleotide
uucaugacaucucgggcaa

SEQ ID NO: 2207866 - RNA, 19 nt, Artificial Sequence
  Description of Artificial Sequence: Synthetic oligonucleotide
ugucaauuauguccucaac

SEQ ID NO: 2207867 - RNA, 19 nt, Artificial Sequence
  Description of Artificial Sequence: Synthetic oligonucleotide
cucaacaaucaagacauuc

SEQ ID NO: 2207868 - RNA, 19 nt, Artificial Sequence
  Description of Artificial Sequence: Synthetic oligonucleotide
acccaacuagcuucgccgc

SEQ ID NO: 2207869 - RNA, 19 nt, Artificial Sequence
  Description of Artificial Sequence: Synthetic oligonucleotide
aggcucauagugcaaauaa

SEQ ID NO: 2207870 - RNA, 19 nt, Artificial Sequence
  Description of Artificial Sequence: Synthetic oligonucleotide
ugcauuguuuuaccagugu

SEQ ID NO: 2207871 - RNA, 19 nt, Artificial Sequence
  Description of Artificial Sequence: Synthetic oligonucleotide
ucauuauagucaagggcau

SEQ ID NO: 2207872 - RNA, 19 nt, Artificial Sequence
  Description of Artificial Sequence: Synthetic oligonucleotide
guaaacccaacuagcuucg

SEQ ID NO: 2207873 - RNA, 19 nt, Artificial Sequence
  Description of Artificial Sequence: Synthetic oligonucleotide
aagucuggccuauauccaa

SEQ ID NO: 2207874 - RNA, 19 nt, Artificial Sequence
  Description of Artificial Sequence: Synthetic oligonucleotide
gucgccaugacggaaucgg

SEQ ID NO: 2207875 - RNA, 19 nt, Artificial Sequence
  Description of Artificial Sequence: Synthetic oligonucleotide
gauucaaaucccugaagua

SEQ ID NO: 2207876 - RNA, 19 nt, Artificial Sequence
  Description of Artificial Sequence: Synthetic oligonucleotide
ucgacauagugauuaggaa

SEQ ID NO: 2207877 - RNA, 19 nt, Artificial Sequence
  Description of Artificial Sequence: Synthetic oligonucleotide
aucauccccaccaauaacu

SEQ ID NO: 2207878 - RNA, 19 nt, Artificial Sequence
  Description of Artificial Sequence: Synthetic oligonucleotide
aucacuaaucacgacgcug

SEQ ID NO: 2207879 - RNA, 19 nt, Artificial Sequence
  Description of Artificial Sequence: Synthetic oligonucleotide
auccaacaaagucuggccu

SEQ ID NO: 2207880 - RNA, 19 nt, Artificial Sequence
  Description of Artificial Sequence: Synthetic oligonucleotide
uucgagagguccuuuucac

SEQ ID NO: 2207881 - RNA, 19 nt, Artificial Sequence
  Description of Artificial Sequence: Synthetic oligonucleotide
cuuagaagguucaugcaaa

SEQ ID NO: 2207882 - RNA, 19 nt, Artificial Sequence
  Description of Artificial Sequence: Synthetic oligonucleotide
cugaucauuacaguagcuc

SEQ ID NO: 2207883 - RNA, 19 nt, Artificial Sequence
  Description of Artificial Sequence: Synthetic oligonucleotide
cuaggucauagccugguuc

SEQ ID NO: 2207884 - RNA, 19 nt, Artificial Sequence
  Description of Artificial Sequence: Synthetic oligonucleotide
agauucaacuugaacucuc

SEQ ID NO: 2207885 - RNA, 19 nt, Artificial Sequence
  Description of Artificial Sequence: Synthetic oligonucleotide
aaagcuguacuaagcagau

SEQ ID NO: 2207886 - RNA, 19 nt, Artificial Sequence
  Description of Artificial Sequence: Synthetic oligonucleotide
uuagaagguucaugcaaaa

SEQ ID NO: 2207887 - RNA, 19 nt, Artificial Sequence
  Description of Artificial Sequence: Synthetic oligonucleotide
acauagugauuaggaauac

SEQ ID NO: 2207888 - RNA, 19 nt, Artificial Sequence
  Description of Artificial Sequence: Synthetic oligonucleotide
agaucauccccaccaauaa

SEQ ID NO: 2207889 - RNA, 19 nt, Artificial Sequence
  Description of Artificial Sequence: Synthetic oligonucleotide
auggccucccaucucuuuc

SEQ ID NO: 2207890 - RNA, 19 nt, Artificial Sequence
  Description of Artificial Sequence: Synthetic oligonucleotide
uccucguguuugcagauuc

SEQ ID NO: 2207891 - RNA, 19 nt, Artificial Sequence
  Description of Artificial Sequence: Synthetic oligonucleotide
aucucuuucaugacaucuc

SEQ ID NO: 2207892 - RNA, 19 nt, Artificial Sequence
  Description of Artificial Sequence: Synthetic oligonucleotide
agaaugcagcaacugacau

SEQ ID NO: 2207893 - RNA, 19 nt, Artificial Sequence
  Description of Artificial Sequence: Synthetic oligonucleotide
gucaagggcauauccaaca

SEQ ID NO: 2207894 - RNA, 19 nt, Artificial Sequence
  Description of Artificial Sequence: Synthetic oligonucleotide
gccaugacggaaucggucg

SEQ ID NO: 2207895 - RNA, 19 nt, Artificial Sequence
  Description of Artificial Sequence: Synthetic oligonucleotide
augacacaaauaugauuca

SEQ ID NO: 2207896 - RNA, 19 nt, Artificial Sequence
  Description of Artificial Sequence: Synthetic oligonucleotide
aaagucuggccuauaucca

SEQ ID NO: 2207897 - RNA, 19 nt, Artificial Sequence
  Description of Artificial Sequence: Synthetic oligonucleotide
caaauccucgacauaguga

SEQ ID NO: 2207898 - RNA, 19 nt, Artificial Sequence
  Description of Artificial Sequence: Synthetic oligonucleotide
caugggaauggaucuauca

SEQ ID NO: 2207899 - RNA, 19 nt, Artificial Sequence
  Description of Artificial Sequence: Synthetic oligonucleotide
acuaaucacgacgcugggg

SEQ ID NO: 2207900 - RNA, 19 nt, Artificial Sequence
  Description of Artificial Sequence: Synthetic oligonucleotide
ucaagacauucuuuccagu

SEQ ID NO: 2207901 - RNA, 19 nt, Artificial Sequence
  Description of Artificial Sequence: Synthetic oligonucleotide
ucguguuugcagauucaac

SEQ ID NO: 2207902 - RNA, 19 nt, Artificial Sequence
  Description of Artificial Sequence: Synthetic oligonucleotide
ucgagagguccuuuucacc

SEQ ID NO: 2207903 - RNA, 19 nt, Artificial Sequence
  Description of Artificial Sequence: Synthetic oligonucleotide
uuugcagauucaacuugaa

SEQ ID NO: 2207904 - RNA, 19 nt, Artificial Sequence
  Description of Artificial Sequence: Synthetic oligonucleotide
aacuuuuauguccccuguu

SEQ ID NO: 2207905 - RNA, 19 nt, Artificial Sequence
  Description of Artificial Sequence: Synthetic oligonucleotide
gaagagcggugugaggagg

SEQ ID NO: 2207906 - RNA, 19 nt, Artificial Sequence
  Description of Artificial Sequence: Synthetic oligonucleotide
aacuagcuucgccgccgcc

SEQ ID NO: 2207907 - RNA, 19 nt, Artificial Sequence
  Description of Artificial Sequence: Synthetic oligonucleotide
auagccugguucaucauca

SEQ ID NO: 2207908 - RNA, 19 nt, Artificial Sequence
  Description of Artificial Sequence: Synthetic oligonucleotide
uccaacaaagucuggccua

SEQ ID NO: 2207909 - RNA, 19 nt, Artificial Sequence
  Description of Artificial Sequence: Synthetic oligonucleotide
aaucacgacgcuggggcug

SEQ ID NO: 2207910 - RNA, 19 nt, Artificial Sequence
  Description of Artificial Sequence: Synthetic oligonucleotide
gcaacugacauuucuaaaa

SEQ ID NO: 2207911 - RNA, 19 nt, Artificial Sequence
  Description of Artificial Sequence: Synthetic oligonucleotide
cuuuuauguccccuguuga

SEQ ID NO: 2207912 - RNA, 19 nt, Artificial Sequence
  Description of Artificial Sequence: Synthetic oligonucleotide
ucccaguuucacuaaugac

SEQ ID NO: 2207913 - RNA, 19 nt, Artificial Sequence
  Description of Artificial Sequence: Synthetic oligonucleotide
uugagagaucauccccacc

SEQ ID NO: 2207914 - RNA, 19 nt, Artificial Sequence
  Description of Artificial Sequence: Synthetic oligonucleotide
auuuugggguuguaccgcu

SEQ ID NO: 2207915 - RNA, 19 nt, Artificial Sequence
  Description of Artificial Sequence: Synthetic oligonucleotide
aaagcagaguuugcauugu

SEQ ID NO: 2207916 - RNA, 19 nt, Artificial Sequence
  Description of Artificial Sequence: Synthetic oligonucleotide
ucuggccuauauccaacac

SEQ ID NO: 2207917 - RNA, 19 nt, Artificial Sequence
  Description of Artificial Sequence: Synthetic oligonucleotide
uuaaccauuuugggguugu

SEQ ID NO: 2207918 - RNA, 19 nt, Artificial Sequence
  Description of Artificial Sequence: Synthetic oligonucleotide
ggcaacgggucacagacgc

SEQ ID NO: 2207919 - RNA, 19 nt, Artificial Sequence
  Description of Artificial Sequence: Synthetic oligonucleotide
uguccucaacaaucaagac

SEQ ID NO: 2207920 - RNA, 19 nt, Artificial Sequence
  Description of Artificial Sequence: Synthetic oligonucleotide
cagucugauaaaaucuaca

SEQ ID NO: 2207921 - RNA, 19 nt, Artificial Sequence
  Description of Artificial Sequence: Synthetic oligonucleotide
ggaucuaucacuauuucua

SEQ ID NO: 2207922 - RNA, 19 nt, Artificial Sequence
  Description of Artificial Sequence: Synthetic oligonucleotide
gugcuuuaauguaauccag

SEQ ID NO: 2207923 - RNA, 19 nt, Artificial Sequence
  Description of Artificial Sequence: Synthetic oligonucleotide
agggaaagcagaguuugca

SEQ ID NO: 2207924 - RNA, 19 nt, Artificial Sequence
  Description of Artificial Sequence: Synthetic oligonucleotide
agucaagggcauauccaac

SEQ ID NO: 2207925 - RNA, 19 nt, Artificial Sequence
  Description of Artificial Sequence: Synthetic oligonucleotide
uuguaccgcuugaccaggg

SEQ ID NO: 2207926 - RNA, 19 nt, Artificial Sequence
  Description of Artificial Sequence: Synthetic oligonucleotide
cacaaugugauggccuccc

SEQ ID NO: 2207927 - RNA, 19 nt, Artificial Sequence
  Description of Artificial Sequence: Synthetic oligonucleotide
aguccuguccauaaucacu

SEQ ID NO: 2207928 - RNA, 19 nt, Artificial Sequence
  Description of Artificial Sequence: Synthetic oligonucleotide
cuaucacuauuucuauuca

SEQ ID NO: 2207929 - RNA, 19 nt, Artificial Sequence
  Description of Artificial Sequence: Synthetic oligonucleotide
uacagucaugggaauggau

SEQ ID NO: 2207930 - RNA, 19 nt, Artificial Sequence
  Description of Artificial Sequence: Synthetic oligonucleotide
guuugcagauucaacuuga

SEQ ID NO: 2207931 - RNA, 19 nt, Artificial Sequence
  Description of Artificial Sequence: Synthetic oligonucleotide
agguaaacccaacuagcuu

SEQ ID NO: 2207932 - RNA, 19 nt, Artificial Sequence
  Description of Artificial Sequence: Synthetic oligonucleotide
uguaccgcuugaccaggga

SEQ ID NO: 2207933 - RNA, 19 nt, Artificial Sequence
  Description of Artificial Sequence: Synthetic oligonucleotide
acuagaaugcuugguaauu

SEQ ID NO: 2207934 - RNA, 19 nt, Artificial Sequence
  Description of Artificial Sequence: Synthetic oligonucleotide
cuguugacugaucauuaca

SEQ ID NO: 2207935 - RNA, 19 nt, Artificial Sequence
  Description of Artificial Sequence: Synthetic oligonucleotide
auccucgacauagugauua

SEQ ID NO: 2207936 - RNA, 19 nt, Artificial Sequence
  Description of Artificial Sequence: Synthetic oligonucleotide
caagggcauauccaacaac

SEQ ID NO: 2207937 - RNA, 19 nt, Artificial Sequence
  Description of Artificial Sequence: Synthetic oligonucleotide
gaauggaucuaucacuauu

SEQ ID NO: 2207938 - RNA, 19 nt, Artificial Sequence
  Description of Artificial Sequence: Synthetic oligonucleotide
aucacgacgcuggggcugc

SEQ ID NO: 2207939 - RNA, 19 nt, Artificial Sequence
  Description of Artificial Sequence: Synthetic oligonucleotide
cccaccaauaacuuuuaug

SEQ ID NO: 2207940 - RNA, 19 nt, Artificial Sequence
  Description of Artificial Sequence: Synthetic oligonucleotide
ucauccccaccaauaacuu

SEQ ID NO: 2207941 - RNA, 19 nt, Artificial Sequence
  Description of Artificial Sequence: Synthetic oligonucleotide
auucagugcuuuaauguaa

SEQ ID NO: 2207942 - RNA, 19 nt, Artificial Sequence
  Description of Artificial Sequence: Synthetic oligonucleotide
gcagaacuagaaugcuugg

SEQ ID NO: 2207943 - RNA, 19 nt, Artificial Sequence
  Description of Artificial Sequence: Synthetic oligonucleotide
ugugauggccucccaucuc

SEQ ID NO: 2207944 - RNA, 19 nt, Artificial Sequence
  Description of Artificial Sequence: Synthetic oligonucleotide
aucuacagucaugggaaug

SEQ ID NO: 2207945 - RNA, 19 nt, Artificial Sequence
  Description of Artificial Sequence: Synthetic oligonucleotide
uuauagucaagggcauauc

SEQ ID NO: 2207946 - RNA, 19 nt, Artificial Sequence
  Description of Artificial Sequence: Synthetic oligonucleotide
gugauuaggaauacaaaau

SEQ ID NO: 2207947 - RNA, 19 nt, Artificial Sequence
  Description of Artificial Sequence: Synthetic oligonucleotide
aucuaucacuauuucuauu

SEQ ID NO: 2207948 - RNA, 19 nt, Artificial Sequence
  Description of Artificial Sequence: Synthetic oligonucleotide
uuucaguccuguccauaau

SEQ ID NO: 2207949 - RNA, 19 nt, Artificial Sequence
  Description of Artificial Sequence: Synthetic oligonucleotide
ucagugcuuuaauguaauc

SEQ ID NO: 2207950 - RNA, 19 nt, Artificial Sequence
  Description of Artificial Sequence: Synthetic oligonucleotide
gagcgaagagcggugugag

SEQ ID NO: 2207951 - RNA, 19 nt, Artificial Sequence
  Description of Artificial Sequence: Synthetic oligonucleotide
cuucgagagguccuuuuca

SEQ ID NO: 2207952 - RNA, 19 nt, Artificial Sequence
  Description of Artificial Sequence: Synthetic oligonucleotide
ucaugggaauggaucuauc

SEQ ID NO: 2207953 - RNA, 19 nt, Artificial Sequence
  Description of Artificial Sequence: Synthetic oligonucleotide
cacuaaucacgacgcuggg

SEQ ID NO: 2207954 - RNA, 19 nt, Artificial Sequence
  Description of Artificial Sequence: Synthetic oligonucleotide
caaacuugucuggaauuuc

SEQ ID NO: 2207955 - RNA, 19 nt, Artificial Sequence
  Description of Artificial Sequence: Synthetic oligonucleotide
cacagagggccacaaugug

SEQ ID NO: 2207956 - RNA, 19 nt, Artificial Sequence
  Description of Artificial Sequence: Synthetic oligonucleotide
aacacuucgagagguccuu

SEQ ID NO: 2207957 - RNA, 19 nt, Artificial Sequence
  Description of Artificial Sequence: Synthetic oligonucleotide
uaaucacgacgcuggggcu

SEQ ID NO: 2207958 - RNA, 19 nt, Artificial Sequence
  Description of Artificial Sequence: Synthetic oligonucleotide
ugggaacaugaaugggacu

SEQ ID NO: 2207959 - RNA, 19 nt, Artificial Sequence
  Description of Artificial Sequence: Synthetic oligonucleotide
aacuugucuggaauuucaa

SEQ ID NO: 2207960 - RNA, 19 nt, Artificial Sequence
  Description of Artificial Sequence: Synthetic oligonucleotide
auccccaccaauaacuuuu

SEQ ID NO: 2207961 - RNA, 19 nt, Artificial Sequence
  Description of Artificial Sequence: Synthetic oligonucleotide
acggaaucggucggcuggc

SEQ ID NO: 2207962 - RNA, 19 nt, Artificial Sequence
  Description of Artificial Sequence: Synthetic oligonucleotide
uccaacacuucgagagguc

SEQ ID NO: 2207963 - RNA, 19 nt, Artificial Sequence
  Description of Artificial Sequence: Synthetic oligonucleotide
ggguuguaccgcuugacca

SEQ ID NO: 2207964 - RNA, 19 nt, Artificial Sequence
  Description of Artificial Sequence: Synthetic oligonucleotide
augacaucucgggcaaguc

SEQ ID NO: 2207965 - RNA, 19 nt, Artificial Sequence
  Description of Artificial Sequence: Synthetic oligonucleotide
accgcuugaccagggaaag

SEQ ID NO: 2207966 - RNA, 19 nt, Artificial Sequence
  Description of Artificial Sequence: Synthetic oligonucleotide
aggucagcaaagaauuuau

SEQ ID NO: 2207967 - RNA, 19 nt, Artificial Sequence
  Description of Artificial Sequence: Synthetic oligonucleotide
ggugagguaaacccaacua

SEQ ID NO: 2207968 - RNA, 19 nt, Artificial Sequence
  Description of Artificial Sequence: Synthetic oligonucleotide
agaaagcggugagguaaac

SEQ ID NO: 2207969 - RNA, 19 nt, Artificial Sequence
  Description of Artificial Sequence: Synthetic oligonucleotide
uauguccccuguugacuga

SEQ ID NO: 2207970 - RNA, 19 nt, Artificial Sequence
  Description of Artificial Sequence: Synthetic oligonucleotide
ugacggaaucggucggcug

SEQ ID NO: 2207971 - RNA, 19 nt, Artificial Sequence
  Description of Artificial Sequence: Synthetic oligonucleotide
ugggacuccucguguuugc

SEQ ID NO: 2207972 - RNA, 19 nt, Artificial Sequence
  Description of Artificial Sequence: Synthetic oligonucleotide
caguuaaaguugagagauc

SEQ ID NO: 2207973 - RNA, 19 nt, Artificial Sequence
  Description of Artificial Sequence: Synthetic oligonucleotide
aagcggugagguaaaccca

SEQ ID NO: 2207974 - RNA, 19 nt, Artificial Sequence
  Description of Artificial Sequence: Synthetic oligonucleotide
acuaagcagauggcugcag

SEQ ID NO: 2207975 - RNA, 19 nt, Artificial Sequence
  Description of Artificial Sequence: Synthetic oligonucleotide
gagguaaacccaacuagcu

SEQ ID NO: 2207976 - RNA, 19 nt, Artificial Sequence
  Description of Artificial Sequence: Synthetic oligonucleotide
guuuuaccagugucaauua

SEQ ID NO: 2207977 - RNA, 19 nt, Artificial Sequence
  Description of Artificial Sequence: Synthetic oligonucleotide
uuguuuuaccagugucaau

SEQ ID NO: 2207978 - RNA, 19 nt, Artificial Sequence
  Description of Artificial Sequence: Synthetic oligonucleotide
gcucauagugcaaauaaaa

SEQ ID NO: 2207979 - RNA, 19 nt, Artificial Sequence
  Description of Artificial Sequence: Synthetic oligonucleotide
guugacugaucauuacagu

SEQ ID NO: 2207980 - RNA, 19 nt, Artificial Sequence
  Description of Artificial Sequence: Synthetic oligonucleotide
aucuaggucauagccuggu

SEQ ID NO: 2207981 - RNA, 19 nt, Artificial Sequence
  Description of Artificial Sequence: Synthetic oligonucleotide
ggcacgagaaagcggugag

SEQ ID NO: 2207982 - RNA, 19 nt, Artificial Sequence
  Description of Artificial Sequence: Synthetic oligonucleotide
ucuaggucauagccugguu

SEQ ID NO: 2207983 - RNA, 19 nt, Artificial Sequence
  Description of Artificial Sequence: Synthetic oligonucleotide
caugacggaaucggucggc

SEQ ID NO: 2207984 - RNA, 19 nt, Artificial Sequence
  Description of Artificial Sequence: Synthetic oligonucleotide
aagagcggugugaggagga

SEQ ID NO: 2207985 - RNA, 19 nt, Artificial Sequence
  Description of Artificial Sequence: Synthetic oligonucleotide
aaucccugaaguacucauu

SEQ ID NO: 2207986 - RNA, 19 nt, Artificial Sequence
  Description of Artificial Sequence: Synthetic oligonucleotide
ggaaucggucggcuggcgg

SEQ ID NO: 2207987 - RNA, 19 nt, Artificial Sequence
  Description of Artificial Sequence: Synthetic oligonucleotide
cuuaaccauuuugggguug

SEQ ID NO: 2207988 - RNA, 19 nt, Artificial Sequence
  Description of Artificial Sequence: Synthetic oligonucleotide
ccaaauccucgacauagug

SEQ ID NO: 2207989 - RNA, 19 nt, Artificial Sequence
  Description of Artificial Sequence: Synthetic oligonucleotide
aagcuguacuaagcagaug

SEQ ID NO: 2207990 - RNA, 19 nt, Artificial Sequence
  Description of Artificial Sequence: Synthetic oligonucleotide
gggguuguaccgcuugacc

SEQ ID NO: 2207991 - RNA, 19 nt, Artificial Sequence
  Description of Artificial Sequence: Synthetic oligonucleotide
ccuauauccaacacuucga

SEQ ID NO: 2207992 - RNA, 19 nt, Artificial Sequence
  Description of Artificial Sequence: Synthetic oligonucleotide
accagcaagcuugcaaccu

SEQ ID NO: 2207993 - RNA, 19 nt, Artificial Sequence
  Description of Artificial Sequence: Synthetic oligonucleotide
acugaucauuacaguagcu

SEQ ID NO: 2207994 - RNA, 19 nt, Artificial Sequence
  Description of Artificial Sequence: Synthetic oligonucleotide
ggaauacaaaauaaaucua

SEQ ID NO: 2207995 - RNA, 19 nt, Artificial Sequence
  Description of Artificial Sequence: Synthetic oligonucleotide
aaucggucggcuggcggga

SEQ ID NO: 2207996 - RNA, 19 nt, Artificial Sequence
  Description of Artificial Sequence: Synthetic oligonucleotide
ucuuucaguccuguccaua

SEQ ID NO: 2207997 - RNA, 19 nt, Artificial Sequence
  Description of Artificial Sequence: Synthetic oligonucleotide
cauagugauuaggaauaca

SEQ ID NO: 2207998 - RNA, 19 nt, Artificial Sequence
  Description of Artificial Sequence: Synthetic oligonucleotide
ucgccaugacggaaucggu

SEQ ID NO: 2207999 - RNA, 19 nt, Artificial Sequence
  Description of Artificial Sequence: Synthetic oligonucleotide
agcuugcaaccuuaaccau

SEQ ID NO: 2208000 - RNA, 19 nt, Artificial Sequence
  Description of Artificial Sequence: Synthetic oligonucleotide
acaaugugauggccuccca

SEQ ID NO: 2208001 - RNA, 19 nt, Artificial Sequence
  Description of Artificial Sequence: Synthetic oligonucleotide
uaaacccaacuagcuucgc

SEQ ID NO: 2208002 - RNA, 19 nt, Artificial Sequence
  Description of Artificial Sequence: Synthetic oligonucleotide
guaccgcuugaccagggaa

SEQ ID NO: 2208003 - RNA, 19 nt, Artificial Sequence
  Description of Artificial Sequence: Synthetic oligonucleotide
guuuaagaaugcagcaacu

SEQ ID NO: 2208004 - RNA, 19 nt, Artificial Sequence
  Description of Artificial Sequence: Synthetic oligonucleotide
gaaugcagcaacugacauu

SEQ ID NO: 2208005 - RNA, 19 nt, Artificial Sequence
  Description of Artificial Sequence: Synthetic oligonucleotide
caagacauucuuuccaguu

SEQ ID NO: 2208006 - RNA, 19 nt, Artificial Sequence
  Description of Artificial Sequence: Synthetic oligonucleotide
ugggguuguaccgcuugac

SEQ ID NO: 2208007 - RNA, 19 nt, Artificial Sequence
  Description of Artificial Sequence: Synthetic oligonucleotide
aguagcucuucagucugau

SEQ ID NO: 2208008 - RNA, 19 nt, Artificial Sequence
  Description of Artificial Sequence: Synthetic oligonucleotide
cagaguuugcauuguuuua

SEQ ID NO: 2208009 - RNA, 19 nt, Artificial Sequence
  Description of Artificial Sequence: Synthetic oligonucleotide
gggcauauccaacaacaaa

SEQ ID NO: 2208010 - RNA, 19 nt, Artificial Sequence
  Description of Artificial Sequence: Synthetic oligonucleotide
gcgaagagcggugugagga

SEQ ID NO: 2208011 - RNA, 19 nt, Artificial Sequence
  Description of Artificial Sequence: Synthetic oligonucleotide
caacuagcuucgccgccgc

SEQ ID NO: 2208012 - RNA, 19 nt, Artificial Sequence
  Description of Artificial Sequence: Synthetic oligonucleotide
caacaaucaagacauucuu

SEQ ID NO: 2208013 - RNA, 19 nt, Artificial Sequence
  Description of Artificial Sequence: Synthetic oligonucleotide
gcugcgggucgccaugacg

SEQ ID NO: 2208014 - RNA, 19 nt, Artificial Sequence
  Description of Artificial Sequence: Synthetic oligonucleotide
auuuuacugggaacaugaa

SEQ ID NO: 2208015 - RNA, 19 nt, Artificial Sequence
  Description of Artificial Sequence: Synthetic oligonucleotide
uccccuguugacugaucau

SEQ ID NO: 2208016 - RNA, 19 nt, Artificial Sequence
  Description of Artificial Sequence: Synthetic oligonucleotide
ccuguugacugaucauuac

SEQ ID NO: 2208017 - RNA, 19 nt, Artificial Sequence
  Description of Artificial Sequence: Synthetic oligonucleotide
gccgaggcacgagaaagcg

SEQ ID NO: 2208018 - RNA, 19 nt, Artificial Sequence
  Description of Artificial Sequence: Synthetic oligonucleotide
gaggaggcgccgaggcacg

SEQ ID NO: 2208019 - RNA, 19 nt, Artificial Sequence
  Description of Artificial Sequence: Synthetic oligonucleotide
augacggaaucggucggcu

SEQ ID NO: 2208020 - RNA, 19 nt, Artificial Sequence
  Description of Artificial Sequence: Synthetic oligonucleotide
cuggccuauauccaacacu

SEQ ID NO: 2208021 - RNA, 19 nt, Artificial Sequence
  Description of Artificial Sequence: Synthetic oligonucleotide
gagaaagcggugagguaaa

SEQ ID NO: 2208022 - RNA, 19 nt, Artificial Sequence
  Description of Artificial Sequence: Synthetic oligonucleotide
gacaucucgggcaagucuu

SEQ ID NO: 2208023 - RNA, 19 nt, Artificial Sequence
  Description of Artificial Sequence: Synthetic oligonucleotide
agcggugagguaaacccaa

SEQ ID NO: 2208024 - RNA, 19 nt, Artificial Sequence
  Description of Artificial Sequence: Synthetic oligonucleotide
cacgagaaagcggugaggu

SEQ ID NO: 2208025 - RNA, 19 nt, Artificial Sequence
  Description of Artificial Sequence: Synthetic oligonucleotide
cagagggccacaaugugau

SEQ ID NO: 2208026 - RNA, 19 nt, Artificial Sequence
  Description of Artificial Sequence: Synthetic oligonucleotide
gaggcgccgaggcacgaga

SEQ ID NO: 2208027 - RNA, 19 nt, Artificial Sequence
  Description of Artificial Sequence: Synthetic oligonucleotide
ccaacuagcuucgccgccg

SEQ ID NO: 2208028 - RNA, 19 nt, Artificial Sequence
  Description of Artificial Sequence: Synthetic oligonucleotide
caugaaugggacuccucgu

SEQ ID NO: 2208029 - RNA, 19 nt, Artificial Sequence
  Description of Artificial Sequence: Synthetic oligonucleotide
guuucacuaaugacacaaa

SEQ ID NO: 2208030 - RNA, 19 nt, Artificial Sequence
  Description of Artificial Sequence: Synthetic oligonucleotide
cuguccauaaucacuccau

SEQ ID NO: 2208031 - RNA, 19 nt, Artificial Sequence
  Description of Artificial Sequence: Synthetic oligonucleotide
caucuuaggcuuuguauuu

SEQ ID NO: 2208032 - RNA, 19 nt, Artificial Sequence
  Description of Artificial Sequence: Synthetic oligonucleotide
gggaauggaucuaucacua

SEQ ID NO: 2208033 - RNA, 19 nt, Artificial Sequence
  Description of Artificial Sequence: Synthetic oligonucleotide
acgagaaagcggugaggua

SEQ ID NO: 2208034 - RNA, 19 nt, Artificial Sequence
  Description of Artificial Sequence: Synthetic oligonucleotide
gcaagcuugcaaccuuaac

SEQ ID NO: 2208035 - RNA, 19 nt, Artificial Sequence
  Description of Artificial Sequence: Synthetic oligonucleotide
cauauccaacaacaaacuu

SEQ ID NO: 2208036 - RNA, 19 nt, Artificial Sequence
  Description of Artificial Sequence: Synthetic oligonucleotide
cgagagguccuuuucacca

SEQ ID NO: 2208037 - RNA, 19 nt, Artificial Sequence
  Description of Artificial Sequence: Synthetic oligonucleotide
cuguacuaagcagauggcu

SEQ ID NO: 2208038 - RNA, 19 nt, Artificial Sequence
  Description of Artificial Sequence: Synthetic oligonucleotide
cucguguuugcagauucaa

SEQ ID NO: 2208039 - RNA, 19 nt, Artificial Sequence
  Description of Artificial Sequence: Synthetic oligonucleotide
agggcauauccaacaacaa

SEQ ID NO: 2208040 - RNA, 19 nt, Artificial Sequence
  Description of Artificial Sequence: Synthetic oligonucleotide
ucggucggcuggcgggagc

SEQ ID NO: 2208041 - RNA, 19 nt, Artificial Sequence
  Description of Artificial Sequence: Synthetic oligonucleotide
auccaacaacaaacuuguc

SEQ ID NO: 2208042 - RNA, 19 nt, Artificial Sequence
  Description of Artificial Sequence: Synthetic oligonucleotide
ugauggccucccaucucuu

SEQ ID NO: 2208043 - RNA, 19 nt, Artificial Sequence
  Description of Artificial Sequence: Synthetic oligonucleotide
agucaugggaauggaucua

SEQ ID NO: 2208044 - RNA, 19 nt, Artificial Sequence
  Description of Artificial Sequence: Synthetic oligonucleotide
ccaugacggaaucggucgg

SEQ ID NO: 2208045 - RNA, 19 nt, Artificial Sequence
  Description of Artificial Sequence: Synthetic oligonucleotide
gcgccgaggcacgagaaag

SEQ ID NO: 2208046 - RNA, 19 nt, Artificial Sequence
  Description of Artificial Sequence: Synthetic oligonucleotide
ggagcgaagagcgguguga

SEQ ID NO: 2208047 - RNA, 19 nt, Artificial Sequence
  Description of Artificial Sequence: Synthetic oligonucleotide
gcacgagaaagcggugagg

SEQ ID NO: 2208048 - RNA, 19 nt, Artificial Sequence
  Description of Artificial Sequence: Synthetic oligonucleotide
ccucgacauagugauuagg

SEQ ID NO: 2208049 - RNA, 19 nt, Artificial Sequence
  Description of Artificial Sequence: Synthetic oligonucleotide
cucggcaacgggucacaga

SEQ ID NO: 2208050 - RNA, 19 nt, Artificial Sequence
  Description of Artificial Sequence: Synthetic oligonucleotide
ccgaggcacgagaaagcgg

SEQ ID NO: 2208051 - RNA, 19 nt, Artificial Sequence
  Description of Artificial Sequence: Synthetic oligonucleotide
aauccucgacauagugauu

SEQ ID NO: 2208052 - RNA, 19 nt, Artificial Sequence
  Description of Artificial Sequence: Synthetic oligonucleotide
cuagaaugcuugguaauuu

SEQ ID NO: 2208053 - RNA, 19 nt, Artificial Sequence
  Description of Artificial Sequence: Synthetic oligonucleotide
cauuauagucaagggcaua

SEQ ID NO: 2208054 - RNA, 19 nt, Artificial Sequence
  Description of Artificial Sequence: Synthetic oligonucleotide
caucucgggcaagucuuuc

SEQ ID NO: 2208055 - RNA, 19 nt, Artificial Sequence
  Description of Artificial Sequence: Synthetic oligonucleotide
caugacaucucgggcaagu

SEQ ID NO: 2208056 - RNA, 19 nt, Artificial Sequence
  Description of Artificial Sequence: Synthetic oligonucleotide
cagcaagcuugcaaccuua

SEQ ID NO: 2208057 - RNA, 19 nt, Artificial Sequence
  Description of Artificial Sequence: Synthetic oligonucleotide
cagaacuagaaugcuuggu

SEQ ID NO: 2208058 - RNA, 19 nt, Artificial Sequence
  Description of Artificial Sequence: Synthetic oligonucleotide
agcaagcuugcaaccuuaa

SEQ ID NO: 2208059 - RNA, 19 nt, Artificial Sequence
  Description of Artificial Sequence: Synthetic oligonucleotide
ggcucauagugcaaauaaa

SEQ ID NO: 2208060 - RNA, 19 nt, Artificial Sequence
  Description of Artificial Sequence: Synthetic oligonucleotide
ggucgccaugacggaaucg

SEQ ID NO: 2208061 - RNA, 19 nt, Artificial Sequence
  Description of Artificial Sequence: Synthetic oligonucleotide
uaaccauuuugggguugua

SEQ ID NO: 2208062 - RNA, 19 nt, Artificial Sequence
  Description of Artificial Sequence: Synthetic oligonucleotide
gcagcaacugacauuucua

SEQ ID NO: 2208063 - RNA, 19 nt, Artificial Sequence
  Description of Artificial Sequence: Synthetic oligonucleotide
cgagaaagcggugagguaa

SEQ ID NO: 2208064 - RNA, 19 nt, Artificial Sequence
  Description of Artificial Sequence: Synthetic oligonucleotide
gucaugggaauggaucuau

SEQ ID NO: 2208065 - RNA, 19 nt, Artificial Sequence
  Description of Artificial Sequence: Synthetic oligonucleotide
cagauucaacuugaacucu

SEQ ID NO: 2208066 - RNA, 19 nt, Artificial Sequence
  Description of Artificial Sequence: Synthetic oligonucleotide
gugugaggaggaagcccgc

SEQ ID NO: 2208067 - RNA, 19 nt, Artificial Sequence
  Description of Artificial Sequence: Synthetic oligonucleotide
cgaagagcggugugaggag

SEQ ID NO: 2208068 - RNA, 19 nt, Artificial Sequence
  Description of Artificial Sequence: Synthetic oligonucleotide
cccugaaguacucauuaua

SEQ ID NO: 2208069 - RNA, 19 nt, Artificial Sequence
  Description of Artificial Sequence: Synthetic oligonucleotide
cccaacuagcuucgccgcc

SEQ ID NO: 2208070 - RNA, 19 nt, Artificial Sequence
  Description of Artificial Sequence: Synthetic oligonucleotide
auguccccuguugacugau

SEQ ID NO: 2208071 - RNA, 19 nt, Artificial Sequence
  Description of Artificial Sequence: Synthetic oligonucleotide
cuauuucuauucagugcuu

SEQ ID NO: 2208072 - RNA, 19 nt, Artificial Sequence
  Description of Artificial Sequence: Synthetic oligonucleotide
cgacauagugauuaggaau

SEQ ID NO: 2208073 - RNA, 19 nt, Artificial Sequence
  Description of Artificial Sequence: Synthetic oligonucleotide
gauggccucccaucucuuu

SEQ ID NO: 2208074 - RNA, 19 nt, Artificial Sequence
  Description of Artificial Sequence: Synthetic oligonucleotide
caucacuaaucacgacgcu

SEQ ID NO: 2208075 - RNA, 19 nt, Artificial Sequence
  Description of Artificial Sequence: Synthetic oligonucleotide
cagaggaggcgccgaggca

SEQ ID NO: 2208076 - RNA, 19 nt, Artificial Sequence
  Description of Artificial Sequence: Synthetic oligonucleotide
ggggcugcgggucgccaug

SEQ ID NO: 2208077 - RNA, 19 nt, Artificial Sequence
  Description of Artificial Sequence: Synthetic oligonucleotide
cgccaugacggaaucgguc

SEQ ID NO: 2208078 - RNA, 19 nt, Artificial Sequence
  Description of Artificial Sequence: Synthetic oligonucleotide
aucggucggcuggcgggag

SEQ ID NO: 2208079 - RNA, 19 nt, Artificial Sequence
  Description of Artificial Sequence: Synthetic oligonucleotide
acaucucgggcaagucuuu

SEQ ID NO: 2208080 - RNA, 19 nt, Artificial Sequence
  Description of Artificial Sequence: Synthetic oligonucleotide
acacuucgagagguccuuu

SEQ ID NO: 2208081 - RNA, 19 nt, Artificial Sequence
  Description of Artificial Sequence: Synthetic oligonucleotide
ucacgacgcuggggcugcg

SEQ ID NO: 2208082 - RNA, 19 nt, Artificial Sequence
  Description of Artificial Sequence: Synthetic oligonucleotide
cccuguugacugaucauua

SEQ ID NO: 2208083 - RNA, 19 nt, Artificial Sequence
  Description of Artificial Sequence: Synthetic oligonucleotide
gcggugugaggaggaagcc

SEQ ID NO: 2208084 - RNA, 19 nt, Artificial Sequence
  Description of Artificial Sequence: Synthetic oligonucleotide
cgccgaggcacgagaaagc

SEQ ID NO: 2208085 - RNA, 19 nt, Artificial Sequence
  Description of Artificial Sequence: Synthetic oligonucleotide
cauccccaccaauaacuuu

SEQ ID NO: 2208086 - RNA, 19 nt, Artificial Sequence
  Description of Artificial Sequence: Synthetic oligonucleotide
cuucgccgccgccucggca

SEQ ID NO: 2208087 - RNA, 19 nt, Artificial Sequence
  Description of Artificial Sequence: Synthetic oligonucleotide
gggucgccaugacggaauc

SEQ ID NO: 2208088 - RNA, 19 nt, Artificial Sequence
  Description of Artificial Sequence: Synthetic oligonucleotide
ggccuauauccaacacuuc

SEQ ID NO: 2208089 - RNA, 19 nt, Artificial Sequence
  Description of Artificial Sequence: Synthetic oligonucleotide
gcuugcaaccuuaaccauu

SEQ ID NO: 2208090 - RNA, 19 nt, Artificial Sequence
  Description of Artificial Sequence: Synthetic oligonucleotide
gccgccucggcaacggguc

SEQ ID NO: 2208091 - RNA, 19 nt, Artificial Sequence
  Description of Artificial Sequence: Synthetic oligonucleotide
gggacuccucguguuugca

SEQ ID NO: 2208092 - RNA, 19 nt, Artificial Sequence
  Description of Artificial Sequence: Synthetic oligonucleotide
ggcgccgaggcacgagaaa

SEQ ID NO: 2208093 - RNA, 19 nt, Artificial Sequence
  Description of Artificial Sequence: Synthetic oligonucleotide
gcggugagguaaacccaac

SEQ ID NO: 2208094 - RNA, 19 nt, Artificial Sequence
  Description of Artificial Sequence: Synthetic oligonucleotide
aggcgccgaggcacgagaa

SEQ ID NO: 2208095 - RNA, 19 nt, Artificial Sequence
  Description of Artificial Sequence: Synthetic oligonucleotide
cggcaacgggucacagacg

SEQ ID NO: 2208096 - RNA, 19 nt, Artificial Sequence
  Description of Artificial Sequence: Synthetic oligonucleotide
ccgcuugaccagggaaagc

SEQ ID NO: 2208097 - RNA, 19 nt, Artificial Sequence
  Description of Artificial Sequence: Synthetic oligonucleotide
ccgcagaggaggcgccgag

SEQ ID NO: 2208098 - RNA, 19 nt, Artificial Sequence
  Description of Artificial Sequence: Synthetic oligonucleotide
cggucggcuggcgggagcg

SEQ ID NO: 2208099 - RNA, 19 nt, Artificial Sequence
  Description of Artificial Sequence: Synthetic oligonucleotide
ggcugcgggucgccaugac

SEQ ID NO: 2208100 - RNA, 19 nt, Artificial Sequence
  Description of Artificial Sequence: Synthetic oligonucleotide
ccucggcaacgggucacag

SEQ ID NO: 2208101 - RNA, 19 nt, Artificial Sequence
  Description of Artificial Sequence: Synthetic oligonucleotide
ccaacaaagucuggccuau

SEQ ID NO: 2208102 - RNA, 19 nt, Artificial Sequence
  Description of Artificial Sequence: Synthetic oligonucleotide
ccagcaagcuugcaaccuu

SEQ ID NO: 2208103 - RNA, 19 nt, Artificial Sequence
  Description of Artificial Sequence: Synthetic oligonucleotide
cggaaucggucggcuggcg

SEQ ID NO: 2208104 - RNA, 19 nt, Artificial Sequence
  Description of Artificial Sequence: Synthetic oligonucleotide
cggugagguaaacccaacu

SEQ ID NO: 2208105 - RNA, 19 nt, Artificial Sequence
  Description of Artificial Sequence: Synthetic oligonucleotide
ccccuguugacugaucauu

SEQ ID NO: 2208106 - RNA, 19 nt, Artificial Sequence
  Description of Artificial Sequence: Synthetic oligonucleotide
gcgggucgccaugacggaa

SEQ ID NO: 2208107 - RNA, 19 nt, Artificial Sequence
  Description of Artificial Sequence: Synthetic oligonucleotide
cuccucguguuugcagauu

SEQ ID NO: 2208108 - RNA, 19 nt, Artificial Sequence
  Description of Artificial Sequence: Synthetic oligonucleotide
cccgcagaggaggcgccga

SEQ ID NO: 2208109 - RNA, 19 nt, Artificial Sequence
  Description of Artificial Sequence: Synthetic oligonucleotide
cgggucgccaugacggaau

SEQ ID NO: 2208110 - RNA, 19 nt, Artificial Sequence
  Description of Artificial Sequence: Synthetic oligonucleotide
aagagauacaucuaaaacc

SEQ ID NO: 2208111 - RNA, 19 nt, Artificial Sequence
  Description of Artificial Sequence: Synthetic oligonucleotide
ucuaaaaccacuaauagca

SEQ ID NO: 2208112 - RNA, 19 nt, Artificial Sequence
  Description of Artificial Sequence: Synthetic oligonucleotide
aaagcuauauugcaguggc

SEQ ID NO: 2208113 - RNA, 19 nt, Artificial Sequence
  Description of Artificial Sequence: Synthetic oligonucleotide
aacacuuguagauugauuc

SEQ ID NO: 2208114 - RNA, 19 nt, Artificial Sequence
  Description of Artificial Sequence: Synthetic oligonucleotide
aauuuaaacaagcugucuc

SEQ ID NO: 2208115 - RNA, 19 nt, Artificial Sequence
  Description of Artificial Sequence: Synthetic oligonucleotide
uuuaaaauccugaagagac

SEQ ID NO: 2208116 - RNA, 19 nt, Artificial Sequence
  Description of Artificial Sequence: Synthetic oligonucleotide
uuaaauagggauaagggug

SEQ ID NO: 2208117 - RNA, 19 nt, Artificial Sequence
  Description of Artificial Sequence: Synthetic oligonucleotide
ucaaauauaagcaacagua

SEQ ID NO: 2208118 - RNA, 19 nt, Artificial Sequence
  Description of Artificial Sequence: Synthetic oligonucleotide
acuuauuuuagccuggagc

SEQ ID NO: 2208119 - RNA, 19 nt, Artificial Sequence
  Description of Artificial Sequence: Synthetic oligonucleotide
auuuauguagcauacaaag

SEQ ID NO: 2208120 - RNA, 19 nt, Artificial Sequence
  Description of Artificial Sequence: Synthetic oligonucleotide
aaauauaagcaacaguaag

SEQ ID NO: 2208121 - RNA, 19 nt, Artificial Sequence
  Description of Artificial Sequence: Synthetic oligonucleotide
uuagcaagaauaaugcacg

SEQ ID NO: 2208122 - RNA, 19 nt, Artificial Sequence
  Description of Artificial Sequence: Synthetic oligonucleotide
cuuauuuuagccuggagcg

SEQ ID NO: 2208123 - RNA, 19 nt, Artificial Sequence
  Description of Artificial Sequence: Synthetic oligonucleotide
uguagauugauucaaauau

SEQ ID NO: 2208124 - RNA, 19 nt, Artificial Sequence
  Description of Artificial Sequence: Synthetic oligonucleotide
uuauguagcauacaaaggu

SEQ ID NO: 2208125 - RNA, 19 nt, Artificial Sequence
  Description of Artificial Sequence: Synthetic oligonucleotide
aaaccuggagaauuuaaac

SEQ ID NO: 2208126 - RNA, 19 nt, Artificial Sequence
  Description of Artificial Sequence: Synthetic oligonucleotide
uuuagcaagaauaaugcac

SEQ ID NO: 2208127 - RNA, 19 nt, Artificial Sequence
  Description of Artificial Sequence: Synthetic oligonucleotide
cauuaaauagggauaaggg

SEQ ID NO: 2208128 - RNA, 19 nt, Artificial Sequence
  Description of Artificial Sequence: Synthetic oligonucleotide
aaauaugauauccucauau

SEQ ID NO: 2208129 - RNA, 19 nt, Artificial Sequence
  Description of Artificial Sequence: Synthetic oligonucleotide
auaaguuuguuucucacuc

SEQ ID NO: 2208130 - RNA, 19 nt, Artificial Sequence
  Description of Artificial Sequence: Synthetic oligonucleotide
augccuguuauguauaucc

SEQ ID NO: 2208131 - RNA, 19 nt, Artificial Sequence
  Description of Artificial Sequence: Synthetic oligonucleotide
agcucucucauucaaagcc

SEQ ID NO: 2208132 - RNA, 19 nt, Artificial Sequence
  Description of Artificial Sequence: Synthetic oligonucleotide
caagcuacauuaaauaggg

SEQ ID NO: 2208133 - RNA, 19 nt, Artificial Sequence
  Description of Artificial Sequence: Synthetic oligonucleotide
uaaauagggauaagggugg

SEQ ID NO: 2208134 - RNA, 19 nt, Artificial Sequence
  Description of Artificial Sequence: Synthetic oligonucleotide
aucuaaaaccacuaauagc

SEQ ID NO: 2208135 - RNA, 19 nt, Artificial Sequence
  Description of Artificial Sequence: Synthetic oligonucleotide
uauaaaaccuuuauuauuu

SEQ ID NO: 2208136 - RNA, 19 nt, Artificial Sequence
  Description of Artificial Sequence: Synthetic oligonucleotide
uuuauguagcauacaaagg

SEQ ID NO: 2208137 - RNA, 19 nt, Artificial Sequence
  Description of Artificial Sequence: Synthetic oligonucleotide
uacuaaaucaguaaagcuc

SEQ ID NO: 2208138 - RNA, 19 nt, Artificial Sequence
  Description of Artificial Sequence: Synthetic oligonucleotide
uuaggaauauggcaaauac

SEQ ID NO: 2208139 - RNA, 19 nt, Artificial Sequence
  Description of Artificial Sequence: Synthetic oligonucleotide
auuaaauagggauaagggu

SEQ ID NO: 2208140 - RNA, 19 nt, Artificial Sequence
  Description of Artificial Sequence: Synthetic oligonucleotide
uucauuuuaggaauauggc

SEQ ID NO: 2208141 - RNA, 19 nt, Artificial Sequence
  Description of Artificial Sequence: Synthetic oligonucleotide
cuuucaaaauaugauaucc

SEQ ID NO: 2208142 - RNA, 19 nt, Artificial Sequence
  Description of Artificial Sequence: Synthetic oligonucleotide
ucaaaauaugauauccuca

SEQ ID NO: 2208143 - RNA, 19 nt, Artificial Sequence
  Description of Artificial Sequence: Synthetic oligonucleotide
ucauuuuaggaauauggca

SEQ ID NO: 2208144 - RNA, 19 nt, Artificial Sequence
  Description of Artificial Sequence: Synthetic oligonucleotide
auugauucaaauauaagca

SEQ ID NO: 2208145 - RNA, 19 nt, Artificial Sequence
  Description of Artificial Sequence: Synthetic oligonucleotide
uuaguuauaaaaccuuuau

SEQ ID NO: 2208146 - RNA, 19 nt, Artificial Sequence
  Description of Artificial Sequence: Synthetic oligonucleotide
uucgauuagccuuccaacg

SEQ ID NO: 2208147 - RNA, 19 nt, Artificial Sequence
  Description of Artificial Sequence: Synthetic oligonucleotide
uucaaagccaaacacuugu

SEQ ID NO: 2208148 - RNA, 19 nt, Artificial Sequence
  Description of Artificial Sequence: Synthetic oligonucleotide
uaugauauccucauauuau

SEQ ID NO: 2208149 - RNA, 19 nt, Artificial Sequence
  Description of Artificial Sequence: Synthetic oligonucleotide
acauuaaauagggauaagg

SEQ ID NO: 2208150 - RNA, 19 nt, Artificial Sequence
  Description of Artificial Sequence: Synthetic oligonucleotide
uguauauccucuuuaaaau

SEQ ID NO: 2208151 - RNA, 19 nt, Artificial Sequence
  Description of Artificial Sequence: Synthetic oligonucleotide
uuuuguaucccaucagaag

SEQ ID NO: 2208152 - RNA, 19 nt, Artificial Sequence
  Description of Artificial Sequence: Synthetic oligonucleotide
aaagaacaaaccuggagaa

SEQ ID NO: 2208153 - RNA, 19 nt, Artificial Sequence
  Description of Artificial Sequence: Synthetic oligonucleotide
cuaaacauaucuucacugc

SEQ ID NO: 2208154 - RNA, 19 nt, Artificial Sequence
  Description of Artificial Sequence: Synthetic oligonucleotide
uauugcaguggcaauacca

SEQ ID NO: 2208155 - RNA, 19 nt, Artificial Sequence
  Description of Artificial Sequence: Synthetic oligonucleotide
uucaaaauagggagauggg

SEQ ID NO: 2208156 - RNA, 19 nt, Artificial Sequence
  Description of Artificial Sequence: Synthetic oligonucleotide
gacaagaagagauacaucu

SEQ ID NO: 2208157 - RNA, 19 nt, Artificial Sequence
  Description of Artificial Sequence: Synthetic oligonucleotide
acaaagaacaaaccuggag

SEQ ID NO: 2208158 - RNA, 19 nt, Artificial Sequence
  Description of Artificial Sequence: Synthetic oligonucleotide
uagauugauucaaauauaa

SEQ ID NO: 2208159 - RNA, 19 nt, Artificial Sequence
  Description of Artificial Sequence: Synthetic oligonucleotide
aacauaucuucacugcuca

SEQ ID NO: 2208160 - RNA, 19 nt, Artificial Sequence
  Description of Artificial Sequence: Synthetic oligonucleotide
acuagcaggauuucugcac

SEQ ID NO: 2208161 - RNA, 19 nt, Artificial Sequence
  Description of Artificial Sequence: Synthetic oligonucleotide
cucauauuauuuuguaacc

SEQ ID NO: 2208162 - RNA, 19 nt, Artificial Sequence
  Description of Artificial Sequence: Synthetic oligonucleotide
uacaaagguacucuugucu

SEQ ID NO: 2208163 - RNA, 19 nt, Artificial Sequence
  Description of Artificial Sequence: Synthetic oligonucleotide
ucauccacaucccuaaaca

SEQ ID NO: 2208164 - RNA, 19 nt, Artificial Sequence
  Description of Artificial Sequence: Synthetic oligonucleotide
agcuacauuaaauagggau

SEQ ID NO: 2208165 - RNA, 19 nt, Artificial Sequence
  Description of Artificial Sequence: Synthetic oligonucleotide
cucccuaaaaguuucuucc

SEQ ID NO: 2208166 - RNA, 19 nt, Artificial Sequence
  Description of Artificial Sequence: Synthetic oligonucleotide
uggcaaauacaaauaagca

SEQ ID NO: 2208167 - RNA, 19 nt, Artificial Sequence
  Description of Artificial Sequence: Synthetic oligonucleotide
auguauauccucuuuaaaa

SEQ ID NO: 2208168 - RNA, 19 nt, Artificial Sequence
  Description of Artificial Sequence: Synthetic oligonucleotide
uggagcgguacaaagaaca

SEQ ID NO: 2208169 - RNA, 19 nt, Artificial Sequence
  Description of Artificial Sequence: Synthetic oligonucleotide
uaaugcacguucauuuuag

SEQ ID NO: 2208170 - RNA, 19 nt, Artificial Sequence
  Description of Artificial Sequence: Synthetic oligonucleotide
uuacuaaaucaguaaagcu

SEQ ID NO: 2208171 - RNA, 19 nt, Artificial Sequence
  Description of Artificial Sequence: Synthetic oligonucleotide
aaaaccacuaauagcaaca

SEQ ID NO: 2208172 - RNA, 19 nt, Artificial Sequence
  Description of Artificial Sequence: Synthetic oligonucleotide
uaaaauccugaagagacug

SEQ ID NO: 2208173 - RNA, 19 nt, Artificial Sequence
  Description of Artificial Sequence: Synthetic oligonucleotide
gacugaaucagccucuccc

SEQ ID NO: 2208174 - RNA, 19 nt, Artificial Sequence
  Description of Artificial Sequence: Synthetic oligonucleotide
uacccagauggaaacaagg

SEQ ID NO: 2208175 - RNA, 19 nt, Artificial Sequence
  Description of Artificial Sequence: Synthetic oligonucleotide
agcgguacaaagaacaaac

SEQ ID NO: 2208176 - RNA, 19 nt, Artificial Sequence
  Description of Artificial Sequence: Synthetic oligonucleotide
ggcaaauacaaauaagcag

SEQ ID NO: 2208177 - RNA, 19 nt, Artificial Sequence
  Description of Artificial Sequence: Synthetic oligonucleotide
ggcaauaccagauaaaaca

SEQ ID NO: 2208178 - RNA, 19 nt, Artificial Sequence
  Description of Artificial Sequence: Synthetic oligonucleotide
aaaauagggagaugggcaa

SEQ ID NO: 2208179 - RNA, 19 nt, Artificial Sequence
  Description of Artificial Sequence: Synthetic oligonucleotide
aagccaaacacuuguagau

SEQ ID NO: 2208180 - RNA, 19 nt, Artificial Sequence
  Description of Artificial Sequence: Synthetic oligonucleotide
ucaaaugccuguuauguau

SEQ ID NO: 2208181 - RNA, 19 nt, Artificial Sequence
  Description of Artificial Sequence: Synthetic oligonucleotide
ucaaaauagggagaugggc

SEQ ID NO: 2208182 - RNA, 19 nt, Artificial Sequence
  Description of Artificial Sequence: Synthetic oligonucleotide
auauccucauauuauuuug

SEQ ID NO: 2208183 - RNA, 19 nt, Artificial Sequence
  Description of Artificial Sequence: Synthetic oligonucleotide
ugucuuucaaaauaugaua

SEQ ID NO: 2208184 - RNA, 19 nt, Artificial Sequence
  Description of Artificial Sequence: Synthetic oligonucleotide
ucucccacuuauuuuagcc

SEQ ID NO: 2208185 - RNA, 19 nt, Artificial Sequence
  Description of Artificial Sequence: Synthetic oligonucleotide
aaagguacucuugucuuuc

SEQ ID NO: 2208186 - RNA, 19 nt, Artificial Sequence
  Description of Artificial Sequence: Synthetic oligonucleotide
ugugcauuuauguagcaua

SEQ ID NO: 2208187 - RNA, 19 nt, Artificial Sequence
  Description of Artificial Sequence: Synthetic oligonucleotide
cuggagaauuuaaacaagc

SEQ ID NO: 2208188 - RNA, 19 nt, Artificial Sequence
  Description of Artificial Sequence: Synthetic oligonucleotide
ugcacguucauuuuaggaa

SEQ ID NO: 2208189 - RNA, 19 nt, Artificial Sequence
  Description of Artificial Sequence: Synthetic oligonucleotide
acuaaaucaguaaagcucu

SEQ ID NO: 2208190 - RNA, 19 nt, Artificial Sequence
  Description of Artificial Sequence: Synthetic oligonucleotide
gaaacaaggaccagacuag

SEQ ID NO: 2208191 - RNA, 19 nt, Artificial Sequence
  Description of Artificial Sequence: Synthetic oligonucleotide
caggguuucaucuugugug

SEQ ID NO: 2208192 - RNA, 19 nt, Artificial Sequence
  Description of Artificial Sequence: Synthetic oligonucleotide
aaugcacguucauuuuagg

SEQ ID NO: 2208193 - RNA, 19 nt, Artificial Sequence
  Description of Artificial Sequence: Synthetic oligonucleotide
uacaucuaaaaccacuaau

SEQ ID NO: 2208194 - RNA, 19 nt, Artificial Sequence
  Description of Artificial Sequence: Synthetic oligonucleotide
uugauucaaauauaagcaa

SEQ ID NO: 2208195 - RNA, 19 nt, Artificial Sequence
  Description of Artificial Sequence: Synthetic oligonucleotide
aaacaaggaccagacuagc

SEQ ID NO: 2208196 - RNA, 19 nt, Artificial Sequence
  Description of Artificial Sequence: Synthetic oligonucleotide
gaauauggcaaauacaaau

SEQ ID NO: 2208197 - RNA, 19 nt, Artificial Sequence
  Description of Artificial Sequence: Synthetic oligonucleotide
uuauguauauccucuuuaa

SEQ ID NO: 2208198 - RNA, 19 nt, Artificial Sequence
  Description of Artificial Sequence: Synthetic oligonucleotide
ucacaaguuuauaugugca

SEQ ID NO: 2208199 - RNA, 19 nt, Artificial Sequence
  Description of Artificial Sequence: Synthetic oligonucleotide
cuuuccucauuuuguaucc

SEQ ID NO: 2208200 - RNA, 19 nt, Artificial Sequence
  Description of Artificial Sequence: Synthetic oligonucleotide
ucauuuuguaucccaucag

SEQ ID NO: 2208201 - RNA, 19 nt, Artificial Sequence
  Description of Artificial Sequence: Synthetic oligonucleotide
ucaucuuucacaaguuuau

SEQ ID NO: 2208202 - RNA, 19 nt, Artificial Sequence
  Description of Artificial Sequence: Synthetic oligonucleotide
gaaagcuauauugcagugg

SEQ ID NO: 2208203 - RNA, 19 nt, Artificial Sequence
  Description of Artificial Sequence: Synthetic oligonucleotide
cauaucagaaaauugcuaa

SEQ ID NO: 2208204 - RNA, 19 nt, Artificial Sequence
  Description of Artificial Sequence: Synthetic oligonucleotide
uuucgauuagccuuccaac

SEQ ID NO: 2208205 - RNA, 19 nt, Artificial Sequence
  Description of Artificial Sequence: Synthetic oligonucleotide
uaggaauauggcaaauaca

SEQ ID NO: 2208206 - RNA, 19 nt, Artificial Sequence
  Description of Artificial Sequence: Synthetic oligonucleotide
ggagaauuuaaacaagcug

SEQ ID NO: 2208207 - RNA, 19 nt, Artificial Sequence
  Description of Artificial Sequence: Synthetic oligonucleotide
ucgauuagccuuccaacgc

SEQ ID NO: 2208208 - RNA, 19 nt, Artificial Sequence
  Description of Artificial Sequence: Synthetic oligonucleotide
guaaccuuuccucauuuug

SEQ ID NO: 2208209 - RNA, 19 nt, Artificial Sequence
  Description of Artificial Sequence: Synthetic oligonucleotide
aauaaugcacguucauuuu

SEQ ID NO: 2208210 - RNA, 19 nt, Artificial Sequence
  Description of Artificial Sequence: Synthetic oligonucleotide
auaugauauccucauauua

SEQ ID NO: 2208211 - RNA, 19 nt, Artificial Sequence
  Description of Artificial Sequence: Synthetic oligonucleotide
auaagggugguuucgauua

SEQ ID NO: 2208212 - RNA, 19 nt, Artificial Sequence
  Description of Artificial Sequence: Synthetic oligonucleotide
agaagagauacaucuaaaa

SEQ ID NO: 2208213 - RNA, 19 nt, Artificial Sequence
  Description of Artificial Sequence: Synthetic oligonucleotide
uaagcaacaguaagaugca

SEQ ID NO: 2208214 - RNA, 19 nt, Artificial Sequence
  Description of Artificial Sequence: Synthetic oligonucleotide
ucccuaaaaguuucuuccg

SEQ ID NO: 2208215 - RNA, 19 nt, Artificial Sequence
  Description of Artificial Sequence: Synthetic oligonucleotide
aauauggcaaauacaaaua

SEQ ID NO: 2208216 - RNA, 19 nt, Artificial Sequence
  Description of Artificial Sequence: Synthetic oligonucleotide
auauaagcaacaguaagau

SEQ ID NO: 2208217 - RNA, 19 nt, Artificial Sequence
  Description of Artificial Sequence: Synthetic oligonucleotide
uauguagcauacaaaggua

SEQ ID NO: 2208218 - RNA, 19 nt, Artificial Sequence
  Description of Artificial Sequence: Synthetic oligonucleotide
uuuuccucgggcuuuggcu

SEQ ID NO: 2208219 - RNA, 19 nt, Artificial Sequence
  Description of Artificial Sequence: Synthetic oligonucleotide
gguacaaagaacaaaccug

SEQ ID NO: 2208220 - RNA, 19 nt, Artificial Sequence
  Description of Artificial Sequence: Synthetic oligonucleotide
aauagggagaugggcaaag

SEQ ID NO: 2208221 - RNA, 19 nt, Artificial Sequence
  Description of Artificial Sequence: Synthetic oligonucleotide
aucagaaaauugcuaauaa

SEQ ID NO: 2208222 - RNA, 19 nt, Artificial Sequence
  Description of Artificial Sequence: Synthetic oligonucleotide
aacgcaucacuauaaguuu

SEQ ID NO: 2208223 - RNA, 19 nt, Artificial Sequence
  Description of Artificial Sequence: Synthetic oligonucleotide
ccucauauuauuuuguaac

SEQ ID NO: 2208224 - RNA, 19 nt, Artificial Sequence
  Description of Artificial Sequence: Synthetic oligonucleotide
caaggaccagacuagcagg

SEQ ID NO: 2208225 - RNA, 19 nt, Artificial Sequence
  Description of Artificial Sequence: Synthetic oligonucleotide
uauguauauccucuuuaaa

SEQ ID NO: 2208226 - RNA, 19 nt, Artificial Sequence
  Description of Artificial Sequence: Synthetic oligonucleotide
uauaagcaacaguaagaug

SEQ ID NO: 2208227 - RNA, 19 nt, Artificial Sequence
  Description of Artificial Sequence: Synthetic oligonucleotide
ccagauggaaacaaggacc

SEQ ID NO: 2208228 - RNA, 19 nt, Artificial Sequence
  Description of Artificial Sequence: Synthetic oligonucleotide
cuauaaguuuguuucucac

SEQ ID NO: 2208229 - RNA, 19 nt, Artificial Sequence
  Description of Artificial Sequence: Synthetic oligonucleotide
ucccacuuauuuuagccug

SEQ ID NO: 2208230 - RNA, 19 nt, Artificial Sequence
  Description of Artificial Sequence: Synthetic oligonucleotide
aagaauaaugcacguucau

SEQ ID NO: 2208231 - RNA, 19 nt, Artificial Sequence
  Description of Artificial Sequence: Synthetic oligonucleotide
accacuaauagcaacagau

SEQ ID NO: 2208232 - RNA, 19 nt, Artificial Sequence
  Description of Artificial Sequence: Synthetic oligonucleotide
uaguuauaaaaccuuuauu

SEQ ID NO: 2208233 - RNA, 19 nt, Artificial Sequence
  Description of Artificial Sequence: Synthetic oligonucleotide
uacugaucuggucaguuuc

SEQ ID NO: 2208234 - RNA, 19 nt, Artificial Sequence
  Description of Artificial Sequence: Synthetic oligonucleotide
uuguaucccaucagaagcu

SEQ ID NO: 2208235 - RNA, 19 nt, Artificial Sequence
  Description of Artificial Sequence: Synthetic oligonucleotide
auacaaagguacucuuguc

SEQ ID NO: 2208236 - RNA, 19 nt, Artificial Sequence
  Description of Artificial Sequence: Synthetic oligonucleotide
uauauugcaguggcaauac

SEQ ID NO: 2208237 - RNA, 19 nt, Artificial Sequence
  Description of Artificial Sequence: Synthetic oligonucleotide
uuauuuuagccuggagcgg

SEQ ID NO: 2208238 - RNA, 19 nt, Artificial Sequence
  Description of Artificial Sequence: Synthetic oligonucleotide
acuaauagcaacagauuca

SEQ ID NO: 2208239 - RNA, 19 nt, Artificial Sequence
  Description of Artificial Sequence: Synthetic oligonucleotide
gaauaaugcacguucauuu

SEQ ID NO: 2208240 - RNA, 19 nt, Artificial Sequence
  Description of Artificial Sequence: Synthetic oligonucleotide
agaaagcuauauugcagug

SEQ ID NO: 2208241 - RNA, 19 nt, Artificial Sequence
  Description of Artificial Sequence: Synthetic oligonucleotide
uccucuuuaaaauccugaa

SEQ ID NO: 2208242 - RNA, 19 nt, Artificial Sequence
  Description of Artificial Sequence: Synthetic oligonucleotide
auauugcaguggcaauacc

SEQ ID NO: 2208243 - RNA, 19 nt, Artificial Sequence
  Description of Artificial Sequence: Synthetic oligonucleotide
gcaagaauaaugcacguuc

SEQ ID NO: 2208244 - RNA, 19 nt, Artificial Sequence
  Description of Artificial Sequence: Synthetic oligonucleotide
aaaauaugauauccucaua

SEQ ID NO: 2208245 - RNA, 19 nt, Artificial Sequence
  Description of Artificial Sequence: Synthetic oligonucleotide
guauauccucuuuaaaauc

SEQ ID NO: 2208246 - RNA, 19 nt, Artificial Sequence
  Description of Artificial Sequence: Synthetic oligonucleotide
gaugggcaaaggcauauca

SEQ ID NO: 2208247 - RNA, 19 nt, Artificial Sequence
  Description of Artificial Sequence: Synthetic oligonucleotide
auaucuucacugcucaaau

SEQ ID NO: 2208248 - RNA, 19 nt, Artificial Sequence
  Description of Artificial Sequence: Synthetic oligonucleotide
ggcaagcuacauuaaauag

SEQ ID NO: 2208249 - RNA, 19 nt, Artificial Sequence
  Description of Artificial Sequence: Synthetic oligonucleotide
aaugccuguuauguauauc

SEQ ID NO: 2208250 - RNA, 19 nt, Artificial Sequence
  Description of Artificial Sequence: Synthetic oligonucleotide
gcaagcuacauuaaauagg

SEQ ID NO: 2208251 - RNA, 19 nt, Artificial Sequence
  Description of Artificial Sequence: Synthetic oligonucleotide
auuuuaggaauauggcaaa

SEQ ID NO: 2208252 - RNA, 19 nt, Artificial Sequence
  Description of Artificial Sequence: Synthetic oligonucleotide
ugauauccucauauuauuu

SEQ ID NO: 2208253 - RNA, 19 nt, Artificial Sequence
  Description of Artificial Sequence: Synthetic oligonucleotide
ggaaacaaggaccagacua

SEQ ID NO: 2208254 - RNA, 19 nt, Artificial Sequence
  Description of Artificial Sequence: Synthetic oligonucleotide
uauuuuagccuggagcggu

SEQ ID NO: 2208255 - RNA, 19 nt, Artificial Sequence
  Description of Artificial Sequence: Synthetic oligonucleotide
aagaugcagacaagaagag

SEQ ID NO: 2208256 - RNA, 19 nt, Artificial Sequence
  Description of Artificial Sequence: Synthetic oligonucleotide
uaucagaaaauugcuaaua

SEQ ID NO: 2208257 - RNA, 19 nt, Artificial Sequence
  Description of Artificial Sequence: Synthetic oligonucleotide
uuuuguaaccuuuccucau

SEQ ID NO: 2208258 - RNA, 19 nt, Artificial Sequence
  Description of Artificial Sequence: Synthetic oligonucleotide
auaucagaaaauugcuaau

SEQ ID NO: 2208259 - RNA, 19 nt, Artificial Sequence
  Description of Artificial Sequence: Synthetic oligonucleotide
gauggaaacaaggaccaga

SEQ ID NO: 2208260 - RNA, 19 nt, Artificial Sequence
  Description of Artificial Sequence: Synthetic oligonucleotide
ucuuacaccgccgccugcg

SEQ ID NO: 2208261 - RNA, 19 nt, Artificial Sequence
  Description of Artificial Sequence: Synthetic oligonucleotide
aaauccugaagagacugaa

SEQ ID NO: 2208262 - RNA, 19 nt, Artificial Sequence
  Description of Artificial Sequence: Synthetic oligonucleotide
ucacuauaaguuuguuucu

SEQ ID NO: 2208263 - RNA, 19 nt, Artificial Sequence
  Description of Artificial Sequence: Synthetic oligonucleotide
cugaagagacugaaucagc

SEQ ID NO: 2208264 - RNA, 19 nt, Artificial Sequence
  Description of Artificial Sequence: Synthetic oligonucleotide
agaacaaaccuggagaauu

SEQ ID NO: 2208265 - RNA, 19 nt, Artificial Sequence
  Description of Artificial Sequence: Synthetic oligonucleotide
gaugcagacaagaagagau

SEQ ID NO: 2208266 - RNA, 19 nt, Artificial Sequence
  Description of Artificial Sequence: Synthetic oligonucleotide
uggcaauaccagauaaaac

SEQ ID NO: 2208267 - RNA, 19 nt, Artificial Sequence
  Description of Artificial Sequence: Synthetic oligonucleotide
acaucuaaaaccacuaaua

SEQ ID NO: 2208268 - RNA, 19 nt, Artificial Sequence
  Description of Artificial Sequence: Synthetic oligonucleotide
cucuccuuaucucaucuac

SEQ ID NO: 2208269 - RNA, 19 nt, Artificial Sequence
  Description of Artificial Sequence: Synthetic oligonucleotide
uacaaagaacaaaccugga

SEQ ID NO: 2208270 - RNA, 19 nt, Artificial Sequence
  Description of Artificial Sequence: Synthetic oligonucleotide
ucuccuuaucucaucuacu

SEQ ID NO: 2208271 - RNA, 19 nt, Artificial Sequence
  Description of Artificial Sequence: Synthetic oligonucleotide
aaaugccuguuauguauau

SEQ ID NO: 2208272 - RNA, 19 nt, Artificial Sequence
  Description of Artificial Sequence: Synthetic oligonucleotide
uaaguuuguuucucacucu

SEQ ID NO: 2208273 - RNA, 19 nt, Artificial Sequence
  Description of Artificial Sequence: Synthetic oligonucleotide
ucccuaaacauaucuucac

SEQ ID NO: 2208274 - RNA, 19 nt, Artificial Sequence
  Description of Artificial Sequence: Synthetic oligonucleotide
augauauccucauauuauu

SEQ ID NO: 2208275 - RNA, 19 nt, Artificial Sequence
  Description of Artificial Sequence: Synthetic oligonucleotide
uaucuucacugcucaaaug

SEQ ID NO: 2208276 - RNA, 19 nt, Artificial Sequence
  Description of Artificial Sequence: Synthetic oligonucleotide
acacuuguagauugauuca

SEQ ID NO: 2208277 - RNA, 19 nt, Artificial Sequence
  Description of Artificial Sequence: Synthetic oligonucleotide
caagaagagauacaucuaa

SEQ ID NO: 2208278 - RNA, 19 nt, Artificial Sequence
  Description of Artificial Sequence: Synthetic oligonucleotide
guuauguauauccucuuua

SEQ ID NO: 2208279 - RNA, 19 nt, Artificial Sequence
  Description of Artificial Sequence: Synthetic oligonucleotide
aaccuuuccucauuuugua

SEQ ID NO: 2208280 - RNA, 19 nt, Artificial Sequence
  Description of Artificial Sequence: Synthetic oligonucleotide
uuuguaaccuuuccucauu

SEQ ID NO: 2208281 - RNA, 19 nt, Artificial Sequence
  Description of Artificial Sequence: Synthetic oligonucleotide
gauuucugcacacgucgac

SEQ ID NO: 2208282 - RNA, 19 nt, Artificial Sequence
  Description of Artificial Sequence: Synthetic oligonucleotide
cuuucacaaguuuauaugu

SEQ ID NO: 2208283 - RNA, 19 nt, Artificial Sequence
  Description of Artificial Sequence: Synthetic oligonucleotide
gcaacaguaagaugcagac

SEQ ID NO: 2208284 - RNA, 19 nt, Artificial Sequence
  Description of Artificial Sequence: Synthetic oligonucleotide
augcacguucauuuuagga

SEQ ID NO: 2208285 - RNA, 19 nt, Artificial Sequence
  Description of Artificial Sequence: Synthetic oligonucleotide
ugcucaaaugccuguuaug

SEQ ID NO: 2208286 - RNA, 19 nt, Artificial Sequence
  Description of Artificial Sequence: Synthetic oligonucleotide
uaucccaucagaagcucau

SEQ ID NO: 2208287 - RNA, 19 nt, Artificial Sequence
  Description of Artificial Sequence: Synthetic oligonucleotide
guuucgauuagccuuccaa

SEQ ID NO: 2208288 - RNA, 19 nt, Artificial Sequence
  Description of Artificial Sequence: Synthetic oligonucleotide
agggugguuucgauuagcc

SEQ ID NO: 2208289 - RNA, 19 nt, Artificial Sequence
  Description of Artificial Sequence: Synthetic oligonucleotide
cuuucucccacuuauuuua

SEQ ID NO: 2208290 - RNA, 19 nt, Artificial Sequence
  Description of Artificial Sequence: Synthetic oligonucleotide
uacuucauccacaucccua

SEQ ID NO: 2208291 - RNA, 19 nt, Artificial Sequence
  Description of Artificial Sequence: Synthetic oligonucleotide
caaaauaugauauccucau

SEQ ID NO: 2208292 - RNA, 19 nt, Artificial Sequence
  Description of Artificial Sequence: Synthetic oligonucleotide
aggcaagcuacauuaaaua

SEQ ID NO: 2208293 - RNA, 19 nt, Artificial Sequence
  Description of Artificial Sequence: Synthetic oligonucleotide
auagggauaagggugguuu

SEQ ID NO: 2208294 - RNA, 19 nt, Artificial Sequence
  Description of Artificial Sequence: Synthetic oligonucleotide
uccuuaucucaucuacuuc

SEQ ID NO: 2208295 - RNA, 19 nt, Artificial Sequence
  Description of Artificial Sequence: Synthetic oligonucleotide
agggauaagggugguuucg

SEQ ID NO: 2208296 - RNA, 19 nt, Artificial Sequence
  Description of Artificial Sequence: Synthetic oligonucleotide
cugguacccagauggaaac

SEQ ID NO: 2208297 - RNA, 19 nt, Artificial Sequence
  Description of Artificial Sequence: Synthetic oligonucleotide
ugaaucagccucucccuaa

SEQ ID NO: 2208298 - RNA, 19 nt, Artificial Sequence
  Description of Artificial Sequence: Synthetic oligonucleotide
auacaucuaaaaccacuaa

SEQ ID NO: 2208299 - RNA, 19 nt, Artificial Sequence
  Description of Artificial Sequence: Synthetic oligonucleotide
aagcugucuccuccuuccg

SEQ ID NO: 2208300 - RNA, 19 nt, Artificial Sequence
  Description of Artificial Sequence: Synthetic oligonucleotide
uacaccgccgccugcgaag

SEQ ID NO: 2208301 - RNA, 19 nt, Artificial Sequence
  Description of Artificial Sequence: Synthetic oligonucleotide
gccaaacacuuguagauug

SEQ ID NO: 2208302 - RNA, 19 nt, Artificial Sequence
  Description of Artificial Sequence: Synthetic oligonucleotide
uaugugcauuuauguagca

SEQ ID NO: 2208303 - RNA, 19 nt, Artificial Sequence
  Description of Artificial Sequence: Synthetic oligonucleotide
ucuugugugugcuucucuu

SEQ ID NO: 2208304 - RNA, 19 nt, Artificial Sequence
  Description of Artificial Sequence: Synthetic oligonucleotide
uuuagccuggagcgguaca

SEQ ID NO: 2208305 - RNA, 19 nt, Artificial Sequence
  Description of Artificial Sequence: Synthetic oligonucleotide
auuuuguaucccaucagaa

SEQ ID NO: 2208306 - RNA, 19 nt, Artificial Sequence
  Description of Artificial Sequence: Synthetic oligonucleotide
guagcauacaaagguacuc

SEQ ID NO: 2208307 - RNA, 19 nt, Artificial Sequence
  Description of Artificial Sequence: Synthetic oligonucleotide
ucaaagccaaacacuugua

SEQ ID NO: 2208308 - RNA, 19 nt, Artificial Sequence
  Description of Artificial Sequence: Synthetic oligonucleotide
aggguuucaucuugugugu

SEQ ID NO: 2208309 - RNA, 19 nt, Artificial Sequence
  Description of Artificial Sequence: Synthetic oligonucleotide
cagguacugaucuggucag

SEQ ID NO: 2208310 - RNA, 19 nt, Artificial Sequence
  Description of Artificial Sequence: Synthetic oligonucleotide
agaauaaugcacguucauu

SEQ ID NO: 2208311 - RNA, 19 nt, Artificial Sequence
  Description of Artificial Sequence: Synthetic oligonucleotide
aagguacucuugucuuuca

SEQ ID NO: 2208312 - RNA, 19 nt, Artificial Sequence
  Description of Artificial Sequence: Synthetic oligonucleotide
caaaccuggagaauuuaaa

SEQ ID NO: 2208313 - RNA, 19 nt, Artificial Sequence
  Description of Artificial Sequence: Synthetic oligonucleotide
ucccaucagaagcucauuu

SEQ ID NO: 2208314 - RNA, 19 nt, Artificial Sequence
  Description of Artificial Sequence: Synthetic oligonucleotide
agcaacaguaagaugcaga

SEQ ID NO: 2208315 - RNA, 19 nt, Artificial Sequence
  Description of Artificial Sequence: Synthetic oligonucleotide
ugcacacgucgacuccugg

SEQ ID NO: 2208316 - RNA, 19 nt, Artificial Sequence
  Description of Artificial Sequence: Synthetic oligonucleotide
guggcaauaccagauaaaa

SEQ ID NO: 2208317 - RNA, 19 nt, Artificial Sequence
  Description of Artificial Sequence: Synthetic oligonucleotide
gguuucaucuugugugugc

SEQ ID NO: 2208318 - RNA, 19 nt, Artificial Sequence
  Description of Artificial Sequence: Synthetic oligonucleotide
ccuuaucucaucuacuuca

SEQ ID NO: 2208319 - RNA, 19 nt, Artificial Sequence
  Description of Artificial Sequence: Synthetic oligonucleotide
caacgcaucacuauaaguu

SEQ ID NO: 2208320 - RNA, 19 nt, Artificial Sequence
  Description of Artificial Sequence: Synthetic oligonucleotide
uguuucucacucuccuuau

SEQ ID NO: 2208321 - RNA, 19 nt, Artificial Sequence
  Description of Artificial Sequence: Synthetic oligonucleotide
cuuuuccucgggcuuuggc

SEQ ID NO: 2208322 - RNA, 19 nt, Artificial Sequence
  Description of Artificial Sequence: Synthetic oligonucleotide
gcugucuccuccuuccgcg

SEQ ID NO: 2208323 - RNA, 19 nt, Artificial Sequence
  Description of Artificial Sequence: Synthetic oligonucleotide
ucugggguuccuuccauuu

SEQ ID NO: 2208324 - RNA, 19 nt, Artificial Sequence
  Description of Artificial Sequence: Synthetic oligonucleotide
cgaagcugaaggaagcugg

SEQ ID NO: 2208325 - RNA, 19 nt, Artificial Sequence
  Description of Artificial Sequence: Synthetic oligonucleotide
uggaaacaaggaccagacu

SEQ ID NO: 2208326 - RNA, 19 nt, Artificial Sequence
  Description of Artificial Sequence: Synthetic oligonucleotide
guaaagcucucucauucaa

SEQ ID NO: 2208327 - RNA, 19 nt, Artificial Sequence
  Description of Artificial Sequence: Synthetic oligonucleotide
cacuauaaguuuguuucuc

SEQ ID NO: 2208328 - RNA, 19 nt, Artificial Sequence
  Description of Artificial Sequence: Synthetic oligonucleotide
aaaccaaggcaagcuacau

SEQ ID NO: 2208329 - RNA, 19 nt, Artificial Sequence
  Description of Artificial Sequence: Synthetic oligonucleotide
gacuagcaggauuucugca

SEQ ID NO: 2208330 - RNA, 19 nt, Artificial Sequence
  Description of Artificial Sequence: Synthetic oligonucleotide
gaagagacugaaucagccu

SEQ ID NO: 2208331 - RNA, 19 nt, Artificial Sequence
  Description of Artificial Sequence: Synthetic oligonucleotide
ggcucaucauuuucugggg

SEQ ID NO: 2208332 - RNA, 19 nt, Artificial Sequence
  Description of Artificial Sequence: Synthetic oligonucleotide
agcaggauuucugcacacg

SEQ ID NO: 2208333 - RNA, 19 nt, Artificial Sequence
  Description of Artificial Sequence: Synthetic oligonucleotide
gugcauuuauguagcauac

SEQ ID NO: 2208334 - RNA, 19 nt, Artificial Sequence
  Description of Artificial Sequence: Synthetic oligonucleotide
uuagccuggagcgguacaa

SEQ ID NO: 2208335 - RNA, 19 nt, Artificial Sequence
  Description of Artificial Sequence: Synthetic oligonucleotide
aaauagggauaaggguggu

SEQ ID NO: 2208336 - RNA, 19 nt, Artificial Sequence
  Description of Artificial Sequence: Synthetic oligonucleotide
cuaaaucaguaaagcucuc

SEQ ID NO: 2208337 - RNA, 19 nt, Artificial Sequence
  Description of Artificial Sequence: Synthetic oligonucleotide
aaauagggagaugggcaaa

SEQ ID NO: 2208338 - RNA, 19 nt, Artificial Sequence
  Description of Artificial Sequence: Synthetic oligonucleotide
auucaaagccaaacacuug

SEQ ID NO: 2208339 - RNA, 19 nt, Artificial Sequence
  Description of Artificial Sequence: Synthetic oligonucleotide
ccuuuccucauuuuguauc

SEQ ID NO: 2208340 - RNA, 19 nt, Artificial Sequence
  Description of Artificial Sequence: Synthetic oligonucleotide
uagggauaagggugguuuc

SEQ ID NO: 2208341 - RNA, 19 nt, Artificial Sequence
  Description of Artificial Sequence: Synthetic oligonucleotide
caggauuucugcacacguc

SEQ ID NO: 2208342 - RNA, 19 nt, Artificial Sequence
  Description of Artificial Sequence: Synthetic oligonucleotide
uuccgcgggccucuuacac

SEQ ID NO: 2208343 - RNA, 19 nt, Artificial Sequence
  Description of Artificial Sequence: Synthetic oligonucleotide
ucugcacacgucgacuccu

SEQ ID NO: 2208344 - RNA, 19 nt, Artificial Sequence
  Description of Artificial Sequence: Synthetic oligonucleotide
aauccugaagagacugaau

SEQ ID NO: 2208345 - RNA, 19 nt, Artificial Sequence
  Description of Artificial Sequence: Synthetic oligonucleotide
cauaucuucacugcucaaa

SEQ ID NO: 2208346 - RNA, 19 nt, Artificial Sequence
  Description of Artificial Sequence: Synthetic oligonucleotide
guagauugauucaaauaua

SEQ ID NO: 2208347 - RNA, 19 nt, Artificial Sequence
  Description of Artificial Sequence: Synthetic oligonucleotide
uguaucccaucagaagcuc

SEQ ID NO: 2208348 - RNA, 19 nt, Artificial Sequence
  Description of Artificial Sequence: Synthetic oligonucleotide
gagauacaucuaaaaccac

SEQ ID NO: 2208349 - RNA, 19 nt, Artificial Sequence
  Description of Artificial Sequence: Synthetic oligonucleotide
cccagauggaaacaaggac

SEQ ID NO: 2208350 - RNA, 19 nt, Artificial Sequence
  Description of Artificial Sequence: Synthetic oligonucleotide
auuagccuuccaacgcauc

SEQ ID NO: 2208351 - RNA, 19 nt, Artificial Sequence
  Description of Artificial Sequence: Synthetic oligonucleotide
acccagauggaaacaagga

SEQ ID NO: 2208352 - RNA, 19 nt, Artificial Sequence
  Description of Artificial Sequence: Synthetic oligonucleotide
gauaagggugguuucgauu

SEQ ID NO: 2208353 - RNA, 19 nt, Artificial Sequence
  Description of Artificial Sequence: Synthetic oligonucleotide
acaguaagaugcagacaag

SEQ ID NO: 2208354 - RNA, 19 nt, Artificial Sequence
  Description of Artificial Sequence: Synthetic oligonucleotide
cuuguagauugauucaaau

SEQ ID NO: 2208355 - RNA, 19 nt, Artificial Sequence
  Description of Artificial Sequence: Synthetic oligonucleotide
acgcaucacuauaaguuug

SEQ ID NO: 2208356 - RNA, 19 nt, Artificial Sequence
  Description of Artificial Sequence: Synthetic oligonucleotide
aauagggauaagggugguu

SEQ ID NO: 2208357 - RNA, 19 nt, Artificial Sequence
  Description of Artificial Sequence: Synthetic oligonucleotide
cuauauugcaguggcaaua

SEQ ID NO: 2208358 - RNA, 19 nt, Artificial Sequence
  Description of Artificial Sequence: Synthetic oligonucleotide
gcuacauuaaauagggaua

SEQ ID NO: 2208359 - RNA, 19 nt, Artificial Sequence
  Description of Artificial Sequence: Synthetic oligonucleotide
guacccagauggaaacaag

SEQ ID NO: 2208360 - RNA, 19 nt, Artificial Sequence
  Description of Artificial Sequence: Synthetic oligonucleotide
acaaaccuggagaauuuaa

SEQ ID NO: 2208361 - RNA, 19 nt, Artificial Sequence
  Description of Artificial Sequence: Synthetic oligonucleotide
uccagguacugaucugguc

SEQ ID NO: 2208362 - RNA, 19 nt, Artificial Sequence
  Description of Artificial Sequence: Synthetic oligonucleotide
ccgccugcgaagcugaagg

SEQ ID NO: 2208363 - RNA, 19 nt, Artificial Sequence
  Description of Artificial Sequence: Synthetic oligonucleotide
uuuuagccuggagcgguac

SEQ ID NO: 2208364 - RNA, 19 nt, Artificial Sequence
  Description of Artificial Sequence: Synthetic oligonucleotide
gugguuucgauuagccuuc

SEQ ID NO: 2208365 - RNA, 19 nt, Artificial Sequence
  Description of Artificial Sequence: Synthetic oligonucleotide
acugcucaaaugccuguua

SEQ ID NO: 2208366 - RNA, 19 nt, Artificial Sequence
  Description of Artificial Sequence: Synthetic oligonucleotide
gguacucuugucuuucaaa

SEQ ID NO: 2208367 - RNA, 19 nt, Artificial Sequence
  Description of Artificial Sequence: Synthetic oligonucleotide
uagccuuccaacgcaucac

SEQ ID NO: 2208368 - RNA, 19 nt, Artificial Sequence
  Description of Artificial Sequence: Synthetic oligonucleotide
caaggcaagcuacauuaaa

SEQ ID NO: 2208369 - RNA, 19 nt, Artificial Sequence
  Description of Artificial Sequence: Synthetic oligonucleotide
cuggagcgguacaaagaac

SEQ ID NO: 2208370 - RNA, 19 nt, Artificial Sequence
  Description of Artificial Sequence: Synthetic oligonucleotide
acugaucuggucaguuucu

SEQ ID NO: 2208371 - RNA, 19 nt, Artificial Sequence
  Description of Artificial Sequence: Synthetic oligonucleotide
ucacucuccuuaucucauc

SEQ ID NO: 2208372 - RNA, 19 nt, Artificial Sequence
  Description of Artificial Sequence: Synthetic oligonucleotide
acuuguagauugauucaaa

SEQ ID NO: 2208373 - RNA, 19 nt, Artificial Sequence
  Description of Artificial Sequence: Synthetic oligonucleotide
guuucucacucuccuuauc

SEQ ID NO: 2208374 - RNA, 19 nt, Artificial Sequence
  Description of Artificial Sequence: Synthetic oligonucleotide
agcaagaauaaugcacguu

SEQ ID NO: 2208375 - RNA, 19 nt, Artificial Sequence
  Description of Artificial Sequence: Synthetic oligonucleotide
auaccagauaaaacagaaa

SEQ ID NO: 2208376 - RNA, 19 nt, Artificial Sequence
  Description of Artificial Sequence: Synthetic oligonucleotide
augugcauuuauguagcau

SEQ ID NO: 2208377 - RNA, 19 nt, Artificial Sequence
  Description of Artificial Sequence: Synthetic oligonucleotide
acaagaagagauacaucua

SEQ ID NO: 2208378 - RNA, 19 nt, Artificial Sequence
  Description of Artificial Sequence: Synthetic oligonucleotide
caaaugccuguuauguaua

SEQ ID NO: 2208379 - RNA, 19 nt, Artificial Sequence
  Description of Artificial Sequence: Synthetic oligonucleotide
auccacaucccuaaacaua

SEQ ID NO: 2208380 - RNA, 19 nt, Artificial Sequence
  Description of Artificial Sequence: Synthetic oligonucleotide
agguacucuugucuuucaa

SEQ ID NO: 2208381 - RNA, 19 nt, Artificial Sequence
  Description of Artificial Sequence: Synthetic oligonucleotide
cccacuuauuuuagccugg

SEQ ID NO: 2208382 - RNA, 19 nt, Artificial Sequence
  Description of Artificial Sequence: Synthetic oligonucleotide
uuacaccgccgccugcgaa

SEQ ID NO: 2208383 - RNA, 19 nt, Artificial Sequence
  Description of Artificial Sequence: Synthetic oligonucleotide
accagacuagcaggauuuc

SEQ ID NO: 2208384 - RNA, 19 nt, Artificial Sequence
  Description of Artificial Sequence: Synthetic oligonucleotide
aagcuauauugcaguggca

SEQ ID NO: 2208385 - RNA, 19 nt, Artificial Sequence
  Description of Artificial Sequence: Synthetic oligonucleotide
acauaucuucacugcucaa

SEQ ID NO: 2208386 - RNA, 19 nt, Artificial Sequence
  Description of Artificial Sequence: Synthetic oligonucleotide
cucuggcuuuuccucgggc

SEQ ID NO: 2208387 - RNA, 19 nt, Artificial Sequence
  Description of Artificial Sequence: Synthetic oligonucleotide
cuucacugcucaaaugccu

SEQ ID NO: 2208388 - RNA, 19 nt, Artificial Sequence
  Description of Artificial Sequence: Synthetic oligonucleotide
caguggcaauaccagauaa

SEQ ID NO: 2208389 - RNA, 19 nt, Artificial Sequence
  Description of Artificial Sequence: Synthetic oligonucleotide
gccuguuauguauauccuc

SEQ ID NO: 2208390 - RNA, 19 nt, Artificial Sequence
  Description of Artificial Sequence: Synthetic oligonucleotide
cucaaaugccuguuaugua

SEQ ID NO: 2208391 - RNA, 19 nt, Artificial Sequence
  Description of Artificial Sequence: Synthetic oligonucleotide
ccuguuauguauauccucu

SEQ ID NO: 2208392 - RNA, 19 nt, Artificial Sequence
  Description of Artificial Sequence: Synthetic oligonucleotide
acaucccuaaacauaucuu

SEQ ID NO: 2208393 - RNA, 19 nt, Artificial Sequence
  Description of Artificial Sequence: Synthetic oligonucleotide
acguucauuuuaggaauau

SEQ ID NO: 2208394 - RNA, 19 nt, Artificial Sequence
  Description of Artificial Sequence: Synthetic oligonucleotide
gagcgguacaaagaacaaa

SEQ ID NO: 2208395 - RNA, 19 nt, Artificial Sequence
  Description of Artificial Sequence: Synthetic oligonucleotide
gucuccuccuuccgcgggc

SEQ ID NO: 2208396 - RNA, 19 nt, Artificial Sequence
  Description of Artificial Sequence: Synthetic oligonucleotide
acucuccuuaucucaucua

SEQ ID NO: 2208397 - RNA, 19 nt, Artificial Sequence
  Description of Artificial Sequence: Synthetic oligonucleotide
ccgcgggccucuuacaccg

SEQ ID NO: 2208398 - RNA, 19 nt, Artificial Sequence
  Description of Artificial Sequence: Synthetic oligonucleotide
cuccuuaucucaucuacuu

SEQ ID NO: 2208399 - RNA, 19 nt, Artificial Sequence
  Description of Artificial Sequence: Synthetic oligonucleotide
cucccacuuauuuuagccu

SEQ ID NO: 2208400 - RNA, 19 nt, Artificial Sequence
  Description of Artificial Sequence: Synthetic oligonucleotide
gaccagacuagcaggauuu

SEQ ID NO: 2208401 - RNA, 19 nt, Artificial Sequence
  Description of Artificial Sequence: Synthetic oligonucleotide
guaucccaucagaagcuca

SEQ ID NO: 2208402 - RNA, 19 nt, Artificial Sequence
  Description of Artificial Sequence: Synthetic oligonucleotide
caacaguaagaugcagaca

SEQ ID NO: 2208403 - RNA, 19 nt, Artificial Sequence
  Description of Artificial Sequence: Synthetic oligonucleotide
gcgguacaaagaacaaacc

SEQ ID NO: 2208404 - RNA, 19 nt, Artificial Sequence
  Description of Artificial Sequence: Synthetic oligonucleotide
agcugguacccagauggaa

SEQ ID NO: 2208405 - RNA, 19 nt, Artificial Sequence
  Description of Artificial Sequence: Synthetic oligonucleotide
ugguuucgauuagccuucc

SEQ ID NO: 2208406 - RNA, 19 nt, Artificial Sequence
  Description of Artificial Sequence: Synthetic oligonucleotide
cugcacacgucgacuccug

SEQ ID NO: 2208407 - RNA, 19 nt, Artificial Sequence
  Description of Artificial Sequence: Synthetic oligonucleotide
gaagcugaaggaagcuggu

SEQ ID NO: 2208408 - RNA, 19 nt, Artificial Sequence
  Description of Artificial Sequence: Synthetic oligonucleotide
ggcaggguuucaucuugug

SEQ ID NO: 2208409 - RNA, 19 nt, Artificial Sequence
  Description of Artificial Sequence: Synthetic oligonucleotide
cucuuacaccgccgccugc

SEQ ID NO: 2208410 - RNA, 19 nt, Artificial Sequence
  Description of Artificial Sequence: Synthetic oligonucleotide
ccuggagcgguacaaagaa

SEQ ID NO: 2208411 - RNA, 19 nt, Artificial Sequence
  Description of Artificial Sequence: Synthetic oligonucleotide
gcacguucauuuuaggaau

SEQ ID NO: 2208412 - RNA, 19 nt, Artificial Sequence
  Description of Artificial Sequence: Synthetic oligonucleotide
cacguucauuuuaggaaua

SEQ ID NO: 2208413 - RNA, 19 nt, Artificial Sequence
  Description of Artificial Sequence: Synthetic oligonucleotide
cacucuccuuaucucaucu

SEQ ID NO: 2208414 - RNA, 19 nt, Artificial Sequence
  Description of Artificial Sequence: Synthetic oligonucleotide
cucgggcuuuggcuccucc

SEQ ID NO: 2208415 - RNA, 19 nt, Artificial Sequence
  Description of Artificial Sequence: Synthetic oligonucleotide
gcaggauuucugcacacgu

SEQ ID NO: 2208416 - RNA, 19 nt, Artificial Sequence
  Description of Artificial Sequence: Synthetic oligonucleotide
gcugguacccagauggaaa

SEQ ID NO: 2208417 - RNA, 19 nt, Artificial Sequence
  Description of Artificial Sequence: Synthetic oligonucleotide
gggcaaaggcauaucagaa

SEQ ID NO: 2208418 - RNA, 19 nt, Artificial Sequence
  Description of Artificial Sequence: Synthetic oligonucleotide
gcagacaagaagagauaca

SEQ ID NO: 2208419 - RNA, 19 nt, Artificial Sequence
  Description of Artificial Sequence: Synthetic oligonucleotide
accgccgccugcgaagcug

SEQ ID NO: 2208420 - RNA, 19 nt, Artificial Sequence
  Description of Artificial Sequence: Synthetic oligonucleotide
cugaaucagccucucccua

SEQ ID NO: 2208421 - RNA, 19 nt, Artificial Sequence
  Description of Artificial Sequence: Synthetic oligonucleotide
gauuagccuuccaacgcau

SEQ ID NO: 2208422 - RNA, 19 nt, Artificial Sequence
  Description of Artificial Sequence: Synthetic oligonucleotide
agccucucccuaaaaguuu

SEQ ID NO: 2208423 - RNA, 19 nt, Artificial Sequence
  Description of Artificial Sequence: Synthetic oligonucleotide
gggccucuuacaccgccgc

SEQ ID NO: 2208424 - RNA, 19 nt, Artificial Sequence
  Description of Artificial Sequence: Synthetic oligonucleotide
ccuuccgcgggccucuuac

SEQ ID NO: 2208425 - RNA, 19 nt, Artificial Sequence
  Description of Artificial Sequence: Synthetic oligonucleotide
cucacucuccuuaucucau

SEQ ID NO: 2208426 - RNA, 19 nt, Artificial Sequence
  Description of Artificial Sequence: Synthetic oligonucleotide
gggauaagggugguuucga

SEQ ID NO: 2208427 - RNA, 19 nt, Artificial Sequence
  Description of Artificial Sequence: Synthetic oligonucleotide
cugcucaaaugccuguuau

SEQ ID NO: 2208428 - RNA, 19 nt, Artificial Sequence
  Description of Artificial Sequence: Synthetic oligonucleotide
cuuacaccgccgccugcga

SEQ ID NO: 2208429 - RNA, 19 nt, Artificial Sequence
  Description of Artificial Sequence: Synthetic oligonucleotide
aggaccagacuagcaggau

SEQ ID NO: 2208430 - RNA, 19 nt, Artificial Sequence
  Description of Artificial Sequence: Synthetic oligonucleotide
ggauuucugcacacgucga

SEQ ID NO: 2208431 - RNA, 19 nt, Artificial Sequence
  Description of Artificial Sequence: Synthetic oligonucleotide
ggguuucaucuugugugug

SEQ ID NO: 2208432 - RNA, 19 nt, Artificial Sequence
  Description of Artificial Sequence: Synthetic oligonucleotide
cagccucucccuaaaaguu

SEQ ID NO: 2208433 - RNA, 19 nt, Artificial Sequence
  Description of Artificial Sequence: Synthetic oligonucleotide
auuuuagccuggagcggua

SEQ ID NO: 2208434 - RNA, 19 nt, Artificial Sequence
  Description of Artificial Sequence: Synthetic oligonucleotide
ccucuuacaccgccgccug

SEQ ID NO: 2208435 - RNA, 19 nt, Artificial Sequence
  Description of Artificial Sequence: Synthetic oligonucleotide
gcuauauugcaguggcaau

SEQ ID NO: 2208436 - RNA, 19 nt, Artificial Sequence
  Description of Artificial Sequence: Synthetic oligonucleotide
ccuaaaaguuucuuccgau

SEQ ID NO: 2208437 - RNA, 19 nt, Artificial Sequence
  Description of Artificial Sequence: Synthetic oligonucleotide
cuguuauguauauccucuu

SEQ ID NO: 2208438 - RNA, 19 nt, Artificial Sequence
  Description of Artificial Sequence: Synthetic oligonucleotide
cgguacaaagaacaaaccu

SEQ ID NO: 2208439 - RNA, 19 nt, Artificial Sequence
  Description of Artificial Sequence: Synthetic oligonucleotide
ggagcgguacaaagaacaa

SEQ ID NO: 2208440 - RNA, 19 nt, Artificial Sequence
  Description of Artificial Sequence: Synthetic oligonucleotide
cuuccgcgggccucuuaca

SEQ ID NO: 2208441 - RNA, 19 nt, Artificial Sequence
  Description of Artificial Sequence: Synthetic oligonucleotide
ggccucuuacaccgccgcc

SEQ ID NO: 2208442 - RNA, 19 nt, Artificial Sequence
  Description of Artificial Sequence: Synthetic oligonucleotide
aucccaucagaagcucauu

SEQ ID NO: 2208443 - RNA, 19 nt, Artificial Sequence
  Description of Artificial Sequence: Synthetic oligonucleotide
gguuucgauuagccuucca

SEQ ID NO: 2208444 - RNA, 19 nt, Artificial Sequence
  Description of Artificial Sequence: Synthetic oligonucleotide
ccaacgcaucacuauaagu

SEQ ID NO: 2208445 - RNA, 19 nt, Artificial Sequence
  Description of Artificial Sequence: Synthetic oligonucleotide
gccuggagcgguacaaaga

SEQ ID NO: 2208446 - RNA, 19 nt, Artificial Sequence
  Description of Artificial Sequence: Synthetic oligonucleotide
cccuaaacauaucuucacu

SEQ ID NO: 2208447 - RNA, 19 nt, Artificial Sequence
  Description of Artificial Sequence: Synthetic oligonucleotide
ccucuggcuuuuccucggg

SEQ ID NO: 2208448 - RNA, 19 nt, Artificial Sequence
  Description of Artificial Sequence: Synthetic oligonucleotide
gggugguuucgauuagccu

SEQ ID NO: 2208449 - RNA, 19 nt, Artificial Sequence
  Description of Artificial Sequence: Synthetic oligonucleotide
ggauaagggugguuucgau

SEQ ID NO: 2208450 - RNA, 19 nt, Artificial Sequence
  Description of Artificial Sequence: Synthetic oligonucleotide
ggaccagacuagcaggauu

SEQ ID NO: 2208451 - RNA, 19 nt, Artificial Sequence
  Description of Artificial Sequence: Synthetic oligonucleotide
uccuuccgcgggccucuua

SEQ ID NO: 2208452 - RNA, 19 nt, Artificial Sequence
  Description of Artificial Sequence: Synthetic oligonucleotide
gccugcgaagcugaaggaa

SEQ ID NO: 2208453 - RNA, 19 nt, Artificial Sequence
  Description of Artificial Sequence: Synthetic oligonucleotide
gcacacgucgacuccuggu

SEQ ID NO: 2208454 - RNA, 19 nt, Artificial Sequence
  Description of Artificial Sequence: Synthetic oligonucleotide
ccaaggcaagcuacauuaa

SEQ ID NO: 2208455 - RNA, 19 nt, Artificial Sequence
  Description of Artificial Sequence: Synthetic oligonucleotide
ggagaugggcaaaggcaua

SEQ ID NO: 2208456 - RNA, 19 nt, Artificial Sequence
  Description of Artificial Sequence: Synthetic oligonucleotide
gccgccugcgaagcugaag

SEQ ID NO: 2208457 - RNA, 19 nt, Artificial Sequence
  Description of Artificial Sequence: Synthetic oligonucleotide
cgggccucuuacaccgccg

SEQ ID NO: 2208458 - RNA, 19 nt, Artificial Sequence
  Description of Artificial Sequence: Synthetic oligonucleotide
uccucgggcuuuggcucau

SEQ ID NO: 2208459 - RNA, 19 nt, Artificial Sequence
  Description of Artificial Sequence: Synthetic oligonucleotide
gccucuuacaccgccgccu

SEQ ID NO: 2208460 - RNA, 19 nt, Artificial Sequence
  Description of Artificial Sequence: Synthetic oligonucleotide
ccacuuauuuuagccugga

SEQ ID NO: 2208461 - RNA, 19 nt, Artificial Sequence
  Description of Artificial Sequence: Synthetic oligonucleotide
cucucccuaaaaguuucuu

SEQ ID NO: 2208462 - RNA, 19 nt, Artificial Sequence
  Description of Artificial Sequence: Synthetic oligonucleotide
cugggguuccuuccauuuu

SEQ ID NO: 2208463 - RNA, 19 nt, Artificial Sequence
  Description of Artificial Sequence: Synthetic oligonucleotide
cgcaucacuauaaguuugu

SEQ ID NO: 2208464 - RNA, 19 nt, Artificial Sequence
  Description of Artificial Sequence: Synthetic oligonucleotide
cacugcucaaaugccuguu

SEQ ID NO: 2208465 - RNA, 19 nt, Artificial Sequence
  Description of Artificial Sequence: Synthetic oligonucleotide
ccagacuagcaggauuucu

SEQ ID NO: 2208466 - RNA, 19 nt, Artificial Sequence
  Description of Artificial Sequence: Synthetic oligonucleotide
ccgccgccugcgaagcuga

SEQ ID NO: 2208467 - RNA, 19 nt, Artificial Sequence
  Description of Artificial Sequence: Synthetic oligonucleotide
cgccugcgaagcugaagga

SEQ ID NO: 2208468 - RNA, 19 nt, Artificial Sequence
  Description of Artificial Sequence: Synthetic oligonucleotide
cgcgggccucuuacaccgc

SEQ ID NO: 2208469 - RNA, 19 nt, Artificial Sequence
  Description of Artificial Sequence: Synthetic oligonucleotide
ccuccuuccgcgggccucu

SEQ ID NO: 2208470 - RNA, 19 nt, Artificial Sequence
  Description of Artificial Sequence: Synthetic oligonucleotide
caccgccgccugcgaagcu

SEQ ID NO: 2208471 - RNA, 19 nt, Artificial Sequence
  Description of Artificial Sequence: Synthetic oligonucleotide
ccucgggcuuuggcuccuc

SEQ ID NO: 2208472 - RNA, 19 nt, Artificial Sequence
  Description of Artificial Sequence: Synthetic oligonucleotide
uuuguaagaaguauuauag

SEQ ID NO: 2208473 - RNA, 19 nt, Artificial Sequence
  Description of Artificial Sequence: Synthetic oligonucleotide
aguauuauaguuucaaagg

SEQ ID NO: 2208474 - RNA, 19 nt, Artificial Sequence
  Description of Artificial Sequence: Synthetic oligonucleotide
aaugcagaaaaucugcagg

SEQ ID NO: 2208475 - RNA, 19 nt, Artificial Sequence
  Description of Artificial Sequence: Synthetic oligonucleotide
uaauuuaccaccaaggcca

SEQ ID NO: 2208476 - RNA, 19 nt, Artificial Sequence
  Description of Artificial Sequence: Synthetic oligonucleotide
aaguauuauaguuucaaag

SEQ ID NO: 2208477 - RNA, 19 nt, Artificial Sequence
  Description of Artificial Sequence: Synthetic oligonucleotide
aaaugcauaaucugcaauc

SEQ ID NO: 2208478 - RNA, 19 nt, Artificial Sequence
  Description of Artificial Sequence: Synthetic oligonucleotide
uuuaaaaucacuauacaua

SEQ ID NO: 2208479 - RNA, 19 nt, Artificial Sequence
  Description of Artificial Sequence: Synthetic oligonucleotide
aagguaagaaauuuguaug

SEQ ID NO: 2208480 - RNA, 19 nt, Artificial Sequence
  Description of Artificial Sequence: Synthetic oligonucleotide
uaacuuuuaagucaaggug

SEQ ID NO: 2208481 - RNA, 19 nt, Artificial Sequence
  Description of Artificial Sequence: Synthetic oligonucleotide
uuuaaguuguuuuaaaguc

SEQ ID NO: 2208482 - RNA, 19 nt, Artificial Sequence
  Description of Artificial Sequence: Synthetic oligonucleotide
uuguauguaauuuaccacc

SEQ ID NO: 2208483 - RNA, 19 nt, Artificial Sequence
  Description of Artificial Sequence: Synthetic oligonucleotide
uuaguaaagaggauuuucc

SEQ ID NO: 2208484 - RNA, 19 nt, Artificial Sequence
  Description of Artificial Sequence: Synthetic oligonucleotide
uguaauuuaccaccaaggc

SEQ ID NO: 2208485 - RNA, 19 nt, Artificial Sequence
  Description of Artificial Sequence: Synthetic oligonucleotide
agaaauaucaacaacaaaa

SEQ ID NO: 2208486 - RNA, 19 nt, Artificial Sequence
  Description of Artificial Sequence: Synthetic oligonucleotide
auaaaugcagaaaaucugc

SEQ ID NO: 2208487 - RNA, 19 nt, Artificial Sequence
  Description of Artificial Sequence: Synthetic oligonucleotide
uauguaauuuaccaccaag

SEQ ID NO: 2208488 - RNA, 19 nt, Artificial Sequence
  Description of Artificial Sequence: Synthetic oligonucleotide
uguuguaaaugcauaaucu

SEQ ID NO: 2208489 - RNA, 19 nt, Artificial Sequence
  Description of Artificial Sequence: Synthetic oligonucleotide
ucaaagguaagaaauuugu

SEQ ID NO: 2208490 - RNA, 19 nt, Artificial Sequence
  Description of Artificial Sequence: Synthetic oligonucleotide
uacauuaucaaugaaauuu

SEQ ID NO: 2208491 - RNA, 19 nt, Artificial Sequence
  Description of Artificial Sequence: Synthetic oligonucleotide
aauuacuugcuucuggccu

SEQ ID NO: 2208492 - RNA, 19 nt, Artificial Sequence
  Description of Artificial Sequence: Synthetic oligonucleotide
uauuauaguuucaaaggca

SEQ ID NO: 2208493 - RNA, 19 nt, Artificial Sequence
  Description of Artificial Sequence: Synthetic oligonucleotide
aauuuguauguaauuuacc

SEQ ID NO: 2208494 - RNA, 19 nt, Artificial Sequence
  Description of Artificial Sequence: Synthetic oligonucleotide
uguauggaguuacagaaga

SEQ ID NO: 2208495 - RNA, 19 nt, Artificial Sequence
  Description of Artificial Sequence: Synthetic oligonucleotide
aaaugcagaaaaucugcag

SEQ ID NO: 2208496 - RNA, 19 nt, Artificial Sequence
  Description of Artificial Sequence: Synthetic oligonucleotide
aaucacaggcuuugcaugg

SEQ ID NO: 2208497 - RNA, 19 nt, Artificial Sequence
  Description of Artificial Sequence: Synthetic oligonucleotide
ucuguauggaguuacagaa

SEQ ID NO: 2208498 - RNA, 19 nt, Artificial Sequence
  Description of Artificial Sequence: Synthetic oligonucleotide
auaacuuuuaagucaaggu

SEQ ID NO: 2208499 - RNA, 19 nt, Artificial Sequence
  Description of Artificial Sequence: Synthetic oligonucleotide
guauuauaguuucaaaggc

SEQ ID NO: 2208500 - RNA, 19 nt, Artificial Sequence
  Description of Artificial Sequence: Synthetic oligonucleotide
uucgucaaguuuuacuugg

SEQ ID NO: 2208501 - RNA, 19 nt, Artificial Sequence
  Description of Artificial Sequence: Synthetic oligonucleotide
uauaacuccaacucuuuug

SEQ ID NO: 2208502 - RNA, 19 nt, Artificial Sequence
  Description of Artificial Sequence: Synthetic oligonucleotide
cuuuguauaacuccaacuc

SEQ ID NO: 2208503 - RNA, 19 nt, Artificial Sequence
  Description of Artificial Sequence: Synthetic oligonucleotide
uaagaaguauuauaguuuc

SEQ ID NO: 2208504 - RNA, 19 nt, Artificial Sequence
  Description of Artificial Sequence: Synthetic oligonucleotide
auguuggaacuucacagcc

SEQ ID NO: 2208505 - RNA, 19 nt, Artificial Sequence
  Description of Artificial Sequence: Synthetic oligonucleotide
uuuuacuugggcaucuggc

SEQ ID NO: 2208506 - RNA, 19 nt, Artificial Sequence
  Description of Artificial Sequence: Synthetic oligonucleotide
guaaagaggauuuuccagc

SEQ ID NO: 2208507 - RNA, 19 nt, Artificial Sequence
  Description of Artificial Sequence: Synthetic oligonucleotide
uacagaagaaagcugaaau

SEQ ID NO: 2208508 - RNA, 19 nt, Artificial Sequence
  Description of Artificial Sequence: Synthetic oligonucleotide
uguuuaaaaucacuauaca

SEQ ID NO: 2208509 - RNA, 19 nt, Artificial Sequence
  Description of Artificial Sequence: Synthetic oligonucleotide
agcuauaacuuuuaaguca

SEQ ID NO: 2208510 - RNA, 19 nt, Artificial Sequence
  Description of Artificial Sequence: Synthetic oligonucleotide
guaauuuaccaccaaggcc

SEQ ID NO: 2208511 - RNA, 19 nt, Artificial Sequence
  Description of Artificial Sequence: Synthetic oligonucleotide
uuuguauaacuccaacucu

SEQ ID NO: 2208512 - RNA, 19 nt, Artificial Sequence
  Description of Artificial Sequence: Synthetic oligonucleotide
uuuuguaagaaguauuaua

SEQ ID NO: 2208513 - RNA, 19 nt, Artificial Sequence
  Description of Artificial Sequence: Synthetic oligonucleotide
uuagcaaccagaauucuau

SEQ ID NO: 2208514 - RNA, 19 nt, Artificial Sequence
  Description of Artificial Sequence: Synthetic oligonucleotide
uccuacuaggccuacauca

SEQ ID NO: 2208515 - RNA, 19 nt, Artificial Sequence
  Description of Artificial Sequence: Synthetic oligonucleotide
ugaauuacuugcuucuggc

SEQ ID NO: 2208516 - RNA, 19 nt, Artificial Sequence
  Description of Artificial Sequence: Synthetic oligonucleotide
uucaaagguaagaaauuug

SEQ ID NO: 2208517 - RNA, 19 nt, Artificial Sequence
  Description of Artificial Sequence: Synthetic oligonucleotide
ucucucuaaaugcuugagg

SEQ ID NO: 2208518 - RNA, 19 nt, Artificial Sequence
  Description of Artificial Sequence: Synthetic oligonucleotide
guuauugaaaugcccacag

SEQ ID NO: 2208519 - RNA, 19 nt, Artificial Sequence
  Description of Artificial Sequence: Synthetic oligonucleotide
ucaaaggcaguucuguaug

SEQ ID NO: 2208520 - RNA, 19 nt, Artificial Sequence
  Description of Artificial Sequence: Synthetic oligonucleotide
ucuuuuguaagaaguauua

SEQ ID NO: 2208521 - RNA, 19 nt, Artificial Sequence
  Description of Artificial Sequence: Synthetic oligonucleotide
aauccagaaauaucaacaa

SEQ ID NO: 2208522 - RNA, 19 nt, Artificial Sequence
  Description of Artificial Sequence: Synthetic oligonucleotide
uggaguuacagaagaaagc

SEQ ID NO: 2208523 - RNA, 19 nt, Artificial Sequence
  Description of Artificial Sequence: Synthetic oligonucleotide
aacgaggguaacccauucc

SEQ ID NO: 2208524 - RNA, 19 nt, Artificial Sequence
  Description of Artificial Sequence: Synthetic oligonucleotide
aggauuuuccagcauuugg

SEQ ID NO: 2208525 - RNA, 19 nt, Artificial Sequence
  Description of Artificial Sequence: Synthetic oligonucleotide
uguauguaauuuaccacca

SEQ ID NO: 2208526 - RNA, 19 nt, Artificial Sequence
  Description of Artificial Sequence: Synthetic oligonucleotide
cuucagugcacuaacucgg

SEQ ID NO: 2208527 - RNA, 19 nt, Artificial Sequence
  Description of Artificial Sequence: Synthetic oligonucleotide
augcagaaaaucugcaggg

SEQ ID NO: 2208528 - RNA, 19 nt, Artificial Sequence
  Description of Artificial Sequence: Synthetic oligonucleotide
ucuuauuaacugccaacag

SEQ ID NO: 2208529 - RNA, 19 nt, Artificial Sequence
  Description of Artificial Sequence: Synthetic oligonucleotide
accuuuagcaaccagaauu

SEQ ID NO: 2208530 - RNA, 19 nt, Artificial Sequence
  Description of Artificial Sequence: Synthetic oligonucleotide
uccuacuccagccacaaac

SEQ ID NO: 2208531 - RNA, 19 nt, Artificial Sequence
  Description of Artificial Sequence: Synthetic oligonucleotide
cauacugucuccaccacgc

SEQ ID NO: 2208532 - RNA, 19 nt, Artificial Sequence
  Description of Artificial Sequence: Synthetic oligonucleotide
uuuaugggcuacaacccag

SEQ ID NO: 2208533 - RNA, 19 nt, Artificial Sequence
  Description of Artificial Sequence: Synthetic oligonucleotide
ucaaguuuuacuugggcau

SEQ ID NO: 2208534 - RNA, 19 nt, Artificial Sequence
  Description of Artificial Sequence: Synthetic oligonucleotide
aaucacuauacauaaucuu

SEQ ID NO: 2208535 - RNA, 19 nt, Artificial Sequence
  Description of Artificial Sequence: Synthetic oligonucleotide
uuuuaagucaaggugaauu

SEQ ID NO: 2208536 - RNA, 19 nt, Artificial Sequence
  Description of Artificial Sequence: Synthetic oligonucleotide
uauguuggaacuucacagc

SEQ ID NO: 2208537 - RNA, 19 nt, Artificial Sequence
  Description of Artificial Sequence: Synthetic oligonucleotide
ucuuuguauaacuccaacu

SEQ ID NO: 2208538 - RNA, 19 nt, Artificial Sequence
  Description of Artificial Sequence: Synthetic oligonucleotide
auuugggaauccuacuagg

SEQ ID NO: 2208539 - RNA, 19 nt, Artificial Sequence
  Description of Artificial Sequence: Synthetic oligonucleotide
auguaauuuaccaccaagg

SEQ ID NO: 2208540 - RNA, 19 nt, Artificial Sequence
  Description of Artificial Sequence: Synthetic oligonucleotide
uuggugaagagucuuacau

SEQ ID NO: 2208541 - RNA, 19 nt, Artificial Sequence
  Description of Artificial Sequence: Synthetic oligonucleotide
aagaaauuuguauguaauu

SEQ ID NO: 2208542 - RNA, 19 nt, Artificial Sequence
  Description of Artificial Sequence: Synthetic oligonucleotide
uuugggaauccuacuaggc

SEQ ID NO: 2208543 - RNA, 19 nt, Artificial Sequence
  Description of Artificial Sequence: Synthetic oligonucleotide
aucagcuauaacuuuuaag

SEQ ID NO: 2208544 - RNA, 19 nt, Artificial Sequence
  Description of Artificial Sequence: Synthetic oligonucleotide
auaacuccaacucuuuugu

SEQ ID NO: 2208545 - RNA, 19 nt, Artificial Sequence
  Description of Artificial Sequence: Synthetic oligonucleotide
uugaaaugcccacaggcac

SEQ ID NO: 2208546 - RNA, 19 nt, Artificial Sequence
  Description of Artificial Sequence: Synthetic oligonucleotide
uuauugaaaugcccacagg

SEQ ID NO: 2208547 - RNA, 19 nt, Artificial Sequence
  Description of Artificial Sequence: Synthetic oligonucleotide
gaaauccagaaauaucaac

SEQ ID NO: 2208548 - RNA, 19 nt, Artificial Sequence
  Description of Artificial Sequence: Synthetic oligonucleotide
uaaguuguuuuaaagucau

SEQ ID NO: 2208549 - RNA, 19 nt, Artificial Sequence
  Description of Artificial Sequence: Synthetic oligonucleotide
aacuccaacucuuuuguaa

SEQ ID NO: 2208550 - RNA, 19 nt, Artificial Sequence
  Description of Artificial Sequence: Synthetic oligonucleotide
ucacuauacauaaucuuuc

SEQ ID NO: 2208551 - RNA, 19 nt, Artificial Sequence
  Description of Artificial Sequence: Synthetic oligonucleotide
aaugcauaaucugcaauca

SEQ ID NO: 2208552 - RNA, 19 nt, Artificial Sequence
  Description of Artificial Sequence: Synthetic oligonucleotide
auuaacugccaacagugca

SEQ ID NO: 2208553 - RNA, 19 nt, Artificial Sequence
  Description of Artificial Sequence: Synthetic oligonucleotide
acauuaucaaugaaauuuc

SEQ ID NO: 2208554 - RNA, 19 nt, Artificial Sequence
  Description of Artificial Sequence: Synthetic oligonucleotide
uccucuuuguauaacucca

SEQ ID NO: 2208555 - RNA, 19 nt, Artificial Sequence
  Description of Artificial Sequence: Synthetic oligonucleotide
auccagaaauaucaacaac

SEQ ID NO: 2208556 - RNA, 19 nt, Artificial Sequence
  Description of Artificial Sequence: Synthetic oligonucleotide
uuccuucuaucaaaccugg

SEQ ID NO: 2208557 - RNA, 19 nt, Artificial Sequence
  Description of Artificial Sequence: Synthetic oligonucleotide
cagucuuuuccuuuggagc

SEQ ID NO: 2208558 - RNA, 19 nt, Artificial Sequence
  Description of Artificial Sequence: Synthetic oligonucleotide
agguaagaaauuuguaugu

SEQ ID NO: 2208559 - RNA, 19 nt, Artificial Sequence
  Description of Artificial Sequence: Synthetic oligonucleotide
gauggggaugauauguugg

SEQ ID NO: 2208560 - RNA, 19 nt, Artificial Sequence
  Description of Artificial Sequence: Synthetic oligonucleotide
aggaauuuguggccauucc

SEQ ID NO: 2208561 - RNA, 19 nt, Artificial Sequence
  Description of Artificial Sequence: Synthetic oligonucleotide
aaaugcuugaggaauuugu

SEQ ID NO: 2208562 - RNA, 19 nt, Artificial Sequence
  Description of Artificial Sequence: Synthetic oligonucleotide
aucaguuauugaaaugccc

SEQ ID NO: 2208563 - RNA, 19 nt, Artificial Sequence
  Description of Artificial Sequence: Synthetic oligonucleotide
gaaauuuguauguaauuua

SEQ ID NO: 2208564 - RNA, 19 nt, Artificial Sequence
  Description of Artificial Sequence: Synthetic oligonucleotide
uacauaaucuuuccaaguu

SEQ ID NO: 2208565 - RNA, 19 nt, Artificial Sequence
  Description of Artificial Sequence: Synthetic oligonucleotide
agucuuacauuaucaauga

SEQ ID NO: 2208566 - RNA, 19 nt, Artificial Sequence
  Description of Artificial Sequence: Synthetic oligonucleotide
aguucgucaaguuuuacuu

SEQ ID NO: 2208567 - RNA, 19 nt, Artificial Sequence
  Description of Artificial Sequence: Synthetic oligonucleotide
aaacgaggguaacccauuc

SEQ ID NO: 2208568 - RNA, 19 nt, Artificial Sequence
  Description of Artificial Sequence: Synthetic oligonucleotide
uacaacccagacaucgccg

SEQ ID NO: 2208569 - RNA, 19 nt, Artificial Sequence
  Description of Artificial Sequence: Synthetic oligonucleotide
aauccuacuaggccuacau

SEQ ID NO: 2208570 - RNA, 19 nt, Artificial Sequence
  Description of Artificial Sequence: Synthetic oligonucleotide
acagucuuuuccuuuggag

SEQ ID NO: 2208571 - RNA, 19 nt, Artificial Sequence
  Description of Artificial Sequence: Synthetic oligonucleotide
aguuacagaagaaagcuga

SEQ ID NO: 2208572 - RNA, 19 nt, Artificial Sequence
  Description of Artificial Sequence: Synthetic oligonucleotide
accaugagcgcgcaaacag

SEQ ID NO: 2208573 - RNA, 19 nt, Artificial Sequence
  Description of Artificial Sequence: Synthetic oligonucleotide
uuuuccagcauuugggaau

SEQ ID NO: 2208574 - RNA, 19 nt, Artificial Sequence
  Description of Artificial Sequence: Synthetic oligonucleotide
aagagucuuacauuaucaa

SEQ ID NO: 2208575 - RNA, 19 nt, Artificial Sequence
  Description of Artificial Sequence: Synthetic oligonucleotide
cucucuaaaugcuugagga

SEQ ID NO: 2208576 - RNA, 19 nt, Artificial Sequence
  Description of Artificial Sequence: Synthetic oligonucleotide
auuuccauacugucuccac

SEQ ID NO: 2208577 - RNA, 19 nt, Artificial Sequence
  Description of Artificial Sequence: Synthetic oligonucleotide
aaugcuugaggaauuugug

SEQ ID NO: 2208578 - RNA, 19 nt, Artificial Sequence
  Description of Artificial Sequence: Synthetic oligonucleotide
ugggaauccuacuaggccu

SEQ ID NO: 2208579 - RNA, 19 nt, Artificial Sequence
  Description of Artificial Sequence: Synthetic oligonucleotide
ugagcgcgcaaacaggcag

SEQ ID NO: 2208580 - RNA, 19 nt, Artificial Sequence
  Description of Artificial Sequence: Synthetic oligonucleotide
ucuuuccaaguucaggccu

SEQ ID NO: 2208581 - RNA, 19 nt, Artificial Sequence
  Description of Artificial Sequence: Synthetic oligonucleotide
aagaggauuuuccagcauu

SEQ ID NO: 2208582 - RNA, 19 nt, Artificial Sequence
  Description of Artificial Sequence: Synthetic oligonucleotide
uaccauuuucaucaguuau

SEQ ID NO: 2208583 - RNA, 19 nt, Artificial Sequence
  Description of Artificial Sequence: Synthetic oligonucleotide
uuaguguuguaaaugcaua

SEQ ID NO: 2208584 - RNA, 19 nt, Artificial Sequence
  Description of Artificial Sequence: Synthetic oligonucleotide
uuauugaguucuccuauaa

SEQ ID NO: 2208585 - RNA, 19 nt, Artificial Sequence
  Description of Artificial Sequence: Synthetic oligonucleotide
uuguauaacuccaacucuu

SEQ ID NO: 2208586 - RNA, 19 nt, Artificial Sequence
  Description of Artificial Sequence: Synthetic oligonucleotide
uauaguuucaaaggcaguu

SEQ ID NO: 2208587 - RNA, 19 nt, Artificial Sequence
  Description of Artificial Sequence: Synthetic oligonucleotide
gaauuacuugcuucuggcc

SEQ ID NO: 2208588 - RNA, 19 nt, Artificial Sequence
  Description of Artificial Sequence: Synthetic oligonucleotide
caucuuauuaacugccaac

SEQ ID NO: 2208589 - RNA, 19 nt, Artificial Sequence
  Description of Artificial Sequence: Synthetic oligonucleotide
uuguaagaaguauuauagu

SEQ ID NO: 2208590 - RNA, 19 nt, Artificial Sequence
  Description of Artificial Sequence: Synthetic oligonucleotide
uccuauaacuuuaccauuu

SEQ ID NO: 2208591 - RNA, 19 nt, Artificial Sequence
  Description of Artificial Sequence: Synthetic oligonucleotide
ugaaaugcccacaggcaca

SEQ ID NO: 2208592 - RNA, 19 nt, Artificial Sequence
  Description of Artificial Sequence: Synthetic oligonucleotide
ucaaggugaauuacuugcu

SEQ ID NO: 2208593 - RNA, 19 nt, Artificial Sequence
  Description of Artificial Sequence: Synthetic oligonucleotide
caucaguuauugaaaugcc

SEQ ID NO: 2208594 - RNA, 19 nt, Artificial Sequence
  Description of Artificial Sequence: Synthetic oligonucleotide
cuuacauuaucaaugaaau

SEQ ID NO: 2208595 - RNA, 19 nt, Artificial Sequence
  Description of Artificial Sequence: Synthetic oligonucleotide
aaguucaggccuuaguguu

SEQ ID NO: 2208596 - RNA, 19 nt, Artificial Sequence
  Description of Artificial Sequence: Synthetic oligonucleotide
ugaaauccagaaauaucaa

SEQ ID NO: 2208597 - RNA, 19 nt, Artificial Sequence
  Description of Artificial Sequence: Synthetic oligonucleotide
uacuaggccuacaucagcu

SEQ ID NO: 2208598 - RNA, 19 nt, Artificial Sequence
  Description of Artificial Sequence: Synthetic oligonucleotide
gaugauauguuggaacuuc

SEQ ID NO: 2208599 - RNA, 19 nt, Artificial Sequence
  Description of Artificial Sequence: Synthetic oligonucleotide
cauuugggaauccuacuag

SEQ ID NO: 2208600 - RNA, 19 nt, Artificial Sequence
  Description of Artificial Sequence: Synthetic oligonucleotide
cauaaucugcaaucacagg

SEQ ID NO: 2208601 - RNA, 19 nt, Artificial Sequence
  Description of Artificial Sequence: Synthetic oligonucleotide
caugagcgcgcaaacaggc

SEQ ID NO: 2208602 - RNA, 19 nt, Artificial Sequence
  Description of Artificial Sequence: Synthetic oligonucleotide
uuuagcaaccagaauucua

SEQ ID NO: 2208603 - RNA, 19 nt, Artificial Sequence
  Description of Artificial Sequence: Synthetic oligonucleotide
agaaagcugaaauccagaa

SEQ ID NO: 2208604 - RNA, 19 nt, Artificial Sequence
  Description of Artificial Sequence: Synthetic oligonucleotide
agcaaccagaauucuaucu

SEQ ID NO: 2208605 - RNA, 19 nt, Artificial Sequence
  Description of Artificial Sequence: Synthetic oligonucleotide
guuuuacuugggcaucugg

SEQ ID NO: 2208606 - RNA, 19 nt, Artificial Sequence
  Description of Artificial Sequence: Synthetic oligonucleotide
ggauuuuccagcauuuggg

SEQ ID NO: 2208607 - RNA, 19 nt, Artificial Sequence
  Description of Artificial Sequence: Synthetic oligonucleotide
agaaguauuauaguuucaa

SEQ ID NO: 2208608 - RNA, 19 nt, Artificial Sequence
  Description of Artificial Sequence: Synthetic oligonucleotide
ugauauguuggaacuucac

SEQ ID NO: 2208609 - RNA, 19 nt, Artificial Sequence
  Description of Artificial Sequence: Synthetic oligonucleotide
gaagagucuuacauuauca

SEQ ID NO: 2208610 - RNA, 19 nt, Artificial Sequence
  Description of Artificial Sequence: Synthetic oligonucleotide
guguuguaaaugcauaauc

SEQ ID NO: 2208611 - RNA, 19 nt, Artificial Sequence
  Description of Artificial Sequence: Synthetic oligonucleotide
uuucaaagguaagaaauuu

SEQ ID NO: 2208612 - RNA, 19 nt, Artificial Sequence
  Description of Artificial Sequence: Synthetic oligonucleotide
gucaaguuuuacuugggca

SEQ ID NO: 2208613 - RNA, 19 nt, Artificial Sequence
  Description of Artificial Sequence: Synthetic oligonucleotide
uuauaguuucaaaggcagu

SEQ ID NO: 2208614 - RNA, 19 nt, Artificial Sequence
  Description of Artificial Sequence: Synthetic oligonucleotide
gucugguucucucuaaaug

SEQ ID NO: 2208615 - RNA, 19 nt, Artificial Sequence
  Description of Artificial Sequence: Synthetic oligonucleotide
uaacucggcuguuugcucc

SEQ ID NO: 2208616 - RNA, 19 nt, Artificial Sequence
  Description of Artificial Sequence: Synthetic oligonucleotide
uaguguuguaaaugcauaa

SEQ ID NO: 2208617 - RNA, 19 nt, Artificial Sequence
  Description of Artificial Sequence: Synthetic oligonucleotide
uuaagucaaggugaauuac

SEQ ID NO: 2208618 - RNA, 19 nt, Artificial Sequence
  Description of Artificial Sequence: Synthetic oligonucleotide
ucuaaaugcuugaggaauu

SEQ ID NO: 2208619 - RNA, 19 nt, Artificial Sequence
  Description of Artificial Sequence: Synthetic oligonucleotide
acgaggguaacccauucca

SEQ ID NO: 2208620 - RNA, 19 nt, Artificial Sequence
  Description of Artificial Sequence: Synthetic oligonucleotide
ucgucaaguuuuacuuggg

SEQ ID NO: 2208621 - RNA, 19 nt, Artificial Sequence
  Description of Artificial Sequence: Synthetic oligonucleotide
ugcaguuccucuuuguaua

SEQ ID NO: 2208622 - RNA, 19 nt, Artificial Sequence
  Description of Artificial Sequence: Synthetic oligonucleotide
auuccuuuguucaugugug

SEQ ID NO: 2208623 - RNA, 19 nt, Artificial Sequence
  Description of Artificial Sequence: Synthetic oligonucleotide
agucaaggugaauuacuug

SEQ ID NO: 2208624 - RNA, 19 nt, Artificial Sequence
  Description of Artificial Sequence: Synthetic oligonucleotide
uuuggugaagagucuuaca

SEQ ID NO: 2208625 - RNA, 19 nt, Artificial Sequence
  Description of Artificial Sequence: Synthetic oligonucleotide
uuacuugggcaucuggcaa

SEQ ID NO: 2208626 - RNA, 19 nt, Artificial Sequence
  Description of Artificial Sequence: Synthetic oligonucleotide
agugcacuaacucggcugu

SEQ ID NO: 2208627 - RNA, 19 nt, Artificial Sequence
  Description of Artificial Sequence: Synthetic oligonucleotide
cuacaacccagacaucgcc

SEQ ID NO: 2208628 - RNA, 19 nt, Artificial Sequence
  Description of Artificial Sequence: Synthetic oligonucleotide
uuugcaugggacacccgac

SEQ ID NO: 2208629 - RNA, 19 nt, Artificial Sequence
  Description of Artificial Sequence: Synthetic oligonucleotide
uguauaacuccaacucuuu

SEQ ID NO: 2208630 - RNA, 19 nt, Artificial Sequence
  Description of Artificial Sequence: Synthetic oligonucleotide
augugugcuuccuucuauc

SEQ ID NO: 2208631 - RNA, 19 nt, Artificial Sequence
  Description of Artificial Sequence: Synthetic oligonucleotide
ucuggccuuucaaagguaa

SEQ ID NO: 2208632 - RNA, 19 nt, Artificial Sequence
  Description of Artificial Sequence: Synthetic oligonucleotide
aauuuaccaccaaggccac

SEQ ID NO: 2208633 - RNA, 19 nt, Artificial Sequence
  Description of Artificial Sequence: Synthetic oligonucleotide
cagcuauaacuuuuaaguc

SEQ ID NO: 2208634 - RNA, 19 nt, Artificial Sequence
  Description of Artificial Sequence: Synthetic oligonucleotide
uacugucuccaccacgcgc

SEQ ID NO: 2208635 - RNA, 19 nt, Artificial Sequence
  Description of Artificial Sequence: Synthetic oligonucleotide
aggguaacccauuccacca

SEQ ID NO: 2208636 - RNA, 19 nt, Artificial Sequence
  Description of Artificial Sequence: Synthetic oligonucleotide
ucucuaaaugcuugaggaa

SEQ ID NO: 2208637 - RNA, 19 nt, Artificial Sequence
  Description of Artificial Sequence: Synthetic oligonucleotide
cagcauuugggaauccuac

SEQ ID NO: 2208638 - RNA, 19 nt, Artificial Sequence
  Description of Artificial Sequence: Synthetic oligonucleotide
caguuauugaaaugcccac

SEQ ID NO: 2208639 - RNA, 19 nt, Artificial Sequence
  Description of Artificial Sequence: Synthetic oligonucleotide
uuaugggcuacaacccaga

SEQ ID NO: 2208640 - RNA, 19 nt, Artificial Sequence
  Description of Artificial Sequence: Synthetic oligonucleotide
ccuucagugcacuaacucg

SEQ ID NO: 2208641 - RNA, 19 nt, Artificial Sequence
  Description of Artificial Sequence: Synthetic oligonucleotide
agacaucgccgccucuucc

SEQ ID NO: 2208642 - RNA, 19 nt, Artificial Sequence
  Description of Artificial Sequence: Synthetic oligonucleotide
cuacuccagccacaaaccg

SEQ ID NO: 2208643 - RNA, 19 nt, Artificial Sequence
  Description of Artificial Sequence: Synthetic oligonucleotide
uucagugcacuaacucggc

SEQ ID NO: 2208644 - RNA, 19 nt, Artificial Sequence
  Description of Artificial Sequence: Synthetic oligonucleotide
aaaccugggacuguuuaaa

SEQ ID NO: 2208645 - RNA, 19 nt, Artificial Sequence
  Description of Artificial Sequence: Synthetic oligonucleotide
cucuuuguauaacuccaac

SEQ ID NO: 2208646 - RNA, 19 nt, Artificial Sequence
  Description of Artificial Sequence: Synthetic oligonucleotide
guucgucaaguuuuacuug

SEQ ID NO: 2208647 - RNA, 19 nt, Artificial Sequence
  Description of Artificial Sequence: Synthetic oligonucleotide
gaaaugcccacaggcacag

SEQ ID NO: 2208648 - RNA, 19 nt, Artificial Sequence
  Description of Artificial Sequence: Synthetic oligonucleotide
uuacauuaucaaugaaauu

SEQ ID NO: 2208649 - RNA, 19 nt, Artificial Sequence
  Description of Artificial Sequence: Synthetic oligonucleotide
aaucugcaaucacaggcuu

SEQ ID NO: 2208650 - RNA, 19 nt, Artificial Sequence
  Description of Artificial Sequence: Synthetic oligonucleotide
aguuauugaaaugcccaca

SEQ ID NO: 2208651 - RNA, 19 nt, Artificial Sequence
  Description of Artificial Sequence: Synthetic oligonucleotide
cacccgacuuaguaaagag

SEQ ID NO: 2208652 - RNA, 19 nt, Artificial Sequence
  Description of Artificial Sequence: Synthetic oligonucleotide
auuuuccagcauuugggaa

SEQ ID NO: 2208653 - RNA, 19 nt, Artificial Sequence
  Description of Artificial Sequence: Synthetic oligonucleotide
gcauaaucugcaaucacag

SEQ ID NO: 2208654 - RNA, 19 nt, Artificial Sequence
  Description of Artificial Sequence: Synthetic oligonucleotide
gccuuaguguuguaaaugc

SEQ ID NO: 2208655 - RNA, 19 nt, Artificial Sequence
  Description of Artificial Sequence: Synthetic oligonucleotide
acuaacucggcuguuugcu

SEQ ID NO: 2208656 - RNA, 19 nt, Artificial Sequence
  Description of Artificial Sequence: Synthetic oligonucleotide
aaagaggauuuuccagcau

SEQ ID NO: 2208657 - RNA, 19 nt, Artificial Sequence
  Description of Artificial Sequence: Synthetic oligonucleotide
uuuguucaugugugcuucc

SEQ ID NO: 2208658 - RNA, 19 nt, Artificial Sequence
  Description of Artificial Sequence: Synthetic oligonucleotide
uccuucuaucaaaccuggg

SEQ ID NO: 2208659 - RNA, 19 nt, Artificial Sequence
  Description of Artificial Sequence: Synthetic oligonucleotide
uuaccauuuucaucaguua

SEQ ID NO: 2208660 - RNA, 19 nt, Artificial Sequence
  Description of Artificial Sequence: Synthetic oligonucleotide
acaggcuuugcaugggaca

SEQ ID NO: 2208661 - RNA, 19 nt, Artificial Sequence
  Description of Artificial Sequence: Synthetic oligonucleotide
uggccuuucaaagguaaga

SEQ ID NO: 2208662 - RNA, 19 nt, Artificial Sequence
  Description of Artificial Sequence: Synthetic oligonucleotide
ugggacacccgacuuagua

SEQ ID NO: 2208663 - RNA, 19 nt, Artificial Sequence
  Description of Artificial Sequence: Synthetic oligonucleotide
cagugcacuaacucggcug

SEQ ID NO: 2208664 - RNA, 19 nt, Artificial Sequence
  Description of Artificial Sequence: Synthetic oligonucleotide
gaguuacagaagaaagcug

SEQ ID NO: 2208665 - RNA, 19 nt, Artificial Sequence
  Description of Artificial Sequence: Synthetic oligonucleotide
aacucuuuuguaagaagua

SEQ ID NO: 2208666 - RNA, 19 nt, Artificial Sequence
  Description of Artificial Sequence: Synthetic oligonucleotide
uucugaggauauuuguuuu

SEQ ID NO: 2208667 - RNA, 19 nt, Artificial Sequence
  Description of Artificial Sequence: Synthetic oligonucleotide
cuucuuuauugaguucucc

SEQ ID NO: 2208668 - RNA, 19 nt, Artificial Sequence
  Description of Artificial Sequence: Synthetic oligonucleotide
acuuuaccauuuucaucag

SEQ ID NO: 2208669 - RNA, 19 nt, Artificial Sequence
  Description of Artificial Sequence: Synthetic oligonucleotide
cuuugcaugggacacccga

SEQ ID NO: 2208670 - RNA, 19 nt, Artificial Sequence
  Description of Artificial Sequence: Synthetic oligonucleotide
gccuacaucagcuauaacu

SEQ ID NO: 2208671 - RNA, 19 nt, Artificial Sequence
  Description of Artificial Sequence: Synthetic oligonucleotide
uugcaugggacacccgacu

SEQ ID NO: 2208672 - RNA, 19 nt, Artificial Sequence
  Description of Artificial Sequence: Synthetic oligonucleotide
auccuacuaggccuacauc

SEQ ID NO: 2208673 - RNA, 19 nt, Artificial Sequence
  Description of Artificial Sequence: Synthetic oligonucleotide
cuacuaggccuacaucagc

SEQ ID NO: 2208674 - RNA, 19 nt, Artificial Sequence
  Description of Artificial Sequence: Synthetic oligonucleotide
uaaacgaggguaacccauu

SEQ ID NO: 2208675 - RNA, 19 nt, Artificial Sequence
  Description of Artificial Sequence: Synthetic oligonucleotide
ccaaguucaggccuuagug

SEQ ID NO: 2208676 - RNA, 19 nt, Artificial Sequence
  Description of Artificial Sequence: Synthetic oligonucleotide
uaugggcuacaacccagac

SEQ ID NO: 2208677 - RNA, 19 nt, Artificial Sequence
  Description of Artificial Sequence: Synthetic oligonucleotide
uccuuuguucaugugugcu

SEQ ID NO: 2208678 - RNA, 19 nt, Artificial Sequence
  Description of Artificial Sequence: Synthetic oligonucleotide
cuuuggugaagagucuuac

SEQ ID NO: 2208679 - RNA, 19 nt, Artificial Sequence
  Description of Artificial Sequence: Synthetic oligonucleotide
aguguuguaaaugcauaau

SEQ ID NO: 2208680 - RNA, 19 nt, Artificial Sequence
  Description of Artificial Sequence: Synthetic oligonucleotide
caugggacacccgacuuag

SEQ ID NO: 2208681 - RNA, 19 nt, Artificial Sequence
  Description of Artificial Sequence: Synthetic oligonucleotide
gcagaaaaucugcagggug

SEQ ID NO: 2208682 - RNA, 19 nt, Artificial Sequence
  Description of Artificial Sequence: Synthetic oligonucleotide
aagaaguauuauaguuuca

SEQ ID NO: 2208683 - RNA, 19 nt, Artificial Sequence
  Description of Artificial Sequence: Synthetic oligonucleotide
agggauuucacagucuuuu

SEQ ID NO: 2208684 - RNA, 19 nt, Artificial Sequence
  Description of Artificial Sequence: Synthetic oligonucleotide
agcugaaauccagaaauau

SEQ ID NO: 2208685 - RNA, 19 nt, Artificial Sequence
  Description of Artificial Sequence: Synthetic oligonucleotide
gacuguuuaaaaucacuau

SEQ ID NO: 2208686 - RNA, 19 nt, Artificial Sequence
  Description of Artificial Sequence: Synthetic oligonucleotide
cuuaguguuguaaaugcau

SEQ ID NO: 2208687 - RNA, 19 nt, Artificial Sequence
  Description of Artificial Sequence: Synthetic oligonucleotide
caacucuuuuguaagaagu

SEQ ID NO: 2208688 - RNA, 19 nt, Artificial Sequence
  Description of Artificial Sequence: Synthetic oligonucleotide
agaaaaucugcagggugcu

SEQ ID NO: 2208689 - RNA, 19 nt, Artificial Sequence
  Description of Artificial Sequence: Synthetic oligonucleotide
augggcuacaacccagaca

SEQ ID NO: 2208690 - RNA, 19 nt, Artificial Sequence
  Description of Artificial Sequence: Synthetic oligonucleotide
cacaaaccguuucugagga

SEQ ID NO: 2208691 - RNA, 19 nt, Artificial Sequence
  Description of Artificial Sequence: Synthetic oligonucleotide
auaaucuuuccaaguucag

SEQ ID NO: 2208692 - RNA, 19 nt, Artificial Sequence
  Description of Artificial Sequence: Synthetic oligonucleotide
auacugucuccaccacgcg

SEQ ID NO: 2208693 - RNA, 19 nt, Artificial Sequence
  Description of Artificial Sequence: Synthetic oligonucleotide
uggugaagagucuuacauu

SEQ ID NO: 2208694 - RNA, 19 nt, Artificial Sequence
  Description of Artificial Sequence: Synthetic oligonucleotide
ucagugcacuaacucggcu

SEQ ID NO: 2208695 - RNA, 19 nt, Artificial Sequence
  Description of Artificial Sequence: Synthetic oligonucleotide
ccacaaaccguuucugagg

SEQ ID NO: 2208696 - RNA, 19 nt, Artificial Sequence
  Description of Artificial Sequence: Synthetic oligonucleotide
cacuaacucggcuguuugc

SEQ ID NO: 2208697 - RNA, 19 nt, Artificial Sequence
  Description of Artificial Sequence: Synthetic oligonucleotide
ugcagaaaaucugcagggu

SEQ ID NO: 2208698 - RNA, 19 nt, Artificial Sequence
  Description of Artificial Sequence: Synthetic oligonucleotide
uccuccuuuggugaagagu

SEQ ID NO: 2208699 - RNA, 19 nt, Artificial Sequence
  Description of Artificial Sequence: Synthetic oligonucleotide
acaucgccgccucuuccac

SEQ ID NO: 2208700 - RNA, 19 nt, Artificial Sequence
  Description of Artificial Sequence: Synthetic oligonucleotide
cauuccuuuguucaugugu

SEQ ID NO: 2208701 - RNA, 19 nt, Artificial Sequence
  Description of Artificial Sequence: Synthetic oligonucleotide
acccgacuuaguaaagagg

SEQ ID NO: 2208702 - RNA, 19 nt, Artificial Sequence
  Description of Artificial Sequence: Synthetic oligonucleotide
cccgacuuaguaaagagga

SEQ ID NO: 2208703 - RNA, 19 nt, Artificial Sequence
  Description of Artificial Sequence: Synthetic oligonucleotide
aaaccguuucugaggauau

SEQ ID NO: 2208704 - RNA, 19 nt, Artificial Sequence
  Description of Artificial Sequence: Synthetic oligonucleotide
guaagaaguauuauaguuu

SEQ ID NO: 2208705 - RNA, 19 nt, Artificial Sequence
  Description of Artificial Sequence: Synthetic oligonucleotide
uugcuccuacuccagccac

SEQ ID NO: 2208706 - RNA, 19 nt, Artificial Sequence
  Description of Artificial Sequence: Synthetic oligonucleotide
aguuucaaaggcaguucug

SEQ ID NO: 2208707 - RNA, 19 nt, Artificial Sequence
  Description of Artificial Sequence: Synthetic oligonucleotide
gacaucgccgccucuucca

SEQ ID NO: 2208708 - RNA, 19 nt, Artificial Sequence
  Description of Artificial Sequence: Synthetic oligonucleotide
uaggccuacaucagcuaua

SEQ ID NO: 2208709 - RNA, 19 nt, Artificial Sequence
  Description of Artificial Sequence: Synthetic oligonucleotide
gguucucucuaaaugcuug

SEQ ID NO: 2208710 - RNA, 19 nt, Artificial Sequence
  Description of Artificial Sequence: Synthetic oligonucleotide
caaguuuuacuugggcauc

SEQ ID NO: 2208711 - RNA, 19 nt, Artificial Sequence
  Description of Artificial Sequence: Synthetic oligonucleotide
caggcuuugcaugggacac

SEQ ID NO: 2208712 - RNA, 19 nt, Artificial Sequence
  Description of Artificial Sequence: Synthetic oligonucleotide
aacccagacaucgccgccu

SEQ ID NO: 2208713 - RNA, 19 nt, Artificial Sequence
  Description of Artificial Sequence: Synthetic oligonucleotide
cuaacucggcuguuugcuc

SEQ ID NO: 2208714 - RNA, 19 nt, Artificial Sequence
  Description of Artificial Sequence: Synthetic oligonucleotide
gcuauaacuuuuaagucaa

SEQ ID NO: 2208715 - RNA, 19 nt, Artificial Sequence
  Description of Artificial Sequence: Synthetic oligonucleotide
guuucaaaggcaguucugu

SEQ ID NO: 2208716 - RNA, 19 nt, Artificial Sequence
  Description of Artificial Sequence: Synthetic oligonucleotide
uuuuccuuuggagcccuuc

SEQ ID NO: 2208717 - RNA, 19 nt, Artificial Sequence
  Description of Artificial Sequence: Synthetic oligonucleotide
caucaguucgucaaguuuu

SEQ ID NO: 2208718 - RNA, 19 nt, Artificial Sequence
  Description of Artificial Sequence: Synthetic oligonucleotide
ugcaugggacacccgacuu

SEQ ID NO: 2208719 - RNA, 19 nt, Artificial Sequence
  Description of Artificial Sequence: Synthetic oligonucleotide
auuuaccaccaaggccacc

SEQ ID NO: 2208720 - RNA, 19 nt, Artificial Sequence
  Description of Artificial Sequence: Synthetic oligonucleotide
gagcgcgcaaacaggcagg

SEQ ID NO: 2208721 - RNA, 19 nt, Artificial Sequence
  Description of Artificial Sequence: Synthetic oligonucleotide
cccuaaacgaggguaaccc

SEQ ID NO: 2208722 - RNA, 19 nt, Artificial Sequence
  Description of Artificial Sequence: Synthetic oligonucleotide
ccuacuaggccuacaucag

SEQ ID NO: 2208723 - RNA, 19 nt, Artificial Sequence
  Description of Artificial Sequence: Synthetic oligonucleotide
augauauguuggaacuuca

SEQ ID NO: 2208724 - RNA, 19 nt, Artificial Sequence
  Description of Artificial Sequence: Synthetic oligonucleotide
gacuuaguaaagaggauuu

SEQ ID NO: 2208725 - RNA, 19 nt, Artificial Sequence
  Description of Artificial Sequence: Synthetic oligonucleotide
uaucaaaccugggacuguu

SEQ ID NO: 2208726 - RNA, 19 nt, Artificial Sequence
  Description of Artificial Sequence: Synthetic oligonucleotide
accguuucugaggauauuu

SEQ ID NO: 2208727 - RNA, 19 nt, Artificial Sequence
  Description of Artificial Sequence: Synthetic oligonucleotide
aggccuuaguguuguaaau

SEQ ID NO: 2208728 - RNA, 19 nt, Artificial Sequence
  Description of Artificial Sequence: Synthetic oligonucleotide
aacugccaacagugcaggu

SEQ ID NO: 2208729 - RNA, 19 nt, Artificial Sequence
  Description of Artificial Sequence: Synthetic oligonucleotide
gaaaaucugcagggugcug

SEQ ID NO: 2208730 - RNA, 19 nt, Artificial Sequence
  Description of Artificial Sequence: Synthetic oligonucleotide
ucggcuguuugcuccuacu

SEQ ID NO: 2208731 - RNA, 19 nt, Artificial Sequence
  Description of Artificial Sequence: Synthetic oligonucleotide
gaauuuguggccauuccuu

SEQ ID NO: 2208732 - RNA, 19 nt, Artificial Sequence
  Description of Artificial Sequence: Synthetic oligonucleotide
aggcaguucuguauggagu

SEQ ID NO: 2208733 - RNA, 19 nt, Artificial Sequence
  Description of Artificial Sequence: Synthetic oligonucleotide
cuaaacgaggguaacccau

SEQ ID NO: 2208734 - RNA, 19 nt, Artificial Sequence
  Description of Artificial Sequence: Synthetic oligonucleotide
guauguaauuuaccaccaa

SEQ ID NO: 2208735 - RNA, 19 nt, Artificial Sequence
  Description of Artificial Sequence: Synthetic oligonucleotide
caaguucaggccuuagugu

SEQ ID NO: 2208736 - RNA, 19 nt, Artificial Sequence
  Description of Artificial Sequence: Synthetic oligonucleotide
aagcugaaauccagaaaua

SEQ ID NO: 2208737 - RNA, 19 nt, Artificial Sequence
  Description of Artificial Sequence: Synthetic oligonucleotide
gggaugauauguuggaacu

SEQ ID NO: 2208738 - RNA, 19 nt, Artificial Sequence
  Description of Artificial Sequence: Synthetic oligonucleotide
acccagacaucgccgccuc

SEQ ID NO: 2208739 - RNA, 19 nt, Artificial Sequence
  Description of Artificial Sequence: Synthetic oligonucleotide
caggccuuaguguuguaaa

SEQ ID NO: 2208740 - RNA, 19 nt, Artificial Sequence
  Description of Artificial Sequence: Synthetic oligonucleotide
agaggauuuuccagcauuu

SEQ ID NO: 2208741 - RNA, 19 nt, Artificial Sequence
  Description of Artificial Sequence: Synthetic oligonucleotide
acacccgacuuaguaaaga

SEQ ID NO: 2208742 - RNA, 19 nt, Artificial Sequence
  Description of Artificial Sequence: Synthetic oligonucleotide
ccaugagcgcgcaaacagg

SEQ ID NO: 2208743 - RNA, 19 nt, Artificial Sequence
  Description of Artificial Sequence: Synthetic oligonucleotide
caaaccguuucugaggaua

SEQ ID NO: 2208744 - RNA, 19 nt, Artificial Sequence
  Description of Artificial Sequence: Synthetic oligonucleotide
aguucaggccuuaguguug

SEQ ID NO: 2208745 - RNA, 19 nt, Artificial Sequence
  Description of Artificial Sequence: Synthetic oligonucleotide
acuccagccacaaaccguu

SEQ ID NO: 2208746 - RNA, 19 nt, Artificial Sequence
  Description of Artificial Sequence: Synthetic oligonucleotide
gucuuuuccuuuggagccc

SEQ ID NO: 2208747 - RNA, 19 nt, Artificial Sequence
  Description of Artificial Sequence: Synthetic oligonucleotide
aguuuuacuugggcaucug

SEQ ID NO: 2208748 - RNA, 19 nt, Artificial Sequence
  Description of Artificial Sequence: Synthetic oligonucleotide
uaacuccaacucuuuugua

SEQ ID NO: 2208749 - RNA, 19 nt, Artificial Sequence
  Description of Artificial Sequence: Synthetic oligonucleotide
cucuaaaugcuugaggaau

SEQ ID NO: 2208750 - RNA, 19 nt, Artificial Sequence
  Description of Artificial Sequence: Synthetic oligonucleotide
ccgcagcgcaccaugagcg

SEQ ID NO: 2208751 - RNA, 19 nt, Artificial Sequence
  Description of Artificial Sequence: Synthetic oligonucleotide
gaauucuaucuucuucuuu

SEQ ID NO: 2208752 - RNA, 19 nt, Artificial Sequence
  Description of Artificial Sequence: Synthetic oligonucleotide
acuuaguaaagaggauuuu

SEQ ID NO: 2208753 - RNA, 19 nt, Artificial Sequence
  Description of Artificial Sequence: Synthetic oligonucleotide
caaaccugggacuguuuaa

SEQ ID NO: 2208754 - RNA, 19 nt, Artificial Sequence
  Description of Artificial Sequence: Synthetic oligonucleotide
ggugaauuacuugcuucug

SEQ ID NO: 2208755 - RNA, 19 nt, Artificial Sequence
  Description of Artificial Sequence: Synthetic oligonucleotide
agugcagguuuugucugca

SEQ ID NO: 2208756 - RNA, 19 nt, Artificial Sequence
  Description of Artificial Sequence: Synthetic oligonucleotide
ggacacccgacuuaguaaa

SEQ ID NO: 2208757 - RNA, 19 nt, Artificial Sequence
  Description of Artificial Sequence: Synthetic oligonucleotide
ucaguucgucaaguuuuac

SEQ ID NO: 2208758 - RNA, 19 nt, Artificial Sequence
  Description of Artificial Sequence: Synthetic oligonucleotide
uucuggccuuucaaaggua

SEQ ID NO: 2208759 - RNA, 19 nt, Artificial Sequence
  Description of Artificial Sequence: Synthetic oligonucleotide
acuaggccuacaucagcua

SEQ ID NO: 2208760 - RNA, 19 nt, Artificial Sequence
  Description of Artificial Sequence: Synthetic oligonucleotide
ugcacuaacucggcuguuu

SEQ ID NO: 2208761 - RNA, 19 nt, Artificial Sequence
  Description of Artificial Sequence: Synthetic oligonucleotide
ggacuguuuaaaaucacua

SEQ ID NO: 2208762 - RNA, 19 nt, Artificial Sequence
  Description of Artificial Sequence: Synthetic oligonucleotide
cucuuuuguaagaaguauu

SEQ ID NO: 2208763 - RNA, 19 nt, Artificial Sequence
  Description of Artificial Sequence: Synthetic oligonucleotide
ccauacugucuccaccacg

SEQ ID NO: 2208764 - RNA, 19 nt, Artificial Sequence
  Description of Artificial Sequence: Synthetic oligonucleotide
caacccagacaucgccgcc

SEQ ID NO: 2208765 - RNA, 19 nt, Artificial Sequence
  Description of Artificial Sequence: Synthetic oligonucleotide
cagcgcaccaugagcgcgc

SEQ ID NO: 2208766 - RNA, 19 nt, Artificial Sequence
  Description of Artificial Sequence: Synthetic oligonucleotide
cuccaacucuuuuguaaga

SEQ ID NO: 2208767 - RNA, 19 nt, Artificial Sequence
  Description of Artificial Sequence: Synthetic oligonucleotide
agcugucugguucucucua

SEQ ID NO: 2208768 - RNA, 19 nt, Artificial Sequence
  Description of Artificial Sequence: Synthetic oligonucleotide
aaaugcccacaggcacagg

SEQ ID NO: 2208769 - RNA, 19 nt, Artificial Sequence
  Description of Artificial Sequence: Synthetic oligonucleotide
caguucgucaaguuuuacu

SEQ ID NO: 2208770 - RNA, 19 nt, Artificial Sequence
  Description of Artificial Sequence: Synthetic oligonucleotide
gcacuaacucggcuguuug

SEQ ID NO: 2208771 - RNA, 19 nt, Artificial Sequence
  Description of Artificial Sequence: Synthetic oligonucleotide
aggccuacaucagcuauaa

SEQ ID NO: 2208772 - RNA, 19 nt, Artificial Sequence
  Description of Artificial Sequence: Synthetic oligonucleotide
aguucuguauggaguuaca

SEQ ID NO: 2208773 - RNA, 19 nt, Artificial Sequence
  Description of Artificial Sequence: Synthetic oligonucleotide
acccgcagcgcaccaugag

SEQ ID NO: 2208774 - RNA, 19 nt, Artificial Sequence
  Description of Artificial Sequence: Synthetic oligonucleotide
gcacagggauuucacaguc

SEQ ID NO: 2208775 - RNA, 19 nt, Artificial Sequence
  Description of Artificial Sequence: Synthetic oligonucleotide
ggagcugcuucaucaguuc

SEQ ID NO: 2208776 - RNA, 19 nt, Artificial Sequence
  Description of Artificial Sequence: Synthetic oligonucleotide
gugcagguuuugucugcag

SEQ ID NO: 2208777 - RNA, 19 nt, Artificial Sequence
  Description of Artificial Sequence: Synthetic oligonucleotide
uuggagcccuucagugcac

SEQ ID NO: 2208778 - RNA, 19 nt, Artificial Sequence
  Description of Artificial Sequence: Synthetic oligonucleotide
caucgccgccucuuccacc

SEQ ID NO: 2208779 - RNA, 19 nt, Artificial Sequence
  Description of Artificial Sequence: Synthetic oligonucleotide
ccguuucugaggauauuug

SEQ ID NO: 2208780 - RNA, 19 nt, Artificial Sequence
  Description of Artificial Sequence: Synthetic oligonucleotide
aaguuguuuuaaagucaua

SEQ ID NO: 2208781 - RNA, 19 nt, Artificial Sequence
  Description of Artificial Sequence: Synthetic oligonucleotide
cgucaaguuuuacuugggc

SEQ ID NO: 2208782 - RNA, 19 nt, Artificial Sequence
  Description of Artificial Sequence: Synthetic oligonucleotide
cagacaucgccgccucuuc

SEQ ID NO: 2208783 - RNA, 19 nt, Artificial Sequence
  Description of Artificial Sequence: Synthetic oligonucleotide
gcuacaacccagacaucgc

SEQ ID NO: 2208784 - RNA, 19 nt, Artificial Sequence
  Description of Artificial Sequence: Synthetic oligonucleotide
caucagcuauaacuuuuaa

SEQ ID NO: 2208785 - RNA, 19 nt, Artificial Sequence
  Description of Artificial Sequence: Synthetic oligonucleotide
gaauccuacuaggccuaca

SEQ ID NO: 2208786 - RNA, 19 nt, Artificial Sequence
  Description of Artificial Sequence: Synthetic oligonucleotide
acaaaccguuucugaggau

SEQ ID NO: 2208787 - RNA, 19 nt, Artificial Sequence
  Description of Artificial Sequence: Synthetic oligonucleotide
cccuucagugcacuaacuc

SEQ ID NO: 2208788 - RNA, 19 nt, Artificial Sequence
  Description of Artificial Sequence: Synthetic oligonucleotide
ccaccuuuagcaaccagaa

SEQ ID NO: 2208789 - RNA, 19 nt, Artificial Sequence
  Description of Artificial Sequence: Synthetic oligonucleotide
guauaacuccaacucuuuu

SEQ ID NO: 2208790 - RNA, 19 nt, Artificial Sequence
  Description of Artificial Sequence: Synthetic oligonucleotide
caguuccucuuuguauaac

SEQ ID NO: 2208791 - RNA, 19 nt, Artificial Sequence
  Description of Artificial Sequence: Synthetic oligonucleotide
aucaguucgucaaguuuua

SEQ ID NO: 2208792 - RNA, 19 nt, Artificial Sequence
  Description of Artificial Sequence: Synthetic oligonucleotide
gagcccuucagugcacuaa

SEQ ID NO: 2208793 - RNA, 19 nt, Artificial Sequence
  Description of Artificial Sequence: Synthetic oligonucleotide
ccuuaguguuguaaaugca

SEQ ID NO: 2208794 - RNA, 19 nt, Artificial Sequence
  Description of Artificial Sequence: Synthetic oligonucleotide
gcagcgcaccaugagcgcg

SEQ ID NO: 2208795 - RNA, 19 nt, Artificial Sequence
  Description of Artificial Sequence: Synthetic oligonucleotide
gcaaccagaauucuaucuu

SEQ ID NO: 2208796 - RNA, 19 nt, Artificial Sequence
  Description of Artificial Sequence: Synthetic oligonucleotide
aaccguuucugaggauauu

SEQ ID NO: 2208797 - RNA, 19 nt, Artificial Sequence
  Description of Artificial Sequence: Synthetic oligonucleotide
ggccauuccuuuguucaug

SEQ ID NO: 2208798 - RNA, 19 nt, Artificial Sequence
  Description of Artificial Sequence: Synthetic oligonucleotide
agcgcgcaaacaggcagga

SEQ ID NO: 2208799 - RNA, 19 nt, Artificial Sequence
  Description of Artificial Sequence: Synthetic oligonucleotide
ggguaacccauuccaccac

SEQ ID NO: 2208800 - RNA, 19 nt, Artificial Sequence
  Description of Artificial Sequence: Synthetic oligonucleotide
cuaggccuacaucagcuau

SEQ ID NO: 2208801 - RNA, 19 nt, Artificial Sequence
  Description of Artificial Sequence: Synthetic oligonucleotide
cuccuauaacuuuaccauu

SEQ ID NO: 2208802 - RNA, 19 nt, Artificial Sequence
  Description of Artificial Sequence: Synthetic oligonucleotide
augagcgcgcaaacaggca

SEQ ID NO: 2208803 - RNA, 19 nt, Artificial Sequence
  Description of Artificial Sequence: Synthetic oligonucleotide
cuucaucaguucgucaagu

SEQ ID NO: 2208804 - RNA, 19 nt, Artificial Sequence
  Description of Artificial Sequence: Synthetic oligonucleotide
ccaucuuauuaacugccaa

SEQ ID NO: 2208805 - RNA, 19 nt, Artificial Sequence
  Description of Artificial Sequence: Synthetic oligonucleotide
ccuaaacgaggguaaccca

SEQ ID NO: 2208806 - RNA, 19 nt, Artificial Sequence
  Description of Artificial Sequence: Synthetic oligonucleotide
gggacuguuuaaaaucacu

SEQ ID NO: 2208807 - RNA, 19 nt, Artificial Sequence
  Description of Artificial Sequence: Synthetic oligonucleotide
cuuuagcaaccagaauucu

SEQ ID NO: 2208808 - RNA, 19 nt, Artificial Sequence
  Description of Artificial Sequence: Synthetic oligonucleotide
gguaacccauuccaccacu

SEQ ID NO: 2208809 - RNA, 19 nt, Artificial Sequence
  Description of Artificial Sequence: Synthetic oligonucleotide
gcgcaaacaggcaggacuc

SEQ ID NO: 2208810 - RNA, 19 nt, Artificial Sequence
  Description of Artificial Sequence: Synthetic oligonucleotide
gcaguuccucuuuguauaa

SEQ ID NO: 2208811 - RNA, 19 nt, Artificial Sequence
  Description of Artificial Sequence: Synthetic oligonucleotide
gcacccgcagcgcaccaug

SEQ ID NO: 2208812 - RNA, 19 nt, Artificial Sequence
  Description of Artificial Sequence: Synthetic oligonucleotide
caccaugagcgcgcaaaca

SEQ ID NO: 2208813 - RNA, 19 nt, Artificial Sequence
  Description of Artificial Sequence: Synthetic oligonucleotide
cacuuccuccuuuggugaa

SEQ ID NO: 2208814 - RNA, 19 nt, Artificial Sequence
  Description of Artificial Sequence: Synthetic oligonucleotide
ccccuaaacgaggguaacc

SEQ ID NO: 2208815 - RNA, 19 nt, Artificial Sequence
  Description of Artificial Sequence: Synthetic oligonucleotide
caccacuuccuccuuuggu

SEQ ID NO: 2208816 - RNA, 19 nt, Artificial Sequence
  Description of Artificial Sequence: Synthetic oligonucleotide
acgcgcacccgcagcgcac

SEQ ID NO: 2208817 - RNA, 19 nt, Artificial Sequence
  Description of Artificial Sequence: Synthetic oligonucleotide
gcugucugguucucucuaa

SEQ ID NO: 2208818 - RNA, 19 nt, Artificial Sequence
  Description of Artificial Sequence: Synthetic oligonucleotide
ccucuuuguauaacuccaa

SEQ ID NO: 2208819 - RNA, 19 nt, Artificial Sequence
  Description of Artificial Sequence: Synthetic oligonucleotide
cacgcgcacccgcagcgca

SEQ ID NO: 2208820 - RNA, 19 nt, Artificial Sequence
  Description of Artificial Sequence: Synthetic oligonucleotide
gcaugggacacccgacuua

SEQ ID NO: 2208821 - RNA, 19 nt, Artificial Sequence
  Description of Artificial Sequence: Synthetic oligonucleotide
cguuucugaggauauuugu

SEQ ID NO: 2208822 - RNA, 19 nt, Artificial Sequence
  Description of Artificial Sequence: Synthetic oligonucleotide
cgcgcaaacaggcaggacu

SEQ ID NO: 2208823 - RNA, 19 nt, Artificial Sequence
  Description of Artificial Sequence: Synthetic oligonucleotide
agcgcaccaugagcgcgca

SEQ ID NO: 2208824 - RNA, 19 nt, Artificial Sequence
  Description of Artificial Sequence: Synthetic oligonucleotide
gggaauccuacuaggccua

SEQ ID NO: 2208825 - RNA, 19 nt, Artificial Sequence
  Description of Artificial Sequence: Synthetic oligonucleotide
cacccgcagcgcaccauga

SEQ ID NO: 2208826 - RNA, 19 nt, Artificial Sequence
  Description of Artificial Sequence: Synthetic oligonucleotide
cggcuguuugcuccuacuc

SEQ ID NO: 2208827 - RNA, 19 nt, Artificial Sequence
  Description of Artificial Sequence: Synthetic oligonucleotide
caccuuuagcaaccagaau

SEQ ID NO: 2208828 - RNA, 19 nt, Artificial Sequence
  Description of Artificial Sequence: Synthetic oligonucleotide
augggacacccgacuuagu

SEQ ID NO: 2208829 - RNA, 19 nt, Artificial Sequence
  Description of Artificial Sequence: Synthetic oligonucleotide
ggaugauauguuggaacuu

SEQ ID NO: 2208830 - RNA, 19 nt, Artificial Sequence
  Description of Artificial Sequence: Synthetic oligonucleotide
ggccuacaucagcuauaac

SEQ ID NO: 2208831 - RNA, 19 nt, Artificial Sequence
  Description of Artificial Sequence: Synthetic oligonucleotide
cgcagcgcaccaugagcgc

SEQ ID NO: 2208832 - RNA, 19 nt, Artificial Sequence
  Description of Artificial Sequence: Synthetic oligonucleotide
ccuuuguucaugugugcuu

SEQ ID NO: 2208833 - RNA, 19 nt, Artificial Sequence
  Description of Artificial Sequence: Synthetic oligonucleotide
ccuauaacuuuaccauuuu

SEQ ID NO: 2208834 - RNA, 19 nt, Artificial Sequence
  Description of Artificial Sequence: Synthetic oligonucleotide
gcaguucuguauggaguua

SEQ ID NO: 2208835 - RNA, 19 nt, Artificial Sequence
  Description of Artificial Sequence: Synthetic oligonucleotide
cuccuacuccagccacaaa

SEQ ID NO: 2208836 - RNA, 19 nt, Artificial Sequence
  Description of Artificial Sequence: Synthetic oligonucleotide
ccaacagugcagguuuugu

SEQ ID NO: 2208837 - RNA, 19 nt, Artificial Sequence
  Description of Artificial Sequence: Synthetic oligonucleotide
cgacuuaguaaagaggauu

SEQ ID NO: 2208838 - RNA, 19 nt, Artificial Sequence
  Description of Artificial Sequence: Synthetic oligonucleotide
cgcaccaugagcgcgcaaa

SEQ ID NO: 2208839 - RNA, 19 nt, Artificial Sequence
  Description of Artificial Sequence: Synthetic oligonucleotide
ccgacuuaguaaagaggau

SEQ ID NO: 2208840 - RNA, 19 nt, Artificial Sequence
  Description of Artificial Sequence: Synthetic oligonucleotide
cuccagccacaaaccguuu

SEQ ID NO: 2208841 - RNA, 19 nt, Artificial Sequence
  Description of Artificial Sequence: Synthetic oligonucleotide
gggcuacaacccagacauc

SEQ ID NO: 2208842 - RNA, 19 nt, Artificial Sequence
  Description of Artificial Sequence: Synthetic oligonucleotide
gcgcgcaaacaggcaggac

SEQ ID NO: 2208843 - RNA, 19 nt, Artificial Sequence
  Description of Artificial Sequence: Synthetic oligonucleotide
gugcacuaacucggcuguu

SEQ ID NO: 2208844 - RNA, 19 nt, Artificial Sequence
  Description of Artificial Sequence: Synthetic oligonucleotide
gggcaucuggcaaguccau

SEQ ID NO: 2208845 - RNA, 19 nt, Artificial Sequence
  Description of Artificial Sequence: Synthetic oligonucleotide
gcgcaccaugagcgcgcaa

SEQ ID NO: 2208846 - RNA, 19 nt, Artificial Sequence
  Description of Artificial Sequence: Synthetic oligonucleotide
uuuuauggcagcuagacgg

SEQ ID NO: 2208847 - RNA, 19 nt, Artificial Sequence
  Description of Artificial Sequence: Synthetic oligonucleotide
uauccuuugucuuugaagg

SEQ ID NO: 2208848 - RNA, 19 nt, Artificial Sequence
  Description of Artificial Sequence: Synthetic oligonucleotide
aaguuaauuugucaguuuc

SEQ ID NO: 2208849 - RNA, 19 nt, Artificial Sequence
  Description of Artificial Sequence: Synthetic oligonucleotide
cugaaaacuaaccauaucc

SEQ ID NO: 2208850 - RNA, 19 nt, Artificial Sequence
  Description of Artificial Sequence: Synthetic oligonucleotide
aaaacgauuuaacaggacu

SEQ ID NO: 2208851 - RNA, 19 nt, Artificial Sequence
  Description of Artificial Sequence: Synthetic oligonucleotide
cugaaaacgauuuaacagg

SEQ ID NO: 2208852 - RNA, 19 nt, Artificial Sequence
  Description of Artificial Sequence: Synthetic oligonucleotide
aaugcuuuuccauucagcu

SEQ ID NO: 2208853 - RNA, 19 nt, Artificial Sequence
  Description of Artificial Sequence: Synthetic oligonucleotide
uggaauuuguaguagacgc

SEQ ID NO: 2208854 - RNA, 19 nt, Artificial Sequence
  Description of Artificial Sequence: Synthetic oligonucleotide
ugaaauacggcacaucgug

SEQ ID NO: 2208855 - RNA, 19 nt, Artificial Sequence
  Description of Artificial Sequence: Synthetic oligonucleotide
ugcugugcgaauaagaucu

SEQ ID NO: 2208856 - RNA, 19 nt, Artificial Sequence
  Description of Artificial Sequence: Synthetic oligonucleotide
uuuaacaggacucucaauu

SEQ ID NO: 2208857 - RNA, 19 nt, Artificial Sequence
  Description of Artificial Sequence: Synthetic oligonucleotide
ucuaccugaaaacuaacca

SEQ ID NO: 2208858 - RNA, 19 nt, Artificial Sequence
  Description of Artificial Sequence: Synthetic oligonucleotide
uugauuuaagccauguucu

SEQ ID NO: 2208859 - RNA, 19 nt, Artificial Sequence
  Description of Artificial Sequence: Synthetic oligonucleotide
gaaucguuccuuaauaagg

SEQ ID NO: 2208860 - RNA, 19 nt, Artificial Sequence
  Description of Artificial Sequence: Synthetic oligonucleotide
uaaccauaucccaaaaucc

SEQ ID NO: 2208861 - RNA, 19 nt, Artificial Sequence
  Description of Artificial Sequence: Synthetic oligonucleotide
uaauuugucaguuucugac

SEQ ID NO: 2208862 - RNA, 19 nt, Artificial Sequence
  Description of Artificial Sequence: Synthetic oligonucleotide
uuccuuuugauuuaagcca

SEQ ID NO: 2208863 - RNA, 19 nt, Artificial Sequence
  Description of Artificial Sequence: Synthetic oligonucleotide
ucaggcaugacucggcugg

SEQ ID NO: 2208864 - RNA, 19 nt, Artificial Sequence
  Description of Artificial Sequence: Synthetic oligonucleotide
uuaauaaggagucuuguuu

SEQ ID NO: 2208865 - RNA, 19 nt, Artificial Sequence
  Description of Artificial Sequence: Synthetic oligonucleotide
uugguuuacaucaucuacc

SEQ ID NO: 2208866 - RNA, 19 nt, Artificial Sequence
  Description of Artificial Sequence: Synthetic oligonucleotide
guuuacaucaucuaccuga

SEQ ID NO: 2208867 - RNA, 19 nt, Artificial Sequence
  Description of Artificial Sequence: Synthetic oligonucleotide
cuucaaacuguuugaaucg

SEQ ID NO: 2208868 - RNA, 19 nt, Artificial Sequence
  Description of Artificial Sequence: Synthetic oligonucleotide
auagcugccacuugggcac

SEQ ID NO: 2208869 - RNA, 19 nt, Artificial Sequence
  Description of Artificial Sequence: Synthetic oligonucleotide
auuuguaguagacgcuucc

SEQ ID NO: 2208870 - RNA, 19 nt, Artificial Sequence
  Description of Artificial Sequence: Synthetic oligonucleotide
aguuugaucagguuguuga

SEQ ID NO: 2208871 - RNA, 19 nt, Artificial Sequence
  Description of Artificial Sequence: Synthetic oligonucleotide
aaacgauuuaacaggacuc

SEQ ID NO: 2208872 - RNA, 19 nt, Artificial Sequence
  Description of Artificial Sequence: Synthetic oligonucleotide
cuaaccauaucccaaaauc

SEQ ID NO: 2208873 - RNA, 19 nt, Artificial Sequence
  Description of Artificial Sequence: Synthetic oligonucleotide
aauaagaucuuuggcauca

SEQ ID NO: 2208874 - RNA, 19 nt, Artificial Sequence
  Description of Artificial Sequence: Synthetic oligonucleotide
uaacaggacucucaauucg

SEQ ID NO: 2208875 - RNA, 19 nt, Artificial Sequence
  Description of Artificial Sequence: Synthetic oligonucleotide
cuccaaaucucugagaacg

SEQ ID NO: 2208876 - RNA, 19 nt, Artificial Sequence
  Description of Artificial Sequence: Synthetic oligonucleotide
aauuggaauuuguaguaga

SEQ ID NO: 2208877 - RNA, 19 nt, Artificial Sequence
  Description of Artificial Sequence: Synthetic oligonucleotide
agcaucaaacacuauuuuc

SEQ ID NO: 2208878 - RNA, 19 nt, Artificial Sequence
  Description of Artificial Sequence: Synthetic oligonucleotide
gagaacgacguucagauga

SEQ ID NO: 2208879 - RNA, 19 nt, Artificial Sequence
  Description of Artificial Sequence: Synthetic oligonucleotide
ugaaucguuccuuaauaag

SEQ ID NO: 2208880 - RNA, 19 nt, Artificial Sequence
  Description of Artificial Sequence: Synthetic oligonucleotide
ugaaaacgauuuaacagga

SEQ ID NO: 2208881 - RNA, 19 nt, Artificial Sequence
  Description of Artificial Sequence: Synthetic oligonucleotide
acuccuuccacggaaaggc

SEQ ID NO: 2208882 - RNA, 19 nt, Artificial Sequence
  Description of Artificial Sequence: Synthetic oligonucleotide
uucagucucucuuucauug

SEQ ID NO: 2208883 - RNA, 19 nt, Artificial Sequence
  Description of Artificial Sequence: Synthetic oligonucleotide
aaaggcgcuguucugaggu

SEQ ID NO: 2208884 - RNA, 19 nt, Artificial Sequence
  Description of Artificial Sequence: Synthetic oligonucleotide
ucaaacacuauuuucucaa

SEQ ID NO: 2208885 - RNA, 19 nt, Artificial Sequence
  Description of Artificial Sequence: Synthetic oligonucleotide
aaacacuauuuucucaacu

SEQ ID NO: 2208886 - RNA, 19 nt, Artificial Sequence
  Description of Artificial Sequence: Synthetic oligonucleotide
acuucaagcgaugugacuc

SEQ ID NO: 2208887 - RNA, 19 nt, Artificial Sequence
  Description of Artificial Sequence: Synthetic oligonucleotide
gaugugacuccuuccacgg

SEQ ID NO: 2208888 - RNA, 19 nt, Artificial Sequence
  Description of Artificial Sequence: Synthetic oligonucleotide
aaauacggcacaucgugcu

SEQ ID NO: 2208889 - RNA, 19 nt, Artificial Sequence
  Description of Artificial Sequence: Synthetic oligonucleotide
aauuugucaguuucugacu

SEQ ID NO: 2208890 - RNA, 19 nt, Artificial Sequence
  Description of Artificial Sequence: Synthetic oligonucleotide
ugcuuuauuuguucgacca

SEQ ID NO: 2208891 - RNA, 19 nt, Artificial Sequence
  Description of Artificial Sequence: Synthetic oligonucleotide
uuccauagcugccacuugg

SEQ ID NO: 2208892 - RNA, 19 nt, Artificial Sequence
  Description of Artificial Sequence: Synthetic oligonucleotide
aacacuauuuucucaacuu

SEQ ID NO: 2208893 - RNA, 19 nt, Artificial Sequence
  Description of Artificial Sequence: Synthetic oligonucleotide
uuugaaucguuccuuaaua

SEQ ID NO: 2208894 - RNA, 19 nt, Artificial Sequence
  Description of Artificial Sequence: Synthetic oligonucleotide
uccacggaaaggcaauugg

SEQ ID NO: 2208895 - RNA, 19 nt, Artificial Sequence
  Description of Artificial Sequence: Synthetic oligonucleotide
cauaucccaaaauccaucc

SEQ ID NO: 2208896 - RNA, 19 nt, Artificial Sequence
  Description of Artificial Sequence: Synthetic oligonucleotide
gaucuuuggcaucaucagg

SEQ ID NO: 2208897 - RNA, 19 nt, Artificial Sequence
  Description of Artificial Sequence: Synthetic oligonucleotide
caaaucucugagaacgacg

SEQ ID NO: 2208898 - RNA, 19 nt, Artificial Sequence
  Description of Artificial Sequence: Synthetic oligonucleotide
acacuauuuucucaacuuc

SEQ ID NO: 2208899 - RNA, 19 nt, Artificial Sequence
  Description of Artificial Sequence: Synthetic oligonucleotide
aauaaggagucuuguuuga

SEQ ID NO: 2208900 - RNA, 19 nt, Artificial Sequence
  Description of Artificial Sequence: Synthetic oligonucleotide
ucaguuucugacuggagga

SEQ ID NO: 2208901 - RNA, 19 nt, Artificial Sequence
  Description of Artificial Sequence: Synthetic oligonucleotide
ugcgaauaagaucuuuggc

SEQ ID NO: 2208902 - RNA, 19 nt, Artificial Sequence
  Description of Artificial Sequence: Synthetic oligonucleotide
gauuauuaaugcuuuucca

SEQ ID NO: 2208903 - RNA, 19 nt, Artificial Sequence
  Description of Artificial Sequence: Synthetic oligonucleotide
cuuuauuuguucgaccagg

SEQ ID NO: 2208904 - RNA, 19 nt, Artificial Sequence
  Description of Artificial Sequence: Synthetic oligonucleotide
uauuaaugcuuuuccauuc

SEQ ID NO: 2208905 - RNA, 19 nt, Artificial Sequence
  Description of Artificial Sequence: Synthetic oligonucleotide
aacuguuugaaucguuccu

SEQ ID NO: 2208906 - RNA, 19 nt, Artificial Sequence
  Description of Artificial Sequence: Synthetic oligonucleotide
uuuugcuuggauuauuaau

SEQ ID NO: 2208907 - RNA, 19 nt, Artificial Sequence
  Description of Artificial Sequence: Synthetic oligonucleotide
cuagugaugauauccuuug

SEQ ID NO: 2208908 - RNA, 19 nt, Artificial Sequence
  Description of Artificial Sequence: Synthetic oligonucleotide
ugcugaaaacgauuuaaca

SEQ ID NO: 2208909 - RNA, 19 nt, Artificial Sequence
  Description of Artificial Sequence: Synthetic oligonucleotide
aggcaauuggaauuuguag

SEQ ID NO: 2208910 - RNA, 19 nt, Artificial Sequence
  Description of Artificial Sequence: Synthetic oligonucleotide
uaagccauguucuucacua

SEQ ID NO: 2208911 - RNA, 19 nt, Artificial Sequence
  Description of Artificial Sequence: Synthetic oligonucleotide
agaucuuuggcaucaucag

SEQ ID NO: 2208912 - RNA, 19 nt, Artificial Sequence
  Description of Artificial Sequence: Synthetic oligonucleotide
aaaucucugagaacgacgu

SEQ ID NO: 2208913 - RNA, 19 nt, Artificial Sequence
  Description of Artificial Sequence: Synthetic oligonucleotide
uaaugcuuuuccauucagc

SEQ ID NO: 2208914 - RNA, 19 nt, Artificial Sequence
  Description of Artificial Sequence: Synthetic oligonucleotide
aguuccaguuuccucuccc

SEQ ID NO: 2208915 - RNA, 19 nt, Artificial Sequence
  Description of Artificial Sequence: Synthetic oligonucleotide
uguucgaccaggcacaguu

SEQ ID NO: 2208916 - RNA, 19 nt, Artificial Sequence
  Description of Artificial Sequence: Synthetic oligonucleotide
uuaauuugucaguuucuga

SEQ ID NO: 2208917 - RNA, 19 nt, Artificial Sequence
  Description of Artificial Sequence: Synthetic oligonucleotide
uaaggagucuuguuugacc

SEQ ID NO: 2208918 - RNA, 19 nt, Artificial Sequence
  Description of Artificial Sequence: Synthetic oligonucleotide
accucguuuguauucacag

SEQ ID NO: 2208919 - RNA, 19 nt, Artificial Sequence
  Description of Artificial Sequence: Synthetic oligonucleotide
aagcgaugugacuccuucc

SEQ ID NO: 2208920 - RNA, 19 nt, Artificial Sequence
  Description of Artificial Sequence: Synthetic oligonucleotide
uccuuaauaaggagucuug

SEQ ID NO: 2208921 - RNA, 19 nt, Artificial Sequence
  Description of Artificial Sequence: Synthetic oligonucleotide
uugaagguccccuccagcc

SEQ ID NO: 2208922 - RNA, 19 nt, Artificial Sequence
  Description of Artificial Sequence: Synthetic oligonucleotide
aaucguuccuuaauaagga

SEQ ID NO: 2208923 - RNA, 19 nt, Artificial Sequence
  Description of Artificial Sequence: Synthetic oligonucleotide
gugcgaauaagaucuuugg

SEQ ID NO: 2208924 - RNA, 19 nt, Artificial Sequence
  Description of Artificial Sequence: Synthetic oligonucleotide
acaguuguccaccaguccu

SEQ ID NO: 2208925 - RNA, 19 nt, Artificial Sequence
  Description of Artificial Sequence: Synthetic oligonucleotide
aacgauuuaacaggacucu

SEQ ID NO: 2208926 - RNA, 19 nt, Artificial Sequence
  Description of Artificial Sequence: Synthetic oligonucleotide
uuaacaggacucucaauuc

SEQ ID NO: 2208927 - RNA, 19 nt, Artificial Sequence
  Description of Artificial Sequence: Synthetic oligonucleotide
uuuacaucaucuaccugaa

SEQ ID NO: 2208928 - RNA, 19 nt, Artificial Sequence
  Description of Artificial Sequence: Synthetic oligonucleotide
aacaggacucucaauucgg

SEQ ID NO: 2208929 - RNA, 19 nt, Artificial Sequence
  Description of Artificial Sequence: Synthetic oligonucleotide
ucguuccuuaauaaggagu

SEQ ID NO: 2208930 - RNA, 19 nt, Artificial Sequence
  Description of Artificial Sequence: Synthetic oligonucleotide
aaccauaucccaaaaucca

SEQ ID NO: 2208931 - RNA, 19 nt, Artificial Sequence
  Description of Artificial Sequence: Synthetic oligonucleotide
aucuaccugaaaacuaacc

SEQ ID NO: 2208932 - RNA, 19 nt, Artificial Sequence
  Description of Artificial Sequence: Synthetic oligonucleotide
cuagacgguuucuagcugc

SEQ ID NO: 2208933 - RNA, 19 nt, Artificial Sequence
  Description of Artificial Sequence: Synthetic oligonucleotide
uuugcuuuauuuguucgac

SEQ ID NO: 2208934 - RNA, 19 nt, Artificial Sequence
  Description of Artificial Sequence: Synthetic oligonucleotide
aacgacguucagaugaaag

SEQ ID NO: 2208935 - RNA, 19 nt, Artificial Sequence
  Description of Artificial Sequence: Synthetic oligonucleotide
caguccuucaaacuguuug

SEQ ID NO: 2208936 - RNA, 19 nt, Artificial Sequence
  Description of Artificial Sequence: Synthetic oligonucleotide
gaucugagcagguagucuc

SEQ ID NO: 2208937 - RNA, 19 nt, Artificial Sequence
  Description of Artificial Sequence: Synthetic oligonucleotide
uucaccuacuucaagcgau

SEQ ID NO: 2208938 - RNA, 19 nt, Artificial Sequence
  Description of Artificial Sequence: Synthetic oligonucleotide
ucuagugaugauauccuuu

SEQ ID NO: 2208939 - RNA, 19 nt, Artificial Sequence
  Description of Artificial Sequence: Synthetic oligonucleotide
uccauagcugccacuuggg

SEQ ID NO: 2208940 - RNA, 19 nt, Artificial Sequence
  Description of Artificial Sequence: Synthetic oligonucleotide
aauacggcacaucgugcug

SEQ ID NO: 2208941 - RNA, 19 nt, Artificial Sequence
  Description of Artificial Sequence: Synthetic oligonucleotide
uuauuuguucgaccaggca

SEQ ID NO: 2208942 - RNA, 19 nt, Artificial Sequence
  Description of Artificial Sequence: Synthetic oligonucleotide
agcuagacgguuucuagcu

SEQ ID NO: 2208943 - RNA, 19 nt, Artificial Sequence
  Description of Artificial Sequence: Synthetic oligonucleotide
ucguuuguauucacaguug

SEQ ID NO: 2208944 - RNA, 19 nt, Artificial Sequence
  Description of Artificial Sequence: Synthetic oligonucleotide
gauuuaacaggacucucaa

SEQ ID NO: 2208945 - RNA, 19 nt, Artificial Sequence
  Description of Artificial Sequence: Synthetic oligonucleotide
acgacguucagaugaaagu

SEQ ID NO: 2208946 - RNA, 19 nt, Artificial Sequence
  Description of Artificial Sequence: Synthetic oligonucleotide
uugaaucguuccuuaauaa

SEQ ID NO: 2208947 - RNA, 19 nt, Artificial Sequence
  Description of Artificial Sequence: Synthetic oligonucleotide
acguaggugcuccaaaucu

SEQ ID NO: 2208948 - RNA, 19 nt, Artificial Sequence
  Description of Artificial Sequence: Synthetic oligonucleotide
uggauuauuaaugcuuuuc

SEQ ID NO: 2208949 - RNA, 19 nt, Artificial Sequence
  Description of Artificial Sequence: Synthetic oligonucleotide
uuuauggcagcuagacggu

SEQ ID NO: 2208950 - RNA, 19 nt, Artificial Sequence
  Description of Artificial Sequence: Synthetic oligonucleotide
uuucuagcugccauucuuc

SEQ ID NO: 2208951 - RNA, 19 nt, Artificial Sequence
  Description of Artificial Sequence: Synthetic oligonucleotide
ugaaguuaauuugucaguu

SEQ ID NO: 2208952 - RNA, 19 nt, Artificial Sequence
  Description of Artificial Sequence: Synthetic oligonucleotide
ugaaagugcugaaaacgau

SEQ ID NO: 2208953 - RNA, 19 nt, Artificial Sequence
  Description of Artificial Sequence: Synthetic oligonucleotide
uugaucagguuguugaauu

SEQ ID NO: 2208954 - RNA, 19 nt, Artificial Sequence
  Description of Artificial Sequence: Synthetic oligonucleotide
aguccuucaaacuguuuga

SEQ ID NO: 2208955 - RNA, 19 nt, Artificial Sequence
  Description of Artificial Sequence: Synthetic oligonucleotide
aaagugcugaaaacgauuu

SEQ ID NO: 2208956 - RNA, 19 nt, Artificial Sequence
  Description of Artificial Sequence: Synthetic oligonucleotide
gcgaauaagaucuuuggca

SEQ ID NO: 2208957 - RNA, 19 nt, Artificial Sequence
  Description of Artificial Sequence: Synthetic oligonucleotide
gauuaaaggcgcuguucug

SEQ ID NO: 2208958 - RNA, 19 nt, Artificial Sequence
  Description of Artificial Sequence: Synthetic oligonucleotide
auuaaaggcgcuguucuga

SEQ ID NO: 2208959 - RNA, 19 nt, Artificial Sequence
  Description of Artificial Sequence: Synthetic oligonucleotide
gacguucagaugaaagugc

SEQ ID NO: 2208960 - RNA, 19 nt, Artificial Sequence
  Description of Artificial Sequence: Synthetic oligonucleotide
agugcugaaaacgauuuaa

SEQ ID NO: 2208961 - RNA, 19 nt, Artificial Sequence
  Description of Artificial Sequence: Synthetic oligonucleotide
agugugaaguuaauuuguc

SEQ ID NO: 2208962 - RNA, 19 nt, Artificial Sequence
  Description of Artificial Sequence: Synthetic oligonucleotide
auaaggagucuuguuugac

SEQ ID NO: 2208963 - RNA, 19 nt, Artificial Sequence
  Description of Artificial Sequence: Synthetic oligonucleotide
uccucaaguuugaucaggu

SEQ ID NO: 2208964 - RNA, 19 nt, Artificial Sequence
  Description of Artificial Sequence: Synthetic oligonucleotide
ucccacuccaggcagugug

SEQ ID NO: 2208965 - RNA, 19 nt, Artificial Sequence
  Description of Artificial Sequence: Synthetic oligonucleotide
agcgaugugacuccuucca

SEQ ID NO: 2208966 - RNA, 19 nt, Artificial Sequence
  Description of Artificial Sequence: Synthetic oligonucleotide
uugcuuuauuuguucgacc

SEQ ID NO: 2208967 - RNA, 19 nt, Artificial Sequence
  Description of Artificial Sequence: Synthetic oligonucleotide
aggacucucaauucggaaa

SEQ ID NO: 2208968 - RNA, 19 nt, Artificial Sequence
  Description of Artificial Sequence: Synthetic oligonucleotide
uuucaccucguuuguauuc

SEQ ID NO: 2208969 - RNA, 19 nt, Artificial Sequence
  Description of Artificial Sequence: Synthetic oligonucleotide
ugaugauauccuuugucuu

SEQ ID NO: 2208970 - RNA, 19 nt, Artificial Sequence
  Description of Artificial Sequence: Synthetic oligonucleotide
guauucacaguuguccacc

SEQ ID NO: 2208971 - RNA, 19 nt, Artificial Sequence
  Description of Artificial Sequence: Synthetic oligonucleotide
uaguagacgcuuccuuuug

SEQ ID NO: 2208972 - RNA, 19 nt, Artificial Sequence
  Description of Artificial Sequence: Synthetic oligonucleotide
gaauaagaucuuuggcauc

SEQ ID NO: 2208973 - RNA, 19 nt, Artificial Sequence
  Description of Artificial Sequence: Synthetic oligonucleotide
uugucuuugaagguccccu

SEQ ID NO: 2208974 - RNA, 19 nt, Artificial Sequence
  Description of Artificial Sequence: Synthetic oligonucleotide
gaaauacggcacaucgugc

SEQ ID NO: 2208975 - RNA, 19 nt, Artificial Sequence
  Description of Artificial Sequence: Synthetic oligonucleotide
auuuguucgaccaggcaca

SEQ ID NO: 2208976 - RNA, 19 nt, Artificial Sequence
  Description of Artificial Sequence: Synthetic oligonucleotide
cuuguuugaccaacugcug

SEQ ID NO: 2208977 - RNA, 19 nt, Artificial Sequence
  Description of Artificial Sequence: Synthetic oligonucleotide
aggaauguccaguuccagu

SEQ ID NO: 2208978 - RNA, 19 nt, Artificial Sequence
  Description of Artificial Sequence: Synthetic oligonucleotide
aacuaaccauaucccaaaa

SEQ ID NO: 2208979 - RNA, 19 nt, Artificial Sequence
  Description of Artificial Sequence: Synthetic oligonucleotide
uccaaaucucugagaacga

SEQ ID NO: 2208980 - RNA, 19 nt, Artificial Sequence
  Description of Artificial Sequence: Synthetic oligonucleotide
ucaccuacuucaagcgaug

SEQ ID NO: 2208981 - RNA, 19 nt, Artificial Sequence
  Description of Artificial Sequence: Synthetic oligonucleotide
acuaaccauaucccaaaau

SEQ ID NO: 2208982 - RNA, 19 nt, Artificial Sequence
  Description of Artificial Sequence: Synthetic oligonucleotide
ugagcagguagucucuuuu

SEQ ID NO: 2208983 - RNA, 19 nt, Artificial Sequence
  Description of Artificial Sequence: Synthetic oligonucleotide
gagguucaggauucucuag

SEQ ID NO: 2208984 - RNA, 19 nt, Artificial Sequence
  Description of Artificial Sequence: Synthetic oligonucleotide
ugcuuggauuauuaaugcu

SEQ ID NO: 2208985 - RNA, 19 nt, Artificial Sequence
  Description of Artificial Sequence: Synthetic oligonucleotide
augauauccuuugucuuug

SEQ ID NO: 2208986 - RNA, 19 nt, Artificial Sequence
  Description of Artificial Sequence: Synthetic oligonucleotide
acggaaaggcaauuggaau

SEQ ID NO: 2208987 - RNA, 19 nt, Artificial Sequence
  Description of Artificial Sequence: Synthetic oligonucleotide
caauuggaauuuguaguag

SEQ ID NO: 2208988 - RNA, 19 nt, Artificial Sequence
  Description of Artificial Sequence: Synthetic oligonucleotide
aaaauccauccagaucuga

SEQ ID NO: 2208989 - RNA, 19 nt, Artificial Sequence
  Description of Artificial Sequence: Synthetic oligonucleotide
caaacacuauuuucucaac

SEQ ID NO: 2208990 - RNA, 19 nt, Artificial Sequence
  Description of Artificial Sequence: Synthetic oligonucleotide
uguuugaaucguuccuuaa

SEQ ID NO: 2208991 - RNA, 19 nt, Artificial Sequence
  Description of Artificial Sequence: Synthetic oligonucleotide
uccaguuuccucucccacu

SEQ ID NO: 2208992 - RNA, 19 nt, Artificial Sequence
  Description of Artificial Sequence: Synthetic oligonucleotide
cuacuucaagcgaugugac

SEQ ID NO: 2208993 - RNA, 19 nt, Artificial Sequence
  Description of Artificial Sequence: Synthetic oligonucleotide
cauagcugccacuugggca

SEQ ID NO: 2208994 - RNA, 19 nt, Artificial Sequence
  Description of Artificial Sequence: Synthetic oligonucleotide
auucucuagugaugauauc

SEQ ID NO: 2208995 - RNA, 19 nt, Artificial Sequence
  Description of Artificial Sequence: Synthetic oligonucleotide
uugaccaacugcugugcga

SEQ ID NO: 2208996 - RNA, 19 nt, Artificial Sequence
  Description of Artificial Sequence: Synthetic oligonucleotide
gacuccuuccacggaaagg

SEQ ID NO: 2208997 - RNA, 19 nt, Artificial Sequence
  Description of Artificial Sequence: Synthetic oligonucleotide
uucaccucguuuguauuca

SEQ ID NO: 2208998 - RNA, 19 nt, Artificial Sequence
  Description of Artificial Sequence: Synthetic oligonucleotide
uucaaacuguuugaaucgu

SEQ ID NO: 2208999 - RNA, 19 nt, Artificial Sequence
  Description of Artificial Sequence: Synthetic oligonucleotide
uuuccauagcugccacuug

SEQ ID NO: 2209000 - RNA, 19 nt, Artificial Sequence
  Description of Artificial Sequence: Synthetic oligonucleotide
caagcgaugugacuccuuc

SEQ ID NO: 2209001 - RNA, 19 nt, Artificial Sequence
  Description of Artificial Sequence: Synthetic oligonucleotide
auuuccauagcugccacuu

SEQ ID NO: 2209002 - RNA, 19 nt, Artificial Sequence
  Description of Artificial Sequence: Synthetic oligonucleotide
cagcuagacgguuucuagc

SEQ ID NO: 2209003 - RNA, 19 nt, Artificial Sequence
  Description of Artificial Sequence: Synthetic oligonucleotide
ucggcuggcagacguaggu

SEQ ID NO: 2209004 - RNA, 19 nt, Artificial Sequence
  Description of Artificial Sequence: Synthetic oligonucleotide
ugauuuaagccauguucuu

SEQ ID NO: 2209005 - RNA, 19 nt, Artificial Sequence
  Description of Artificial Sequence: Synthetic oligonucleotide
acgauuuaacaggacucuc

SEQ ID NO: 2209006 - RNA, 19 nt, Artificial Sequence
  Description of Artificial Sequence: Synthetic oligonucleotide
uuccuuaauaaggagucuu

SEQ ID NO: 2209007 - RNA, 19 nt, Artificial Sequence
  Description of Artificial Sequence: Synthetic oligonucleotide
gauucucuagugaugauau

SEQ ID NO: 2209008 - RNA, 19 nt, Artificial Sequence
  Description of Artificial Sequence: Synthetic oligonucleotide
auaucccaaaauccaucca

SEQ ID NO: 2209009 - RNA, 19 nt, Artificial Sequence
  Description of Artificial Sequence: Synthetic oligonucleotide
cuuugaagguccccuccag

SEQ ID NO: 2209010 - RNA, 19 nt, Artificial Sequence
  Description of Artificial Sequence: Synthetic oligonucleotide
gugugaaguuaauuuguca

SEQ ID NO: 2209011 - RNA, 19 nt, Artificial Sequence
  Description of Artificial Sequence: Synthetic oligonucleotide
ucaacuuccuuuggcauuu

SEQ ID NO: 2209012 - RNA, 19 nt, Artificial Sequence
  Description of Artificial Sequence: Synthetic oligonucleotide
uucgaccaggcacaguuuu

SEQ ID NO: 2209013 - RNA, 19 nt, Artificial Sequence
  Description of Artificial Sequence: Synthetic oligonucleotide
gaaaacgauuuaacaggac

SEQ ID NO: 2209014 - RNA, 19 nt, Artificial Sequence
  Description of Artificial Sequence: Synthetic oligonucleotide
ucccaaaauccauccagau

SEQ ID NO: 2209015 - RNA, 19 nt, Artificial Sequence
  Description of Artificial Sequence: Synthetic oligonucleotide
accuacuucaagcgaugug

SEQ ID NO: 2209016 - RNA, 19 nt, Artificial Sequence
  Description of Artificial Sequence: Synthetic oligonucleotide
ggcaauuggaauuuguagu

SEQ ID NO: 2209017 - RNA, 19 nt, Artificial Sequence
  Description of Artificial Sequence: Synthetic oligonucleotide
uagugaugauauccuuugu

SEQ ID NO: 2209018 - RNA, 19 nt, Artificial Sequence
  Description of Artificial Sequence: Synthetic oligonucleotide
aguagacgcuuccuuuuga

SEQ ID NO: 2209019 - RNA, 19 nt, Artificial Sequence
  Description of Artificial Sequence: Synthetic oligonucleotide
uccuuccacggaaaggcaa

SEQ ID NO: 2209020 - RNA, 19 nt, Artificial Sequence
  Description of Artificial Sequence: Synthetic oligonucleotide
acugcugugcgaauaagau

SEQ ID NO: 2209021 - RNA, 19 nt, Artificial Sequence
  Description of Artificial Sequence: Synthetic oligonucleotide
caucuaccugaaaacuaac

SEQ ID NO: 2209022 - RNA, 19 nt, Artificial Sequence
  Description of Artificial Sequence: Synthetic oligonucleotide
cugagaacgacguucagau

SEQ ID NO: 2209023 - RNA, 19 nt, Artificial Sequence
  Description of Artificial Sequence: Synthetic oligonucleotide
gacguaggugcuccaaauc

SEQ ID NO: 2209024 - RNA, 19 nt, Artificial Sequence
  Description of Artificial Sequence: Synthetic oligonucleotide
gagacaccuggccuucacc

SEQ ID NO: 2209025 - RNA, 19 nt, Artificial Sequence
  Description of Artificial Sequence: Synthetic oligonucleotide
aagugcugaaaacgauuua

SEQ ID NO: 2209026 - RNA, 19 nt, Artificial Sequence
  Description of Artificial Sequence: Synthetic oligonucleotide
gguucaggauucucuagug

SEQ ID NO: 2209027 - RNA, 19 nt, Artificial Sequence
  Description of Artificial Sequence: Synthetic oligonucleotide
uauggcagcuagacgguuu

SEQ ID NO: 2209028 - RNA, 19 nt, Artificial Sequence
  Description of Artificial Sequence: Synthetic oligonucleotide
agacguaggugcuccaaau

SEQ ID NO: 2209029 - RNA, 19 nt, Artificial Sequence
  Description of Artificial Sequence: Synthetic oligonucleotide
uuuguucgaccaggcacag

SEQ ID NO: 2209030 - RNA, 19 nt, Artificial Sequence
  Description of Artificial Sequence: Synthetic oligonucleotide
guuugaccaacugcugugc

SEQ ID NO: 2209031 - RNA, 19 nt, Artificial Sequence
  Description of Artificial Sequence: Synthetic oligonucleotide
cacaguuguccaccagucc

SEQ ID NO: 2209032 - RNA, 19 nt, Artificial Sequence
  Description of Artificial Sequence: Synthetic oligonucleotide
cacggaaaggcaauuggaa

SEQ ID NO: 2209033 - RNA, 19 nt, Artificial Sequence
  Description of Artificial Sequence: Synthetic oligonucleotide
ugagacaccuggccuucac

SEQ ID NO: 2209034 - RNA, 19 nt, Artificial Sequence
  Description of Artificial Sequence: Synthetic oligonucleotide
gugaaguuaauuugucagu

SEQ ID NO: 2209035 - RNA, 19 nt, Artificial Sequence
  Description of Artificial Sequence: Synthetic oligonucleotide
gcagcuagacgguuucuag

SEQ ID NO: 2209036 - RNA, 19 nt, Artificial Sequence
  Description of Artificial Sequence: Synthetic oligonucleotide
gcaauuggaauuuguagua

SEQ ID NO: 2209037 - RNA, 19 nt, Artificial Sequence
  Description of Artificial Sequence: Synthetic oligonucleotide
aaucucugagaacgacguu

SEQ ID NO: 2209038 - RNA, 19 nt, Artificial Sequence
  Description of Artificial Sequence: Synthetic oligonucleotide
cuaccugaaaacuaaccau

SEQ ID NO: 2209039 - RNA, 19 nt, Artificial Sequence
  Description of Artificial Sequence: Synthetic oligonucleotide
agaucugagcagguagucu

SEQ ID NO: 2209040 - RNA, 19 nt, Artificial Sequence
  Description of Artificial Sequence: Synthetic oligonucleotide
cuuggauuauuaaugcuuu

SEQ ID NO: 2209041 - RNA, 19 nt, Artificial Sequence
  Description of Artificial Sequence: Synthetic oligonucleotide
ggauuaaaggcgcuguucu

SEQ ID NO: 2209042 - RNA, 19 nt, Artificial Sequence
  Description of Artificial Sequence: Synthetic oligonucleotide
gugcugaaaacgauuuaac

SEQ ID NO: 2209043 - RNA, 19 nt, Artificial Sequence
  Description of Artificial Sequence: Synthetic oligonucleotide
gaauuuguaguagacgcuu

SEQ ID NO: 2209044 - RNA, 19 nt, Artificial Sequence
  Description of Artificial Sequence: Synthetic oligonucleotide
guuuguauucacaguuguc

SEQ ID NO: 2209045 - RNA, 19 nt, Artificial Sequence
  Description of Artificial Sequence: Synthetic oligonucleotide
aucaucuaccugaaaacua

SEQ ID NO: 2209046 - RNA, 19 nt, Artificial Sequence
  Description of Artificial Sequence: Synthetic oligonucleotide
acguucagaugaaagugcu

SEQ ID NO: 2209047 - RNA, 19 nt, Artificial Sequence
  Description of Artificial Sequence: Synthetic oligonucleotide
ggcuggcagacguaggugc

SEQ ID NO: 2209048 - RNA, 19 nt, Artificial Sequence
  Description of Artificial Sequence: Synthetic oligonucleotide
ugggauuaaaggcgcuguu

SEQ ID NO: 2209049 - RNA, 19 nt, Artificial Sequence
  Description of Artificial Sequence: Synthetic oligonucleotide
cucguuuguauucacaguu

SEQ ID NO: 2209050 - RNA, 19 nt, Artificial Sequence
  Description of Artificial Sequence: Synthetic oligonucleotide
ccuacuucaagcgauguga

SEQ ID NO: 2209051 - RNA, 19 nt, Artificial Sequence
  Description of Artificial Sequence: Synthetic oligonucleotide
uagacgcuuccuuuugauu

SEQ ID NO: 2209052 - RNA, 19 nt, Artificial Sequence
  Description of Artificial Sequence: Synthetic oligonucleotide
ggacucucaauucggaaaa

SEQ ID NO: 2209053 - RNA, 19 nt, Artificial Sequence
  Description of Artificial Sequence: Synthetic oligonucleotide
gaaagugcugaaaacgauu

SEQ ID NO: 2209054 - RNA, 19 nt, Artificial Sequence
  Description of Artificial Sequence: Synthetic oligonucleotide
gaaguuaauuugucaguuu

SEQ ID NO: 2209055 - RNA, 19 nt, Artificial Sequence
  Description of Artificial Sequence: Synthetic oligonucleotide
accauaucccaaaauccau

SEQ ID NO: 2209056 - RNA, 19 nt, Artificial Sequence
  Description of Artificial Sequence: Synthetic oligonucleotide
ggcagugugaaguuaauuu

SEQ ID NO: 2209057 - RNA, 19 nt, Artificial Sequence
  Description of Artificial Sequence: Synthetic oligonucleotide
ccauccagaucugagcagg

SEQ ID NO: 2209058 - RNA, 19 nt, Artificial Sequence
  Description of Artificial Sequence: Synthetic oligonucleotide
accugaaaacuaaccauau

SEQ ID NO: 2209059 - RNA, 19 nt, Artificial Sequence
  Description of Artificial Sequence: Synthetic oligonucleotide
auacggcacaucgugcugu

SEQ ID NO: 2209060 - RNA, 19 nt, Artificial Sequence
  Description of Artificial Sequence: Synthetic oligonucleotide
acucggcuggcagacguag

SEQ ID NO: 2209061 - RNA, 19 nt, Artificial Sequence
  Description of Artificial Sequence: Synthetic oligonucleotide
gacgcuuccuuuugauuua

SEQ ID NO: 2209062 - RNA, 19 nt, Artificial Sequence
  Description of Artificial Sequence: Synthetic oligonucleotide
cuucaccuacuucaagcga

SEQ ID NO: 2209063 - RNA, 19 nt, Artificial Sequence
  Description of Artificial Sequence: Synthetic oligonucleotide
ggcaugacucggcuggcag

SEQ ID NO: 2209064 - RNA, 19 nt, Artificial Sequence
  Description of Artificial Sequence: Synthetic oligonucleotide
cgaugugacuccuuccacg

SEQ ID NO: 2209065 - RNA, 19 nt, Artificial Sequence
  Description of Artificial Sequence: Synthetic oligonucleotide
ccauaucccaaaauccauc

SEQ ID NO: 2209066 - RNA, 19 nt, Artificial Sequence
  Description of Artificial Sequence: Synthetic oligonucleotide
cagucucucuuucauugca

SEQ ID NO: 2209067 - RNA, 19 nt, Artificial Sequence
  Description of Artificial Sequence: Synthetic oligonucleotide
caucaggaauguccaguuc

SEQ ID NO: 2209068 - RNA, 19 nt, Artificial Sequence
  Description of Artificial Sequence: Synthetic oligonucleotide
cucaggcaugacucggcug

SEQ ID NO: 2209069 - RNA, 19 nt, Artificial Sequence
  Description of Artificial Sequence: Synthetic oligonucleotide
ucaccucguuuguauucac

SEQ ID NO: 2209070 - RNA, 19 nt, Artificial Sequence
  Description of Artificial Sequence: Synthetic oligonucleotide
gaagguccccuccagcccu

SEQ ID NO: 2209071 - RNA, 19 nt, Artificial Sequence
  Description of Artificial Sequence: Synthetic oligonucleotide
cucggcuggcagacguagg

SEQ ID NO: 2209072 - RNA, 19 nt, Artificial Sequence
  Description of Artificial Sequence: Synthetic oligonucleotide
acgguuucuagcugccauu

SEQ ID NO: 2209073 - RNA, 19 nt, Artificial Sequence
  Description of Artificial Sequence: Synthetic oligonucleotide
cuuuugauuuaagccaugu

SEQ ID NO: 2209074 - RNA, 19 nt, Artificial Sequence
  Description of Artificial Sequence: Synthetic oligonucleotide
accagcuuuggagccuauc

SEQ ID NO: 2209075 - RNA, 19 nt, Artificial Sequence
  Description of Artificial Sequence: Synthetic oligonucleotide
aguuucugacuggaggauu

SEQ ID NO: 2209076 - RNA, 19 nt, Artificial Sequence
  Description of Artificial Sequence: Synthetic oligonucleotide
gacgguuucuagcugccau

SEQ ID NO: 2209077 - RNA, 19 nt, Artificial Sequence
  Description of Artificial Sequence: Synthetic oligonucleotide
cagaucugagcagguaguc

SEQ ID NO: 2209078 - RNA, 19 nt, Artificial Sequence
  Description of Artificial Sequence: Synthetic oligonucleotide
caucaucuaccugaaaacu

SEQ ID NO: 2209079 - RNA, 19 nt, Artificial Sequence
  Description of Artificial Sequence: Synthetic oligonucleotide
ucaagcgaugugacuccuu

SEQ ID NO: 2209080 - RNA, 19 nt, Artificial Sequence
  Description of Artificial Sequence: Synthetic oligonucleotide
ucgugcuguggcugagaca

SEQ ID NO: 2209081 - RNA, 19 nt, Artificial Sequence
  Description of Artificial Sequence: Synthetic oligonucleotide
acaggacucucaauucgga

SEQ ID NO: 2209082 - RNA, 19 nt, Artificial Sequence
  Description of Artificial Sequence: Synthetic oligonucleotide
ccuguuuugcuuuauuugu

SEQ ID NO: 2209083 - RNA, 19 nt, Artificial Sequence
  Description of Artificial Sequence: Synthetic oligonucleotide
aggagucuuguuugaccaa

SEQ ID NO: 2209084 - RNA, 19 nt, Artificial Sequence
  Description of Artificial Sequence: Synthetic oligonucleotide
cugaaauacggcacaucgu

SEQ ID NO: 2209085 - RNA, 19 nt, Artificial Sequence
  Description of Artificial Sequence: Synthetic oligonucleotide
gggauuaaaggcgcuguuc

SEQ ID NO: 2209086 - RNA, 19 nt, Artificial Sequence
  Description of Artificial Sequence: Synthetic oligonucleotide
guaguagacgcuuccuuuu

SEQ ID NO: 2209087 - RNA, 19 nt, Artificial Sequence
  Description of Artificial Sequence: Synthetic oligonucleotide
agaacgacguucagaugaa

SEQ ID NO: 2209088 - RNA, 19 nt, Artificial Sequence
  Description of Artificial Sequence: Synthetic oligonucleotide
aaggcgcuguucugagguu

SEQ ID NO: 2209089 - RNA, 19 nt, Artificial Sequence
  Description of Artificial Sequence: Synthetic oligonucleotide
augugacuccuuccacgga

SEQ ID NO: 2209090 - RNA, 19 nt, Artificial Sequence
  Description of Artificial Sequence: Synthetic oligonucleotide
gcuagacgguuucuagcug

SEQ ID NO: 2209091 - RNA, 19 nt, Artificial Sequence
  Description of Artificial Sequence: Synthetic oligonucleotide
cacaucgugcuguggcuga

SEQ ID NO: 2209092 - RNA, 19 nt, Artificial Sequence
  Description of Artificial Sequence: Synthetic oligonucleotide
aucugagcagguagucucu

SEQ ID NO: 2209093 - RNA, 19 nt, Artificial Sequence
  Description of Artificial Sequence: Synthetic oligonucleotide
cgacguucagaugaaagug

SEQ ID NO: 2209094 - RNA, 19 nt, Artificial Sequence
  Description of Artificial Sequence: Synthetic oligonucleotide
caggacucucaauucggaa

SEQ ID NO: 2209095 - RNA, 19 nt, Artificial Sequence
  Description of Artificial Sequence: Synthetic oligonucleotide
ggauucucuagugaugaua

SEQ ID NO: 2209096 - RNA, 19 nt, Artificial Sequence
  Description of Artificial Sequence: Synthetic oligonucleotide
caccucguuuguauucaca

SEQ ID NO: 2209097 - RNA, 19 nt, Artificial Sequence
  Description of Artificial Sequence: Synthetic oligonucleotide
guagacgcuuccuuuugau

SEQ ID NO: 2209098 - RNA, 19 nt, Artificial Sequence
  Description of Artificial Sequence: Synthetic oligonucleotide
cgauuuaacaggacucuca

SEQ ID NO: 2209099 - RNA, 19 nt, Artificial Sequence
  Description of Artificial Sequence: Synthetic oligonucleotide
gcuccaaaucucugagaac

SEQ ID NO: 2209100 - RNA, 19 nt, Artificial Sequence
  Description of Artificial Sequence: Synthetic oligonucleotide
uuauggcagcuagacgguu

SEQ ID NO: 2209101 - RNA, 19 nt, Artificial Sequence
  Description of Artificial Sequence: Synthetic oligonucleotide
gacaccuggccuucaccua

SEQ ID NO: 2209102 - RNA, 19 nt, Artificial Sequence
  Description of Artificial Sequence: Synthetic oligonucleotide
cacacucuuccugcuucag

SEQ ID NO: 2209103 - RNA, 19 nt, Artificial Sequence
  Description of Artificial Sequence: Synthetic oligonucleotide
ucugagcagguagucucuu

SEQ ID NO: 2209104 - RNA, 19 nt, Artificial Sequence
  Description of Artificial Sequence: Synthetic oligonucleotide
guccuucaaacuguuugaa

SEQ ID NO: 2209105 - RNA, 19 nt, Artificial Sequence
  Description of Artificial Sequence: Synthetic oligonucleotide
uucugagguucaggauucu

SEQ ID NO: 2209106 - RNA, 19 nt, Artificial Sequence
  Description of Artificial Sequence: Synthetic oligonucleotide
augacucggcuggcagacg

SEQ ID NO: 2209107 - RNA, 19 nt, Artificial Sequence
  Description of Artificial Sequence: Synthetic oligonucleotide
cagacguaggugcuccaaa

SEQ ID NO: 2209108 - RNA, 19 nt, Artificial Sequence
  Description of Artificial Sequence: Synthetic oligonucleotide
caccaguccuucaaacugu

SEQ ID NO: 2209109 - RNA, 19 nt, Artificial Sequence
  Description of Artificial Sequence: Synthetic oligonucleotide
ccacggaaaggcaauugga

SEQ ID NO: 2209110 - RNA, 19 nt, Artificial Sequence
  Description of Artificial Sequence: Synthetic oligonucleotide
cucaacuuccuuuggcauu

SEQ ID NO: 2209111 - RNA, 19 nt, Artificial Sequence
  Description of Artificial Sequence: Synthetic oligonucleotide
ggaauuuguaguagacgcu

SEQ ID NO: 2209112 - RNA, 19 nt, Artificial Sequence
  Description of Artificial Sequence: Synthetic oligonucleotide
gagucuuguuugaccaacu

SEQ ID NO: 2209113 - RNA, 19 nt, Artificial Sequence
  Description of Artificial Sequence: Synthetic oligonucleotide
cgaauaagaucuuuggcau

SEQ ID NO: 2209114 - RNA, 19 nt, Artificial Sequence
  Description of Artificial Sequence: Synthetic oligonucleotide
acggcacaucgugcugugg

SEQ ID NO: 2209115 - RNA, 19 nt, Artificial Sequence
  Description of Artificial Sequence: Synthetic oligonucleotide
gcgaugugacuccuuccac

SEQ ID NO: 2209116 - RNA, 19 nt, Artificial Sequence
  Description of Artificial Sequence: Synthetic oligonucleotide
cggcacaucgugcuguggc

SEQ ID NO: 2209117 - RNA, 19 nt, Artificial Sequence
  Description of Artificial Sequence: Synthetic oligonucleotide
gcuucagucucucuuucau

SEQ ID NO: 2209118 - RNA, 19 nt, Artificial Sequence
  Description of Artificial Sequence: Synthetic oligonucleotide
gaacgacguucagaugaaa

SEQ ID NO: 2209119 - RNA, 19 nt, Artificial Sequence
  Description of Artificial Sequence: Synthetic oligonucleotide
caggcaugacucggcuggc

SEQ ID NO: 2209120 - RNA, 19 nt, Artificial Sequence
  Description of Artificial Sequence: Synthetic oligonucleotide
uuguucgaccaggcacagu

SEQ ID NO: 2209121 - RNA, 19 nt, Artificial Sequence
  Description of Artificial Sequence: Synthetic oligonucleotide
uggcagcuagacgguuucu

SEQ ID NO: 2209122 - RNA, 19 nt, Artificial Sequence
  Description of Artificial Sequence: Synthetic oligonucleotide
cucuagugaugauauccuu

SEQ ID NO: 2209123 - RNA, 19 nt, Artificial Sequence
  Description of Artificial Sequence: Synthetic oligonucleotide
cauuuccauagcugccacu

SEQ ID NO: 2209124 - RNA, 19 nt, Artificial Sequence
  Description of Artificial Sequence: Synthetic oligonucleotide
aggcaugacucggcuggca

SEQ ID NO: 2209125 - RNA, 19 nt, Artificial Sequence
  Description of Artificial Sequence: Synthetic oligonucleotide
acgcuuccuuuugauuuaa

SEQ ID NO: 2209126 - RNA, 19 nt, Artificial Sequence
  Description of Artificial Sequence: Synthetic oligonucleotide
ccaacugcugugcgaauaa

SEQ ID NO: 2209127 - RNA, 19 nt, Artificial Sequence
  Description of Artificial Sequence: Synthetic oligonucleotide
guaccagcuuuggagccua

SEQ ID NO: 2209128 - RNA, 19 nt, Artificial Sequence
  Description of Artificial Sequence: Synthetic oligonucleotide
uaccagcuuuggagccuau

SEQ ID NO: 2209129 - RNA, 19 nt, Artificial Sequence
  Description of Artificial Sequence: Synthetic oligonucleotide
ggcacaucgugcuguggcu

SEQ ID NO: 2209130 - RNA, 19 nt, Artificial Sequence
  Description of Artificial Sequence: Synthetic oligonucleotide
ccuuaauaaggagucuugu

SEQ ID NO: 2209131 - RNA, 19 nt, Artificial Sequence
  Description of Artificial Sequence: Synthetic oligonucleotide
accuggccuucaccuacuu

SEQ ID NO: 2209132 - RNA, 19 nt, Artificial Sequence
  Description of Artificial Sequence: Synthetic oligonucleotide
gguuucuagcugccauucu

SEQ ID NO: 2209133 - RNA, 19 nt, Artificial Sequence
  Description of Artificial Sequence: Synthetic oligonucleotide
cguuuguauucacaguugu

SEQ ID NO: 2209134 - RNA, 19 nt, Artificial Sequence
  Description of Artificial Sequence: Synthetic oligonucleotide
ggcagcuagacgguuucua

SEQ ID NO: 2209135 - RNA, 19 nt, Artificial Sequence
  Description of Artificial Sequence: Synthetic oligonucleotide
gccacuugggcacacucuu

SEQ ID NO: 2209136 - RNA, 19 nt, Artificial Sequence
  Description of Artificial Sequence: Synthetic oligonucleotide
caucgugcuguggcugaga

SEQ ID NO: 2209137 - RNA, 19 nt, Artificial Sequence
  Description of Artificial Sequence: Synthetic oligonucleotide
ggcgcuguucugagguuca

SEQ ID NO: 2209138 - RNA, 19 nt, Artificial Sequence
  Description of Artificial Sequence: Synthetic oligonucleotide
cagcccuguucucaggcau

SEQ ID NO: 2209139 - RNA, 19 nt, Artificial Sequence
  Description of Artificial Sequence: Synthetic oligonucleotide
cgguuucuagcugccauuc

SEQ ID NO: 2209140 - RNA, 19 nt, Artificial Sequence
  Description of Artificial Sequence: Synthetic oligonucleotide
cggaaaggcaauuggaauu

SEQ ID NO: 2209141 - RNA, 19 nt, Artificial Sequence
  Description of Artificial Sequence: Synthetic oligonucleotide
caguuucugacuggaggau

SEQ ID NO: 2209142 - RNA, 19 nt, Artificial Sequence
  Description of Artificial Sequence: Synthetic oligonucleotide
gacucggcuggcagacgua

SEQ ID NO: 2209143 - RNA, 19 nt, Artificial Sequence
  Description of Artificial Sequence: Synthetic oligonucleotide
ccucguuuguauucacagu

SEQ ID NO: 2209144 - RNA, 19 nt, Artificial Sequence
  Description of Artificial Sequence: Synthetic oligonucleotide
gaccaacugcugugcgaau

SEQ ID NO: 2209145 - RNA, 19 nt, Artificial Sequence
  Description of Artificial Sequence: Synthetic oligonucleotide
gcagacguaggugcuccaa

SEQ ID NO: 2209146 - RNA, 19 nt, Artificial Sequence
  Description of Artificial Sequence: Synthetic oligonucleotide
caccuacuucaagcgaugu

SEQ ID NO: 2209147 - RNA, 19 nt, Artificial Sequence
  Description of Artificial Sequence: Synthetic oligonucleotide
cugagcagguagucucuuu

SEQ ID NO: 2209148 - RNA, 19 nt, Artificial Sequence
  Description of Artificial Sequence: Synthetic oligonucleotide
ccuuccacggaaaggcaau

SEQ ID NO: 2209149 - RNA, 19 nt, Artificial Sequence
  Description of Artificial Sequence: Synthetic oligonucleotide
cugugcgaauaagaucuuu

SEQ ID NO: 2209150 - RNA, 19 nt, Artificial Sequence
  Description of Artificial Sequence: Synthetic oligonucleotide
caaguuugaucagguuguu

SEQ ID NO: 2209151 - RNA, 19 nt, Artificial Sequence
  Description of Artificial Sequence: Synthetic oligonucleotide
caccuggccuucaccuacu

SEQ ID NO: 2209152 - RNA, 19 nt, Artificial Sequence
  Description of Artificial Sequence: Synthetic oligonucleotide
guucgaccaggcacaguuu

SEQ ID NO: 2209153 - RNA, 19 nt, Artificial Sequence
  Description of Artificial Sequence: Synthetic oligonucleotide
ccucaaguuugaucagguu

SEQ ID NO: 2209154 - RNA, 19 nt, Artificial Sequence
  Description of Artificial Sequence: Synthetic oligonucleotide
cagcuuccucaaguuugau

SEQ ID NO: 2209155 - RNA, 19 nt, Artificial Sequence
  Description of Artificial Sequence: Synthetic oligonucleotide
ccaguccuucaaacuguuu

SEQ ID NO: 2209156 - RNA, 19 nt, Artificial Sequence
  Description of Artificial Sequence: Synthetic oligonucleotide
aaaauauuaacucaggcca

SEQ ID NO: 2209157 - RNA, 19 nt, Artificial Sequence
  Description of Artificial Sequence: Synthetic oligonucleotide
aaaucugaagaucacacac

SEQ ID NO: 2209158 - RNA, 19 nt, Artificial Sequence
  Description of Artificial Sequence: Synthetic oligonucleotide
ucuaauuaguuuaucaacg

SEQ ID NO: 2209159 - RNA, 19 nt, Artificial Sequence
  Description of Artificial Sequence: Synthetic oligonucleotide
aagaauauauuccugaacu

SEQ ID NO: 2209160 - RNA, 19 nt, Artificial Sequence
  Description of Artificial Sequence: Synthetic oligonucleotide
uaaaauauuaacucaggcc

SEQ ID NO: 2209161 - RNA, 19 nt, Artificial Sequence
  Description of Artificial Sequence: Synthetic oligonucleotide
uuguauauaacaaagggaa

SEQ ID NO: 2209162 - RNA, 19 nt, Artificial Sequence
  Description of Artificial Sequence: Synthetic oligonucleotide
cuaagaaaauuuuagcugg

SEQ ID NO: 2209163 - RNA, 19 nt, Artificial Sequence
  Description of Artificial Sequence: Synthetic oligonucleotide
uauaaggggauuaaaaucu

SEQ ID NO: 2209164 - RNA, 19 nt, Artificial Sequence
  Description of Artificial Sequence: Synthetic oligonucleotide
uauaacaaagggaaguuag

SEQ ID NO: 2209165 - RNA, 19 nt, Artificial Sequence
  Description of Artificial Sequence: Synthetic oligonucleotide
uauaucuccuuucauagag

SEQ ID NO: 2209166 - RNA, 19 nt, Artificial Sequence
  Description of Artificial Sequence: Synthetic oligonucleotide
aucaccugaaucuuggagc

SEQ ID NO: 2209167 - RNA, 19 nt, Artificial Sequence
  Description of Artificial Sequence: Synthetic oligonucleotide
aaaaccagaaaccaucagu

SEQ ID NO: 2209168 - RNA, 19 nt, Artificial Sequence
  Description of Artificial Sequence: Synthetic oligonucleotide
acaaguaggacacggauuc

SEQ ID NO: 2209169 - RNA, 19 nt, Artificial Sequence
  Description of Artificial Sequence: Synthetic oligonucleotide
uaucaacguauuuugaagg

SEQ ID NO: 2209170 - RNA, 19 nt, Artificial Sequence
  Description of Artificial Sequence: Synthetic oligonucleotide
aaucaaagcaaauuccaca

SEQ ID NO: 2209171 - RNA, 19 nt, Artificial Sequence
  Description of Artificial Sequence: Synthetic oligonucleotide
uuguauaaggcucagucca

SEQ ID NO: 2209172 - RNA, 19 nt, Artificial Sequence
  Description of Artificial Sequence: Synthetic oligonucleotide
aaggcagcauuauuuauuc

SEQ ID NO: 2209173 - RNA, 19 nt, Artificial Sequence
  Description of Artificial Sequence: Synthetic oligonucleotide
ucuccuuucauagagcugg

SEQ ID NO: 2209174 - RNA, 19 nt, Artificial Sequence
  Description of Artificial Sequence: Synthetic oligonucleotide
uuaucaacguauuuugaag

SEQ ID NO: 2209175 - RNA, 19 nt, Artificial Sequence
  Description of Artificial Sequence: Synthetic oligonucleotide
agaguaacuuaucugcagc

SEQ ID NO: 2209176 - RNA, 19 nt, Artificial Sequence
  Description of Artificial Sequence: Synthetic oligonucleotide
agaucacacacacacacac

SEQ ID NO: 2209177 - RNA, 19 nt, Artificial Sequence
  Description of Artificial Sequence: Synthetic oligonucleotide
aucacacacacacacacac

SEQ ID NO: 2209178 - RNA, 19 nt, Artificial Sequence
  Description of Artificial Sequence: Synthetic oligonucleotide
uuuuauugaaaugucuuag

SEQ ID NO: 2209179 - RNA, 19 nt, Artificial Sequence
  Description of Artificial Sequence: Synthetic oligonucleotide
gucuuaguaaacuucacag

SEQ ID NO: 2209180 - RNA, 19 nt, Artificial Sequence
  Description of Artificial Sequence: Synthetic oligonucleotide
uuuacauuuccuuaccaca

SEQ ID NO: 2209181 - RNA, 19 nt, Artificial Sequence
  Description of Artificial Sequence: Synthetic oligonucleotide
aauauauuccugaacuuag

SEQ ID NO: 2209182 - RNA, 19 nt, Artificial Sequence
  Description of Artificial Sequence: Synthetic oligonucleotide
cuuaccacaagcagcaagg

SEQ ID NO: 2209183 - RNA, 19 nt, Artificial Sequence
  Description of Artificial Sequence: Synthetic oligonucleotide
ucuuaguaaacuucacagg

SEQ ID NO: 2209184 - RNA, 19 nt, Artificial Sequence
  Description of Artificial Sequence: Synthetic oligonucleotide
aguuuaucaacguauuuug

SEQ ID NO: 2209185 - RNA, 19 nt, Artificial Sequence
  Description of Artificial Sequence: Synthetic oligonucleotide
aguaaaaccagaaaccauc

SEQ ID NO: 2209186 - RNA, 19 nt, Artificial Sequence
  Description of Artificial Sequence: Synthetic oligonucleotide
ucucuagucucuaaaacca

SEQ ID NO: 2209187 - RNA, 19 nt, Artificial Sequence
  Description of Artificial Sequence: Synthetic oligonucleotide
aaauagcuggcccagagaa

SEQ ID NO: 2209188 - RNA, 19 nt, Artificial Sequence
  Description of Artificial Sequence: Synthetic oligonucleotide
gaagaucacacacacacac

SEQ ID NO: 2209189 - RNA, 19 nt, Artificial Sequence
  Description of Artificial Sequence: Synthetic oligonucleotide
aacugaaaccaccaaauau

SEQ ID NO: 2209190 - RNA, 19 nt, Artificial Sequence
  Description of Artificial Sequence: Synthetic oligonucleotide
ucauuuuguccucuugugg

SEQ ID NO: 2209191 - RNA, 19 nt, Artificial Sequence
  Description of Artificial Sequence: Synthetic oligonucleotide
uucucuagucucuaaaacc

SEQ ID NO: 2209192 - RNA, 19 nt, Artificial Sequence
  Description of Artificial Sequence: Synthetic oligonucleotide
cuuaucugcagcauggcag

SEQ ID NO: 2209193 - RNA, 19 nt, Artificial Sequence
  Description of Artificial Sequence: Synthetic oligonucleotide
auucucuagucucuaaaac

SEQ ID NO: 2209194 - RNA, 19 nt, Artificial Sequence
  Description of Artificial Sequence: Synthetic oligonucleotide
uguauaaggggauuaaaau

SEQ ID NO: 2209195 - RNA, 19 nt, Artificial Sequence
  Description of Artificial Sequence: Synthetic oligonucleotide
uuuccuuaccacaagcagc

SEQ ID NO: 2209196 - RNA, 19 nt, Artificial Sequence
  Description of Artificial Sequence: Synthetic oligonucleotide
aauuaguuuaucaacguau

SEQ ID NO: 2209197 - RNA, 19 nt, Artificial Sequence
  Description of Artificial Sequence: Synthetic oligonucleotide
aauuguguuggugacaaca

SEQ ID NO: 2209198 - RNA, 19 nt, Artificial Sequence
  Description of Artificial Sequence: Synthetic oligonucleotide
ugacuaagaaaauuuuagc

SEQ ID NO: 2209199 - RNA, 19 nt, Artificial Sequence
  Description of Artificial Sequence: Synthetic oligonucleotide
ucuucgaauggccucagcc

SEQ ID NO: 2209200 - RNA, 19 nt, Artificial Sequence
  Description of Artificial Sequence: Synthetic oligonucleotide
uuuagcuggaggcuaaaca

SEQ ID NO: 2209201 - RNA, 19 nt, Artificial Sequence
  Description of Artificial Sequence: Synthetic oligonucleotide
uuuaucaacguauuuugaa

SEQ ID NO: 2209202 - RNA, 19 nt, Artificial Sequence
  Description of Artificial Sequence: Synthetic oligonucleotide
uggaggcuaaacaacauug

SEQ ID NO: 2209203 - RNA, 19 nt, Artificial Sequence
  Description of Artificial Sequence: Synthetic oligonucleotide
uuagcauaggaacaucuac

SEQ ID NO: 2209204 - RNA, 19 nt, Artificial Sequence
  Description of Artificial Sequence: Synthetic oligonucleotide
aaacuuugguggcaccagc

SEQ ID NO: 2209205 - RNA, 19 nt, Artificial Sequence
  Description of Artificial Sequence: Synthetic oligonucleotide
cauugaaaugucaaucacc

SEQ ID NO: 2209206 - RNA, 19 nt, Artificial Sequence
  Description of Artificial Sequence: Synthetic oligonucleotide
uaaaaccagagcaagcacu

SEQ ID NO: 2209207 - RNA, 19 nt, Artificial Sequence
  Description of Artificial Sequence: Synthetic oligonucleotide
cauuguauaaggcucaguc

SEQ ID NO: 2209208 - RNA, 19 nt, Artificial Sequence
  Description of Artificial Sequence: Synthetic oligonucleotide
aaugucuuaguaaacuuca

SEQ ID NO: 2209209 - RNA, 19 nt, Artificial Sequence
  Description of Artificial Sequence: Synthetic oligonucleotide
aucucaaaauucucuaguc

SEQ ID NO: 2209210 - RNA, 19 nt, Artificial Sequence
  Description of Artificial Sequence: Synthetic oligonucleotide
aucauugaaaugucaauca

SEQ ID NO: 2209211 - RNA, 19 nt, Artificial Sequence
  Description of Artificial Sequence: Synthetic oligonucleotide
uagcauaggaacaucuacc

SEQ ID NO: 2209212 - RNA, 19 nt, Artificial Sequence
  Description of Artificial Sequence: Synthetic oligonucleotide
cuuaguaaacuucacagga

SEQ ID NO: 2209213 - RNA, 19 nt, Artificial Sequence
  Description of Artificial Sequence: Synthetic oligonucleotide
uuguauaaggggauuaaaa

SEQ ID NO: 2209214 - RNA, 19 nt, Artificial Sequence
  Description of Artificial Sequence: Synthetic oligonucleotide
aaguaggacacggauuccc

SEQ ID NO: 2209215 - RNA, 19 nt, Artificial Sequence
  Description of Artificial Sequence: Synthetic oligonucleotide
cuuagacuguaccugaagc

SEQ ID NO: 2209216 - RNA, 19 nt, Artificial Sequence
  Description of Artificial Sequence: Synthetic oligonucleotide
uuaacucaggccaaguaaa

SEQ ID NO: 2209217 - RNA, 19 nt, Artificial Sequence
  Description of Artificial Sequence: Synthetic oligonucleotide
aauucucuagucucuaaaa

SEQ ID NO: 2209218 - RNA, 19 nt, Artificial Sequence
  Description of Artificial Sequence: Synthetic oligonucleotide
auugaaaugucaaucaccu

SEQ ID NO: 2209219 - RNA, 19 nt, Artificial Sequence
  Description of Artificial Sequence: Synthetic oligonucleotide
cucaaaauucucuagucuc

SEQ ID NO: 2209220 - RNA, 19 nt, Artificial Sequence
  Description of Artificial Sequence: Synthetic oligonucleotide
ugucuuaguaaacuucaca

SEQ ID NO: 2209221 - RNA, 19 nt, Artificial Sequence
  Description of Artificial Sequence: Synthetic oligonucleotide
aaccagaaaccaucagugg

SEQ ID NO: 2209222 - RNA, 19 nt, Artificial Sequence
  Description of Artificial Sequence: Synthetic oligonucleotide
aaucuuggagcaguguuuc

SEQ ID NO: 2209223 - RNA, 19 nt, Artificial Sequence
  Description of Artificial Sequence: Synthetic oligonucleotide
uuuauugaaaugucuuagu

SEQ ID NO: 2209224 - RNA, 19 nt, Artificial Sequence
  Description of Artificial Sequence: Synthetic oligonucleotide
guauaaggggauuaaaauc

SEQ ID NO: 2209225 - RNA, 19 nt, Artificial Sequence
  Description of Artificial Sequence: Synthetic oligonucleotide
acacacugagcucccaucc

SEQ ID NO: 2209226 - RNA, 19 nt, Artificial Sequence
  Description of Artificial Sequence: Synthetic oligonucleotide
gaugguaccacauguguca

SEQ ID NO: 2209227 - RNA, 19 nt, Artificial Sequence
  Description of Artificial Sequence: Synthetic oligonucleotide
aauauuaacucaggccaag

SEQ ID NO: 2209228 - RNA, 19 nt, Artificial Sequence
  Description of Artificial Sequence: Synthetic oligonucleotide
cagacuacgaagugggacg

SEQ ID NO: 2209229 - RNA, 19 nt, Artificial Sequence
  Description of Artificial Sequence: Synthetic oligonucleotide
auuaacucaggccaaguaa

SEQ ID NO: 2209230 - RNA, 19 nt, Artificial Sequence
  Description of Artificial Sequence: Synthetic oligonucleotide
gucuaauuaguuuaucaac

SEQ ID NO: 2209231 - RNA, 19 nt, Artificial Sequence
  Description of Artificial Sequence: Synthetic oligonucleotide
aaauucucuagucucuaaa

SEQ ID NO: 2209232 - RNA, 19 nt, Artificial Sequence
  Description of Artificial Sequence: Synthetic oligonucleotide
uaguaaacuucacaggauc

SEQ ID NO: 2209233 - RNA, 19 nt, Artificial Sequence
  Description of Artificial Sequence: Synthetic oligonucleotide
cuagucucuaaaaccagag

SEQ ID NO: 2209234 - RNA, 19 nt, Artificial Sequence
  Description of Artificial Sequence: Synthetic oligonucleotide
ucauugaaaugucaaucac

SEQ ID NO: 2209235 - RNA, 19 nt, Artificial Sequence
  Description of Artificial Sequence: Synthetic oligonucleotide
aacaucuaccaguugacua

SEQ ID NO: 2209236 - RNA, 19 nt, Artificial Sequence
  Description of Artificial Sequence: Synthetic oligonucleotide
auuguauauaacaaaggga

SEQ ID NO: 2209237 - RNA, 19 nt, Artificial Sequence
  Description of Artificial Sequence: Synthetic oligonucleotide
auaacaaagggaaguuagc

SEQ ID NO: 2209238 - RNA, 19 nt, Artificial Sequence
  Description of Artificial Sequence: Synthetic oligonucleotide
agucuaauuaguuuaucaa

SEQ ID NO: 2209239 - RNA, 19 nt, Artificial Sequence
  Description of Artificial Sequence: Synthetic oligonucleotide
aacuuagucaacauuguau

SEQ ID NO: 2209240 - RNA, 19 nt, Artificial Sequence
  Description of Artificial Sequence: Synthetic oligonucleotide
uaacaaagggaaguuagca

SEQ ID NO: 2209241 - RNA, 19 nt, Artificial Sequence
  Description of Artificial Sequence: Synthetic oligonucleotide
agagcaagcacuguaaaga

SEQ ID NO: 2209242 - RNA, 19 nt, Artificial Sequence
  Description of Artificial Sequence: Synthetic oligonucleotide
ucuagucucuaaaaccaga

SEQ ID NO: 2209243 - RNA, 19 nt, Artificial Sequence
  Description of Artificial Sequence: Synthetic oligonucleotide
aaaguccugggcuuagacu

SEQ ID NO: 2209244 - RNA, 19 nt, Artificial Sequence
  Description of Artificial Sequence: Synthetic oligonucleotide
aacucaggccaaguaaaac

SEQ ID NO: 2209245 - RNA, 19 nt, Artificial Sequence
  Description of Artificial Sequence: Synthetic oligonucleotide
aagggaaguuagcauagga

SEQ ID NO: 2209246 - RNA, 19 nt, Artificial Sequence
  Description of Artificial Sequence: Synthetic oligonucleotide
agcaggauuuuauugaaau

SEQ ID NO: 2209247 - RNA, 19 nt, Artificial Sequence
  Description of Artificial Sequence: Synthetic oligonucleotide
acuuagucaacauuguaua

SEQ ID NO: 2209248 - RNA, 19 nt, Artificial Sequence
  Description of Artificial Sequence: Synthetic oligonucleotide
aggggauuaaaaucugaag

SEQ ID NO: 2209249 - RNA, 19 nt, Artificial Sequence
  Description of Artificial Sequence: Synthetic oligonucleotide
ugaacuuagucaacauugu

SEQ ID NO: 2209250 - RNA, 19 nt, Artificial Sequence
  Description of Artificial Sequence: Synthetic oligonucleotide
ugagaguaacuuaucugca

SEQ ID NO: 2209251 - RNA, 19 nt, Artificial Sequence
  Description of Artificial Sequence: Synthetic oligonucleotide
ggcagauuuguauaagggg

SEQ ID NO: 2209252 - RNA, 19 nt, Artificial Sequence
  Description of Artificial Sequence: Synthetic oligonucleotide
ucuggaaauagcuggccca

SEQ ID NO: 2209253 - RNA, 19 nt, Artificial Sequence
  Description of Artificial Sequence: Synthetic oligonucleotide
uguaccugaagcaggcuac

SEQ ID NO: 2209254 - RNA, 19 nt, Artificial Sequence
  Description of Artificial Sequence: Synthetic oligonucleotide
uagacuguaccugaagcag

SEQ ID NO: 2209255 - RNA, 19 nt, Artificial Sequence
  Description of Artificial Sequence: Synthetic oligonucleotide
uguauaaggcucaguccag

SEQ ID NO: 2209256 - RNA, 19 nt, Artificial Sequence
  Description of Artificial Sequence: Synthetic oligonucleotide
ucuaccaguugacuaagaa

SEQ ID NO: 2209257 - RNA, 19 nt, Artificial Sequence
  Description of Artificial Sequence: Synthetic oligonucleotide
agcauaggaacaucuacca

SEQ ID NO: 2209258 - RNA, 19 nt, Artificial Sequence
  Description of Artificial Sequence: Synthetic oligonucleotide
cacggauucccauuguggg

SEQ ID NO: 2209259 - RNA, 19 nt, Artificial Sequence
  Description of Artificial Sequence: Synthetic oligonucleotide
gccaaguaaaaccagaaac

SEQ ID NO: 2209260 - RNA, 19 nt, Artificial Sequence
  Description of Artificial Sequence: Synthetic oligonucleotide
cacaucgcccaccagaacc

SEQ ID NO: 2209261 - RNA, 19 nt, Artificial Sequence
  Description of Artificial Sequence: Synthetic oligonucleotide
aaccaccaaauauuuaaaa

SEQ ID NO: 2209262 - RNA, 19 nt, Artificial Sequence
  Description of Artificial Sequence: Synthetic oligonucleotide
agcacuguaaagaauauau

SEQ ID NO: 2209263 - RNA, 19 nt, Artificial Sequence
  Description of Artificial Sequence: Synthetic oligonucleotide
ggggauuaaaaucugaaga

SEQ ID NO: 2209264 - RNA, 19 nt, Artificial Sequence
  Description of Artificial Sequence: Synthetic oligonucleotide
guaacuuaucugcagcaug

SEQ ID NO: 2209265 - RNA, 19 nt, Artificial Sequence
  Description of Artificial Sequence: Synthetic oligonucleotide
ucaccugaaucuuggagca

SEQ ID NO: 2209266 - RNA, 19 nt, Artificial Sequence
  Description of Artificial Sequence: Synthetic oligonucleotide
caacguauuuugaagguuc

SEQ ID NO: 2209267 - RNA, 19 nt, Artificial Sequence
  Description of Artificial Sequence: Synthetic oligonucleotide
uacauuuccuuaccacaag

SEQ ID NO: 2209268 - RNA, 19 nt, Artificial Sequence
  Description of Artificial Sequence: Synthetic oligonucleotide
uuaguaaacuucacaggau

SEQ ID NO: 2209269 - RNA, 19 nt, Artificial Sequence
  Description of Artificial Sequence: Synthetic oligonucleotide
ucuguauuuccauuguaua

SEQ ID NO: 2209270 - RNA, 19 nt, Artificial Sequence
  Description of Artificial Sequence: Synthetic oligonucleotide
cacacacacacacacacac

SEQ ID NO: 2209271 - RNA, 19 nt, Artificial Sequence
  Description of Artificial Sequence: Synthetic oligonucleotide
aguguuucauuuuguccuc

SEQ ID NO: 2209272 - RNA, 19 nt, Artificial Sequence
  Description of Artificial Sequence: Synthetic oligonucleotide
cacacacacacacacacug

SEQ ID NO: 2209273 - RNA, 19 nt, Artificial Sequence
  Description of Artificial Sequence: Synthetic oligonucleotide
uuaucugcagcauggcaga

SEQ ID NO: 2209274 - RNA, 19 nt, Artificial Sequence
  Description of Artificial Sequence: Synthetic oligonucleotide
uaguuuaucaacguauuuu

SEQ ID NO: 2209275 - RNA, 19 nt, Artificial Sequence
  Description of Artificial Sequence: Synthetic oligonucleotide
ugaacaaguaggacacgga

SEQ ID NO: 2209276 - RNA, 19 nt, Artificial Sequence
  Description of Artificial Sequence: Synthetic oligonucleotide
aucaacguauuuugaaggu

SEQ ID NO: 2209277 - RNA, 19 nt, Artificial Sequence
  Description of Artificial Sequence: Synthetic oligonucleotide
auuguggguucuucgaaug

SEQ ID NO: 2209278 - RNA, 19 nt, Artificial Sequence
  Description of Artificial Sequence: Synthetic oligonucleotide
uauauaacaaagggaaguu

SEQ ID NO: 2209279 - RNA, 19 nt, Artificial Sequence
  Description of Artificial Sequence: Synthetic oligonucleotide
uagucucuaaaaccagagc

SEQ ID NO: 2209280 - RNA, 19 nt, Artificial Sequence
  Description of Artificial Sequence: Synthetic oligonucleotide
cucaguccagucuaauuag

SEQ ID NO: 2209281 - RNA, 19 nt, Artificial Sequence
  Description of Artificial Sequence: Synthetic oligonucleotide
uaaggggauuaaaaucuga

SEQ ID NO: 2209282 - RNA, 19 nt, Artificial Sequence
  Description of Artificial Sequence: Synthetic oligonucleotide
uauuaacucaggccaagua

SEQ ID NO: 2209283 - RNA, 19 nt, Artificial Sequence
  Description of Artificial Sequence: Synthetic oligonucleotide
uuagucaacauuguauaua

SEQ ID NO: 2209284 - RNA, 19 nt, Artificial Sequence
  Description of Artificial Sequence: Synthetic oligonucleotide
uguuggugacaacaacagc

SEQ ID NO: 2209285 - RNA, 19 nt, Artificial Sequence
  Description of Artificial Sequence: Synthetic oligonucleotide
aggauuuuauugaaauguc

SEQ ID NO: 2209286 - RNA, 19 nt, Artificial Sequence
  Description of Artificial Sequence: Synthetic oligonucleotide
gacguggcugaacaaguag

SEQ ID NO: 2209287 - RNA, 19 nt, Artificial Sequence
  Description of Artificial Sequence: Synthetic oligonucleotide
uaaggcucaguccagucua

SEQ ID NO: 2209288 - RNA, 19 nt, Artificial Sequence
  Description of Artificial Sequence: Synthetic oligonucleotide
caggcuacgucauuuuggc

SEQ ID NO: 2209289 - RNA, 19 nt, Artificial Sequence
  Description of Artificial Sequence: Synthetic oligonucleotide
gucauuuuggccaaacuga

SEQ ID NO: 2209290 - RNA, 19 nt, Artificial Sequence
  Description of Artificial Sequence: Synthetic oligonucleotide
ugaagaucacacacacaca

SEQ ID NO: 2209291 - RNA, 19 nt, Artificial Sequence
  Description of Artificial Sequence: Synthetic oligonucleotide
acuacgaagugggacgugg

SEQ ID NO: 2209292 - RNA, 19 nt, Artificial Sequence
  Description of Artificial Sequence: Synthetic oligonucleotide
uuaguuuaucaacguauuu

SEQ ID NO: 2209293 - RNA, 19 nt, Artificial Sequence
  Description of Artificial Sequence: Synthetic oligonucleotide
aaacugaaaccaccaaaua

SEQ ID NO: 2209294 - RNA, 19 nt, Artificial Sequence
  Description of Artificial Sequence: Synthetic oligonucleotide
uggccaaacugaaaccacc

SEQ ID NO: 2209295 - RNA, 19 nt, Artificial Sequence
  Description of Artificial Sequence: Synthetic oligonucleotide
auccagacuacgaaguggg

SEQ ID NO: 2209296 - RNA, 19 nt, Artificial Sequence
  Description of Artificial Sequence: Synthetic oligonucleotide
aaucugaagaucacacaca

SEQ ID NO: 2209297 - RNA, 19 nt, Artificial Sequence
  Description of Artificial Sequence: Synthetic oligonucleotide
agcauuauuuauucuggaa

SEQ ID NO: 2209298 - RNA, 19 nt, Artificial Sequence
  Description of Artificial Sequence: Synthetic oligonucleotide
acugaaaccaccaaauauu

SEQ ID NO: 2209299 - RNA, 19 nt, Artificial Sequence
  Description of Artificial Sequence: Synthetic oligonucleotide
agugggacguggcugaaca

SEQ ID NO: 2209300 - RNA, 19 nt, Artificial Sequence
  Description of Artificial Sequence: Synthetic oligonucleotide
gaagaucccauggguaagg

SEQ ID NO: 2209301 - RNA, 19 nt, Artificial Sequence
  Description of Artificial Sequence: Synthetic oligonucleotide
gucaguucagaggacagcc

SEQ ID NO: 2209302 - RNA, 19 nt, Artificial Sequence
  Description of Artificial Sequence: Synthetic oligonucleotide
cacacacacacacacugag

SEQ ID NO: 2209303 - RNA, 19 nt, Artificial Sequence
  Description of Artificial Sequence: Synthetic oligonucleotide
aaccauccgguccacuuca

SEQ ID NO: 2209304 - RNA, 19 nt, Artificial Sequence
  Description of Artificial Sequence: Synthetic oligonucleotide
ucaggccaaguaaaaccag

SEQ ID NO: 2209305 - RNA, 19 nt, Artificial Sequence
  Description of Artificial Sequence: Synthetic oligonucleotide
ucccauuguggguucuucg

SEQ ID NO: 2209306 - RNA, 19 nt, Artificial Sequence
  Description of Artificial Sequence: Synthetic oligonucleotide
auaaggcucaguccagucu

SEQ ID NO: 2209307 - RNA, 19 nt, Artificial Sequence
  Description of Artificial Sequence: Synthetic oligonucleotide
uaccacaugugucagccau

SEQ ID NO: 2209308 - RNA, 19 nt, Artificial Sequence
  Description of Artificial Sequence: Synthetic oligonucleotide
gagaagaucccauggguaa

SEQ ID NO: 2209309 - RNA, 19 nt, Artificial Sequence
  Description of Artificial Sequence: Synthetic oligonucleotide
gaguaacuuaucugcagca

SEQ ID NO: 2209310 - RNA, 19 nt, Artificial Sequence
  Description of Artificial Sequence: Synthetic oligonucleotide
ucccauccagacuacgaag

SEQ ID NO: 2209311 - RNA, 19 nt, Artificial Sequence
  Description of Artificial Sequence: Synthetic oligonucleotide
cagucuaauuaguuuauca

SEQ ID NO: 2209312 - RNA, 19 nt, Artificial Sequence
  Description of Artificial Sequence: Synthetic oligonucleotide
guauauaacaaagggaagu

SEQ ID NO: 2209313 - RNA, 19 nt, Artificial Sequence
  Description of Artificial Sequence: Synthetic oligonucleotide
ugggcuuagacuguaccug

SEQ ID NO: 2209314 - RNA, 19 nt, Artificial Sequence
  Description of Artificial Sequence: Synthetic oligonucleotide
uuuguauaaggggauuaaa

SEQ ID NO: 2209315 - RNA, 19 nt, Artificial Sequence
  Description of Artificial Sequence: Synthetic oligonucleotide
aaauauuaacucaggccaa

SEQ ID NO: 2209316 - RNA, 19 nt, Artificial Sequence
  Description of Artificial Sequence: Synthetic oligonucleotide
cagagcaagcacuguaaag

SEQ ID NO: 2209317 - RNA, 19 nt, Artificial Sequence
  Description of Artificial Sequence: Synthetic oligonucleotide
cauuguauaucuccuuuca

SEQ ID NO: 2209318 - RNA, 19 nt, Artificial Sequence
  Description of Artificial Sequence: Synthetic oligonucleotide
caguucagaggacagccag

SEQ ID NO: 2209319 - RNA, 19 nt, Artificial Sequence
  Description of Artificial Sequence: Synthetic oligonucleotide
uuguguuggugacaacaac

SEQ ID NO: 2209320 - RNA, 19 nt, Artificial Sequence
  Description of Artificial Sequence: Synthetic oligonucleotide
ucugaagaucacacacaca

SEQ ID NO: 2209321 - RNA, 19 nt, Artificial Sequence
  Description of Artificial Sequence: Synthetic oligonucleotide
gacacggauucccauugug

SEQ ID NO: 2209322 - RNA, 19 nt, Artificial Sequence
  Description of Artificial Sequence: Synthetic oligonucleotide
aggacacggauucccauug

SEQ ID NO: 2209323 - RNA, 19 nt, Artificial Sequence
  Description of Artificial Sequence: Synthetic oligonucleotide
auuguauaucuccuuucau

SEQ ID NO: 2209324 - RNA, 19 nt, Artificial Sequence
  Description of Artificial Sequence: Synthetic oligonucleotide
aaacaacauuguauaucuc

SEQ ID NO: 2209325 - RNA, 19 nt, Artificial Sequence
  Description of Artificial Sequence: Synthetic oligonucleotide
cucuagucucuaaaaccag

SEQ ID NO: 2209326 - RNA, 19 nt, Artificial Sequence
  Description of Artificial Sequence: Synthetic oligonucleotide
aagguucuuuaaaauauua

SEQ ID NO: 2209327 - RNA, 19 nt, Artificial Sequence
  Description of Artificial Sequence: Synthetic oligonucleotide
uccagucuaauuaguuuau

SEQ ID NO: 2209328 - RNA, 19 nt, Artificial Sequence
  Description of Artificial Sequence: Synthetic oligonucleotide
guauuuugaagguucuuua

SEQ ID NO: 2209329 - RNA, 19 nt, Artificial Sequence
  Description of Artificial Sequence: Synthetic oligonucleotide
ggcuacgucauuuuggcca

SEQ ID NO: 2209330 - RNA, 19 nt, Artificial Sequence
  Description of Artificial Sequence: Synthetic oligonucleotide
aguaaacuucacaggaucu

SEQ ID NO: 2209331 - RNA, 19 nt, Artificial Sequence
  Description of Artificial Sequence: Synthetic oligonucleotide
ggaucucaaaauucucuag

SEQ ID NO: 2209332 - RNA, 19 nt, Artificial Sequence
  Description of Artificial Sequence: Synthetic oligonucleotide
cuguauuuccauuguauaa

SEQ ID NO: 2209333 - RNA, 19 nt, Artificial Sequence
  Description of Artificial Sequence: Synthetic oligonucleotide
aguuagcauaggaacaucu

SEQ ID NO: 2209334 - RNA, 19 nt, Artificial Sequence
  Description of Artificial Sequence: Synthetic oligonucleotide
aguccagucuaauuaguuu

SEQ ID NO: 2209335 - RNA, 19 nt, Artificial Sequence
  Description of Artificial Sequence: Synthetic oligonucleotide
acacggauucccauugugg

SEQ ID NO: 2209336 - RNA, 19 nt, Artificial Sequence
  Description of Artificial Sequence: Synthetic oligonucleotide
acacacacacacugagcuc

SEQ ID NO: 2209337 - RNA, 19 nt, Artificial Sequence
  Description of Artificial Sequence: Synthetic oligonucleotide
ggaacaggaaaguccuggg

SEQ ID NO: 2209338 - RNA, 19 nt, Artificial Sequence
  Description of Artificial Sequence: Synthetic oligonucleotide
gacuguaccugaagcaggc

SEQ ID NO: 2209339 - RNA, 19 nt, Artificial Sequence
  Description of Artificial Sequence: Synthetic oligonucleotide
caccaggauggccacacgg

SEQ ID NO: 2209340 - RNA, 19 nt, Artificial Sequence
  Description of Artificial Sequence: Synthetic oligonucleotide
guucagaggacagccaggc

SEQ ID NO: 2209341 - RNA, 19 nt, Artificial Sequence
  Description of Artificial Sequence: Synthetic oligonucleotide
aacguauuuugaagguucu

SEQ ID NO: 2209342 - RNA, 19 nt, Artificial Sequence
  Description of Artificial Sequence: Synthetic oligonucleotide
uacgaagugggacguggcu

SEQ ID NO: 2209343 - RNA, 19 nt, Artificial Sequence
  Description of Artificial Sequence: Synthetic oligonucleotide
aaaugucaaucaccugaau

SEQ ID NO: 2209344 - RNA, 19 nt, Artificial Sequence
  Description of Artificial Sequence: Synthetic oligonucleotide
gaaauagcuggcccagaga

SEQ ID NO: 2209345 - RNA, 19 nt, Artificial Sequence
  Description of Artificial Sequence: Synthetic oligonucleotide
ucacacacacacacacaca

SEQ ID NO: 2209346 - RNA, 19 nt, Artificial Sequence
  Description of Artificial Sequence: Synthetic oligonucleotide
ggacagagugaucucuugg

SEQ ID NO: 2209347 - RNA, 19 nt, Artificial Sequence
  Description of Artificial Sequence: Synthetic oligonucleotide
ggcuaaacaacauuguaua

SEQ ID NO: 2209348 - RNA, 19 nt, Artificial Sequence
  Description of Artificial Sequence: Synthetic oligonucleotide
acguggcugaacaaguagg

SEQ ID NO: 2209349 - RNA, 19 nt, Artificial Sequence
  Description of Artificial Sequence: Synthetic oligonucleotide
uagagcuggacagagugau

SEQ ID NO: 2209350 - RNA, 19 nt, Artificial Sequence
  Description of Artificial Sequence: Synthetic oligonucleotide
aauuuuagcuggaggcuaa

SEQ ID NO: 2209351 - RNA, 19 nt, Artificial Sequence
  Description of Artificial Sequence: Synthetic oligonucleotide
acacacacacacacugagc

SEQ ID NO: 2209352 - RNA, 19 nt, Artificial Sequence
  Description of Artificial Sequence: Synthetic oligonucleotide
uccgguccacuucauuuug

SEQ ID NO: 2209353 - RNA, 19 nt, Artificial Sequence
  Description of Artificial Sequence: Synthetic oligonucleotide
gcagauuuguauaagggga

SEQ ID NO: 2209354 - RNA, 19 nt, Artificial Sequence
  Description of Artificial Sequence: Synthetic oligonucleotide
guccagucuaauuaguuua

SEQ ID NO: 2209355 - RNA, 19 nt, Artificial Sequence
  Description of Artificial Sequence: Synthetic oligonucleotide
uggacagagugaucucuug

SEQ ID NO: 2209356 - RNA, 19 nt, Artificial Sequence
  Description of Artificial Sequence: Synthetic oligonucleotide
aggcuacgucauuuuggcc

SEQ ID NO: 2209357 - RNA, 19 nt, Artificial Sequence
  Description of Artificial Sequence: Synthetic oligonucleotide
auuaguuuaucaacguauu

SEQ ID NO: 2209358 - RNA, 19 nt, Artificial Sequence
  Description of Artificial Sequence: Synthetic oligonucleotide
aggcuaaacaacauuguau

SEQ ID NO: 2209359 - RNA, 19 nt, Artificial Sequence
  Description of Artificial Sequence: Synthetic oligonucleotide
uggcagaugguaccacaug

SEQ ID NO: 2209360 - RNA, 19 nt, Artificial Sequence
  Description of Artificial Sequence: Synthetic oligonucleotide
uggguucuucgaauggccu

SEQ ID NO: 2209361 - RNA, 19 nt, Artificial Sequence
  Description of Artificial Sequence: Synthetic oligonucleotide
cuaccaguugacuaagaaa

SEQ ID NO: 2209362 - RNA, 19 nt, Artificial Sequence
  Description of Artificial Sequence: Synthetic oligonucleotide
cagcauggcagaugguacc

SEQ ID NO: 2209363 - RNA, 19 nt, Artificial Sequence
  Description of Artificial Sequence: Synthetic oligonucleotide
aacuuugguggcaccagcu

SEQ ID NO: 2209364 - RNA, 19 nt, Artificial Sequence
  Description of Artificial Sequence: Synthetic oligonucleotide
agacuguaccugaagcagg

SEQ ID NO: 2209365 - RNA, 19 nt, Artificial Sequence
  Description of Artificial Sequence: Synthetic oligonucleotide
uaccacaagcagcaaggaa

SEQ ID NO: 2209366 - RNA, 19 nt, Artificial Sequence
  Description of Artificial Sequence: Synthetic oligonucleotide
cagagugaucucuugguga

SEQ ID NO: 2209367 - RNA, 19 nt, Artificial Sequence
  Description of Artificial Sequence: Synthetic oligonucleotide
ugauuucccuuuacauuuc

SEQ ID NO: 2209368 - RNA, 19 nt, Artificial Sequence
  Description of Artificial Sequence: Synthetic oligonucleotide
aagaucacacacacacaca

SEQ ID NO: 2209369 - RNA, 19 nt, Artificial Sequence
  Description of Artificial Sequence: Synthetic oligonucleotide
agaagaucccauggguaag

SEQ ID NO: 2209370 - RNA, 19 nt, Artificial Sequence
  Description of Artificial Sequence: Synthetic oligonucleotide
aggaucauugaaaugucaa

SEQ ID NO: 2209371 - RNA, 19 nt, Artificial Sequence
  Description of Artificial Sequence: Synthetic oligonucleotide
ucauagagcuggacagagu

SEQ ID NO: 2209372 - RNA, 19 nt, Artificial Sequence
  Description of Artificial Sequence: Synthetic oligonucleotide
ggauuaaaaucugaagauc

SEQ ID NO: 2209373 - RNA, 19 nt, Artificial Sequence
  Description of Artificial Sequence: Synthetic oligonucleotide
auaaggggauuaaaaucug

SEQ ID NO: 2209374 - RNA, 19 nt, Artificial Sequence
  Description of Artificial Sequence: Synthetic oligonucleotide
gaacuuagucaacauugua

SEQ ID NO: 2209375 - RNA, 19 nt, Artificial Sequence
  Description of Artificial Sequence: Synthetic oligonucleotide
agcaggcuacgucauuuug

SEQ ID NO: 2209376 - RNA, 19 nt, Artificial Sequence
  Description of Artificial Sequence: Synthetic oligonucleotide
uccauuguauaaggcucag

SEQ ID NO: 2209377 - RNA, 19 nt, Artificial Sequence
  Description of Artificial Sequence: Synthetic oligonucleotide
gaacaaguaggacacggau

SEQ ID NO: 2209378 - RNA, 19 nt, Artificial Sequence
  Description of Artificial Sequence: Synthetic oligonucleotide
ucaacguauuuugaagguu

SEQ ID NO: 2209379 - RNA, 19 nt, Artificial Sequence
  Description of Artificial Sequence: Synthetic oligonucleotide
aguucagaggacagccagg

SEQ ID NO: 2209380 - RNA, 19 nt, Artificial Sequence
  Description of Artificial Sequence: Synthetic oligonucleotide
uuguggaauuguguuggug

SEQ ID NO: 2209381 - RNA, 19 nt, Artificial Sequence
  Description of Artificial Sequence: Synthetic oligonucleotide
agugaucucuuggugauuu

SEQ ID NO: 2209382 - RNA, 19 nt, Artificial Sequence
  Description of Artificial Sequence: Synthetic oligonucleotide
uuuuagcuggaggcuaaac

SEQ ID NO: 2209383 - RNA, 19 nt, Artificial Sequence
  Description of Artificial Sequence: Synthetic oligonucleotide
gcaggauuuuauugaaaug

SEQ ID NO: 2209384 - RNA, 19 nt, Artificial Sequence
  Description of Artificial Sequence: Synthetic oligonucleotide
aguugacuaagaaaauuuu

SEQ ID NO: 2209385 - RNA, 19 nt, Artificial Sequence
  Description of Artificial Sequence: Synthetic oligonucleotide
cuggaaauagcuggcccag

SEQ ID NO: 2209386 - RNA, 19 nt, Artificial Sequence
  Description of Artificial Sequence: Synthetic oligonucleotide
cuacgaagugggacguggc

SEQ ID NO: 2209387 - RNA, 19 nt, Artificial Sequence
  Description of Artificial Sequence: Synthetic oligonucleotide
auauaacaaagggaaguua

SEQ ID NO: 2209388 - RNA, 19 nt, Artificial Sequence
  Description of Artificial Sequence: Synthetic oligonucleotide
cacacacacacacugagcu

SEQ ID NO: 2209389 - RNA, 19 nt, Artificial Sequence
  Description of Artificial Sequence: Synthetic oligonucleotide
cauggguaaggauagcaua

SEQ ID NO: 2209390 - RNA, 19 nt, Artificial Sequence
  Description of Artificial Sequence: Synthetic oligonucleotide
agguucuuuaaaauauuaa

SEQ ID NO: 2209391 - RNA, 19 nt, Artificial Sequence
  Description of Artificial Sequence: Synthetic oligonucleotide
guauaucuccuuucauaga

SEQ ID NO: 2209392 - RNA, 19 nt, Artificial Sequence
  Description of Artificial Sequence: Synthetic oligonucleotide
aguaacuuaucugcagcau

SEQ ID NO: 2209393 - RNA, 19 nt, Artificial Sequence
  Description of Artificial Sequence: Synthetic oligonucleotide
ccagagaagaucccauggg

SEQ ID NO: 2209394 - RNA, 19 nt, Artificial Sequence
  Description of Artificial Sequence: Synthetic oligonucleotide
cacaggaucucaaaauucu

SEQ ID NO: 2209395 - RNA, 19 nt, Artificial Sequence
  Description of Artificial Sequence: Synthetic oligonucleotide
agucaacauuguauauaac

SEQ ID NO: 2209396 - RNA, 19 nt, Artificial Sequence
  Description of Artificial Sequence: Synthetic oligonucleotide
acggauucccauugugggu

SEQ ID NO: 2209397 - RNA, 19 nt, Artificial Sequence
  Description of Artificial Sequence: Synthetic oligonucleotide
ggaaguuagcauaggaaca

SEQ ID NO: 2209398 - RNA, 19 nt, Artificial Sequence
  Description of Artificial Sequence: Synthetic oligonucleotide
accugaaucuuggagcagu

SEQ ID NO: 2209399 - RNA, 19 nt, Artificial Sequence
  Description of Artificial Sequence: Synthetic oligonucleotide
gaaguuagcauaggaacau

SEQ ID NO: 2209400 - RNA, 19 nt, Artificial Sequence
  Description of Artificial Sequence: Synthetic oligonucleotide
acgaagugggacguggcug

SEQ ID NO: 2209401 - RNA, 19 nt, Artificial Sequence
  Description of Artificial Sequence: Synthetic oligonucleotide
auuguguuggugacaacaa

SEQ ID NO: 2209402 - RNA, 19 nt, Artificial Sequence
  Description of Artificial Sequence: Synthetic oligonucleotide
aagugggacguggcugaac

SEQ ID NO: 2209403 - RNA, 19 nt, Artificial Sequence
  Description of Artificial Sequence: Synthetic oligonucleotide
gggauuaaaaucugaagau

SEQ ID NO: 2209404 - RNA, 19 nt, Artificial Sequence
  Description of Artificial Sequence: Synthetic oligonucleotide
guuuaucaacguauuuuga

SEQ ID NO: 2209405 - RNA, 19 nt, Artificial Sequence
  Description of Artificial Sequence: Synthetic oligonucleotide
uuaccacaagcagcaagga

SEQ ID NO: 2209406 - RNA, 19 nt, Artificial Sequence
  Description of Artificial Sequence: Synthetic oligonucleotide
aaacuucacaggaucucaa

SEQ ID NO: 2209407 - RNA, 19 nt, Artificial Sequence
  Description of Artificial Sequence: Synthetic oligonucleotide
acgucauuuuggccaaacu

SEQ ID NO: 2209408 - RNA, 19 nt, Artificial Sequence
  Description of Artificial Sequence: Synthetic oligonucleotide
cgucauuuuggccaaacug

SEQ ID NO: 2209409 - RNA, 19 nt, Artificial Sequence
  Description of Artificial Sequence: Synthetic oligonucleotide
agaaaccaucaguggucag

SEQ ID NO: 2209410 - RNA, 19 nt, Artificial Sequence
  Description of Artificial Sequence: Synthetic oligonucleotide
gcaggcuacgucauuuugg

SEQ ID NO: 2209411 - RNA, 19 nt, Artificial Sequence
  Description of Artificial Sequence: Synthetic oligonucleotide
ccagaaaccaucagugguc

SEQ ID NO: 2209412 - RNA, 19 nt, Artificial Sequence
  Description of Artificial Sequence: Synthetic oligonucleotide
gcuuagacuguaccugaag

SEQ ID NO: 2209413 - RNA, 19 nt, Artificial Sequence
  Description of Artificial Sequence: Synthetic oligonucleotide
caucuaccaguugacuaag

SEQ ID NO: 2209414 - RNA, 19 nt, Artificial Sequence
  Description of Artificial Sequence: Synthetic oligonucleotide
uaggacacggauucccauu

SEQ ID NO: 2209415 - RNA, 19 nt, Artificial Sequence
  Description of Artificial Sequence: Synthetic oligonucleotide
uacgucauuuuggccaaac

SEQ ID NO: 2209416 - RNA, 19 nt, Artificial Sequence
  Description of Artificial Sequence: Synthetic oligonucleotide
caugugucagccaugucgu

SEQ ID NO: 2209417 - RNA, 19 nt, Artificial Sequence
  Description of Artificial Sequence: Synthetic oligonucleotide
aagaucccauggguaagga

SEQ ID NO: 2209418 - RNA, 19 nt, Artificial Sequence
  Description of Artificial Sequence: Synthetic oligonucleotide
uuguccucuuguggaauug

SEQ ID NO: 2209419 - RNA, 19 nt, Artificial Sequence
  Description of Artificial Sequence: Synthetic oligonucleotide
agccaggcagauuuguaua

SEQ ID NO: 2209420 - RNA, 19 nt, Artificial Sequence
  Description of Artificial Sequence: Synthetic oligonucleotide
uucuucgaauggccucagc

SEQ ID NO: 2209421 - RNA, 19 nt, Artificial Sequence
  Description of Artificial Sequence: Synthetic oligonucleotide
aagcaggcuacgucauuuu

SEQ ID NO: 2209422 - RNA, 19 nt, Artificial Sequence
  Description of Artificial Sequence: Synthetic oligonucleotide
agagaagaucccaugggua

SEQ ID NO: 2209423 - RNA, 19 nt, Artificial Sequence
  Description of Artificial Sequence: Synthetic oligonucleotide
gccaggaucauugaaaugu

SEQ ID NO: 2209424 - RNA, 19 nt, Artificial Sequence
  Description of Artificial Sequence: Synthetic oligonucleotide
uccagacuacgaaguggga

SEQ ID NO: 2209425 - RNA, 19 nt, Artificial Sequence
  Description of Artificial Sequence: Synthetic oligonucleotide
uguccucuuguggaauugu

SEQ ID NO: 2209426 - RNA, 19 nt, Artificial Sequence
  Description of Artificial Sequence: Synthetic oligonucleotide
gcucaguccagucuaauua

SEQ ID NO: 2209427 - RNA, 19 nt, Artificial Sequence
  Description of Artificial Sequence: Synthetic oligonucleotide
gaucacacacacacacaca

SEQ ID NO: 2209428 - RNA, 19 nt, Artificial Sequence
  Description of Artificial Sequence: Synthetic oligonucleotide
ggaacaucuaccaguugac

SEQ ID NO: 2209429 - RNA, 19 nt, Artificial Sequence
  Description of Artificial Sequence: Synthetic oligonucleotide
ccuuaccacaagcagcaag

SEQ ID NO: 2209430 - RNA, 19 nt, Artificial Sequence
  Description of Artificial Sequence: Synthetic oligonucleotide
ugguaccacaugugucagc

SEQ ID NO: 2209431 - RNA, 19 nt, Artificial Sequence
  Description of Artificial Sequence: Synthetic oligonucleotide
cagcauuauuuauucugga

SEQ ID NO: 2209432 - RNA, 19 nt, Artificial Sequence
  Description of Artificial Sequence: Synthetic oligonucleotide
augugucagccaugucguc

SEQ ID NO: 2209433 - RNA, 19 nt, Artificial Sequence
  Description of Artificial Sequence: Synthetic oligonucleotide
aguggucaguucagaggac

SEQ ID NO: 2209434 - RNA, 19 nt, Artificial Sequence
  Description of Artificial Sequence: Synthetic oligonucleotide
auccgguccacuucauuuu

SEQ ID NO: 2209435 - RNA, 19 nt, Artificial Sequence
  Description of Artificial Sequence: Synthetic oligonucleotide
agauuuguauaaggggauu

SEQ ID NO: 2209436 - RNA, 19 nt, Artificial Sequence
  Description of Artificial Sequence: Synthetic oligonucleotide
cacgguccuucacaucgcc

SEQ ID NO: 2209437 - RNA, 19 nt, Artificial Sequence
  Description of Artificial Sequence: Synthetic oligonucleotide
gaauuguguuggugacaac

SEQ ID NO: 2209438 - RNA, 19 nt, Artificial Sequence
  Description of Artificial Sequence: Synthetic oligonucleotide
guuagcauaggaacaucua

SEQ ID NO: 2209439 - RNA, 19 nt, Artificial Sequence
  Description of Artificial Sequence: Synthetic oligonucleotide
agacuacgaagugggacgu

SEQ ID NO: 2209440 - RNA, 19 nt, Artificial Sequence
  Description of Artificial Sequence: Synthetic oligonucleotide
ugaagcaggcuacgucauu

SEQ ID NO: 2209441 - RNA, 19 nt, Artificial Sequence
  Description of Artificial Sequence: Synthetic oligonucleotide
ucacaucgcccaccagaac

SEQ ID NO: 2209442 - RNA, 19 nt, Artificial Sequence
  Description of Artificial Sequence: Synthetic oligonucleotide
caaguaggacacggauucc

SEQ ID NO: 2209443 - RNA, 19 nt, Artificial Sequence
  Description of Artificial Sequence: Synthetic oligonucleotide
guggucaguucagaggaca

SEQ ID NO: 2209444 - RNA, 19 nt, Artificial Sequence
  Description of Artificial Sequence: Synthetic oligonucleotide
aggaaaguccugggcuuag

SEQ ID NO: 2209445 - RNA, 19 nt, Artificial Sequence
  Description of Artificial Sequence: Synthetic oligonucleotide
aggcagcauuauuuauucu

SEQ ID NO: 2209446 - RNA, 19 nt, Artificial Sequence
  Description of Artificial Sequence: Synthetic oligonucleotide
cuuagucaacauuguauau

SEQ ID NO: 2209447 - RNA, 19 nt, Artificial Sequence
  Description of Artificial Sequence: Synthetic oligonucleotide
accagagcaagcacuguaa

SEQ ID NO: 2209448 - RNA, 19 nt, Artificial Sequence
  Description of Artificial Sequence: Synthetic oligonucleotide
cagagaagaucccaugggu

SEQ ID NO: 2209449 - RNA, 19 nt, Artificial Sequence
  Description of Artificial Sequence: Synthetic oligonucleotide
agcuucaaaggcagcauua

SEQ ID NO: 2209450 - RNA, 19 nt, Artificial Sequence
  Description of Artificial Sequence: Synthetic oligonucleotide
cagaaaccaucagugguca

SEQ ID NO: 2209451 - RNA, 19 nt, Artificial Sequence
  Description of Artificial Sequence: Synthetic oligonucleotide
cagaugguaccacaugugu

SEQ ID NO: 2209452 - RNA, 19 nt, Artificial Sequence
  Description of Artificial Sequence: Synthetic oligonucleotide
ggugauuucccuuuacauu

SEQ ID NO: 2209453 - RNA, 19 nt, Artificial Sequence
  Description of Artificial Sequence: Synthetic oligonucleotide
cuggcccagagaagauccc

SEQ ID NO: 2209454 - RNA, 19 nt, Artificial Sequence
  Description of Artificial Sequence: Synthetic oligonucleotide
cccuuuacauuuccuuacc

SEQ ID NO: 2209455 - RNA, 19 nt, Artificial Sequence
  Description of Artificial Sequence: Synthetic oligonucleotide
uccuuucauagagcuggac

SEQ ID NO: 2209456 - RNA, 19 nt, Artificial Sequence
  Description of Artificial Sequence: Synthetic oligonucleotide
uucccauuguggguucuuc

SEQ ID NO: 2209457 - RNA, 19 nt, Artificial Sequence
  Description of Artificial Sequence: Synthetic oligonucleotide
gguucuucgaauggccuca

SEQ ID NO: 2209458 - RNA, 19 nt, Artificial Sequence
  Description of Artificial Sequence: Synthetic oligonucleotide
gcauaaacuuugguggcac

SEQ ID NO: 2209459 - RNA, 19 nt, Artificial Sequence
  Description of Artificial Sequence: Synthetic oligonucleotide
uggaaauagcuggcccaga

SEQ ID NO: 2209460 - RNA, 19 nt, Artificial Sequence
  Description of Artificial Sequence: Synthetic oligonucleotide
gaaucuuggagcaguguuu

SEQ ID NO: 2209461 - RNA, 19 nt, Artificial Sequence
  Description of Artificial Sequence: Synthetic oligonucleotide
cagcugagaguaacuuauc

SEQ ID NO: 2209462 - RNA, 19 nt, Artificial Sequence
  Description of Artificial Sequence: Synthetic oligonucleotide
acacacacacacacacuga

SEQ ID NO: 2209463 - RNA, 19 nt, Artificial Sequence
  Description of Artificial Sequence: Synthetic oligonucleotide
gaacaucuaccaguugacu

SEQ ID NO: 2209464 - RNA, 19 nt, Artificial Sequence
  Description of Artificial Sequence: Synthetic oligonucleotide
agcucccauccagacuacg

SEQ ID NO: 2209465 - RNA, 19 nt, Artificial Sequence
  Description of Artificial Sequence: Synthetic oligonucleotide
ggaucauugaaaugucaau

SEQ ID NO: 2209466 - RNA, 19 nt, Artificial Sequence
  Description of Artificial Sequence: Synthetic oligonucleotide
gaagcaggcuacgucauuu

SEQ ID NO: 2209467 - RNA, 19 nt, Artificial Sequence
  Description of Artificial Sequence: Synthetic oligonucleotide
cugggcuuagacuguaccu

SEQ ID NO: 2209468 - RNA, 19 nt, Artificial Sequence
  Description of Artificial Sequence: Synthetic oligonucleotide
agcaagcacuguaaagaau

SEQ ID NO: 2209469 - RNA, 19 nt, Artificial Sequence
  Description of Artificial Sequence: Synthetic oligonucleotide
auggcagaugguaccacau

SEQ ID NO: 2209470 - RNA, 19 nt, Artificial Sequence
  Description of Artificial Sequence: Synthetic oligonucleotide
acacacacacacacacaca

SEQ ID NO: 2209471 - RNA, 19 nt, Artificial Sequence
  Description of Artificial Sequence: Synthetic oligonucleotide
acacacacacacacacacu

SEQ ID NO: 2209472 - RNA, 19 nt, Artificial Sequence
  Description of Artificial Sequence: Synthetic oligonucleotide
cauccgguccacuucauuu

SEQ ID NO: 2209473 - RNA, 19 nt, Artificial Sequence
  Description of Artificial Sequence: Synthetic oligonucleotide
gggcuuagacuguaccuga

SEQ ID NO: 2209474 - RNA, 19 nt, Artificial Sequence
  Description of Artificial Sequence: Synthetic oligonucleotide
ccugaaucuuggagcagug

SEQ ID NO: 2209475 - RNA, 19 nt, Artificial Sequence
  Description of Artificial Sequence: Synthetic oligonucleotide
cauuguggguucuucgaau

SEQ ID NO: 2209476 - RNA, 19 nt, Artificial Sequence
  Description of Artificial Sequence: Synthetic oligonucleotide
cucagccaggaucauugaa

SEQ ID NO: 2209477 - RNA, 19 nt, Artificial Sequence
  Description of Artificial Sequence: Synthetic oligonucleotide
ggccaaguaaaaccagaaa

SEQ ID NO: 2209478 - RNA, 19 nt, Artificial Sequence
  Description of Artificial Sequence: Synthetic oligonucleotide
auuuuagcuggaggcuaaa

SEQ ID NO: 2209479 - RNA, 19 nt, Artificial Sequence
  Description of Artificial Sequence: Synthetic oligonucleotide
guucuucgaauggccucag

SEQ ID NO: 2209480 - RNA, 19 nt, Artificial Sequence
  Description of Artificial Sequence: Synthetic oligonucleotide
gacuacgaagugggacgug

SEQ ID NO: 2209481 - RNA, 19 nt, Artificial Sequence
  Description of Artificial Sequence: Synthetic oligonucleotide
guccuucacaucgcccacc

SEQ ID NO: 2209482 - RNA, 19 nt, Artificial Sequence
  Description of Artificial Sequence: Synthetic oligonucleotide
ggccaaacugaaaccacca

SEQ ID NO: 2209483 - RNA, 19 nt, Artificial Sequence
  Description of Artificial Sequence: Synthetic oligonucleotide
gcuacgucauuuuggccaa

SEQ ID NO: 2209484 - RNA, 19 nt, Artificial Sequence
  Description of Artificial Sequence: Synthetic oligonucleotide
cagcaggauuuuauugaaa

SEQ ID NO: 2209485 - RNA, 19 nt, Artificial Sequence
  Description of Artificial Sequence: Synthetic oligonucleotide
acguauuuugaagguucuu

SEQ ID NO: 2209486 - RNA, 19 nt, Artificial Sequence
  Description of Artificial Sequence: Synthetic oligonucleotide
ccagcugagaguaacuuau

SEQ ID NO: 2209487 - RNA, 19 nt, Artificial Sequence
  Description of Artificial Sequence: Synthetic oligonucleotide
gcuaaacaacauuguauau

SEQ ID NO: 2209488 - RNA, 19 nt, Artificial Sequence
  Description of Artificial Sequence: Synthetic oligonucleotide
ccuuuacauuuccuuacca

SEQ ID NO: 2209489 - RNA, 19 nt, Artificial Sequence
  Description of Artificial Sequence: Synthetic oligonucleotide
gccaggcagauuuguauaa

SEQ ID NO: 2209490 - RNA, 19 nt, Artificial Sequence
  Description of Artificial Sequence: Synthetic oligonucleotide
aguccugggcuuagacugu

SEQ ID NO: 2209491 - RNA, 19 nt, Artificial Sequence
  Description of Artificial Sequence: Synthetic oligonucleotide
gucguccaccaggauggcc

SEQ ID NO: 2209492 - RNA, 19 nt, Artificial Sequence
  Description of Artificial Sequence: Synthetic oligonucleotide
cccauuguggguucuucga

SEQ ID NO: 2209493 - RNA, 19 nt, Artificial Sequence
  Description of Artificial Sequence: Synthetic oligonucleotide
guaggacacggauucccau

SEQ ID NO: 2209494 - RNA, 19 nt, Artificial Sequence
  Description of Artificial Sequence: Synthetic oligonucleotide
gccaaacugaaaccaccaa

SEQ ID NO: 2209495 - RNA, 19 nt, Artificial Sequence
  Description of Artificial Sequence: Synthetic oligonucleotide
ggaggcuaaacaacauugu

SEQ ID NO: 2209496 - RNA, 19 nt, Artificial Sequence
  Description of Artificial Sequence: Synthetic oligonucleotide
ggauucccauuguggguuc

SEQ ID NO: 2209497 - RNA, 19 nt, Artificial Sequence
  Description of Artificial Sequence: Synthetic oligonucleotide
auucccauuguggguucuu

SEQ ID NO: 2209498 - RNA, 19 nt, Artificial Sequence
  Description of Artificial Sequence: Synthetic oligonucleotide
ccagucuaauuaguuuauc

SEQ ID NO: 2209499 - RNA, 19 nt, Artificial Sequence
  Description of Artificial Sequence: Synthetic oligonucleotide
uccuuaccacaagcagcaa

SEQ ID NO: 2209500 - RNA, 19 nt, Artificial Sequence
  Description of Artificial Sequence: Synthetic oligonucleotide
cuuguggaauuguguuggu

SEQ ID NO: 2209501 - RNA, 19 nt, Artificial Sequence
  Description of Artificial Sequence: Synthetic oligonucleotide
gcucccauccagacuacga

SEQ ID NO: 2209502 - RNA, 19 nt, Artificial Sequence
  Description of Artificial Sequence: Synthetic oligonucleotide
cccauggguaaggauagca

SEQ ID NO: 2209503 - RNA, 19 nt, Artificial Sequence
  Description of Artificial Sequence: Synthetic oligonucleotide
cugaagcaggcuacgucau

SEQ ID NO: 2209504 - RNA, 19 nt, Artificial Sequence
  Description of Artificial Sequence: Synthetic oligonucleotide
cgguccuucacaucgccca

SEQ ID NO: 2209505 - RNA, 19 nt, Artificial Sequence
  Description of Artificial Sequence: Synthetic oligonucleotide
uggcaccagcugagaguaa

SEQ ID NO: 2209506 - RNA, 19 nt, Artificial Sequence
  Description of Artificial Sequence: Synthetic oligonucleotide
ccaccagaaccauccgguc

SEQ ID NO: 2209507 - RNA, 19 nt, Artificial Sequence
  Description of Artificial Sequence: Synthetic oligonucleotide
gugggacguggcugaacaa

SEQ ID NO: 2209508 - RNA, 19 nt, Artificial Sequence
  Description of Artificial Sequence: Synthetic oligonucleotide
gcuggacagagugaucucu

SEQ ID NO: 2209509 - RNA, 19 nt, Artificial Sequence
  Description of Artificial Sequence: Synthetic oligonucleotide
gaagugggacguggcugaa

SEQ ID NO: 2209510 - RNA, 19 nt, Artificial Sequence
  Description of Artificial Sequence: Synthetic oligonucleotide
cugaaucuuggagcagugu

SEQ ID NO: 2209511 - RNA, 19 nt, Artificial Sequence
  Description of Artificial Sequence: Synthetic oligonucleotide
ccugaacuuagucaacauu

SEQ ID NO: 2209512 - RNA, 19 nt, Artificial Sequence
  Description of Artificial Sequence: Synthetic oligonucleotide
ccauggguaaggauagcau

SEQ ID NO: 2209513 - RNA, 19 nt, Artificial Sequence
  Description of Artificial Sequence: Synthetic oligonucleotide
ggcuuagacuguaccugaa

SEQ ID NO: 2209514 - RNA, 19 nt, Artificial Sequence
  Description of Artificial Sequence: Synthetic oligonucleotide
ccaguugacuaagaaaauu

SEQ ID NO: 2209515 - RNA, 19 nt, Artificial Sequence
  Description of Artificial Sequence: Synthetic oligonucleotide
ggacguggcugaacaagua

SEQ ID NO: 2209516 - RNA, 19 nt, Artificial Sequence
  Description of Artificial Sequence: Synthetic oligonucleotide
ggacacggauucccauugu

SEQ ID NO: 2209517 - RNA, 19 nt, Artificial Sequence
  Description of Artificial Sequence: Synthetic oligonucleotide
gcuggaggcuaaacaacau

SEQ ID NO: 2209518 - RNA, 19 nt, Artificial Sequence
  Description of Artificial Sequence: Synthetic oligonucleotide
cgaauggccucagccagga

SEQ ID NO: 2209519 - RNA, 19 nt, Artificial Sequence
  Description of Artificial Sequence: Synthetic oligonucleotide
gaggacagccaggcagauu

SEQ ID NO: 2209520 - RNA, 19 nt, Artificial Sequence
  Description of Artificial Sequence: Synthetic oligonucleotide
cuacgucauuuuggccaaa

SEQ ID NO: 2209521 - RNA, 19 nt, Artificial Sequence
  Description of Artificial Sequence: Synthetic oligonucleotide
cgcccaccagaaccauccg

SEQ ID NO: 2209522 - RNA, 19 nt, Artificial Sequence
  Description of Artificial Sequence: Synthetic oligonucleotide
cagaaccauccgguccacu

SEQ ID NO: 2209523 - RNA, 19 nt, Artificial Sequence
  Description of Artificial Sequence: Synthetic oligonucleotide
ccauuguauaaggcucagu

SEQ ID NO: 2209524 - RNA, 19 nt, Artificial Sequence
  Description of Artificial Sequence: Synthetic oligonucleotide
caucgcccaccagaaccau

SEQ ID NO: 2209525 - RNA, 19 nt, Artificial Sequence
  Description of Artificial Sequence: Synthetic oligonucleotide
cggauucccauuguggguu

SEQ ID NO: 2209526 - RNA, 19 nt, Artificial Sequence
  Description of Artificial Sequence: Synthetic oligonucleotide
ccauccgguccacuucauu

SEQ ID NO: 2209527 - RNA, 19 nt, Artificial Sequence
  Description of Artificial Sequence: Synthetic oligonucleotide
aauucaugcccacacauac

SEQ ID NO: 2209528 - RNA, 19 nt, Artificial Sequence
  Description of Artificial Sequence: Synthetic oligonucleotide
uaaagggugacaaacuggg

SEQ ID NO: 2209529 - RNA, 19 nt, Artificial Sequence
  Description of Artificial Sequence: Synthetic oligonucleotide
agaucuuuaaauugugugg

SEQ ID NO: 2209530 - RNA, 19 nt, Artificial Sequence
  Description of Artificial Sequence: Synthetic oligonucleotide
agaacaaccuccuucuacc

SEQ ID NO: 2209531 - RNA, 19 nt, Artificial Sequence
  Description of Artificial Sequence: Synthetic oligonucleotide
augaucucaucauagggcc

SEQ ID NO: 2209532 - RNA, 19 nt, Artificial Sequence
  Description of Artificial Sequence: Synthetic oligonucleotide
aaucccugacuccaggccc

SEQ ID NO: 2209533 - RNA, 19 nt, Artificial Sequence
  Description of Artificial Sequence: Synthetic oligonucleotide
aauuguguggaucugcuau

SEQ ID NO: 2209534 - RNA, 19 nt, Artificial Sequence
  Description of Artificial Sequence: Synthetic oligonucleotide
ucucuugugaacuugcagc

SEQ ID NO: 2209535 - RNA, 19 nt, Artificial Sequence
  Description of Artificial Sequence: Synthetic oligonucleotide
uuucuuuccaaugaccacg

SEQ ID NO: 2209536 - RNA, 19 nt, Artificial Sequence
  Description of Artificial Sequence: Synthetic oligonucleotide
aaaguguuuaggucuauga

SEQ ID NO: 2209537 - RNA, 19 nt, Artificial Sequence
  Description of Artificial Sequence: Synthetic oligonucleotide
agugaaaccagccacguga

SEQ ID NO: 2209538 - RNA, 19 nt, Artificial Sequence
  Description of Artificial Sequence: Synthetic oligonucleotide
uugaacaccaucugauugg

SEQ ID NO: 2209539 - RNA, 19 nt, Artificial Sequence
  Description of Artificial Sequence: Synthetic oligonucleotide
acacauaccaccuugucug

SEQ ID NO: 2209540 - RNA, 19 nt, Artificial Sequence
  Description of Artificial Sequence: Synthetic oligonucleotide
gacuucaucacucuucuug

SEQ ID NO: 2209541 - RNA, 19 nt, Artificial Sequence
  Description of Artificial Sequence: Synthetic oligonucleotide
uuccuaaacacaccaaccc

SEQ ID NO: 2209542 - RNA, 19 nt, Artificial Sequence
  Description of Artificial Sequence: Synthetic oligonucleotide
uugacaaugacaccaauuu

SEQ ID NO: 2209543 - RNA, 19 nt, Artificial Sequence
  Description of Artificial Sequence: Synthetic oligonucleotide
aguguuuaggucuaugacu

SEQ ID NO: 2209544 - RNA, 19 nt, Artificial Sequence
  Description of Artificial Sequence: Synthetic oligonucleotide
ugagccauggcaucugugg

SEQ ID NO: 2209545 - RNA, 19 nt, Artificial Sequence
  Description of Artificial Sequence: Synthetic oligonucleotide
accuuguugacaaugacac

SEQ ID NO: 2209546 - RNA, 19 nt, Artificial Sequence
  Description of Artificial Sequence: Synthetic oligonucleotide
agucaaaaguguuuagguc

SEQ ID NO: 2209547 - RNA, 19 nt, Artificial Sequence
  Description of Artificial Sequence: Synthetic oligonucleotide
agcucuucagucuugaaca

SEQ ID NO: 2209548 - RNA, 19 nt, Artificial Sequence
  Description of Artificial Sequence: Synthetic oligonucleotide
gucugcauaauucaugccc

SEQ ID NO: 2209549 - RNA, 19 nt, Artificial Sequence
  Description of Artificial Sequence: Synthetic oligonucleotide
ucuaccagaguucagcauc

SEQ ID NO: 2209550 - RNA, 19 nt, Artificial Sequence
  Description of Artificial Sequence: Synthetic oligonucleotide
uauagggaugccaucacac

SEQ ID NO: 2209551 - RNA, 19 nt, Artificial Sequence
  Description of Artificial Sequence: Synthetic oligonucleotide
gucucaugucucuagaggg

SEQ ID NO: 2209552 - RNA, 19 nt, Artificial Sequence
  Description of Artificial Sequence: Synthetic oligonucleotide
uucaugcccacacauacca

SEQ ID NO: 2209553 - RNA, 19 nt, Artificial Sequence
  Description of Artificial Sequence: Synthetic oligonucleotide
agucucaugucucuagagg

SEQ ID NO: 2209554 - RNA, 19 nt, Artificial Sequence
  Description of Artificial Sequence: Synthetic oligonucleotide
ucaccugugaccgagggag

SEQ ID NO: 2209555 - RNA, 19 nt, Artificial Sequence
  Description of Artificial Sequence: Synthetic oligonucleotide
ucaaugguuauagggaugc

SEQ ID NO: 2209556 - RNA, 19 nt, Artificial Sequence
  Description of Artificial Sequence: Synthetic oligonucleotide
cuuccuaaacacaccaacc

SEQ ID NO: 2209557 - RNA, 19 nt, Artificial Sequence
  Description of Artificial Sequence: Synthetic oligonucleotide
uggauaaagggugacaaac

SEQ ID NO: 2209558 - RNA, 19 nt, Artificial Sequence
  Description of Artificial Sequence: Synthetic oligonucleotide
uccuaaacacaccaacccc

SEQ ID NO: 2209559 - RNA, 19 nt, Artificial Sequence
  Description of Artificial Sequence: Synthetic oligonucleotide
aauggaacuggagaacuug

SEQ ID NO: 2209560 - RNA, 19 nt, Artificial Sequence
  Description of Artificial Sequence: Synthetic oligonucleotide
ucauagggccccacaaugg

SEQ ID NO: 2209561 - RNA, 19 nt, Artificial Sequence
  Description of Artificial Sequence: Synthetic oligonucleotide
uaaauuguguggaucugcu

SEQ ID NO: 2209562 - RNA, 19 nt, Artificial Sequence
  Description of Artificial Sequence: Synthetic oligonucleotide
aagucaaugguuauaggga

SEQ ID NO: 2209563 - RNA, 19 nt, Artificial Sequence
  Description of Artificial Sequence: Synthetic oligonucleotide
acuaccuccccguucacuc

SEQ ID NO: 2209564 - RNA, 19 nt, Artificial Sequence
  Description of Artificial Sequence: Synthetic oligonucleotide
uuaaauuguguggaucugc

SEQ ID NO: 2209565 - RNA, 19 nt, Artificial Sequence
  Description of Artificial Sequence: Synthetic oligonucleotide
gaugauguccccuggauaa

SEQ ID NO: 2209566 - RNA, 19 nt, Artificial Sequence
  Description of Artificial Sequence: Synthetic oligonucleotide
ucauuugccagucccgagc

SEQ ID NO: 2209567 - RNA, 19 nt, Artificial Sequence
  Description of Artificial Sequence: Synthetic oligonucleotide
uuugcaguggucugcauaa

SEQ ID NO: 2209568 - RNA, 19 nt, Artificial Sequence
  Description of Artificial Sequence: Synthetic oligonucleotide
cuugaacaccaucugauug

SEQ ID NO: 2209569 - RNA, 19 nt, Artificial Sequence
  Description of Artificial Sequence: Synthetic oligonucleotide
uuucccaguaaccacugcu

SEQ ID NO: 2209570 - RNA, 19 nt, Artificial Sequence
  Description of Artificial Sequence: Synthetic oligonucleotide
aaacacaccaaccccugga

SEQ ID NO: 2209571 - RNA, 19 nt, Artificial Sequence
  Description of Artificial Sequence: Synthetic oligonucleotide
gacaccaauuucuucaauc

SEQ ID NO: 2209572 - RNA, 19 nt, Artificial Sequence
  Description of Artificial Sequence: Synthetic oligonucleotide
aggacuggcaacuggguag

SEQ ID NO: 2209573 - RNA, 19 nt, Artificial Sequence
  Description of Artificial Sequence: Synthetic oligonucleotide
gaucuuuaaauugugugga

SEQ ID NO: 2209574 - RNA, 19 nt, Artificial Sequence
  Description of Artificial Sequence: Synthetic oligonucleotide
aucauagggccccacaaug

SEQ ID NO: 2209575 - RNA, 19 nt, Artificial Sequence
  Description of Artificial Sequence: Synthetic oligonucleotide
auugcgucucauuugccag

SEQ ID NO: 2209576 - RNA, 19 nt, Artificial Sequence
  Description of Artificial Sequence: Synthetic oligonucleotide
caucacaccaccuuguuga

SEQ ID NO: 2209577 - RNA, 19 nt, Artificial Sequence
  Description of Artificial Sequence: Synthetic oligonucleotide
aacaaccuccuucuaccag

SEQ ID NO: 2209578 - RNA, 19 nt, Artificial Sequence
  Description of Artificial Sequence: Synthetic oligonucleotide
uucacucgacagcagaucu

SEQ ID NO: 2209579 - RNA, 19 nt, Artificial Sequence
  Description of Artificial Sequence: Synthetic oligonucleotide
auaaagggugacaaacugg

SEQ ID NO: 2209580 - RNA, 19 nt, Artificial Sequence
  Description of Artificial Sequence: Synthetic oligonucleotide
uuuaggucuaugacucccc

SEQ ID NO: 2209581 - RNA, 19 nt, Artificial Sequence
  Description of Artificial Sequence: Synthetic oligonucleotide
uagggaugccaucacacca

SEQ ID NO: 2209582 - RNA, 19 nt, Artificial Sequence
  Description of Artificial Sequence: Synthetic oligonucleotide
uggacuaccuccccguuca

SEQ ID NO: 2209583 - RNA, 19 nt, Artificial Sequence
  Description of Artificial Sequence: Synthetic oligonucleotide
ugguaaccaaggcagggcc

SEQ ID NO: 2209584 - RNA, 19 nt, Artificial Sequence
  Description of Artificial Sequence: Synthetic oligonucleotide
aacugggagacccaggcua

SEQ ID NO: 2209585 - RNA, 19 nt, Artificial Sequence
  Description of Artificial Sequence: Synthetic oligonucleotide
accacugcuuuccauugcg

SEQ ID NO: 2209586 - RNA, 19 nt, Artificial Sequence
  Description of Artificial Sequence: Synthetic oligonucleotide
caggcuaucagcucuucag

SEQ ID NO: 2209587 - RNA, 19 nt, Artificial Sequence
  Description of Artificial Sequence: Synthetic oligonucleotide
cacgucaugggccacagug

SEQ ID NO: 2209588 - RNA, 19 nt, Artificial Sequence
  Description of Artificial Sequence: Synthetic oligonucleotide
gagaacaaccuccuucuac

SEQ ID NO: 2209589 - RNA, 19 nt, Artificial Sequence
  Description of Artificial Sequence: Synthetic oligonucleotide
caugcccacacauaccacc

SEQ ID NO: 2209590 - RNA, 19 nt, Artificial Sequence
  Description of Artificial Sequence: Synthetic oligonucleotide
agcacucacgucaugggcc

SEQ ID NO: 2209591 - RNA, 19 nt, Artificial Sequence
  Description of Artificial Sequence: Synthetic oligonucleotide
uuauagggaugccaucaca

SEQ ID NO: 2209592 - RNA, 19 nt, Artificial Sequence
  Description of Artificial Sequence: Synthetic oligonucleotide
uugugaacuugcagcagag

SEQ ID NO: 2209593 - RNA, 19 nt, Artificial Sequence
  Description of Artificial Sequence: Synthetic oligonucleotide
ugugcuugccuuucuuucc

SEQ ID NO: 2209594 - RNA, 19 nt, Artificial Sequence
  Description of Artificial Sequence: Synthetic oligonucleotide
aaaaguguuuaggucuaug

SEQ ID NO: 2209595 - RNA, 19 nt, Artificial Sequence
  Description of Artificial Sequence: Synthetic oligonucleotide
aaagacaggaggcuuccua

SEQ ID NO: 2209596 - RNA, 19 nt, Artificial Sequence
  Description of Artificial Sequence: Synthetic oligonucleotide
gaagaugaugggcuccuug

SEQ ID NO: 2209597 - RNA, 19 nt, Artificial Sequence
  Description of Artificial Sequence: Synthetic oligonucleotide
cucuagagggcugacaggc

SEQ ID NO: 2209598 - RNA, 19 nt, Artificial Sequence
  Description of Artificial Sequence: Synthetic oligonucleotide
uuuaaauuguguggaucug

SEQ ID NO: 2209599 - RNA, 19 nt, Artificial Sequence
  Description of Artificial Sequence: Synthetic oligonucleotide
ucaaaaguguuuaggucua

SEQ ID NO: 2209600 - RNA, 19 nt, Artificial Sequence
  Description of Artificial Sequence: Synthetic oligonucleotide
uguucuuugcaguggucug

SEQ ID NO: 2209601 - RNA, 19 nt, Artificial Sequence
  Description of Artificial Sequence: Synthetic oligonucleotide
accaauuucuucaaucuca

SEQ ID NO: 2209602 - RNA, 19 nt, Artificial Sequence
  Description of Artificial Sequence: Synthetic oligonucleotide
cuuuaaauuguguggaucu

SEQ ID NO: 2209603 - RNA, 19 nt, Artificial Sequence
  Description of Artificial Sequence: Synthetic oligonucleotide
acaaccuccuucuaccaga

SEQ ID NO: 2209604 - RNA, 19 nt, Artificial Sequence
  Description of Artificial Sequence: Synthetic oligonucleotide
uggaacugcaccagucuca

SEQ ID NO: 2209605 - RNA, 19 nt, Artificial Sequence
  Description of Artificial Sequence: Synthetic oligonucleotide
cacauucuguucuuugcag

SEQ ID NO: 2209606 - RNA, 19 nt, Artificial Sequence
  Description of Artificial Sequence: Synthetic oligonucleotide
cucacacuggacuucauca

SEQ ID NO: 2209607 - RNA, 19 nt, Artificial Sequence
  Description of Artificial Sequence: Synthetic oligonucleotide
cauaccaccuugucuggcc

SEQ ID NO: 2209608 - RNA, 19 nt, Artificial Sequence
  Description of Artificial Sequence: Synthetic oligonucleotide
uaaccacugcuuuccauug

SEQ ID NO: 2209609 - RNA, 19 nt, Artificial Sequence
  Description of Artificial Sequence: Synthetic oligonucleotide
auuguguggaucugcuaug

SEQ ID NO: 2209610 - RNA, 19 nt, Artificial Sequence
  Description of Artificial Sequence: Synthetic oligonucleotide
cuggcaacuggguagccag

SEQ ID NO: 2209611 - RNA, 19 nt, Artificial Sequence
  Description of Artificial Sequence: Synthetic oligonucleotide
auggaacuggagaacuugc

SEQ ID NO: 2209612 - RNA, 19 nt, Artificial Sequence
  Description of Artificial Sequence: Synthetic oligonucleotide
agggugacaaacugggaga

SEQ ID NO: 2209613 - RNA, 19 nt, Artificial Sequence
  Description of Artificial Sequence: Synthetic oligonucleotide
guuuaggucuaugacuccc

SEQ ID NO: 2209614 - RNA, 19 nt, Artificial Sequence
  Description of Artificial Sequence: Synthetic oligonucleotide
uaauucaugcccacacaua

SEQ ID NO: 2209615 - RNA, 19 nt, Artificial Sequence
  Description of Artificial Sequence: Synthetic oligonucleotide
aaucucacacuggacuuca

SEQ ID NO: 2209616 - RNA, 19 nt, Artificial Sequence
  Description of Artificial Sequence: Synthetic oligonucleotide
aguucagcaucaaagccug

SEQ ID NO: 2209617 - RNA, 19 nt, Artificial Sequence
  Description of Artificial Sequence: Synthetic oligonucleotide
auucaugcccacacauacc

SEQ ID NO: 2209618 - RNA, 19 nt, Artificial Sequence
  Description of Artificial Sequence: Synthetic oligonucleotide
uggaacuggagaacuugcu

SEQ ID NO: 2209619 - RNA, 19 nt, Artificial Sequence
  Description of Artificial Sequence: Synthetic oligonucleotide
gaacuugcagcagagcuga

SEQ ID NO: 2209620 - RNA, 19 nt, Artificial Sequence
  Description of Artificial Sequence: Synthetic oligonucleotide
accaucugauugguguugc

SEQ ID NO: 2209621 - RNA, 19 nt, Artificial Sequence
  Description of Artificial Sequence: Synthetic oligonucleotide
agccacgugagccauggca

SEQ ID NO: 2209622 - RNA, 19 nt, Artificial Sequence
  Description of Artificial Sequence: Synthetic oligonucleotide
gauguccccuggauaaagg

SEQ ID NO: 2209623 - RNA, 19 nt, Artificial Sequence
  Description of Artificial Sequence: Synthetic oligonucleotide
uagggccccacaauggaac

SEQ ID NO: 2209624 - RNA, 19 nt, Artificial Sequence
  Description of Artificial Sequence: Synthetic oligonucleotide
uguuuaggucuaugacucc

SEQ ID NO: 2209625 - RNA, 19 nt, Artificial Sequence
  Description of Artificial Sequence: Synthetic oligonucleotide
uuugccagucccgagcacu

SEQ ID NO: 2209626 - RNA, 19 nt, Artificial Sequence
  Description of Artificial Sequence: Synthetic oligonucleotide
caaucccugacuccaggcc

SEQ ID NO: 2209627 - RNA, 19 nt, Artificial Sequence
  Description of Artificial Sequence: Synthetic oligonucleotide
ugccuuucuuuccaaugac

SEQ ID NO: 2209628 - RNA, 19 nt, Artificial Sequence
  Description of Artificial Sequence: Synthetic oligonucleotide
gagcacucacgucaugggc

SEQ ID NO: 2209629 - RNA, 19 nt, Artificial Sequence
  Description of Artificial Sequence: Synthetic oligonucleotide
ugauguccccuggauaaag

SEQ ID NO: 2209630 - RNA, 19 nt, Artificial Sequence
  Description of Artificial Sequence: Synthetic oligonucleotide
ugcaccagucucaugucuc

SEQ ID NO: 2209631 - RNA, 19 nt, Artificial Sequence
  Description of Artificial Sequence: Synthetic oligonucleotide
aaauuguguggaucugcua

SEQ ID NO: 2209632 - RNA, 19 nt, Artificial Sequence
  Description of Artificial Sequence: Synthetic oligonucleotide
gcaucauugucuuggggag

SEQ ID NO: 2209633 - RNA, 19 nt, Artificial Sequence
  Description of Artificial Sequence: Synthetic oligonucleotide
ucucauuugccagucccga

SEQ ID NO: 2209634 - RNA, 19 nt, Artificial Sequence
  Description of Artificial Sequence: Synthetic oligonucleotide
gucccgagcacucacguca

SEQ ID NO: 2209635 - RNA, 19 nt, Artificial Sequence
  Description of Artificial Sequence: Synthetic oligonucleotide
cugucccugguaaccaagg

SEQ ID NO: 2209636 - RNA, 19 nt, Artificial Sequence
  Description of Artificial Sequence: Synthetic oligonucleotide
uggaggaguuccagucagg

SEQ ID NO: 2209637 - RNA, 19 nt, Artificial Sequence
  Description of Artificial Sequence: Synthetic oligonucleotide
uuguguggaucugcuaugc

SEQ ID NO: 2209638 - RNA, 19 nt, Artificial Sequence
  Description of Artificial Sequence: Synthetic oligonucleotide
ucuugaacaccaucugauu

SEQ ID NO: 2209639 - RNA, 19 nt, Artificial Sequence
  Description of Artificial Sequence: Synthetic oligonucleotide
uccccguucacucgacagc

SEQ ID NO: 2209640 - RNA, 19 nt, Artificial Sequence
  Description of Artificial Sequence: Synthetic oligonucleotide
gcuuccuaaacacaccaac

SEQ ID NO: 2209641 - RNA, 19 nt, Artificial Sequence
  Description of Artificial Sequence: Synthetic oligonucleotide
guuccagucaggaugaugu

SEQ ID NO: 2209642 - RNA, 19 nt, Artificial Sequence
  Description of Artificial Sequence: Synthetic oligonucleotide
cuucaaucucacacuggac

SEQ ID NO: 2209643 - RNA, 19 nt, Artificial Sequence
  Description of Artificial Sequence: Synthetic oligonucleotide
gggaguguggagucaaaag

SEQ ID NO: 2209644 - RNA, 19 nt, Artificial Sequence
  Description of Artificial Sequence: Synthetic oligonucleotide
uucccaguaaccacugcuu

SEQ ID NO: 2209645 - RNA, 19 nt, Artificial Sequence
  Description of Artificial Sequence: Synthetic oligonucleotide
cacucuucuugagaaagac

SEQ ID NO: 2209646 - RNA, 19 nt, Artificial Sequence
  Description of Artificial Sequence: Synthetic oligonucleotide
cagucucaugucucuagag

SEQ ID NO: 2209647 - RNA, 19 nt, Artificial Sequence
  Description of Artificial Sequence: Synthetic oligonucleotide
cauugcgucucauuugcca

SEQ ID NO: 2209648 - RNA, 19 nt, Artificial Sequence
  Description of Artificial Sequence: Synthetic oligonucleotide
ugcauaauucaugcccaca

SEQ ID NO: 2209649 - RNA, 19 nt, Artificial Sequence
  Description of Artificial Sequence: Synthetic oligonucleotide
aguguggagucaaaagugu

SEQ ID NO: 2209650 - RNA, 19 nt, Artificial Sequence
  Description of Artificial Sequence: Synthetic oligonucleotide
caccuuguugacaaugaca

SEQ ID NO: 2209651 - RNA, 19 nt, Artificial Sequence
  Description of Artificial Sequence: Synthetic oligonucleotide
acauaccaccuugucuggc

SEQ ID NO: 2209652 - RNA, 19 nt, Artificial Sequence
  Description of Artificial Sequence: Synthetic oligonucleotide
ugaaaccagccacgugagc

SEQ ID NO: 2209653 - RNA, 19 nt, Artificial Sequence
  Description of Artificial Sequence: Synthetic oligonucleotide
aggcuaucagcucuucagu

SEQ ID NO: 2209654 - RNA, 19 nt, Artificial Sequence
  Description of Artificial Sequence: Synthetic oligonucleotide
caucugauugguguugcug

SEQ ID NO: 2209655 - RNA, 19 nt, Artificial Sequence
  Description of Artificial Sequence: Synthetic oligonucleotide
guccccuggauaaagggug

SEQ ID NO: 2209656 - RNA, 19 nt, Artificial Sequence
  Description of Artificial Sequence: Synthetic oligonucleotide
cacauaccaccuugucugg

SEQ ID NO: 2209657 - RNA, 19 nt, Artificial Sequence
  Description of Artificial Sequence: Synthetic oligonucleotide
agacccaggcuaucagcuc

SEQ ID NO: 2209658 - RNA, 19 nt, Artificial Sequence
  Description of Artificial Sequence: Synthetic oligonucleotide
cagucuugaacaccaucug

SEQ ID NO: 2209659 - RNA, 19 nt, Artificial Sequence
  Description of Artificial Sequence: Synthetic oligonucleotide
ugacaggcucucuugugaa

SEQ ID NO: 2209660 - RNA, 19 nt, Artificial Sequence
  Description of Artificial Sequence: Synthetic oligonucleotide
cacugcuuuccauugcguc

SEQ ID NO: 2209661 - RNA, 19 nt, Artificial Sequence
  Description of Artificial Sequence: Synthetic oligonucleotide
ugugaacuugcagcagagc

SEQ ID NO: 2209662 - RNA, 19 nt, Artificial Sequence
  Description of Artificial Sequence: Synthetic oligonucleotide
cuucuaccagaguucagca

SEQ ID NO: 2209663 - RNA, 19 nt, Artificial Sequence
  Description of Artificial Sequence: Synthetic oligonucleotide
caccaauuucuucaaucuc

SEQ ID NO: 2209664 - RNA, 19 nt, Artificial Sequence
  Description of Artificial Sequence: Synthetic oligonucleotide
cuccccguucacucgacag

SEQ ID NO: 2209665 - RNA, 19 nt, Artificial Sequence
  Description of Artificial Sequence: Synthetic oligonucleotide
cucauuugccagucccgag

SEQ ID NO: 2209666 - RNA, 19 nt, Artificial Sequence
  Description of Artificial Sequence: Synthetic oligonucleotide
cugguaaccaaggcagggc

SEQ ID NO: 2209667 - RNA, 19 nt, Artificial Sequence
  Description of Artificial Sequence: Synthetic oligonucleotide
auuugccagucccgagcac

SEQ ID NO: 2209668 - RNA, 19 nt, Artificial Sequence
  Description of Artificial Sequence: Synthetic oligonucleotide
caaccuccuucuaccagag

SEQ ID NO: 2209669 - RNA, 19 nt, Artificial Sequence
  Description of Artificial Sequence: Synthetic oligonucleotide
guggucugcauaauucaug

SEQ ID NO: 2209670 - RNA, 19 nt, Artificial Sequence
  Description of Artificial Sequence: Synthetic oligonucleotide
ggcagaaaguaucaaaagu

SEQ ID NO: 2209671 - RNA, 19 nt, Artificial Sequence
  Description of Artificial Sequence: Synthetic oligonucleotide
cugcucuggacuaccuccc

SEQ ID NO: 2209672 - RNA, 19 nt, Artificial Sequence
  Description of Artificial Sequence: Synthetic oligonucleotide
ccuucuaccagaguucagc

SEQ ID NO: 2209673 - RNA, 19 nt, Artificial Sequence
  Description of Artificial Sequence: Synthetic oligonucleotide
gucccugguaaccaaggca

SEQ ID NO: 2209674 - RNA, 19 nt, Artificial Sequence
  Description of Artificial Sequence: Synthetic oligonucleotide
cuaccuccccguucacucg

SEQ ID NO: 2209675 - RNA, 19 nt, Artificial Sequence
  Description of Artificial Sequence: Synthetic oligonucleotide
cuggaacugcaccagucuc

SEQ ID NO: 2209676 - RNA, 19 nt, Artificial Sequence
  Description of Artificial Sequence: Synthetic oligonucleotide
ugcugaagaugaugggcuc

SEQ ID NO: 2209677 - RNA, 19 nt, Artificial Sequence
  Description of Artificial Sequence: Synthetic oligonucleotide
uucuaccagaguucagcau

SEQ ID NO: 2209678 - RNA, 19 nt, Artificial Sequence
  Description of Artificial Sequence: Synthetic oligonucleotide
uggaucugcuaugcugucc

SEQ ID NO: 2209679 - RNA, 19 nt, Artificial Sequence
  Description of Artificial Sequence: Synthetic oligonucleotide
cuugaugugcuugccuuuc

SEQ ID NO: 2209680 - RNA, 19 nt, Artificial Sequence
  Description of Artificial Sequence: Synthetic oligonucleotide
ucuguucuuugcagugguc

SEQ ID NO: 2209681 - RNA, 19 nt, Artificial Sequence
  Description of Artificial Sequence: Synthetic oligonucleotide
caguggucugcauaauuca

SEQ ID NO: 2209682 - RNA, 19 nt, Artificial Sequence
  Description of Artificial Sequence: Synthetic oligonucleotide
ugaugugcuugccuuucuu

SEQ ID NO: 2209683 - RNA, 19 nt, Artificial Sequence
  Description of Artificial Sequence: Synthetic oligonucleotide
gucaaugguuauagggaug

SEQ ID NO: 2209684 - RNA, 19 nt, Artificial Sequence
  Description of Artificial Sequence: Synthetic oligonucleotide
uccuucuaccagaguucag

SEQ ID NO: 2209685 - RNA, 19 nt, Artificial Sequence
  Description of Artificial Sequence: Synthetic oligonucleotide
agucccgagcacucacguc

SEQ ID NO: 2209686 - RNA, 19 nt, Artificial Sequence
  Description of Artificial Sequence: Synthetic oligonucleotide
acagugaaaccagccacgu

SEQ ID NO: 2209687 - RNA, 19 nt, Artificial Sequence
  Description of Artificial Sequence: Synthetic oligonucleotide
uugcgucucauuugccagu

SEQ ID NO: 2209688 - RNA, 19 nt, Artificial Sequence
  Description of Artificial Sequence: Synthetic oligonucleotide
aaagggugacaaacuggga

SEQ ID NO: 2209689 - RNA, 19 nt, Artificial Sequence
  Description of Artificial Sequence: Synthetic oligonucleotide
gaugccaucacaccaccuu

SEQ ID NO: 2209690 - RNA, 19 nt, Artificial Sequence
  Description of Artificial Sequence: Synthetic oligonucleotide
cucgcucucuggugggagg

SEQ ID NO: 2209691 - RNA, 19 nt, Artificial Sequence
  Description of Artificial Sequence: Synthetic oligonucleotide
gauugguguugcugcucug

SEQ ID NO: 2209692 - RNA, 19 nt, Artificial Sequence
  Description of Artificial Sequence: Synthetic oligonucleotide
agguggggugucuggaacu

SEQ ID NO: 2209693 - RNA, 19 nt, Artificial Sequence
  Description of Artificial Sequence: Synthetic oligonucleotide
cauuugccagucccgagca

SEQ ID NO: 2209694 - RNA, 19 nt, Artificial Sequence
  Description of Artificial Sequence: Synthetic oligonucleotide
cauagggccccacaaugga

SEQ ID NO: 2209695 - RNA, 19 nt, Artificial Sequence
  Description of Artificial Sequence: Synthetic oligonucleotide
ggucaccugugaccgaggg

SEQ ID NO: 2209696 - RNA, 19 nt, Artificial Sequence
  Description of Artificial Sequence: Synthetic oligonucleotide
gggaggacuggcaacuggg

SEQ ID NO: 2209697 - RNA, 19 nt, Artificial Sequence
  Description of Artificial Sequence: Synthetic oligonucleotide
cucgacagcagaucuuuaa

SEQ ID NO: 2209698 - RNA, 19 nt, Artificial Sequence
  Description of Artificial Sequence: Synthetic oligonucleotide
ugucucuagagggcugaca

SEQ ID NO: 2209699 - RNA, 19 nt, Artificial Sequence
  Description of Artificial Sequence: Synthetic oligonucleotide
ggagacccaggcuaucagc

SEQ ID NO: 2209700 - RNA, 19 nt, Artificial Sequence
  Description of Artificial Sequence: Synthetic oligonucleotide
cccacaauggaacuggaga

SEQ ID NO: 2209701 - RNA, 19 nt, Artificial Sequence
  Description of Artificial Sequence: Synthetic oligonucleotide
caaccccuggaggaguucc

SEQ ID NO: 2209702 - RNA, 19 nt, Artificial Sequence
  Description of Artificial Sequence: Synthetic oligonucleotide
gggugucuggaacugcacc

SEQ ID NO: 2209703 - RNA, 19 nt, Artificial Sequence
  Description of Artificial Sequence: Synthetic oligonucleotide
uugccagucccgagcacuc

SEQ ID NO: 2209704 - RNA, 19 nt, Artificial Sequence
  Description of Artificial Sequence: Synthetic oligonucleotide
aucugcuaugcugucccug

SEQ ID NO: 2209705 - RNA, 19 nt, Artificial Sequence
  Description of Artificial Sequence: Synthetic oligonucleotide
accaccuugucuggccggg

SEQ ID NO: 2209706 - RNA, 19 nt, Artificial Sequence
  Description of Artificial Sequence: Synthetic oligonucleotide
accgagggaggacuggcaa

SEQ ID NO: 2209707 - RNA, 19 nt, Artificial Sequence
  Description of Artificial Sequence: Synthetic oligonucleotide
ucacucgacagcagaucuu

SEQ ID NO: 2209708 - RNA, 19 nt, Artificial Sequence
  Description of Artificial Sequence: Synthetic oligonucleotide
gguguugcugcucuggacu

SEQ ID NO: 2209709 - RNA, 19 nt, Artificial Sequence
  Description of Artificial Sequence: Synthetic oligonucleotide
caccaccuuguugacaaug

SEQ ID NO: 2209710 - RNA, 19 nt, Artificial Sequence
  Description of Artificial Sequence: Synthetic oligonucleotide
acuggacuucaucacucuu

SEQ ID NO: 2209711 - RNA, 19 nt, Artificial Sequence
  Description of Artificial Sequence: Synthetic oligonucleotide
caucuguggccuugaugug

SEQ ID NO: 2209712 - RNA, 19 nt, Artificial Sequence
  Description of Artificial Sequence: Synthetic oligonucleotide
guucacucgacagcagauc

SEQ ID NO: 2209713 - RNA, 19 nt, Artificial Sequence
  Description of Artificial Sequence: Synthetic oligonucleotide
ugcgucucauuugccaguc

SEQ ID NO: 2209714 - RNA, 19 nt, Artificial Sequence
  Description of Artificial Sequence: Synthetic oligonucleotide
cacggccaguuccaccucc

SEQ ID NO: 2209715 - RNA, 19 nt, Artificial Sequence
  Description of Artificial Sequence: Synthetic oligonucleotide
ccugguaaccaaggcaggg

SEQ ID NO: 2209716 - RNA, 19 nt, Artificial Sequence
  Description of Artificial Sequence: Synthetic oligonucleotide
augaccacggccaguucca

SEQ ID NO: 2209717 - RNA, 19 nt, Artificial Sequence
  Description of Artificial Sequence: Synthetic oligonucleotide
cgucucauuugccaguccc

SEQ ID NO: 2209718 - RNA, 19 nt, Artificial Sequence
  Description of Artificial Sequence: Synthetic oligonucleotide
gcucuggacuaccuccccg

SEQ ID NO: 2209719 - RNA, 19 nt, Artificial Sequence
  Description of Artificial Sequence: Synthetic oligonucleotide
cuggacuaccuccccguuc

SEQ ID NO: 2209720 - RNA, 19 nt, Artificial Sequence
  Description of Artificial Sequence: Synthetic oligonucleotide
cuccucgcucucugguggg

SEQ ID NO: 2209721 - RNA, 19 nt, Artificial Sequence
  Description of Artificial Sequence: Synthetic oligonucleotide
ugcuuuccauugcgucuca

SEQ ID NO: 2209722 - RNA, 19 nt, Artificial Sequence
  Description of Artificial Sequence: Synthetic oligonucleotide
augucucuagagggcugac

SEQ ID NO: 2209723 - RNA, 19 nt, Artificial Sequence
  Description of Artificial Sequence: Synthetic oligonucleotide
uccaaugaccacggccagu

SEQ ID NO: 2209724 - RNA, 19 nt, Artificial Sequence
  Description of Artificial Sequence: Synthetic oligonucleotide
caccugugaccgagggagg

SEQ ID NO: 2209725 - RNA, 19 nt, Artificial Sequence
  Description of Artificial Sequence: Synthetic oligonucleotide
uggccgggugacaggggcc

SEQ ID NO: 2209726 - RNA, 19 nt, Artificial Sequence
  Description of Artificial Sequence: Synthetic oligonucleotide
ccaaucccugacuccaggc

SEQ ID NO: 2209727 - RNA, 19 nt, Artificial Sequence
  Description of Artificial Sequence: Synthetic oligonucleotide
ucuggacuaccuccccguu

SEQ ID NO: 2209728 - RNA, 19 nt, Artificial Sequence
  Description of Artificial Sequence: Synthetic oligonucleotide
gucuggaacugcaccaguc

SEQ ID NO: 2209729 - RNA, 19 nt, Artificial Sequence
  Description of Artificial Sequence: Synthetic oligonucleotide
caccaaucccugacuccag

SEQ ID NO: 2209730 - RNA, 19 nt, Artificial Sequence
  Description of Artificial Sequence: Synthetic oligonucleotide
gcugaagaugaugggcucc

SEQ ID NO: 2209731 - RNA, 19 nt, Artificial Sequence
  Description of Artificial Sequence: Synthetic oligonucleotide
gcuaugcugucccugguaa

SEQ ID NO: 2209732 - RNA, 19 nt, Artificial Sequence
  Description of Artificial Sequence: Synthetic oligonucleotide
ucgcucucuggugggagga

SEQ ID NO: 2209733 - RNA, 19 nt, Artificial Sequence
  Description of Artificial Sequence: Synthetic oligonucleotide
cagugaaaccagccacgug

SEQ ID NO: 2209734 - RNA, 19 nt, Artificial Sequence
  Description of Artificial Sequence: Synthetic oligonucleotide
ugcugucccugguaaccaa

SEQ ID NO: 2209735 - RNA, 19 nt, Artificial Sequence
  Description of Artificial Sequence: Synthetic oligonucleotide
gugaccgagggaggacugg

SEQ ID NO: 2209736 - RNA, 19 nt, Artificial Sequence
  Description of Artificial Sequence: Synthetic oligonucleotide
ccgagcacucacgucaugg

SEQ ID NO: 2209737 - RNA, 19 nt, Artificial Sequence
  Description of Artificial Sequence: Synthetic oligonucleotide
ggccaguuccaccucccag

SEQ ID NO: 2209738 - RNA, 19 nt, Artificial Sequence
  Description of Artificial Sequence: Synthetic oligonucleotide
ugcuugccuuucuuuccaa

SEQ ID NO: 2209739 - RNA, 19 nt, Artificial Sequence
  Description of Artificial Sequence: Synthetic oligonucleotide
acgucaugggccacaguga

SEQ ID NO: 2209740 - RNA, 19 nt, Artificial Sequence
  Description of Artificial Sequence: Synthetic oligonucleotide
aggcucucuugugaacuug

SEQ ID NO: 2209741 - RNA, 19 nt, Artificial Sequence
  Description of Artificial Sequence: Synthetic oligonucleotide
accugugaccgagggagga

SEQ ID NO: 2209742 - RNA, 19 nt, Artificial Sequence
  Description of Artificial Sequence: Synthetic oligonucleotide
ggugaggccccuccaggug

SEQ ID NO: 2209743 - RNA, 19 nt, Artificial Sequence
  Description of Artificial Sequence: Synthetic oligonucleotide
augcugucccugguaacca

SEQ ID NO: 2209744 - RNA, 19 nt, Artificial Sequence
  Description of Artificial Sequence: Synthetic oligonucleotide
gggaugccaucacaccacc

SEQ ID NO: 2209745 - RNA, 19 nt, Artificial Sequence
  Description of Artificial Sequence: Synthetic oligonucleotide
ggaggaugaucucaucaua

SEQ ID NO: 2209746 - RNA, 19 nt, Artificial Sequence
  Description of Artificial Sequence: Synthetic oligonucleotide
ggcucucuugugaacuugc

SEQ ID NO: 2209747 - RNA, 19 nt, Artificial Sequence
  Description of Artificial Sequence: Synthetic oligonucleotide
ccuaaacacaccaaccccu

SEQ ID NO: 2209748 - RNA, 19 nt, Artificial Sequence
  Description of Artificial Sequence: Synthetic oligonucleotide
uggccuugaugugcuugcc

SEQ ID NO: 2209749 - RNA, 19 nt, Artificial Sequence
  Description of Artificial Sequence: Synthetic oligonucleotide
ucccgagcacucacgucau

SEQ ID NO: 2209750 - RNA, 19 nt, Artificial Sequence
  Description of Artificial Sequence: Synthetic oligonucleotide
gucaccugugaccgaggga

SEQ ID NO: 2209751 - RNA, 19 nt, Artificial Sequence
  Description of Artificial Sequence: Synthetic oligonucleotide
ugacaggggccaggaaggu

SEQ ID NO: 2209752 - RNA, 19 nt, Artificial Sequence
  Description of Artificial Sequence: Synthetic oligonucleotide
cccaccaaucccugacucc

SEQ ID NO: 2209753 - RNA, 19 nt, Artificial Sequence
  Description of Artificial Sequence: Synthetic oligonucleotide
uggggaguguggagucaaa

SEQ ID NO: 2209754 - RNA, 19 nt, Artificial Sequence
  Description of Artificial Sequence: Synthetic oligonucleotide
ggauaaagggugacaaacu

SEQ ID NO: 2209755 - RNA, 19 nt, Artificial Sequence
  Description of Artificial Sequence: Synthetic oligonucleotide
gggugacaaacugggagac

SEQ ID NO: 2209756 - RNA, 19 nt, Artificial Sequence
  Description of Artificial Sequence: Synthetic oligonucleotide
cgagcacucacgucauggg

SEQ ID NO: 2209757 - RNA, 19 nt, Artificial Sequence
  Description of Artificial Sequence: Synthetic oligonucleotide
ggaugauguccccuggaua

SEQ ID NO: 2209758 - RNA, 19 nt, Artificial Sequence
  Description of Artificial Sequence: Synthetic oligonucleotide
ccuggauaaagggugacaa

SEQ ID NO: 2209759 - RNA, 19 nt, Artificial Sequence
  Description of Artificial Sequence: Synthetic oligonucleotide
cuaucagcucuucagucuu

SEQ ID NO: 2209760 - RNA, 19 nt, Artificial Sequence
  Description of Artificial Sequence: Synthetic oligonucleotide
auagggccccacaauggaa

SEQ ID NO: 2209761 - RNA, 19 nt, Artificial Sequence
  Description of Artificial Sequence: Synthetic oligonucleotide
ggugacaaacugggagacc

SEQ ID NO: 2209762 - RNA, 19 nt, Artificial Sequence
  Description of Artificial Sequence: Synthetic oligonucleotide
ccaucacaccaccuuguug

SEQ ID NO: 2209763 - RNA, 19 nt, Artificial Sequence
  Description of Artificial Sequence: Synthetic oligonucleotide
aaccccuggaggaguucca

SEQ ID NO: 2209764 - RNA, 19 nt, Artificial Sequence
  Description of Artificial Sequence: Synthetic oligonucleotide
ccagucccgagcacucacg

SEQ ID NO: 2209765 - RNA, 19 nt, Artificial Sequence
  Description of Artificial Sequence: Synthetic oligonucleotide
ugcccacacauaccaccuu

SEQ ID NO: 2209766 - RNA, 19 nt, Artificial Sequence
  Description of Artificial Sequence: Synthetic oligonucleotide
aacuugcagcagagcugag

SEQ ID NO: 2209767 - RNA, 19 nt, Artificial Sequence
  Description of Artificial Sequence: Synthetic oligonucleotide
cuggugggaggaugaucuc

SEQ ID NO: 2209768 - RNA, 19 nt, Artificial Sequence
  Description of Artificial Sequence: Synthetic oligonucleotide
ucacgucaugggccacagu

SEQ ID NO: 2209769 - RNA, 19 nt, Artificial Sequence
  Description of Artificial Sequence: Synthetic oligonucleotide
aucccugacuccaggccca

SEQ ID NO: 2209770 - RNA, 19 nt, Artificial Sequence
  Description of Artificial Sequence: Synthetic oligonucleotide
gcacucacgucaugggcca

SEQ ID NO: 2209771 - RNA, 19 nt, Artificial Sequence
  Description of Artificial Sequence: Synthetic oligonucleotide
cucuggacuaccuccccgu

SEQ ID NO: 2209772 - RNA, 19 nt, Artificial Sequence
  Description of Artificial Sequence: Synthetic oligonucleotide
augauguccccuggauaaa

SEQ ID NO: 2209773 - RNA, 19 nt, Artificial Sequence
  Description of Artificial Sequence: Synthetic oligonucleotide
ccccacaauggaacuggag

SEQ ID NO: 2209774 - RNA, 19 nt, Artificial Sequence
  Description of Artificial Sequence: Synthetic oligonucleotide
ugccagucccgagcacuca

SEQ ID NO: 2209775 - RNA, 19 nt, Artificial Sequence
  Description of Artificial Sequence: Synthetic oligonucleotide
ugaccacggccaguuccac

SEQ ID NO: 2209776 - RNA, 19 nt, Artificial Sequence
  Description of Artificial Sequence: Synthetic oligonucleotide
cacccgcacauucuguucu

SEQ ID NO: 2209777 - RNA, 19 nt, Artificial Sequence
  Description of Artificial Sequence: Synthetic oligonucleotide
ugccacugagagggcaguc

SEQ ID NO: 2209778 - RNA, 19 nt, Artificial Sequence
  Description of Artificial Sequence: Synthetic oligonucleotide
gaccgagggaggacuggca

SEQ ID NO: 2209779 - RNA, 19 nt, Artificial Sequence
  Description of Artificial Sequence: Synthetic oligonucleotide
uccucgcucucugguggga

SEQ ID NO: 2209780 - RNA, 19 nt, Artificial Sequence
  Description of Artificial Sequence: Synthetic oligonucleotide
gaucugcuaugcugucccu

SEQ ID NO: 2209781 - RNA, 19 nt, Artificial Sequence
  Description of Artificial Sequence: Synthetic oligonucleotide
accuccccguucacucgac

SEQ ID NO: 2209782 - RNA, 19 nt, Artificial Sequence
  Description of Artificial Sequence: Synthetic oligonucleotide
acccgcacauucuguucuu

SEQ ID NO: 2209783 - RNA, 19 nt, Artificial Sequence
  Description of Artificial Sequence: Synthetic oligonucleotide
caauggaacuggagaacuu

SEQ ID NO: 2209784 - RNA, 19 nt, Artificial Sequence
  Description of Artificial Sequence: Synthetic oligonucleotide
ccgagggaggacuggcaac

SEQ ID NO: 2209785 - RNA, 19 nt, Artificial Sequence
  Description of Artificial Sequence: Synthetic oligonucleotide
gagagggcagucucuccuu

SEQ ID NO: 2209786 - RNA, 19 nt, Artificial Sequence
  Description of Artificial Sequence: Synthetic oligonucleotide
ccagucucaugucucuaga

SEQ ID NO: 2209787 - RNA, 19 nt, Artificial Sequence
  Description of Artificial Sequence: Synthetic oligonucleotide
gacuaccuccccguucacu

SEQ ID NO: 2209788 - RNA, 19 nt, Artificial Sequence
  Description of Artificial Sequence: Synthetic oligonucleotide
cugcaccagucucaugucu

SEQ ID NO: 2209789 - RNA, 19 nt, Artificial Sequence
  Description of Artificial Sequence: Synthetic oligonucleotide
cacugagagggcagucucu

SEQ ID NO: 2209790 - RNA, 19 nt, Artificial Sequence
  Description of Artificial Sequence: Synthetic oligonucleotide
gaggccccuccaggugggg

SEQ ID NO: 2209791 - RNA, 19 nt, Artificial Sequence
  Description of Artificial Sequence: Synthetic oligonucleotide
cacucgacagcagaucuuu

SEQ ID NO: 2209792 - RNA, 19 nt, Artificial Sequence
  Description of Artificial Sequence: Synthetic oligonucleotide
ccccaccaaucccugacuc

SEQ ID NO: 2209793 - RNA, 19 nt, Artificial Sequence
  Description of Artificial Sequence: Synthetic oligonucleotide
ccacgugagccauggcauc

SEQ ID NO: 2209794 - RNA, 19 nt, Artificial Sequence
  Description of Artificial Sequence: Synthetic oligonucleotide
ggggaguguggagucaaaa

SEQ ID NO: 2209795 - RNA, 19 nt, Artificial Sequence
  Description of Artificial Sequence: Synthetic oligonucleotide
gucaugggccacagugaaa

SEQ ID NO: 2209796 - RNA, 19 nt, Artificial Sequence
  Description of Artificial Sequence: Synthetic oligonucleotide
cugugaccgagggaggacu

SEQ ID NO: 2209797 - RNA, 19 nt, Artificial Sequence
  Description of Artificial Sequence: Synthetic oligonucleotide
caucauugucuuggggagu

SEQ ID NO: 2209798 - RNA, 19 nt, Artificial Sequence
  Description of Artificial Sequence: Synthetic oligonucleotide
gcgucucauuugccagucc

SEQ ID NO: 2209799 - RNA, 19 nt, Artificial Sequence
  Description of Artificial Sequence: Synthetic oligonucleotide
ggugggaggaugaucucau

SEQ ID NO: 2209800 - RNA, 19 nt, Artificial Sequence
  Description of Artificial Sequence: Synthetic oligonucleotide
ggggugucuggaacugcac

SEQ ID NO: 2209801 - RNA, 19 nt, Artificial Sequence
  Description of Artificial Sequence: Synthetic oligonucleotide
ccccguucacucgacagca

SEQ ID NO: 2209802 - RNA, 19 nt, Artificial Sequence
  Description of Artificial Sequence: Synthetic oligonucleotide
ggccuugaugugcuugccu

SEQ ID NO: 2209803 - RNA, 19 nt, Artificial Sequence
  Description of Artificial Sequence: Synthetic oligonucleotide
ggcuuccuaaacacaccaa

SEQ ID NO: 2209804 - RNA, 19 nt, Artificial Sequence
  Description of Artificial Sequence: Synthetic oligonucleotide
cacucacgucaugggccac

SEQ ID NO: 2209805 - RNA, 19 nt, Artificial Sequence
  Description of Artificial Sequence: Synthetic oligonucleotide
ccaggcuaucagcucuuca

SEQ ID NO: 2209806 - RNA, 19 nt, Artificial Sequence
  Description of Artificial Sequence: Synthetic oligonucleotide
ccucgcucucuggugggag

SEQ ID NO: 2209807 - RNA, 19 nt, Artificial Sequence
  Description of Artificial Sequence: Synthetic oligonucleotide
gccacgugagccauggcau

SEQ ID NO: 2209808 - RNA, 19 nt, Artificial Sequence
  Description of Artificial Sequence: Synthetic oligonucleotide
acccaggcuaucagcucuu

SEQ ID NO: 2209809 - RNA, 19 nt, Artificial Sequence
  Description of Artificial Sequence: Synthetic oligonucleotide
ggacuaccuccccguucac

SEQ ID NO: 2209810 - RNA, 19 nt, Artificial Sequence
  Description of Artificial Sequence: Synthetic oligonucleotide
ggcacccgcacauucuguu

SEQ ID NO: 2209811 - RNA, 19 nt, Artificial Sequence
  Description of Artificial Sequence: Synthetic oligonucleotide
ggaggacuggcaacugggu

SEQ ID NO: 2209812 - RNA, 19 nt, Artificial Sequence
  Description of Artificial Sequence: Synthetic oligonucleotide
cugcuaugcugucccuggu

SEQ ID NO: 2209813 - RNA, 19 nt, Artificial Sequence
  Description of Artificial Sequence: Synthetic oligonucleotide
ccgggugacaggggccagg

SEQ ID NO: 2209814 - RNA, 19 nt, Artificial Sequence
  Description of Artificial Sequence: Synthetic oligonucleotide
caccagucucaugucucua

SEQ ID NO: 2209815 - RNA, 19 nt, Artificial Sequence
  Description of Artificial Sequence: Synthetic oligonucleotide
ccaaugaccacggccaguu

SEQ ID NO: 2209816 - RNA, 19 nt, Artificial Sequence
  Description of Artificial Sequence: Synthetic oligonucleotide
ccccuggauaaagggugac

SEQ ID NO: 2209817 - RNA, 19 nt, Artificial Sequence
  Description of Artificial Sequence: Synthetic oligonucleotide
cccgagcacucacgucaug

SEQ ID NO: 2209818 - RNA, 19 nt, Artificial Sequence
  Description of Artificial Sequence: Synthetic oligonucleotide
ccaaccccuggaggaguuc

SEQ ID NO: 2209819 - RNA, 19 nt, Artificial Sequence
  Description of Artificial Sequence: Synthetic oligonucleotide
ccaucugauugguguugcu

SEQ ID NO: 2209820 - RNA, 19 nt, Artificial Sequence
  Description of Artificial Sequence: Synthetic oligonucleotide
cccugacuccaggcccagg

SEQ ID NO: 2209821 - RNA, 19 nt, Artificial Sequence
  Description of Artificial Sequence: Synthetic oligonucleotide
ccuccccguucacucgaca

SEQ ID NO: 2209822 - RNA, 19 nt, Artificial Sequence
  Description of Artificial Sequence: Synthetic oligonucleotide
gccgggugacaggggccag

SEQ ID NO: 2209823 - RNA, 19 nt, Artificial Sequence
  Description of Artificial Sequence: Synthetic oligonucleotide
gggcacccgcacauucugu

SEQ ID NO: 2209824 - RNA, 19 nt, Artificial Sequence
  Description of Artificial Sequence: Synthetic oligonucleotide
cccaguccaccuccucgcu

SEQ ID NO: 2209825 - RNA, 19 nt, Artificial Sequence
  Description of Artificial Sequence: Synthetic oligonucleotide
gccccuccagguggggugu

SEQ ID NO: 2209826 - RNA, 19 nt, Artificial Sequence
  Description of Artificial Sequence: Synthetic oligonucleotide
ccccuccaggugggguguc

SEQ ID NO: 2209827 - RNA, 19 nt, Artificial Sequence
  Description of Artificial Sequence: Synthetic oligonucleotide
cccgcacauucuguucuuu

SEQ ID NO: 2209828 - RNA, 19 nt, Artificial Sequence
  Description of Artificial Sequence: Synthetic oligonucleotide
aagggguaaaccucgaagc

SEQ ID NO: 2209829 - RNA, 19 nt, Artificial Sequence
  Description of Artificial Sequence: Synthetic oligonucleotide
ugggauaagccuaauaagg

SEQ ID NO: 2209830 - RNA, 19 nt, Artificial Sequence
  Description of Artificial Sequence: Synthetic oligonucleotide
aacauuaccccucggauag

SEQ ID NO: 2209831 - RNA, 19 nt, Artificial Sequence
  Description of Artificial Sequence: Synthetic oligonucleotide
aagguggaaagcuggaggc

SEQ ID NO: 2209832 - RNA, 19 nt, Artificial Sequence
  Description of Artificial Sequence: Synthetic oligonucleotide
aaaccucgaagccaaaagg

SEQ ID NO: 2209833 - RNA, 19 nt, Artificial Sequence
  Description of Artificial Sequence: Synthetic oligonucleotide
gauaguaguaagcagcacc

SEQ ID NO: 2209834 - RNA, 19 nt, Artificial Sequence
  Description of Artificial Sequence: Synthetic oligonucleotide
aauugaagccuucaagcag

SEQ ID NO: 2209835 - RNA, 19 nt, Artificial Sequence
  Description of Artificial Sequence: Synthetic oligonucleotide
aauaaggccaaacguuggg

SEQ ID NO: 2209836 - RNA, 19 nt, Artificial Sequence
  Description of Artificial Sequence: Synthetic oligonucleotide
auagucagcaaugacuucc

SEQ ID NO: 2209837 - RNA, 19 nt, Artificial Sequence
  Description of Artificial Sequence: Synthetic oligonucleotide
aaauugaagccuucaagca

SEQ ID NO: 2209838 - RNA, 19 nt, Artificial Sequence
  Description of Artificial Sequence: Synthetic oligonucleotide
ugcuaagguguucugaggg

SEQ ID NO: 2209839 - RNA, 19 nt, Artificial Sequence
  Description of Artificial Sequence: Synthetic oligonucleotide
aagcauggaacugggaugc

SEQ ID NO: 2209840 - RNA, 19 nt, Artificial Sequence
  Description of Artificial Sequence: Synthetic oligonucleotide
ugugcugaguaccaggaag

SEQ ID NO: 2209841 - RNA, 19 nt, Artificial Sequence
  Description of Artificial Sequence: Synthetic oligonucleotide
gauacagguaucaaggggc

SEQ ID NO: 2209842 - RNA, 19 nt, Artificial Sequence
  Description of Artificial Sequence: Synthetic oligonucleotide
aaaguaauggggauacagg

SEQ ID NO: 2209843 - RNA, 19 nt, Artificial Sequence
  Description of Artificial Sequence: Synthetic oligonucleotide
uaaaccucgaagccaaaag

SEQ ID NO: 2209844 - RNA, 19 nt, Artificial Sequence
  Description of Artificial Sequence: Synthetic oligonucleotide
uaccaugccaccuggaagg

SEQ ID NO: 2209845 - RNA, 19 nt, Artificial Sequence
  Description of Artificial Sequence: Synthetic oligonucleotide
ugguagcucuucaagaagg

SEQ ID NO: 2209846 - RNA, 19 nt, Artificial Sequence
  Description of Artificial Sequence: Synthetic oligonucleotide
guugauaguaguaagcagc

SEQ ID NO: 2209847 - RNA, 19 nt, Artificial Sequence
  Description of Artificial Sequence: Synthetic oligonucleotide
aaucuggcacuuccguucc

SEQ ID NO: 2209848 - RNA, 19 nt, Artificial Sequence
  Description of Artificial Sequence: Synthetic oligonucleotide
cuaauaaggccaaacguug

SEQ ID NO: 2209849 - RNA, 19 nt, Artificial Sequence
  Description of Artificial Sequence: Synthetic oligonucleotide
agugguuggagaugguagc

SEQ ID NO: 2209850 - RNA, 19 nt, Artificial Sequence
  Description of Artificial Sequence: Synthetic oligonucleotide
caaaccagccuccaaaccg

SEQ ID NO: 2209851 - RNA, 19 nt, Artificial Sequence
  Description of Artificial Sequence: Synthetic oligonucleotide
uaauaaggccaaacguugg

SEQ ID NO: 2209852 - RNA, 19 nt, Artificial Sequence
  Description of Artificial Sequence: Synthetic oligonucleotide
aaugacuuccauucgcagu

SEQ ID NO: 2209853 - RNA, 19 nt, Artificial Sequence
  Description of Artificial Sequence: Synthetic oligonucleotide
aguacagguggugagacac

SEQ ID NO: 2209854 - RNA, 19 nt, Artificial Sequence
  Description of Artificial Sequence: Synthetic oligonucleotide
ugggcuagaaucuuagggc

SEQ ID NO: 2209855 - RNA, 19 nt, Artificial Sequence
  Description of Artificial Sequence: Synthetic oligonucleotide
ugucaaacauagcaggugu

SEQ ID NO: 2209856 - RNA, 19 nt, Artificial Sequence
  Description of Artificial Sequence: Synthetic oligonucleotide
aguccagucacgccaaugg

SEQ ID NO: 2209857 - RNA, 19 nt, Artificial Sequence
  Description of Artificial Sequence: Synthetic oligonucleotide
uugauaguaguaagcagca

SEQ ID NO: 2209858 - RNA, 19 nt, Artificial Sequence
  Description of Artificial Sequence: Synthetic oligonucleotide
uccacaacacuucucaagu

SEQ ID NO: 2209859 - RNA, 19 nt, Artificial Sequence
  Description of Artificial Sequence: Synthetic oligonucleotide
ugaguggcaaaucuggcac

SEQ ID NO: 2209860 - RNA, 19 nt, Artificial Sequence
  Description of Artificial Sequence: Synthetic oligonucleotide
agccuaauaaggccaaacg

SEQ ID NO: 2209861 - RNA, 19 nt, Artificial Sequence
  Description of Artificial Sequence: Synthetic oligonucleotide
aaacauagcaggugugcug

SEQ ID NO: 2209862 - RNA, 19 nt, Artificial Sequence
  Description of Artificial Sequence: Synthetic oligonucleotide
agcauagacaucuugucgu

SEQ ID NO: 2209863 - RNA, 19 nt, Artificial Sequence
  Description of Artificial Sequence: Synthetic oligonucleotide
agggguaaaccucgaagcc

SEQ ID NO: 2209864 - RNA, 19 nt, Artificial Sequence
  Description of Artificial Sequence: Synthetic oligonucleotide
aacacuucucaagugguag

SEQ ID NO: 2209865 - RNA, 19 nt, Artificial Sequence
  Description of Artificial Sequence: Synthetic oligonucleotide
uaagcauggaacugggaug

SEQ ID NO: 2209866 - RNA, 19 nt, Artificial Sequence
  Description of Artificial Sequence: Synthetic oligonucleotide
uuugucaaacauagcaggu

SEQ ID NO: 2209867 - RNA, 19 nt, Artificial Sequence
  Description of Artificial Sequence: Synthetic oligonucleotide
aaaguacaucuucuguucu

SEQ ID NO: 2209868 - RNA, 19 nt, Artificial Sequence
  Description of Artificial Sequence: Synthetic oligonucleotide
gagaugguagcucuucaag

SEQ ID NO: 2209869 - RNA, 19 nt, Artificial Sequence
  Description of Artificial Sequence: Synthetic oligonucleotide
aagccuaauaaggccaaac

SEQ ID NO: 2209870 - RNA, 19 nt, Artificial Sequence
  Description of Artificial Sequence: Synthetic oligonucleotide
aaucuuagggcgccuguug

SEQ ID NO: 2209871 - RNA, 19 nt, Artificial Sequence
  Description of Artificial Sequence: Synthetic oligonucleotide
agugguaggauacgcacug

SEQ ID NO: 2209872 - RNA, 19 nt, Artificial Sequence
  Description of Artificial Sequence: Synthetic oligonucleotide
ugcagucugggcuagaauc

SEQ ID NO: 2209873 - RNA, 19 nt, Artificial Sequence
  Description of Artificial Sequence: Synthetic oligonucleotide
uacaucuucuguucuucgg

SEQ ID NO: 2209874 - RNA, 19 nt, Artificial Sequence
  Description of Artificial Sequence: Synthetic oligonucleotide
caagguggaaagcuggagg

SEQ ID NO: 2209875 - RNA, 19 nt, Artificial Sequence
  Description of Artificial Sequence: Synthetic oligonucleotide
ugucguugauaguaguaag

SEQ ID NO: 2209876 - RNA, 19 nt, Artificial Sequence
  Description of Artificial Sequence: Synthetic oligonucleotide
ucaaacauagcaggugugc

SEQ ID NO: 2209877 - RNA, 19 nt, Artificial Sequence
  Description of Artificial Sequence: Synthetic oligonucleotide
uggggauacagguaucaag

SEQ ID NO: 2209878 - RNA, 19 nt, Artificial Sequence
  Description of Artificial Sequence: Synthetic oligonucleotide
caaacguugggcagguggg

SEQ ID NO: 2209879 - RNA, 19 nt, Artificial Sequence
  Description of Artificial Sequence: Synthetic oligonucleotide
gauaagccuaauaaggcca

SEQ ID NO: 2209880 - RNA, 19 nt, Artificial Sequence
  Description of Artificial Sequence: Synthetic oligonucleotide
aaggccaaacguugggcag

SEQ ID NO: 2209881 - RNA, 19 nt, Artificial Sequence
  Description of Artificial Sequence: Synthetic oligonucleotide
cugggauaagccuaauaag

SEQ ID NO: 2209882 - RNA, 19 nt, Artificial Sequence
  Description of Artificial Sequence: Synthetic oligonucleotide
auuguaccaugccaccugg

SEQ ID NO: 2209883 - RNA, 19 nt, Artificial Sequence
  Description of Artificial Sequence: Synthetic oligonucleotide
auaaggccaaacguugggc

SEQ ID NO: 2209884 - RNA, 19 nt, Artificial Sequence
  Description of Artificial Sequence: Synthetic oligonucleotide
agauguagugcuaaggugu

SEQ ID NO: 2209885 - RNA, 19 nt, Artificial Sequence
  Description of Artificial Sequence: Synthetic oligonucleotide
ucuucaagaaggguuugag

SEQ ID NO: 2209886 - RNA, 19 nt, Artificial Sequence
  Description of Artificial Sequence: Synthetic oligonucleotide
aacauagcaggugugcuga

SEQ ID NO: 2209887 - RNA, 19 nt, Artificial Sequence
  Description of Artificial Sequence: Synthetic oligonucleotide
gauacgcacugauccacgg

SEQ ID NO: 2209888 - RNA, 19 nt, Artificial Sequence
  Description of Artificial Sequence: Synthetic oligonucleotide
auagacaucuugucguuga

SEQ ID NO: 2209889 - RNA, 19 nt, Artificial Sequence
  Description of Artificial Sequence: Synthetic oligonucleotide
ucaagugguaggauacgca

SEQ ID NO: 2209890 - RNA, 19 nt, Artificial Sequence
  Description of Artificial Sequence: Synthetic oligonucleotide
aguaagcagcaccugccac

SEQ ID NO: 2209891 - RNA, 19 nt, Artificial Sequence
  Description of Artificial Sequence: Synthetic oligonucleotide
aaaccagccuccaaaccgg

SEQ ID NO: 2209892 - RNA, 19 nt, Artificial Sequence
  Description of Artificial Sequence: Synthetic oligonucleotide
uggcaaaucuggcacuucc

SEQ ID NO: 2209893 - RNA, 19 nt, Artificial Sequence
  Description of Artificial Sequence: Synthetic oligonucleotide
ugguaagcauggaacuggg

SEQ ID NO: 2209894 - RNA, 19 nt, Artificial Sequence
  Description of Artificial Sequence: Synthetic oligonucleotide
uguagugcuaagguguucu

SEQ ID NO: 2209895 - RNA, 19 nt, Artificial Sequence
  Description of Artificial Sequence: Synthetic oligonucleotide
uucaagcagagcgaugcgg

SEQ ID NO: 2209896 - RNA, 19 nt, Artificial Sequence
  Description of Artificial Sequence: Synthetic oligonucleotide
aguacaucuucuguucuuc

SEQ ID NO: 2209897 - RNA, 19 nt, Artificial Sequence
  Description of Artificial Sequence: Synthetic oligonucleotide
uucauuguaccaugccacc

SEQ ID NO: 2209898 - RNA, 19 nt, Artificial Sequence
  Description of Artificial Sequence: Synthetic oligonucleotide
cagcauagacaucuugucg

SEQ ID NO: 2209899 - RNA, 19 nt, Artificial Sequence
  Description of Artificial Sequence: Synthetic oligonucleotide
gaugguagcucuucaagaa

SEQ ID NO: 2209900 - RNA, 19 nt, Artificial Sequence
  Description of Artificial Sequence: Synthetic oligonucleotide
ggauacagguaucaagggg

SEQ ID NO: 2209901 - RNA, 19 nt, Artificial Sequence
  Description of Artificial Sequence: Synthetic oligonucleotide
ggggauacagguaucaagg

SEQ ID NO: 2209902 - RNA, 19 nt, Artificial Sequence
  Description of Artificial Sequence: Synthetic oligonucleotide
aucuuagggcgccuguugg

SEQ ID NO: 2209903 - RNA, 19 nt, Artificial Sequence
  Description of Artificial Sequence: Synthetic oligonucleotide
gaauccugaggcuugguaa

SEQ ID NO: 2209904 - RNA, 19 nt, Artificial Sequence
  Description of Artificial Sequence: Synthetic oligonucleotide
uguaccaugccaccuggaa

SEQ ID NO: 2209905 - RNA, 19 nt, Artificial Sequence
  Description of Artificial Sequence: Synthetic oligonucleotide
ggauaagccuaauaaggcc

SEQ ID NO: 2209906 - RNA, 19 nt, Artificial Sequence
  Description of Artificial Sequence: Synthetic oligonucleotide
agcaacauuaccccucgga

SEQ ID NO: 2209907 - RNA, 19 nt, Artificial Sequence
  Description of Artificial Sequence: Synthetic oligonucleotide
uugucaaacauagcaggug

SEQ ID NO: 2209908 - RNA, 19 nt, Artificial Sequence
  Description of Artificial Sequence: Synthetic oligonucleotide
auaguaguaagcagcaccu

SEQ ID NO: 2209909 - RNA, 19 nt, Artificial Sequence
  Description of Artificial Sequence: Synthetic oligonucleotide
cagguggugagacacuggg

SEQ ID NO: 2209910 - RNA, 19 nt, Artificial Sequence
  Description of Artificial Sequence: Synthetic oligonucleotide
cagugguuggagaugguag

SEQ ID NO: 2209911 - RNA, 19 nt, Artificial Sequence
  Description of Artificial Sequence: Synthetic oligonucleotide
cuccacaacacuucucaag

SEQ ID NO: 2209912 - RNA, 19 nt, Artificial Sequence
  Description of Artificial Sequence: Synthetic oligonucleotide
augguagcucuucaagaag

SEQ ID NO: 2209913 - RNA, 19 nt, Artificial Sequence
  Description of Artificial Sequence: Synthetic oligonucleotide
uccacggggucucucagug

SEQ ID NO: 2209914 - RNA, 19 nt, Artificial Sequence
  Description of Artificial Sequence: Synthetic oligonucleotide
ucccgauaaguccagucac

SEQ ID NO: 2209915 - RNA, 19 nt, Artificial Sequence
  Description of Artificial Sequence: Synthetic oligonucleotide
accuggaagggguaaaccu

SEQ ID NO: 2209916 - RNA, 19 nt, Artificial Sequence
  Description of Artificial Sequence: Synthetic oligonucleotide
guucauuguaccaugccac

SEQ ID NO: 2209917 - RNA, 19 nt, Artificial Sequence
  Description of Artificial Sequence: Synthetic oligonucleotide
gaguucauuguaccaugcc

SEQ ID NO: 2209918 - RNA, 19 nt, Artificial Sequence
  Description of Artificial Sequence: Synthetic oligonucleotide
cagauguagugcuaaggug

SEQ ID NO: 2209919 - RNA, 19 nt, Artificial Sequence
  Description of Artificial Sequence: Synthetic oligonucleotide
aucccgauaaguccaguca

SEQ ID NO: 2209920 - RNA, 19 nt, Artificial Sequence
  Description of Artificial Sequence: Synthetic oligonucleotide
uugucguugauaguaguaa

SEQ ID NO: 2209921 - RNA, 19 nt, Artificial Sequence
  Description of Artificial Sequence: Synthetic oligonucleotide
gggcuagaaucuuagggcg

SEQ ID NO: 2209922 - RNA, 19 nt, Artificial Sequence
  Description of Artificial Sequence: Synthetic oligonucleotide
gccaauggaaauugaagcc

SEQ ID NO: 2209923 - RNA, 19 nt, Artificial Sequence
  Description of Artificial Sequence: Synthetic oligonucleotide
gaugcucagauguagugcu

SEQ ID NO: 2209924 - RNA, 19 nt, Artificial Sequence
  Description of Artificial Sequence: Synthetic oligonucleotide
cucggauagcaaaccagcc

SEQ ID NO: 2209925 - RNA, 19 nt, Artificial Sequence
  Description of Artificial Sequence: Synthetic oligonucleotide
uaguaagcagcaccugcca

SEQ ID NO: 2209926 - RNA, 19 nt, Artificial Sequence
  Description of Artificial Sequence: Synthetic oligonucleotide
ugggguggaccucauaguc

SEQ ID NO: 2209927 - RNA, 19 nt, Artificial Sequence
  Description of Artificial Sequence: Synthetic oligonucleotide
uggggcuaagccagcuucg

SEQ ID NO: 2209928 - RNA, 19 nt, Artificial Sequence
  Description of Artificial Sequence: Synthetic oligonucleotide
aggauacgcacugauccac

SEQ ID NO: 2209929 - RNA, 19 nt, Artificial Sequence
  Description of Artificial Sequence: Synthetic oligonucleotide
ggcuaagccagcuucgugc

SEQ ID NO: 2209930 - RNA, 19 nt, Artificial Sequence
  Description of Artificial Sequence: Synthetic oligonucleotide
uucggaguaccgcucuuca

SEQ ID NO: 2209931 - RNA, 19 nt, Artificial Sequence
  Description of Artificial Sequence: Synthetic oligonucleotide
auacgcacugauccacggg

SEQ ID NO: 2209932 - RNA, 19 nt, Artificial Sequence
  Description of Artificial Sequence: Synthetic oligonucleotide
ugcucugcuggaauccuga

SEQ ID NO: 2209933 - RNA, 19 nt, Artificial Sequence
  Description of Artificial Sequence: Synthetic oligonucleotide
aaacguugggcaggugggg

SEQ ID NO: 2209934 - RNA, 19 nt, Artificial Sequence
  Description of Artificial Sequence: Synthetic oligonucleotide
ucucaagugguaggauacg

SEQ ID NO: 2209935 - RNA, 19 nt, Artificial Sequence
  Description of Artificial Sequence: Synthetic oligonucleotide
aaguacaucuucuguucuu

SEQ ID NO: 2209936 - RNA, 19 nt, Artificial Sequence
  Description of Artificial Sequence: Synthetic oligonucleotide
aaacuucuccacaacacuu

SEQ ID NO: 2209937 - RNA, 19 nt, Artificial Sequence
  Description of Artificial Sequence: Synthetic oligonucleotide
gucguugauaguaguaagc

SEQ ID NO: 2209938 - RNA, 19 nt, Artificial Sequence
  Description of Artificial Sequence: Synthetic oligonucleotide
gcugggauaagccuaauaa

SEQ ID NO: 2209939 - RNA, 19 nt, Artificial Sequence
  Description of Artificial Sequence: Synthetic oligonucleotide
gugcugaguaccaggaagg

SEQ ID NO: 2209940 - RNA, 19 nt, Artificial Sequence
  Description of Artificial Sequence: Synthetic oligonucleotide
auagcaggugugcugagua

SEQ ID NO: 2209941 - RNA, 19 nt, Artificial Sequence
  Description of Artificial Sequence: Synthetic oligonucleotide
caaugacuuccauucgcag

SEQ ID NO: 2209942 - RNA, 19 nt, Artificial Sequence
  Description of Artificial Sequence: Synthetic oligonucleotide
uuaccccucggauagcaaa

SEQ ID NO: 2209943 - RNA, 19 nt, Artificial Sequence
  Description of Artificial Sequence: Synthetic oligonucleotide
cauggaacugggaugcuca

SEQ ID NO: 2209944 - RNA, 19 nt, Artificial Sequence
  Description of Artificial Sequence: Synthetic oligonucleotide
guaauggggauacagguau

SEQ ID NO: 2209945 - RNA, 19 nt, Artificial Sequence
  Description of Artificial Sequence: Synthetic oligonucleotide
ccaaacguugggcaggugg

SEQ ID NO: 2209946 - RNA, 19 nt, Artificial Sequence
  Description of Artificial Sequence: Synthetic oligonucleotide
guaggcacacagucagggg

SEQ ID NO: 2209947 - RNA, 19 nt, Artificial Sequence
  Description of Artificial Sequence: Synthetic oligonucleotide
guaagcauggaacugggau

SEQ ID NO: 2209948 - RNA, 19 nt, Artificial Sequence
  Description of Artificial Sequence: Synthetic oligonucleotide
uggagaugguagcucuuca

SEQ ID NO: 2209949 - RNA, 19 nt, Artificial Sequence
  Description of Artificial Sequence: Synthetic oligonucleotide
guaagcagcaccugccaca

SEQ ID NO: 2209950 - RNA, 19 nt, Artificial Sequence
  Description of Artificial Sequence: Synthetic oligonucleotide
cucaagugguaggauacgc

SEQ ID NO: 2209951 - RNA, 19 nt, Artificial Sequence
  Description of Artificial Sequence: Synthetic oligonucleotide
ugauccacggggucucuca

SEQ ID NO: 2209952 - RNA, 19 nt, Artificial Sequence
  Description of Artificial Sequence: Synthetic oligonucleotide
acgccaauggaaauugaag

SEQ ID NO: 2209953 - RNA, 19 nt, Artificial Sequence
  Description of Artificial Sequence: Synthetic oligonucleotide
aaagcuggaggcaggaguu

SEQ ID NO: 2209954 - RNA, 19 nt, Artificial Sequence
  Description of Artificial Sequence: Synthetic oligonucleotide
cuuagggcgccuguugggg

SEQ ID NO: 2209955 - RNA, 19 nt, Artificial Sequence
  Description of Artificial Sequence: Synthetic oligonucleotide
gggauaagccuaauaaggc

SEQ ID NO: 2209956 - RNA, 19 nt, Artificial Sequence
  Description of Artificial Sequence: Synthetic oligonucleotide
uuccguuccuggcagcaac

SEQ ID NO: 2209957 - RNA, 19 nt, Artificial Sequence
  Description of Artificial Sequence: Synthetic oligonucleotide
ugguaggauacgcacugau

SEQ ID NO: 2209958 - RNA, 19 nt, Artificial Sequence
  Description of Artificial Sequence: Synthetic oligonucleotide
ugagacacuggggcuaagc

SEQ ID NO: 2209959 - RNA, 19 nt, Artificial Sequence
  Description of Artificial Sequence: Synthetic oligonucleotide
ugggaugcucagauguagu

SEQ ID NO: 2209960 - RNA, 19 nt, Artificial Sequence
  Description of Artificial Sequence: Synthetic oligonucleotide
guuccuggcagcaacauua

SEQ ID NO: 2209961 - RNA, 19 nt, Artificial Sequence
  Description of Artificial Sequence: Synthetic oligonucleotide
ccuucaagcagagcgaugc

SEQ ID NO: 2209962 - RNA, 19 nt, Artificial Sequence
  Description of Artificial Sequence: Synthetic oligonucleotide
uaccccucggauagcaaac

SEQ ID NO: 2209963 - RNA, 19 nt, Artificial Sequence
  Description of Artificial Sequence: Synthetic oligonucleotide
cauucgcaguucuggaaac

SEQ ID NO: 2209964 - RNA, 19 nt, Artificial Sequence
  Description of Artificial Sequence: Synthetic oligonucleotide
agagcgaugcggccagcuc

SEQ ID NO: 2209965 - RNA, 19 nt, Artificial Sequence
  Description of Artificial Sequence: Synthetic oligonucleotide
gucacgccaauggaaauug

SEQ ID NO: 2209966 - RNA, 19 nt, Artificial Sequence
  Description of Artificial Sequence: Synthetic oligonucleotide
ggguggaccucauagucag

SEQ ID NO: 2209967 - RNA, 19 nt, Artificial Sequence
  Description of Artificial Sequence: Synthetic oligonucleotide
uccauucgcaguucuggaa

SEQ ID NO: 2209968 - RNA, 19 nt, Artificial Sequence
  Description of Artificial Sequence: Synthetic oligonucleotide
agcagagcgaugcggccag

SEQ ID NO: 2209969 - RNA, 19 nt, Artificial Sequence
  Description of Artificial Sequence: Synthetic oligonucleotide
aagugguaggauacgcacu

SEQ ID NO: 2209970 - RNA, 19 nt, Artificial Sequence
  Description of Artificial Sequence: Synthetic oligonucleotide
caggagucacagcaucccg

SEQ ID NO: 2209971 - RNA, 19 nt, Artificial Sequence
  Description of Artificial Sequence: Synthetic oligonucleotide
caucuugucguugauagua

SEQ ID NO: 2209972 - RNA, 19 nt, Artificial Sequence
  Description of Artificial Sequence: Synthetic oligonucleotide
gauccacggggucucucag

SEQ ID NO: 2209973 - RNA, 19 nt, Artificial Sequence
  Description of Artificial Sequence: Synthetic oligonucleotide
auccugaggcuugguaagc

SEQ ID NO: 2209974 - RNA, 19 nt, Artificial Sequence
  Description of Artificial Sequence: Synthetic oligonucleotide
uagugcuaagguguucuga

SEQ ID NO: 2209975 - RNA, 19 nt, Artificial Sequence
  Description of Artificial Sequence: Synthetic oligonucleotide
caucccgauaaguccaguc

SEQ ID NO: 2209976 - RNA, 19 nt, Artificial Sequence
  Description of Artificial Sequence: Synthetic oligonucleotide
ccucggauagcaaaccagc

SEQ ID NO: 2209977 - RNA, 19 nt, Artificial Sequence
  Description of Artificial Sequence: Synthetic oligonucleotide
gcagcaacauuaccccucg

SEQ ID NO: 2209978 - RNA, 19 nt, Artificial Sequence
  Description of Artificial Sequence: Synthetic oligonucleotide
gguuugagggcuuugucaa

SEQ ID NO: 2209979 - RNA, 19 nt, Artificial Sequence
  Description of Artificial Sequence: Synthetic oligonucleotide
ucgcaguucuggaaacuuc

SEQ ID NO: 2209980 - RNA, 19 nt, Artificial Sequence
  Description of Artificial Sequence: Synthetic oligonucleotide
cuggggcuaagccagcuuc

SEQ ID NO: 2209981 - RNA, 19 nt, Artificial Sequence
  Description of Artificial Sequence: Synthetic oligonucleotide
aagccuucaagcagagcga

SEQ ID NO: 2209982 - RNA, 19 nt, Artificial Sequence
  Description of Artificial Sequence: Synthetic oligonucleotide
cugggaugcucagauguag

SEQ ID NO: 2209983 - RNA, 19 nt, Artificial Sequence
  Description of Artificial Sequence: Synthetic oligonucleotide
uagaaucuuagggcgccug

SEQ ID NO: 2209984 - RNA, 19 nt, Artificial Sequence
  Description of Artificial Sequence: Synthetic oligonucleotide
cuggaaacuucuccacaac

SEQ ID NO: 2209985 - RNA, 19 nt, Artificial Sequence
  Description of Artificial Sequence: Synthetic oligonucleotide
ugcugaguaccaggaaggc

SEQ ID NO: 2209986 - RNA, 19 nt, Artificial Sequence
  Description of Artificial Sequence: Synthetic oligonucleotide
uaauggggauacagguauc

SEQ ID NO: 2209987 - RNA, 19 nt, Artificial Sequence
  Description of Artificial Sequence: Synthetic oligonucleotide
aacguugggcagguggggu

SEQ ID NO: 2209988 - RNA, 19 nt, Artificial Sequence
  Description of Artificial Sequence: Synthetic oligonucleotide
ugcucagauguagugcuaa

SEQ ID NO: 2209989 - RNA, 19 nt, Artificial Sequence
  Description of Artificial Sequence: Synthetic oligonucleotide
gguagcucuucaagaaggg

SEQ ID NO: 2209990 - RNA, 19 nt, Artificial Sequence
  Description of Artificial Sequence: Synthetic oligonucleotide
cagcuucgugcucugcugg

SEQ ID NO: 2209991 - RNA, 19 nt, Artificial Sequence
  Description of Artificial Sequence: Synthetic oligonucleotide
uuggagaugguagcucuuc

SEQ ID NO: 2209992 - RNA, 19 nt, Artificial Sequence
  Description of Artificial Sequence: Synthetic oligonucleotide
accccucggauagcaaacc

SEQ ID NO: 2209993 - RNA, 19 nt, Artificial Sequence
  Description of Artificial Sequence: Synthetic oligonucleotide
uccuggcagcaacauuacc

SEQ ID NO: 2209994 - RNA, 19 nt, Artificial Sequence
  Description of Artificial Sequence: Synthetic oligonucleotide
cuugucguugauaguagua

SEQ ID NO: 2209995 - RNA, 19 nt, Artificial Sequence
  Description of Artificial Sequence: Synthetic oligonucleotide
ugauaguaguaagcagcac

SEQ ID NO: 2209996 - RNA, 19 nt, Artificial Sequence
  Description of Artificial Sequence: Synthetic oligonucleotide
ucgugcucugcuggaaucc

SEQ ID NO: 2209997 - RNA, 19 nt, Artificial Sequence
  Description of Artificial Sequence: Synthetic oligonucleotide
ggcuugguaagcauggaac

SEQ ID NO: 2209998 - RNA, 19 nt, Artificial Sequence
  Description of Artificial Sequence: Synthetic oligonucleotide
gaacugggaugcucagaug

SEQ ID NO: 2209999 - RNA, 19 nt, Artificial Sequence
  Description of Artificial Sequence: Synthetic oligonucleotide
aggccaaacguugggcagg

SEQ ID NO: 2210000 - RNA, 19 nt, Artificial Sequence
  Description of Artificial Sequence: Synthetic oligonucleotide
auagcaaaccagccuccaa

SEQ ID NO: 2210001 - RNA, 19 nt, Artificial Sequence
  Description of Artificial Sequence: Synthetic oligonucleotide
aggugggguggaaaaguac

SEQ ID NO: 2210002 - RNA, 19 nt, Artificial Sequence
  Description of Artificial Sequence: Synthetic oligonucleotide
acaucuugucguugauagu

SEQ ID NO: 2210003 - RNA, 19 nt, Artificial Sequence
  Description of Artificial Sequence: Synthetic oligonucleotide
ggaaaaguacaucuucugu

SEQ ID NO: 2210004 - RNA, 19 nt, Artificial Sequence
  Description of Artificial Sequence: Synthetic oligonucleotide
uggaaagcuggaggcagga

SEQ ID NO: 2210005 - RNA, 19 nt, Artificial Sequence
  Description of Artificial Sequence: Synthetic oligonucleotide
uaguaguaagcagcaccug

SEQ ID NO: 2210006 - RNA, 19 nt, Artificial Sequence
  Description of Artificial Sequence: Synthetic oligonucleotide
uggcacuuccguuccuggc

SEQ ID NO: 2210007 - RNA, 19 nt, Artificial Sequence
  Description of Artificial Sequence: Synthetic oligonucleotide
gcuaagguguucugagggc

SEQ ID NO: 2210008 - RNA, 19 nt, Artificial Sequence
  Description of Artificial Sequence: Synthetic oligonucleotide
gggaugcucagauguagug

SEQ ID NO: 2210009 - RNA, 19 nt, Artificial Sequence
  Description of Artificial Sequence: Synthetic oligonucleotide
ggguuugagggcuuuguca

SEQ ID NO: 2210010 - RNA, 19 nt, Artificial Sequence
  Description of Artificial Sequence: Synthetic oligonucleotide
gaguaccgcucuucaggag

SEQ ID NO: 2210011 - RNA, 19 nt, Artificial Sequence
  Description of Artificial Sequence: Synthetic oligonucleotide
augcggccagcucuuguag

SEQ ID NO: 2210012 - RNA, 19 nt, Artificial Sequence
  Description of Artificial Sequence: Synthetic oligonucleotide
uagacaucuugucguugau

SEQ ID NO: 2210013 - RNA, 19 nt, Artificial Sequence
  Description of Artificial Sequence: Synthetic oligonucleotide
guggaccucauagucagca

SEQ ID NO: 2210014 - RNA, 19 nt, Artificial Sequence
  Description of Artificial Sequence: Synthetic oligonucleotide
gaugcggccagcucuugua

SEQ ID NO: 2210015 - RNA, 19 nt, Artificial Sequence
  Description of Artificial Sequence: Synthetic oligonucleotide
aggcuugguaagcauggaa

SEQ ID NO: 2210016 - RNA, 19 nt, Artificial Sequence
  Description of Artificial Sequence: Synthetic oligonucleotide
gaggcaggaguucauugua

SEQ ID NO: 2210017 - RNA, 19 nt, Artificial Sequence
  Description of Artificial Sequence: Synthetic oligonucleotide
uggaagggguaaaccucga

SEQ ID NO: 2210018 - RNA, 19 nt, Artificial Sequence
  Description of Artificial Sequence: Synthetic oligonucleotide
ucacgccaauggaaauuga

SEQ ID NO: 2210019 - RNA, 19 nt, Artificial Sequence
  Description of Artificial Sequence: Synthetic oligonucleotide
gucagcauagacaucuugu

SEQ ID NO: 2210020 - RNA, 19 nt, Artificial Sequence
  Description of Artificial Sequence: Synthetic oligonucleotide
uuagggcgccuguuggggu

SEQ ID NO: 2210021 - RNA, 19 nt, Artificial Sequence
  Description of Artificial Sequence: Synthetic oligonucleotide
uuguaccaugccaccugga

SEQ ID NO: 2210022 - RNA, 19 nt, Artificial Sequence
  Description of Artificial Sequence: Synthetic oligonucleotide
uucgcaguucuggaaacuu

SEQ ID NO: 2210023 - RNA, 19 nt, Artificial Sequence
  Description of Artificial Sequence: Synthetic oligonucleotide
uagcaggugugcugaguac

SEQ ID NO: 2210024 - RNA, 19 nt, Artificial Sequence
  Description of Artificial Sequence: Synthetic oligonucleotide
uccugaggcuugguaagca

SEQ ID NO: 2210025 - RNA, 19 nt, Artificial Sequence
  Description of Artificial Sequence: Synthetic oligonucleotide
gcuagaaucuuagggcgcc

SEQ ID NO: 2210026 - RNA, 19 nt, Artificial Sequence
  Description of Artificial Sequence: Synthetic oligonucleotide
caacauuaccccucggaua

SEQ ID NO: 2210027 - RNA, 19 nt, Artificial Sequence
  Description of Artificial Sequence: Synthetic oligonucleotide
augcacacaccugcuaugu

SEQ ID NO: 2210028 - RNA, 19 nt, Artificial Sequence
  Description of Artificial Sequence: Synthetic oligonucleotide
cuucuccacaacacuucuc

SEQ ID NO: 2210029 - RNA, 19 nt, Artificial Sequence
  Description of Artificial Sequence: Synthetic oligonucleotide
ggucagcauagacaucuug

SEQ ID NO: 2210030 - RNA, 19 nt, Artificial Sequence
  Description of Artificial Sequence: Synthetic oligonucleotide
ggcaaaucuggcacuuccg

SEQ ID NO: 2210031 - RNA, 19 nt, Artificial Sequence
  Description of Artificial Sequence: Synthetic oligonucleotide
acauagcaggugugcugag

SEQ ID NO: 2210032 - RNA, 19 nt, Artificial Sequence
  Description of Artificial Sequence: Synthetic oligonucleotide
agcucuucaagaaggguuu

SEQ ID NO: 2210033 - RNA, 19 nt, Artificial Sequence
  Description of Artificial Sequence: Synthetic oligonucleotide
cacgccaauggaaauugaa

SEQ ID NO: 2210034 - RNA, 19 nt, Artificial Sequence
  Description of Artificial Sequence: Synthetic oligonucleotide
auaagccuaauaaggccaa

SEQ ID NO: 2210035 - RNA, 19 nt, Artificial Sequence
  Description of Artificial Sequence: Synthetic oligonucleotide
acguugggcagguggggug

SEQ ID NO: 2210036 - RNA, 19 nt, Artificial Sequence
  Description of Artificial Sequence: Synthetic oligonucleotide
cggaguaccgcucuucagg

SEQ ID NO: 2210037 - RNA, 19 nt, Artificial Sequence
  Description of Artificial Sequence: Synthetic oligonucleotide
auguagugcuaagguguuc

SEQ ID NO: 2210038 - RNA, 19 nt, Artificial Sequence
  Description of Artificial Sequence: Synthetic oligonucleotide
ggggaguacagguggugag

SEQ ID NO: 2210039 - RNA, 19 nt, Artificial Sequence
  Description of Artificial Sequence: Synthetic oligonucleotide
cccgauaaguccagucacg

SEQ ID NO: 2210040 - RNA, 19 nt, Artificial Sequence
  Description of Artificial Sequence: Synthetic oligonucleotide
acauuaccccucggauagc

SEQ ID NO: 2210041 - RNA, 19 nt, Artificial Sequence
  Description of Artificial Sequence: Synthetic oligonucleotide
guucugagggcugggauaa

SEQ ID NO: 2210042 - RNA, 19 nt, Artificial Sequence
  Description of Artificial Sequence: Synthetic oligonucleotide
gaaggguuugagggcuuug

SEQ ID NO: 2210043 - RNA, 19 nt, Artificial Sequence
  Description of Artificial Sequence: Synthetic oligonucleotide
cuggaauccugaggcuugg

SEQ ID NO: 2210044 - RNA, 19 nt, Artificial Sequence
  Description of Artificial Sequence: Synthetic oligonucleotide
ugguuggagaugguagcuc

SEQ ID NO: 2210045 - RNA, 19 nt, Artificial Sequence
  Description of Artificial Sequence: Synthetic oligonucleotide
ggaguaccgcucuucagga

SEQ ID NO: 2210046 - RNA, 19 nt, Artificial Sequence
  Description of Artificial Sequence: Synthetic oligonucleotide
cagcaccugccacaugggc

SEQ ID NO: 2210047 - RNA, 19 nt, Artificial Sequence
  Description of Artificial Sequence: Synthetic oligonucleotide
uagguccugggaagggcaa

SEQ ID NO: 2210048 - RNA, 19 nt, Artificial Sequence
  Description of Artificial Sequence: Synthetic oligonucleotide
uggugagacacuggggcua

SEQ ID NO: 2210049 - RNA, 19 nt, Artificial Sequence
  Description of Artificial Sequence: Synthetic oligonucleotide
guaaaccucgaagccaaaa

SEQ ID NO: 2210050 - RNA, 19 nt, Artificial Sequence
  Description of Artificial Sequence: Synthetic oligonucleotide
aggagucacagcaucccga

SEQ ID NO: 2210051 - RNA, 19 nt, Artificial Sequence
  Description of Artificial Sequence: Synthetic oligonucleotide
ggauacgcacugauccacg

SEQ ID NO: 2210052 - RNA, 19 nt, Artificial Sequence
  Description of Artificial Sequence: Synthetic oligonucleotide
gagcgaugcggccagcucu

SEQ ID NO: 2210053 - RNA, 19 nt, Artificial Sequence
  Description of Artificial Sequence: Synthetic oligonucleotide
ggaacugggaugcucagau

SEQ ID NO: 2210054 - RNA, 19 nt, Artificial Sequence
  Description of Artificial Sequence: Synthetic oligonucleotide
auucgcaguucuggaaacu

SEQ ID NO: 2210055 - RNA, 19 nt, Artificial Sequence
  Description of Artificial Sequence: Synthetic oligonucleotide
gucucucagugguuggaga

SEQ ID NO: 2210056 - RNA, 19 nt, Artificial Sequence
  Description of Artificial Sequence: Synthetic oligonucleotide
agucacgccaauggaaauu

SEQ ID NO: 2210057 - RNA, 19 nt, Artificial Sequence
  Description of Artificial Sequence: Synthetic oligonucleotide
gaguacagguggugagaca

SEQ ID NO: 2210058 - RNA, 19 nt, Artificial Sequence
  Description of Artificial Sequence: Synthetic oligonucleotide
ggcacuuccguuccuggca

SEQ ID NO: 2210059 - RNA, 19 nt, Artificial Sequence
  Description of Artificial Sequence: Synthetic oligonucleotide
auaaguccagucacgccaa

SEQ ID NO: 2210060 - RNA, 19 nt, Artificial Sequence
  Description of Artificial Sequence: Synthetic oligonucleotide
ugaagccuucaagcagagc

SEQ ID NO: 2210061 - RNA, 19 nt, Artificial Sequence
  Description of Artificial Sequence: Synthetic oligonucleotide
accaugccaccuggaaggg

SEQ ID NO: 2210062 - RNA, 19 nt, Artificial Sequence
  Description of Artificial Sequence: Synthetic oligonucleotide
agcuucgugcucugcugga

SEQ ID NO: 2210063 - RNA, 19 nt, Artificial Sequence
  Description of Artificial Sequence: Synthetic oligonucleotide
ggaguacagguggugagac

SEQ ID NO: 2210064 - RNA, 19 nt, Artificial Sequence
  Description of Artificial Sequence: Synthetic oligonucleotide
aguggcaaaucuggcacuu

SEQ ID NO: 2210065 - RNA, 19 nt, Artificial Sequence
  Description of Artificial Sequence: Synthetic oligonucleotide
ccaugggucagcauagaca

SEQ ID NO: 2210066 - RNA, 19 nt, Artificial Sequence
  Description of Artificial Sequence: Synthetic oligonucleotide
guagguccugggaagggca

SEQ ID NO: 2210067 - RNA, 19 nt, Artificial Sequence
  Description of Artificial Sequence: Synthetic oligonucleotide
cccucggauagcaaaccag

SEQ ID NO: 2210068 - RNA, 19 nt, Artificial Sequence
  Description of Artificial Sequence: Synthetic oligonucleotide
uaagccuaauaaggccaaa

SEQ ID NO: 2210069 - RNA, 19 nt, Artificial Sequence
  Description of Artificial Sequence: Synthetic oligonucleotide
cauuaccccucggauagca

SEQ ID NO: 2210070 - RNA, 19 nt, Artificial Sequence
  Description of Artificial Sequence: Synthetic oligonucleotide
gcucagauguagugcuaag

SEQ ID NO: 2210071 - RNA, 19 nt, Artificial Sequence
  Description of Artificial Sequence: Synthetic oligonucleotide
guccagucacgccaaugga

SEQ ID NO: 2210072 - RNA, 19 nt, Artificial Sequence
  Description of Artificial Sequence: Synthetic oligonucleotide
ggauagcaaaccagccucc

SEQ ID NO: 2210073 - RNA, 19 nt, Artificial Sequence
  Description of Artificial Sequence: Synthetic oligonucleotide
ccgauaaguccagucacgc

SEQ ID NO: 2210074 - RNA, 19 nt, Artificial Sequence
  Description of Artificial Sequence: Synthetic oligonucleotide
gcacuuccguuccuggcag

SEQ ID NO: 2210075 - RNA, 19 nt, Artificial Sequence
  Description of Artificial Sequence: Synthetic oligonucleotide
cuucggaguaccgcucuuc

SEQ ID NO: 2210076 - RNA, 19 nt, Artificial Sequence
  Description of Artificial Sequence: Synthetic oligonucleotide
caagaaggguuugagggcu

SEQ ID NO: 2210077 - RNA, 19 nt, Artificial Sequence
  Description of Artificial Sequence: Synthetic oligonucleotide
gguagguccugggaagggc

SEQ ID NO: 2210078 - RNA, 19 nt, Artificial Sequence
  Description of Artificial Sequence: Synthetic oligonucleotide
gguaggauacgcacugauc

SEQ ID NO: 2210079 - RNA, 19 nt, Artificial Sequence
  Description of Artificial Sequence: Synthetic oligonucleotide
agguggaaagcuggaggca

SEQ ID NO: 2210080 - RNA, 19 nt, Artificial Sequence
  Description of Artificial Sequence: Synthetic oligonucleotide
ucuucggaguaccgcucuu

SEQ ID NO: 2210081 - RNA, 19 nt, Artificial Sequence
  Description of Artificial Sequence: Synthetic oligonucleotide
cuaagguguucugagggcu

SEQ ID NO: 2210082 - RNA, 19 nt, Artificial Sequence
  Description of Artificial Sequence: Synthetic oligonucleotide
ggagaugguagcucuucaa

SEQ ID NO: 2210083 - RNA, 19 nt, Artificial Sequence
  Description of Artificial Sequence: Synthetic oligonucleotide
agacaucuugucguugaua

SEQ ID NO: 2210084 - RNA, 19 nt, Artificial Sequence
  Description of Artificial Sequence: Synthetic oligonucleotide
uaaguccagucacgccaau

SEQ ID NO: 2210085 - RNA, 19 nt, Artificial Sequence
  Description of Artificial Sequence: Synthetic oligonucleotide
ggcuagaaucuuagggcgc

SEQ ID NO: 2210086 - RNA, 19 nt, Artificial Sequence
  Description of Artificial Sequence: Synthetic oligonucleotide
uguugggguggaccucaua

SEQ ID NO: 2210087 - RNA, 19 nt, Artificial Sequence
  Description of Artificial Sequence: Synthetic oligonucleotide
gggguaaaccucgaagcca

SEQ ID NO: 2210088 - RNA, 19 nt, Artificial Sequence
  Description of Artificial Sequence: Synthetic oligonucleotide
agguguucugagggcuggg

SEQ ID NO: 2210089 - RNA, 19 nt, Artificial Sequence
  Description of Artificial Sequence: Synthetic oligonucleotide
caaacauagcaggugugcu

SEQ ID NO: 2210090 - RNA, 19 nt, Artificial Sequence
  Description of Artificial Sequence: Synthetic oligonucleotide
caacacuucucaaguggua

SEQ ID NO: 2210091 - RNA, 19 nt, Artificial Sequence
  Description of Artificial Sequence: Synthetic oligonucleotide
ggggucucucagugguugg

SEQ ID NO: 2210092 - RNA, 19 nt, Artificial Sequence
  Description of Artificial Sequence: Synthetic oligonucleotide
cucuucaagaaggguuuga

SEQ ID NO: 2210093 - RNA, 19 nt, Artificial Sequence
  Description of Artificial Sequence: Synthetic oligonucleotide
gcaacauuaccccucggau

SEQ ID NO: 2210094 - RNA, 19 nt, Artificial Sequence
  Description of Artificial Sequence: Synthetic oligonucleotide
aucaaggggccuggggagu

SEQ ID NO: 2210095 - RNA, 19 nt, Artificial Sequence
  Description of Artificial Sequence: Synthetic oligonucleotide
ggguaaaccucgaagccaa

SEQ ID NO: 2210096 - RNA, 19 nt, Artificial Sequence
  Description of Artificial Sequence: Synthetic oligonucleotide
cacugauccacggggucuc

SEQ ID NO: 2210097 - RNA, 19 nt, Artificial Sequence
  Description of Artificial Sequence: Synthetic oligonucleotide
cuaagccagcuucgugcuc

SEQ ID NO: 2210098 - RNA, 19 nt, Artificial Sequence
  Description of Artificial Sequence: Synthetic oligonucleotide
ggaauccugaggcuuggua

SEQ ID NO: 2210099 - RNA, 19 nt, Artificial Sequence
  Description of Artificial Sequence: Synthetic oligonucleotide
guaccgcucuucaggaguc

SEQ ID NO: 2210100 - RNA, 19 nt, Artificial Sequence
  Description of Artificial Sequence: Synthetic oligonucleotide
ccacaacacuucucaagug

SEQ ID NO: 2210101 - RNA, 19 nt, Artificial Sequence
  Description of Artificial Sequence: Synthetic oligonucleotide
ccagucacgccaauggaaa

SEQ ID NO: 2210102 - RNA, 19 nt, Artificial Sequence
  Description of Artificial Sequence: Synthetic oligonucleotide
cacuuccguuccuggcagc

SEQ ID NO: 2210103 - RNA, 19 nt, Artificial Sequence
  Description of Artificial Sequence: Synthetic oligonucleotide
ggaggcaggaguucauugu

SEQ ID NO: 2210104 - RNA, 19 nt, Artificial Sequence
  Description of Artificial Sequence: Synthetic oligonucleotide
gauguagugcuaagguguu

SEQ ID NO: 2210105 - RNA, 19 nt, Artificial Sequence
  Description of Artificial Sequence: Synthetic oligonucleotide
ucaaggggccuggggagua

SEQ ID NO: 2210106 - RNA, 19 nt, Artificial Sequence
  Description of Artificial Sequence: Synthetic oligonucleotide
cagcaacauuaccccucgg

SEQ ID NO: 2210107 - RNA, 19 nt, Artificial Sequence
  Description of Artificial Sequence: Synthetic oligonucleotide
cacggggucucucaguggu

SEQ ID NO: 2210108 - RNA, 19 nt, Artificial Sequence
  Description of Artificial Sequence: Synthetic oligonucleotide
gaggcuugguaagcaugga

SEQ ID NO: 2210109 - RNA, 19 nt, Artificial Sequence
  Description of Artificial Sequence: Synthetic oligonucleotide
ggaugcacacaccugcuau

SEQ ID NO: 2210110 - RNA, 19 nt, Artificial Sequence
  Description of Artificial Sequence: Synthetic oligonucleotide
uggaauccugaggcuuggu

SEQ ID NO: 2210111 - RNA, 19 nt, Artificial Sequence
  Description of Artificial Sequence: Synthetic oligonucleotide
ccauucgcaguucuggaaa

SEQ ID NO: 2210112 - RNA, 19 nt, Artificial Sequence
  Description of Artificial Sequence: Synthetic oligonucleotide
caggugggguggaaaagua

SEQ ID NO: 2210113 - RNA, 19 nt, Artificial Sequence
  Description of Artificial Sequence: Synthetic oligonucleotide
agggcugggauaagccuaa

SEQ ID NO: 2210114 - RNA, 19 nt, Artificial Sequence
  Description of Artificial Sequence: Synthetic oligonucleotide
cccaugggucagcauagac

SEQ ID NO: 2210115 - RNA, 19 nt, Artificial Sequence
  Description of Artificial Sequence: Synthetic oligonucleotide
uaccgcucuucaggaguca

SEQ ID NO: 2210116 - RNA, 19 nt, Artificial Sequence
  Description of Artificial Sequence: Synthetic oligonucleotide
gugugcugaguaccaggaa

SEQ ID NO: 2210117 - RNA, 19 nt, Artificial Sequence
  Description of Artificial Sequence: Synthetic oligonucleotide
ccacaugggcugcagucug

SEQ ID NO: 2210118 - RNA, 19 nt, Artificial Sequence
  Description of Artificial Sequence: Synthetic oligonucleotide
gugcucugcuggaauccug

SEQ ID NO: 2210119 - RNA, 19 nt, Artificial Sequence
  Description of Artificial Sequence: Synthetic oligonucleotide
ccaauggaaauugaagccu

SEQ ID NO: 2210120 - RNA, 19 nt, Artificial Sequence
  Description of Artificial Sequence: Synthetic oligonucleotide
gaaucuuagggcgccuguu

SEQ ID NO: 2210121 - RNA, 19 nt, Artificial Sequence
  Description of Artificial Sequence: Synthetic oligonucleotide
gugguuggagaugguagcu

SEQ ID NO: 2210122 - RNA, 19 nt, Artificial Sequence
  Description of Artificial Sequence: Synthetic oligonucleotide
auuaccccucggauagcaa

SEQ ID NO: 2210123 - RNA, 19 nt, Artificial Sequence
  Description of Artificial Sequence: Synthetic oligonucleotide
gcuaagccagcuucgugcu

SEQ ID NO: 2210124 - RNA, 19 nt, Artificial Sequence
  Description of Artificial Sequence: Synthetic oligonucleotide
gggaagggcaagguggaaa

SEQ ID NO: 2210125 - RNA, 19 nt, Artificial Sequence
  Description of Artificial Sequence: Synthetic oligonucleotide
acgcacugauccacggggu

SEQ ID NO: 2210126 - RNA, 19 nt, Artificial Sequence
  Description of Artificial Sequence: Synthetic oligonucleotide
gcagcaccugccacauggg

SEQ ID NO: 2210127 - RNA, 19 nt, Artificial Sequence
  Description of Artificial Sequence: Synthetic oligonucleotide
gggguggaccucauaguca

SEQ ID NO: 2210128 - RNA, 19 nt, Artificial Sequence
  Description of Artificial Sequence: Synthetic oligonucleotide
gcuuucugaguggcaaauc

SEQ ID NO: 2210129 - RNA, 19 nt, Artificial Sequence
  Description of Artificial Sequence: Synthetic oligonucleotide
guggcaaaucuggcacuuc

SEQ ID NO: 2210130 - RNA, 19 nt, Artificial Sequence
  Description of Artificial Sequence: Synthetic oligonucleotide
gcauggaacugggaugcuc

SEQ ID NO: 2210131 - RNA, 19 nt, Artificial Sequence
  Description of Artificial Sequence: Synthetic oligonucleotide
gcucuucaagaaggguuug

SEQ ID NO: 2210132 - RNA, 19 nt, Artificial Sequence
  Description of Artificial Sequence: Synthetic oligonucleotide
gguguucugagggcuggga

SEQ ID NO: 2210133 - RNA, 19 nt, Artificial Sequence
  Description of Artificial Sequence: Synthetic oligonucleotide
gguaagcauggaacuggga

SEQ ID NO: 2210134 - RNA, 19 nt, Artificial Sequence
  Description of Artificial Sequence: Synthetic oligonucleotide
agcauggaacugggaugcu

SEQ ID NO: 2210135 - RNA, 19 nt, Artificial Sequence
  Description of Artificial Sequence: Synthetic oligonucleotide
cugauccacggggucucuc

SEQ ID NO: 2210136 - RNA, 19 nt, Artificial Sequence
  Description of Artificial Sequence: Synthetic oligonucleotide
agcgaugcggccagcucuu

SEQ ID NO: 2210137 - RNA, 19 nt, Artificial Sequence
  Description of Artificial Sequence: Synthetic oligonucleotide
cuucgugcucugcuggaau

SEQ ID NO: 2210138 - RNA, 19 nt, Artificial Sequence
  Description of Artificial Sequence: Synthetic oligonucleotide
caaggggccuggggaguac

SEQ ID NO: 2210139 - RNA, 19 nt, Artificial Sequence
  Description of Artificial Sequence: Synthetic oligonucleotide
gaaggccaggguagguccu

SEQ ID NO: 2210140 - RNA, 19 nt, Artificial Sequence
  Description of Artificial Sequence: Synthetic oligonucleotide
cauagcaggugugcugagu

SEQ ID NO: 2210141 - RNA, 19 nt, Artificial Sequence
  Description of Artificial Sequence: Synthetic oligonucleotide
ccacggggucucucagugg

SEQ ID NO: 2210142 - RNA, 19 nt, Artificial Sequence
  Description of Artificial Sequence: Synthetic oligonucleotide
ccaccuggaagggguaaac

SEQ ID NO: 2210143 - RNA, 19 nt, Artificial Sequence
  Description of Artificial Sequence: Synthetic oligonucleotide
gcaggugggguggaaaagu

SEQ ID NO: 2210144 - RNA, 19 nt, Artificial Sequence
  Description of Artificial Sequence: Synthetic oligonucleotide
augcucagauguagugcua

SEQ ID NO: 2210145 - RNA, 19 nt, Artificial Sequence
  Description of Artificial Sequence: Synthetic oligonucleotide
guacagguggugagacacu

SEQ ID NO: 2210146 - RNA, 19 nt, Artificial Sequence
  Description of Artificial Sequence: Synthetic oligonucleotide
gggucucucagugguugga

SEQ ID NO: 2210147 - RNA, 19 nt, Artificial Sequence
  Description of Artificial Sequence: Synthetic oligonucleotide
cagucacgccaauggaaau

SEQ ID NO: 2210148 - RNA, 19 nt, Artificial Sequence
  Description of Artificial Sequence: Synthetic oligonucleotide
cuuccguuccuggcagcaa

SEQ ID NO: 2210149 - RNA, 19 nt, Artificial Sequence
  Description of Artificial Sequence: Synthetic oligonucleotide
cuagaaucuuagggcgccu

SEQ ID NO: 2210150 - RNA, 19 nt, Artificial Sequence
  Description of Artificial Sequence: Synthetic oligonucleotide
ccugccacaugggcugcag

SEQ ID NO: 2210151 - RNA, 19 nt, Artificial Sequence
  Description of Artificial Sequence: Synthetic oligonucleotide
ggcuuucugaguggcaaau

SEQ ID NO: 2210152 - RNA, 19 nt, Artificial Sequence
  Description of Artificial Sequence: Synthetic oligonucleotide
cgcacugauccacgggguc

SEQ ID NO: 2210153 - RNA, 19 nt, Artificial Sequence
  Description of Artificial Sequence: Synthetic oligonucleotide
cucagugguuggagauggu

SEQ ID NO: 2210154 - RNA, 19 nt, Artificial Sequence
  Description of Artificial Sequence: Synthetic oligonucleotide
ccccucggauagcaaacca

SEQ ID NO: 2210155 - RNA, 19 nt, Artificial Sequence
  Description of Artificial Sequence: Synthetic oligonucleotide
gguaaaccucgaagccaaa

SEQ ID NO: 2210156 - RNA, 19 nt, Artificial Sequence
  Description of Artificial Sequence: Synthetic oligonucleotide
gcuucgugcucugcuggaa

SEQ ID NO: 2210157 - RNA, 19 nt, Artificial Sequence
  Description of Artificial Sequence: Synthetic oligonucleotide
cagagcgaugcggccagcu

SEQ ID NO: 2210158 - RNA, 19 nt, Artificial Sequence
  Description of Artificial Sequence: Synthetic oligonucleotide
cugccacaugggcugcagu

SEQ ID NO: 2210159 - RNA, 19 nt, Artificial Sequence
  Description of Artificial Sequence: Synthetic oligonucleotide
acggggucucucagugguu

SEQ ID NO: 2210160 - RNA, 19 nt, Artificial Sequence
  Description of Artificial Sequence: Synthetic oligonucleotide
ggggcuaagccagcuucgu

SEQ ID NO: 2210161 - RNA, 19 nt, Artificial Sequence
  Description of Artificial Sequence: Synthetic oligonucleotide
ggccaaacguugggcaggu

SEQ ID NO: 2210162 - RNA, 19 nt, Artificial Sequence
  Description of Artificial Sequence: Synthetic oligonucleotide
gccuguugggguggaccuc

SEQ ID NO: 2210163 - RNA, 19 nt, Artificial Sequence
  Description of Artificial Sequence: Synthetic oligonucleotide
gccaaacguugggcaggug

SEQ ID NO: 2210164 - RNA, 19 nt, Artificial Sequence
  Description of Artificial Sequence: Synthetic oligonucleotide
gcagagcgaugcggccagc

SEQ ID NO: 2210165 - RNA, 19 nt, Artificial Sequence
  Description of Artificial Sequence: Synthetic oligonucleotide
gcgaugcggccagcucuug

SEQ ID NO: 2210166 - RNA, 19 nt, Artificial Sequence
  Description of Artificial Sequence: Synthetic oligonucleotide
ggcgccuguugggguggac

SEQ ID NO: 2210167 - RNA, 19 nt, Artificial Sequence
  Description of Artificial Sequence: Synthetic oligonucleotide
caccugcuaugugcugggu

SEQ ID NO: 2210168 - RNA, 19 nt, Artificial Sequence
  Description of Artificial Sequence: Synthetic oligonucleotide
gggucagcauagacaucuu

SEQ ID NO: 2210169 - RNA, 19 nt, Artificial Sequence
  Description of Artificial Sequence: Synthetic oligonucleotide
cguuccuggcagcaacauu

SEQ ID NO: 2210170 - RNA, 19 nt, Artificial Sequence
  Description of Artificial Sequence: Synthetic oligonucleotide
ccguuccuggcagcaacau

SEQ ID NO: 2210171 - RNA, 19 nt, Artificial Sequence
  Description of Artificial Sequence: Synthetic oligonucleotide
gggcgccuguuggggugga

SEQ ID NO: 2210172 - RNA, 19 nt, Artificial Sequence
  Description of Artificial Sequence: Synthetic oligonucleotide
gggcugggauaagccuaau

SEQ ID NO: 2210173 - RNA, 19 nt, Artificial Sequence
  Description of Artificial Sequence: Synthetic oligonucleotide
aauacaucauuuuagcacc

SEQ ID NO: 2210174 - RNA, 19 nt, Artificial Sequence
  Description of Artificial Sequence: Synthetic oligonucleotide
uggaauauuacuaugauua

SEQ ID NO: 2210175 - RNA, 19 nt, Artificial Sequence
  Description of Artificial Sequence: Synthetic oligonucleotide
uguaauuucaaauauaauu

SEQ ID NO: 2210176 - RNA, 19 nt, Artificial Sequence
  Description of Artificial Sequence: Synthetic oligonucleotide
uaugauuagauacagauuu

SEQ ID NO: 2210177 - RNA, 19 nt, Artificial Sequence
  Description of Artificial Sequence: Synthetic oligonucleotide
gaaucuaucagcuguaucc

SEQ ID NO: 2210178 - RNA, 19 nt, Artificial Sequence
  Description of Artificial Sequence: Synthetic oligonucleotide
aucuuuuaugguuucaucc

SEQ ID NO: 2210179 - RNA, 19 nt, Artificial Sequence
  Description of Artificial Sequence: Synthetic oligonucleotide
agcaccugaaaguagaugc

SEQ ID NO: 2210180 - RNA, 19 nt, Artificial Sequence
  Description of Artificial Sequence: Synthetic oligonucleotide
uauuacuaugauuagauac

SEQ ID NO: 2210181 - RNA, 19 nt, Artificial Sequence
  Description of Artificial Sequence: Synthetic oligonucleotide
ucucaaaccacauacacug

SEQ ID NO: 2210182 - RNA, 19 nt, Artificial Sequence
  Description of Artificial Sequence: Synthetic oligonucleotide
auuuauugccuuuaauccc

SEQ ID NO: 2210183 - RNA, 19 nt, Artificial Sequence
  Description of Artificial Sequence: Synthetic oligonucleotide
uaauuuauugccuuuaauc

SEQ ID NO: 2210184 - RNA, 19 nt, Artificial Sequence
  Description of Artificial Sequence: Synthetic oligonucleotide
uugaucaucaguuaucuca

SEQ ID NO: 2210185 - RNA, 19 nt, Artificial Sequence
  Description of Artificial Sequence: Synthetic oligonucleotide
ugagcuagaacuuugcuca

SEQ ID NO: 2210186 - RNA, 19 nt, Artificial Sequence
  Description of Artificial Sequence: Synthetic oligonucleotide
aaggcauccccauaucucc

SEQ ID NO: 2210187 - RNA, 19 nt, Artificial Sequence
  Description of Artificial Sequence: Synthetic oligonucleotide
ucuucuaaucucaagaggu

SEQ ID NO: 2210188 - RNA, 19 nt, Artificial Sequence
  Description of Artificial Sequence: Synthetic oligonucleotide
ucauuuagauuuuccaugg

SEQ ID NO: 2210189 - RNA, 19 nt, Artificial Sequence
  Description of Artificial Sequence: Synthetic oligonucleotide
gaauugaugaaucuaucag

SEQ ID NO: 2210190 - RNA, 19 nt, Artificial Sequence
  Description of Artificial Sequence: Synthetic oligonucleotide
aacauaagcacgaaggguc

SEQ ID NO: 2210191 - RNA, 19 nt, Artificial Sequence
  Description of Artificial Sequence: Synthetic oligonucleotide
ucaacauaagcacgaaggg

SEQ ID NO: 2210192 - RNA, 19 nt, Artificial Sequence
  Description of Artificial Sequence: Synthetic oligonucleotide
uugaauaaaagguaguguc

SEQ ID NO: 2210193 - RNA, 19 nt, Artificial Sequence
  Description of Artificial Sequence: Synthetic oligonucleotide
guuucauccaaccuagugg

SEQ ID NO: 2210194 - RNA, 19 nt, Artificial Sequence
  Description of Artificial Sequence: Synthetic oligonucleotide
aaagguagugucuucugag

SEQ ID NO: 2210195 - RNA, 19 nt, Artificial Sequence
  Description of Artificial Sequence: Synthetic oligonucleotide
uuuagauguaauuucaaau

SEQ ID NO: 2210196 - RNA, 19 nt, Artificial Sequence
  Description of Artificial Sequence: Synthetic oligonucleotide
ugaugaaucuaucagcugu

SEQ ID NO: 2210197 - RNA, 19 nt, Artificial Sequence
  Description of Artificial Sequence: Synthetic oligonucleotide
uaucauauuugcucgaagc

SEQ ID NO: 2210198 - RNA, 19 nt, Artificial Sequence
  Description of Artificial Sequence: Synthetic oligonucleotide
ugacuuauccagaaaauac

SEQ ID NO: 2210199 - RNA, 19 nt, Artificial Sequence
  Description of Artificial Sequence: Synthetic oligonucleotide
uuuauugccuuuaauccca

SEQ ID NO: 2210200 - RNA, 19 nt, Artificial Sequence
  Description of Artificial Sequence: Synthetic oligonucleotide
gucaacauaagcacgaagg

SEQ ID NO: 2210201 - RNA, 19 nt, Artificial Sequence
  Description of Artificial Sequence: Synthetic oligonucleotide
uuagauguaauuucaaaua

SEQ ID NO: 2210202 - RNA, 19 nt, Artificial Sequence
  Description of Artificial Sequence: Synthetic oligonucleotide
uccuauacuccucauacug

SEQ ID NO: 2210203 - RNA, 19 nt, Artificial Sequence
  Description of Artificial Sequence: Synthetic oligonucleotide
ucaauugcugaucuagcag

SEQ ID NO: 2210204 - RNA, 19 nt, Artificial Sequence
  Description of Artificial Sequence: Synthetic oligonucleotide
auuguguaugaggaaaucc

SEQ ID NO: 2210205 - RNA, 19 nt, Artificial Sequence
  Description of Artificial Sequence: Synthetic oligonucleotide
aaguagaugcugaagagag

SEQ ID NO: 2210206 - RNA, 19 nt, Artificial Sequence
  Description of Artificial Sequence: Synthetic oligonucleotide
ucuugacuuauccagaaaa

SEQ ID NO: 2210207 - RNA, 19 nt, Artificial Sequence
  Description of Artificial Sequence: Synthetic oligonucleotide
auuuggagcacauuuccuc

SEQ ID NO: 2210208 - RNA, 19 nt, Artificial Sequence
  Description of Artificial Sequence: Synthetic oligonucleotide
uguauggaagucaaauuga

SEQ ID NO: 2210209 - RNA, 19 nt, Artificial Sequence
  Description of Artificial Sequence: Synthetic oligonucleotide
gaauuuggagcacauuucc

SEQ ID NO: 2210210 - RNA, 19 nt, Artificial Sequence
  Description of Artificial Sequence: Synthetic oligonucleotide
gaaaguagaugcugaagag

SEQ ID NO: 2210211 - RNA, 19 nt, Artificial Sequence
  Description of Artificial Sequence: Synthetic oligonucleotide
aaauugaucaucaguuauc

SEQ ID NO: 2210212 - RNA, 19 nt, Artificial Sequence
  Description of Artificial Sequence: Synthetic oligonucleotide
uacacugcauuucauuuag

SEQ ID NO: 2210213 - RNA, 19 nt, Artificial Sequence
  Description of Artificial Sequence: Synthetic oligonucleotide
ugaauaaaagguagugucu

SEQ ID NO: 2210214 - RNA, 19 nt, Artificial Sequence
  Description of Artificial Sequence: Synthetic oligonucleotide
ucagaaaccuuuguaagag

SEQ ID NO: 2210215 - RNA, 19 nt, Artificial Sequence
  Description of Artificial Sequence: Synthetic oligonucleotide
aacuacaguucccaaagcu

SEQ ID NO: 2210216 - RNA, 19 nt, Artificial Sequence
  Description of Artificial Sequence: Synthetic oligonucleotide
ucccuugugaauuuggagc

SEQ ID NO: 2210217 - RNA, 19 nt, Artificial Sequence
  Description of Artificial Sequence: Synthetic oligonucleotide
auuucaauugcugaucuag

SEQ ID NO: 2210218 - RNA, 19 nt, Artificial Sequence
  Description of Artificial Sequence: Synthetic oligonucleotide
uaugguuucauccaaccua

SEQ ID NO: 2210219 - RNA, 19 nt, Artificial Sequence
  Description of Artificial Sequence: Synthetic oligonucleotide
uuuaugguuucauccaacc

SEQ ID NO: 2210220 - RNA, 19 nt, Artificial Sequence
  Description of Artificial Sequence: Synthetic oligonucleotide
ucucaagaggucaacauaa

SEQ ID NO: 2210221 - RNA, 19 nt, Artificial Sequence
  Description of Artificial Sequence: Synthetic oligonucleotide
aauugaucaucaguuaucu

SEQ ID NO: 2210222 - RNA, 19 nt, Artificial Sequence
  Description of Artificial Sequence: Synthetic oligonucleotide
uuguguaugaggaaauccu

SEQ ID NO: 2210223 - RNA, 19 nt, Artificial Sequence
  Description of Artificial Sequence: Synthetic oligonucleotide
augcauucugucucaaacc

SEQ ID NO: 2210224 - RNA, 19 nt, Artificial Sequence
  Description of Artificial Sequence: Synthetic oligonucleotide
uagauguaauuucaaauau

SEQ ID NO: 2210225 - RNA, 19 nt, Artificial Sequence
  Description of Artificial Sequence: Synthetic oligonucleotide
ugauuagauacagauuuag

SEQ ID NO: 2210226 - RNA, 19 nt, Artificial Sequence
  Description of Artificial Sequence: Synthetic oligonucleotide
ugcauucugucucaaacca

SEQ ID NO: 2210227 - RNA, 19 nt, Artificial Sequence
  Description of Artificial Sequence: Synthetic oligonucleotide
ucaagaggucaacauaagc

SEQ ID NO: 2210228 - RNA, 19 nt, Artificial Sequence
  Description of Artificial Sequence: Synthetic oligonucleotide
cuauacuccucauacuggg

SEQ ID NO: 2210229 - RNA, 19 nt, Artificial Sequence
  Description of Artificial Sequence: Synthetic oligonucleotide
ugagaguaucuucuaaucu

SEQ ID NO: 2210230 - RNA, 19 nt, Artificial Sequence
  Description of Artificial Sequence: Synthetic oligonucleotide
aucuucuaaucucaagagg

SEQ ID NO: 2210231 - RNA, 19 nt, Artificial Sequence
  Description of Artificial Sequence: Synthetic oligonucleotide
caauugcugaucuagcagc

SEQ ID NO: 2210232 - RNA, 19 nt, Artificial Sequence
  Description of Artificial Sequence: Synthetic oligonucleotide
ugucucaaaccacauacac

SEQ ID NO: 2210233 - RNA, 19 nt, Artificial Sequence
  Description of Artificial Sequence: Synthetic oligonucleotide
caugcaguauguauggaag

SEQ ID NO: 2210234 - RNA, 19 nt, Artificial Sequence
  Description of Artificial Sequence: Synthetic oligonucleotide
uguaagagucuucacauuu

SEQ ID NO: 2210235 - RNA, 19 nt, Artificial Sequence
  Description of Artificial Sequence: Synthetic oligonucleotide
aaaagguagugucuucuga

SEQ ID NO: 2210236 - RNA, 19 nt, Artificial Sequence
  Description of Artificial Sequence: Synthetic oligonucleotide
cuacaguucccaaagcugc

SEQ ID NO: 2210237 - RNA, 19 nt, Artificial Sequence
  Description of Artificial Sequence: Synthetic oligonucleotide
ugcacauuuggaauugaug

SEQ ID NO: 2210238 - RNA, 19 nt, Artificial Sequence
  Description of Artificial Sequence: Synthetic oligonucleotide
gauaugcuaaaaugcauuc

SEQ ID NO: 2210239 - RNA, 19 nt, Artificial Sequence
  Description of Artificial Sequence: Synthetic oligonucleotide
gagaguaucuucuaaucuc

SEQ ID NO: 2210240 - RNA, 19 nt, Artificial Sequence
  Description of Artificial Sequence: Synthetic oligonucleotide
ugaucuagcagccuugaau

SEQ ID NO: 2210241 - RNA, 19 nt, Artificial Sequence
  Description of Artificial Sequence: Synthetic oligonucleotide
ucaaaccacauacacugca

SEQ ID NO: 2210242 - RNA, 19 nt, Artificial Sequence
  Description of Artificial Sequence: Synthetic oligonucleotide
uauuuugcacauuuggaau

SEQ ID NO: 2210243 - RNA, 19 nt, Artificial Sequence
  Description of Artificial Sequence: Synthetic oligonucleotide
gaaaacagcaggcaggaaa

SEQ ID NO: 2210244 - RNA, 19 nt, Artificial Sequence
  Description of Artificial Sequence: Synthetic oligonucleotide
cauauuugcucgaagcaug

SEQ ID NO: 2210245 - RNA, 19 nt, Artificial Sequence
  Description of Artificial Sequence: Synthetic oligonucleotide
auuacuaugauuagauaca

SEQ ID NO: 2210246 - RNA, 19 nt, Artificial Sequence
  Description of Artificial Sequence: Synthetic oligonucleotide
ugauaugcuaaaaugcauu

SEQ ID NO: 2210247 - RNA, 19 nt, Artificial Sequence
  Description of Artificial Sequence: Synthetic oligonucleotide
uguauccaaagacugugcu

SEQ ID NO: 2210248 - RNA, 19 nt, Artificial Sequence
  Description of Artificial Sequence: Synthetic oligonucleotide
uuucaauugcugaucuagc

SEQ ID NO: 2210249 - RNA, 19 nt, Artificial Sequence
  Description of Artificial Sequence: Synthetic oligonucleotide
uauccaaagacugugcuuc

SEQ ID NO: 2210250 - RNA, 19 nt, Artificial Sequence
  Description of Artificial Sequence: Synthetic oligonucleotide
ugaauuuggagcacauuuc

SEQ ID NO: 2210251 - RNA, 19 nt, Artificial Sequence
  Description of Artificial Sequence: Synthetic oligonucleotide
uuacuaugauuagauacag

SEQ ID NO: 2210252 - RNA, 19 nt, Artificial Sequence
  Description of Artificial Sequence: Synthetic oligonucleotide
uuuuccauggcagauguuc

SEQ ID NO: 2210253 - RNA, 19 nt, Artificial Sequence
  Description of Artificial Sequence: Synthetic oligonucleotide
aaaguagaugcugaagaga

SEQ ID NO: 2210254 - RNA, 19 nt, Artificial Sequence
  Description of Artificial Sequence: Synthetic oligonucleotide
aaugucuggaauauuacua

SEQ ID NO: 2210255 - RNA, 19 nt, Artificial Sequence
  Description of Artificial Sequence: Synthetic oligonucleotide
uuagauuuuccauggcaga

SEQ ID NO: 2210256 - RNA, 19 nt, Artificial Sequence
  Description of Artificial Sequence: Synthetic oligonucleotide
augccuuucuacuucauga

SEQ ID NO: 2210257 - RNA, 19 nt, Artificial Sequence
  Description of Artificial Sequence: Synthetic oligonucleotide
uuuuagcaccugaaaguag

SEQ ID NO: 2210258 - RNA, 19 nt, Artificial Sequence
  Description of Artificial Sequence: Synthetic oligonucleotide
uaaaaugcauucugucuca

SEQ ID NO: 2210259 - RNA, 19 nt, Artificial Sequence
  Description of Artificial Sequence: Synthetic oligonucleotide
ggaacuacaguucccaaag

SEQ ID NO: 2210260 - RNA, 19 nt, Artificial Sequence
  Description of Artificial Sequence: Synthetic oligonucleotide
aaguggaagcagguuaugg

SEQ ID NO: 2210261 - RNA, 19 nt, Artificial Sequence
  Description of Artificial Sequence: Synthetic oligonucleotide
ugcaaaucuuuguugacaa

SEQ ID NO: 2210262 - RNA, 19 nt, Artificial Sequence
  Description of Artificial Sequence: Synthetic oligonucleotide
uuuccauggcagauguucc

SEQ ID NO: 2210263 - RNA, 19 nt, Artificial Sequence
  Description of Artificial Sequence: Synthetic oligonucleotide
ucucccaaggcgcugauau

SEQ ID NO: 2210264 - RNA, 19 nt, Artificial Sequence
  Description of Artificial Sequence: Synthetic oligonucleotide
uugagcuagaacuuugcuc

SEQ ID NO: 2210265 - RNA, 19 nt, Artificial Sequence
  Description of Artificial Sequence: Synthetic oligonucleotide
aagcagauguaaguggaag

SEQ ID NO: 2210266 - RNA, 19 nt, Artificial Sequence
  Description of Artificial Sequence: Synthetic oligonucleotide
gaucuagcagccuugaaua

SEQ ID NO: 2210267 - RNA, 19 nt, Artificial Sequence
  Description of Artificial Sequence: Synthetic oligonucleotide
agaugcugaagagagguag

SEQ ID NO: 2210268 - RNA, 19 nt, Artificial Sequence
  Description of Artificial Sequence: Synthetic oligonucleotide
uguguaugaggaaauccuc

SEQ ID NO: 2210269 - RNA, 19 nt, Artificial Sequence
  Description of Artificial Sequence: Synthetic oligonucleotide
auccccauaucucccaagg

SEQ ID NO: 2210270 - RNA, 19 nt, Artificial Sequence
  Description of Artificial Sequence: Synthetic oligonucleotide
uaaagcguugcaaaucuuu

SEQ ID NO: 2210271 - RNA, 19 nt, Artificial Sequence
  Description of Artificial Sequence: Synthetic oligonucleotide
auccucauuaaagcguugc

SEQ ID NO: 2210272 - RNA, 19 nt, Artificial Sequence
  Description of Artificial Sequence: Synthetic oligonucleotide
ucugagaguaucuucuaau

SEQ ID NO: 2210273 - RNA, 19 nt, Artificial Sequence
  Description of Artificial Sequence: Synthetic oligonucleotide
agauguaaguggaagcagg

SEQ ID NO: 2210274 - RNA, 19 nt, Artificial Sequence
  Description of Artificial Sequence: Synthetic oligonucleotide
uuucucaugcaguauguau

SEQ ID NO: 2210275 - RNA, 19 nt, Artificial Sequence
  Description of Artificial Sequence: Synthetic oligonucleotide
ucuaaucucaagaggucaa

SEQ ID NO: 2210276 - RNA, 19 nt, Artificial Sequence
  Description of Artificial Sequence: Synthetic oligonucleotide
aaagcguugcaaaucuuug

SEQ ID NO: 2210277 - RNA, 19 nt, Artificial Sequence
  Description of Artificial Sequence: Synthetic oligonucleotide
aagguagugucuucugaga

SEQ ID NO: 2210278 - RNA, 19 nt, Artificial Sequence
  Description of Artificial Sequence: Synthetic oligonucleotide
aaucuaucagcuguaucca

SEQ ID NO: 2210279 - RNA, 19 nt, Artificial Sequence
  Description of Artificial Sequence: Synthetic oligonucleotide
gcacauuuggaauugauga

SEQ ID NO: 2210280 - RNA, 19 nt, Artificial Sequence
  Description of Artificial Sequence: Synthetic oligonucleotide
auuugcucgaagcauguau

SEQ ID NO: 2210281 - RNA, 19 nt, Artificial Sequence
  Description of Artificial Sequence: Synthetic oligonucleotide
ugcuaaaaugcauucuguc

SEQ ID NO: 2210282 - RNA, 19 nt, Artificial Sequence
  Description of Artificial Sequence: Synthetic oligonucleotide
uuuuaucauauuugcucga

SEQ ID NO: 2210283 - RNA, 19 nt, Artificial Sequence
  Description of Artificial Sequence: Synthetic oligonucleotide
guagcauuguguaugagga

SEQ ID NO: 2210284 - RNA, 19 nt, Artificial Sequence
  Description of Artificial Sequence: Synthetic oligonucleotide
agguagugucuucugagag

SEQ ID NO: 2210285 - RNA, 19 nt, Artificial Sequence
  Description of Artificial Sequence: Synthetic oligonucleotide
ucuaucagcuguauccaaa

SEQ ID NO: 2210286 - RNA, 19 nt, Artificial Sequence
  Description of Artificial Sequence: Synthetic oligonucleotide
uucuaaucucaagagguca

SEQ ID NO: 2210287 - RNA, 19 nt, Artificial Sequence
  Description of Artificial Sequence: Synthetic oligonucleotide
auuuggaauugaugaaucu

SEQ ID NO: 2210288 - RNA, 19 nt, Artificial Sequence
  Description of Artificial Sequence: Synthetic oligonucleotide
gaauauuacuaugauuaga

SEQ ID NO: 2210289 - RNA, 19 nt, Artificial Sequence
  Description of Artificial Sequence: Synthetic oligonucleotide
ucaugcaguauguauggaa

SEQ ID NO: 2210290 - RNA, 19 nt, Artificial Sequence
  Description of Artificial Sequence: Synthetic oligonucleotide
uauggaagucaaauugauc

SEQ ID NO: 2210291 - RNA, 19 nt, Artificial Sequence
  Description of Artificial Sequence: Synthetic oligonucleotide
agugucuucugagaguauc

SEQ ID NO: 2210292 - RNA, 19 nt, Artificial Sequence
  Description of Artificial Sequence: Synthetic oligonucleotide
uacagauuuagauguaauu

SEQ ID NO: 2210293 - RNA, 19 nt, Artificial Sequence
  Description of Artificial Sequence: Synthetic oligonucleotide
ucaaggcauccccauaucu

SEQ ID NO: 2210294 - RNA, 19 nt, Artificial Sequence
  Description of Artificial Sequence: Synthetic oligonucleotide
ucuuucucaugcaguaugu

SEQ ID NO: 2210295 - RNA, 19 nt, Artificial Sequence
  Description of Artificial Sequence: Synthetic oligonucleotide
ugucuggaauauuacuaug

SEQ ID NO: 2210296 - RNA, 19 nt, Artificial Sequence
  Description of Artificial Sequence: Synthetic oligonucleotide
ucauuaaagcguugcaaau

SEQ ID NO: 2210297 - RNA, 19 nt, Artificial Sequence
  Description of Artificial Sequence: Synthetic oligonucleotide
aagcauguauuuugcacau

SEQ ID NO: 2210298 - RNA, 19 nt, Artificial Sequence
  Description of Artificial Sequence: Synthetic oligonucleotide
cugaagagagguagcauug

SEQ ID NO: 2210299 - RNA, 19 nt, Artificial Sequence
  Description of Artificial Sequence: Synthetic oligonucleotide
ucaaauugaucaucaguua

SEQ ID NO: 2210300 - RNA, 19 nt, Artificial Sequence
  Description of Artificial Sequence: Synthetic oligonucleotide
uuuggaauugaugaaucua

SEQ ID NO: 2210301 - RNA, 19 nt, Artificial Sequence
  Description of Artificial Sequence: Synthetic oligonucleotide
aagcguugcaaaucuuugu

SEQ ID NO: 2210302 - RNA, 19 nt, Artificial Sequence
  Description of Artificial Sequence: Synthetic oligonucleotide
gaagagagguagcauugug

SEQ ID NO: 2210303 - RNA, 19 nt, Artificial Sequence
  Description of Artificial Sequence: Synthetic oligonucleotide
auaaaagguagugucuucu

SEQ ID NO: 2210304 - RNA, 19 nt, Artificial Sequence
  Description of Artificial Sequence: Synthetic oligonucleotide
caaccuaguggcuauagca

SEQ ID NO: 2210305 - RNA, 19 nt, Artificial Sequence
  Description of Artificial Sequence: Synthetic oligonucleotide
agaacuuugcucacaaugu

SEQ ID NO: 2210306 - RNA, 19 nt, Artificial Sequence
  Description of Artificial Sequence: Synthetic oligonucleotide
cucgaagcauguauuuugc

SEQ ID NO: 2210307 - RNA, 19 nt, Artificial Sequence
  Description of Artificial Sequence: Synthetic oligonucleotide
agcaauugcuuucucuugu

SEQ ID NO: 2210308 - RNA, 19 nt, Artificial Sequence
  Description of Artificial Sequence: Synthetic oligonucleotide
aaacagcaggcaggaaagc

SEQ ID NO: 2210309 - RNA, 19 nt, Artificial Sequence
  Description of Artificial Sequence: Synthetic oligonucleotide
cucuugucuugacuuaucc

SEQ ID NO: 2210310 - RNA, 19 nt, Artificial Sequence
  Description of Artificial Sequence: Synthetic oligonucleotide
uugucuugacuuauccaga

SEQ ID NO: 2210311 - RNA, 19 nt, Artificial Sequence
  Description of Artificial Sequence: Synthetic oligonucleotide
uuugcucgaagcauguauu

SEQ ID NO: 2210312 - RNA, 19 nt, Artificial Sequence
  Description of Artificial Sequence: Synthetic oligonucleotide
aacuuugcucacaaugucu

SEQ ID NO: 2210313 - RNA, 19 nt, Artificial Sequence
  Description of Artificial Sequence: Synthetic oligonucleotide
agagagguagcauugugua

SEQ ID NO: 2210314 - RNA, 19 nt, Artificial Sequence
  Description of Artificial Sequence: Synthetic oligonucleotide
auggcagauguuccuuccc

SEQ ID NO: 2210315 - RNA, 19 nt, Artificial Sequence
  Description of Artificial Sequence: Synthetic oligonucleotide
uugcaaaucuuuguugaca

SEQ ID NO: 2210316 - RNA, 19 nt, Artificial Sequence
  Description of Artificial Sequence: Synthetic oligonucleotide
auugaucaucaguuaucuc

SEQ ID NO: 2210317 - RNA, 19 nt, Artificial Sequence
  Description of Artificial Sequence: Synthetic oligonucleotide
auuuugcacauuuggaauu

SEQ ID NO: 2210318 - RNA, 19 nt, Artificial Sequence
  Description of Artificial Sequence: Synthetic oligonucleotide
aagagagguagcauugugu

SEQ ID NO: 2210319 - RNA, 19 nt, Artificial Sequence
  Description of Artificial Sequence: Synthetic oligonucleotide
acaucauuuuagcaccuga

SEQ ID NO: 2210320 - RNA, 19 nt, Artificial Sequence
  Description of Artificial Sequence: Synthetic oligonucleotide
ggaauauuacuaugauuag

SEQ ID NO: 2210321 - RNA, 19 nt, Artificial Sequence
  Description of Artificial Sequence: Synthetic oligonucleotide
ucccaaagcugccauccag

SEQ ID NO: 2210322 - RNA, 19 nt, Artificial Sequence
  Description of Artificial Sequence: Synthetic oligonucleotide
ucccaaggcgcugauaugc

SEQ ID NO: 2210323 - RNA, 19 nt, Artificial Sequence
  Description of Artificial Sequence: Synthetic oligonucleotide
ugacaaauauuuucuucau

SEQ ID NO: 2210324 - RNA, 19 nt, Artificial Sequence
  Description of Artificial Sequence: Synthetic oligonucleotide
uccucauuaaagcguugca

SEQ ID NO: 2210325 - RNA, 19 nt, Artificial Sequence
  Description of Artificial Sequence: Synthetic oligonucleotide
acuacaguucccaaagcug

SEQ ID NO: 2210326 - RNA, 19 nt, Artificial Sequence
  Description of Artificial Sequence: Synthetic oligonucleotide
uacuaugauuagauacaga

SEQ ID NO: 2210327 - RNA, 19 nt, Artificial Sequence
  Description of Artificial Sequence: Synthetic oligonucleotide
gauuagauacagauuuaga

SEQ ID NO: 2210328 - RNA, 19 nt, Artificial Sequence
  Description of Artificial Sequence: Synthetic oligonucleotide
uaaucucaagaggucaaca

SEQ ID NO: 2210329 - RNA, 19 nt, Artificial Sequence
  Description of Artificial Sequence: Synthetic oligonucleotide
cauuuuagcaccugaaagu

SEQ ID NO: 2210330 - RNA, 19 nt, Artificial Sequence
  Description of Artificial Sequence: Synthetic oligonucleotide
ugucuugacuuauccagaa

SEQ ID NO: 2210331 - RNA, 19 nt, Artificial Sequence
  Description of Artificial Sequence: Synthetic oligonucleotide
cauuaaagcguugcaaauc

SEQ ID NO: 2210332 - RNA, 19 nt, Artificial Sequence
  Description of Artificial Sequence: Synthetic oligonucleotide
cuucuaaucucaagagguc

SEQ ID NO: 2210333 - RNA, 19 nt, Artificial Sequence
  Description of Artificial Sequence: Synthetic oligonucleotide
aaauccucauuaaagcguu

SEQ ID NO: 2210334 - RNA, 19 nt, Artificial Sequence
  Description of Artificial Sequence: Synthetic oligonucleotide
auccagaaaauacaucauu

SEQ ID NO: 2210335 - RNA, 19 nt, Artificial Sequence
  Description of Artificial Sequence: Synthetic oligonucleotide
uaucagcuguauccaaaga

SEQ ID NO: 2210336 - RNA, 19 nt, Artificial Sequence
  Description of Artificial Sequence: Synthetic oligonucleotide
agccuugaauaaaagguag

SEQ ID NO: 2210337 - RNA, 19 nt, Artificial Sequence
  Description of Artificial Sequence: Synthetic oligonucleotide
uuauugccuuuaaucccag

SEQ ID NO: 2210338 - RNA, 19 nt, Artificial Sequence
  Description of Artificial Sequence: Synthetic oligonucleotide
cagcuguauccaaagacug

SEQ ID NO: 2210339 - RNA, 19 nt, Artificial Sequence
  Description of Artificial Sequence: Synthetic oligonucleotide
acauuuggaauugaugaau

SEQ ID NO: 2210340 - RNA, 19 nt, Artificial Sequence
  Description of Artificial Sequence: Synthetic oligonucleotide
auuuuagcaccugaaagua

SEQ ID NO: 2210341 - RNA, 19 nt, Artificial Sequence
  Description of Artificial Sequence: Synthetic oligonucleotide
cauacugggaacuacaguu

SEQ ID NO: 2210342 - RNA, 19 nt, Artificial Sequence
  Description of Artificial Sequence: Synthetic oligonucleotide
caaggcauccccauaucuc

SEQ ID NO: 2210343 - RNA, 19 nt, Artificial Sequence
  Description of Artificial Sequence: Synthetic oligonucleotide
agaguaucuucuaaucuca

SEQ ID NO: 2210344 - RNA, 19 nt, Artificial Sequence
  Description of Artificial Sequence: Synthetic oligonucleotide
uguugacaaauauuuucuu

SEQ ID NO: 2210345 - RNA, 19 nt, Artificial Sequence
  Description of Artificial Sequence: Synthetic oligonucleotide
agcagguuauggcaggccu

SEQ ID NO: 2210346 - RNA, 19 nt, Artificial Sequence
  Description of Artificial Sequence: Synthetic oligonucleotide
gaaauccucauuaaagcgu

SEQ ID NO: 2210347 - RNA, 19 nt, Artificial Sequence
  Description of Artificial Sequence: Synthetic oligonucleotide
acauacacugcauuucauu

SEQ ID NO: 2210348 - RNA, 19 nt, Artificial Sequence
  Description of Artificial Sequence: Synthetic oligonucleotide
ugccuuucuacuucaugac

SEQ ID NO: 2210349 - RNA, 19 nt, Artificial Sequence
  Description of Artificial Sequence: Synthetic oligonucleotide
cuguauccaaagacugugc

SEQ ID NO: 2210350 - RNA, 19 nt, Artificial Sequence
  Description of Artificial Sequence: Synthetic oligonucleotide
cauggcagauguuccuucc

SEQ ID NO: 2210351 - RNA, 19 nt, Artificial Sequence
  Description of Artificial Sequence: Synthetic oligonucleotide
ggugaaucucuguuccugg

SEQ ID NO: 2210352 - RNA, 19 nt, Artificial Sequence
  Description of Artificial Sequence: Synthetic oligonucleotide
ugcaguauguauggaaguc

SEQ ID NO: 2210353 - RNA, 19 nt, Artificial Sequence
  Description of Artificial Sequence: Synthetic oligonucleotide
gaugcugaagagagguagc

SEQ ID NO: 2210354 - RNA, 19 nt, Artificial Sequence
  Description of Artificial Sequence: Synthetic oligonucleotide
cucaagaggucaacauaag

SEQ ID NO: 2210355 - RNA, 19 nt, Artificial Sequence
  Description of Artificial Sequence: Synthetic oligonucleotide
agcacgaagggucaucuuu

SEQ ID NO: 2210356 - RNA, 19 nt, Artificial Sequence
  Description of Artificial Sequence: Synthetic oligonucleotide
cauuuagauuuuccauggc

SEQ ID NO: 2210357 - RNA, 19 nt, Artificial Sequence
  Description of Artificial Sequence: Synthetic oligonucleotide
uaagcacgaagggucaucu

SEQ ID NO: 2210358 - RNA, 19 nt, Artificial Sequence
  Description of Artificial Sequence: Synthetic oligonucleotide
gaacuacaguucccaaagc

SEQ ID NO: 2210359 - RNA, 19 nt, Artificial Sequence
  Description of Artificial Sequence: Synthetic oligonucleotide
auaugcuaaaaugcauucu

SEQ ID NO: 2210360 - RNA, 19 nt, Artificial Sequence
  Description of Artificial Sequence: Synthetic oligonucleotide
agcguugcaaaucuuuguu

SEQ ID NO: 2210361 - RNA, 19 nt, Artificial Sequence
  Description of Artificial Sequence: Synthetic oligonucleotide
aucucaagaggucaacaua

SEQ ID NO: 2210362 - RNA, 19 nt, Artificial Sequence
  Description of Artificial Sequence: Synthetic oligonucleotide
augcaguauguauggaagu

SEQ ID NO: 2210363 - RNA, 19 nt, Artificial Sequence
  Description of Artificial Sequence: Synthetic oligonucleotide
auauuacuaugauuagaua

SEQ ID NO: 2210364 - RNA, 19 nt, Artificial Sequence
  Description of Artificial Sequence: Synthetic oligonucleotide
gugaauuuggagcacauuu

SEQ ID NO: 2210365 - RNA, 19 nt, Artificial Sequence
  Description of Artificial Sequence: Synthetic oligonucleotide
gaggucaacauaagcacga

SEQ ID NO: 2210366 - RNA, 19 nt, Artificial Sequence
  Description of Artificial Sequence: Synthetic oligonucleotide
auacugggaacuacaguuc

SEQ ID NO: 2210367 - RNA, 19 nt, Artificial Sequence
  Description of Artificial Sequence: Synthetic oligonucleotide
auaagcacgaagggucauc

SEQ ID NO: 2210368 - RNA, 19 nt, Artificial Sequence
  Description of Artificial Sequence: Synthetic oligonucleotide
gucaaauugaucaucaguu

SEQ ID NO: 2210369 - RNA, 19 nt, Artificial Sequence
  Description of Artificial Sequence: Synthetic oligonucleotide
uggcagauguuccuucccu

SEQ ID NO: 2210370 - RNA, 19 nt, Artificial Sequence
  Description of Artificial Sequence: Synthetic oligonucleotide
ccagcagugccucagaaac

SEQ ID NO: 2210371 - RNA, 19 nt, Artificial Sequence
  Description of Artificial Sequence: Synthetic oligonucleotide
agauuuuccauggcagaug

SEQ ID NO: 2210372 - RNA, 19 nt, Artificial Sequence
  Description of Artificial Sequence: Synthetic oligonucleotide
aguucccaaagcugccauc

SEQ ID NO: 2210373 - RNA, 19 nt, Artificial Sequence
  Description of Artificial Sequence: Synthetic oligonucleotide
aaccuaguggcuauagcaa

SEQ ID NO: 2210374 - RNA, 19 nt, Artificial Sequence
  Description of Artificial Sequence: Synthetic oligonucleotide
agcagugccucagaaaccu

SEQ ID NO: 2210375 - RNA, 19 nt, Artificial Sequence
  Description of Artificial Sequence: Synthetic oligonucleotide
cuaguggcuauagcaauug

SEQ ID NO: 2210376 - RNA, 19 nt, Artificial Sequence
  Description of Artificial Sequence: Synthetic oligonucleotide
ucuagcagccuugaauaaa

SEQ ID NO: 2210377 - RNA, 19 nt, Artificial Sequence
  Description of Artificial Sequence: Synthetic oligonucleotide
acugggaacuacaguuccc

SEQ ID NO: 2210378 - RNA, 19 nt, Artificial Sequence
  Description of Artificial Sequence: Synthetic oligonucleotide
cuagcagccuugaauaaaa

SEQ ID NO: 2210379 - RNA, 19 nt, Artificial Sequence
  Description of Artificial Sequence: Synthetic oligonucleotide
ucgaagcauguauuuugca

SEQ ID NO: 2210380 - RNA, 19 nt, Artificial Sequence
  Description of Artificial Sequence: Synthetic oligonucleotide
uccccauaucucccaaggc

SEQ ID NO: 2210381 - RNA, 19 nt, Artificial Sequence
  Description of Artificial Sequence: Synthetic oligonucleotide
uagcagccuugaauaaaag

SEQ ID NO: 2210382 - RNA, 19 nt, Artificial Sequence
  Description of Artificial Sequence: Synthetic oligonucleotide
ugccucagaaaccuuugua

SEQ ID NO: 2210383 - RNA, 19 nt, Artificial Sequence
  Description of Artificial Sequence: Synthetic oligonucleotide
uaguggcuauagcaauugc

SEQ ID NO: 2210384 - RNA, 19 nt, Artificial Sequence
  Description of Artificial Sequence: Synthetic oligonucleotide
uuggagcacauuuccucug

SEQ ID NO: 2210385 - RNA, 19 nt, Artificial Sequence
  Description of Artificial Sequence: Synthetic oligonucleotide
ccuauacuccucauacugg

SEQ ID NO: 2210386 - RNA, 19 nt, Artificial Sequence
  Description of Artificial Sequence: Synthetic oligonucleotide
guagaugcugaagagaggu

SEQ ID NO: 2210387 - RNA, 19 nt, Artificial Sequence
  Description of Artificial Sequence: Synthetic oligonucleotide
augaggaaauccucauuaa

SEQ ID NO: 2210388 - RNA, 19 nt, Artificial Sequence
  Description of Artificial Sequence: Synthetic oligonucleotide
cgcugauaugcuaaaaugc

SEQ ID NO: 2210389 - RNA, 19 nt, Artificial Sequence
  Description of Artificial Sequence: Synthetic oligonucleotide
ccccauaucucccaaggcg

SEQ ID NO: 2210390 - RNA, 19 nt, Artificial Sequence
  Description of Artificial Sequence: Synthetic oligonucleotide
uuccuauacuccucauacu

SEQ ID NO: 2210391 - RNA, 19 nt, Artificial Sequence
  Description of Artificial Sequence: Synthetic oligonucleotide
uugcacauuuggaauugau

SEQ ID NO: 2210392 - RNA, 19 nt, Artificial Sequence
  Description of Artificial Sequence: Synthetic oligonucleotide
aguagaugcugaagagagg

SEQ ID NO: 2210393 - RNA, 19 nt, Artificial Sequence
  Description of Artificial Sequence: Synthetic oligonucleotide
acgaagggucaucuuucuc

SEQ ID NO: 2210394 - RNA, 19 nt, Artificial Sequence
  Description of Artificial Sequence: Synthetic oligonucleotide
ggaagcagguuauggcagg

SEQ ID NO: 2210395 - RNA, 19 nt, Artificial Sequence
  Description of Artificial Sequence: Synthetic oligonucleotide
uccaaccuaguggcuauag

SEQ ID NO: 2210396 - RNA, 19 nt, Artificial Sequence
  Description of Artificial Sequence: Synthetic oligonucleotide
uugcugaucuagcagccuu

SEQ ID NO: 2210397 - RNA, 19 nt, Artificial Sequence
  Description of Artificial Sequence: Synthetic oligonucleotide
uuauggcaggccuuccuau

SEQ ID NO: 2210398 - RNA, 19 nt, Artificial Sequence
  Description of Artificial Sequence: Synthetic oligonucleotide
gcgcugauaugcuaaaaug

SEQ ID NO: 2210399 - RNA, 19 nt, Artificial Sequence
  Description of Artificial Sequence: Synthetic oligonucleotide
cagauguaaguggaagcag

SEQ ID NO: 2210400 - RNA, 19 nt, Artificial Sequence
  Description of Artificial Sequence: Synthetic oligonucleotide
ucauccaaccuaguggcua

SEQ ID NO: 2210401 - RNA, 19 nt, Artificial Sequence
  Description of Artificial Sequence: Synthetic oligonucleotide
uuccauggcagauguuccu

SEQ ID NO: 2210402 - RNA, 19 nt, Artificial Sequence
  Description of Artificial Sequence: Synthetic oligonucleotide
caucauuuuagcaccugaa

SEQ ID NO: 2210403 - RNA, 19 nt, Artificial Sequence
  Description of Artificial Sequence: Synthetic oligonucleotide
uacaucauuuuagcaccug

SEQ ID NO: 2210404 - RNA, 19 nt, Artificial Sequence
  Description of Artificial Sequence: Synthetic oligonucleotide
gcugauaugcuaaaaugca

SEQ ID NO: 2210405 - RNA, 19 nt, Artificial Sequence
  Description of Artificial Sequence: Synthetic oligonucleotide
cccauaucucccaaggcgc

SEQ ID NO: 2210406 - RNA, 19 nt, Artificial Sequence
  Description of Artificial Sequence: Synthetic oligonucleotide
cuaaucucaagaggucaac

SEQ ID NO: 2210407 - RNA, 19 nt, Artificial Sequence
  Description of Artificial Sequence: Synthetic oligonucleotide
gcuguauccaaagacugug

SEQ ID NO: 2210408 - RNA, 19 nt, Artificial Sequence
  Description of Artificial Sequence: Synthetic oligonucleotide
ggcuauagcaauugcuuuc

SEQ ID NO: 2210409 - RNA, 19 nt, Artificial Sequence
  Description of Artificial Sequence: Synthetic oligonucleotide
accuaguggcuauagcaau

SEQ ID NO: 2210410 - RNA, 19 nt, Artificial Sequence
  Description of Artificial Sequence: Synthetic oligonucleotide
uggcuauagcaauugcuuu

SEQ ID NO: 2210411 - RNA, 19 nt, Artificial Sequence
  Description of Artificial Sequence: Synthetic oligonucleotide
ugcucacaaugucuggaau

SEQ ID NO: 2210412 - RNA, 19 nt, Artificial Sequence
  Description of Artificial Sequence: Synthetic oligonucleotide
uucaaggcauccccauauc

SEQ ID NO: 2210413 - RNA, 19 nt, Artificial Sequence
  Description of Artificial Sequence: Synthetic oligonucleotide
uucugucucaaaccacaua

SEQ ID NO: 2210414 - RNA, 19 nt, Artificial Sequence
  Description of Artificial Sequence: Synthetic oligonucleotide
ccuugaauaaaagguagug

SEQ ID NO: 2210415 - RNA, 19 nt, Artificial Sequence
  Description of Artificial Sequence: Synthetic oligonucleotide
gaauaaaagguagugucuu

SEQ ID NO: 2210416 - RNA, 19 nt, Artificial Sequence
  Description of Artificial Sequence: Synthetic oligonucleotide
uuaaagcguugcaaaucuu

SEQ ID NO: 2210417 - RNA, 19 nt, Artificial Sequence
  Description of Artificial Sequence: Synthetic oligonucleotide
gcuaaaaugcauucugucu

SEQ ID NO: 2210418 - RNA, 19 nt, Artificial Sequence
  Description of Artificial Sequence: Synthetic oligonucleotide
uuucuugagcuagaacuuu

SEQ ID NO: 2210419 - RNA, 19 nt, Artificial Sequence
  Description of Artificial Sequence: Synthetic oligonucleotide
aaggcgcugauaugcuaaa

SEQ ID NO: 2210420 - RNA, 19 nt, Artificial Sequence
  Description of Artificial Sequence: Synthetic oligonucleotide
cuugaauaaaagguagugu

SEQ ID NO: 2210421 - RNA, 19 nt, Artificial Sequence
  Description of Artificial Sequence: Synthetic oligonucleotide
auauuugcucgaagcaugu

SEQ ID NO: 2210422 - RNA, 19 nt, Artificial Sequence
  Description of Artificial Sequence: Synthetic oligonucleotide
uuugcacauuuggaauuga

SEQ ID NO: 2210423 - RNA, 19 nt, Artificial Sequence
  Description of Artificial Sequence: Synthetic oligonucleotide
uaaguggaagcagguuaug

SEQ ID NO: 2210424 - RNA, 19 nt, Artificial Sequence
  Description of Artificial Sequence: Synthetic oligonucleotide
cauuguguaugaggaaauc

SEQ ID NO: 2210425 - RNA, 19 nt, Artificial Sequence
  Description of Artificial Sequence: Synthetic oligonucleotide
augcuaaaaugcauucugu

SEQ ID NO: 2210426 - RNA, 19 nt, Artificial Sequence
  Description of Artificial Sequence: Synthetic oligonucleotide
cgaagcauguauuuugcac

SEQ ID NO: 2210427 - RNA, 19 nt, Artificial Sequence
  Description of Artificial Sequence: Synthetic oligonucleotide
uugcucgaagcauguauuu

SEQ ID NO: 2210428 - RNA, 19 nt, Artificial Sequence
  Description of Artificial Sequence: Synthetic oligonucleotide
uauggcaggccuuccuaua

SEQ ID NO: 2210429 - RNA, 19 nt, Artificial Sequence
  Description of Artificial Sequence: Synthetic oligonucleotide
accugaaaguagaugcuga

SEQ ID NO: 2210430 - RNA, 19 nt, Artificial Sequence
  Description of Artificial Sequence: Synthetic oligonucleotide
augcugaagagagguagca

SEQ ID NO: 2210431 - RNA, 19 nt, Artificial Sequence
  Description of Artificial Sequence: Synthetic oligonucleotide
cagccuugaauaaaaggua

SEQ ID NO: 2210432 - RNA, 19 nt, Artificial Sequence
  Description of Artificial Sequence: Synthetic oligonucleotide
agugccucagaaaccuuug

SEQ ID NO: 2210433 - RNA, 19 nt, Artificial Sequence
  Description of Artificial Sequence: Synthetic oligonucleotide
aauccucauuaaagcguug

SEQ ID NO: 2210434 - RNA, 19 nt, Artificial Sequence
  Description of Artificial Sequence: Synthetic oligonucleotide
gauguaaguggaagcaggu

SEQ ID NO: 2210435 - RNA, 19 nt, Artificial Sequence
  Description of Artificial Sequence: Synthetic oligonucleotide
cuugugaauuuggagcaca

SEQ ID NO: 2210436 - RNA, 19 nt, Artificial Sequence
  Description of Artificial Sequence: Synthetic oligonucleotide
cagcagugccucagaaacc

SEQ ID NO: 2210437 - RNA, 19 nt, Artificial Sequence
  Description of Artificial Sequence: Synthetic oligonucleotide
acauaagcacgaaggguca

SEQ ID NO: 2210438 - RNA, 19 nt, Artificial Sequence
  Description of Artificial Sequence: Synthetic oligonucleotide
uagaugcugaagagaggua

SEQ ID NO: 2210439 - RNA, 19 nt, Artificial Sequence
  Description of Artificial Sequence: Synthetic oligonucleotide
aucuagcagccuugaauaa

SEQ ID NO: 2210440 - RNA, 19 nt, Artificial Sequence
  Description of Artificial Sequence: Synthetic oligonucleotide
aggcauccccauaucuccc

SEQ ID NO: 2210441 - RNA, 19 nt, Artificial Sequence
  Description of Artificial Sequence: Synthetic oligonucleotide
gccucagaaaccuuuguaa

SEQ ID NO: 2210442 - RNA, 19 nt, Artificial Sequence
  Description of Artificial Sequence: Synthetic oligonucleotide
auaucucccaaggcgcuga

SEQ ID NO: 2210443 - RNA, 19 nt, Artificial Sequence
  Description of Artificial Sequence: Synthetic oligonucleotide
cuugacuuauccagaaaau

SEQ ID NO: 2210444 - RNA, 19 nt, Artificial Sequence
  Description of Artificial Sequence: Synthetic oligonucleotide
guuauggcaggccuuccua

SEQ ID NO: 2210445 - RNA, 19 nt, Artificial Sequence
  Description of Artificial Sequence: Synthetic oligonucleotide
cauccccauaucucccaag

SEQ ID NO: 2210446 - RNA, 19 nt, Artificial Sequence
  Description of Artificial Sequence: Synthetic oligonucleotide
ugugaauuuggagcacauu

SEQ ID NO: 2210447 - RNA, 19 nt, Artificial Sequence
  Description of Artificial Sequence: Synthetic oligonucleotide
gcguugcaaaucuuuguug

SEQ ID NO: 2210448 - RNA, 19 nt, Artificial Sequence
  Description of Artificial Sequence: Synthetic oligonucleotide
gagcuagaacuuugcucac

SEQ ID NO: 2210449 - RNA, 19 nt, Artificial Sequence
  Description of Artificial Sequence: Synthetic oligonucleotide
agcuguauccaaagacugu

SEQ ID NO: 2210450 - RNA, 19 nt, Artificial Sequence
  Description of Artificial Sequence: Synthetic oligonucleotide
ugggaacuacaguucccaa

SEQ ID NO: 2210451 - RNA, 19 nt, Artificial Sequence
  Description of Artificial Sequence: Synthetic oligonucleotide
cagguuauggcaggccuuc

SEQ ID NO: 2210452 - RNA, 19 nt, Artificial Sequence
  Description of Artificial Sequence: Synthetic oligonucleotide
auugcugaucuagcagccu

SEQ ID NO: 2210453 - RNA, 19 nt, Artificial Sequence
  Description of Artificial Sequence: Synthetic oligonucleotide
ugcugaagagagguagcau

SEQ ID NO: 2210454 - RNA, 19 nt, Artificial Sequence
  Description of Artificial Sequence: Synthetic oligonucleotide
cugauaugcuaaaaugcau

SEQ ID NO: 2210455 - RNA, 19 nt, Artificial Sequence
  Description of Artificial Sequence: Synthetic oligonucleotide
ugcucgaagcauguauuuu

SEQ ID NO: 2210456 - RNA, 19 nt, Artificial Sequence
  Description of Artificial Sequence: Synthetic oligonucleotide
cuaugauuagauacagauu

SEQ ID NO: 2210457 - RNA, 19 nt, Artificial Sequence
  Description of Artificial Sequence: Synthetic oligonucleotide
auacaucauuuuagcaccu

SEQ ID NO: 2210458 - RNA, 19 nt, Artificial Sequence
  Description of Artificial Sequence: Synthetic oligonucleotide
augaaucuaucagcuguau

SEQ ID NO: 2210459 - RNA, 19 nt, Artificial Sequence
  Description of Artificial Sequence: Synthetic oligonucleotide
augauuagauacagauuua

SEQ ID NO: 2210460 - RNA, 19 nt, Artificial Sequence
  Description of Artificial Sequence: Synthetic oligonucleotide
agcuagaacuuugcucaca

SEQ ID NO: 2210461 - RNA, 19 nt, Artificial Sequence
  Description of Artificial Sequence: Synthetic oligonucleotide
caacauaagcacgaagggu

SEQ ID NO: 2210462 - RNA, 19 nt, Artificial Sequence
  Description of Artificial Sequence: Synthetic oligonucleotide
aagcacgaagggucaucuu

SEQ ID NO: 2210463 - RNA, 19 nt, Artificial Sequence
  Description of Artificial Sequence: Synthetic oligonucleotide
cuugagcuagaacuuugcu

SEQ ID NO: 2210464 - RNA, 19 nt, Artificial Sequence
  Description of Artificial Sequence: Synthetic oligonucleotide
guaaguggaagcagguuau

SEQ ID NO: 2210465 - RNA, 19 nt, Artificial Sequence
  Description of Artificial Sequence: Synthetic oligonucleotide
ggcaggaaagcagauguaa

SEQ ID NO: 2210466 - RNA, 19 nt, Artificial Sequence
  Description of Artificial Sequence: Synthetic oligonucleotide
uauuugcucgaagcaugua

SEQ ID NO: 2210467 - RNA, 19 nt, Artificial Sequence
  Description of Artificial Sequence: Synthetic oligonucleotide
gcucacaaugucuggaaua

SEQ ID NO: 2210468 - RNA, 19 nt, Artificial Sequence
  Description of Artificial Sequence: Synthetic oligonucleotide
gucucaaaccacauacacu

SEQ ID NO: 2210469 - RNA, 19 nt, Artificial Sequence
  Description of Artificial Sequence: Synthetic oligonucleotide
cuggaauauuacuaugauu

SEQ ID NO: 2210470 - RNA, 19 nt, Artificial Sequence
  Description of Artificial Sequence: Synthetic oligonucleotide
gcaauugcuuucucuuguc

SEQ ID NO: 2210471 - RNA, 19 nt, Artificial Sequence
  Description of Artificial Sequence: Synthetic oligonucleotide
gucuugacuuauccagaaa

SEQ ID NO: 2210472 - RNA, 19 nt, Artificial Sequence
  Description of Artificial Sequence: Synthetic oligonucleotide
cucccaaggcgcugauaug

SEQ ID NO: 2210473 - RNA, 19 nt, Artificial Sequence
  Description of Artificial Sequence: Synthetic oligonucleotide
gccuuucuacuucaugaca

SEQ ID NO: 2210474 - RNA, 19 nt, Artificial Sequence
  Description of Artificial Sequence: Synthetic oligonucleotide
ccaaccuaguggcuauagc

SEQ ID NO: 2210475 - RNA, 19 nt, Artificial Sequence
  Description of Artificial Sequence: Synthetic oligonucleotide
guauccaaagacugugcuu

SEQ ID NO: 2210476 - RNA, 19 nt, Artificial Sequence
  Description of Artificial Sequence: Synthetic oligonucleotide
caaaccacauacacugcau

SEQ ID NO: 2210477 - RNA, 19 nt, Artificial Sequence
  Description of Artificial Sequence: Synthetic oligonucleotide
ccucauacugggaacuaca

SEQ ID NO: 2210478 - RNA, 19 nt, Artificial Sequence
  Description of Artificial Sequence: Synthetic oligonucleotide
ggcaggccuuccuauacuc

SEQ ID NO: 2210479 - RNA, 19 nt, Artificial Sequence
  Description of Artificial Sequence: Synthetic oligonucleotide
caauugcuuucucuugucu

SEQ ID NO: 2210480 - RNA, 19 nt, Artificial Sequence
  Description of Artificial Sequence: Synthetic oligonucleotide
ucacaaugucuggaauauu

SEQ ID NO: 2210481 - RNA, 19 nt, Artificial Sequence
  Description of Artificial Sequence: Synthetic oligonucleotide
agcugccauccagcagugc

SEQ ID NO: 2210482 - RNA, 19 nt, Artificial Sequence
  Description of Artificial Sequence: Synthetic oligonucleotide
aggucaacauaagcacgaa

SEQ ID NO: 2210483 - RNA, 19 nt, Artificial Sequence
  Description of Artificial Sequence: Synthetic oligonucleotide
ggcgcugauaugcuaaaau

SEQ ID NO: 2210484 - RNA, 19 nt, Artificial Sequence
  Description of Artificial Sequence: Synthetic oligonucleotide
gcuauagcaauugcuuucu

SEQ ID NO: 2210485 - RNA, 19 nt, Artificial Sequence
  Description of Artificial Sequence: Synthetic oligonucleotide
gcauucugucucaaaccac

SEQ ID NO: 2210486 - RNA, 19 nt, Artificial Sequence
  Description of Artificial Sequence: Synthetic oligonucleotide
cuuucucaugcaguaugua

SEQ ID NO: 2210487 - RNA, 19 nt, Artificial Sequence
  Description of Artificial Sequence: Synthetic oligonucleotide
cagauguuccuucccuugu

SEQ ID NO: 2210488 - RNA, 19 nt, Artificial Sequence
  Description of Artificial Sequence: Synthetic oligonucleotide
ggcauccccauaucuccca

SEQ ID NO: 2210489 - RNA, 19 nt, Artificial Sequence
  Description of Artificial Sequence: Synthetic oligonucleotide
ccucauuaaagcguugcaa

SEQ ID NO: 2210490 - RNA, 19 nt, Artificial Sequence
  Description of Artificial Sequence: Synthetic oligonucleotide
cauccaaccuaguggcuau

SEQ ID NO: 2210491 - RNA, 19 nt, Artificial Sequence
  Description of Artificial Sequence: Synthetic oligonucleotide
gcaggccuuccuauacucc

SEQ ID NO: 2210492 - RNA, 19 nt, Artificial Sequence
  Description of Artificial Sequence: Synthetic oligonucleotide
gguuauggcaggccuuccu

SEQ ID NO: 2210493 - RNA, 19 nt, Artificial Sequence
  Description of Artificial Sequence: Synthetic oligonucleotide
acacugcauuucauuuaga

SEQ ID NO: 2210494 - RNA, 19 nt, Artificial Sequence
  Description of Artificial Sequence: Synthetic oligonucleotide
cacgaagggucaucuuucu

SEQ ID NO: 2210495 - RNA, 19 nt, Artificial Sequence
  Description of Artificial Sequence: Synthetic oligonucleotide
cugaucuagcagccuugaa

SEQ ID NO: 2210496 - RNA, 19 nt, Artificial Sequence
  Description of Artificial Sequence: Synthetic oligonucleotide
gcugaucuagcagccuuga

SEQ ID NO: 2210497 - RNA, 19 nt, Artificial Sequence
  Description of Artificial Sequence: Synthetic oligonucleotide
cacauacacugcauuucau

SEQ ID NO: 2210498 - RNA, 19 nt, Artificial Sequence
  Description of Artificial Sequence: Synthetic oligonucleotide
cagugccucagaaaccuuu

SEQ ID NO: 2210499 - RNA, 19 nt, Artificial Sequence
  Description of Artificial Sequence: Synthetic oligonucleotide
cuagaacuuugcucacaau

SEQ ID NO: 2210500 - RNA, 19 nt, Artificial Sequence
  Description of Artificial Sequence: Synthetic oligonucleotide
aggcgcugauaugcuaaaa

SEQ ID NO: 2210501 - RNA, 19 nt, Artificial Sequence
  Description of Artificial Sequence: Synthetic oligonucleotide
auuuuccauggcagauguu

SEQ ID NO: 2210502 - RNA, 19 nt, Artificial Sequence
  Description of Artificial Sequence: Synthetic oligonucleotide
gccuugaauaaaagguagu

SEQ ID NO: 2210503 - RNA, 19 nt, Artificial Sequence
  Description of Artificial Sequence: Synthetic oligonucleotide
ggagcacauuuccucugcu

SEQ ID NO: 2210504 - RNA, 19 nt, Artificial Sequence
  Description of Artificial Sequence: Synthetic oligonucleotide
gcauuguguaugaggaaau

SEQ ID NO: 2210505 - RNA, 19 nt, Artificial Sequence
  Description of Artificial Sequence: Synthetic oligonucleotide
cuccucauacugggaacua

SEQ ID NO: 2210506 - RNA, 19 nt, Artificial Sequence
  Description of Artificial Sequence: Synthetic oligonucleotide
auccaaccuaguggcuaua

SEQ ID NO: 2210507 - RNA, 19 nt, Artificial Sequence
  Description of Artificial Sequence: Synthetic oligonucleotide
aucucccaaggcgcugaua

SEQ ID NO: 2210508 - RNA, 19 nt, Artificial Sequence
  Description of Artificial Sequence: Synthetic oligonucleotide
ggcagauguuccuucccuu

SEQ ID NO: 2210509 - RNA, 19 nt, Artificial Sequence
  Description of Artificial Sequence: Synthetic oligonucleotide
cauaagcacgaagggucau

SEQ ID NO: 2210510 - RNA, 19 nt, Artificial Sequence
  Description of Artificial Sequence: Synthetic oligonucleotide
ccauaucucccaaggcgcu

SEQ ID NO: 2210511 - RNA, 19 nt, Artificial Sequence
  Description of Artificial Sequence: Synthetic oligonucleotide
ccuaguggcuauagcaauu

SEQ ID NO: 2210512 - RNA, 19 nt, Artificial Sequence
  Description of Artificial Sequence: Synthetic oligonucleotide
ccaaggcgcugauaugcua

SEQ ID NO: 2210513 - RNA, 19 nt, Artificial Sequence
  Description of Artificial Sequence: Synthetic oligonucleotide
cccaaggcgcugauaugcu

SEQ ID NO: 2210514 - RNA, 19 nt, Artificial Sequence
  Description of Artificial Sequence: Synthetic oligonucleotide
gcagguuauggcaggccuu

SEQ ID NO: 2210515 - RNA, 19 nt, Artificial Sequence
  Description of Artificial Sequence: Synthetic oligonucleotide
aauuaaauuacacagcagc

SEQ ID NO: 2210516 - RNA, 19 nt, Artificial Sequence
  Description of Artificial Sequence: Synthetic oligonucleotide
auugaugaacuccacaucc

SEQ ID NO: 2210517 - RNA, 19 nt, Artificial Sequence
  Description of Artificial Sequence: Synthetic oligonucleotide
aaagagagagcauggaggg

SEQ ID NO: 2210518 - RNA, 19 nt, Artificial Sequence
  Description of Artificial Sequence: Synthetic oligonucleotide
uuugcuuaaacuuuauuau

SEQ ID NO: 2210519 - RNA, 19 nt, Artificial Sequence
  Description of Artificial Sequence: Synthetic oligonucleotide
aaagauccucuuuaucacg

SEQ ID NO: 2210520 - RNA, 19 nt, Artificial Sequence
  Description of Artificial Sequence: Synthetic oligonucleotide
aggagaaccacccacaaug

SEQ ID NO: 2210521 - RNA, 19 nt, Artificial Sequence
  Description of Artificial Sequence: Synthetic oligonucleotide
aaaauaguuccaaaccagg

SEQ ID NO: 2210522 - RNA, 19 nt, Artificial Sequence
  Description of Artificial Sequence: Synthetic oligonucleotide
auaguuccaaaccaggaag

SEQ ID NO: 2210523 - RNA, 19 nt, Artificial Sequence
  Description of Artificial Sequence: Synthetic oligonucleotide
gaaaagguggagaagcugg

SEQ ID NO: 2210524 - RNA, 19 nt, Artificial Sequence
  Description of Artificial Sequence: Synthetic oligonucleotide
uuuugacaggcguugacgg

SEQ ID NO: 2210525 - RNA, 19 nt, Artificial Sequence
  Description of Artificial Sequence: Synthetic oligonucleotide
gacauaacguaccaugucc

SEQ ID NO: 2210526 - RNA, 19 nt, Artificial Sequence
  Description of Artificial Sequence: Synthetic oligonucleotide
uuacacagcagcuuuacac

SEQ ID NO: 2210527 - RNA, 19 nt, Artificial Sequence
  Description of Artificial Sequence: Synthetic oligonucleotide
aagggucagggacauaacg

SEQ ID NO: 2210528 - RNA, 19 nt, Artificial Sequence
  Description of Artificial Sequence: Synthetic oligonucleotide
aauaguuccaaaccaggaa

SEQ ID NO: 2210529 - RNA, 19 nt, Artificial Sequence
  Description of Artificial Sequence: Synthetic oligonucleotide
aaugaggccacuggaauuc

SEQ ID NO: 2210530 - RNA, 19 nt, Artificial Sequence
  Description of Artificial Sequence: Synthetic oligonucleotide
aaacgcaugaagaacaugu

SEQ ID NO: 2210531 - RNA, 19 nt, Artificial Sequence
  Description of Artificial Sequence: Synthetic oligonucleotide
auccauugacuccuaagcc

SEQ ID NO: 2210532 - RNA, 19 nt, Artificial Sequence
  Description of Artificial Sequence: Synthetic oligonucleotide
aauuacacagcagcuuuac

SEQ ID NO: 2210533 - RNA, 19 nt, Artificial Sequence
  Description of Artificial Sequence: Synthetic oligonucleotide
caaaauaguuccaaaccag

SEQ ID NO: 2210534 - RNA, 19 nt, Artificial Sequence
  Description of Artificial Sequence: Synthetic oligonucleotide
uuccaaaccaggaagcggc

SEQ ID NO: 2210535 - RNA, 19 nt, Artificial Sequence
  Description of Artificial Sequence: Synthetic oligonucleotide
aagauccucuuuaucacgc

SEQ ID NO: 2210536 - RNA, 19 nt, Artificial Sequence
  Description of Artificial Sequence: Synthetic oligonucleotide
uauucguuugcuuaaacuu

SEQ ID NO: 2210537 - RNA, 19 nt, Artificial Sequence
  Description of Artificial Sequence: Synthetic oligonucleotide
uugacggcgagugugaggg

SEQ ID NO: 2210538 - RNA, 19 nt, Artificial Sequence
  Description of Artificial Sequence: Synthetic oligonucleotide
gaauucagguagaaggugg

SEQ ID NO: 2210539 - RNA, 19 nt, Artificial Sequence
  Description of Artificial Sequence: Synthetic oligonucleotide
aaacugugcaaaauaguuc

SEQ ID NO: 2210540 - RNA, 19 nt, Artificial Sequence
  Description of Artificial Sequence: Synthetic oligonucleotide
uguagaaacgcaugaagaa

SEQ ID NO: 2210541 - RNA, 19 nt, Artificial Sequence
  Description of Artificial Sequence: Synthetic oligonucleotide
uccauugacuccuaagccc

SEQ ID NO: 2210542 - RNA, 19 nt, Artificial Sequence
  Description of Artificial Sequence: Synthetic oligonucleotide
uuauucguuugcuuaaacu

SEQ ID NO: 2210543 - RNA, 19 nt, Artificial Sequence
  Description of Artificial Sequence: Synthetic oligonucleotide
gaauaggcaucaaaggucc

SEQ ID NO: 2210544 - RNA, 19 nt, Artificial Sequence
  Description of Artificial Sequence: Synthetic oligonucleotide
guggagugggaacagaggg

SEQ ID NO: 2210545 - RNA, 19 nt, Artificial Sequence
  Description of Artificial Sequence: Synthetic oligonucleotide
guuugcuuaaacuuuauua

SEQ ID NO: 2210546 - RNA, 19 nt, Artificial Sequence
  Description of Artificial Sequence: Synthetic oligonucleotide
ugcuuaaacuuuauuauuu

SEQ ID NO: 2210547 - RNA, 19 nt, Artificial Sequence
  Description of Artificial Sequence: Synthetic oligonucleotide
gaacacguguguaaguugg

SEQ ID NO: 2210548 - RNA, 19 nt, Artificial Sequence
  Description of Artificial Sequence: Synthetic oligonucleotide
uggugguagagccugagga

SEQ ID NO: 2210549 - RNA, 19 nt, Artificial Sequence
  Description of Artificial Sequence: Synthetic oligonucleotide
agggacauaacguaccaug

SEQ ID NO: 2210550 - RNA, 19 nt, Artificial Sequence
  Description of Artificial Sequence: Synthetic oligonucleotide
agcuuuacacagcaugagg

SEQ ID NO: 2210551 - RNA, 19 nt, Artificial Sequence
  Description of Artificial Sequence: Synthetic oligonucleotide
ucuuuaucacgccuguaga

SEQ ID NO: 2210552 - RNA, 19 nt, Artificial Sequence
  Description of Artificial Sequence: Synthetic oligonucleotide
aaacuuuauuauuuacaau

SEQ ID NO: 2210553 - RNA, 19 nt, Artificial Sequence
  Description of Artificial Sequence: Synthetic oligonucleotide
cucuuuaucacgccuguag

SEQ ID NO: 2210554 - RNA, 19 nt, Artificial Sequence
  Description of Artificial Sequence: Synthetic oligonucleotide
uaucacgccuguagaaacg

SEQ ID NO: 2210555 - RNA, 19 nt, Artificial Sequence
  Description of Artificial Sequence: Synthetic oligonucleotide
guaaguugggcucugguuc

SEQ ID NO: 2210556 - RNA, 19 nt, Artificial Sequence
  Description of Artificial Sequence: Synthetic oligonucleotide
gaugccuugacccaagucu

SEQ ID NO: 2210557 - RNA, 19 nt, Artificial Sequence
  Description of Artificial Sequence: Synthetic oligonucleotide
ucaaagguccgguaaagau

SEQ ID NO: 2210558 - RNA, 19 nt, Artificial Sequence
  Description of Artificial Sequence: Synthetic oligonucleotide
agagcauggagggaggugg

SEQ ID NO: 2210559 - RNA, 19 nt, Artificial Sequence
  Description of Artificial Sequence: Synthetic oligonucleotide
uaacguaccauguccggcc

SEQ ID NO: 2210560 - RNA, 19 nt, Artificial Sequence
  Description of Artificial Sequence: Synthetic oligonucleotide
auaacguaccauguccggc

SEQ ID NO: 2210561 - RNA, 19 nt, Artificial Sequence
  Description of Artificial Sequence: Synthetic oligonucleotide
acguguguaaguugggcuc

SEQ ID NO: 2210562 - RNA, 19 nt, Artificial Sequence
  Description of Artificial Sequence: Synthetic oligonucleotide
uugacaggcguugacggcg

SEQ ID NO: 2210563 - RNA, 19 nt, Artificial Sequence
  Description of Artificial Sequence: Synthetic oligonucleotide
uaguuccaaaccaggaagc

SEQ ID NO: 2210564 - RNA, 19 nt, Artificial Sequence
  Description of Artificial Sequence: Synthetic oligonucleotide
aaauaguuccaaaccagga

SEQ ID NO: 2210565 - RNA, 19 nt, Artificial Sequence
  Description of Artificial Sequence: Synthetic oligonucleotide
gaaugguagagcccgagga

SEQ ID NO: 2210566 - RNA, 19 nt, Artificial Sequence
  Description of Artificial Sequence: Synthetic oligonucleotide
gugauggcgacaaaugagg

SEQ ID NO: 2210567 - RNA, 19 nt, Artificial Sequence
  Description of Artificial Sequence: Synthetic oligonucleotide
auccagacagccauugugc

SEQ ID NO: 2210568 - RNA, 19 nt, Artificial Sequence
  Description of Artificial Sequence: Synthetic oligonucleotide
uuaucacgccuguagaaac

SEQ ID NO: 2210569 - RNA, 19 nt, Artificial Sequence
  Description of Artificial Sequence: Synthetic oligonucleotide
ugucagcuugucuagguga

SEQ ID NO: 2210570 - RNA, 19 nt, Artificial Sequence
  Description of Artificial Sequence: Synthetic oligonucleotide
aaugaguugacagccugga

SEQ ID NO: 2210571 - RNA, 19 nt, Artificial Sequence
  Description of Artificial Sequence: Synthetic oligonucleotide
uugacuccuaagcccaucc

SEQ ID NO: 2210572 - RNA, 19 nt, Artificial Sequence
  Description of Artificial Sequence: Synthetic oligonucleotide
acaaugaguugacagccug

SEQ ID NO: 2210573 - RNA, 19 nt, Artificial Sequence
  Description of Artificial Sequence: Synthetic oligonucleotide
ucagguagaagguggaaua

SEQ ID NO: 2210574 - RNA, 19 nt, Artificial Sequence
  Description of Artificial Sequence: Synthetic oligonucleotide
uguagaaucuccagccgaa

SEQ ID NO: 2210575 - RNA, 19 nt, Artificial Sequence
  Description of Artificial Sequence: Synthetic oligonucleotide
acauccauugacuccuaag

SEQ ID NO: 2210576 - RNA, 19 nt, Artificial Sequence
  Description of Artificial Sequence: Synthetic oligonucleotide
cuuuacacagcaugaggug

SEQ ID NO: 2210577 - RNA, 19 nt, Artificial Sequence
  Description of Artificial Sequence: Synthetic oligonucleotide
cuugguacgaaugcucagg

SEQ ID NO: 2210578 - RNA, 19 nt, Artificial Sequence
  Description of Artificial Sequence: Synthetic oligonucleotide
caaagguccgguaaagauc

SEQ ID NO: 2210579 - RNA, 19 nt, Artificial Sequence
  Description of Artificial Sequence: Synthetic oligonucleotide
agauccucuuuaucacgcc

SEQ ID NO: 2210580 - RNA, 19 nt, Artificial Sequence
  Description of Artificial Sequence: Synthetic oligonucleotide
gaaucuccagccgaaacug

SEQ ID NO: 2210581 - RNA, 19 nt, Artificial Sequence
  Description of Artificial Sequence: Synthetic oligonucleotide
cauaacguaccauguccgg

SEQ ID NO: 2210582 - RNA, 19 nt, Artificial Sequence
  Description of Artificial Sequence: Synthetic oligonucleotide
gacagccuggaccugaaac

SEQ ID NO: 2210583 - RNA, 19 nt, Artificial Sequence
  Description of Artificial Sequence: Synthetic oligonucleotide
ugugcaaaauaguuccaaa

SEQ ID NO: 2210584 - RNA, 19 nt, Artificial Sequence
  Description of Artificial Sequence: Synthetic oligonucleotide
uugaugaacuccacaucca

SEQ ID NO: 2210585 - RNA, 19 nt, Artificial Sequence
  Description of Artificial Sequence: Synthetic oligonucleotide
aaaugaggccacuggaauu

SEQ ID NO: 2210586 - RNA, 19 nt, Artificial Sequence
  Description of Artificial Sequence: Synthetic oligonucleotide
uuuaucacgccuguagaaa

SEQ ID NO: 2210587 - RNA, 19 nt, Artificial Sequence
  Description of Artificial Sequence: Synthetic oligonucleotide
gacaaaugaggccacugga

SEQ ID NO: 2210588 - RNA, 19 nt, Artificial Sequence
  Description of Artificial Sequence: Synthetic oligonucleotide
ucccagaggagaaccaccc

SEQ ID NO: 2210589 - RNA, 19 nt, Artificial Sequence
  Description of Artificial Sequence: Synthetic oligonucleotide
auggcgacaaaugaggcca

SEQ ID NO: 2210590 - RNA, 19 nt, Artificial Sequence
  Description of Artificial Sequence: Synthetic oligonucleotide
aaaccaggaagcggcaaag

SEQ ID NO: 2210591 - RNA, 19 nt, Artificial Sequence
  Description of Artificial Sequence: Synthetic oligonucleotide
cuguagaaacgcaugaaga

SEQ ID NO: 2210592 - RNA, 19 nt, Artificial Sequence
  Description of Artificial Sequence: Synthetic oligonucleotide
acauaacguaccauguccg

SEQ ID NO: 2210593 - RNA, 19 nt, Artificial Sequence
  Description of Artificial Sequence: Synthetic oligonucleotide
uugguacgaaugcucagga

SEQ ID NO: 2210594 - RNA, 19 nt, Artificial Sequence
  Description of Artificial Sequence: Synthetic oligonucleotide
gguacgaaugcucaggauc

SEQ ID NO: 2210595 - RNA, 19 nt, Artificial Sequence
  Description of Artificial Sequence: Synthetic oligonucleotide
caaugaguugacagccugg

SEQ ID NO: 2210596 - RNA, 19 nt, Artificial Sequence
  Description of Artificial Sequence: Synthetic oligonucleotide
uucguuugcuuaaacuuua

SEQ ID NO: 2210597 - RNA, 19 nt, Artificial Sequence
  Description of Artificial Sequence: Synthetic oligonucleotide
ucagggacauaacguacca

SEQ ID NO: 2210598 - RNA, 19 nt, Artificial Sequence
  Description of Artificial Sequence: Synthetic oligonucleotide
gcaaaauaguuccaaacca

SEQ ID NO: 2210599 - RNA, 19 nt, Artificial Sequence
  Description of Artificial Sequence: Synthetic oligonucleotide
auaggcaucaaagguccgg

SEQ ID NO: 2210600 - RNA, 19 nt, Artificial Sequence
  Description of Artificial Sequence: Synthetic oligonucleotide
aguuccaaaccaggaagcg

SEQ ID NO: 2210601 - RNA, 19 nt, Artificial Sequence
  Description of Artificial Sequence: Synthetic oligonucleotide
ucgacauucuuguccaccu

SEQ ID NO: 2210602 - RNA, 19 nt, Artificial Sequence
  Description of Artificial Sequence: Synthetic oligonucleotide
aucacgccuguagaaacgc

SEQ ID NO: 2210603 - RNA, 19 nt, Artificial Sequence
  Description of Artificial Sequence: Synthetic oligonucleotide
guagaaacgcaugaagaac

SEQ ID NO: 2210604 - RNA, 19 nt, Artificial Sequence
  Description of Artificial Sequence: Synthetic oligonucleotide
uguaaguugggcucugguu

SEQ ID NO: 2210605 - RNA, 19 nt, Artificial Sequence
  Description of Artificial Sequence: Synthetic oligonucleotide
ugggcaggccuacuagacg

SEQ ID NO: 2210606 - RNA, 19 nt, Artificial Sequence
  Description of Artificial Sequence: Synthetic oligonucleotide
uugcuuaaacuuuauuauu

SEQ ID NO: 2210607 - RNA, 19 nt, Artificial Sequence
  Description of Artificial Sequence: Synthetic oligonucleotide
gaacauguguaugggcagg

SEQ ID NO: 2210608 - RNA, 19 nt, Artificial Sequence
  Description of Artificial Sequence: Synthetic oligonucleotide
acacguguguaaguugggc

SEQ ID NO: 2210609 - RNA, 19 nt, Artificial Sequence
  Description of Artificial Sequence: Synthetic oligonucleotide
cuggggucgagccugguag

SEQ ID NO: 2210610 - RNA, 19 nt, Artificial Sequence
  Description of Artificial Sequence: Synthetic oligonucleotide
uugugcguagcaaagucuu

SEQ ID NO: 2210611 - RNA, 19 nt, Artificial Sequence
  Description of Artificial Sequence: Synthetic oligonucleotide
aaagguggagaagcuggag

SEQ ID NO: 2210612 - RNA, 19 nt, Artificial Sequence
  Description of Artificial Sequence: Synthetic oligonucleotide
uuugacaggcguugacggc

SEQ ID NO: 2210613 - RNA, 19 nt, Artificial Sequence
  Description of Artificial Sequence: Synthetic oligonucleotide
gugggaaagagagagcaug

SEQ ID NO: 2210614 - RNA, 19 nt, Artificial Sequence
  Description of Artificial Sequence: Synthetic oligonucleotide
gaacuccacauccauugac

SEQ ID NO: 2210615 - RNA, 19 nt, Artificial Sequence
  Description of Artificial Sequence: Synthetic oligonucleotide
cuugacccaagucuggguc

SEQ ID NO: 2210616 - RNA, 19 nt, Artificial Sequence
  Description of Artificial Sequence: Synthetic oligonucleotide
ugcguagcaaagucuucag

SEQ ID NO: 2210617 - RNA, 19 nt, Artificial Sequence
  Description of Artificial Sequence: Synthetic oligonucleotide
agcuugucuaggugauggc

SEQ ID NO: 2210618 - RNA, 19 nt, Artificial Sequence
  Description of Artificial Sequence: Synthetic oligonucleotide
aggccuacuagacgccagc

SEQ ID NO: 2210619 - RNA, 19 nt, Artificial Sequence
  Description of Artificial Sequence: Synthetic oligonucleotide
gagggugucagcuugucua

SEQ ID NO: 2210620 - RNA, 19 nt, Artificial Sequence
  Description of Artificial Sequence: Synthetic oligonucleotide
cauggagggagguggcugg

SEQ ID NO: 2210621 - RNA, 19 nt, Artificial Sequence
  Description of Artificial Sequence: Synthetic oligonucleotide
ugggucaggccuuggaaca

SEQ ID NO: 2210622 - RNA, 19 nt, Artificial Sequence
  Description of Artificial Sequence: Synthetic oligonucleotide
cuuauucguuugcuuaaac

SEQ ID NO: 2210623 - RNA, 19 nt, Artificial Sequence
  Description of Artificial Sequence: Synthetic oligonucleotide
agaaccacccacaaugagu

SEQ ID NO: 2210624 - RNA, 19 nt, Artificial Sequence
  Description of Artificial Sequence: Synthetic oligonucleotide
guuccaaaccaggaagcgg

SEQ ID NO: 2210625 - RNA, 19 nt, Artificial Sequence
  Description of Artificial Sequence: Synthetic oligonucleotide
ccuacuagacgccagcggg

SEQ ID NO: 2210626 - RNA, 19 nt, Artificial Sequence
  Description of Artificial Sequence: Synthetic oligonucleotide
ugaacuccacauccauuga

SEQ ID NO: 2210627 - RNA, 19 nt, Artificial Sequence
  Description of Artificial Sequence: Synthetic oligonucleotide
agguagaagguggaauagg

SEQ ID NO: 2210628 - RNA, 19 nt, Artificial Sequence
  Description of Artificial Sequence: Synthetic oligonucleotide
uccucuugugcguagcaaa

SEQ ID NO: 2210629 - RNA, 19 nt, Artificial Sequence
  Description of Artificial Sequence: Synthetic oligonucleotide
gguagaagguggaauaggc

SEQ ID NO: 2210630 - RNA, 19 nt, Artificial Sequence
  Description of Artificial Sequence: Synthetic oligonucleotide
uguaugggcaggccuacua

SEQ ID NO: 2210631 - RNA, 19 nt, Artificial Sequence
  Description of Artificial Sequence: Synthetic oligonucleotide
ugugcaacucaggucccgg

SEQ ID NO: 2210632 - RNA, 19 nt, Artificial Sequence
  Description of Artificial Sequence: Synthetic oligonucleotide
ucugguucugacagcccca

SEQ ID NO: 2210633 - RNA, 19 nt, Artificial Sequence
  Description of Artificial Sequence: Synthetic oligonucleotide
uccagacagccauugugca

SEQ ID NO: 2210634 - RNA, 19 nt, Artificial Sequence
  Description of Artificial Sequence: Synthetic oligonucleotide
ugccuugacccaagucugg

SEQ ID NO: 2210635 - RNA, 19 nt, Artificial Sequence
  Description of Artificial Sequence: Synthetic oligonucleotide
uccucuuuaucacgccugu

SEQ ID NO: 2210636 - RNA, 19 nt, Artificial Sequence
  Description of Artificial Sequence: Synthetic oligonucleotide
uggcccucgacauucuugu

SEQ ID NO: 2210637 - RNA, 19 nt, Artificial Sequence
  Description of Artificial Sequence: Synthetic oligonucleotide
uaccauguccggcccuugg

SEQ ID NO: 2210638 - RNA, 19 nt, Artificial Sequence
  Description of Artificial Sequence: Synthetic oligonucleotide
uugacccaagucuggguca

SEQ ID NO: 2210639 - RNA, 19 nt, Artificial Sequence
  Description of Artificial Sequence: Synthetic oligonucleotide
guagagcccgaggagaaag

SEQ ID NO: 2210640 - RNA, 19 nt, Artificial Sequence
  Description of Artificial Sequence: Synthetic oligonucleotide
uucagguagaagguggaau

SEQ ID NO: 2210641 - RNA, 19 nt, Artificial Sequence
  Description of Artificial Sequence: Synthetic oligonucleotide
cuacuagacgccagcgggc

SEQ ID NO: 2210642 - RNA, 19 nt, Artificial Sequence
  Description of Artificial Sequence: Synthetic oligonucleotide
acgccagcgggcuugcagg

SEQ ID NO: 2210643 - RNA, 19 nt, Artificial Sequence
  Description of Artificial Sequence: Synthetic oligonucleotide
acccaagucugggucaggc

SEQ ID NO: 2210644 - RNA, 19 nt, Artificial Sequence
  Description of Artificial Sequence: Synthetic oligonucleotide
aacacguguguaaguuggg

SEQ ID NO: 2210645 - RNA, 19 nt, Artificial Sequence
  Description of Artificial Sequence: Synthetic oligonucleotide
ugugagugaccaggaagag

SEQ ID NO: 2210646 - RNA, 19 nt, Artificial Sequence
  Description of Artificial Sequence: Synthetic oligonucleotide
aaaagguggagaagcugga

SEQ ID NO: 2210647 - RNA, 19 nt, Artificial Sequence
  Description of Artificial Sequence: Synthetic oligonucleotide
uugucuaggugauggcgac

SEQ ID NO: 2210648 - RNA, 19 nt, Artificial Sequence
  Description of Artificial Sequence: Synthetic oligonucleotide
ccuguagaaacgcaugaag

SEQ ID NO: 2210649 - RNA, 19 nt, Artificial Sequence
  Description of Artificial Sequence: Synthetic oligonucleotide
auuacacagcagcuuuaca

SEQ ID NO: 2210650 - RNA, 19 nt, Artificial Sequence
  Description of Artificial Sequence: Synthetic oligonucleotide
agcccauccagacagccau

SEQ ID NO: 2210651 - RNA, 19 nt, Artificial Sequence
  Description of Artificial Sequence: Synthetic oligonucleotide
uccuaagcccauccagaca

SEQ ID NO: 2210652 - RNA, 19 nt, Artificial Sequence
  Description of Artificial Sequence: Synthetic oligonucleotide
ccugaaacagagguggugg

SEQ ID NO: 2210653 - RNA, 19 nt, Artificial Sequence
  Description of Artificial Sequence: Synthetic oligonucleotide
guugacggcgagugugagg

SEQ ID NO: 2210654 - RNA, 19 nt, Artificial Sequence
  Description of Artificial Sequence: Synthetic oligonucleotide
ccgaaacugugcaaaauag

SEQ ID NO: 2210655 - RNA, 19 nt, Artificial Sequence
  Description of Artificial Sequence: Synthetic oligonucleotide
cugaggaagagggugggug

SEQ ID NO: 2210656 - RNA, 19 nt, Artificial Sequence
  Description of Artificial Sequence: Synthetic oligonucleotide
uccgguaaagauccucuuu

SEQ ID NO: 2210657 - RNA, 19 nt, Artificial Sequence
  Description of Artificial Sequence: Synthetic oligonucleotide
gugugagugaccaggaaga

SEQ ID NO: 2210658 - RNA, 19 nt, Artificial Sequence
  Description of Artificial Sequence: Synthetic oligonucleotide
gacgccagcgggcuugcag

SEQ ID NO: 2210659 - RNA, 19 nt, Artificial Sequence
  Description of Artificial Sequence: Synthetic oligonucleotide
ugcaacucaggucccgguc

SEQ ID NO: 2210660 - RNA, 19 nt, Artificial Sequence
  Description of Artificial Sequence: Synthetic oligonucleotide
caaagggucagggacauaa

SEQ ID NO: 2210661 - RNA, 19 nt, Artificial Sequence
  Description of Artificial Sequence: Synthetic oligonucleotide
gucagggacauaacguacc

SEQ ID NO: 2210662 - RNA, 19 nt, Artificial Sequence
  Description of Artificial Sequence: Synthetic oligonucleotide
cuuuaucacgccuguagaa

SEQ ID NO: 2210663 - RNA, 19 nt, Artificial Sequence
  Description of Artificial Sequence: Synthetic oligonucleotide
uguguaaguugggcucugg

SEQ ID NO: 2210664 - RNA, 19 nt, Artificial Sequence
  Description of Artificial Sequence: Synthetic oligonucleotide
gugagugaccaggaagagg

SEQ ID NO: 2210665 - RNA, 19 nt, Artificial Sequence
  Description of Artificial Sequence: Synthetic oligonucleotide
cucgacauucuuguccacc

SEQ ID NO: 2210666 - RNA, 19 nt, Artificial Sequence
  Description of Artificial Sequence: Synthetic oligonucleotide
uggaacacguguguaaguu

SEQ ID NO: 2210667 - RNA, 19 nt, Artificial Sequence
  Description of Artificial Sequence: Synthetic oligonucleotide
gaaacgcaugaagaacaug

SEQ ID NO: 2210668 - RNA, 19 nt, Artificial Sequence
  Description of Artificial Sequence: Synthetic oligonucleotide
guacauggugucccggggc

SEQ ID NO: 2210669 - RNA, 19 nt, Artificial Sequence
  Description of Artificial Sequence: Synthetic oligonucleotide
aggguggcgggucagcugu

SEQ ID NO: 2210670 - RNA, 19 nt, Artificial Sequence
  Description of Artificial Sequence: Synthetic oligonucleotide
auguccggcccuugguacg

SEQ ID NO: 2210671 - RNA, 19 nt, Artificial Sequence
  Description of Artificial Sequence: Synthetic oligonucleotide
cauguccggcccuugguac

SEQ ID NO: 2210672 - RNA, 19 nt, Artificial Sequence
  Description of Artificial Sequence: Synthetic oligonucleotide
ggaaugguagagcccgagg

SEQ ID NO: 2210673 - RNA, 19 nt, Artificial Sequence
  Description of Artificial Sequence: Synthetic oligonucleotide
ugguagagcccgaggagaa

SEQ ID NO: 2210674 - RNA, 19 nt, Artificial Sequence
  Description of Artificial Sequence: Synthetic oligonucleotide
gguacauggugucccgggg

SEQ ID NO: 2210675 - RNA, 19 nt, Artificial Sequence
  Description of Artificial Sequence: Synthetic oligonucleotide
ugaugccuugacccaaguc

SEQ ID NO: 2210676 - RNA, 19 nt, Artificial Sequence
  Description of Artificial Sequence: Synthetic oligonucleotide
ucuuauucguuugcuuaaa

SEQ ID NO: 2210677 - RNA, 19 nt, Artificial Sequence
  Description of Artificial Sequence: Synthetic oligonucleotide
ugacuccuaagcccaucca

SEQ ID NO: 2210678 - RNA, 19 nt, Artificial Sequence
  Description of Artificial Sequence: Synthetic oligonucleotide
auucguuugcuuaaacuuu

SEQ ID NO: 2210679 - RNA, 19 nt, Artificial Sequence
  Description of Artificial Sequence: Synthetic oligonucleotide
ugagggugucagcuugucu

SEQ ID NO: 2210680 - RNA, 19 nt, Artificial Sequence
  Description of Artificial Sequence: Synthetic oligonucleotide
uccaaaccaggaagcggca

SEQ ID NO: 2210681 - RNA, 19 nt, Artificial Sequence
  Description of Artificial Sequence: Synthetic oligonucleotide
gcuguagaaucuccagccg

SEQ ID NO: 2210682 - RNA, 19 nt, Artificial Sequence
  Description of Artificial Sequence: Synthetic oligonucleotide
ugugcguagcaaagucuuc

SEQ ID NO: 2210683 - RNA, 19 nt, Artificial Sequence
  Description of Artificial Sequence: Synthetic oligonucleotide
gggcaggccuacuagacgc

SEQ ID NO: 2210684 - RNA, 19 nt, Artificial Sequence
  Description of Artificial Sequence: Synthetic oligonucleotide
agggucagggacauaacgu

SEQ ID NO: 2210685 - RNA, 19 nt, Artificial Sequence
  Description of Artificial Sequence: Synthetic oligonucleotide
acaaaugaggccacuggaa

SEQ ID NO: 2210686 - RNA, 19 nt, Artificial Sequence
  Description of Artificial Sequence: Synthetic oligonucleotide
uggggucgagccugguagg

SEQ ID NO: 2210687 - RNA, 19 nt, Artificial Sequence
  Description of Artificial Sequence: Synthetic oligonucleotide
gggugggaaugguagagcc

SEQ ID NO: 2210688 - RNA, 19 nt, Artificial Sequence
  Description of Artificial Sequence: Synthetic oligonucleotide
gagagagcauggagggagg

SEQ ID NO: 2210689 - RNA, 19 nt, Artificial Sequence
  Description of Artificial Sequence: Synthetic oligonucleotide
gaagcggcaaagggucagg

SEQ ID NO: 2210690 - RNA, 19 nt, Artificial Sequence
  Description of Artificial Sequence: Synthetic oligonucleotide
gcuugucuaggugauggcg

SEQ ID NO: 2210691 - RNA, 19 nt, Artificial Sequence
  Description of Artificial Sequence: Synthetic oligonucleotide
gcggcaaagggucagggac

SEQ ID NO: 2210692 - RNA, 19 nt, Artificial Sequence
  Description of Artificial Sequence: Synthetic oligonucleotide
ggaacacguguguaaguug

SEQ ID NO: 2210693 - RNA, 19 nt, Artificial Sequence
  Description of Artificial Sequence: Synthetic oligonucleotide
ggugucccggggcugaggg

SEQ ID NO: 2210694 - RNA, 19 nt, Artificial Sequence
  Description of Artificial Sequence: Synthetic oligonucleotide
aggucccggucccuccucc

SEQ ID NO: 2210695 - RNA, 19 nt, Artificial Sequence
  Description of Artificial Sequence: Synthetic oligonucleotide
ggaauucagguagaaggug

SEQ ID NO: 2210696 - RNA, 19 nt, Artificial Sequence
  Description of Artificial Sequence: Synthetic oligonucleotide
uggcgggucagcuguagaa

SEQ ID NO: 2210697 - RNA, 19 nt, Artificial Sequence
  Description of Artificial Sequence: Synthetic oligonucleotide
caggcguugacggcgagug

SEQ ID NO: 2210698 - RNA, 19 nt, Artificial Sequence
  Description of Artificial Sequence: Synthetic oligonucleotide
acuccuaagcccauccaga

SEQ ID NO: 2210699 - RNA, 19 nt, Artificial Sequence
  Description of Artificial Sequence: Synthetic oligonucleotide
aucaaagguccgguaaaga

SEQ ID NO: 2210700 - RNA, 19 nt, Artificial Sequence
  Description of Artificial Sequence: Synthetic oligonucleotide
augccuugacccaagucug

SEQ ID NO: 2210701 - RNA, 19 nt, Artificial Sequence
  Description of Artificial Sequence: Synthetic oligonucleotide
gacggcgagugugagggug

SEQ ID NO: 2210702 - RNA, 19 nt, Artificial Sequence
  Description of Artificial Sequence: Synthetic oligonucleotide
agguccgguaaagauccuc

SEQ ID NO: 2210703 - RNA, 19 nt, Artificial Sequence
  Description of Artificial Sequence: Synthetic oligonucleotide
uggaguggagugggaacag

SEQ ID NO: 2210704 - RNA, 19 nt, Artificial Sequence
  Description of Artificial Sequence: Synthetic oligonucleotide
auccucuuuaucacgccug

SEQ ID NO: 2210705 - RNA, 19 nt, Artificial Sequence
  Description of Artificial Sequence: Synthetic oligonucleotide
gcaacucaggucccggucc

SEQ ID NO: 2210706 - RNA, 19 nt, Artificial Sequence
  Description of Artificial Sequence: Synthetic oligonucleotide
ucguuugcuuaaacuuuau

SEQ ID NO: 2210707 - RNA, 19 nt, Artificial Sequence
  Description of Artificial Sequence: Synthetic oligonucleotide
caacucaggucccgguccc

SEQ ID NO: 2210708 - RNA, 19 nt, Artificial Sequence
  Description of Artificial Sequence: Synthetic oligonucleotide
uguguaugggcaggccuac

SEQ ID NO: 2210709 - RNA, 19 nt, Artificial Sequence
  Description of Artificial Sequence: Synthetic oligonucleotide
cuagacgccagcgggcuug

SEQ ID NO: 2210710 - RNA, 19 nt, Artificial Sequence
  Description of Artificial Sequence: Synthetic oligonucleotide
ggguccaguucucagggug

SEQ ID NO: 2210711 - RNA, 19 nt, Artificial Sequence
  Description of Artificial Sequence: Synthetic oligonucleotide
guacgaaugcucaggaucu

SEQ ID NO: 2210712 - RNA, 19 nt, Artificial Sequence
  Description of Artificial Sequence: Synthetic oligonucleotide
cuaagcccauccagacagc

SEQ ID NO: 2210713 - RNA, 19 nt, Artificial Sequence
  Description of Artificial Sequence: Synthetic oligonucleotide
gcccucgacauucuugucc

SEQ ID NO: 2210714 - RNA, 19 nt, Artificial Sequence
  Description of Artificial Sequence: Synthetic oligonucleotide
uccaguucucaggguggcg

SEQ ID NO: 2210715 - RNA, 19 nt, Artificial Sequence
  Description of Artificial Sequence: Synthetic oligonucleotide
ggacauaacguaccauguc

SEQ ID NO: 2210716 - RNA, 19 nt, Artificial Sequence
  Description of Artificial Sequence: Synthetic oligonucleotide
gugcguagcaaagucuuca

SEQ ID NO: 2210717 - RNA, 19 nt, Artificial Sequence
  Description of Artificial Sequence: Synthetic oligonucleotide
ggucgagccugguaggcgc

SEQ ID NO: 2210718 - RNA, 19 nt, Artificial Sequence
  Description of Artificial Sequence: Synthetic oligonucleotide
agugaugccuugacccaag

SEQ ID NO: 2210719 - RNA, 19 nt, Artificial Sequence
  Description of Artificial Sequence: Synthetic oligonucleotide
agcggcaaagggucaggga

SEQ ID NO: 2210720 - RNA, 19 nt, Artificial Sequence
  Description of Artificial Sequence: Synthetic oligonucleotide
acgaaugcucaggaucuca

SEQ ID NO: 2210721 - RNA, 19 nt, Artificial Sequence
  Description of Artificial Sequence: Synthetic oligonucleotide
agccauugugcaacucagg

SEQ ID NO: 2210722 - RNA, 19 nt, Artificial Sequence
  Description of Artificial Sequence: Synthetic oligonucleotide
gagugugagggugucagcu

SEQ ID NO: 2210723 - RNA, 19 nt, Artificial Sequence
  Description of Artificial Sequence: Synthetic oligonucleotide
agaaacgcaugaagaacau

SEQ ID NO: 2210724 - RNA, 19 nt, Artificial Sequence
  Description of Artificial Sequence: Synthetic oligonucleotide
gccuacuagacgccagcgg

SEQ ID NO: 2210725 - RNA, 19 nt, Artificial Sequence
  Description of Artificial Sequence: Synthetic oligonucleotide
ugguacgaaugcucaggau

SEQ ID NO: 2210726 - RNA, 19 nt, Artificial Sequence
  Description of Artificial Sequence: Synthetic oligonucleotide
ccucuugugcguagcaaag

SEQ ID NO: 2210727 - RNA, 19 nt, Artificial Sequence
  Description of Artificial Sequence: Synthetic oligonucleotide
caggccuacuagacgccag

SEQ ID NO: 2210728 - RNA, 19 nt, Artificial Sequence
  Description of Artificial Sequence: Synthetic oligonucleotide
gagcccgaggagaaagcug

SEQ ID NO: 2210729 - RNA, 19 nt, Artificial Sequence
  Description of Artificial Sequence: Synthetic oligonucleotide
cgacaaaugaggccacugg

SEQ ID NO: 2210730 - RNA, 19 nt, Artificial Sequence
  Description of Artificial Sequence: Synthetic oligonucleotide
gucuaggugauggcgacaa

SEQ ID NO: 2210731 - RNA, 19 nt, Artificial Sequence
  Description of Artificial Sequence: Synthetic oligonucleotide
ugggaaugguagagcccga

SEQ ID NO: 2210732 - RNA, 19 nt, Artificial Sequence
  Description of Artificial Sequence: Synthetic oligonucleotide
ggcguugacggcgagugug

SEQ ID NO: 2210733 - RNA, 19 nt, Artificial Sequence
  Description of Artificial Sequence: Synthetic oligonucleotide
ucuaggugauggcgacaaa

SEQ ID NO: 2210734 - RNA, 19 nt, Artificial Sequence
  Description of Artificial Sequence: Synthetic oligonucleotide
guugggcucugguucugac

SEQ ID NO: 2210735 - RNA, 19 nt, Artificial Sequence
  Description of Artificial Sequence: Synthetic oligonucleotide
ucaggguggcgggucagcu

SEQ ID NO: 2210736 - RNA, 19 nt, Artificial Sequence
  Description of Artificial Sequence: Synthetic oligonucleotide
uggcuggcccucgacauuc

SEQ ID NO: 2210737 - RNA, 19 nt, Artificial Sequence
  Description of Artificial Sequence: Synthetic oligonucleotide
gcagcuuuacacagcauga

SEQ ID NO: 2210738 - RNA, 19 nt, Artificial Sequence
  Description of Artificial Sequence: Synthetic oligonucleotide
uccagccgaaacugugcaa

SEQ ID NO: 2210739 - RNA, 19 nt, Artificial Sequence
  Description of Artificial Sequence: Synthetic oligonucleotide
ccuuucccagaggagaacc

SEQ ID NO: 2210740 - RNA, 19 nt, Artificial Sequence
  Description of Artificial Sequence: Synthetic oligonucleotide
cacguguguaaguugggcu

SEQ ID NO: 2210741 - RNA, 19 nt, Artificial Sequence
  Description of Artificial Sequence: Synthetic oligonucleotide
cugugcaaaauaguuccaa

SEQ ID NO: 2210742 - RNA, 19 nt, Artificial Sequence
  Description of Artificial Sequence: Synthetic oligonucleotide
auguguaugggcaggccua

SEQ ID NO: 2210743 - RNA, 19 nt, Artificial Sequence
  Description of Artificial Sequence: Synthetic oligonucleotide
gccgaaacugugcaaaaua

SEQ ID NO: 2210744 - RNA, 19 nt, Artificial Sequence
  Description of Artificial Sequence: Synthetic oligonucleotide
auucagguagaagguggaa

SEQ ID NO: 2210745 - RNA, 19 nt, Artificial Sequence
  Description of Artificial Sequence: Synthetic oligonucleotide
gguggguggcaggaugugg

SEQ ID NO: 2210746 - RNA, 19 nt, Artificial Sequence
  Description of Artificial Sequence: Synthetic oligonucleotide
uggcgacaaaugaggccac

SEQ ID NO: 2210747 - RNA, 19 nt, Artificial Sequence
  Description of Artificial Sequence: Synthetic oligonucleotide
ggcgguacauggugucccg

SEQ ID NO: 2210748 - RNA, 19 nt, Artificial Sequence
  Description of Artificial Sequence: Synthetic oligonucleotide
gcuugcaggguccaguucu

SEQ ID NO: 2210749 - RNA, 19 nt, Artificial Sequence
  Description of Artificial Sequence: Synthetic oligonucleotide
ggucagggacauaacguac

SEQ ID NO: 2210750 - RNA, 19 nt, Artificial Sequence
  Description of Artificial Sequence: Synthetic oligonucleotide
gccauugugcaacucaggu

SEQ ID NO: 2210751 - RNA, 19 nt, Artificial Sequence
  Description of Artificial Sequence: Synthetic oligonucleotide
agagagcauggagggaggu

SEQ ID NO: 2210752 - RNA, 19 nt, Artificial Sequence
  Description of Artificial Sequence: Synthetic oligonucleotide
ggaagcggcaaagggucag

SEQ ID NO: 2210753 - RNA, 19 nt, Artificial Sequence
  Description of Artificial Sequence: Synthetic oligonucleotide
ucgagccugguaggcgcgg

SEQ ID NO: 2210754 - RNA, 19 nt, Artificial Sequence
  Description of Artificial Sequence: Synthetic oligonucleotide
gggucagggacauaacgua

SEQ ID NO: 2210755 - RNA, 19 nt, Artificial Sequence
  Description of Artificial Sequence: Synthetic oligonucleotide
agccgaaacugugcaaaau

SEQ ID NO: 2210756 - RNA, 19 nt, Artificial Sequence
  Description of Artificial Sequence: Synthetic oligonucleotide
ccuugguacgaaugcucag

SEQ ID NO: 2210757 - RNA, 19 nt, Artificial Sequence
  Description of Artificial Sequence: Synthetic oligonucleotide
ggucaggccuuggaacacg

SEQ ID NO: 2210758 - RNA, 19 nt, Artificial Sequence
  Description of Artificial Sequence: Synthetic oligonucleotide
gcucgggcgguacauggug

SEQ ID NO: 2210759 - RNA, 19 nt, Artificial Sequence
  Description of Artificial Sequence: Synthetic oligonucleotide
uacgaaugcucaggaucuc

SEQ ID NO: 2210760 - RNA, 19 nt, Artificial Sequence
  Description of Artificial Sequence: Synthetic oligonucleotide
gagugggaacagaggggug

SEQ ID NO: 2210761 - RNA, 19 nt, Artificial Sequence
  Description of Artificial Sequence: Synthetic oligonucleotide
ugacagccuggaccugaaa

SEQ ID NO: 2210762 - RNA, 19 nt, Artificial Sequence
  Description of Artificial Sequence: Synthetic oligonucleotide
ggaucucauugaugaacuc

SEQ ID NO: 2210763 - RNA, 19 nt, Artificial Sequence
  Description of Artificial Sequence: Synthetic oligonucleotide
ggccuacuagacgccagcg

SEQ ID NO: 2210764 - RNA, 19 nt, Artificial Sequence
  Description of Artificial Sequence: Synthetic oligonucleotide
gccuugacccaagucuggg

SEQ ID NO: 2210765 - RNA, 19 nt, Artificial Sequence
  Description of Artificial Sequence: Synthetic oligonucleotide
gcaugaagaacauguguau

SEQ ID NO: 2210766 - RNA, 19 nt, Artificial Sequence
  Description of Artificial Sequence: Synthetic oligonucleotide
gucgagccugguaggcgcg

SEQ ID NO: 2210767 - RNA, 19 nt, Artificial Sequence
  Description of Artificial Sequence: Synthetic oligonucleotide
gugucccggggcugagggg

SEQ ID NO: 2210768 - RNA, 19 nt, Artificial Sequence
  Description of Artificial Sequence: Synthetic oligonucleotide
gaaugcucaggaucucauu

SEQ ID NO: 2210769 - RNA, 19 nt, Artificial Sequence
  Description of Artificial Sequence: Synthetic oligonucleotide
cagcgggcuugcagggucc

SEQ ID NO: 2210770 - RNA, 19 nt, Artificial Sequence
  Description of Artificial Sequence: Synthetic oligonucleotide
gggaaugguagagcccgag

SEQ ID NO: 2210771 - RNA, 19 nt, Artificial Sequence
  Description of Artificial Sequence: Synthetic oligonucleotide
caggguggcgggucagcug

SEQ ID NO: 2210772 - RNA, 19 nt, Artificial Sequence
  Description of Artificial Sequence: Synthetic oligonucleotide
cgcaugaagaacaugugua

SEQ ID NO: 2210773 - RNA, 19 nt, Artificial Sequence
  Description of Artificial Sequence: Synthetic oligonucleotide
aacucaggucccggucccu

SEQ ID NO: 2210774 - RNA, 19 nt, Artificial Sequence
  Description of Artificial Sequence: Synthetic oligonucleotide
gaugaacuccacauccauu

SEQ ID NO: 2210775 - RNA, 19 nt, Artificial Sequence
  Description of Artificial Sequence: Synthetic oligonucleotide
gcgacaaaugaggccacug

SEQ ID NO: 2210776 - RNA, 19 nt, Artificial Sequence
  Description of Artificial Sequence: Synthetic oligonucleotide
gcgggucagcuguagaauc

SEQ ID NO: 2210777 - RNA, 19 nt, Artificial Sequence
  Description of Artificial Sequence: Synthetic oligonucleotide
ggagugggaacagaggggu

SEQ ID NO: 2210778 - RNA, 19 nt, Artificial Sequence
  Description of Artificial Sequence: Synthetic oligonucleotide
guagaaucuccagccgaaa

SEQ ID NO: 2210779 - RNA, 19 nt, Artificial Sequence
  Description of Artificial Sequence: Synthetic oligonucleotide
cacaaugaguugacagccu

SEQ ID NO: 2210780 - RNA, 19 nt, Artificial Sequence
  Description of Artificial Sequence: Synthetic oligonucleotide
acguaccauguccggcccu

SEQ ID NO: 2210781 - RNA, 19 nt, Artificial Sequence
  Description of Artificial Sequence: Synthetic oligonucleotide
guucucaggguggcggguc

SEQ ID NO: 2210782 - RNA, 19 nt, Artificial Sequence
  Description of Artificial Sequence: Synthetic oligonucleotide
ggugucagcuugucuaggu

SEQ ID NO: 2210783 - RNA, 19 nt, Artificial Sequence
  Description of Artificial Sequence: Synthetic oligonucleotide
ucaccuccucuugugcgua

SEQ ID NO: 2210784 - RNA, 19 nt, Artificial Sequence
  Description of Artificial Sequence: Synthetic oligonucleotide
cugaaacagaggugguggu

SEQ ID NO: 2210785 - RNA, 19 nt, Artificial Sequence
  Description of Artificial Sequence: Synthetic oligonucleotide
ccgguaaagauccucuuua

SEQ ID NO: 2210786 - RNA, 19 nt, Artificial Sequence
  Description of Artificial Sequence: Synthetic oligonucleotide
caccuccucuugugcguag

SEQ ID NO: 2210787 - RNA, 19 nt, Artificial Sequence
  Description of Artificial Sequence: Synthetic oligonucleotide
augaggccacuggaauuca

SEQ ID NO: 2210788 - RNA, 19 nt, Artificial Sequence
  Description of Artificial Sequence: Synthetic oligonucleotide
acaggcguugacggcgagu

SEQ ID NO: 2210789 - RNA, 19 nt, Artificial Sequence
  Description of Artificial Sequence: Synthetic oligonucleotide
ccuuggaacacguguguaa

SEQ ID NO: 2210790 - RNA, 19 nt, Artificial Sequence
  Description of Artificial Sequence: Synthetic oligonucleotide
cgguacauggugucccggg

SEQ ID NO: 2210791 - RNA, 19 nt, Artificial Sequence
  Description of Artificial Sequence: Synthetic oligonucleotide
gggucgagccugguaggcg

SEQ ID NO: 2210792 - RNA, 19 nt, Artificial Sequence
  Description of Artificial Sequence: Synthetic oligonucleotide
gggcgguacaugguguccc

SEQ ID NO: 2210793 - RNA, 19 nt, Artificial Sequence
  Description of Artificial Sequence: Synthetic oligonucleotide
uagacgccagcgggcuugc

SEQ ID NO: 2210794 - RNA, 19 nt, Artificial Sequence
  Description of Artificial Sequence: Synthetic oligonucleotide
guaggcgcggaggcagggc

SEQ ID NO: 2210795 - RNA, 19 nt, Artificial Sequence
  Description of Artificial Sequence: Synthetic oligonucleotide
gguaggcgcggaggcaggg

SEQ ID NO: 2210796 - RNA, 19 nt, Artificial Sequence
  Description of Artificial Sequence: Synthetic oligonucleotide
acggcgagugugagggugu

SEQ ID NO: 2210797 - RNA, 19 nt, Artificial Sequence
  Description of Artificial Sequence: Synthetic oligonucleotide
ccaggaagcggcaaagggu

SEQ ID NO: 2210798 - RNA, 19 nt, Artificial Sequence
  Description of Artificial Sequence: Synthetic oligonucleotide
aggaagcggcaaaggguca

SEQ ID NO: 2210799 - RNA, 19 nt, Artificial Sequence
  Description of Artificial Sequence: Synthetic oligonucleotide
uccggcccuugguacgaau

SEQ ID NO: 2210800 - RNA, 19 nt, Artificial Sequence
  Description of Artificial Sequence: Synthetic oligonucleotide
gguccgguaaagauccucu

SEQ ID NO: 2210801 - RNA, 19 nt, Artificial Sequence
  Description of Artificial Sequence: Synthetic oligonucleotide
ugacggcgagugugagggu

SEQ ID NO: 2210802 - RNA, 19 nt, Artificial Sequence
  Description of Artificial Sequence: Synthetic oligonucleotide
agccuggaccugaaacaga

SEQ ID NO: 2210803 - RNA, 19 nt, Artificial Sequence
  Description of Artificial Sequence: Synthetic oligonucleotide
guggcgggucagcuguaga

SEQ ID NO: 2210804 - RNA, 19 nt, Artificial Sequence
  Description of Artificial Sequence: Synthetic oligonucleotide
ggcucugccuccccgcguc

SEQ ID NO: 2210805 - RNA, 19 nt, Artificial Sequence
  Description of Artificial Sequence: Synthetic oligonucleotide
aagguccgguaaagauccu

SEQ ID NO: 2210806 - RNA, 19 nt, Artificial Sequence
  Description of Artificial Sequence: Synthetic oligonucleotide
cacauccauugacuccuaa

SEQ ID NO: 2210807 - RNA, 19 nt, Artificial Sequence
  Description of Artificial Sequence: Synthetic oligonucleotide
gggcccgaggcgccgggcg

SEQ ID NO: 2210808 - RNA, 19 nt, Artificial Sequence
  Description of Artificial Sequence: Synthetic oligonucleotide
ggccacuggaauucaggua

SEQ ID NO: 2210809 - RNA, 19 nt, Artificial Sequence
  Description of Artificial Sequence: Synthetic oligonucleotide
cacuggaauucagguagaa

SEQ ID NO: 2210810 - RNA, 19 nt, Artificial Sequence
  Description of Artificial Sequence: Synthetic oligonucleotide
guaccauguccggcccuug

SEQ ID NO: 2210811 - RNA, 19 nt, Artificial Sequence
  Description of Artificial Sequence: Synthetic oligonucleotide
cagugaugccuugacccaa

SEQ ID NO: 2210812 - RNA, 19 nt, Artificial Sequence
  Description of Artificial Sequence: Synthetic oligonucleotide
cggcccuugguacgaaugc

SEQ ID NO: 2210813 - RNA, 19 nt, Artificial Sequence
  Description of Artificial Sequence: Synthetic oligonucleotide
ccagcgggcuugcaggguc

SEQ ID NO: 2210814 - RNA, 19 nt, Artificial Sequence
  Description of Artificial Sequence: Synthetic oligonucleotide
cuccucuugugcguagcaa

SEQ ID NO: 2210815 - RNA, 19 nt, Artificial Sequence
  Description of Artificial Sequence: Synthetic oligonucleotide
gcccuugguacgaaugcuc

SEQ ID NO: 2210816 - RNA, 19 nt, Artificial Sequence
  Description of Artificial Sequence: Synthetic oligonucleotide
gguggcuggcccucgacau

SEQ ID NO: 2210817 - RNA, 19 nt, Artificial Sequence
  Description of Artificial Sequence: Synthetic oligonucleotide
ggggucgagccugguaggc

SEQ ID NO: 2210818 - RNA, 19 nt, Artificial Sequence
  Description of Artificial Sequence: Synthetic oligonucleotide
cucuugugcguagcaaagu

SEQ ID NO: 2210819 - RNA, 19 nt, Artificial Sequence
  Description of Artificial Sequence: Synthetic oligonucleotide
cggcucgggcgguacaugg

SEQ ID NO: 2210820 - RNA, 19 nt, Artificial Sequence
  Description of Artificial Sequence: Synthetic oligonucleotide
ggcaggccuacuagacgcc

SEQ ID NO: 2210821 - RNA, 19 nt, Artificial Sequence
  Description of Artificial Sequence: Synthetic oligonucleotide
gcgguacauggugucccgg

SEQ ID NO: 2210822 - RNA, 19 nt, Artificial Sequence
  Description of Artificial Sequence: Synthetic oligonucleotide
cgaaacugugcaaaauagu

SEQ ID NO: 2210823 - RNA, 19 nt, Artificial Sequence
  Description of Artificial Sequence: Synthetic oligonucleotide
ggcgcggaggcagggcccg

SEQ ID NO: 2210824 - RNA, 19 nt, Artificial Sequence
  Description of Artificial Sequence: Synthetic oligonucleotide
ggccuuggaacacgugugu

SEQ ID NO: 2210825 - RNA, 19 nt, Artificial Sequence
  Description of Artificial Sequence: Synthetic oligonucleotide
guccgguaaagauccucuu

SEQ ID NO: 2210826 - RNA, 19 nt, Artificial Sequence
  Description of Artificial Sequence: Synthetic oligonucleotide
agcgggcuugcagggucca

SEQ ID NO: 2210827 - RNA, 19 nt, Artificial Sequence
  Description of Artificial Sequence: Synthetic oligonucleotide
cgagugugagggugucagc

SEQ ID NO: 2210828 - RNA, 19 nt, Artificial Sequence
  Description of Artificial Sequence: Synthetic oligonucleotide
cacccacaaugaguugaca

SEQ ID NO: 2210829 - RNA, 19 nt, Artificial Sequence
  Description of Artificial Sequence: Synthetic oligonucleotide
gcguagcaaagucuucagu

SEQ ID NO: 2210830 - RNA, 19 nt, Artificial Sequence
  Description of Artificial Sequence: Synthetic oligonucleotide
cauugacuccuaagcccau

SEQ ID NO: 2210831 - RNA, 19 nt, Artificial Sequence
  Description of Artificial Sequence: Synthetic oligonucleotide
gcaggccuacuagacgcca

SEQ ID NO: 2210832 - RNA, 19 nt, Artificial Sequence
  Description of Artificial Sequence: Synthetic oligonucleotide
ccacuggaauucagguaga

SEQ ID NO: 2210833 - RNA, 19 nt, Artificial Sequence
  Description of Artificial Sequence: Synthetic oligonucleotide
gcguugacggcgaguguga

SEQ ID NO: 2210834 - RNA, 19 nt, Artificial Sequence
  Description of Artificial Sequence: Synthetic oligonucleotide
ccccuuucccagaggagaa

SEQ ID NO: 2210835 - RNA, 19 nt, Artificial Sequence
  Description of Artificial Sequence: Synthetic oligonucleotide
ccucgacauucuuguccac

SEQ ID NO: 2210836 - RNA, 19 nt, Artificial Sequence
  Description of Artificial Sequence: Synthetic oligonucleotide
cccuuucccagaggagaac

SEQ ID NO: 2210837 - RNA, 19 nt, Artificial Sequence
  Description of Artificial Sequence: Synthetic oligonucleotide
ccauguccggcccuuggua

SEQ ID NO: 2210838 - RNA, 19 nt, Artificial Sequence
  Description of Artificial Sequence: Synthetic oligonucleotide
ggcccucgacauucuuguc

SEQ ID NO: 2210839 - RNA, 19 nt, Artificial Sequence
  Description of Artificial Sequence: Synthetic oligonucleotide
gccuuggaacacgugugua

SEQ ID NO: 2210840 - RNA, 19 nt, Artificial Sequence
  Description of Artificial Sequence: Synthetic oligonucleotide
cguugacggcgagugugag

SEQ ID NO: 2210841 - RNA, 19 nt, Artificial Sequence
  Description of Artificial Sequence: Synthetic oligonucleotide
ggcgggucagcuguagaau

SEQ ID NO: 2210842 - RNA, 19 nt, Artificial Sequence
  Description of Artificial Sequence: Synthetic oligonucleotide
ccuugacccaagucugggu

SEQ ID NO: 2210843 - RNA, 19 nt, Artificial Sequence
  Description of Artificial Sequence: Synthetic oligonucleotide
cagggacauaacguaccau

SEQ ID NO: 2210844 - RNA, 19 nt, Artificial Sequence
  Description of Artificial Sequence: Synthetic oligonucleotide
ggcgagugugaggguguca

SEQ ID NO: 2210845 - RNA, 19 nt, Artificial Sequence
  Description of Artificial Sequence: Synthetic oligonucleotide
guguaugggcaggccuacu

SEQ ID NO: 2210846 - RNA, 19 nt, Artificial Sequence
  Description of Artificial Sequence: Synthetic oligonucleotide
gggcuugcaggguccaguu

SEQ ID NO: 2210847 - RNA, 19 nt, Artificial Sequence
  Description of Artificial Sequence: Synthetic oligonucleotide
ccaaaccaggaagcggcaa

SEQ ID NO: 2210848 - RNA, 19 nt, Artificial Sequence
  Description of Artificial Sequence: Synthetic oligonucleotide
cgaaugcucaggaucucau

SEQ ID NO: 2210849 - RNA, 19 nt, Artificial Sequence
  Description of Artificial Sequence: Synthetic oligonucleotide
ggcucccacuagcagcuuu

SEQ ID NO: 2210850 - RNA, 19 nt, Artificial Sequence
  Description of Artificial Sequence: Synthetic oligonucleotide
agacgccagcgggcuugca

SEQ ID NO: 2210851 - RNA, 19 nt, Artificial Sequence
  Description of Artificial Sequence: Synthetic oligonucleotide
ggcgacaaaugaggccacu

SEQ ID NO: 2210852 - RNA, 19 nt, Artificial Sequence
  Description of Artificial Sequence: Synthetic oligonucleotide
cgguaaagauccucuuuau

SEQ ID NO: 2210853 - RNA, 19 nt, Artificial Sequence
  Description of Artificial Sequence: Synthetic oligonucleotide
gcucccacuagcagcuuuu

SEQ ID NO: 2210854 - RNA, 19 nt, Artificial Sequence
  Description of Artificial Sequence: Synthetic oligonucleotide
cguuugcuuaaacuuuauu

SEQ ID NO: 2210855 - RNA, 19 nt, Artificial Sequence
  Description of Artificial Sequence: Synthetic oligonucleotide
ccggcucgggcgguacaug

SEQ ID NO: 2210856 - RNA, 19 nt, Artificial Sequence
  Description of Artificial Sequence: Synthetic oligonucleotide
ggcucgggcgguacauggu

SEQ ID NO: 2210857 - RNA, 19 nt, Artificial Sequence
  Description of Artificial Sequence: Synthetic oligonucleotide
ccacauccauugacuccua

SEQ ID NO: 2210858 - RNA, 19 nt, Artificial Sequence
  Description of Artificial Sequence: Synthetic oligonucleotide
cgcggaggcagggcccgag

SEQ ID NO: 2210859 - RNA, 19 nt, Artificial Sequence
  Description of Artificial Sequence: Synthetic oligonucleotide
cggcgagugugaggguguc

SEQ ID NO: 2210860 - RNA, 19 nt, Artificial Sequence
  Description of Artificial Sequence: Synthetic oligonucleotide
gccagcgggcuugcagggu

SEQ ID NO: 2210861 - RNA, 19 nt, Artificial Sequence
  Description of Artificial Sequence: Synthetic oligonucleotide
gcccgaggagaaagcuggu

SEQ ID NO: 2210862 - RNA, 19 nt, Artificial Sequence
  Description of Artificial Sequence: Synthetic oligonucleotide
cguaccauguccggcccuu

SEQ ID NO: 2210863 - RNA, 19 nt, Artificial Sequence
  Description of Artificial Sequence: Synthetic oligonucleotide
ggguggcgggucagcugua

SEQ ID NO: 2210864 - RNA, 19 nt, Artificial Sequence
  Description of Artificial Sequence: Synthetic oligonucleotide
ccccggcucgggcgguaca

SEQ ID NO: 2210865 - RNA, 19 nt, Artificial Sequence
  Description of Artificial Sequence: Synthetic oligonucleotide
gcgcggaggcagggcccga

SEQ ID NO: 2210866 - RNA, 19 nt, Artificial Sequence
  Description of Artificial Sequence: Synthetic oligonucleotide
aauauucuaccacugagcc

SEQ ID NO: 2210867 - RNA, 19 nt, Artificial Sequence
  Description of Artificial Sequence: Synthetic oligonucleotide
aaagcuauggauugcaagc

SEQ ID NO: 2210868 - RNA, 19 nt, Artificial Sequence
  Description of Artificial Sequence: Synthetic oligonucleotide
agugaaauguagcagauac

SEQ ID NO: 2210869 - RNA, 19 nt, Artificial Sequence
  Description of Artificial Sequence: Synthetic oligonucleotide
aggacaacaacauucaggg

SEQ ID NO: 2210870 - RNA, 19 nt, Artificial Sequence
  Description of Artificial Sequence: Synthetic oligonucleotide
ucugauaugguuuuaacac

SEQ ID NO: 2210871 - RNA, 19 nt, Artificial Sequence
  Description of Artificial Sequence: Synthetic oligonucleotide
aaaaccuggaguuauuaag

SEQ ID NO: 2210872 - RNA, 19 nt, Artificial Sequence
  Description of Artificial Sequence: Synthetic oligonucleotide
ugaacugauuucuagaaag

SEQ ID NO: 2210873 - RNA, 19 nt, Artificial Sequence
  Description of Artificial Sequence: Synthetic oligonucleotide
aaauccauuguauuuaaga

SEQ ID NO: 2210874 - RNA, 19 nt, Artificial Sequence
  Description of Artificial Sequence: Synthetic oligonucleotide
aaugugauaaaaccuggag

SEQ ID NO: 2210875 - RNA, 19 nt, Artificial Sequence
  Description of Artificial Sequence: Synthetic oligonucleotide
aaauguagcagauacuccu

SEQ ID NO: 2210876 - RNA, 19 nt, Artificial Sequence
  Description of Artificial Sequence: Synthetic oligonucleotide
uauucuaccacugagccag

SEQ ID NO: 2210877 - RNA, 19 nt, Artificial Sequence
  Description of Artificial Sequence: Synthetic oligonucleotide
ucuuacuuccugaaaauag

SEQ ID NO: 2210878 - RNA, 19 nt, Artificial Sequence
  Description of Artificial Sequence: Synthetic oligonucleotide
agauggacaccucaggucc

SEQ ID NO: 2210879 - RNA, 19 nt, Artificial Sequence
  Description of Artificial Sequence: Synthetic oligonucleotide
uaaguguccauuuaucucc

SEQ ID NO: 2210880 - RNA, 19 nt, Artificial Sequence
  Description of Artificial Sequence: Synthetic oligonucleotide
uuucgaauggcauuuaaca

SEQ ID NO: 2210881 - RNA, 19 nt, Artificial Sequence
  Description of Artificial Sequence: Synthetic oligonucleotide
gauaaugcaguuuuccgag

SEQ ID NO: 2210882 - RNA, 19 nt, Artificial Sequence
  Description of Artificial Sequence: Synthetic oligonucleotide
ugugauuccucuuuuagug

SEQ ID NO: 2210883 - RNA, 19 nt, Artificial Sequence
  Description of Artificial Sequence: Synthetic oligonucleotide
aguuauuaaggacaacaac

SEQ ID NO: 2210884 - RNA, 19 nt, Artificial Sequence
  Description of Artificial Sequence: Synthetic oligonucleotide
uuuaacacuguucuucaag

SEQ ID NO: 2210885 - RNA, 19 nt, Artificial Sequence
  Description of Artificial Sequence: Synthetic oligonucleotide
aacaagucaggaaacagac

SEQ ID NO: 2210886 - RNA, 19 nt, Artificial Sequence
  Description of Artificial Sequence: Synthetic oligonucleotide
auuucuccgaaucagacug

SEQ ID NO: 2210887 - RNA, 19 nt, Artificial Sequence
  Description of Artificial Sequence: Synthetic oligonucleotide
agaucuauagaauaugccu

SEQ ID NO: 2210888 - RNA, 19 nt, Artificial Sequence
  Description of Artificial Sequence: Synthetic oligonucleotide
agaagcauuuccuggaugg

SEQ ID NO: 2210889 - RNA, 19 nt, Artificial Sequence
  Description of Artificial Sequence: Synthetic oligonucleotide
uccaaugugauaaaaccug

SEQ ID NO: 2210890 - RNA, 19 nt, Artificial Sequence
  Description of Artificial Sequence: Synthetic oligonucleotide
uaagcagagaucuauagaa

SEQ ID NO: 2210891 - RNA, 19 nt, Artificial Sequence
  Description of Artificial Sequence: Synthetic oligonucleotide
auucgagcaguccacaggc

SEQ ID NO: 2210892 - RNA, 19 nt, Artificial Sequence
  Description of Artificial Sequence: Synthetic oligonucleotide
aauccauuguauuuaagau

SEQ ID NO: 2210893 - RNA, 19 nt, Artificial Sequence
  Description of Artificial Sequence: Synthetic oligonucleotide
uuccaaauaucuaaacaag

SEQ ID NO: 2210894 - RNA, 19 nt, Artificial Sequence
  Description of Artificial Sequence: Synthetic oligonucleotide
aauucgagcaguccacagg

SEQ ID NO: 2210895 - RNA, 19 nt, Artificial Sequence
  Description of Artificial Sequence: Synthetic oligonucleotide
uuuaacaucccaagggaug

SEQ ID NO: 2210896 - RNA, 19 nt, Artificial Sequence
  Description of Artificial Sequence: Synthetic oligonucleotide
guuccaaugugauaaaacc

SEQ ID NO: 2210897 - RNA, 19 nt, Artificial Sequence
  Description of Artificial Sequence: Synthetic oligonucleotide
aguugaauauucuaagugu

SEQ ID NO: 2210898 - RNA, 19 nt, Artificial Sequence
  Description of Artificial Sequence: Synthetic oligonucleotide
uguaacgaaccauuggaag

SEQ ID NO: 2210899 - RNA, 19 nt, Artificial Sequence
  Description of Artificial Sequence: Synthetic oligonucleotide
gacuccaaagaacugaagc

SEQ ID NO: 2210900 - RNA, 19 nt, Artificial Sequence
  Description of Artificial Sequence: Synthetic oligonucleotide
uaaucuggaauauucuacc

SEQ ID NO: 2210901 - RNA, 19 nt, Artificial Sequence
  Description of Artificial Sequence: Synthetic oligonucleotide
gauuucuagaaagaguugc

SEQ ID NO: 2210902 - RNA, 19 nt, Artificial Sequence
  Description of Artificial Sequence: Synthetic oligonucleotide
uuauuaaggacaacaacau

SEQ ID NO: 2210903 - RNA, 19 nt, Artificial Sequence
  Description of Artificial Sequence: Synthetic oligonucleotide
aucuaaacaagucaggaaa

SEQ ID NO: 2210904 - RNA, 19 nt, Artificial Sequence
  Description of Artificial Sequence: Synthetic oligonucleotide
ucagagaagaacagacagg

SEQ ID NO: 2210905 - RNA, 19 nt, Artificial Sequence
  Description of Artificial Sequence: Synthetic oligonucleotide
uacaaguaagcagagaucu

SEQ ID NO: 2210906 - RNA, 19 nt, Artificial Sequence
  Description of Artificial Sequence: Synthetic oligonucleotide
ugaaauguagcagauacuc

SEQ ID NO: 2210907 - RNA, 19 nt, Artificial Sequence
  Description of Artificial Sequence: Synthetic oligonucleotide
uuugcaauccuguuuccag

SEQ ID NO: 2210908 - RNA, 19 nt, Artificial Sequence
  Description of Artificial Sequence: Synthetic oligonucleotide
uuaagauuucuccgaauca

SEQ ID NO: 2210909 - RNA, 19 nt, Artificial Sequence
  Description of Artificial Sequence: Synthetic oligonucleotide
agagaucuauagaauaugc

SEQ ID NO: 2210910 - RNA, 19 nt, Artificial Sequence
  Description of Artificial Sequence: Synthetic oligonucleotide
uccaaauaucuaaacaagu

SEQ ID NO: 2210911 - RNA, 19 nt, Artificial Sequence
  Description of Artificial Sequence: Synthetic oligonucleotide
cuaaucuggaauauucuac

SEQ ID NO: 2210912 - RNA, 19 nt, Artificial Sequence
  Description of Artificial Sequence: Synthetic oligonucleotide
aauggcauuuaacauccca

SEQ ID NO: 2210913 - RNA, 19 nt, Artificial Sequence
  Description of Artificial Sequence: Synthetic oligonucleotide
gaaagcuauggauugcaag

SEQ ID NO: 2210914 - RNA, 19 nt, Artificial Sequence
  Description of Artificial Sequence: Synthetic oligonucleotide
ugauaaugcaguuuuccga

SEQ ID NO: 2210915 - RNA, 19 nt, Artificial Sequence
  Description of Artificial Sequence: Synthetic oligonucleotide
uaagauuucuccgaaucag

SEQ ID NO: 2210916 - RNA, 19 nt, Artificial Sequence
  Description of Artificial Sequence: Synthetic oligonucleotide
aguaagcagagaucuauag

SEQ ID NO: 2210917 - RNA, 19 nt, Artificial Sequence
  Description of Artificial Sequence: Synthetic oligonucleotide
aaccgacucacucagagaa

SEQ ID NO: 2210918 - RNA, 19 nt, Artificial Sequence
  Description of Artificial Sequence: Synthetic oligonucleotide
uguccaacaagugugauuc

SEQ ID NO: 2210919 - RNA, 19 nt, Artificial Sequence
  Description of Artificial Sequence: Synthetic oligonucleotide
gaucuauagaauaugccug

SEQ ID NO: 2210920 - RNA, 19 nt, Artificial Sequence
  Description of Artificial Sequence: Synthetic oligonucleotide
uauagaauaugccugcauu

SEQ ID NO: 2210921 - RNA, 19 nt, Artificial Sequence
  Description of Artificial Sequence: Synthetic oligonucleotide
aaguugcucaggcugaaug

SEQ ID NO: 2210922 - RNA, 19 nt, Artificial Sequence
  Description of Artificial Sequence: Synthetic oligonucleotide
aaagagcacacgaaagaac

SEQ ID NO: 2210923 - RNA, 19 nt, Artificial Sequence
  Description of Artificial Sequence: Synthetic oligonucleotide
gcauuuaacaucccaaggg

SEQ ID NO: 2210924 - RNA, 19 nt, Artificial Sequence
  Description of Artificial Sequence: Synthetic oligonucleotide
ucuaaacaagucaggaaac

SEQ ID NO: 2210925 - RNA, 19 nt, Artificial Sequence
  Description of Artificial Sequence: Synthetic oligonucleotide
ucuaugacagaaccgcuga

SEQ ID NO: 2210926 - RNA, 19 nt, Artificial Sequence
  Description of Artificial Sequence: Synthetic oligonucleotide
cuuuuagugacgugugagg

SEQ ID NO: 2210927 - RNA, 19 nt, Artificial Sequence
  Description of Artificial Sequence: Synthetic oligonucleotide
cugauaaugcaguuuuccg

SEQ ID NO: 2210928 - RNA, 19 nt, Artificial Sequence
  Description of Artificial Sequence: Synthetic oligonucleotide
agugugauuccucuuuuag

SEQ ID NO: 2210929 - RNA, 19 nt, Artificial Sequence
  Description of Artificial Sequence: Synthetic oligonucleotide
uuccaaugugauaaaaccu

SEQ ID NO: 2210930 - RNA, 19 nt, Artificial Sequence
  Description of Artificial Sequence: Synthetic oligonucleotide
gacaacaacauucaggggu

SEQ ID NO: 2210931 - RNA, 19 nt, Artificial Sequence
  Description of Artificial Sequence: Synthetic oligonucleotide
cacacgaaagaacaugggg

SEQ ID NO: 2210932 - RNA, 19 nt, Artificial Sequence
  Description of Artificial Sequence: Synthetic oligonucleotide
ucuuuuagugacgugugag

SEQ ID NO: 2210933 - RNA, 19 nt, Artificial Sequence
  Description of Artificial Sequence: Synthetic oligonucleotide
aagagcacacgaaagaaca

SEQ ID NO: 2210934 - RNA, 19 nt, Artificial Sequence
  Description of Artificial Sequence: Synthetic oligonucleotide
cauuggaagugaaauguag

SEQ ID NO: 2210935 - RNA, 19 nt, Artificial Sequence
  Description of Artificial Sequence: Synthetic oligonucleotide
ugaauauucuaagugucca

SEQ ID NO: 2210936 - RNA, 19 nt, Artificial Sequence
  Description of Artificial Sequence: Synthetic oligonucleotide
aguugcucaggcugaaugg

SEQ ID NO: 2210937 - RNA, 19 nt, Artificial Sequence
  Description of Artificial Sequence: Synthetic oligonucleotide
acacuuaaagagcacacga

SEQ ID NO: 2210938 - RNA, 19 nt, Artificial Sequence
  Description of Artificial Sequence: Synthetic oligonucleotide
gaauauucuaccacugagc

SEQ ID NO: 2210939 - RNA, 19 nt, Artificial Sequence
  Description of Artificial Sequence: Synthetic oligonucleotide
uucaggcacauuuggaaag

SEQ ID NO: 2210940 - RNA, 19 nt, Artificial Sequence
  Description of Artificial Sequence: Synthetic oligonucleotide
aaauucgagcaguccacag

SEQ ID NO: 2210941 - RNA, 19 nt, Artificial Sequence
  Description of Artificial Sequence: Synthetic oligonucleotide
uguacucugcaguugcucc

SEQ ID NO: 2210942 - RNA, 19 nt, Artificial Sequence
  Description of Artificial Sequence: Synthetic oligonucleotide
aaucuggaauauucuacca

SEQ ID NO: 2210943 - RNA, 19 nt, Artificial Sequence
  Description of Artificial Sequence: Synthetic oligonucleotide
uauuuaagauuucuccgaa

SEQ ID NO: 2210944 - RNA, 19 nt, Artificial Sequence
  Description of Artificial Sequence: Synthetic oligonucleotide
uggcgaaugguuucgaaug

SEQ ID NO: 2210945 - RNA, 19 nt, Artificial Sequence
  Description of Artificial Sequence: Synthetic oligonucleotide
aaugguuucgaauggcauu

SEQ ID NO: 2210946 - RNA, 19 nt, Artificial Sequence
  Description of Artificial Sequence: Synthetic oligonucleotide
uucuaugacagaaccgcug

SEQ ID NO: 2210947 - RNA, 19 nt, Artificial Sequence
  Description of Artificial Sequence: Synthetic oligonucleotide
aacauucagggguguuccc

SEQ ID NO: 2210948 - RNA, 19 nt, Artificial Sequence
  Description of Artificial Sequence: Synthetic oligonucleotide
uggcauuuaacaucccaag

SEQ ID NO: 2210949 - RNA, 19 nt, Artificial Sequence
  Description of Artificial Sequence: Synthetic oligonucleotide
agcuauggauugcaagccc

SEQ ID NO: 2210950 - RNA, 19 nt, Artificial Sequence
  Description of Artificial Sequence: Synthetic oligonucleotide
guauuuaagauuucuccga

SEQ ID NO: 2210951 - RNA, 19 nt, Artificial Sequence
  Description of Artificial Sequence: Synthetic oligonucleotide
augcaguuuuccgagaugg

SEQ ID NO: 2210952 - RNA, 19 nt, Artificial Sequence
  Description of Artificial Sequence: Synthetic oligonucleotide
cucaugggagucuucaggc

SEQ ID NO: 2210953 - RNA, 19 nt, Artificial Sequence
  Description of Artificial Sequence: Synthetic oligonucleotide
ucuugguguacucugcagu

SEQ ID NO: 2210954 - RNA, 19 nt, Artificial Sequence
  Description of Artificial Sequence: Synthetic oligonucleotide
auaucuaaacaagucagga

SEQ ID NO: 2210955 - RNA, 19 nt, Artificial Sequence
  Description of Artificial Sequence: Synthetic oligonucleotide
uuggaaagacacugaaagc

SEQ ID NO: 2210956 - RNA, 19 nt, Artificial Sequence
  Description of Artificial Sequence: Synthetic oligonucleotide
cauccugaauucaggaugc

SEQ ID NO: 2210957 - RNA, 19 nt, Artificial Sequence
  Description of Artificial Sequence: Synthetic oligonucleotide
cucccuguaagcaagcaug

SEQ ID NO: 2210958 - RNA, 19 nt, Artificial Sequence
  Description of Artificial Sequence: Synthetic oligonucleotide
gauacuccuccguuguucc

SEQ ID NO: 2210959 - RNA, 19 nt, Artificial Sequence
  Description of Artificial Sequence: Synthetic oligonucleotide
cagacagggaaauucgagc

SEQ ID NO: 2210960 - RNA, 19 nt, Artificial Sequence
  Description of Artificial Sequence: Synthetic oligonucleotide
agacagggaaauucgagca

SEQ ID NO: 2210961 - RNA, 19 nt, Artificial Sequence
  Description of Artificial Sequence: Synthetic oligonucleotide
uuccaggcaaaauccauug

SEQ ID NO: 2210962 - RNA, 19 nt, Artificial Sequence
  Description of Artificial Sequence: Synthetic oligonucleotide
ugauuucuagaaagaguug

SEQ ID NO: 2210963 - RNA, 19 nt, Artificial Sequence
  Description of Artificial Sequence: Synthetic oligonucleotide
uuagugacgugugaggugu

SEQ ID NO: 2210964 - RNA, 19 nt, Artificial Sequence
  Description of Artificial Sequence: Synthetic oligonucleotide
uaugccugcauuugcaauc

SEQ ID NO: 2210965 - RNA, 19 nt, Artificial Sequence
  Description of Artificial Sequence: Synthetic oligonucleotide
agguuccaaauaucuaaac

SEQ ID NO: 2210966 - RNA, 19 nt, Artificial Sequence
  Description of Artificial Sequence: Synthetic oligonucleotide
uuuuagugacgugugaggu

SEQ ID NO: 2210967 - RNA, 19 nt, Artificial Sequence
  Description of Artificial Sequence: Synthetic oligonucleotide
aaucagacuguuuucucuu

SEQ ID NO: 2210968 - RNA, 19 nt, Artificial Sequence
  Description of Artificial Sequence: Synthetic oligonucleotide
ugaauggcgaaugguuucg

SEQ ID NO: 2210969 - RNA, 19 nt, Artificial Sequence
  Description of Artificial Sequence: Synthetic oligonucleotide
ugauuccucuuuuagugac

SEQ ID NO: 2210970 - RNA, 19 nt, Artificial Sequence
  Description of Artificial Sequence: Synthetic oligonucleotide
uccucuuuuagugacgugu

SEQ ID NO: 2210971 - RNA, 19 nt, Artificial Sequence
  Description of Artificial Sequence: Synthetic oligonucleotide
aauauucuaaguguccauu

SEQ ID NO: 2210972 - RNA, 19 nt, Artificial Sequence
  Description of Artificial Sequence: Synthetic oligonucleotide
uuuagugacgugugaggug

SEQ ID NO: 2210973 - RNA, 19 nt, Artificial Sequence
  Description of Artificial Sequence: Synthetic oligonucleotide
uaacgaaccauuggaagug

SEQ ID NO: 2210974 - RNA, 19 nt, Artificial Sequence
  Description of Artificial Sequence: Synthetic oligonucleotide
aaagaguugcucccuguaa

SEQ ID NO: 2210975 - RNA, 19 nt, Artificial Sequence
  Description of Artificial Sequence: Synthetic oligonucleotide
uaaagagcacacgaaagaa

SEQ ID NO: 2210976 - RNA, 19 nt, Artificial Sequence
  Description of Artificial Sequence: Synthetic oligonucleotide
uccuaaucuggaauauucu

SEQ ID NO: 2210977 - RNA, 19 nt, Artificial Sequence
  Description of Artificial Sequence: Synthetic oligonucleotide
uagaauaugccugcauuug

SEQ ID NO: 2210978 - RNA, 19 nt, Artificial Sequence
  Description of Artificial Sequence: Synthetic oligonucleotide
uuaagguuccaaauaucua

SEQ ID NO: 2210979 - RNA, 19 nt, Artificial Sequence
  Description of Artificial Sequence: Synthetic oligonucleotide
auagaauaugccugcauuu

SEQ ID NO: 2210980 - RNA, 19 nt, Artificial Sequence
  Description of Artificial Sequence: Synthetic oligonucleotide
agcacacgaaagaacaugg

SEQ ID NO: 2210981 - RNA, 19 nt, Artificial Sequence
  Description of Artificial Sequence: Synthetic oligonucleotide
aacaccauaguugaauauu

SEQ ID NO: 2210982 - RNA, 19 nt, Artificial Sequence
  Description of Artificial Sequence: Synthetic oligonucleotide
cuguaagcaagcaugucuc

SEQ ID NO: 2210983 - RNA, 19 nt, Artificial Sequence
  Description of Artificial Sequence: Synthetic oligonucleotide
uccgagauggacaccucag

SEQ ID NO: 2210984 - RNA, 19 nt, Artificial Sequence
  Description of Artificial Sequence: Synthetic oligonucleotide
aaacaccauaguugaauau

SEQ ID NO: 2210985 - RNA, 19 nt, Artificial Sequence
  Description of Artificial Sequence: Synthetic oligonucleotide
agggguguucccuugagga

SEQ ID NO: 2210986 - RNA, 19 nt, Artificial Sequence
  Description of Artificial Sequence: Synthetic oligonucleotide
uguuuccaggcaaaaucca

SEQ ID NO: 2210987 - RNA, 19 nt, Artificial Sequence
  Description of Artificial Sequence: Synthetic oligonucleotide
ugcaauccuguuuccaggc

SEQ ID NO: 2210988 - RNA, 19 nt, Artificial Sequence
  Description of Artificial Sequence: Synthetic oligonucleotide
augacagaaccgcugauaa

SEQ ID NO: 2210989 - RNA, 19 nt, Artificial Sequence
  Description of Artificial Sequence: Synthetic oligonucleotide
uugcucaggcugaauggcg

SEQ ID NO: 2210990 - RNA, 19 nt, Artificial Sequence
  Description of Artificial Sequence: Synthetic oligonucleotide
ugcauuugcaauccuguuu

SEQ ID NO: 2210991 - RNA, 19 nt, Artificial Sequence
  Description of Artificial Sequence: Synthetic oligonucleotide
ugauaaaaccuggaguuau

SEQ ID NO: 2210992 - RNA, 19 nt, Artificial Sequence
  Description of Artificial Sequence: Synthetic oligonucleotide
uugaacugauuucuagaaa

SEQ ID NO: 2210993 - RNA, 19 nt, Artificial Sequence
  Description of Artificial Sequence: Synthetic oligonucleotide
ucagguccuaaucuggaau

SEQ ID NO: 2210994 - RNA, 19 nt, Artificial Sequence
  Description of Artificial Sequence: Synthetic oligonucleotide
cuuugaacugauuucuaga

SEQ ID NO: 2210995 - RNA, 19 nt, Artificial Sequence
  Description of Artificial Sequence: Synthetic oligonucleotide
ggcauuuaacaucccaagg

SEQ ID NO: 2210996 - RNA, 19 nt, Artificial Sequence
  Description of Artificial Sequence: Synthetic oligonucleotide
uguucccuugaggaggugg

SEQ ID NO: 2210997 - RNA, 19 nt, Artificial Sequence
  Description of Artificial Sequence: Synthetic oligonucleotide
uuucuaugacagaaccgcu

SEQ ID NO: 2210998 - RNA, 19 nt, Artificial Sequence
  Description of Artificial Sequence: Synthetic oligonucleotide
uguaagcaagcaugucucc

SEQ ID NO: 2210999 - RNA, 19 nt, Artificial Sequence
  Description of Artificial Sequence: Synthetic oligonucleotide
agcagagaucuauagaaua

SEQ ID NO: 2211000 - RNA, 19 nt, Artificial Sequence
  Description of Artificial Sequence: Synthetic oligonucleotide
auggauugcaagcccagcu

SEQ ID NO: 2211001 - RNA, 19 nt, Artificial Sequence
  Description of Artificial Sequence: Synthetic oligonucleotide
auccauuguauuuaagauu

SEQ ID NO: 2211002 - RNA, 19 nt, Artificial Sequence
  Description of Artificial Sequence: Synthetic oligonucleotide
gacagggaaauucgagcag

SEQ ID NO: 2211003 - RNA, 19 nt, Artificial Sequence
  Description of Artificial Sequence: Synthetic oligonucleotide
acgugugagguguucuugg

SEQ ID NO: 2211004 - RNA, 19 nt, Artificial Sequence
  Description of Artificial Sequence: Synthetic oligonucleotide
uccauagcuuuaagguucc

SEQ ID NO: 2211005 - RNA, 19 nt, Artificial Sequence
  Description of Artificial Sequence: Synthetic oligonucleotide
ggaguuauuaaggacaaca

SEQ ID NO: 2211006 - RNA, 19 nt, Artificial Sequence
  Description of Artificial Sequence: Synthetic oligonucleotide
auugcaagcccagcucugc

SEQ ID NO: 2211007 - RNA, 19 nt, Artificial Sequence
  Description of Artificial Sequence: Synthetic oligonucleotide
caucuuuauaucugauaug

SEQ ID NO: 2211008 - RNA, 19 nt, Artificial Sequence
  Description of Artificial Sequence: Synthetic oligonucleotide
ccaaauaucuaaacaaguc

SEQ ID NO: 2211009 - RNA, 19 nt, Artificial Sequence
  Description of Artificial Sequence: Synthetic oligonucleotide
agauacuccuccguuguuc

SEQ ID NO: 2211010 - RNA, 19 nt, Artificial Sequence
  Description of Artificial Sequence: Synthetic oligonucleotide
uccacacuuaaagagcaca

SEQ ID NO: 2211011 - RNA, 19 nt, Artificial Sequence
  Description of Artificial Sequence: Synthetic oligonucleotide
acagaaccgcugauaaugc

SEQ ID NO: 2211012 - RNA, 19 nt, Artificial Sequence
  Description of Artificial Sequence: Synthetic oligonucleotide
aagggaugcugcaaccgac

SEQ ID NO: 2211013 - RNA, 19 nt, Artificial Sequence
  Description of Artificial Sequence: Synthetic oligonucleotide
acugauuucuagaaagagu

SEQ ID NO: 2211014 - RNA, 19 nt, Artificial Sequence
  Description of Artificial Sequence: Synthetic oligonucleotide
agcuuuaagguuccaaaua

SEQ ID NO: 2211015 - RNA, 19 nt, Artificial Sequence
  Description of Artificial Sequence: Synthetic oligonucleotide
uucuugguguacucugcag

SEQ ID NO: 2211016 - RNA, 19 nt, Artificial Sequence
  Description of Artificial Sequence: Synthetic oligonucleotide
cuggaauauucuaccacug

SEQ ID NO: 2211017 - RNA, 19 nt, Artificial Sequence
  Description of Artificial Sequence: Synthetic oligonucleotide
auauucuaaguguccauuu

SEQ ID NO: 2211018 - RNA, 19 nt, Artificial Sequence
  Description of Artificial Sequence: Synthetic oligonucleotide
guaagcagagaucuauaga

SEQ ID NO: 2211019 - RNA, 19 nt, Artificial Sequence
  Description of Artificial Sequence: Synthetic oligonucleotide
acucacucagagaagaaca

SEQ ID NO: 2211020 - RNA, 19 nt, Artificial Sequence
  Description of Artificial Sequence: Synthetic oligonucleotide
ggcacauuuggaaagacac

SEQ ID NO: 2211021 - RNA, 19 nt, Artificial Sequence
  Description of Artificial Sequence: Synthetic oligonucleotide
uuucuagaaagaguugcuc

SEQ ID NO: 2211022 - RNA, 19 nt, Artificial Sequence
  Description of Artificial Sequence: Synthetic oligonucleotide
gauuccucuuuuagugacg

SEQ ID NO: 2211023 - RNA, 19 nt, Artificial Sequence
  Description of Artificial Sequence: Synthetic oligonucleotide
cugauuucuagaaagaguu

SEQ ID NO: 2211024 - RNA, 19 nt, Artificial Sequence
  Description of Artificial Sequence: Synthetic oligonucleotide
uuuuacaaguaagcagaga

SEQ ID NO: 2211025 - RNA, 19 nt, Artificial Sequence
  Description of Artificial Sequence: Synthetic oligonucleotide
aggaugcugugaaugacac

SEQ ID NO: 2211026 - RNA, 19 nt, Artificial Sequence
  Description of Artificial Sequence: Synthetic oligonucleotide
caaguugucuuccaugcca

SEQ ID NO: 2211027 - RNA, 19 nt, Artificial Sequence
  Description of Artificial Sequence: Synthetic oligonucleotide
aauucaggaugcugugaau

SEQ ID NO: 2211028 - RNA, 19 nt, Artificial Sequence
  Description of Artificial Sequence: Synthetic oligonucleotide
aagauuucuccgaaucaga

SEQ ID NO: 2211029 - RNA, 19 nt, Artificial Sequence
  Description of Artificial Sequence: Synthetic oligonucleotide
uggauugcaagcccagcuc

SEQ ID NO: 2211030 - RNA, 19 nt, Artificial Sequence
  Description of Artificial Sequence: Synthetic oligonucleotide
caugggagucuucaggcac

SEQ ID NO: 2211031 - RNA, 19 nt, Artificial Sequence
  Description of Artificial Sequence: Synthetic oligonucleotide
uggauggacagcagcuuga

SEQ ID NO: 2211032 - RNA, 19 nt, Artificial Sequence
  Description of Artificial Sequence: Synthetic oligonucleotide
gagcacacgaaagaacaug

SEQ ID NO: 2211033 - RNA, 19 nt, Artificial Sequence
  Description of Artificial Sequence: Synthetic oligonucleotide
acaacaacauucaggggug

SEQ ID NO: 2211034 - RNA, 19 nt, Artificial Sequence
  Description of Artificial Sequence: Synthetic oligonucleotide
cgaauggcauuuaacaucc

SEQ ID NO: 2211035 - RNA, 19 nt, Artificial Sequence
  Description of Artificial Sequence: Synthetic oligonucleotide
guaacgaaccauuggaagu

SEQ ID NO: 2211036 - RNA, 19 nt, Artificial Sequence
  Description of Artificial Sequence: Synthetic oligonucleotide
uaagcaagcaugucuccua

SEQ ID NO: 2211037 - RNA, 19 nt, Artificial Sequence
  Description of Artificial Sequence: Synthetic oligonucleotide
uccaacaagugugauuccu

SEQ ID NO: 2211038 - RNA, 19 nt, Artificial Sequence
  Description of Artificial Sequence: Synthetic oligonucleotide
aauggcgaaugguuucgaa

SEQ ID NO: 2211039 - RNA, 19 nt, Artificial Sequence
  Description of Artificial Sequence: Synthetic oligonucleotide
cugaauggcgaaugguuuc

SEQ ID NO: 2211040 - RNA, 19 nt, Artificial Sequence
  Description of Artificial Sequence: Synthetic oligonucleotide
auauucuaccacugagcca

SEQ ID NO: 2211041 - RNA, 19 nt, Artificial Sequence
  Description of Artificial Sequence: Synthetic oligonucleotide
ugcugcaaccgacucacuc

SEQ ID NO: 2211042 - RNA, 19 nt, Artificial Sequence
  Description of Artificial Sequence: Synthetic oligonucleotide
auuuaagauuucuccgaau

SEQ ID NO: 2211043 - RNA, 19 nt, Artificial Sequence
  Description of Artificial Sequence: Synthetic oligonucleotide
uucugccucauguccaaca

SEQ ID NO: 2211044 - RNA, 19 nt, Artificial Sequence
  Description of Artificial Sequence: Synthetic oligonucleotide
gaaucagacuguuuucucu

SEQ ID NO: 2211045 - RNA, 19 nt, Artificial Sequence
  Description of Artificial Sequence: Synthetic oligonucleotide
uuccgagauggacaccuca

SEQ ID NO: 2211046 - RNA, 19 nt, Artificial Sequence
  Description of Artificial Sequence: Synthetic oligonucleotide
ucuauagaauaugccugca

SEQ ID NO: 2211047 - RNA, 19 nt, Artificial Sequence
  Description of Artificial Sequence: Synthetic oligonucleotide
ccaaugugauaaaaccugg

SEQ ID NO: 2211048 - RNA, 19 nt, Artificial Sequence
  Description of Artificial Sequence: Synthetic oligonucleotide
ugaaagcuauggauugcaa

SEQ ID NO: 2211049 - RNA, 19 nt, Artificial Sequence
  Description of Artificial Sequence: Synthetic oligonucleotide
guugcucccuguaagcaag

SEQ ID NO: 2211050 - RNA, 19 nt, Artificial Sequence
  Description of Artificial Sequence: Synthetic oligonucleotide
cagagaucuauagaauaug

SEQ ID NO: 2211051 - RNA, 19 nt, Artificial Sequence
  Description of Artificial Sequence: Synthetic oligonucleotide
agacacugaaagcuaugga

SEQ ID NO: 2211052 - RNA, 19 nt, Artificial Sequence
  Description of Artificial Sequence: Synthetic oligonucleotide
guccuaaucuggaauauuc

SEQ ID NO: 2211053 - RNA, 19 nt, Artificial Sequence
  Description of Artificial Sequence: Synthetic oligonucleotide
ucgagcaguccacaggcuc

SEQ ID NO: 2211054 - RNA, 19 nt, Artificial Sequence
  Description of Artificial Sequence: Synthetic oligonucleotide
gacucacucagagaagaac

SEQ ID NO: 2211055 - RNA, 19 nt, Artificial Sequence
  Description of Artificial Sequence: Synthetic oligonucleotide
ugaauucaggaugcuguga

SEQ ID NO: 2211056 - RNA, 19 nt, Artificial Sequence
  Description of Artificial Sequence: Synthetic oligonucleotide
caguuuuccgagauggaca

SEQ ID NO: 2211057 - RNA, 19 nt, Artificial Sequence
  Description of Artificial Sequence: Synthetic oligonucleotide
aacaagugugauuccucuu

SEQ ID NO: 2211058 - RNA, 19 nt, Artificial Sequence
  Description of Artificial Sequence: Synthetic oligonucleotide
ugccuguaacgaaccauug

SEQ ID NO: 2211059 - RNA, 19 nt, Artificial Sequence
  Description of Artificial Sequence: Synthetic oligonucleotide
acacuguucuucaaguugu

SEQ ID NO: 2211060 - RNA, 19 nt, Artificial Sequence
  Description of Artificial Sequence: Synthetic oligonucleotide
guuucgaauggcauuuaac

SEQ ID NO: 2211061 - RNA, 19 nt, Artificial Sequence
  Description of Artificial Sequence: Synthetic oligonucleotide
gcaaccgacucacucagag

SEQ ID NO: 2211062 - RNA, 19 nt, Artificial Sequence
  Description of Artificial Sequence: Synthetic oligonucleotide
auaugguuuuaacacuguu

SEQ ID NO: 2211063 - RNA, 19 nt, Artificial Sequence
  Description of Artificial Sequence: Synthetic oligonucleotide
gcugauaaugcaguuuucc

SEQ ID NO: 2211064 - RNA, 19 nt, Artificial Sequence
  Description of Artificial Sequence: Synthetic oligonucleotide
ucuuugcagagaagcauuu

SEQ ID NO: 2211065 - RNA, 19 nt, Artificial Sequence
  Description of Artificial Sequence: Synthetic oligonucleotide
ugucuccuacaucuuugca

SEQ ID NO: 2211066 - RNA, 19 nt, Artificial Sequence
  Description of Artificial Sequence: Synthetic oligonucleotide
auggcgaaugguuucgaau

SEQ ID NO: 2211067 - RNA, 19 nt, Artificial Sequence
  Description of Artificial Sequence: Synthetic oligonucleotide
aagguuccaaauaucuaaa

SEQ ID NO: 2211068 - RNA, 19 nt, Artificial Sequence
  Description of Artificial Sequence: Synthetic oligonucleotide
gggaaauucgagcagucca

SEQ ID NO: 2211069 - RNA, 19 nt, Artificial Sequence
  Description of Artificial Sequence: Synthetic oligonucleotide
uccgaaucagacuguuuuc

SEQ ID NO: 2211070 - RNA, 19 nt, Artificial Sequence
  Description of Artificial Sequence: Synthetic oligonucleotide
auaucugauaugguuuuaa

SEQ ID NO: 2211071 - RNA, 19 nt, Artificial Sequence
  Description of Artificial Sequence: Synthetic oligonucleotide
aacagacagggaaauucga

SEQ ID NO: 2211072 - RNA, 19 nt, Artificial Sequence
  Description of Artificial Sequence: Synthetic oligonucleotide
guugcucaggcugaauggc

SEQ ID NO: 2211073 - RNA, 19 nt, Artificial Sequence
  Description of Artificial Sequence: Synthetic oligonucleotide
uauggauugcaagcccagc

SEQ ID NO: 2211074 - RNA, 19 nt, Artificial Sequence
  Description of Artificial Sequence: Synthetic oligonucleotide
cugcaaccgacucacucag

SEQ ID NO: 2211075 - RNA, 19 nt, Artificial Sequence
  Description of Artificial Sequence: Synthetic oligonucleotide
auaugccugcauuugcaau

SEQ ID NO: 2211076 - RNA, 19 nt, Artificial Sequence
  Description of Artificial Sequence: Synthetic oligonucleotide
gaaccauuggaagugaaau

SEQ ID NO: 2211077 - RNA, 19 nt, Artificial Sequence
  Description of Artificial Sequence: Synthetic oligonucleotide
acagggaaauucgagcagu

SEQ ID NO: 2211078 - RNA, 19 nt, Artificial Sequence
  Description of Artificial Sequence: Synthetic oligonucleotide
agguguucuugguguacuc

SEQ ID NO: 2211079 - RNA, 19 nt, Artificial Sequence
  Description of Artificial Sequence: Synthetic oligonucleotide
cuggauggacagcagcuug

SEQ ID NO: 2211080 - RNA, 19 nt, Artificial Sequence
  Description of Artificial Sequence: Synthetic oligonucleotide
aguucuuccauagcuuuaa

SEQ ID NO: 2211081 - RNA, 19 nt, Artificial Sequence
  Description of Artificial Sequence: Synthetic oligonucleotide
ucaggcacauuuggaaaga

SEQ ID NO: 2211082 - RNA, 19 nt, Artificial Sequence
  Description of Artificial Sequence: Synthetic oligonucleotide
cauuugcaauccuguuucc

SEQ ID NO: 2211083 - RNA, 19 nt, Artificial Sequence
  Description of Artificial Sequence: Synthetic oligonucleotide
aagugugauuccucuuuua

SEQ ID NO: 2211084 - RNA, 19 nt, Artificial Sequence
  Description of Artificial Sequence: Synthetic oligonucleotide
cuaaacaagucaggaaaca

SEQ ID NO: 2211085 - RNA, 19 nt, Artificial Sequence
  Description of Artificial Sequence: Synthetic oligonucleotide
gauuucuccgaaucagacu

SEQ ID NO: 2211086 - RNA, 19 nt, Artificial Sequence
  Description of Artificial Sequence: Synthetic oligonucleotide
uccaggcaaaauccauugu

SEQ ID NO: 2211087 - RNA, 19 nt, Artificial Sequence
  Description of Artificial Sequence: Synthetic oligonucleotide
guugucuuccaugccaaac

SEQ ID NO: 2211088 - RNA, 19 nt, Artificial Sequence
  Description of Artificial Sequence: Synthetic oligonucleotide
gacacaggguguucucaug

SEQ ID NO: 2211089 - RNA, 19 nt, Artificial Sequence
  Description of Artificial Sequence: Synthetic oligonucleotide
ugcaguuuuccgagaugga

SEQ ID NO: 2211090 - RNA, 19 nt, Artificial Sequence
  Description of Artificial Sequence: Synthetic oligonucleotide
caaugugauaaaaccugga

SEQ ID NO: 2211091 - RNA, 19 nt, Artificial Sequence
  Description of Artificial Sequence: Synthetic oligonucleotide
auuuaacaucccaagggau

SEQ ID NO: 2211092 - RNA, 19 nt, Artificial Sequence
  Description of Artificial Sequence: Synthetic oligonucleotide
auuugcaauccuguuucca

SEQ ID NO: 2211093 - RNA, 19 nt, Artificial Sequence
  Description of Artificial Sequence: Synthetic oligonucleotide
aguugcucccuguaagcaa

SEQ ID NO: 2211094 - RNA, 19 nt, Artificial Sequence
  Description of Artificial Sequence: Synthetic oligonucleotide
agacuguuuucucuuugaa

SEQ ID NO: 2211095 - RNA, 19 nt, Artificial Sequence
  Description of Artificial Sequence: Synthetic oligonucleotide
agcauuuccuggauggaca

SEQ ID NO: 2211096 - RNA, 19 nt, Artificial Sequence
  Description of Artificial Sequence: Synthetic oligonucleotide
aguguccauuuaucuccac

SEQ ID NO: 2211097 - RNA, 19 nt, Artificial Sequence
  Description of Artificial Sequence: Synthetic oligonucleotide
uccuacaucuuugcagaga

SEQ ID NO: 2211098 - RNA, 19 nt, Artificial Sequence
  Description of Artificial Sequence: Synthetic oligonucleotide
caggcugaauggcgaaugg

SEQ ID NO: 2211099 - RNA, 19 nt, Artificial Sequence
  Description of Artificial Sequence: Synthetic oligonucleotide
ugaggagguggaauauuuu

SEQ ID NO: 2211100 - RNA, 19 nt, Artificial Sequence
  Description of Artificial Sequence: Synthetic oligonucleotide
ugcgucuuacuuccugaaa

SEQ ID NO: 2211101 - RNA, 19 nt, Artificial Sequence
  Description of Artificial Sequence: Synthetic oligonucleotide
aacgaaccauuggaaguga

SEQ ID NO: 2211102 - RNA, 19 nt, Artificial Sequence
  Description of Artificial Sequence: Synthetic oligonucleotide
ucugccuguaacgaaccau

SEQ ID NO: 2211103 - RNA, 19 nt, Artificial Sequence
  Description of Artificial Sequence: Synthetic oligonucleotide
uuucuccgaaucagacugu

SEQ ID NO: 2211104 - RNA, 19 nt, Artificial Sequence
  Description of Artificial Sequence: Synthetic oligonucleotide
gccuguaacgaaccauugg

SEQ ID NO: 2211105 - RNA, 19 nt, Artificial Sequence
  Description of Artificial Sequence: Synthetic oligonucleotide
aagcagagaucuauagaau

SEQ ID NO: 2211106 - RNA, 19 nt, Artificial Sequence
  Description of Artificial Sequence: Synthetic oligonucleotide
augguuucgaauggcauuu

SEQ ID NO: 2211107 - RNA, 19 nt, Artificial Sequence
  Description of Artificial Sequence: Synthetic oligonucleotide
gaaauucgagcaguccaca

SEQ ID NO: 2211108 - RNA, 19 nt, Artificial Sequence
  Description of Artificial Sequence: Synthetic oligonucleotide
uagcagauacuccuccguu

SEQ ID NO: 2211109 - RNA, 19 nt, Artificial Sequence
  Description of Artificial Sequence: Synthetic oligonucleotide
ggguguucccuugaggagg

SEQ ID NO: 2211110 - RNA, 19 nt, Artificial Sequence
  Description of Artificial Sequence: Synthetic oligonucleotide
cuucaggcacauuuggaaa

SEQ ID NO: 2211111 - RNA, 19 nt, Artificial Sequence
  Description of Artificial Sequence: Synthetic oligonucleotide
ccuguaacgaaccauugga

SEQ ID NO: 2211112 - RNA, 19 nt, Artificial Sequence
  Description of Artificial Sequence: Synthetic oligonucleotide
gacgugugagguguucuug

SEQ ID NO: 2211113 - RNA, 19 nt, Artificial Sequence
  Description of Artificial Sequence: Synthetic oligonucleotide
uugguguacucugcaguug

SEQ ID NO: 2211114 - RNA, 19 nt, Artificial Sequence
  Description of Artificial Sequence: Synthetic oligonucleotide
cuggaguuauuaaggacaa

SEQ ID NO: 2211115 - RNA, 19 nt, Artificial Sequence
  Description of Artificial Sequence: Synthetic oligonucleotide
auuuggaaagacacugaaa

SEQ ID NO: 2211116 - RNA, 19 nt, Artificial Sequence
  Description of Artificial Sequence: Synthetic oligonucleotide
cuacaucuuugcagagaag

SEQ ID NO: 2211117 - RNA, 19 nt, Artificial Sequence
  Description of Artificial Sequence: Synthetic oligonucleotide
gauugcaagcccagcucug

SEQ ID NO: 2211118 - RNA, 19 nt, Artificial Sequence
  Description of Artificial Sequence: Synthetic oligonucleotide
agugacgugugagguguuc

SEQ ID NO: 2211119 - RNA, 19 nt, Artificial Sequence
  Description of Artificial Sequence: Synthetic oligonucleotide
auguccaacaagugugauu

SEQ ID NO: 2211120 - RNA, 19 nt, Artificial Sequence
  Description of Artificial Sequence: Synthetic oligonucleotide
gaauauucuaaguguccau

SEQ ID NO: 2211121 - RNA, 19 nt, Artificial Sequence
  Description of Artificial Sequence: Synthetic oligonucleotide
guucuugguguacucugca

SEQ ID NO: 2211122 - RNA, 19 nt, Artificial Sequence
  Description of Artificial Sequence: Synthetic oligonucleotide
ggaaauucgagcaguccac

SEQ ID NO: 2211123 - RNA, 19 nt, Artificial Sequence
  Description of Artificial Sequence: Synthetic oligonucleotide
acauucagggguguucccu

SEQ ID NO: 2211124 - RNA, 19 nt, Artificial Sequence
  Description of Artificial Sequence: Synthetic oligonucleotide
caagcaugucuccuacauc

SEQ ID NO: 2211125 - RNA, 19 nt, Artificial Sequence
  Description of Artificial Sequence: Synthetic oligonucleotide
cuguaacgaaccauuggaa

SEQ ID NO: 2211126 - RNA, 19 nt, Artificial Sequence
  Description of Artificial Sequence: Synthetic oligonucleotide
cugaaagcuauggauugca

SEQ ID NO: 2211127 - RNA, 19 nt, Artificial Sequence
  Description of Artificial Sequence: Synthetic oligonucleotide
aagugaaauguagcagaua

SEQ ID NO: 2211128 - RNA, 19 nt, Artificial Sequence
  Description of Artificial Sequence: Synthetic oligonucleotide
ggacaacaacauucagggg

SEQ ID NO: 2211129 - RNA, 19 nt, Artificial Sequence
  Description of Artificial Sequence: Synthetic oligonucleotide
aaccgcugauaaugcaguu

SEQ ID NO: 2211130 - RNA, 19 nt, Artificial Sequence
  Description of Artificial Sequence: Synthetic oligonucleotide
ugacagaaccgcugauaau

SEQ ID NO: 2211131 - RNA, 19 nt, Artificial Sequence
  Description of Artificial Sequence: Synthetic oligonucleotide
aucuuugcagagaagcauu

SEQ ID NO: 2211132 - RNA, 19 nt, Artificial Sequence
  Description of Artificial Sequence: Synthetic oligonucleotide
gcuuuaagguuccaaauau

SEQ ID NO: 2211133 - RNA, 19 nt, Artificial Sequence
  Description of Artificial Sequence: Synthetic oligonucleotide
ugaaugacacaggguguuc

SEQ ID NO: 2211134 - RNA, 19 nt, Artificial Sequence
  Description of Artificial Sequence: Synthetic oligonucleotide
gaguugcucccuguaagca

SEQ ID NO: 2211135 - RNA, 19 nt, Artificial Sequence
  Description of Artificial Sequence: Synthetic oligonucleotide
aacaacauucagggguguu

SEQ ID NO: 2211136 - RNA, 19 nt, Artificial Sequence
  Description of Artificial Sequence: Synthetic oligonucleotide
uacuccuccguuguuccaa

SEQ ID NO: 2211137 - RNA, 19 nt, Artificial Sequence
  Description of Artificial Sequence: Synthetic oligonucleotide
uucgagcaguccacaggcu

SEQ ID NO: 2211138 - RNA, 19 nt, Artificial Sequence
  Description of Artificial Sequence: Synthetic oligonucleotide
gcugcaaccgacucacuca

SEQ ID NO: 2211139 - RNA, 19 nt, Artificial Sequence
  Description of Artificial Sequence: Synthetic oligonucleotide
caauccuguuuccaggcaa

SEQ ID NO: 2211140 - RNA, 19 nt, Artificial Sequence
  Description of Artificial Sequence: Synthetic oligonucleotide
guacucugcaguugcucca

SEQ ID NO: 2211141 - RNA, 19 nt, Artificial Sequence
  Description of Artificial Sequence: Synthetic oligonucleotide
caagggaugcugcaaccga

SEQ ID NO: 2211142 - RNA, 19 nt, Artificial Sequence
  Description of Artificial Sequence: Synthetic oligonucleotide
gcgucuuacuuccugaaaa

SEQ ID NO: 2211143 - RNA, 19 nt, Artificial Sequence
  Description of Artificial Sequence: Synthetic oligonucleotide
augacacaggguguucuca

SEQ ID NO: 2211144 - RNA, 19 nt, Artificial Sequence
  Description of Artificial Sequence: Synthetic oligonucleotide
cuuugcagagaagcauuuc

SEQ ID NO: 2211145 - RNA, 19 nt, Artificial Sequence
  Description of Artificial Sequence: Synthetic oligonucleotide
cuccuacaucuuugcagag

SEQ ID NO: 2211146 - RNA, 19 nt, Artificial Sequence
  Description of Artificial Sequence: Synthetic oligonucleotide
gaagcauuuccuggaugga

SEQ ID NO: 2211147 - RNA, 19 nt, Artificial Sequence
  Description of Artificial Sequence: Synthetic oligonucleotide
uuccucuuuuagugacgug

SEQ ID NO: 2211148 - RNA, 19 nt, Artificial Sequence
  Description of Artificial Sequence: Synthetic oligonucleotide
aggcucagcugcgucuuac

SEQ ID NO: 2211149 - RNA, 19 nt, Artificial Sequence
  Description of Artificial Sequence: Synthetic oligonucleotide
gaaagacacugaaagcuau

SEQ ID NO: 2211150 - RNA, 19 nt, Artificial Sequence
  Description of Artificial Sequence: Synthetic oligonucleotide
gugugauuccucuuuuagu

SEQ ID NO: 2211151 - RNA, 19 nt, Artificial Sequence
  Description of Artificial Sequence: Synthetic oligonucleotide
ugacgugugagguguucuu

SEQ ID NO: 2211152 - RNA, 19 nt, Artificial Sequence
  Description of Artificial Sequence: Synthetic oligonucleotide
uguucucaugggagucuuc

SEQ ID NO: 2211153 - RNA, 19 nt, Artificial Sequence
  Description of Artificial Sequence: Synthetic oligonucleotide
ccucuuuuagugacgugug

SEQ ID NO: 2211154 - RNA, 19 nt, Artificial Sequence
  Description of Artificial Sequence: Synthetic oligonucleotide
cauagcuuuaagguuccaa

SEQ ID NO: 2211155 - RNA, 19 nt, Artificial Sequence
  Description of Artificial Sequence: Synthetic oligonucleotide
caacaagugugauuccucu

SEQ ID NO: 2211156 - RNA, 19 nt, Artificial Sequence
  Description of Artificial Sequence: Synthetic oligonucleotide
uuuccgagauggacaccuc

SEQ ID NO: 2211157 - RNA, 19 nt, Artificial Sequence
  Description of Artificial Sequence: Synthetic oligonucleotide
uccuguuuccaggcaaaau

SEQ ID NO: 2211158 - RNA, 19 nt, Artificial Sequence
  Description of Artificial Sequence: Synthetic oligonucleotide
caaguaagcagagaucuau

SEQ ID NO: 2211159 - RNA, 19 nt, Artificial Sequence
  Description of Artificial Sequence: Synthetic oligonucleotide
gaaugacacaggguguucu

SEQ ID NO: 2211160 - RNA, 19 nt, Artificial Sequence
  Description of Artificial Sequence: Synthetic oligonucleotide
ucuccgaaucagacuguuu

SEQ ID NO: 2211161 - RNA, 19 nt, Artificial Sequence
  Description of Artificial Sequence: Synthetic oligonucleotide
cagguccuaaucuggaaua

SEQ ID NO: 2211162 - RNA, 19 nt, Artificial Sequence
  Description of Artificial Sequence: Synthetic oligonucleotide
cucuuuuagugacguguga

SEQ ID NO: 2211163 - RNA, 19 nt, Artificial Sequence
  Description of Artificial Sequence: Synthetic oligonucleotide
ccuacaucuuugcagagaa

SEQ ID NO: 2211164 - RNA, 19 nt, Artificial Sequence
  Description of Artificial Sequence: Synthetic oligonucleotide
auuuaucuccacacuuaaa

SEQ ID NO: 2211165 - RNA, 19 nt, Artificial Sequence
  Description of Artificial Sequence: Synthetic oligonucleotide
agacuccaaagaacugaag

SEQ ID NO: 2211166 - RNA, 19 nt, Artificial Sequence
  Description of Artificial Sequence: Synthetic oligonucleotide
guagcagauacuccuccgu

SEQ ID NO: 2211167 - RNA, 19 nt, Artificial Sequence
  Description of Artificial Sequence: Synthetic oligonucleotide
caggggccgacacagcauc

SEQ ID NO: 2211168 - RNA, 19 nt, Artificial Sequence
  Description of Artificial Sequence: Synthetic oligonucleotide
gggguguucccuugaggag

SEQ ID NO: 2211169 - RNA, 19 nt, Artificial Sequence
  Description of Artificial Sequence: Synthetic oligonucleotide
cguuguuccaaugugauaa

SEQ ID NO: 2211170 - RNA, 19 nt, Artificial Sequence
  Description of Artificial Sequence: Synthetic oligonucleotide
ccaacaagugugauuccuc

SEQ ID NO: 2211171 - RNA, 19 nt, Artificial Sequence
  Description of Artificial Sequence: Synthetic oligonucleotide
cacuguucuucaaguuguc

SEQ ID NO: 2211172 - RNA, 19 nt, Artificial Sequence
  Description of Artificial Sequence: Synthetic oligonucleotide
gaaccgcugauaaugcagu

SEQ ID NO: 2211173 - RNA, 19 nt, Artificial Sequence
  Description of Artificial Sequence: Synthetic oligonucleotide
cuccgaaucagacuguuuu

SEQ ID NO: 2211174 - RNA, 19 nt, Artificial Sequence
  Description of Artificial Sequence: Synthetic oligonucleotide
cuuccauagcuuuaagguu

SEQ ID NO: 2211175 - RNA, 19 nt, Artificial Sequence
  Description of Artificial Sequence: Synthetic oligonucleotide
agagaagaacagacaggga

SEQ ID NO: 2211176 - RNA, 19 nt, Artificial Sequence
  Description of Artificial Sequence: Synthetic oligonucleotide
uggaguuauuaaggacaac

SEQ ID NO: 2211177 - RNA, 19 nt, Artificial Sequence
  Description of Artificial Sequence: Synthetic oligonucleotide
uucuccgaaucagacuguu

SEQ ID NO: 2211178 - RNA, 19 nt, Artificial Sequence
  Description of Artificial Sequence: Synthetic oligonucleotide
aguugucuuccaugccaaa

SEQ ID NO: 2211179 - RNA, 19 nt, Artificial Sequence
  Description of Artificial Sequence: Synthetic oligonucleotide
gcacacgaaagaacauggg

SEQ ID NO: 2211180 - RNA, 19 nt, Artificial Sequence
  Description of Artificial Sequence: Synthetic oligonucleotide
auacuccuccguuguucca

SEQ ID NO: 2211181 - RNA, 19 nt, Artificial Sequence
  Description of Artificial Sequence: Synthetic oligonucleotide
ccuaaucuggaauauucua

SEQ ID NO: 2211182 - RNA, 19 nt, Artificial Sequence
  Description of Artificial Sequence: Synthetic oligonucleotide
aggcugaauggcgaauggu

SEQ ID NO: 2211183 - RNA, 19 nt, Artificial Sequence
  Description of Artificial Sequence: Synthetic oligonucleotide
ugcucccuguaagcaagca

SEQ ID NO: 2211184 - RNA, 19 nt, Artificial Sequence
  Description of Artificial Sequence: Synthetic oligonucleotide
ccgagauggacaccucagg

SEQ ID NO: 2211185 - RNA, 19 nt, Artificial Sequence
  Description of Artificial Sequence: Synthetic oligonucleotide
agguccuaaucuggaauau

SEQ ID NO: 2211186 - RNA, 19 nt, Artificial Sequence
  Description of Artificial Sequence: Synthetic oligonucleotide
guaagcaagcaugucuccu

SEQ ID NO: 2211187 - RNA, 19 nt, Artificial Sequence
  Description of Artificial Sequence: Synthetic oligonucleotide
guguacucugcaguugcuc

SEQ ID NO: 2211188 - RNA, 19 nt, Artificial Sequence
  Description of Artificial Sequence: Synthetic oligonucleotide
cagaaccgcugauaaugca

SEQ ID NO: 2211189 - RNA, 19 nt, Artificial Sequence
  Description of Artificial Sequence: Synthetic oligonucleotide
agagcacacgaaagaacau

SEQ ID NO: 2211190 - RNA, 19 nt, Artificial Sequence
  Description of Artificial Sequence: Synthetic oligonucleotide
gugauaaaaccuggaguua

SEQ ID NO: 2211191 - RNA, 19 nt, Artificial Sequence
  Description of Artificial Sequence: Synthetic oligonucleotide
ccuguaagcaagcaugucu

SEQ ID NO: 2211192 - RNA, 19 nt, Artificial Sequence
  Description of Artificial Sequence: Synthetic oligonucleotide
gcuauggauugcaagccca

SEQ ID NO: 2211193 - RNA, 19 nt, Artificial Sequence
  Description of Artificial Sequence: Synthetic oligonucleotide
agggaugcugcaaccgacu

SEQ ID NO: 2211194 - RNA, 19 nt, Artificial Sequence
  Description of Artificial Sequence: Synthetic oligonucleotide
ggaaagacacugaaagcua

SEQ ID NO: 2211195 - RNA, 19 nt, Artificial Sequence
  Description of Artificial Sequence: Synthetic oligonucleotide
accgcugauaaugcaguuu

SEQ ID NO: 2211196 - RNA, 19 nt, Artificial Sequence
  Description of Artificial Sequence: Synthetic oligonucleotide
cuauagaauaugccugcau

SEQ ID NO: 2211197 - RNA, 19 nt, Artificial Sequence
  Description of Artificial Sequence: Synthetic oligonucleotide
cucagguccuaaucuggaa

SEQ ID NO: 2211198 - RNA, 19 nt, Artificial Sequence
  Description of Artificial Sequence: Synthetic oligonucleotide
accgacucacucagagaag

SEQ ID NO: 2211199 - RNA, 19 nt, Artificial Sequence
  Description of Artificial Sequence: Synthetic oligonucleotide
ccuccguuguuccaaugug

SEQ ID NO: 2211200 - RNA, 19 nt, Artificial Sequence
  Description of Artificial Sequence: Synthetic oligonucleotide
gguuucgaauggcauuuaa

SEQ ID NO: 2211201 - RNA, 19 nt, Artificial Sequence
  Description of Artificial Sequence: Synthetic oligonucleotide
aggggccgacacagcaucc

SEQ ID NO: 2211202 - RNA, 19 nt, Artificial Sequence
  Description of Artificial Sequence: Synthetic oligonucleotide
gcugcgucuuacuuccuga

SEQ ID NO: 2211203 - RNA, 19 nt, Artificial Sequence
  Description of Artificial Sequence: Synthetic oligonucleotide
gaauggcgaaugguuucga

SEQ ID NO: 2211204 - RNA, 19 nt, Artificial Sequence
  Description of Artificial Sequence: Synthetic oligonucleotide
agcaguccacaggcucagc

SEQ ID NO: 2211205 - RNA, 19 nt, Artificial Sequence
  Description of Artificial Sequence: Synthetic oligonucleotide
ggauugcaagcccagcucu

SEQ ID NO: 2211206 - RNA, 19 nt, Artificial Sequence
  Description of Artificial Sequence: Synthetic oligonucleotide
guccacaggcucagcugcg

SEQ ID NO: 2211207 - RNA, 19 nt, Artificial Sequence
  Description of Artificial Sequence: Synthetic oligonucleotide
cccaagggaugcugcaacc

SEQ ID NO: 2211208 - RNA, 19 nt, Artificial Sequence
  Description of Artificial Sequence: Synthetic oligonucleotide
acaaguaagcagagaucua

SEQ ID NO: 2211209 - RNA, 19 nt, Artificial Sequence
  Description of Artificial Sequence: Synthetic oligonucleotide
guuuuccgagauggacacc

SEQ ID NO: 2211210 - RNA, 19 nt, Artificial Sequence
  Description of Artificial Sequence: Synthetic oligonucleotide
gugaaauguagcagauacu

SEQ ID NO: 2211211 - RNA, 19 nt, Artificial Sequence
  Description of Artificial Sequence: Synthetic oligonucleotide
cugccuguaacgaaccauu

SEQ ID NO: 2211212 - RNA, 19 nt, Artificial Sequence
  Description of Artificial Sequence: Synthetic oligonucleotide
auucuaccacugagccagg

SEQ ID NO: 2211213 - RNA, 19 nt, Artificial Sequence
  Description of Artificial Sequence: Synthetic oligonucleotide
cugcgucuuacuuccugaa

SEQ ID NO: 2211214 - RNA, 19 nt, Artificial Sequence
  Description of Artificial Sequence: Synthetic oligonucleotide
gugaaugacacaggguguu

SEQ ID NO: 2211215 - RNA, 19 nt, Artificial Sequence
  Description of Artificial Sequence: Synthetic oligonucleotide
cgaaugguuucgaauggca

SEQ ID NO: 2211216 - RNA, 19 nt, Artificial Sequence
  Description of Artificial Sequence: Synthetic oligonucleotide
gcagagaucuauagaauau

SEQ ID NO: 2211217 - RNA, 19 nt, Artificial Sequence
  Description of Artificial Sequence: Synthetic oligonucleotide
ccauuguauuuaagauuuc

SEQ ID NO: 2211218 - RNA, 19 nt, Artificial Sequence
  Description of Artificial Sequence: Synthetic oligonucleotide
ugguuucgaauggcauuua

SEQ ID NO: 2211219 - RNA, 19 nt, Artificial Sequence
  Description of Artificial Sequence: Synthetic oligonucleotide
gggccgacacagcauccug

SEQ ID NO: 2211220 - RNA, 19 nt, Artificial Sequence
  Description of Artificial Sequence: Synthetic oligonucleotide
acgaaccauuggaagugaa

SEQ ID NO: 2211221 - RNA, 19 nt, Artificial Sequence
  Description of Artificial Sequence: Synthetic oligonucleotide
ccgacucacucagagaaga

SEQ ID NO: 2211222 - RNA, 19 nt, Artificial Sequence
  Description of Artificial Sequence: Synthetic oligonucleotide
ccaaacaccauaguugaau

SEQ ID NO: 2211223 - RNA, 19 nt, Artificial Sequence
  Description of Artificial Sequence: Synthetic oligonucleotide
cauucagggguguucccuu

SEQ ID NO: 2211224 - RNA, 19 nt, Artificial Sequence
  Description of Artificial Sequence: Synthetic oligonucleotide
gucaggaaacagacuccaa

SEQ ID NO: 2211225 - RNA, 19 nt, Artificial Sequence
  Description of Artificial Sequence: Synthetic oligonucleotide
cacugagccaggggccgac

SEQ ID NO: 2211226 - RNA, 19 nt, Artificial Sequence
  Description of Artificial Sequence: Synthetic oligonucleotide
cagcucugccuguaacgaa

SEQ ID NO: 2211227 - RNA, 19 nt, Artificial Sequence
  Description of Artificial Sequence: Synthetic oligonucleotide
ccauuggaagugaaaugua

SEQ ID NO: 2211228 - RNA, 19 nt, Artificial Sequence
  Description of Artificial Sequence: Synthetic oligonucleotide
cuaugacagaaccgcugau

SEQ ID NO: 2211229 - RNA, 19 nt, Artificial Sequence
  Description of Artificial Sequence: Synthetic oligonucleotide
cgagcaguccacaggcuca

SEQ ID NO: 2211230 - RNA, 19 nt, Artificial Sequence
  Description of Artificial Sequence: Synthetic oligonucleotide
cuugaggagguggaauauu

SEQ ID NO: 2211231 - RNA, 19 nt, Artificial Sequence
  Description of Artificial Sequence: Synthetic oligonucleotide
gcugaauggcgaaugguuu

SEQ ID NO: 2211232 - RNA, 19 nt, Artificial Sequence
  Description of Artificial Sequence: Synthetic oligonucleotide
ggccgacacagcauccuga

SEQ ID NO: 2211233 - RNA, 19 nt, Artificial Sequence
  Description of Artificial Sequence: Synthetic oligonucleotide
gcaugucuccuacaucuuu

SEQ ID NO: 2211234 - RNA, 19 nt, Artificial Sequence
  Description of Artificial Sequence: Synthetic oligonucleotide
ccgaaucagacuguuuucu

SEQ ID NO: 2211235 - RNA, 19 nt, Artificial Sequence
  Description of Artificial Sequence: Synthetic oligonucleotide
gcucccuguaagcaagcau

SEQ ID NO: 2211236 - RNA, 19 nt, Artificial Sequence
  Description of Artificial Sequence: Synthetic oligonucleotide
ccgcugauaaugcaguuuu

SEQ ID NO: 2211237 - RNA, 19 nt, Artificial Sequence
  Description of Artificial Sequence: Synthetic oligonucleotide
gguguucccuugaggaggu

SEQ ID NO: 2211238 - RNA, 19 nt, Artificial Sequence
  Description of Artificial Sequence: Synthetic oligonucleotide
cgcugauaaugcaguuuuc

SEQ ID NO: 2211239 - RNA, 19 nt, Artificial Sequence
  Description of Artificial Sequence: Synthetic oligonucleotide
cccuguaagcaagcauguc

SEQ ID NO: 2211240 - RNA, 19 nt, Artificial Sequence
  Description of Artificial Sequence: Synthetic oligonucleotide
guguucccuugaggaggug

SEQ ID NO: 2211241 - RNA, 19 nt, Artificial Sequence
  Description of Artificial Sequence: Synthetic oligonucleotide
caacaacauucaggggugu

SEQ ID NO: 2211242 - RNA, 19 nt, Artificial Sequence
  Description of Artificial Sequence: Synthetic oligonucleotide
gguccuaaucuggaauauu

SEQ ID NO: 2211243 - RNA, 19 nt, Artificial Sequence
  Description of Artificial Sequence: Synthetic oligonucleotide
cgucuuacuuccugaaaau

SEQ ID NO: 2211244 - RNA, 19 nt, Artificial Sequence
  Description of Artificial Sequence: Synthetic oligonucleotide
cucaggcugaauggcgaau

SEQ ID NO: 2211245 - RNA, 19 nt, Artificial Sequence
  Description of Artificial Sequence: Synthetic oligonucleotide
gguguacucugcaguugcu

SEQ ID NO: 2211246 - RNA, 19 nt, Artificial Sequence
  Description of Artificial Sequence: Synthetic oligonucleotide
augcugcaaccgacucacu

SEQ ID NO: 2211247 - RNA, 19 nt, Artificial Sequence
  Description of Artificial Sequence: Synthetic oligonucleotide
gcaguugcuccagguccca

SEQ ID NO: 2211248 - RNA, 19 nt, Artificial Sequence
  Description of Artificial Sequence: Synthetic oligonucleotide
ggacaccucagguccuaau

SEQ ID NO: 2211249 - RNA, 19 nt, Artificial Sequence
  Description of Artificial Sequence: Synthetic oligonucleotide
ccguuguuccaaugugaua

SEQ ID NO: 2211250 - RNA, 19 nt, Artificial Sequence
  Description of Artificial Sequence: Synthetic oligonucleotide
gccaaacaccauaguugaa

SEQ ID NO: 2211251 - RNA, 19 nt, Artificial Sequence
  Description of Artificial Sequence: Synthetic oligonucleotide
cagauacuccuccguuguu

SEQ ID NO: 2211252 - RNA, 19 nt, Artificial Sequence
  Description of Artificial Sequence: Synthetic oligonucleotide
cgacucacucagagaagaa

SEQ ID NO: 2211253 - RNA, 19 nt, Artificial Sequence
  Description of Artificial Sequence: Synthetic oligonucleotide
ggggccgacacagcauccu

SEQ ID NO: 2211254 - RNA, 19 nt, Artificial Sequence
  Description of Artificial Sequence: Synthetic oligonucleotide
ccaugccaaacaccauagu

SEQ ID NO: 2211255 - RNA, 19 nt, Artificial Sequence
  Description of Artificial Sequence: Synthetic oligonucleotide
ccaggggccgacacagcau

SEQ ID NO: 2211256 - RNA, 19 nt, Artificial Sequence
  Description of Artificial Sequence: Synthetic oligonucleotide
ccacugagccaggggccga

SEQ ID NO: 2211257 - RNA, 19 nt, Artificial Sequence
  Description of Artificial Sequence: Synthetic oligonucleotide
aaucgugcaccauagaagc

SEQ ID NO: 2211258 - RNA, 19 nt, Artificial Sequence
  Description of Artificial Sequence: Synthetic oligonucleotide
aaauaugucccaaauacac

SEQ ID NO: 2211259 - RNA, 19 nt, Artificial Sequence
  Description of Artificial Sequence: Synthetic oligonucleotide
gaugaucucuaccacaucg

SEQ ID NO: 2211260 - RNA, 19 nt, Artificial Sequence
  Description of Artificial Sequence: Synthetic oligonucleotide
auagaauuccuccagucgg

SEQ ID NO: 2211261 - RNA, 19 nt, Artificial Sequence
  Description of Artificial Sequence: Synthetic oligonucleotide
uaauuuguugugaugucgg

SEQ ID NO: 2211262 - RNA, 19 nt, Artificial Sequence
  Description of Artificial Sequence: Synthetic oligonucleotide
agguuaucuggauauaggc

SEQ ID NO: 2211263 - RNA, 19 nt, Artificial Sequence
  Description of Artificial Sequence: Synthetic oligonucleotide
ggaaauaugucccaaauac

SEQ ID NO: 2211264 - RNA, 19 nt, Artificial Sequence
  Description of Artificial Sequence: Synthetic oligonucleotide
uucacagugggucccaccg

SEQ ID NO: 2211265 - RNA, 19 nt, Artificial Sequence
  Description of Artificial Sequence: Synthetic oligonucleotide
uagguuaucuggauauagg

SEQ ID NO: 2211266 - RNA, 19 nt, Artificial Sequence
  Description of Artificial Sequence: Synthetic oligonucleotide
uggguuagaaucuuugaug

SEQ ID NO: 2211267 - RNA, 19 nt, Artificial Sequence
  Description of Artificial Sequence: Synthetic oligonucleotide
aauaugucccaaauacacg

SEQ ID NO: 2211268 - RNA, 19 nt, Artificial Sequence
  Description of Artificial Sequence: Synthetic oligonucleotide
aguucagccuuccggaagc

SEQ ID NO: 2211269 - RNA, 19 nt, Artificial Sequence
  Description of Artificial Sequence: Synthetic oligonucleotide
ucguaggugucaaaguggg

SEQ ID NO: 2211270 - RNA, 19 nt, Artificial Sequence
  Description of Artificial Sequence: Synthetic oligonucleotide
aaaucgugcaccauagaag

SEQ ID NO: 2211271 - RNA, 19 nt, Artificial Sequence
  Description of Artificial Sequence: Synthetic oligonucleotide
aauuccuccagucggugug

SEQ ID NO: 2211272 - RNA, 19 nt, Artificial Sequence
  Description of Artificial Sequence: Synthetic oligonucleotide
uucuaagggacccugguuc

SEQ ID NO: 2211273 - RNA, 19 nt, Artificial Sequence
  Description of Artificial Sequence: Synthetic oligonucleotide
uggcuuucaguccuguggg

SEQ ID NO: 2211274 - RNA, 19 nt, Artificial Sequence
  Description of Artificial Sequence: Synthetic oligonucleotide
accauagaagcccacucgg

SEQ ID NO: 2211275 - RNA, 19 nt, Artificial Sequence
  Description of Artificial Sequence: Synthetic oligonucleotide
ucagccuuccggaagcuag

SEQ ID NO: 2211276 - RNA, 19 nt, Artificial Sequence
  Description of Artificial Sequence: Synthetic oligonucleotide
aaccucuccguauagaauu

SEQ ID NO: 2211277 - RNA, 19 nt, Artificial Sequence
  Description of Artificial Sequence: Synthetic oligonucleotide
uguggguccagcuuggacu

SEQ ID NO: 2211278 - RNA, 19 nt, Artificial Sequence
  Description of Artificial Sequence: Synthetic oligonucleotide
uggucuggcccaaucaagg

SEQ ID NO: 2211279 - RNA, 19 nt, Artificial Sequence
  Description of Artificial Sequence: Synthetic oligonucleotide
cuccguauagaauuccucc

SEQ ID NO: 2211280 - RNA, 19 nt, Artificial Sequence
  Description of Artificial Sequence: Synthetic oligonucleotide
uggauauaggccuucugug

SEQ ID NO: 2211281 - RNA, 19 nt, Artificial Sequence
  Description of Artificial Sequence: Synthetic oligonucleotide
acauagguuaucuggauau

SEQ ID NO: 2211282 - RNA, 19 nt, Artificial Sequence
  Description of Artificial Sequence: Synthetic oligonucleotide
uccacauagguuaucugga

SEQ ID NO: 2211283 - RNA, 19 nt, Artificial Sequence
  Description of Artificial Sequence: Synthetic oligonucleotide
gaagcuagaucuguucagg

SEQ ID NO: 2211284 - RNA, 19 nt, Artificial Sequence
  Description of Artificial Sequence: Synthetic oligonucleotide
uguccacuggguuagaauc

SEQ ID NO: 2211285 - RNA, 19 nt, Artificial Sequence
  Description of Artificial Sequence: Synthetic oligonucleotide
auugaugguuccuuguaca

SEQ ID NO: 2211286 - RNA, 19 nt, Artificial Sequence
  Description of Artificial Sequence: Synthetic oligonucleotide
ugucggaagaguuugggau

SEQ ID NO: 2211287 - RNA, 19 nt, Artificial Sequence
  Description of Artificial Sequence: Synthetic oligonucleotide
guaggugucaaaguggggc

SEQ ID NO: 2211288 - RNA, 19 nt, Artificial Sequence
  Description of Artificial Sequence: Synthetic oligonucleotide
aaacucuuguucauccagg

SEQ ID NO: 2211289 - RNA, 19 nt, Artificial Sequence
  Description of Artificial Sequence: Synthetic oligonucleotide
cucguaggugucaaagugg

SEQ ID NO: 2211290 - RNA, 19 nt, Artificial Sequence
  Description of Artificial Sequence: Synthetic oligonucleotide
gaagcagagccguaauuug

SEQ ID NO: 2211291 - RNA, 19 nt, Artificial Sequence
  Description of Artificial Sequence: Synthetic oligonucleotide
accugggccacuucuaagg

SEQ ID NO: 2211292 - RNA, 19 nt, Artificial Sequence
  Description of Artificial Sequence: Synthetic oligonucleotide
guuaucuggauauaggccu

SEQ ID NO: 2211293 - RNA, 19 nt, Artificial Sequence
  Description of Artificial Sequence: Synthetic oligonucleotide
uguucagggaguuccugag

SEQ ID NO: 2211294 - RNA, 19 nt, Artificial Sequence
  Description of Artificial Sequence: Synthetic oligonucleotide
ugcagaaauccuugaagca

SEQ ID NO: 2211295 - RNA, 19 nt, Artificial Sequence
  Description of Artificial Sequence: Synthetic oligonucleotide
aauuuguugugaugucgga

SEQ ID NO: 2211296 - RNA, 19 nt, Artificial Sequence
  Description of Artificial Sequence: Synthetic oligonucleotide
ugugauugaugguuccuug

SEQ ID NO: 2211297 - RNA, 19 nt, Artificial Sequence
  Description of Artificial Sequence: Synthetic oligonucleotide
auagguuaucuggauauag

SEQ ID NO: 2211298 - RNA, 19 nt, Artificial Sequence
  Description of Artificial Sequence: Synthetic oligonucleotide
guaagcagaggcugcagag

SEQ ID NO: 2211299 - RNA, 19 nt, Artificial Sequence
  Description of Artificial Sequence: Synthetic oligonucleotide
gauugaugguuccuuguac

SEQ ID NO: 2211300 - RNA, 19 nt, Artificial Sequence
  Description of Artificial Sequence: Synthetic oligonucleotide
caaacucuuguucauccag

SEQ ID NO: 2211301 - RNA, 19 nt, Artificial Sequence
  Description of Artificial Sequence: Synthetic oligonucleotide
guuagaaucuuugaugauc

SEQ ID NO: 2211302 - RNA, 19 nt, Artificial Sequence
  Description of Artificial Sequence: Synthetic oligonucleotide
uugcggucgaaguagguca

SEQ ID NO: 2211303 - RNA, 19 nt, Artificial Sequence
  Description of Artificial Sequence: Synthetic oligonucleotide
ggauauaggccuucugugg

SEQ ID NO: 2211304 - RNA, 19 nt, Artificial Sequence
  Description of Artificial Sequence: Synthetic oligonucleotide
gaugucggaagaguuuggg

SEQ ID NO: 2211305 - RNA, 19 nt, Artificial Sequence
  Description of Artificial Sequence: Synthetic oligonucleotide
cuucuugcagaaauccuug

SEQ ID NO: 2211306 - RNA, 19 nt, Artificial Sequence
  Description of Artificial Sequence: Synthetic oligonucleotide
ugggccacuucuaagggac

SEQ ID NO: 2211307 - RNA, 19 nt, Artificial Sequence
  Description of Artificial Sequence: Synthetic oligonucleotide
uccguauagaauuccucca

SEQ ID NO: 2211308 - RNA, 19 nt, Artificial Sequence
  Description of Artificial Sequence: Synthetic oligonucleotide
agagccguaauuuguugug

SEQ ID NO: 2211309 - RNA, 19 nt, Artificial Sequence
  Description of Artificial Sequence: Synthetic oligonucleotide
guuugugcuguucuaccag

SEQ ID NO: 2211310 - RNA, 19 nt, Artificial Sequence
  Description of Artificial Sequence: Synthetic oligonucleotide
cuuggacuuguccacuggg

SEQ ID NO: 2211311 - RNA, 19 nt, Artificial Sequence
  Description of Artificial Sequence: Synthetic oligonucleotide
ucaacaccgucuccucacg

SEQ ID NO: 2211312 - RNA, 19 nt, Artificial Sequence
  Description of Artificial Sequence: Synthetic oligonucleotide
uguaguggcgcuccaguuc

SEQ ID NO: 2211313 - RNA, 19 nt, Artificial Sequence
  Description of Artificial Sequence: Synthetic oligonucleotide
uccaggucaccaaaucgug

SEQ ID NO: 2211314 - RNA, 19 nt, Artificial Sequence
  Description of Artificial Sequence: Synthetic oligonucleotide
guaguggcgcuccaguucc

SEQ ID NO: 2211315 - RNA, 19 nt, Artificial Sequence
  Description of Artificial Sequence: Synthetic oligonucleotide
ucgugcaccauagaagccc

SEQ ID NO: 2211316 - RNA, 19 nt, Artificial Sequence
  Description of Artificial Sequence: Synthetic oligonucleotide
ugauugaugguuccuugua

SEQ ID NO: 2211317 - RNA, 19 nt, Artificial Sequence
  Description of Artificial Sequence: Synthetic oligonucleotide
ugaagcagagccguaauuu

SEQ ID NO: 2211318 - RNA, 19 nt, Artificial Sequence
  Description of Artificial Sequence: Synthetic oligonucleotide
uugaugguuccuuguacac

SEQ ID NO: 2211319 - RNA, 19 nt, Artificial Sequence
  Description of Artificial Sequence: Synthetic oligonucleotide
ugaucucuaccacaucguc

SEQ ID NO: 2211320 - RNA, 19 nt, Artificial Sequence
  Description of Artificial Sequence: Synthetic oligonucleotide
ucaaaguggggcuccacau

SEQ ID NO: 2211321 - RNA, 19 nt, Artificial Sequence
  Description of Artificial Sequence: Synthetic oligonucleotide
gaugcgugucuugauguag

SEQ ID NO: 2211322 - RNA, 19 nt, Artificial Sequence
  Description of Artificial Sequence: Synthetic oligonucleotide
ucuggauauaggccuucug

SEQ ID NO: 2211323 - RNA, 19 nt, Artificial Sequence
  Description of Artificial Sequence: Synthetic oligonucleotide
uggaggguccugcucagug

SEQ ID NO: 2211324 - RNA, 19 nt, Artificial Sequence
  Description of Artificial Sequence: Synthetic oligonucleotide
uucuggucuggcccaauca

SEQ ID NO: 2211325 - RNA, 19 nt, Artificial Sequence
  Description of Artificial Sequence: Synthetic oligonucleotide
gucggugugagaucucugc

SEQ ID NO: 2211326 - RNA, 19 nt, Artificial Sequence
  Description of Artificial Sequence: Synthetic oligonucleotide
ggguuagaaucuuugauga

SEQ ID NO: 2211327 - RNA, 19 nt, Artificial Sequence
  Description of Artificial Sequence: Synthetic oligonucleotide
ucauccaggucaccaaauc

SEQ ID NO: 2211328 - RNA, 19 nt, Artificial Sequence
  Description of Artificial Sequence: Synthetic oligonucleotide
uugugcuguucuaccagcc

SEQ ID NO: 2211329 - RNA, 19 nt, Artificial Sequence
  Description of Artificial Sequence: Synthetic oligonucleotide
caaaucgugcaccauagaa

SEQ ID NO: 2211330 - RNA, 19 nt, Artificial Sequence
  Description of Artificial Sequence: Synthetic oligonucleotide
ucuccguauagaauuccuc

SEQ ID NO: 2211331 - RNA, 19 nt, Artificial Sequence
  Description of Artificial Sequence: Synthetic oligonucleotide
acuucuaagggacccuggu

SEQ ID NO: 2211332 - RNA, 19 nt, Artificial Sequence
  Description of Artificial Sequence: Synthetic oligonucleotide
gaguucagccuuccggaag

SEQ ID NO: 2211333 - RNA, 19 nt, Artificial Sequence
  Description of Artificial Sequence: Synthetic oligonucleotide
uacacaaacucuuguucau

SEQ ID NO: 2211334 - RNA, 19 nt, Artificial Sequence
  Description of Artificial Sequence: Synthetic oligonucleotide
ucguccccgaaccucuccg

SEQ ID NO: 2211335 - RNA, 19 nt, Artificial Sequence
  Description of Artificial Sequence: Synthetic oligonucleotide
ucggaagaguuugggaucc

SEQ ID NO: 2211336 - RNA, 19 nt, Artificial Sequence
  Description of Artificial Sequence: Synthetic oligonucleotide
uuggacuuguccacugggu

SEQ ID NO: 2211337 - RNA, 19 nt, Artificial Sequence
  Description of Artificial Sequence: Synthetic oligonucleotide
aauggccaccuccacuggu

SEQ ID NO: 2211338 - RNA, 19 nt, Artificial Sequence
  Description of Artificial Sequence: Synthetic oligonucleotide
gugaugucggaagaguuug

SEQ ID NO: 2211339 - RNA, 19 nt, Artificial Sequence
  Description of Artificial Sequence: Synthetic oligonucleotide
agcuagaucuguucaggga

SEQ ID NO: 2211340 - RNA, 19 nt, Artificial Sequence
  Description of Artificial Sequence: Synthetic oligonucleotide
cacuggguuagaaucuuug

SEQ ID NO: 2211341 - RNA, 19 nt, Artificial Sequence
  Description of Artificial Sequence: Synthetic oligonucleotide
uguucauccaggucaccaa

SEQ ID NO: 2211342 - RNA, 19 nt, Artificial Sequence
  Description of Artificial Sequence: Synthetic oligonucleotide
gagcucguaggugucaaag

SEQ ID NO: 2211343 - RNA, 19 nt, Artificial Sequence
  Description of Artificial Sequence: Synthetic oligonucleotide
gcagaaauccuugaagcag

SEQ ID NO: 2211344 - RNA, 19 nt, Artificial Sequence
  Description of Artificial Sequence: Synthetic oligonucleotide
uuugugauugaugguuccu

SEQ ID NO: 2211345 - RNA, 19 nt, Artificial Sequence
  Description of Artificial Sequence: Synthetic oligonucleotide
gaacggugugcagaagagg

SEQ ID NO: 2211346 - RNA, 19 nt, Artificial Sequence
  Description of Artificial Sequence: Synthetic oligonucleotide
ucuaccacaucguccccga

SEQ ID NO: 2211347 - RNA, 19 nt, Artificial Sequence
  Description of Artificial Sequence: Synthetic oligonucleotide
cagaaauccuugaagcaga

SEQ ID NO: 2211348 - RNA, 19 nt, Artificial Sequence
  Description of Artificial Sequence: Synthetic oligonucleotide
gguuaucuggauauaggcc

SEQ ID NO: 2211349 - RNA, 19 nt, Artificial Sequence
  Description of Artificial Sequence: Synthetic oligonucleotide
accgucuccucacgguggc

SEQ ID NO: 2211350 - RNA, 19 nt, Artificial Sequence
  Description of Artificial Sequence: Synthetic oligonucleotide
agcuuugugauugaugguu

SEQ ID NO: 2211351 - RNA, 19 nt, Artificial Sequence
  Description of Artificial Sequence: Synthetic oligonucleotide
ugucaacaccgucuccuca

SEQ ID NO: 2211352 - RNA, 19 nt, Artificial Sequence
  Description of Artificial Sequence: Synthetic oligonucleotide
ggaagcuagaucuguucag

SEQ ID NO: 2211353 - RNA, 19 nt, Artificial Sequence
  Description of Artificial Sequence: Synthetic oligonucleotide
uccagucggugugagaucu

SEQ ID NO: 2211354 - RNA, 19 nt, Artificial Sequence
  Description of Artificial Sequence: Synthetic oligonucleotide
ucugggaucucugccaaaa

SEQ ID NO: 2211355 - RNA, 19 nt, Artificial Sequence
  Description of Artificial Sequence: Synthetic oligonucleotide
ugaugguuccuuguacaca

SEQ ID NO: 2211356 - RNA, 19 nt, Artificial Sequence
  Description of Artificial Sequence: Synthetic oligonucleotide
gugaacggugugcagaaga

SEQ ID NO: 2211357 - RNA, 19 nt, Artificial Sequence
  Description of Artificial Sequence: Synthetic oligonucleotide
uuucucagugcauccucac

SEQ ID NO: 2211358 - RNA, 19 nt, Artificial Sequence
  Description of Artificial Sequence: Synthetic oligonucleotide
gucaacaccgucuccucac

SEQ ID NO: 2211359 - RNA, 19 nt, Artificial Sequence
  Description of Artificial Sequence: Synthetic oligonucleotide
uggacuuguccacuggguu

SEQ ID NO: 2211360 - RNA, 19 nt, Artificial Sequence
  Description of Artificial Sequence: Synthetic oligonucleotide
ucccgugucuucuucugca

SEQ ID NO: 2211361 - RNA, 19 nt, Artificial Sequence
  Description of Artificial Sequence: Synthetic oligonucleotide
cuuucaguccugugggguc

SEQ ID NO: 2211362 - RNA, 19 nt, Artificial Sequence
  Description of Artificial Sequence: Synthetic oligonucleotide
uuaucuggauauaggccuu

SEQ ID NO: 2211363 - RNA, 19 nt, Artificial Sequence
  Description of Artificial Sequence: Synthetic oligonucleotide
aucguccccgaaccucucc

SEQ ID NO: 2211364 - RNA, 19 nt, Artificial Sequence
  Description of Artificial Sequence: Synthetic oligonucleotide
uccgugcucagcagggucu

SEQ ID NO: 2211365 - RNA, 19 nt, Artificial Sequence
  Description of Artificial Sequence: Synthetic oligonucleotide
aagcagagccguaauuugu

SEQ ID NO: 2211366 - RNA, 19 nt, Artificial Sequence
  Description of Artificial Sequence: Synthetic oligonucleotide
auauaggccuucugugggu

SEQ ID NO: 2211367 - RNA, 19 nt, Artificial Sequence
  Description of Artificial Sequence: Synthetic oligonucleotide
gcucguaggugucaaagug

SEQ ID NO: 2211368 - RNA, 19 nt, Artificial Sequence
  Description of Artificial Sequence: Synthetic oligonucleotide
gaggcgacuguaguggcgc

SEQ ID NO: 2211369 - RNA, 19 nt, Artificial Sequence
  Description of Artificial Sequence: Synthetic oligonucleotide
caccgagcccugcagaacc

SEQ ID NO: 2211370 - RNA, 19 nt, Artificial Sequence
  Description of Artificial Sequence: Synthetic oligonucleotide
cuggucuggcccaaucaag

SEQ ID NO: 2211371 - RNA, 19 nt, Artificial Sequence
  Description of Artificial Sequence: Synthetic oligonucleotide
cccacucggaaauaugucc

SEQ ID NO: 2211372 - RNA, 19 nt, Artificial Sequence
  Description of Artificial Sequence: Synthetic oligonucleotide
cacagugggucccaccgag

SEQ ID NO: 2211373 - RNA, 19 nt, Artificial Sequence
  Description of Artificial Sequence: Synthetic oligonucleotide
auccaggucaccaaaucgu

SEQ ID NO: 2211374 - RNA, 19 nt, Artificial Sequence
  Description of Artificial Sequence: Synthetic oligonucleotide
cagugggucccaccgagcc

SEQ ID NO: 2211375 - RNA, 19 nt, Artificial Sequence
  Description of Artificial Sequence: Synthetic oligonucleotide
uugaagcagagccguaauu

SEQ ID NO: 2211376 - RNA, 19 nt, Artificial Sequence
  Description of Artificial Sequence: Synthetic oligonucleotide
acaccgucuccucacggug

SEQ ID NO: 2211377 - RNA, 19 nt, Artificial Sequence
  Description of Artificial Sequence: Synthetic oligonucleotide
uucccggugguauuccuuc

SEQ ID NO: 2211378 - RNA, 19 nt, Artificial Sequence
  Description of Artificial Sequence: Synthetic oligonucleotide
agcucguaggugucaaagu

SEQ ID NO: 2211379 - RNA, 19 nt, Artificial Sequence
  Description of Artificial Sequence: Synthetic oligonucleotide
ucagugcauccucacacuu

SEQ ID NO: 2211380 - RNA, 19 nt, Artificial Sequence
  Description of Artificial Sequence: Synthetic oligonucleotide
cacuucuaagggacccugg

SEQ ID NO: 2211381 - RNA, 19 nt, Artificial Sequence
  Description of Artificial Sequence: Synthetic oligonucleotide
auuuguugugaugucggaa

SEQ ID NO: 2211382 - RNA, 19 nt, Artificial Sequence
  Description of Artificial Sequence: Synthetic oligonucleotide
gucggaagaguuugggauc

SEQ ID NO: 2211383 - RNA, 19 nt, Artificial Sequence
  Description of Artificial Sequence: Synthetic oligonucleotide
uuucaguccugugggguca

SEQ ID NO: 2211384 - RNA, 19 nt, Artificial Sequence
  Description of Artificial Sequence: Synthetic oligonucleotide
uccugcucaguggcaaagg

SEQ ID NO: 2211385 - RNA, 19 nt, Artificial Sequence
  Description of Artificial Sequence: Synthetic oligonucleotide
cauagaagcccacucggaa

SEQ ID NO: 2211386 - RNA, 19 nt, Artificial Sequence
  Description of Artificial Sequence: Synthetic oligonucleotide
agaaauccuugaagcagag

SEQ ID NO: 2211387 - RNA, 19 nt, Artificial Sequence
  Description of Artificial Sequence: Synthetic oligonucleotide
uggcacacgcggaugcgug

SEQ ID NO: 2211388 - RNA, 19 nt, Artificial Sequence
  Description of Artificial Sequence: Synthetic oligonucleotide
ugcaccauagaagcccacu

SEQ ID NO: 2211389 - RNA, 19 nt, Artificial Sequence
  Description of Artificial Sequence: Synthetic oligonucleotide
gggacccugguucacagug

SEQ ID NO: 2211390 - RNA, 19 nt, Artificial Sequence
  Description of Artificial Sequence: Synthetic oligonucleotide
uuccuucuggucuggccca

SEQ ID NO: 2211391 - RNA, 19 nt, Artificial Sequence
  Description of Artificial Sequence: Synthetic oligonucleotide
aucgugcaccauagaagcc

SEQ ID NO: 2211392 - RNA, 19 nt, Artificial Sequence
  Description of Artificial Sequence: Synthetic oligonucleotide
ccacucggaaauauguccc

SEQ ID NO: 2211393 - RNA, 19 nt, Artificial Sequence
  Description of Artificial Sequence: Synthetic oligonucleotide
cuggugucaacaccgucuc

SEQ ID NO: 2211394 - RNA, 19 nt, Artificial Sequence
  Description of Artificial Sequence: Synthetic oligonucleotide
cucuaccacaucguccccg

SEQ ID NO: 2211395 - RNA, 19 nt, Artificial Sequence
  Description of Artificial Sequence: Synthetic oligonucleotide
agccguaauuuguugugau

SEQ ID NO: 2211396 - RNA, 19 nt, Artificial Sequence
  Description of Artificial Sequence: Synthetic oligonucleotide
uugugauugaugguuccuu

SEQ ID NO: 2211397 - RNA, 19 nt, Artificial Sequence
  Description of Artificial Sequence: Synthetic oligonucleotide
uaagggacccugguucaca

SEQ ID NO: 2211398 - RNA, 19 nt, Artificial Sequence
  Description of Artificial Sequence: Synthetic oligonucleotide
ugcggucgaaguaggucac

SEQ ID NO: 2211399 - RNA, 19 nt, Artificial Sequence
  Description of Artificial Sequence: Synthetic oligonucleotide
cuuccggaagcuagaucug

SEQ ID NO: 2211400 - RNA, 19 nt, Artificial Sequence
  Description of Artificial Sequence: Synthetic oligonucleotide
ggucgaaguaggucacccg

SEQ ID NO: 2211401 - RNA, 19 nt, Artificial Sequence
  Description of Artificial Sequence: Synthetic oligonucleotide
cauccucacacuucuugca

SEQ ID NO: 2211402 - RNA, 19 nt, Artificial Sequence
  Description of Artificial Sequence: Synthetic oligonucleotide
cugcagagccucccggagg

SEQ ID NO: 2211403 - RNA, 19 nt, Artificial Sequence
  Description of Artificial Sequence: Synthetic oligonucleotide
guugcggucgaaguagguc

SEQ ID NO: 2211404 - RNA, 19 nt, Artificial Sequence
  Description of Artificial Sequence: Synthetic oligonucleotide
aaggcccgcagcccguagu

SEQ ID NO: 2211405 - RNA, 19 nt, Artificial Sequence
  Description of Artificial Sequence: Synthetic oligonucleotide
ggaaaggcgugcuccgugc

SEQ ID NO: 2211406 - RNA, 19 nt, Artificial Sequence
  Description of Artificial Sequence: Synthetic oligonucleotide
augaucucuaccacaucgu

SEQ ID NO: 2211407 - RNA, 19 nt, Artificial Sequence
  Description of Artificial Sequence: Synthetic oligonucleotide
ugaggugugggugcugguc

SEQ ID NO: 2211408 - RNA, 19 nt, Artificial Sequence
  Description of Artificial Sequence: Synthetic oligonucleotide
aaguggggcuccacauagg

SEQ ID NO: 2211409 - RNA, 19 nt, Artificial Sequence
  Description of Artificial Sequence: Synthetic oligonucleotide
cagugcauccucacacuuc

SEQ ID NO: 2211410 - RNA, 19 nt, Artificial Sequence
  Description of Artificial Sequence: Synthetic oligonucleotide
uuccggaagcuagaucugu

SEQ ID NO: 2211411 - RNA, 19 nt, Artificial Sequence
  Description of Artificial Sequence: Synthetic oligonucleotide
uaggucacccgguccuuga

SEQ ID NO: 2211412 - RNA, 19 nt, Artificial Sequence
  Description of Artificial Sequence: Synthetic oligonucleotide
cuguucagggaguuccuga

SEQ ID NO: 2211413 - RNA, 19 nt, Artificial Sequence
  Description of Artificial Sequence: Synthetic oligonucleotide
ucucuaccacaucgucccc

SEQ ID NO: 2211414 - RNA, 19 nt, Artificial Sequence
  Description of Artificial Sequence: Synthetic oligonucleotide
cagcccguaguugcggucg

SEQ ID NO: 2211415 - RNA, 19 nt, Artificial Sequence
  Description of Artificial Sequence: Synthetic oligonucleotide
uggucuucugguguggcuu

SEQ ID NO: 2211416 - RNA, 19 nt, Artificial Sequence
  Description of Artificial Sequence: Synthetic oligonucleotide
accucuccguauagaauuc

SEQ ID NO: 2211417 - RNA, 19 nt, Artificial Sequence
  Description of Artificial Sequence: Synthetic oligonucleotide
ccguauagaauuccuccag

SEQ ID NO: 2211418 - RNA, 19 nt, Artificial Sequence
  Description of Artificial Sequence: Synthetic oligonucleotide
ucagcagggucuugcguuu

SEQ ID NO: 2211419 - RNA, 19 nt, Artificial Sequence
  Description of Artificial Sequence: Synthetic oligonucleotide
aagcccacucggaaauaug

SEQ ID NO: 2211420 - RNA, 19 nt, Artificial Sequence
  Description of Artificial Sequence: Synthetic oligonucleotide
uccggaagcuagaucuguu

SEQ ID NO: 2211421 - RNA, 19 nt, Artificial Sequence
  Description of Artificial Sequence: Synthetic oligonucleotide
ucacgguggcacacgcgga

SEQ ID NO: 2211422 - RNA, 19 nt, Artificial Sequence
  Description of Artificial Sequence: Synthetic oligonucleotide
ugugaacggugugcagaag

SEQ ID NO: 2211423 - RNA, 19 nt, Artificial Sequence
  Description of Artificial Sequence: Synthetic oligonucleotide
gugugaacggugugcagaa

SEQ ID NO: 2211424 - RNA, 19 nt, Artificial Sequence
  Description of Artificial Sequence: Synthetic oligonucleotide
gcuggguaagcagaggcug

SEQ ID NO: 2211425 - RNA, 19 nt, Artificial Sequence
  Description of Artificial Sequence: Synthetic oligonucleotide
ccaaucaaggccuuguucu

SEQ ID NO: 2211426 - RNA, 19 nt, Artificial Sequence
  Description of Artificial Sequence: Synthetic oligonucleotide
acaucguccccgaaccucu

SEQ ID NO: 2211427 - RNA, 19 nt, Artificial Sequence
  Description of Artificial Sequence: Synthetic oligonucleotide
acagugggucccaccgagc

SEQ ID NO: 2211428 - RNA, 19 nt, Artificial Sequence
  Description of Artificial Sequence: Synthetic oligonucleotide
ucccaccgagcccugcaga

SEQ ID NO: 2211429 - RNA, 19 nt, Artificial Sequence
  Description of Artificial Sequence: Synthetic oligonucleotide
gcuuggacuuguccacugg

SEQ ID NO: 2211430 - RNA, 19 nt, Artificial Sequence
  Description of Artificial Sequence: Synthetic oligonucleotide
ggugugaacggugugcaga

SEQ ID NO: 2211431 - RNA, 19 nt, Artificial Sequence
  Description of Artificial Sequence: Synthetic oligonucleotide
ccugguucacagugggucc

SEQ ID NO: 2211432 - RNA, 19 nt, Artificial Sequence
  Description of Artificial Sequence: Synthetic oligonucleotide
cucccgugucuucuucugc

SEQ ID NO: 2211433 - RNA, 19 nt, Artificial Sequence
  Description of Artificial Sequence: Synthetic oligonucleotide
cacaucguccccgaaccuc

SEQ ID NO: 2211434 - RNA, 19 nt, Artificial Sequence
  Description of Artificial Sequence: Synthetic oligonucleotide
uaucuggauauaggccuuc

SEQ ID NO: 2211435 - RNA, 19 nt, Artificial Sequence
  Description of Artificial Sequence: Synthetic oligonucleotide
gccguaauuuguugugaug

SEQ ID NO: 2211436 - RNA, 19 nt, Artificial Sequence
  Description of Artificial Sequence: Synthetic oligonucleotide
cuguggguccagcuuggac

SEQ ID NO: 2211437 - RNA, 19 nt, Artificial Sequence
  Description of Artificial Sequence: Synthetic oligonucleotide
gugcuggucuucuggugug

SEQ ID NO: 2211438 - RNA, 19 nt, Artificial Sequence
  Description of Artificial Sequence: Synthetic oligonucleotide
gagccguaauuuguuguga

SEQ ID NO: 2211439 - RNA, 19 nt, Artificial Sequence
  Description of Artificial Sequence: Synthetic oligonucleotide
gugauugaugguuccuugu

SEQ ID NO: 2211440 - RNA, 19 nt, Artificial Sequence
  Description of Artificial Sequence: Synthetic oligonucleotide
cacauagguuaucuggaua

SEQ ID NO: 2211441 - RNA, 19 nt, Artificial Sequence
  Description of Artificial Sequence: Synthetic oligonucleotide
gcgcuggguaagcagaggc

SEQ ID NO: 2211442 - RNA, 19 nt, Artificial Sequence
  Description of Artificial Sequence: Synthetic oligonucleotide
uccccgaaccucuccguau

SEQ ID NO: 2211443 - RNA, 19 nt, Artificial Sequence
  Description of Artificial Sequence: Synthetic oligonucleotide
caccaaaucgugcaccaua

SEQ ID NO: 2211444 - RNA, 19 nt, Artificial Sequence
  Description of Artificial Sequence: Synthetic oligonucleotide
cuggguuagaaucuuugau

SEQ ID NO: 2211445 - RNA, 19 nt, Artificial Sequence
  Description of Artificial Sequence: Synthetic oligonucleotide
caggcgcuggguaagcaga

SEQ ID NO: 2211446 - RNA, 19 nt, Artificial Sequence
  Description of Artificial Sequence: Synthetic oligonucleotide
uagaucuguucagggaguu

SEQ ID NO: 2211447 - RNA, 19 nt, Artificial Sequence
  Description of Artificial Sequence: Synthetic oligonucleotide
cgugucuugauguagggaa

SEQ ID NO: 2211448 - RNA, 19 nt, Artificial Sequence
  Description of Artificial Sequence: Synthetic oligonucleotide
ccaggucaccaaaucgugc

SEQ ID NO: 2211449 - RNA, 19 nt, Artificial Sequence
  Description of Artificial Sequence: Synthetic oligonucleotide
uugcguuugugcuguucua

SEQ ID NO: 2211450 - RNA, 19 nt, Artificial Sequence
  Description of Artificial Sequence: Synthetic oligonucleotide
ggcuuucaguccugugggg

SEQ ID NO: 2211451 - RNA, 19 nt, Artificial Sequence
  Description of Artificial Sequence: Synthetic oligonucleotide
cgguccuugagcucguagg

SEQ ID NO: 2211452 - RNA, 19 nt, Artificial Sequence
  Description of Artificial Sequence: Synthetic oligonucleotide
gucacccgguccuugagcu

SEQ ID NO: 2211453 - RNA, 19 nt, Artificial Sequence
  Description of Artificial Sequence: Synthetic oligonucleotide
ccaucuggugugaacggug

SEQ ID NO: 2211454 - RNA, 19 nt, Artificial Sequence
  Description of Artificial Sequence: Synthetic oligonucleotide
ugcgcucgcccaucuggug

SEQ ID NO: 2211455 - RNA, 19 nt, Artificial Sequence
  Description of Artificial Sequence: Synthetic oligonucleotide
auguagggaaaggcgugcu

SEQ ID NO: 2211456 - RNA, 19 nt, Artificial Sequence
  Description of Artificial Sequence: Synthetic oligonucleotide
ugagcucguaggugucaaa

SEQ ID NO: 2211457 - RNA, 19 nt, Artificial Sequence
  Description of Artificial Sequence: Synthetic oligonucleotide
gggaaaggcgugcuccgug

SEQ ID NO: 2211458 - RNA, 19 nt, Artificial Sequence
  Description of Artificial Sequence: Synthetic oligonucleotide
aucuggauauaggccuucu

SEQ ID NO: 2211459 - RNA, 19 nt, Artificial Sequence
  Description of Artificial Sequence: Synthetic oligonucleotide
cuagaucuguucagggagu

SEQ ID NO: 2211460 - RNA, 19 nt, Artificial Sequence
  Description of Artificial Sequence: Synthetic oligonucleotide
cuggugugaacggugugca

SEQ ID NO: 2211461 - RNA, 19 nt, Artificial Sequence
  Description of Artificial Sequence: Synthetic oligonucleotide
agcagagccguaauuuguu

SEQ ID NO: 2211462 - RNA, 19 nt, Artificial Sequence
  Description of Artificial Sequence: Synthetic oligonucleotide
gaaggcccgcagcccguag

SEQ ID NO: 2211463 - RNA, 19 nt, Artificial Sequence
  Description of Artificial Sequence: Synthetic oligonucleotide
acucggaaauaugucccaa

SEQ ID NO: 2211464 - RNA, 19 nt, Artificial Sequence
  Description of Artificial Sequence: Synthetic oligonucleotide
gcaggcgcuggguaagcag

SEQ ID NO: 2211465 - RNA, 19 nt, Artificial Sequence
  Description of Artificial Sequence: Synthetic oligonucleotide
ugucaaaguggggcuccac

SEQ ID NO: 2211466 - RNA, 19 nt, Artificial Sequence
  Description of Artificial Sequence: Synthetic oligonucleotide
cuuguucauccaggucacc

SEQ ID NO: 2211467 - RNA, 19 nt, Artificial Sequence
  Description of Artificial Sequence: Synthetic oligonucleotide
guuugggauccucugggau

SEQ ID NO: 2211468 - RNA, 19 nt, Artificial Sequence
  Description of Artificial Sequence: Synthetic oligonucleotide
gcccaucuggugugaacgg

SEQ ID NO: 2211469 - RNA, 19 nt, Artificial Sequence
  Description of Artificial Sequence: Synthetic oligonucleotide
ggucacccgguccuugagc

SEQ ID NO: 2211470 - RNA, 19 nt, Artificial Sequence
  Description of Artificial Sequence: Synthetic oligonucleotide
gucccaccgagcccugcag

SEQ ID NO: 2211471 - RNA, 19 nt, Artificial Sequence
  Description of Artificial Sequence: Synthetic oligonucleotide
uuccuccagucggugugag

SEQ ID NO: 2211472 - RNA, 19 nt, Artificial Sequence
  Description of Artificial Sequence: Synthetic oligonucleotide
uccuugaagcagagccgua

SEQ ID NO: 2211473 - RNA, 19 nt, Artificial Sequence
  Description of Artificial Sequence: Synthetic oligonucleotide
cagagccguaauuuguugu

SEQ ID NO: 2211474 - RNA, 19 nt, Artificial Sequence
  Description of Artificial Sequence: Synthetic oligonucleotide
uccuccagucggugugaga

SEQ ID NO: 2211475 - RNA, 19 nt, Artificial Sequence
  Description of Artificial Sequence: Synthetic oligonucleotide
cccaaucaaggccuuguuc

SEQ ID NO: 2211476 - RNA, 19 nt, Artificial Sequence
  Description of Artificial Sequence: Synthetic oligonucleotide
auuccuccagucgguguga

SEQ ID NO: 2211477 - RNA, 19 nt, Artificial Sequence
  Description of Artificial Sequence: Synthetic oligonucleotide
caaaguggggcuccacaua

SEQ ID NO: 2211478 - RNA, 19 nt, Artificial Sequence
  Description of Artificial Sequence: Synthetic oligonucleotide
cuccagucggugugagauc

SEQ ID NO: 2211479 - RNA, 19 nt, Artificial Sequence
  Description of Artificial Sequence: Synthetic oligonucleotide
ggugcuggucuucuggugu

SEQ ID NO: 2211480 - RNA, 19 nt, Artificial Sequence
  Description of Artificial Sequence: Synthetic oligonucleotide
uaguggcgcuccaguuccc

SEQ ID NO: 2211481 - RNA, 19 nt, Artificial Sequence
  Description of Artificial Sequence: Synthetic oligonucleotide
cucuccguauagaauuccu

SEQ ID NO: 2211482 - RNA, 19 nt, Artificial Sequence
  Description of Artificial Sequence: Synthetic oligonucleotide
ucaccaaaucgugcaccau

SEQ ID NO: 2211483 - RNA, 19 nt, Artificial Sequence
  Description of Artificial Sequence: Synthetic oligonucleotide
cacgcggaugcgugucuug

SEQ ID NO: 2211484 - RNA, 19 nt, Artificial Sequence
  Description of Artificial Sequence: Synthetic oligonucleotide
caucuggugugaacggugu

SEQ ID NO: 2211485 - RNA, 19 nt, Artificial Sequence
  Description of Artificial Sequence: Synthetic oligonucleotide
gcgacuguaguggcgcucc

SEQ ID NO: 2211486 - RNA, 19 nt, Artificial Sequence
  Description of Artificial Sequence: Synthetic oligonucleotide
agucggugugagaucucug

SEQ ID NO: 2211487 - RNA, 19 nt, Artificial Sequence
  Description of Artificial Sequence: Synthetic oligonucleotide
caguucccggugguauucc

SEQ ID NO: 2211488 - RNA, 19 nt, Artificial Sequence
  Description of Artificial Sequence: Synthetic oligonucleotide
ucacccgguccuugagcuc

SEQ ID NO: 2211489 - RNA, 19 nt, Artificial Sequence
  Description of Artificial Sequence: Synthetic oligonucleotide
aguugcggucgaaguaggu

SEQ ID NO: 2211490 - RNA, 19 nt, Artificial Sequence
  Description of Artificial Sequence: Synthetic oligonucleotide
ccguaauuuguugugaugu

SEQ ID NO: 2211491 - RNA, 19 nt, Artificial Sequence
  Description of Artificial Sequence: Synthetic oligonucleotide
uucagccuuccggaagcua

SEQ ID NO: 2211492 - RNA, 19 nt, Artificial Sequence
  Description of Artificial Sequence: Synthetic oligonucleotide
gggugcuggucuucuggug

SEQ ID NO: 2211493 - RNA, 19 nt, Artificial Sequence
  Description of Artificial Sequence: Synthetic oligonucleotide
cauagguuaucuggauaua

SEQ ID NO: 2211494 - RNA, 19 nt, Artificial Sequence
  Description of Artificial Sequence: Synthetic oligonucleotide
acgguggcacacgcggaug

SEQ ID NO: 2211495 - RNA, 19 nt, Artificial Sequence
  Description of Artificial Sequence: Synthetic oligonucleotide
ggucagaguucagccuucc

SEQ ID NO: 2211496 - RNA, 19 nt, Artificial Sequence
  Description of Artificial Sequence: Synthetic oligonucleotide
aggcgugcuccgugcucag

SEQ ID NO: 2211497 - RNA, 19 nt, Artificial Sequence
  Description of Artificial Sequence: Synthetic oligonucleotide
agcccguaguugcggucga

SEQ ID NO: 2211498 - RNA, 19 nt, Artificial Sequence
  Description of Artificial Sequence: Synthetic oligonucleotide
cgaaccucuccguauagaa

SEQ ID NO: 2211499 - RNA, 19 nt, Artificial Sequence
  Description of Artificial Sequence: Synthetic oligonucleotide
cccggaggcgacuguagug

SEQ ID NO: 2211500 - RNA, 19 nt, Artificial Sequence
  Description of Artificial Sequence: Synthetic oligonucleotide
acggugugcagaagaggaa

SEQ ID NO: 2211501 - RNA, 19 nt, Artificial Sequence
  Description of Artificial Sequence: Synthetic oligonucleotide
caucguccccgaaccucuc

SEQ ID NO: 2211502 - RNA, 19 nt, Artificial Sequence
  Description of Artificial Sequence: Synthetic oligonucleotide
aggcgacuguaguggcgcu

SEQ ID NO: 2211503 - RNA, 19 nt, Artificial Sequence
  Description of Artificial Sequence: Synthetic oligonucleotide
ggcgcuccaguucccggug

SEQ ID NO: 2211504 - RNA, 19 nt, Artificial Sequence
  Description of Artificial Sequence: Synthetic oligonucleotide
ccucuccguauagaauucc

SEQ ID NO: 2211505 - RNA, 19 nt, Artificial Sequence
  Description of Artificial Sequence: Synthetic oligonucleotide
gguuagaaucuuugaugau

SEQ ID NO: 2211506 - RNA, 19 nt, Artificial Sequence
  Description of Artificial Sequence: Synthetic oligonucleotide
cuucuaagggacccugguu

SEQ ID NO: 2211507 - RNA, 19 nt, Artificial Sequence
  Description of Artificial Sequence: Synthetic oligonucleotide
gcuggucuucugguguggc

SEQ ID NO: 2211508 - RNA, 19 nt, Artificial Sequence
  Description of Artificial Sequence: Synthetic oligonucleotide
cggaagcuagaucuguuca

SEQ ID NO: 2211509 - RNA, 19 nt, Artificial Sequence
  Description of Artificial Sequence: Synthetic oligonucleotide
ccacuucuaagggacccug

SEQ ID NO: 2211510 - RNA, 19 nt, Artificial Sequence
  Description of Artificial Sequence: Synthetic oligonucleotide
ggucuugcguuugugcugu

SEQ ID NO: 2211511 - RNA, 19 nt, Artificial Sequence
  Description of Artificial Sequence: Synthetic oligonucleotide
ggaugcgugucuugaugua

SEQ ID NO: 2211512 - RNA, 19 nt, Artificial Sequence
  Description of Artificial Sequence: Synthetic oligonucleotide
cccguaguugcggucgaag

SEQ ID NO: 2211513 - RNA, 19 nt, Artificial Sequence
  Description of Artificial Sequence: Synthetic oligonucleotide
ugggucccaccgagcccug

SEQ ID NO: 2211514 - RNA, 19 nt, Artificial Sequence
  Description of Artificial Sequence: Synthetic oligonucleotide
guccccgaaccucuccgua

SEQ ID NO: 2211515 - RNA, 19 nt, Artificial Sequence
  Description of Artificial Sequence: Synthetic oligonucleotide
cggucgaaguaggucaccc

SEQ ID NO: 2211516 - RNA, 19 nt, Artificial Sequence
  Description of Artificial Sequence: Synthetic oligonucleotide
cagcuuugugauugauggu

SEQ ID NO: 2211517 - RNA, 19 nt, Artificial Sequence
  Description of Artificial Sequence: Synthetic oligonucleotide
gcuuucaguccuguggggu

SEQ ID NO: 2211518 - RNA, 19 nt, Artificial Sequence
  Description of Artificial Sequence: Synthetic oligonucleotide
cccgaaccucuccguauag

SEQ ID NO: 2211519 - RNA, 19 nt, Artificial Sequence
  Description of Artificial Sequence: Synthetic oligonucleotide
accgagcccugcagaacca

SEQ ID NO: 2211520 - RNA, 19 nt, Artificial Sequence
  Description of Artificial Sequence: Synthetic oligonucleotide
acuuguccacuggguuaga

SEQ ID NO: 2211521 - RNA, 19 nt, Artificial Sequence
  Description of Artificial Sequence: Synthetic oligonucleotide
ccuugaagcagagccguaa

SEQ ID NO: 2211522 - RNA, 19 nt, Artificial Sequence
  Description of Artificial Sequence: Synthetic oligonucleotide
gcccacucggaaauauguc

SEQ ID NO: 2211523 - RNA, 19 nt, Artificial Sequence
  Description of Artificial Sequence: Synthetic oligonucleotide
cagucggugugagaucucu

SEQ ID NO: 2211524 - RNA, 19 nt, Artificial Sequence
  Description of Artificial Sequence: Synthetic oligonucleotide
cggugugagaucucugcca

SEQ ID NO: 2211525 - RNA, 19 nt, Artificial Sequence
  Description of Artificial Sequence: Synthetic oligonucleotide
acacgcggaugcgugucuu

SEQ ID NO: 2211526 - RNA, 19 nt, Artificial Sequence
  Description of Artificial Sequence: Synthetic oligonucleotide
cuguaguggcgcuccaguu

SEQ ID NO: 2211527 - RNA, 19 nt, Artificial Sequence
  Description of Artificial Sequence: Synthetic oligonucleotide
augguuccuuguacacaaa

SEQ ID NO: 2211528 - RNA, 19 nt, Artificial Sequence
  Description of Artificial Sequence: Synthetic oligonucleotide
cguaguugcggucgaagua

SEQ ID NO: 2211529 - RNA, 19 nt, Artificial Sequence
  Description of Artificial Sequence: Synthetic oligonucleotide
gcgugucuugauguaggga

SEQ ID NO: 2211530 - RNA, 19 nt, Artificial Sequence
  Description of Artificial Sequence: Synthetic oligonucleotide
cggaaauaugucccaaaua

SEQ ID NO: 2211531 - RNA, 19 nt, Artificial Sequence
  Description of Artificial Sequence: Synthetic oligonucleotide
ccaaaucgugcaccauaga

SEQ ID NO: 2211532 - RNA, 19 nt, Artificial Sequence
  Description of Artificial Sequence: Synthetic oligonucleotide
cgugcaccauagaagccca

SEQ ID NO: 2211533 - RNA, 19 nt, Artificial Sequence
  Description of Artificial Sequence: Synthetic oligonucleotide
ccuccagucggugugagau

SEQ ID NO: 2211534 - RNA, 19 nt, Artificial Sequence
  Description of Artificial Sequence: Synthetic oligonucleotide
cguauagaauuccuccagu

SEQ ID NO: 2211535 - RNA, 19 nt, Artificial Sequence
  Description of Artificial Sequence: Synthetic oligonucleotide
gggucagaguucagccuuc

SEQ ID NO: 2211536 - RNA, 19 nt, Artificial Sequence
  Description of Artificial Sequence: Synthetic oligonucleotide
cacgguggcacacgcggau

SEQ ID NO: 2211537 - RNA, 19 nt, Artificial Sequence
  Description of Artificial Sequence: Synthetic oligonucleotide
gggccacuucuaagggacc

SEQ ID NO: 2211538 - RNA, 19 nt, Artificial Sequence
  Description of Artificial Sequence: Synthetic oligonucleotide
guggcacacgcggaugcgu

SEQ ID NO: 2211539 - RNA, 19 nt, Artificial Sequence
  Description of Artificial Sequence: Synthetic oligonucleotide
gcacacgcggaugcguguc

SEQ ID NO: 2211540 - RNA, 19 nt, Artificial Sequence
  Description of Artificial Sequence: Synthetic oligonucleotide
ggccaccuccacugguguc

SEQ ID NO: 2211541 - RNA, 19 nt, Artificial Sequence
  Description of Artificial Sequence: Synthetic oligonucleotide
ggcgacuguaguggcgcuc

SEQ ID NO: 2211542 - RNA, 19 nt, Artificial Sequence
  Description of Artificial Sequence: Synthetic oligonucleotide
gcggucgaaguaggucacc

SEQ ID NO: 2211543 - RNA, 19 nt, Artificial Sequence
  Description of Artificial Sequence: Synthetic oligonucleotide
ccguaguugcggucgaagu

SEQ ID NO: 2211544 - RNA, 19 nt, Artificial Sequence
  Description of Artificial Sequence: Synthetic oligonucleotide
cccaccgagcccugcagaa

SEQ ID NO: 2211545 - RNA, 19 nt, Artificial Sequence
  Description of Artificial Sequence: Synthetic oligonucleotide
cgagcccugcagaaccauc

SEQ ID NO: 2211546 - RNA, 19 nt, Artificial Sequence
  Description of Artificial Sequence: Synthetic oligonucleotide
ccacauagguuaucuggau

SEQ ID NO: 2211547 - RNA, 19 nt, Artificial Sequence
  Description of Artificial Sequence: Synthetic oligonucleotide
cacacgcggaugcgugucu

SEQ ID NO: 2211548 - RNA, 19 nt, Artificial Sequence
  Description of Artificial Sequence: Synthetic oligonucleotide
gcgcucgcccaucuggugu

SEQ ID NO: 2211549 - RNA, 19 nt, Artificial Sequence
  Description of Artificial Sequence: Synthetic oligonucleotide
cggaugcgugucuugaugu

SEQ ID NO: 2211550 - RNA, 19 nt, Artificial Sequence
  Description of Artificial Sequence: Synthetic oligonucleotide
ccagucggugugagaucuc

SEQ ID NO: 2211551 - RNA, 19 nt, Artificial Sequence
  Description of Artificial Sequence: Synthetic oligonucleotide
ccaccgagcccugcagaac

SEQ ID NO: 2211552 - RNA, 19 nt, Artificial Sequence
  Description of Artificial Sequence: Synthetic oligonucleotide
guucccggugguauuccuu

SEQ ID NO: 2211553 - RNA, 19 nt, Artificial Sequence
  Description of Artificial Sequence: Synthetic oligonucleotide
ggcacacgcggaugcgugu

SEQ ID NO: 2211554 - RNA, 19 nt, Artificial Sequence
  Description of Artificial Sequence: Synthetic oligonucleotide
ccgcagcccguaguugcgg

SEQ ID NO: 2211555 - RNA, 19 nt, Artificial Sequence
  Description of Artificial Sequence: Synthetic oligonucleotide
ggcccgcagcccguaguug

SEQ ID NO: 2211556 - RNA, 19 nt, Artificial Sequence
  Description of Artificial Sequence: Synthetic oligonucleotide
ggcaggcgcuggguaagca

SEQ ID NO: 2211557 - RNA, 19 nt, Artificial Sequence
  Description of Artificial Sequence: Synthetic oligonucleotide
ggcgugcuccgugcucagc

SEQ ID NO: 2211558 - RNA, 19 nt, Artificial Sequence
  Description of Artificial Sequence: Synthetic oligonucleotide
ccgaaccucuccguauaga

SEQ ID NO: 2211559 - RNA, 19 nt, Artificial Sequence
  Description of Artificial Sequence: Synthetic oligonucleotide
acccgguccuugagcucgu

SEQ ID NO: 2211560 - RNA, 19 nt, Artificial Sequence
  Description of Artificial Sequence: Synthetic oligonucleotide
ccccgaaccucuccguaua

SEQ ID NO: 2211561 - RNA, 19 nt, Artificial Sequence
  Description of Artificial Sequence: Synthetic oligonucleotide
gcccaaucaaggccuuguu

SEQ ID NO: 2211562 - RNA, 19 nt, Artificial Sequence
  Description of Artificial Sequence: Synthetic oligonucleotide
gggucccaccgagcccugc

SEQ ID NO: 2211563 - RNA, 19 nt, Artificial Sequence
  Description of Artificial Sequence: Synthetic oligonucleotide
cuggcccaaucaaggccuu

SEQ ID NO: 2211564 - RNA, 19 nt, Artificial Sequence
  Description of Artificial Sequence: Synthetic oligonucleotide
cgcuggguaagcagaggcu

SEQ ID NO: 2211565 - RNA, 19 nt, Artificial Sequence
  Description of Artificial Sequence: Synthetic oligonucleotide
ggaaggcccgcagcccgua

SEQ ID NO: 2211566 - RNA, 19 nt, Artificial Sequence
  Description of Artificial Sequence: Synthetic oligonucleotide
cggugguauuccuucuggu

SEQ ID NO: 2211567 - RNA, 19 nt, Artificial Sequence
  Description of Artificial Sequence: Synthetic oligonucleotide
ccccaugcgcucgcccauc

SEQ ID NO: 2211568 - RNA, 19 nt, Artificial Sequence
  Description of Artificial Sequence: Synthetic oligonucleotide
ccucccggaggcgacugua

SEQ ID NO: 2211569 - RNA, 19 nt, Artificial Sequence
  Description of Artificial Sequence: Synthetic oligonucleotide
ccacaucguccccgaaccu

SEQ ID NO: 2211570 - RNA, 19 nt, Artificial Sequence
  Description of Artificial Sequence: Synthetic oligonucleotide
cccaugcgcucgcccaucu

SEQ ID NO: 2211571 - RNA, 19 nt, Artificial Sequence
  Description of Artificial Sequence: Synthetic oligonucleotide
gcccguaguugcggucgaa

SEQ ID NO: 2211572 - RNA, 19 nt, Artificial Sequence
  Description of Artificial Sequence: Synthetic oligonucleotide
cguccccgaaccucuccgu

SEQ ID NO: 2211573 - RNA, 19 nt, Artificial Sequence
  Description of Artificial Sequence: Synthetic oligonucleotide
ccgucuccucacgguggca

SEQ ID NO: 2211574 - RNA, 19 nt, Artificial Sequence
  Description of Artificial Sequence: Synthetic oligonucleotide
cgcggaugcgugucuugau

SEQ ID NO: 2211575 - RNA, 19 nt, Artificial Sequence
  Description of Artificial Sequence: Synthetic oligonucleotide
ccgagcccugcagaaccau

SEQ ID NO: 2211576 - RNA, 19 nt, Artificial Sequence
  Description of Artificial Sequence: Synthetic oligonucleotide
ccgugcucagcagggucuu

SEQ ID NO: 2211577 - RNA, 19 nt, Artificial Sequence
  Description of Artificial Sequence: Synthetic oligonucleotide
cccgguccuugagcucgua

SEQ ID NO: 2211578 - RNA, 19 nt, Artificial Sequence
  Description of Artificial Sequence: Synthetic oligonucleotide
aaaccagaaacuuggguac

SEQ ID NO: 2211579 - RNA, 19 nt, Artificial Sequence
  Description of Artificial Sequence: Synthetic oligonucleotide
agaaccuccaggcagaggg

SEQ ID NO: 2211580 - RNA, 19 nt, Artificial Sequence
  Description of Artificial Sequence: Synthetic oligonucleotide
aggaauauuugucaccagc

SEQ ID NO: 2211581 - RNA, 19 nt, Artificial Sequence
  Description of Artificial Sequence: Synthetic oligonucleotide
auuuuggagggucacagac

SEQ ID NO: 2211582 - RNA, 19 nt, Artificial Sequence
  Description of Artificial Sequence: Synthetic oligonucleotide
aauauuugucaccagcacu

SEQ ID NO: 2211583 - RNA, 19 nt, Artificial Sequence
  Description of Artificial Sequence: Synthetic oligonucleotide
uucagaucagggcacaagg

SEQ ID NO: 2211584 - RNA, 19 nt, Artificial Sequence
  Description of Artificial Sequence: Synthetic oligonucleotide
aucagcaaaaccuagcaug

SEQ ID NO: 2211585 - RNA, 19 nt, Artificial Sequence
  Description of Artificial Sequence: Synthetic oligonucleotide
uggaauuugaucuuggcuu

SEQ ID NO: 2211586 - RNA, 19 nt, Artificial Sequence
  Description of Artificial Sequence: Synthetic oligonucleotide
uuugggagagaucaggggu

SEQ ID NO: 2211587 - RNA, 19 nt, Artificial Sequence
  Description of Artificial Sequence: Synthetic oligonucleotide
aaccuagcaugacuguccc

SEQ ID NO: 2211588 - RNA, 19 nt, Artificial Sequence
  Description of Artificial Sequence: Synthetic oligonucleotide
ucuuugggagagaucaggg

SEQ ID NO: 2211589 - RNA, 19 nt, Artificial Sequence
  Description of Artificial Sequence: Synthetic oligonucleotide
ugaagaagugaagacagcc

SEQ ID NO: 2211590 - RNA, 19 nt, Artificial Sequence
  Description of Artificial Sequence: Synthetic oligonucleotide
gggagaaacucucagaggg

SEQ ID NO: 2211591 - RNA, 19 nt, Artificial Sequence
  Description of Artificial Sequence: Synthetic oligonucleotide
uucuugggcauucaggaug

SEQ ID NO: 2211592 - RNA, 19 nt, Artificial Sequence
  Description of Artificial Sequence: Synthetic oligonucleotide
gacauggucaccugguuag

SEQ ID NO: 2211593 - RNA, 19 nt, Artificial Sequence
  Description of Artificial Sequence: Synthetic oligonucleotide
aggaaagccacugacuagc

SEQ ID NO: 2211594 - RNA, 19 nt, Artificial Sequence
  Description of Artificial Sequence: Synthetic oligonucleotide
ucagcaaaaccuagcauga

SEQ ID NO: 2211595 - RNA, 19 nt, Artificial Sequence
  Description of Artificial Sequence: Synthetic oligonucleotide
aggugacuauagcagaacc

SEQ ID NO: 2211596 - RNA, 19 nt, Artificial Sequence
  Description of Artificial Sequence: Synthetic oligonucleotide
uguuguagcaacugaucag

SEQ ID NO: 2211597 - RNA, 19 nt, Artificial Sequence
  Description of Artificial Sequence: Synthetic oligonucleotide
aacgggauccccucuuugg

SEQ ID NO: 2211598 - RNA, 19 nt, Artificial Sequence
  Description of Artificial Sequence: Synthetic oligonucleotide
gacaugcagaccuagcuug

SEQ ID NO: 2211599 - RNA, 19 nt, Artificial Sequence
  Description of Artificial Sequence: Synthetic oligonucleotide
uucaaguuagaaaccagaa

SEQ ID NO: 2211600 - RNA, 19 nt, Artificial Sequence
  Description of Artificial Sequence: Synthetic oligonucleotide
cugacuagcacccugugac

SEQ ID NO: 2211601 - RNA, 19 nt, Artificial Sequence
  Description of Artificial Sequence: Synthetic oligonucleotide
ugcagaccuagcuugauga

SEQ ID NO: 2211602 - RNA, 19 nt, Artificial Sequence
  Description of Artificial Sequence: Synthetic oligonucleotide
ucuaugucaauuuuauguu

SEQ ID NO: 2211603 - RNA, 19 nt, Artificial Sequence
  Description of Artificial Sequence: Synthetic oligonucleotide
ucaaguuagaaaccagaaa

SEQ ID NO: 2211604 - RNA, 19 nt, Artificial Sequence
  Description of Artificial Sequence: Synthetic oligonucleotide
uuuggagggucacagacau

SEQ ID NO: 2211605 - RNA, 19 nt, Artificial Sequence
  Description of Artificial Sequence: Synthetic oligonucleotide
augucaugcaauucuuggg

SEQ ID NO: 2211606 - RNA, 19 nt, Artificial Sequence
  Description of Artificial Sequence: Synthetic oligonucleotide
uagcagaaccuccaggcag

SEQ ID NO: 2211607 - RNA, 19 nt, Artificial Sequence
  Description of Artificial Sequence: Synthetic oligonucleotide
auauuugucaccagcacug

SEQ ID NO: 2211608 - RNA, 19 nt, Artificial Sequence
  Description of Artificial Sequence: Synthetic oligonucleotide
cagaggacauuuuggaggg

SEQ ID NO: 2211609 - RNA, 19 nt, Artificial Sequence
  Description of Artificial Sequence: Synthetic oligonucleotide
aacucucagagggaccugc

SEQ ID NO: 2211610 - RNA, 19 nt, Artificial Sequence
  Description of Artificial Sequence: Synthetic oligonucleotide
cucuaugucaauuuuaugu

SEQ ID NO: 2211611 - RNA, 19 nt, Artificial Sequence
  Description of Artificial Sequence: Synthetic oligonucleotide
ucgucuugagccuggauug

SEQ ID NO: 2211612 - RNA, 19 nt, Artificial Sequence
  Description of Artificial Sequence: Synthetic oligonucleotide
cagcagaucuucaaguuag

SEQ ID NO: 2211613 - RNA, 19 nt, Artificial Sequence
  Description of Artificial Sequence: Synthetic oligonucleotide
gaauauuugucaccagcac

SEQ ID NO: 2211614 - RNA, 19 nt, Artificial Sequence
  Description of Artificial Sequence: Synthetic oligonucleotide
ucuggcauagguucugggc

SEQ ID NO: 2211615 - RNA, 19 nt, Artificial Sequence
  Description of Artificial Sequence: Synthetic oligonucleotide
ugacuggacaccuggaugu

SEQ ID NO: 2211616 - RNA, 19 nt, Artificial Sequence
  Description of Artificial Sequence: Synthetic oligonucleotide
augucaggaauauuuguca

SEQ ID NO: 2211617 - RNA, 19 nt, Artificial Sequence
  Description of Artificial Sequence: Synthetic oligonucleotide
aaugcggccuuggaaugcc

SEQ ID NO: 2211618 - RNA, 19 nt, Artificial Sequence
  Description of Artificial Sequence: Synthetic oligonucleotide
ucuccaacuugucuagcag

SEQ ID NO: 2211619 - RNA, 19 nt, Artificial Sequence
  Description of Artificial Sequence: Synthetic oligonucleotide
uccucuaugucaauuuuau

SEQ ID NO: 2211620 - RNA, 19 nt, Artificial Sequence
  Description of Artificial Sequence: Synthetic oligonucleotide
uccaacuugucuagcagcu

SEQ ID NO: 2211621 - RNA, 19 nt, Artificial Sequence
  Description of Artificial Sequence: Synthetic oligonucleotide
aaguggaucgccaggaugu

SEQ ID NO: 2211622 - RNA, 19 nt, Artificial Sequence
  Description of Artificial Sequence: Synthetic oligonucleotide
uucgucuugagccuggauu

SEQ ID NO: 2211623 - RNA, 19 nt, Artificial Sequence
  Description of Artificial Sequence: Synthetic oligonucleotide
cauagggagaaacucucag

SEQ ID NO: 2211624 - RNA, 19 nt, Artificial Sequence
  Description of Artificial Sequence: Synthetic oligonucleotide
cacccugugacuaucuggc

SEQ ID NO: 2211625 - RNA, 19 nt, Artificial Sequence
  Description of Artificial Sequence: Synthetic oligonucleotide
cuuugggagagaucagggg

SEQ ID NO: 2211626 - RNA, 19 nt, Artificial Sequence
  Description of Artificial Sequence: Synthetic oligonucleotide
agaucuccaacuugucuag

SEQ ID NO: 2211627 - RNA, 19 nt, Artificial Sequence
  Description of Artificial Sequence: Synthetic oligonucleotide
acauuuuggagggucacag

SEQ ID NO: 2211628 - RNA, 19 nt, Artificial Sequence
  Description of Artificial Sequence: Synthetic oligonucleotide
agaaaccagaaacuugggu

SEQ ID NO: 2211629 - RNA, 19 nt, Artificial Sequence
  Description of Artificial Sequence: Synthetic oligonucleotide
agaucagggcacaaggugg

SEQ ID NO: 2211630 - RNA, 19 nt, Artificial Sequence
  Description of Artificial Sequence: Synthetic oligonucleotide
cuauagcagaaccuccagg

SEQ ID NO: 2211631 - RNA, 19 nt, Artificial Sequence
  Description of Artificial Sequence: Synthetic oligonucleotide
cuugaugaagaagugaaga

SEQ ID NO: 2211632 - RNA, 19 nt, Artificial Sequence
  Description of Artificial Sequence: Synthetic oligonucleotide
cuaugucaauuuuauguuc

SEQ ID NO: 2211633 - RNA, 19 nt, Artificial Sequence
  Description of Artificial Sequence: Synthetic oligonucleotide
ucuggaaguggaucgccag

SEQ ID NO: 2211634 - RNA, 19 nt, Artificial Sequence
  Description of Artificial Sequence: Synthetic oligonucleotide
ucaccugguuagcaaaagc

SEQ ID NO: 2211635 - RNA, 19 nt, Artificial Sequence
  Description of Artificial Sequence: Synthetic oligonucleotide
acuauagcagaaccuccag

SEQ ID NO: 2211636 - RNA, 19 nt, Artificial Sequence
  Description of Artificial Sequence: Synthetic oligonucleotide
uggccaaucuggcauaggu

SEQ ID NO: 2211637 - RNA, 19 nt, Artificial Sequence
  Description of Artificial Sequence: Synthetic oligonucleotide
gaaguggaucgccaggaug

SEQ ID NO: 2211638 - RNA, 19 nt, Artificial Sequence
  Description of Artificial Sequence: Synthetic oligonucleotide
cuggacaccuggauguugg

SEQ ID NO: 2211639 - RNA, 19 nt, Artificial Sequence
  Description of Artificial Sequence: Synthetic oligonucleotide
acugaucagccacuuuggg

SEQ ID NO: 2211640 - RNA, 19 nt, Artificial Sequence
  Description of Artificial Sequence: Synthetic oligonucleotide
aagguggagcguccuagag

SEQ ID NO: 2211641 - RNA, 19 nt, Artificial Sequence
  Description of Artificial Sequence: Synthetic oligonucleotide
uugccugccuugcugaaug

SEQ ID NO: 2211642 - RNA, 19 nt, Artificial Sequence
  Description of Artificial Sequence: Synthetic oligonucleotide
caugacugucccuugcagc

SEQ ID NO: 2211643 - RNA, 19 nt, Artificial Sequence
  Description of Artificial Sequence: Synthetic oligonucleotide
ugucccuugcagcaucucc

SEQ ID NO: 2211644 - RNA, 19 nt, Artificial Sequence
  Description of Artificial Sequence: Synthetic oligonucleotide
aguccagaaggaaagccac

SEQ ID NO: 2211645 - RNA, 19 nt, Artificial Sequence
  Description of Artificial Sequence: Synthetic oligonucleotide
ucuugggcauucaggaugu

SEQ ID NO: 2211646 - RNA, 19 nt, Artificial Sequence
  Description of Artificial Sequence: Synthetic oligonucleotide
cuucaaguuagaaaccaga

SEQ ID NO: 2211647 - RNA, 19 nt, Artificial Sequence
  Description of Artificial Sequence: Synthetic oligonucleotide
cugguuagcaaaagcugag

SEQ ID NO: 2211648 - RNA, 19 nt, Artificial Sequence
  Description of Artificial Sequence: Synthetic oligonucleotide
gucaggaauauuugucacc

SEQ ID NO: 2211649 - RNA, 19 nt, Artificial Sequence
  Description of Artificial Sequence: Synthetic oligonucleotide
ucagaucagggcacaaggu

SEQ ID NO: 2211650 - RNA, 19 nt, Artificial Sequence
  Description of Artificial Sequence: Synthetic oligonucleotide
auagggagaaacucucaga

SEQ ID NO: 2211651 - RNA, 19 nt, Artificial Sequence
  Description of Artificial Sequence: Synthetic oligonucleotide
cagugugugaucccagucc

SEQ ID NO: 2211652 - RNA, 19 nt, Artificial Sequence
  Description of Artificial Sequence: Synthetic oligonucleotide
ugugaucccaguccccagc

SEQ ID NO: 2211653 - RNA, 19 nt, Artificial Sequence
  Description of Artificial Sequence: Synthetic oligonucleotide
gguuagcaaaagcugaggc

SEQ ID NO: 2211654 - RNA, 19 nt, Artificial Sequence
  Description of Artificial Sequence: Synthetic oligonucleotide
aaguccagaaggaaagcca

SEQ ID NO: 2211655 - RNA, 19 nt, Artificial Sequence
  Description of Artificial Sequence: Synthetic oligonucleotide
cagaaacuuggguacuugc

SEQ ID NO: 2211656 - RNA, 19 nt, Artificial Sequence
  Description of Artificial Sequence: Synthetic oligonucleotide
ucagggguguccuuuucug

SEQ ID NO: 2211657 - RNA, 19 nt, Artificial Sequence
  Description of Artificial Sequence: Synthetic oligonucleotide
cagaucagggcacaaggug

SEQ ID NO: 2211658 - RNA, 19 nt, Artificial Sequence
  Description of Artificial Sequence: Synthetic oligonucleotide
guccuagaggacuaaacuc

SEQ ID NO: 2211659 - RNA, 19 nt, Artificial Sequence
  Description of Artificial Sequence: Synthetic oligonucleotide
gagaaacucucagagggac

SEQ ID NO: 2211660 - RNA, 19 nt, Artificial Sequence
  Description of Artificial Sequence: Synthetic oligonucleotide
uggaucuccccacucacau

SEQ ID NO: 2211661 - RNA, 19 nt, Artificial Sequence
  Description of Artificial Sequence: Synthetic oligonucleotide
ugaaugcggccuuggaaug

SEQ ID NO: 2211662 - RNA, 19 nt, Artificial Sequence
  Description of Artificial Sequence: Synthetic oligonucleotide
aguuagaaaccagaaacuu

SEQ ID NO: 2211663 - RNA, 19 nt, Artificial Sequence
  Description of Artificial Sequence: Synthetic oligonucleotide
gugacuauagcagaaccuc

SEQ ID NO: 2211664 - RNA, 19 nt, Artificial Sequence
  Description of Artificial Sequence: Synthetic oligonucleotide
aagccagcauuccucuaug

SEQ ID NO: 2211665 - RNA, 19 nt, Artificial Sequence
  Description of Artificial Sequence: Synthetic oligonucleotide
gaagaagugaagacagcca

SEQ ID NO: 2211666 - RNA, 19 nt, Artificial Sequence
  Description of Artificial Sequence: Synthetic oligonucleotide
agaaacucucagagggacc

SEQ ID NO: 2211667 - RNA, 19 nt, Artificial Sequence
  Description of Artificial Sequence: Synthetic oligonucleotide
acgggauccccucuuuggg

SEQ ID NO: 2211668 - RNA, 19 nt, Artificial Sequence
  Description of Artificial Sequence: Synthetic oligonucleotide
aucuccaacuugucuagca

SEQ ID NO: 2211669 - RNA, 19 nt, Artificial Sequence
  Description of Artificial Sequence: Synthetic oligonucleotide
uggcacucggaacuggcca

SEQ ID NO: 2211670 - RNA, 19 nt, Artificial Sequence
  Description of Artificial Sequence: Synthetic oligonucleotide
ugugugaucccagucccca

SEQ ID NO: 2211671 - RNA, 19 nt, Artificial Sequence
  Description of Artificial Sequence: Synthetic oligonucleotide
gguggagcguccuagagga

SEQ ID NO: 2211672 - RNA, 19 nt, Artificial Sequence
  Description of Artificial Sequence: Synthetic oligonucleotide
uccuuuuguuguagcaacu

SEQ ID NO: 2211673 - RNA, 19 nt, Artificial Sequence
  Description of Artificial Sequence: Synthetic oligonucleotide
ugaagugcuugcuggaauu

SEQ ID NO: 2211674 - RNA, 19 nt, Artificial Sequence
  Description of Artificial Sequence: Synthetic oligonucleotide
uggaucgccaggaugucau

SEQ ID NO: 2211675 - RNA, 19 nt, Artificial Sequence
  Description of Artificial Sequence: Synthetic oligonucleotide
auagcagaaccuccaggca

SEQ ID NO: 2211676 - RNA, 19 nt, Artificial Sequence
  Description of Artificial Sequence: Synthetic oligonucleotide
acaagguggagcguccuag

SEQ ID NO: 2211677 - RNA, 19 nt, Artificial Sequence
  Description of Artificial Sequence: Synthetic oligonucleotide
uuccucuaugucaauuuua

SEQ ID NO: 2211678 - RNA, 19 nt, Artificial Sequence
  Description of Artificial Sequence: Synthetic oligonucleotide
cacugagugaagugcuugc

SEQ ID NO: 2211679 - RNA, 19 nt, Artificial Sequence
  Description of Artificial Sequence: Synthetic oligonucleotide
agaccuagcuugaugaaga

SEQ ID NO: 2211680 - RNA, 19 nt, Artificial Sequence
  Description of Artificial Sequence: Synthetic oligonucleotide
uggaaguggaucgccagga

SEQ ID NO: 2211681 - RNA, 19 nt, Artificial Sequence
  Description of Artificial Sequence: Synthetic oligonucleotide
gcaaaaccuagcaugacug

SEQ ID NO: 2211682 - RNA, 19 nt, Artificial Sequence
  Description of Artificial Sequence: Synthetic oligonucleotide
uccacgggugggcuucugg

SEQ ID NO: 2211683 - RNA, 19 nt, Artificial Sequence
  Description of Artificial Sequence: Synthetic oligonucleotide
uacuugccugccuugcuga

SEQ ID NO: 2211684 - RNA, 19 nt, Artificial Sequence
  Description of Artificial Sequence: Synthetic oligonucleotide
ucaugcaauucuugggcau

SEQ ID NO: 2211685 - RNA, 19 nt, Artificial Sequence
  Description of Artificial Sequence: Synthetic oligonucleotide
guuagcaaaagcugaggcu

SEQ ID NO: 2211686 - RNA, 19 nt, Artificial Sequence
  Description of Artificial Sequence: Synthetic oligonucleotide
cugagugaagugcuugcug

SEQ ID NO: 2211687 - RNA, 19 nt, Artificial Sequence
  Description of Artificial Sequence: Synthetic oligonucleotide
acgggugggcuucuggaag

SEQ ID NO: 2211688 - RNA, 19 nt, Artificial Sequence
  Description of Artificial Sequence: Synthetic oligonucleotide
uucaggaugucaggaauau

SEQ ID NO: 2211689 - RNA, 19 nt, Artificial Sequence
  Description of Artificial Sequence: Synthetic oligonucleotide
gcuugcuggaauuugaucu

SEQ ID NO: 2211690 - RNA, 19 nt, Artificial Sequence
  Description of Artificial Sequence: Synthetic oligonucleotide
aucuggcauagguucuggg

SEQ ID NO: 2211691 - RNA, 19 nt, Artificial Sequence
  Description of Artificial Sequence: Synthetic oligonucleotide
gaucgccaggaugucaugc

SEQ ID NO: 2211692 - RNA, 19 nt, Artificial Sequence
  Description of Artificial Sequence: Synthetic oligonucleotide
ucuugagccuggauugcuc

SEQ ID NO: 2211693 - RNA, 19 nt, Artificial Sequence
  Description of Artificial Sequence: Synthetic oligonucleotide
ucuuggccuugccaaagaa

SEQ ID NO: 2211694 - RNA, 19 nt, Artificial Sequence
  Description of Artificial Sequence: Synthetic oligonucleotide
guacuugccugccuugcug

SEQ ID NO: 2211695 - RNA, 19 nt, Artificial Sequence
  Description of Artificial Sequence: Synthetic oligonucleotide
uagguucugggccacuuuu

SEQ ID NO: 2211696 - RNA, 19 nt, Artificial Sequence
  Description of Artificial Sequence: Synthetic oligonucleotide
accugguuagcaaaagcug

SEQ ID NO: 2211697 - RNA, 19 nt, Artificial Sequence
  Description of Artificial Sequence: Synthetic oligonucleotide
auuccucuaugucaauuuu

SEQ ID NO: 2211698 - RNA, 19 nt, Artificial Sequence
  Description of Artificial Sequence: Synthetic oligonucleotide
gaaacucucagagggaccu

SEQ ID NO: 2211699 - RNA, 19 nt, Artificial Sequence
  Description of Artificial Sequence: Synthetic oligonucleotide
uuggguacuugccugccuu

SEQ ID NO: 2211700 - RNA, 19 nt, Artificial Sequence
  Description of Artificial Sequence: Synthetic oligonucleotide
uggagcguccuagaggacu

SEQ ID NO: 2211701 - RNA, 19 nt, Artificial Sequence
  Description of Artificial Sequence: Synthetic oligonucleotide
gaauuugaucuuggcuugc

SEQ ID NO: 2211702 - RNA, 19 nt, Artificial Sequence
  Description of Artificial Sequence: Synthetic oligonucleotide
ugcggccuuggaaugccag

SEQ ID NO: 2211703 - RNA, 19 nt, Artificial Sequence
  Description of Artificial Sequence: Synthetic oligonucleotide
cuaucuggcugacuggaca

SEQ ID NO: 2211704 - RNA, 19 nt, Artificial Sequence
  Description of Artificial Sequence: Synthetic oligonucleotide
aggaugucaggaauauuug

SEQ ID NO: 2211705 - RNA, 19 nt, Artificial Sequence
  Description of Artificial Sequence: Synthetic oligonucleotide
cagaccuagcuugaugaag

SEQ ID NO: 2211706 - RNA, 19 nt, Artificial Sequence
  Description of Artificial Sequence: Synthetic oligonucleotide
cugaucagccacuuuggga

SEQ ID NO: 2211707 - RNA, 19 nt, Artificial Sequence
  Description of Artificial Sequence: Synthetic oligonucleotide
augcagaccuagcuugaug

SEQ ID NO: 2211708 - RNA, 19 nt, Artificial Sequence
  Description of Artificial Sequence: Synthetic oligonucleotide
agcaugacugucccuugca

SEQ ID NO: 2211709 - RNA, 19 nt, Artificial Sequence
  Description of Artificial Sequence: Synthetic oligonucleotide
ugcuugcuggaauuugauc

SEQ ID NO: 2211710 - RNA, 19 nt, Artificial Sequence
  Description of Artificial Sequence: Synthetic oligonucleotide
cacucacauagggagaaac

SEQ ID NO: 2211711 - RNA, 19 nt, Artificial Sequence
  Description of Artificial Sequence: Synthetic oligonucleotide
gucaugcaauucuugggca

SEQ ID NO: 2211712 - RNA, 19 nt, Artificial Sequence
  Description of Artificial Sequence: Synthetic oligonucleotide
caggaugucaggaauauuu

SEQ ID NO: 2211713 - RNA, 19 nt, Artificial Sequence
  Description of Artificial Sequence: Synthetic oligonucleotide
aucgccaggaugucaugca

SEQ ID NO: 2211714 - RNA, 19 nt, Artificial Sequence
  Description of Artificial Sequence: Synthetic oligonucleotide
ugucuagcagcuccuccuc

SEQ ID NO: 2211715 - RNA, 19 nt, Artificial Sequence
  Description of Artificial Sequence: Synthetic oligonucleotide
uggucaccugguuagcaaa

SEQ ID NO: 2211716 - RNA, 19 nt, Artificial Sequence
  Description of Artificial Sequence: Synthetic oligonucleotide
gaacgggauccccucuuug

SEQ ID NO: 2211717 - RNA, 19 nt, Artificial Sequence
  Description of Artificial Sequence: Synthetic oligonucleotide
gaacuggccaaucuggcau

SEQ ID NO: 2211718 - RNA, 19 nt, Artificial Sequence
  Description of Artificial Sequence: Synthetic oligonucleotide
agacauggucaccugguua

SEQ ID NO: 2211719 - RNA, 19 nt, Artificial Sequence
  Description of Artificial Sequence: Synthetic oligonucleotide
acucggaacuggccaaucu

SEQ ID NO: 2211720 - RNA, 19 nt, Artificial Sequence
  Description of Artificial Sequence: Synthetic oligonucleotide
uccaagggcuggaucugca

SEQ ID NO: 2211721 - RNA, 19 nt, Artificial Sequence
  Description of Artificial Sequence: Synthetic oligonucleotide
ugacuagcacccugugacu

SEQ ID NO: 2211722 - RNA, 19 nt, Artificial Sequence
  Description of Artificial Sequence: Synthetic oligonucleotide
ugaucccaguccccagcag

SEQ ID NO: 2211723 - RNA, 19 nt, Artificial Sequence
  Description of Artificial Sequence: Synthetic oligonucleotide
gauccccucuuugggagag

SEQ ID NO: 2211724 - RNA, 19 nt, Artificial Sequence
  Description of Artificial Sequence: Synthetic oligonucleotide
ccuagcuugaugaagaagu

SEQ ID NO: 2211725 - RNA, 19 nt, Artificial Sequence
  Description of Artificial Sequence: Synthetic oligonucleotide
aaccagaaacuuggguacu

SEQ ID NO: 2211726 - RNA, 19 nt, Artificial Sequence
  Description of Artificial Sequence: Synthetic oligonucleotide
ucuggcugacuggacaccu

SEQ ID NO: 2211727 - RNA, 19 nt, Artificial Sequence
  Description of Artificial Sequence: Synthetic oligonucleotide
gcacccugugacuaucugg

SEQ ID NO: 2211728 - RNA, 19 nt, Artificial Sequence
  Description of Artificial Sequence: Synthetic oligonucleotide
ugcacccgaagccagcauu

SEQ ID NO: 2211729 - RNA, 19 nt, Artificial Sequence
  Description of Artificial Sequence: Synthetic oligonucleotide
acucacauagggagaaacu

SEQ ID NO: 2211730 - RNA, 19 nt, Artificial Sequence
  Description of Artificial Sequence: Synthetic oligonucleotide
ugcugaaugcggccuugga

SEQ ID NO: 2211731 - RNA, 19 nt, Artificial Sequence
  Description of Artificial Sequence: Synthetic oligonucleotide
cuagcaugacugucccuug

SEQ ID NO: 2211732 - RNA, 19 nt, Artificial Sequence
  Description of Artificial Sequence: Synthetic oligonucleotide
auguuggucaccacaggca

SEQ ID NO: 2211733 - RNA, 19 nt, Artificial Sequence
  Description of Artificial Sequence: Synthetic oligonucleotide
acauggucaccugguuagc

SEQ ID NO: 2211734 - RNA, 19 nt, Artificial Sequence
  Description of Artificial Sequence: Synthetic oligonucleotide
gaaugcggccuuggaaugc

SEQ ID NO: 2211735 - RNA, 19 nt, Artificial Sequence
  Description of Artificial Sequence: Synthetic oligonucleotide
accuagcuugaugaagaag

SEQ ID NO: 2211736 - RNA, 19 nt, Artificial Sequence
  Description of Artificial Sequence: Synthetic oligonucleotide
acuaucuggcugacuggac

SEQ ID NO: 2211737 - RNA, 19 nt, Artificial Sequence
  Description of Artificial Sequence: Synthetic oligonucleotide
gagugaagugcuugcugga

SEQ ID NO: 2211738 - RNA, 19 nt, Artificial Sequence
  Description of Artificial Sequence: Synthetic oligonucleotide
cugaaugcggccuuggaau

SEQ ID NO: 2211739 - RNA, 19 nt, Artificial Sequence
  Description of Artificial Sequence: Synthetic oligonucleotide
ccugccuugcugaaugcgg

SEQ ID NO: 2211740 - RNA, 19 nt, Artificial Sequence
  Description of Artificial Sequence: Synthetic oligonucleotide
cagagggaccugcugccgg

SEQ ID NO: 2211741 - RNA, 19 nt, Artificial Sequence
  Description of Artificial Sequence: Synthetic oligonucleotide
caggaauauuugucaccag

SEQ ID NO: 2211742 - RNA, 19 nt, Artificial Sequence
  Description of Artificial Sequence: Synthetic oligonucleotide
gagccuggauugcuccucc

SEQ ID NO: 2211743 - RNA, 19 nt, Artificial Sequence
  Description of Artificial Sequence: Synthetic oligonucleotide
agggguguccuuuucuguu

SEQ ID NO: 2211744 - RNA, 19 nt, Artificial Sequence
  Description of Artificial Sequence: Synthetic oligonucleotide
cuggaauuugaucuuggcu

SEQ ID NO: 2211745 - RNA, 19 nt, Artificial Sequence
  Description of Artificial Sequence: Synthetic oligonucleotide
ggauugcuccuccugaaga

SEQ ID NO: 2211746 - RNA, 19 nt, Artificial Sequence
  Description of Artificial Sequence: Synthetic oligonucleotide
ggagagaucaggggugucc

SEQ ID NO: 2211747 - RNA, 19 nt, Artificial Sequence
  Description of Artificial Sequence: Synthetic oligonucleotide
gacauuuuggagggucaca

SEQ ID NO: 2211748 - RNA, 19 nt, Artificial Sequence
  Description of Artificial Sequence: Synthetic oligonucleotide
ucgccaggaugucaugcaa

SEQ ID NO: 2211749 - RNA, 19 nt, Artificial Sequence
  Description of Artificial Sequence: Synthetic oligonucleotide
gucaccugguuagcaaaag

SEQ ID NO: 2211750 - RNA, 19 nt, Artificial Sequence
  Description of Artificial Sequence: Synthetic oligonucleotide
acaacugacagggccucca

SEQ ID NO: 2211751 - RNA, 19 nt, Artificial Sequence
  Description of Artificial Sequence: Synthetic oligonucleotide
cagguggacaugcagaccu

SEQ ID NO: 2211752 - RNA, 19 nt, Artificial Sequence
  Description of Artificial Sequence: Synthetic oligonucleotide
ccugguuagcaaaagcuga

SEQ ID NO: 2211753 - RNA, 19 nt, Artificial Sequence
  Description of Artificial Sequence: Synthetic oligonucleotide
uggccuugccaaagaagau

SEQ ID NO: 2211754 - RNA, 19 nt, Artificial Sequence
  Description of Artificial Sequence: Synthetic oligonucleotide
ccagcacugagugaagugc

SEQ ID NO: 2211755 - RNA, 19 nt, Artificial Sequence
  Description of Artificial Sequence: Synthetic oligonucleotide
gacugucccuugcagcauc

SEQ ID NO: 2211756 - RNA, 19 nt, Artificial Sequence
  Description of Artificial Sequence: Synthetic oligonucleotide
aaacucucagagggaccug

SEQ ID NO: 2211757 - RNA, 19 nt, Artificial Sequence
  Description of Artificial Sequence: Synthetic oligonucleotide
gagggcagcagaucuucaa

SEQ ID NO: 2211758 - RNA, 19 nt, Artificial Sequence
  Description of Artificial Sequence: Synthetic oligonucleotide
aguggaucgccaggauguc

SEQ ID NO: 2211759 - RNA, 19 nt, Artificial Sequence
  Description of Artificial Sequence: Synthetic oligonucleotide
gaucuccaacuugucuagc

SEQ ID NO: 2211760 - RNA, 19 nt, Artificial Sequence
  Description of Artificial Sequence: Synthetic oligonucleotide
cccucuuugggagagauca

SEQ ID NO: 2211761 - RNA, 19 nt, Artificial Sequence
  Description of Artificial Sequence: Synthetic oligonucleotide
caccuccccgccuccacgg

SEQ ID NO: 2211762 - RNA, 19 nt, Artificial Sequence
  Description of Artificial Sequence: Synthetic oligonucleotide
aggacauuuuggaggguca

SEQ ID NO: 2211763 - RNA, 19 nt, Artificial Sequence
  Description of Artificial Sequence: Synthetic oligonucleotide
cugcugccggcccaguggc

SEQ ID NO: 2211764 - RNA, 19 nt, Artificial Sequence
  Description of Artificial Sequence: Synthetic oligonucleotide
ggcaccgggaacgggaucc

SEQ ID NO: 2211765 - RNA, 19 nt, Artificial Sequence
  Description of Artificial Sequence: Synthetic oligonucleotide
auagguucugggccacuuu

SEQ ID NO: 2211766 - RNA, 19 nt, Artificial Sequence
  Description of Artificial Sequence: Synthetic oligonucleotide
auucaggaugucaggaaua

SEQ ID NO: 2211767 - RNA, 19 nt, Artificial Sequence
  Description of Artificial Sequence: Synthetic oligonucleotide
acauagggagaaacucuca

SEQ ID NO: 2211768 - RNA, 19 nt, Artificial Sequence
  Description of Artificial Sequence: Synthetic oligonucleotide
acccgaagccagcauuccu

SEQ ID NO: 2211769 - RNA, 19 nt, Artificial Sequence
  Description of Artificial Sequence: Synthetic oligonucleotide
agaucagggguguccuuuu

SEQ ID NO: 2211770 - RNA, 19 nt, Artificial Sequence
  Description of Artificial Sequence: Synthetic oligonucleotide
cauucaggaugucaggaau

SEQ ID NO: 2211771 - RNA, 19 nt, Artificial Sequence
  Description of Artificial Sequence: Synthetic oligonucleotide
gaccuagcuugaugaagaa

SEQ ID NO: 2211772 - RNA, 19 nt, Artificial Sequence
  Description of Artificial Sequence: Synthetic oligonucleotide
cuccauucuuggccuugcc

SEQ ID NO: 2211773 - RNA, 19 nt, Artificial Sequence
  Description of Artificial Sequence: Synthetic oligonucleotide
cauuccucuaugucaauuu

SEQ ID NO: 2211774 - RNA, 19 nt, Artificial Sequence
  Description of Artificial Sequence: Synthetic oligonucleotide
gggguguccuuuucuguug

SEQ ID NO: 2211775 - RNA, 19 nt, Artificial Sequence
  Description of Artificial Sequence: Synthetic oligonucleotide
gcugaggcuucagaucagg

SEQ ID NO: 2211776 - RNA, 19 nt, Artificial Sequence
  Description of Artificial Sequence: Synthetic oligonucleotide
caggcagcuccaagggcug

SEQ ID NO: 2211777 - RNA, 19 nt, Artificial Sequence
  Description of Artificial Sequence: Synthetic oligonucleotide
caacugacagggccuccac

SEQ ID NO: 2211778 - RNA, 19 nt, Artificial Sequence
  Description of Artificial Sequence: Synthetic oligonucleotide
ccugugacuaucuggcuga

SEQ ID NO: 2211779 - RNA, 19 nt, Artificial Sequence
  Description of Artificial Sequence: Synthetic oligonucleotide
ggguguccuuuucuguugc

SEQ ID NO: 2211780 - RNA, 19 nt, Artificial Sequence
  Description of Artificial Sequence: Synthetic oligonucleotide
gguggacaugcagaccuag

SEQ ID NO: 2211781 - RNA, 19 nt, Artificial Sequence
  Description of Artificial Sequence: Synthetic oligonucleotide
gcugaaugcggccuuggaa

SEQ ID NO: 2211782 - RNA, 19 nt, Artificial Sequence
  Description of Artificial Sequence: Synthetic oligonucleotide
ugccugccuugcugaaugc

SEQ ID NO: 2211783 - RNA, 19 nt, Artificial Sequence
  Description of Artificial Sequence: Synthetic oligonucleotide
cacugacuagcacccugug

SEQ ID NO: 2211784 - RNA, 19 nt, Artificial Sequence
  Description of Artificial Sequence: Synthetic oligonucleotide
cuagcacccugugacuauc

SEQ ID NO: 2211785 - RNA, 19 nt, Artificial Sequence
  Description of Artificial Sequence: Synthetic oligonucleotide
cgaggguacaacugacagg

SEQ ID NO: 2211786 - RNA, 19 nt, Artificial Sequence
  Description of Artificial Sequence: Synthetic oligonucleotide
agcuucgucuugagccugg

SEQ ID NO: 2211787 - RNA, 19 nt, Artificial Sequence
  Description of Artificial Sequence: Synthetic oligonucleotide
uccccucuuugggagagau

SEQ ID NO: 2211788 - RNA, 19 nt, Artificial Sequence
  Description of Artificial Sequence: Synthetic oligonucleotide
acaugcagaccuagcuuga

SEQ ID NO: 2211789 - RNA, 19 nt, Artificial Sequence
  Description of Artificial Sequence: Synthetic oligonucleotide
ggaucugcacccgaagcca

SEQ ID NO: 2211790 - RNA, 19 nt, Artificial Sequence
  Description of Artificial Sequence: Synthetic oligonucleotide
cuggcugacuggacaccug

SEQ ID NO: 2211791 - RNA, 19 nt, Artificial Sequence
  Description of Artificial Sequence: Synthetic oligonucleotide
gcggccuuggaaugccagg

SEQ ID NO: 2211792 - RNA, 19 nt, Artificial Sequence
  Description of Artificial Sequence: Synthetic oligonucleotide
cuggauugcuccuccugaa

SEQ ID NO: 2211793 - RNA, 19 nt, Artificial Sequence
  Description of Artificial Sequence: Synthetic oligonucleotide
cuccccgccuccacgggug

SEQ ID NO: 2211794 - RNA, 19 nt, Artificial Sequence
  Description of Artificial Sequence: Synthetic oligonucleotide
acccugugacuaucuggcu

SEQ ID NO: 2211795 - RNA, 19 nt, Artificial Sequence
  Description of Artificial Sequence: Synthetic oligonucleotide
gcuugcuggaucuccccac

SEQ ID NO: 2211796 - RNA, 19 nt, Artificial Sequence
  Description of Artificial Sequence: Synthetic oligonucleotide
ccucuaugucaauuuuaug

SEQ ID NO: 2211797 - RNA, 19 nt, Artificial Sequence
  Description of Artificial Sequence: Synthetic oligonucleotide
cagcaaaaccuagcaugac

SEQ ID NO: 2211798 - RNA, 19 nt, Artificial Sequence
  Description of Artificial Sequence: Synthetic oligonucleotide
gggucacagacauggucac

SEQ ID NO: 2211799 - RNA, 19 nt, Artificial Sequence
  Description of Artificial Sequence: Synthetic oligonucleotide
cauggucaccugguuagca

SEQ ID NO: 2211800 - RNA, 19 nt, Artificial Sequence
  Description of Artificial Sequence: Synthetic oligonucleotide
auccccgccuccauucuug

SEQ ID NO: 2211801 - RNA, 19 nt, Artificial Sequence
  Description of Artificial Sequence: Synthetic oligonucleotide
ucaggaugucaggaauauu

SEQ ID NO: 2211802 - RNA, 19 nt, Artificial Sequence
  Description of Artificial Sequence: Synthetic oligonucleotide
accagaaacuuggguacuu

SEQ ID NO: 2211803 - RNA, 19 nt, Artificial Sequence
  Description of Artificial Sequence: Synthetic oligonucleotide
ggacauuuuggagggucac

SEQ ID NO: 2211804 - RNA, 19 nt, Artificial Sequence
  Description of Artificial Sequence: Synthetic oligonucleotide
ggugacuauagcagaaccu

SEQ ID NO: 2211805 - RNA, 19 nt, Artificial Sequence
  Description of Artificial Sequence: Synthetic oligonucleotide
gccacuuugggaucaucaa

SEQ ID NO: 2211806 - RNA, 19 nt, Artificial Sequence
  Description of Artificial Sequence: Synthetic oligonucleotide
accuagcaugacugucccu

SEQ ID NO: 2211807 - RNA, 19 nt, Artificial Sequence
  Description of Artificial Sequence: Synthetic oligonucleotide
gcuucuggaaguggaucgc

SEQ ID NO: 2211808 - RNA, 19 nt, Artificial Sequence
  Description of Artificial Sequence: Synthetic oligonucleotide
gaccucgggcaccgggaac

SEQ ID NO: 2211809 - RNA, 19 nt, Artificial Sequence
  Description of Artificial Sequence: Synthetic oligonucleotide
gccuggauugcuccuccug

SEQ ID NO: 2211810 - RNA, 19 nt, Artificial Sequence
  Description of Artificial Sequence: Synthetic oligonucleotide
aucuccccacucacauagg

SEQ ID NO: 2211811 - RNA, 19 nt, Artificial Sequence
  Description of Artificial Sequence: Synthetic oligonucleotide
accgggaacgggauccccu

SEQ ID NO: 2211812 - RNA, 19 nt, Artificial Sequence
  Description of Artificial Sequence: Synthetic oligonucleotide
ccuggauugcuccuccuga

SEQ ID NO: 2211813 - RNA, 19 nt, Artificial Sequence
  Description of Artificial Sequence: Synthetic oligonucleotide
aggcagugugugaucccag

SEQ ID NO: 2211814 - RNA, 19 nt, Artificial Sequence
  Description of Artificial Sequence: Synthetic oligonucleotide
gagggaccugcugccggcc

SEQ ID NO: 2211815 - RNA, 19 nt, Artificial Sequence
  Description of Artificial Sequence: Synthetic oligonucleotide
caucagcaaaaccuagcau

SEQ ID NO: 2211816 - RNA, 19 nt, Artificial Sequence
  Description of Artificial Sequence: Synthetic oligonucleotide
gccugccuugcugaaugcg

SEQ ID NO: 2211817 - RNA, 19 nt, Artificial Sequence
  Description of Artificial Sequence: Synthetic oligonucleotide
ccagaaacuuggguacuug

SEQ ID NO: 2211818 - RNA, 19 nt, Artificial Sequence
  Description of Artificial Sequence: Synthetic oligonucleotide
caucucccgggucuccaca

SEQ ID NO: 2211819 - RNA, 19 nt, Artificial Sequence
  Description of Artificial Sequence: Synthetic oligonucleotide
gcguccuagaggacuaaac

SEQ ID NO: 2211820 - RNA, 19 nt, Artificial Sequence
  Description of Artificial Sequence: Synthetic oligonucleotide
cuugcuggaucuccccacu

SEQ ID NO: 2211821 - RNA, 19 nt, Artificial Sequence
  Description of Artificial Sequence: Synthetic oligonucleotide
gggaucaucaaaggugacu

SEQ ID NO: 2211822 - RNA, 19 nt, Artificial Sequence
  Description of Artificial Sequence: Synthetic oligonucleotide
cagcuccaagggcuggauc

SEQ ID NO: 2211823 - RNA, 19 nt, Artificial Sequence
  Description of Artificial Sequence: Synthetic oligonucleotide
cacgggugggcuucuggaa

SEQ ID NO: 2211824 - RNA, 19 nt, Artificial Sequence
  Description of Artificial Sequence: Synthetic oligonucleotide
guggaucgccaggauguca

SEQ ID NO: 2211825 - RNA, 19 nt, Artificial Sequence
  Description of Artificial Sequence: Synthetic oligonucleotide
ggcccaguggcacucggaa

SEQ ID NO: 2211826 - RNA, 19 nt, Artificial Sequence
  Description of Artificial Sequence: Synthetic oligonucleotide
agcguccuagaggacuaaa

SEQ ID NO: 2211827 - RNA, 19 nt, Artificial Sequence
  Description of Artificial Sequence: Synthetic oligonucleotide
cagcuucgucuugagccug

SEQ ID NO: 2211828 - RNA, 19 nt, Artificial Sequence
  Description of Artificial Sequence: Synthetic oligonucleotide
ggcacucggaacuggccaa

SEQ ID NO: 2211829 - RNA, 19 nt, Artificial Sequence
  Description of Artificial Sequence: Synthetic oligonucleotide
cugugacuaucuggcugac

SEQ ID NO: 2211830 - RNA, 19 nt, Artificial Sequence
  Description of Artificial Sequence: Synthetic oligonucleotide
gccccgaggguacaacuga

SEQ ID NO: 2211831 - RNA, 19 nt, Artificial Sequence
  Description of Artificial Sequence: Synthetic oligonucleotide
cacucggaacuggccaauc

SEQ ID NO: 2211832 - RNA, 19 nt, Artificial Sequence
  Description of Artificial Sequence: Synthetic oligonucleotide
ggacaugcagaccuagcuu

SEQ ID NO: 2211833 - RNA, 19 nt, Artificial Sequence
  Description of Artificial Sequence: Synthetic oligonucleotide
cggccuuggaaugccaggg

SEQ ID NO: 2211834 - RNA, 19 nt, Artificial Sequence
  Description of Artificial Sequence: Synthetic oligonucleotide
gcagaccuagcuugaugaa

SEQ ID NO: 2211835 - RNA, 19 nt, Artificial Sequence
  Description of Artificial Sequence: Synthetic oligonucleotide
cucgggcaccgggaacggg

SEQ ID NO: 2211836 - RNA, 19 nt, Artificial Sequence
  Description of Artificial Sequence: Synthetic oligonucleotide
gcacccgaagccagcauuc

SEQ ID NO: 2211837 - RNA, 19 nt, Artificial Sequence
  Description of Artificial Sequence: Synthetic oligonucleotide
cccaguggcacucggaacu

SEQ ID NO: 2211838 - RNA, 19 nt, Artificial Sequence
  Description of Artificial Sequence: Synthetic oligonucleotide
cagggguguccuuuucugu

SEQ ID NO: 2211839 - RNA, 19 nt, Artificial Sequence
  Description of Artificial Sequence: Synthetic oligonucleotide
caccgggaacgggaucccc

SEQ ID NO: 2211840 - RNA, 19 nt, Artificial Sequence
  Description of Artificial Sequence: Synthetic oligonucleotide
ggauccccucuuugggaga

SEQ ID NO: 2211841 - RNA, 19 nt, Artificial Sequence
  Description of Artificial Sequence: Synthetic oligonucleotide
cuuggguacuugccugccu

SEQ ID NO: 2211842 - RNA, 19 nt, Artificial Sequence
  Description of Artificial Sequence: Synthetic oligonucleotide
ggucaccugguuagcaaaa

SEQ ID NO: 2211843 - RNA, 19 nt, Artificial Sequence
  Description of Artificial Sequence: Synthetic oligonucleotide
cacaagguggagcguccua

SEQ ID NO: 2211844 - RNA, 19 nt, Artificial Sequence
  Description of Artificial Sequence: Synthetic oligonucleotide
cguccuagaggacuaaacu

SEQ ID NO: 2211845 - RNA, 19 nt, Artificial Sequence
  Description of Artificial Sequence: Synthetic oligonucleotide
gcccaguggcacucggaac

SEQ ID NO: 2211846 - RNA, 19 nt, Artificial Sequence
  Description of Artificial Sequence: Synthetic oligonucleotide
ccccgaggguacaacugac

SEQ ID NO: 2211847 - RNA, 19 nt, Artificial Sequence
  Description of Artificial Sequence: Synthetic oligonucleotide
caugcaauucuugggcauu

SEQ ID NO: 2211848 - RNA, 19 nt, Artificial Sequence
  Description of Artificial Sequence: Synthetic oligonucleotide
ggcagugugugaucccagu

SEQ ID NO: 2211849 - RNA, 19 nt, Artificial Sequence
  Description of Artificial Sequence: Synthetic oligonucleotide
ugccggcccaguggcacuc

SEQ ID NO: 2211850 - RNA, 19 nt, Artificial Sequence
  Description of Artificial Sequence: Synthetic oligonucleotide
ccacgggugggcuucugga

SEQ ID NO: 2211851 - RNA, 19 nt, Artificial Sequence
  Description of Artificial Sequence: Synthetic oligonucleotide
ggagcguccuagaggacua

SEQ ID NO: 2211852 - RNA, 19 nt, Artificial Sequence
  Description of Artificial Sequence: Synthetic oligonucleotide
ugcugccccgaggguacaa

SEQ ID NO: 2211853 - RNA, 19 nt, Artificial Sequence
  Description of Artificial Sequence: Synthetic oligonucleotide
ccgggaacgggauccccuc

SEQ ID NO: 2211854 - RNA, 19 nt, Artificial Sequence
  Description of Artificial Sequence: Synthetic oligonucleotide
cugucccuugcagcaucuc

SEQ ID NO: 2211855 - RNA, 19 nt, Artificial Sequence
  Description of Artificial Sequence: Synthetic oligonucleotide
cugccccgaggguacaacu

SEQ ID NO: 2211856 - RNA, 19 nt, Artificial Sequence
  Description of Artificial Sequence: Synthetic oligonucleotide
cccgaggguacaacugaca

SEQ ID NO: 2211857 - RNA, 19 nt, Artificial Sequence
  Description of Artificial Sequence: Synthetic oligonucleotide
ggaucuccccacucacaua

SEQ ID NO: 2211858 - RNA, 19 nt, Artificial Sequence
  Description of Artificial Sequence: Synthetic oligonucleotide
ccuagcaugacugucccuu

SEQ ID NO: 2211859 - RNA, 19 nt, Artificial Sequence
  Description of Artificial Sequence: Synthetic oligonucleotide
ggaccucgggcaccgggaa

SEQ ID NO: 2211860 - RNA, 19 nt, Artificial Sequence
  Description of Artificial Sequence: Synthetic oligonucleotide
agguggacaugcagaccua

SEQ ID NO: 2211861 - RNA, 19 nt, Artificial Sequence
  Description of Artificial Sequence: Synthetic oligonucleotide
cagacauggucaccugguu

SEQ ID NO: 2211862 - RNA, 19 nt, Artificial Sequence
  Description of Artificial Sequence: Synthetic oligonucleotide
gagcguccuagaggacuaa

SEQ ID NO: 2211863 - RNA, 19 nt, Artificial Sequence
  Description of Artificial Sequence: Synthetic oligonucleotide
guggagcguccuagaggac

SEQ ID NO: 2211864 - RNA, 19 nt, Artificial Sequence
  Description of Artificial Sequence: Synthetic oligonucleotide
auccccucuuugggagaga

SEQ ID NO: 2211865 - RNA, 19 nt, Artificial Sequence
  Description of Artificial Sequence: Synthetic oligonucleotide
gccuccacgggugggcuuc

SEQ ID NO: 2211866 - RNA, 19 nt, Artificial Sequence
  Description of Artificial Sequence: Synthetic oligonucleotide
gcugccccgaggguacaac

SEQ ID NO: 2211867 - RNA, 19 nt, Artificial Sequence
  Description of Artificial Sequence: Synthetic oligonucleotide
ggcugacuggacaccugga

SEQ ID NO: 2211868 - RNA, 19 nt, Artificial Sequence
  Description of Artificial Sequence: Synthetic oligonucleotide
ggcuggaucugcacccgaa

SEQ ID NO: 2211869 - RNA, 19 nt, Artificial Sequence
  Description of Artificial Sequence: Synthetic oligonucleotide
augcggccuuggaaugcca

SEQ ID NO: 2211870 - RNA, 19 nt, Artificial Sequence
  Description of Artificial Sequence: Synthetic oligonucleotide
ccccacucacauagggaga

SEQ ID NO: 2211871 - RNA, 19 nt, Artificial Sequence
  Description of Artificial Sequence: Synthetic oligonucleotide
caugcagaccuagcuugau

SEQ ID NO: 2211872 - RNA, 19 nt, Artificial Sequence
  Description of Artificial Sequence: Synthetic oligonucleotide
cuugccugccuugcugaau

SEQ ID NO: 2211873 - RNA, 19 nt, Artificial Sequence
  Description of Artificial Sequence: Synthetic oligonucleotide
cccgccuccacgggugggc

SEQ ID NO: 2211874 - RNA, 19 nt, Artificial Sequence
  Description of Artificial Sequence: Synthetic oligonucleotide
ccgaagccagcauuccucu

SEQ ID NO: 2211875 - RNA, 19 nt, Artificial Sequence
  Description of Artificial Sequence: Synthetic oligonucleotide
gcuucagaucagggcacaa

SEQ ID NO: 2211876 - RNA, 19 nt, Artificial Sequence
  Description of Artificial Sequence: Synthetic oligonucleotide
ccccucuuugggagagauc

SEQ ID NO: 2211877 - RNA, 19 nt, Artificial Sequence
  Description of Artificial Sequence: Synthetic oligonucleotide
ggaacgggauccccucuuu

SEQ ID NO: 2211878 - RNA, 19 nt, Artificial Sequence
  Description of Artificial Sequence: Synthetic oligonucleotide
ccccgccuccauucuuggc

SEQ ID NO: 2211879 - RNA, 19 nt, Artificial Sequence
  Description of Artificial Sequence: Synthetic oligonucleotide
gggaacgggauccccucuu

SEQ ID NO: 2211880 - RNA, 19 nt, Artificial Sequence
  Description of Artificial Sequence: Synthetic oligonucleotide
gcuucgucuugagccugga

SEQ ID NO: 2211881 - RNA, 19 nt, Artificial Sequence
  Description of Artificial Sequence: Synthetic oligonucleotide
gggagagaucagggguguc

SEQ ID NO: 2211882 - RNA, 19 nt, Artificial Sequence
  Description of Artificial Sequence: Synthetic oligonucleotide
cuccacgggugggcuucug

SEQ ID NO: 2211883 - RNA, 19 nt, Artificial Sequence
  Description of Artificial Sequence: Synthetic oligonucleotide
gcaacugaucagccacuuu

SEQ ID NO: 2211884 - RNA, 19 nt, Artificial Sequence
  Description of Artificial Sequence: Synthetic oligonucleotide
cugccggcccaguggcacu

SEQ ID NO: 2211885 - RNA, 19 nt, Artificial Sequence
  Description of Artificial Sequence: Synthetic oligonucleotide
ggagggucacagacauggu

SEQ ID NO: 2211886 - RNA, 19 nt, Artificial Sequence
  Description of Artificial Sequence: Synthetic oligonucleotide
ccacucacauagggagaaa

SEQ ID NO: 2211887 - RNA, 19 nt, Artificial Sequence
  Description of Artificial Sequence: Synthetic oligonucleotide
gcauagguucugggccacu

SEQ ID NO: 2211888 - RNA, 19 nt, Artificial Sequence
  Description of Artificial Sequence: Synthetic oligonucleotide
gcacucggaacuggccaau

SEQ ID NO: 2211889 - RNA, 19 nt, Artificial Sequence
  Description of Artificial Sequence: Synthetic oligonucleotide
cgaagccagcauuccucua

SEQ ID NO: 2211890 - RNA, 19 nt, Artificial Sequence
  Description of Artificial Sequence: Synthetic oligonucleotide
cggcccaguggcacucgga

SEQ ID NO: 2211891 - RNA, 19 nt, Artificial Sequence
  Description of Artificial Sequence: Synthetic oligonucleotide
ccuccccgccuccacgggu

SEQ ID NO: 2211892 - RNA, 19 nt, Artificial Sequence
  Description of Artificial Sequence: Synthetic oligonucleotide
ccacauccccgccuccauu

SEQ ID NO: 2211893 - RNA, 19 nt, Artificial Sequence
  Description of Artificial Sequence: Synthetic oligonucleotide
ccaggcccugcugccccga

SEQ ID NO: 2211894 - RNA, 19 nt, Artificial Sequence
  Description of Artificial Sequence: Synthetic oligonucleotide
cgggaacgggauccccucu

SEQ ID NO: 2211895 - RNA, 19 nt, Artificial Sequence
  Description of Artificial Sequence: Synthetic oligonucleotide
cgccuccacgggugggcuu

SEQ ID NO: 2211896 - RNA, 19 nt, Artificial Sequence
  Description of Artificial Sequence: Synthetic oligonucleotide
uauucaaauguccagaagg

SEQ ID NO: 2211897 - RNA, 19 nt, Artificial Sequence
  Description of Artificial Sequence: Synthetic oligonucleotide
aaagaaguaagccaagcag

SEQ ID NO: 2211898 - RNA, 19 nt, Artificial Sequence
  Description of Artificial Sequence: Synthetic oligonucleotide
ucugauaguauucaaaugu

SEQ ID NO: 2211899 - RNA, 19 nt, Artificial Sequence
  Description of Artificial Sequence: Synthetic oligonucleotide
aacacagaccccgagaugc

SEQ ID NO: 2211900 - RNA, 19 nt, Artificial Sequence
  Description of Artificial Sequence: Synthetic oligonucleotide
uuuuauucugucaaagacc

SEQ ID NO: 2211901 - RNA, 19 nt, Artificial Sequence
  Description of Artificial Sequence: Synthetic oligonucleotide
acaauugucacaauggugg

SEQ ID NO: 2211902 - RNA, 19 nt, Artificial Sequence
  Description of Artificial Sequence: Synthetic oligonucleotide
aagaaguaagccaagcagc

SEQ ID NO: 2211903 - RNA, 19 nt, Artificial Sequence
  Description of Artificial Sequence: Synthetic oligonucleotide
aauuguugggagauggucc

SEQ ID NO: 2211904 - RNA, 19 nt, Artificial Sequence
  Description of Artificial Sequence: Synthetic oligonucleotide
auuguuucccagcagcucc

SEQ ID NO: 2211905 - RNA, 19 nt, Artificial Sequence
  Description of Artificial Sequence: Synthetic oligonucleotide
uccaaaaggggccauagag

SEQ ID NO: 2211906 - RNA, 19 nt, Artificial Sequence
  Description of Artificial Sequence: Synthetic oligonucleotide
aaaagaauaggaaacgaug

SEQ ID NO: 2211907 - RNA, 19 nt, Artificial Sequence
  Description of Artificial Sequence: Synthetic oligonucleotide
uggcacauauccaaaaggg

SEQ ID NO: 2211908 - RNA, 19 nt, Artificial Sequence
  Description of Artificial Sequence: Synthetic oligonucleotide
aacgguacgucuucucucc

SEQ ID NO: 2211909 - RNA, 19 nt, Artificial Sequence
  Description of Artificial Sequence: Synthetic oligonucleotide
auugcuauggcaaagacca

SEQ ID NO: 2211910 - RNA, 19 nt, Artificial Sequence
  Description of Artificial Sequence: Synthetic oligonucleotide
aaaaugucauugccaacac

SEQ ID NO: 2211911 - RNA, 19 nt, Artificial Sequence
  Description of Artificial Sequence: Synthetic oligonucleotide
uaaaugaagagcgaguagc

SEQ ID NO: 2211912 - RNA, 19 nt, Artificial Sequence
  Description of Artificial Sequence: Synthetic oligonucleotide
aauugcuauggcaaagacc

SEQ ID NO: 2211913 - RNA, 19 nt, Artificial Sequence
  Description of Artificial Sequence: Synthetic oligonucleotide
uaggcauagaugaugguag

SEQ ID NO: 2211914 - RNA, 19 nt, Artificial Sequence
  Description of Artificial Sequence: Synthetic oligonucleotide
uaagaaguuggaaagguuc

SEQ ID NO: 2211915 - RNA, 19 nt, Artificial Sequence
  Description of Artificial Sequence: Synthetic oligonucleotide
ucgauguuuauuguggugg

SEQ ID NO: 2211916 - RNA, 19 nt, Artificial Sequence
  Description of Artificial Sequence: Synthetic oligonucleotide
aaaggggccauagagaucu

SEQ ID NO: 2211917 - RNA, 19 nt, Artificial Sequence
  Description of Artificial Sequence: Synthetic oligonucleotide
uccucgauguuuauugugg

SEQ ID NO: 2211918 - RNA, 19 nt, Artificial Sequence
  Description of Artificial Sequence: Synthetic oligonucleotide
ugauaguauucaaaugucc

SEQ ID NO: 2211919 - RNA, 19 nt, Artificial Sequence
  Description of Artificial Sequence: Synthetic oligonucleotide
ucuccagaaaagaauagga

SEQ ID NO: 2211920 - RNA, 19 nt, Artificial Sequence
  Description of Artificial Sequence: Synthetic oligonucleotide
aaagaauaggaaacgaugu

SEQ ID NO: 2211921 - RNA, 19 nt, Artificial Sequence
  Description of Artificial Sequence: Synthetic oligonucleotide
aucgccaaacucuucaaac

SEQ ID NO: 2211922 - RNA, 19 nt, Artificial Sequence
  Description of Artificial Sequence: Synthetic oligonucleotide
ucaugacuaagacccaacg

SEQ ID NO: 2211923 - RNA, 19 nt, Artificial Sequence
  Description of Artificial Sequence: Synthetic oligonucleotide
uguggggauauaaaugaag

SEQ ID NO: 2211924 - RNA, 19 nt, Artificial Sequence
  Description of Artificial Sequence: Synthetic oligonucleotide
cugccauucagccagaggc

SEQ ID NO: 2211925 - RNA, 19 nt, Artificial Sequence
  Description of Artificial Sequence: Synthetic oligonucleotide
acugcaagucaucugcagc

SEQ ID NO: 2211926 - RNA, 19 nt, Artificial Sequence
  Description of Artificial Sequence: Synthetic oligonucleotide
aagaaugucugauaguauu

SEQ ID NO: 2211927 - RNA, 19 nt, Artificial Sequence
  Description of Artificial Sequence: Synthetic oligonucleotide
aaguaacucagucucguca

SEQ ID NO: 2211928 - RNA, 19 nt, Artificial Sequence
  Description of Artificial Sequence: Synthetic oligonucleotide
gggauauaaaugaagagcg

SEQ ID NO: 2211929 - RNA, 19 nt, Artificial Sequence
  Description of Artificial Sequence: Synthetic oligonucleotide
aaguuggaaagguucccac

SEQ ID NO: 2211930 - RNA, 19 nt, Artificial Sequence
  Description of Artificial Sequence: Synthetic oligonucleotide
aauugucacaaugguggcc

SEQ ID NO: 2211931 - RNA, 19 nt, Artificial Sequence
  Description of Artificial Sequence: Synthetic oligonucleotide
ucccagauggauuaagaag

SEQ ID NO: 2211932 - RNA, 19 nt, Artificial Sequence
  Description of Artificial Sequence: Synthetic oligonucleotide
agagcuagaggcacgagcc

SEQ ID NO: 2211933 - RNA, 19 nt, Artificial Sequence
  Description of Artificial Sequence: Synthetic oligonucleotide
ggauuaagaaguuggaaag

SEQ ID NO: 2211934 - RNA, 19 nt, Artificial Sequence
  Description of Artificial Sequence: Synthetic oligonucleotide
gaagcaacacaauugucac

SEQ ID NO: 2211935 - RNA, 19 nt, Artificial Sequence
  Description of Artificial Sequence: Synthetic oligonucleotide
augacuaagacccaacgaa

SEQ ID NO: 2211936 - RNA, 19 nt, Artificial Sequence
  Description of Artificial Sequence: Synthetic oligonucleotide
agaaguaagccaagcagcc

SEQ ID NO: 2211937 - RNA, 19 nt, Artificial Sequence
  Description of Artificial Sequence: Synthetic oligonucleotide
ucgguuauccucucgaaca

SEQ ID NO: 2211938 - RNA, 19 nt, Artificial Sequence
  Description of Artificial Sequence: Synthetic oligonucleotide
uaagacccaacgaacaacu

SEQ ID NO: 2211939 - RNA, 19 nt, Artificial Sequence
  Description of Artificial Sequence: Synthetic oligonucleotide
caacgaacaacucucuggg

SEQ ID NO: 2211940 - RNA, 19 nt, Artificial Sequence
  Description of Artificial Sequence: Synthetic oligonucleotide
aguaacucagucucgucag

SEQ ID NO: 2211941 - RNA, 19 nt, Artificial Sequence
  Description of Artificial Sequence: Synthetic oligonucleotide
agcaaaguggcuccaucgc

SEQ ID NO: 2211942 - RNA, 19 nt, Artificial Sequence
  Description of Artificial Sequence: Synthetic oligonucleotide
guaaguguccacaucaaag

SEQ ID NO: 2211943 - RNA, 19 nt, Artificial Sequence
  Description of Artificial Sequence: Synthetic oligonucleotide
uguuagcuggauuuggcug

SEQ ID NO: 2211944 - RNA, 19 nt, Artificial Sequence
  Description of Artificial Sequence: Synthetic oligonucleotide
acucagucucgucagaguc

SEQ ID NO: 2211945 - RNA, 19 nt, Artificial Sequence
  Description of Artificial Sequence: Synthetic oligonucleotide
uagcaaaguggcuccaucg

SEQ ID NO: 2211946 - RNA, 19 nt, Artificial Sequence
  Description of Artificial Sequence: Synthetic oligonucleotide
auaaaugaagagcgaguag

SEQ ID NO: 2211947 - RNA, 19 nt, Artificial Sequence
  Description of Artificial Sequence: Synthetic oligonucleotide
guuuggaagucucaccagg

SEQ ID NO: 2211948 - RNA, 19 nt, Artificial Sequence
  Description of Artificial Sequence: Synthetic oligonucleotide
uuauugugguggcaucugg

SEQ ID NO: 2211949 - RNA, 19 nt, Artificial Sequence
  Description of Artificial Sequence: Synthetic oligonucleotide
uccacaguacugcuguggg

SEQ ID NO: 2211950 - RNA, 19 nt, Artificial Sequence
  Description of Artificial Sequence: Synthetic oligonucleotide
gauaguauucaaaugucca

SEQ ID NO: 2211951 - RNA, 19 nt, Artificial Sequence
  Description of Artificial Sequence: Synthetic oligonucleotide
uauaaaugaagagcgagua

SEQ ID NO: 2211952 - RNA, 19 nt, Artificial Sequence
  Description of Artificial Sequence: Synthetic oligonucleotide
gaugguagccgcuauggac

SEQ ID NO: 2211953 - RNA, 19 nt, Artificial Sequence
  Description of Artificial Sequence: Synthetic oligonucleotide
gaaccggcaacagagaccc

SEQ ID NO: 2211954 - RNA, 19 nt, Artificial Sequence
  Description of Artificial Sequence: Synthetic oligonucleotide
ugggagaugguccaucucu

SEQ ID NO: 2211955 - RNA, 19 nt, Artificial Sequence
  Description of Artificial Sequence: Synthetic oligonucleotide
aacucgggcacauaacggu

SEQ ID NO: 2211956 - RNA, 19 nt, Artificial Sequence
  Description of Artificial Sequence: Synthetic oligonucleotide
agagcgaguagccguagac

SEQ ID NO: 2211957 - RNA, 19 nt, Artificial Sequence
  Description of Artificial Sequence: Synthetic oligonucleotide
cuccacaugaggaagcccc

SEQ ID NO: 2211958 - RNA, 19 nt, Artificial Sequence
  Description of Artificial Sequence: Synthetic oligonucleotide
guggcacauauccaaaagg

SEQ ID NO: 2211959 - RNA, 19 nt, Artificial Sequence
  Description of Artificial Sequence: Synthetic oligonucleotide
auuaagaaguuggaaaggu

SEQ ID NO: 2211960 - RNA, 19 nt, Artificial Sequence
  Description of Artificial Sequence: Synthetic oligonucleotide
uacagccucacgaaguucu

SEQ ID NO: 2211961 - RNA, 19 nt, Artificial Sequence
  Description of Artificial Sequence: Synthetic oligonucleotide
ugacuaagacccaacgaac

SEQ ID NO: 2211962 - RNA, 19 nt, Artificial Sequence
  Description of Artificial Sequence: Synthetic oligonucleotide
aacugcaagucaucugcag

SEQ ID NO: 2211963 - RNA, 19 nt, Artificial Sequence
  Description of Artificial Sequence: Synthetic oligonucleotide
acgauguucaucacuuugc

SEQ ID NO: 2211964 - RNA, 19 nt, Artificial Sequence
  Description of Artificial Sequence: Synthetic oligonucleotide
ucaaagaaguaagccaagc

SEQ ID NO: 2211965 - RNA, 19 nt, Artificial Sequence
  Description of Artificial Sequence: Synthetic oligonucleotide
uggccaaggccacacgucg

SEQ ID NO: 2211966 - RNA, 19 nt, Artificial Sequence
  Description of Artificial Sequence: Synthetic oligonucleotide
gaauaggaaacgauguuca

SEQ ID NO: 2211967 - RNA, 19 nt, Artificial Sequence
  Description of Artificial Sequence: Synthetic oligonucleotide
aggaaccggcaacagagac

SEQ ID NO: 2211968 - RNA, 19 nt, Artificial Sequence
  Description of Artificial Sequence: Synthetic oligonucleotide
acgaacaacucucugggga

SEQ ID NO: 2211969 - RNA, 19 nt, Artificial Sequence
  Description of Artificial Sequence: Synthetic oligonucleotide
ccagaaaagaauaggaaac

SEQ ID NO: 2211970 - RNA, 19 nt, Artificial Sequence
  Description of Artificial Sequence: Synthetic oligonucleotide
aacgaacaacucucugggg

SEQ ID NO: 2211971 - RNA, 19 nt, Artificial Sequence
  Description of Artificial Sequence: Synthetic oligonucleotide
cacacgaucuccagaaaag

SEQ ID NO: 2211972 - RNA, 19 nt, Artificial Sequence
  Description of Artificial Sequence: Synthetic oligonucleotide
ggaacucgggcacauaacg

SEQ ID NO: 2211973 - RNA, 19 nt, Artificial Sequence
  Description of Artificial Sequence: Synthetic oligonucleotide
uaauugcuauggcaaagac

SEQ ID NO: 2211974 - RNA, 19 nt, Artificial Sequence
  Description of Artificial Sequence: Synthetic oligonucleotide
augaagagcgaguagccgu

SEQ ID NO: 2211975 - RNA, 19 nt, Artificial Sequence
  Description of Artificial Sequence: Synthetic oligonucleotide
ggggauauaaaugaagagc

SEQ ID NO: 2211976 - RNA, 19 nt, Artificial Sequence
  Description of Artificial Sequence: Synthetic oligonucleotide
auaacgguacgucuucucu

SEQ ID NO: 2211977 - RNA, 19 nt, Artificial Sequence
  Description of Artificial Sequence: Synthetic oligonucleotide
aguauucaaauguccagaa

SEQ ID NO: 2211978 - RNA, 19 nt, Artificial Sequence
  Description of Artificial Sequence: Synthetic oligonucleotide
uagccguagacgcacacga

SEQ ID NO: 2211979 - RNA, 19 nt, Artificial Sequence
  Description of Artificial Sequence: Synthetic oligonucleotide
agaaugucugauaguauuc

SEQ ID NO: 2211980 - RNA, 19 nt, Artificial Sequence
  Description of Artificial Sequence: Synthetic oligonucleotide
gacauacagccucacgaag

SEQ ID NO: 2211981 - RNA, 19 nt, Artificial Sequence
  Description of Artificial Sequence: Synthetic oligonucleotide
ucaaagaaugucugauagu

SEQ ID NO: 2211982 - RNA, 19 nt, Artificial Sequence
  Description of Artificial Sequence: Synthetic oligonucleotide
auugucacaaugguggcca

SEQ ID NO: 2211983 - RNA, 19 nt, Artificial Sequence
  Description of Artificial Sequence: Synthetic oligonucleotide
ugcuauggcaaagaccaag

SEQ ID NO: 2211984 - RNA, 19 nt, Artificial Sequence
  Description of Artificial Sequence: Synthetic oligonucleotide
cagcaaguaacucagucuc

SEQ ID NO: 2211985 - RNA, 19 nt, Artificial Sequence
  Description of Artificial Sequence: Synthetic oligonucleotide
aggcauagaugaugguagc

SEQ ID NO: 2211986 - RNA, 19 nt, Artificial Sequence
  Description of Artificial Sequence: Synthetic oligonucleotide
agcaacacaauugucacaa

SEQ ID NO: 2211987 - RNA, 19 nt, Artificial Sequence
  Description of Artificial Sequence: Synthetic oligonucleotide
agacccaacgaacaacucu

SEQ ID NO: 2211988 - RNA, 19 nt, Artificial Sequence
  Description of Artificial Sequence: Synthetic oligonucleotide
agagaucuggguugcugcg

SEQ ID NO: 2211989 - RNA, 19 nt, Artificial Sequence
  Description of Artificial Sequence: Synthetic oligonucleotide
aauaggaaacgauguucau

SEQ ID NO: 2211990 - RNA, 19 nt, Artificial Sequence
  Description of Artificial Sequence: Synthetic oligonucleotide
gauguucaucacuuugcug

SEQ ID NO: 2211991 - RNA, 19 nt, Artificial Sequence
  Description of Artificial Sequence: Synthetic oligonucleotide
agucucgucagagucauug

SEQ ID NO: 2211992 - RNA, 19 nt, Artificial Sequence
  Description of Artificial Sequence: Synthetic oligonucleotide
uguuuggaagucucaccag

SEQ ID NO: 2211993 - RNA, 19 nt, Artificial Sequence
  Description of Artificial Sequence: Synthetic oligonucleotide
uuaagaaguuggaaagguu

SEQ ID NO: 2211994 - RNA, 19 nt, Artificial Sequence
  Description of Artificial Sequence: Synthetic oligonucleotide
uugcugcuagcaaaguggc

SEQ ID NO: 2211995 - RNA, 19 nt, Artificial Sequence
  Description of Artificial Sequence: Synthetic oligonucleotide
guauucaaauguccagaag

SEQ ID NO: 2211996 - RNA, 19 nt, Artificial Sequence
  Description of Artificial Sequence: Synthetic oligonucleotide
agaggcucuucucccaagg

SEQ ID NO: 2211997 - RNA, 19 nt, Artificial Sequence
  Description of Artificial Sequence: Synthetic oligonucleotide
gacccuuuuauucugucaa

SEQ ID NO: 2211998 - RNA, 19 nt, Artificial Sequence
  Description of Artificial Sequence: Synthetic oligonucleotide
aacagcuggccaaaauguc

SEQ ID NO: 2211999 - RNA, 19 nt, Artificial Sequence
  Description of Artificial Sequence: Synthetic oligonucleotide
uaauuguugggagaugguc

SEQ ID NO: 2212000 - RNA, 19 nt, Artificial Sequence
  Description of Artificial Sequence: Synthetic oligonucleotide
uggaagucucaccaggguc

SEQ ID NO: 2212001 - RNA, 19 nt, Artificial Sequence
  Description of Artificial Sequence: Synthetic oligonucleotide
uggggcaucaaagaaguaa

SEQ ID NO: 2212002 - RNA, 19 nt, Artificial Sequence
  Description of Artificial Sequence: Synthetic oligonucleotide
cuggccaaaaugucauugc

SEQ ID NO: 2212003 - RNA, 19 nt, Artificial Sequence
  Description of Artificial Sequence: Synthetic oligonucleotide
ucacuuugcuguuucucca

SEQ ID NO: 2212004 - RNA, 19 nt, Artificial Sequence
  Description of Artificial Sequence: Synthetic oligonucleotide
uuuauugugguggcaucug

SEQ ID NO: 2212005 - RNA, 19 nt, Artificial Sequence
  Description of Artificial Sequence: Synthetic oligonucleotide
ucgccaaacucuucaaacu

SEQ ID NO: 2212006 - RNA, 19 nt, Artificial Sequence
  Description of Artificial Sequence: Synthetic oligonucleotide
aacucagucucgucagagu

SEQ ID NO: 2212007 - RNA, 19 nt, Artificial Sequence
  Description of Artificial Sequence: Synthetic oligonucleotide
gaacucgggcacauaacgg

SEQ ID NO: 2212008 - RNA, 19 nt, Artificial Sequence
  Description of Artificial Sequence: Synthetic oligonucleotide
uaacucagucucgucagag

SEQ ID NO: 2212009 - RNA, 19 nt, Artificial Sequence
  Description of Artificial Sequence: Synthetic oligonucleotide
ucacgaaguucuucccagg

SEQ ID NO: 2212010 - RNA, 19 nt, Artificial Sequence
  Description of Artificial Sequence: Synthetic oligonucleotide
acuaagacccaacgaacaa

SEQ ID NO: 2212011 - RNA, 19 nt, Artificial Sequence
  Description of Artificial Sequence: Synthetic oligonucleotide
ucucuggggcaucaaagaa

SEQ ID NO: 2212012 - RNA, 19 nt, Artificial Sequence
  Description of Artificial Sequence: Synthetic oligonucleotide
gcaacugucugguugggag

SEQ ID NO: 2212013 - RNA, 19 nt, Artificial Sequence
  Description of Artificial Sequence: Synthetic oligonucleotide
caaagaaguaagccaagca

SEQ ID NO: 2212014 - RNA, 19 nt, Artificial Sequence
  Description of Artificial Sequence: Synthetic oligonucleotide
ucgucagagucauuguuuc

SEQ ID NO: 2212015 - RNA, 19 nt, Artificial Sequence
  Description of Artificial Sequence: Synthetic oligonucleotide
caauugucacaaugguggc

SEQ ID NO: 2212016 - RNA, 19 nt, Artificial Sequence
  Description of Artificial Sequence: Synthetic oligonucleotide
gaaugucugauaguauuca

SEQ ID NO: 2212017 - RNA, 19 nt, Artificial Sequence
  Description of Artificial Sequence: Synthetic oligonucleotide
uggguuugcugcuagcaaa

SEQ ID NO: 2212018 - RNA, 19 nt, Artificial Sequence
  Description of Artificial Sequence: Synthetic oligonucleotide
agucucaccaggguccucg

SEQ ID NO: 2212019 - RNA, 19 nt, Artificial Sequence
  Description of Artificial Sequence: Synthetic oligonucleotide
aguuggaaagguucccacu

SEQ ID NO: 2212020 - RNA, 19 nt, Artificial Sequence
  Description of Artificial Sequence: Synthetic oligonucleotide
ucaccaggguccucgaugu

SEQ ID NO: 2212021 - RNA, 19 nt, Artificial Sequence
  Description of Artificial Sequence: Synthetic oligonucleotide
aucucuggggcaucaaaga

SEQ ID NO: 2212022 - RNA, 19 nt, Artificial Sequence
  Description of Artificial Sequence: Synthetic oligonucleotide
aguagccguagacgcacac

SEQ ID NO: 2212023 - RNA, 19 nt, Artificial Sequence
  Description of Artificial Sequence: Synthetic oligonucleotide
uacgucuucucucccagau

SEQ ID NO: 2212024 - RNA, 19 nt, Artificial Sequence
  Description of Artificial Sequence: Synthetic oligonucleotide
ucgggcacauaacgguacg

SEQ ID NO: 2212025 - RNA, 19 nt, Artificial Sequence
  Description of Artificial Sequence: Synthetic oligonucleotide
uggcuguaauuguugggag

SEQ ID NO: 2212026 - RNA, 19 nt, Artificial Sequence
  Description of Artificial Sequence: Synthetic oligonucleotide
caaauguccagaagggaga

SEQ ID NO: 2212027 - RNA, 19 nt, Artificial Sequence
  Description of Artificial Sequence: Synthetic oligonucleotide
uggauuuggcugcugcaac

SEQ ID NO: 2212028 - RNA, 19 nt, Artificial Sequence
  Description of Artificial Sequence: Synthetic oligonucleotide
uggguugguguuuggaagu

SEQ ID NO: 2212029 - RNA, 19 nt, Artificial Sequence
  Description of Artificial Sequence: Synthetic oligonucleotide
aguucuucccaggaaccgg

SEQ ID NO: 2212030 - RNA, 19 nt, Artificial Sequence
  Description of Artificial Sequence: Synthetic oligonucleotide
gcauagaugaugguagccg

SEQ ID NO: 2212031 - RNA, 19 nt, Artificial Sequence
  Description of Artificial Sequence: Synthetic oligonucleotide
gauggauuaagaaguugga

SEQ ID NO: 2212032 - RNA, 19 nt, Artificial Sequence
  Description of Artificial Sequence: Synthetic oligonucleotide
acgugaagcaacacaauug

SEQ ID NO: 2212033 - RNA, 19 nt, Artificial Sequence
  Description of Artificial Sequence: Synthetic oligonucleotide
ucuggguuugcugcuagca

SEQ ID NO: 2212034 - RNA, 19 nt, Artificial Sequence
  Description of Artificial Sequence: Synthetic oligonucleotide
gcuguggggauauaaauga

SEQ ID NO: 2212035 - RNA, 19 nt, Artificial Sequence
  Description of Artificial Sequence: Synthetic oligonucleotide
gaggcucuucucccaaggg

SEQ ID NO: 2212036 - RNA, 19 nt, Artificial Sequence
  Description of Artificial Sequence: Synthetic oligonucleotide
gagcgaguagccguagacg

SEQ ID NO: 2212037 - RNA, 19 nt, Artificial Sequence
  Description of Artificial Sequence: Synthetic oligonucleotide
gacccaacgaacaacucuc

SEQ ID NO: 2212038 - RNA, 19 nt, Artificial Sequence
  Description of Artificial Sequence: Synthetic oligonucleotide
auaggcauagaugauggua

SEQ ID NO: 2212039 - RNA, 19 nt, Artificial Sequence
  Description of Artificial Sequence: Synthetic oligonucleotide
guugcugcggacauacagc

SEQ ID NO: 2212040 - RNA, 19 nt, Artificial Sequence
  Description of Artificial Sequence: Synthetic oligonucleotide
uguuuauugugguggcauc

SEQ ID NO: 2212041 - RNA, 19 nt, Artificial Sequence
  Description of Artificial Sequence: Synthetic oligonucleotide
ggcaaucaugacuaagacc

SEQ ID NO: 2212042 - RNA, 19 nt, Artificial Sequence
  Description of Artificial Sequence: Synthetic oligonucleotide
ggguccucgauguuuauug

SEQ ID NO: 2212043 - RNA, 19 nt, Artificial Sequence
  Description of Artificial Sequence: Synthetic oligonucleotide
cuaagacccaacgaacaac

SEQ ID NO: 2212044 - RNA, 19 nt, Artificial Sequence
  Description of Artificial Sequence: Synthetic oligonucleotide
uuauccucucgaacagcug

SEQ ID NO: 2212045 - RNA, 19 nt, Artificial Sequence
  Description of Artificial Sequence: Synthetic oligonucleotide
aaaaggggccauagagauc

SEQ ID NO: 2212046 - RNA, 19 nt, Artificial Sequence
  Description of Artificial Sequence: Synthetic oligonucleotide
agggcaaucaugacuaaga

SEQ ID NO: 2212047 - RNA, 19 nt, Artificial Sequence
  Description of Artificial Sequence: Synthetic oligonucleotide
gaccccgagaugcccaggg

SEQ ID NO: 2212048 - RNA, 19 nt, Artificial Sequence
  Description of Artificial Sequence: Synthetic oligonucleotide
gacuaagacccaacgaaca

SEQ ID NO: 2212049 - RNA, 19 nt, Artificial Sequence
  Description of Artificial Sequence: Synthetic oligonucleotide
ugaagagcgaguagccgua

SEQ ID NO: 2212050 - RNA, 19 nt, Artificial Sequence
  Description of Artificial Sequence: Synthetic oligonucleotide
aacaacucucuggggaaug

SEQ ID NO: 2212051 - RNA, 19 nt, Artificial Sequence
  Description of Artificial Sequence: Synthetic oligonucleotide
uaacgguacgucuucucuc

SEQ ID NO: 2212052 - RNA, 19 nt, Artificial Sequence
  Description of Artificial Sequence: Synthetic oligonucleotide
cucgauguuuauuguggug

SEQ ID NO: 2212053 - RNA, 19 nt, Artificial Sequence
  Description of Artificial Sequence: Synthetic oligonucleotide
cugcuagcaaaguggcucc

SEQ ID NO: 2212054 - RNA, 19 nt, Artificial Sequence
  Description of Artificial Sequence: Synthetic oligonucleotide
agaccugguaaguguccac

SEQ ID NO: 2212055 - RNA, 19 nt, Artificial Sequence
  Description of Artificial Sequence: Synthetic oligonucleotide
auccacaguacugcugugg

SEQ ID NO: 2212056 - RNA, 19 nt, Artificial Sequence
  Description of Artificial Sequence: Synthetic oligonucleotide
ugaugguagccgcuaugga

SEQ ID NO: 2212057 - RNA, 19 nt, Artificial Sequence
  Description of Artificial Sequence: Synthetic oligonucleotide
agacccuuuuauucuguca

SEQ ID NO: 2212058 - RNA, 19 nt, Artificial Sequence
  Description of Artificial Sequence: Synthetic oligonucleotide
aaaguggcuccaucgccaa

SEQ ID NO: 2212059 - RNA, 19 nt, Artificial Sequence
  Description of Artificial Sequence: Synthetic oligonucleotide
agcacgugaagcaacacaa

SEQ ID NO: 2212060 - RNA, 19 nt, Artificial Sequence
  Description of Artificial Sequence: Synthetic oligonucleotide
caagguggcacauauccaa

SEQ ID NO: 2212061 - RNA, 19 nt, Artificial Sequence
  Description of Artificial Sequence: Synthetic oligonucleotide
caugacuaagacccaacga

SEQ ID NO: 2212062 - RNA, 19 nt, Artificial Sequence
  Description of Artificial Sequence: Synthetic oligonucleotide
uggaaagguucccacuaau

SEQ ID NO: 2212063 - RNA, 19 nt, Artificial Sequence
  Description of Artificial Sequence: Synthetic oligonucleotide
aucuggguuugcugcuagc

SEQ ID NO: 2212064 - RNA, 19 nt, Artificial Sequence
  Description of Artificial Sequence: Synthetic oligonucleotide
augguagccgcuauggaca

SEQ ID NO: 2212065 - RNA, 19 nt, Artificial Sequence
  Description of Artificial Sequence: Synthetic oligonucleotide
ggcacauauccaaaagggg

SEQ ID NO: 2212066 - RNA, 19 nt, Artificial Sequence
  Description of Artificial Sequence: Synthetic oligonucleotide
gaaaagaauaggaaacgau

SEQ ID NO: 2212067 - RNA, 19 nt, Artificial Sequence
  Description of Artificial Sequence: Synthetic oligonucleotide
cuucaaacugcaagucauc

SEQ ID NO: 2212068 - RNA, 19 nt, Artificial Sequence
  Description of Artificial Sequence: Synthetic oligonucleotide
cuggccagcaaguaacuca

SEQ ID NO: 2212069 - RNA, 19 nt, Artificial Sequence
  Description of Artificial Sequence: Synthetic oligonucleotide
acgcacacgaucuccagaa

SEQ ID NO: 2212070 - RNA, 19 nt, Artificial Sequence
  Description of Artificial Sequence: Synthetic oligonucleotide
gaaacgauguucaucacuu

SEQ ID NO: 2212071 - RNA, 19 nt, Artificial Sequence
  Description of Artificial Sequence: Synthetic oligonucleotide
auguuuauugugguggcau

SEQ ID NO: 2212072 - RNA, 19 nt, Artificial Sequence
  Description of Artificial Sequence: Synthetic oligonucleotide
gccauagagaucuggguug

SEQ ID NO: 2212073 - RNA, 19 nt, Artificial Sequence
  Description of Artificial Sequence: Synthetic oligonucleotide
gucaaagaccugguaagug

SEQ ID NO: 2212074 - RNA, 19 nt, Artificial Sequence
  Description of Artificial Sequence: Synthetic oligonucleotide
agccccagagagcuagagg

SEQ ID NO: 2212075 - RNA, 19 nt, Artificial Sequence
  Description of Artificial Sequence: Synthetic oligonucleotide
aggaaacgauguucaucac

SEQ ID NO: 2212076 - RNA, 19 nt, Artificial Sequence
  Description of Artificial Sequence: Synthetic oligonucleotide
gguguuuggaagucucacc

SEQ ID NO: 2212077 - RNA, 19 nt, Artificial Sequence
  Description of Artificial Sequence: Synthetic oligonucleotide
gaaguuggaaagguuccca

SEQ ID NO: 2212078 - RNA, 19 nt, Artificial Sequence
  Description of Artificial Sequence: Synthetic oligonucleotide
gcuauggcaaagaccaagg

SEQ ID NO: 2212079 - RNA, 19 nt, Artificial Sequence
  Description of Artificial Sequence: Synthetic oligonucleotide
caaaguggcuccaucgcca

SEQ ID NO: 2212080 - RNA, 19 nt, Artificial Sequence
  Description of Artificial Sequence: Synthetic oligonucleotide
ggaaugauccacaguacug

SEQ ID NO: 2212081 - RNA, 19 nt, Artificial Sequence
  Description of Artificial Sequence: Synthetic oligonucleotide
agaucuggguugcugcgga

SEQ ID NO: 2212082 - RNA, 19 nt, Artificial Sequence
  Description of Artificial Sequence: Synthetic oligonucleotide
auggauuaagaaguuggaa

SEQ ID NO: 2212083 - RNA, 19 nt, Artificial Sequence
  Description of Artificial Sequence: Synthetic oligonucleotide
gagaucuggguugcugcgg

SEQ ID NO: 2212084 - RNA, 19 nt, Artificial Sequence
  Description of Artificial Sequence: Synthetic oligonucleotide
guagacgcacacgaucucc

SEQ ID NO: 2212085 - RNA, 19 nt, Artificial Sequence
  Description of Artificial Sequence: Synthetic oligonucleotide
guccucgauguuuauugug

SEQ ID NO: 2212086 - RNA, 19 nt, Artificial Sequence
  Description of Artificial Sequence: Synthetic oligonucleotide
ucccacuaauugcuauggc

SEQ ID NO: 2212087 - RNA, 19 nt, Artificial Sequence
  Description of Artificial Sequence: Synthetic oligonucleotide
cauaacgguacgucuucuc

SEQ ID NO: 2212088 - RNA, 19 nt, Artificial Sequence
  Description of Artificial Sequence: Synthetic oligonucleotide
ugguaaguguccacaucaa

SEQ ID NO: 2212089 - RNA, 19 nt, Artificial Sequence
  Description of Artificial Sequence: Synthetic oligonucleotide
cacauaacgguacgucuuc

SEQ ID NO: 2212090 - RNA, 19 nt, Artificial Sequence
  Description of Artificial Sequence: Synthetic oligonucleotide
aagacccaacgaacaacuc

SEQ ID NO: 2212091 - RNA, 19 nt, Artificial Sequence
  Description of Artificial Sequence: Synthetic oligonucleotide
uccacaugaggaagcccca

SEQ ID NO: 2212092 - RNA, 19 nt, Artificial Sequence
  Description of Artificial Sequence: Synthetic oligonucleotide
cuagcaaaguggcuccauc

SEQ ID NO: 2212093 - RNA, 19 nt, Artificial Sequence
  Description of Artificial Sequence: Synthetic oligonucleotide
gccaacagacagcagcacg

SEQ ID NO: 2212094 - RNA, 19 nt, Artificial Sequence
  Description of Artificial Sequence: Synthetic oligonucleotide
acgucgguuauccucucga

SEQ ID NO: 2212095 - RNA, 19 nt, Artificial Sequence
  Description of Artificial Sequence: Synthetic oligonucleotide
ucucuggggaaugauccac

SEQ ID NO: 2212096 - RNA, 19 nt, Artificial Sequence
  Description of Artificial Sequence: Synthetic oligonucleotide
cagagacccuuuuauucug

SEQ ID NO: 2212097 - RNA, 19 nt, Artificial Sequence
  Description of Artificial Sequence: Synthetic oligonucleotide
agcaaguaacucagucucg

SEQ ID NO: 2212098 - RNA, 19 nt, Artificial Sequence
  Description of Artificial Sequence: Synthetic oligonucleotide
acgaucuccagaaaagaau

SEQ ID NO: 2212099 - RNA, 19 nt, Artificial Sequence
  Description of Artificial Sequence: Synthetic oligonucleotide
gucgguuauccucucgaac

SEQ ID NO: 2212100 - RNA, 19 nt, Artificial Sequence
  Description of Artificial Sequence: Synthetic oligonucleotide
uuguuucccagcagcuccu

SEQ ID NO: 2212101 - RNA, 19 nt, Artificial Sequence
  Description of Artificial Sequence: Synthetic oligonucleotide
aaacgauguucaucacuuu

SEQ ID NO: 2212102 - RNA, 19 nt, Artificial Sequence
  Description of Artificial Sequence: Synthetic oligonucleotide
ucagucucgucagagucau

SEQ ID NO: 2212103 - RNA, 19 nt, Artificial Sequence
  Description of Artificial Sequence: Synthetic oligonucleotide
cacaguacugcugugggga

SEQ ID NO: 2212104 - RNA, 19 nt, Artificial Sequence
  Description of Artificial Sequence: Synthetic oligonucleotide
acgguacgucuucucuccc

SEQ ID NO: 2212105 - RNA, 19 nt, Artificial Sequence
  Description of Artificial Sequence: Synthetic oligonucleotide
gaacagcuggccaaaaugu

SEQ ID NO: 2212106 - RNA, 19 nt, Artificial Sequence
  Description of Artificial Sequence: Synthetic oligonucleotide
guagccguagacgcacacg

SEQ ID NO: 2212107 - RNA, 19 nt, Artificial Sequence
  Description of Artificial Sequence: Synthetic oligonucleotide
ucgaacagcuggccaaaau

SEQ ID NO: 2212108 - RNA, 19 nt, Artificial Sequence
  Description of Artificial Sequence: Synthetic oligonucleotide
aaacugcaagucaucugca

SEQ ID NO: 2212109 - RNA, 19 nt, Artificial Sequence
  Description of Artificial Sequence: Synthetic oligonucleotide
agcuuuucuucuggccagc

SEQ ID NO: 2212110 - RNA, 19 nt, Artificial Sequence
  Description of Artificial Sequence: Synthetic oligonucleotide
cacuuugcuguuucuccac

SEQ ID NO: 2212111 - RNA, 19 nt, Artificial Sequence
  Description of Artificial Sequence: Synthetic oligonucleotide
ucggggucuggguuggugu

SEQ ID NO: 2212112 - RNA, 19 nt, Artificial Sequence
  Description of Artificial Sequence: Synthetic oligonucleotide
gcacgagccaggcauaggc

SEQ ID NO: 2212113 - RNA, 19 nt, Artificial Sequence
  Description of Artificial Sequence: Synthetic oligonucleotide
ugccaacacagaccccgag

SEQ ID NO: 2212114 - RNA, 19 nt, Artificial Sequence
  Description of Artificial Sequence: Synthetic oligonucleotide
acacgaucuccagaaaaga

SEQ ID NO: 2212115 - RNA, 19 nt, Artificial Sequence
  Description of Artificial Sequence: Synthetic oligonucleotide
uucccaggaaccggcaaca

SEQ ID NO: 2212116 - RNA, 19 nt, Artificial Sequence
  Description of Artificial Sequence: Synthetic oligonucleotide
guucuucccaggaaccggc

SEQ ID NO: 2212117 - RNA, 19 nt, Artificial Sequence
  Description of Artificial Sequence: Synthetic oligonucleotide
ccaagggugaggaagaaaa

SEQ ID NO: 2212118 - RNA, 19 nt, Artificial Sequence
  Description of Artificial Sequence: Synthetic oligonucleotide
acgagccaggcauaggcau

SEQ ID NO: 2212119 - RNA, 19 nt, Artificial Sequence
  Description of Artificial Sequence: Synthetic oligonucleotide
caaguaacucagucucguc

SEQ ID NO: 2212120 - RNA, 19 nt, Artificial Sequence
  Description of Artificial Sequence: Synthetic oligonucleotide
gcugcuagcaaaguggcuc

SEQ ID NO: 2212121 - RNA, 19 nt, Artificial Sequence
  Description of Artificial Sequence: Synthetic oligonucleotide
gauguuuauugugguggca

SEQ ID NO: 2212122 - RNA, 19 nt, Artificial Sequence
  Description of Artificial Sequence: Synthetic oligonucleotide
aagccccagagagcuagag

SEQ ID NO: 2212123 - RNA, 19 nt, Artificial Sequence
  Description of Artificial Sequence: Synthetic oligonucleotide
gagacccuuuuauucuguc

SEQ ID NO: 2212124 - RNA, 19 nt, Artificial Sequence
  Description of Artificial Sequence: Synthetic oligonucleotide
agggugaggaagaaaacuu

SEQ ID NO: 2212125 - RNA, 19 nt, Artificial Sequence
  Description of Artificial Sequence: Synthetic oligonucleotide
cacgaucuccagaaaagaa

SEQ ID NO: 2212126 - RNA, 19 nt, Artificial Sequence
  Description of Artificial Sequence: Synthetic oligonucleotide
uuucccuguuagcuggauu

SEQ ID NO: 2212127 - RNA, 19 nt, Artificial Sequence
  Description of Artificial Sequence: Synthetic oligonucleotide
aaagaccaagguggcacau

SEQ ID NO: 2212128 - RNA, 19 nt, Artificial Sequence
  Description of Artificial Sequence: Synthetic oligonucleotide
gcugcggacauacagccuc

SEQ ID NO: 2212129 - RNA, 19 nt, Artificial Sequence
  Description of Artificial Sequence: Synthetic oligonucleotide
auccaaaaggggccauaga

SEQ ID NO: 2212130 - RNA, 19 nt, Artificial Sequence
  Description of Artificial Sequence: Synthetic oligonucleotide
auacagccucacgaaguuc

SEQ ID NO: 2212131 - RNA, 19 nt, Artificial Sequence
  Description of Artificial Sequence: Synthetic oligonucleotide
cagccaacagacagcagca

SEQ ID NO: 2212132 - RNA, 19 nt, Artificial Sequence
  Description of Artificial Sequence: Synthetic oligonucleotide
uucuucccaggaaccggca

SEQ ID NO: 2212133 - RNA, 19 nt, Artificial Sequence
  Description of Artificial Sequence: Synthetic oligonucleotide
uguugggagaugguccauc

SEQ ID NO: 2212134 - RNA, 19 nt, Artificial Sequence
  Description of Artificial Sequence: Synthetic oligonucleotide
cauuguuucccagcagcuc

SEQ ID NO: 2212135 - RNA, 19 nt, Artificial Sequence
  Description of Artificial Sequence: Synthetic oligonucleotide
acgucuucucucccagaug

SEQ ID NO: 2212136 - RNA, 19 nt, Artificial Sequence
  Description of Artificial Sequence: Synthetic oligonucleotide
ugcugcuagcaaaguggcu

SEQ ID NO: 2212137 - RNA, 19 nt, Artificial Sequence
  Description of Artificial Sequence: Synthetic oligonucleotide
gggcaaucaugacuaagac

SEQ ID NO: 2212138 - RNA, 19 nt, Artificial Sequence
  Description of Artificial Sequence: Synthetic oligonucleotide
cucagucucgucagaguca

SEQ ID NO: 2212139 - RNA, 19 nt, Artificial Sequence
  Description of Artificial Sequence: Synthetic oligonucleotide
ggcucuucucccaagggug

SEQ ID NO: 2212140 - RNA, 19 nt, Artificial Sequence
  Description of Artificial Sequence: Synthetic oligonucleotide
guuauccucucgaacagcu

SEQ ID NO: 2212141 - RNA, 19 nt, Artificial Sequence
  Description of Artificial Sequence: Synthetic oligonucleotide
agaugaugguagccgcuau

SEQ ID NO: 2212142 - RNA, 19 nt, Artificial Sequence
  Description of Artificial Sequence: Synthetic oligonucleotide
ugguagccgcuauggacac

SEQ ID NO: 2212143 - RNA, 19 nt, Artificial Sequence
  Description of Artificial Sequence: Synthetic oligonucleotide
uccagaagggagagcuuuu

SEQ ID NO: 2212144 - RNA, 19 nt, Artificial Sequence
  Description of Artificial Sequence: Synthetic oligonucleotide
cagggcaaucaugacuaag

SEQ ID NO: 2212145 - RNA, 19 nt, Artificial Sequence
  Description of Artificial Sequence: Synthetic oligonucleotide
uugggagaugguccaucuc

SEQ ID NO: 2212146 - RNA, 19 nt, Artificial Sequence
  Description of Artificial Sequence: Synthetic oligonucleotide
ccacuaauugcuauggcaa

SEQ ID NO: 2212147 - RNA, 19 nt, Artificial Sequence
  Description of Artificial Sequence: Synthetic oligonucleotide
cacgaaguucuucccagga

SEQ ID NO: 2212148 - RNA, 19 nt, Artificial Sequence
  Description of Artificial Sequence: Synthetic oligonucleotide
caaagaccaagguggcaca

SEQ ID NO: 2212149 - RNA, 19 nt, Artificial Sequence
  Description of Artificial Sequence: Synthetic oligonucleotide
caugaggaagccccagaga

SEQ ID NO: 2212150 - RNA, 19 nt, Artificial Sequence
  Description of Artificial Sequence: Synthetic oligonucleotide
ucccuguuagcuggauuug

SEQ ID NO: 2212151 - RNA, 19 nt, Artificial Sequence
  Description of Artificial Sequence: Synthetic oligonucleotide
aagguggcacauauccaaa

SEQ ID NO: 2212152 - RNA, 19 nt, Artificial Sequence
  Description of Artificial Sequence: Synthetic oligonucleotide
ggcauagaugaugguagcc

SEQ ID NO: 2212153 - RNA, 19 nt, Artificial Sequence
  Description of Artificial Sequence: Synthetic oligonucleotide
cucccaagggugaggaaga

SEQ ID NO: 2212154 - RNA, 19 nt, Artificial Sequence
  Description of Artificial Sequence: Synthetic oligonucleotide
cccacuaauugcuauggca

SEQ ID NO: 2212155 - RNA, 19 nt, Artificial Sequence
  Description of Artificial Sequence: Synthetic oligonucleotide
ggaguggcuguaauuguug

SEQ ID NO: 2212156 - RNA, 19 nt, Artificial Sequence
  Description of Artificial Sequence: Synthetic oligonucleotide
cagcacgugaagcaacaca

SEQ ID NO: 2212157 - RNA, 19 nt, Artificial Sequence
  Description of Artificial Sequence: Synthetic oligonucleotide
acaacucucuggggaauga

SEQ ID NO: 2212158 - RNA, 19 nt, Artificial Sequence
  Description of Artificial Sequence: Synthetic oligonucleotide
ggaaacgauguucaucacu

SEQ ID NO: 2212159 - RNA, 19 nt, Artificial Sequence
  Description of Artificial Sequence: Synthetic oligonucleotide
cacgucgguuauccucucg

SEQ ID NO: 2212160 - RNA, 19 nt, Artificial Sequence
  Description of Artificial Sequence: Synthetic oligonucleotide
guaacucagucucgucaga

SEQ ID NO: 2212161 - RNA, 19 nt, Artificial Sequence
  Description of Artificial Sequence: Synthetic oligonucleotide
ucucgaacagcuggccaaa

SEQ ID NO: 2212162 - RNA, 19 nt, Artificial Sequence
  Description of Artificial Sequence: Synthetic oligonucleotide
ggacauacagccucacgaa

SEQ ID NO: 2212163 - RNA, 19 nt, Artificial Sequence
  Description of Artificial Sequence: Synthetic oligonucleotide
ugguccaucucuggggcau

SEQ ID NO: 2212164 - RNA, 19 nt, Artificial Sequence
  Description of Artificial Sequence: Synthetic oligonucleotide
cacacgucgguuauccucu

SEQ ID NO: 2212165 - RNA, 19 nt, Artificial Sequence
  Description of Artificial Sequence: Synthetic oligonucleotide
ugcugcggacauacagccu

SEQ ID NO: 2212166 - RNA, 19 nt, Artificial Sequence
  Description of Artificial Sequence: Synthetic oligonucleotide
caaucaugacuaagaccca

SEQ ID NO: 2212167 - RNA, 19 nt, Artificial Sequence
  Description of Artificial Sequence: Synthetic oligonucleotide
cuccucggggucuggguug

SEQ ID NO: 2212168 - RNA, 19 nt, Artificial Sequence
  Description of Artificial Sequence: Synthetic oligonucleotide
acauaacgguacgucuucu

SEQ ID NO: 2212169 - RNA, 19 nt, Artificial Sequence
  Description of Artificial Sequence: Synthetic oligonucleotide
ggauauaaaugaagagcga

SEQ ID NO: 2212170 - RNA, 19 nt, Artificial Sequence
  Description of Artificial Sequence: Synthetic oligonucleotide
augucauugccaacacaga

SEQ ID NO: 2212171 - RNA, 19 nt, Artificial Sequence
  Description of Artificial Sequence: Synthetic oligonucleotide
ccaaacucuucaaacugca

SEQ ID NO: 2212172 - RNA, 19 nt, Artificial Sequence
  Description of Artificial Sequence: Synthetic oligonucleotide
gcaacagagacccuuuuau

SEQ ID NO: 2212173 - RNA, 19 nt, Artificial Sequence
  Description of Artificial Sequence: Synthetic oligonucleotide
aagaccaagguggcacaua

SEQ ID NO: 2212174 - RNA, 19 nt, Artificial Sequence
  Description of Artificial Sequence: Synthetic oligonucleotide
acacgucgguuauccucuc

SEQ ID NO: 2212175 - RNA, 19 nt, Artificial Sequence
  Description of Artificial Sequence: Synthetic oligonucleotide
ggcuguaauuguugggaga

SEQ ID NO: 2212176 - RNA, 19 nt, Artificial Sequence
  Description of Artificial Sequence: Synthetic oligonucleotide
gaucuggguugcugcggac

SEQ ID NO: 2212177 - RNA, 19 nt, Artificial Sequence
  Description of Artificial Sequence: Synthetic oligonucleotide
cacagaccccgagaugccc

SEQ ID NO: 2212178 - RNA, 19 nt, Artificial Sequence
  Description of Artificial Sequence: Synthetic oligonucleotide
guaagccaagcagccaaca

SEQ ID NO: 2212179 - RNA, 19 nt, Artificial Sequence
  Description of Artificial Sequence: Synthetic oligonucleotide
gugaagcaacacaauuguc

SEQ ID NO: 2212180 - RNA, 19 nt, Artificial Sequence
  Description of Artificial Sequence: Synthetic oligonucleotide
agagacccuuuuauucugu

SEQ ID NO: 2212181 - RNA, 19 nt, Artificial Sequence
  Description of Artificial Sequence: Synthetic oligonucleotide
cgauguuuauugugguggc

SEQ ID NO: 2212182 - RNA, 19 nt, Artificial Sequence
  Description of Artificial Sequence: Synthetic oligonucleotide
gccguagacgcacacgauc

SEQ ID NO: 2212183 - RNA, 19 nt, Artificial Sequence
  Description of Artificial Sequence: Synthetic oligonucleotide
gcacacgaucuccagaaaa

SEQ ID NO: 2212184 - RNA, 19 nt, Artificial Sequence
  Description of Artificial Sequence: Synthetic oligonucleotide
ggccacacgucgguuaucc

SEQ ID NO: 2212185 - RNA, 19 nt, Artificial Sequence
  Description of Artificial Sequence: Synthetic oligonucleotide
accggcaacagagacccuu

SEQ ID NO: 2212186 - RNA, 19 nt, Artificial Sequence
  Description of Artificial Sequence: Synthetic oligonucleotide
auauccaaaaggggccaua

SEQ ID NO: 2212187 - RNA, 19 nt, Artificial Sequence
  Description of Artificial Sequence: Synthetic oligonucleotide
ggcacauaacgguacgucu

SEQ ID NO: 2212188 - RNA, 19 nt, Artificial Sequence
  Description of Artificial Sequence: Synthetic oligonucleotide
agccgcuauggacacuuuu

SEQ ID NO: 2212189 - RNA, 19 nt, Artificial Sequence
  Description of Artificial Sequence: Synthetic oligonucleotide
cuguggggauauaaaugaa

SEQ ID NO: 2212190 - RNA, 19 nt, Artificial Sequence
  Description of Artificial Sequence: Synthetic oligonucleotide
cuuuucuucuggccagcaa

SEQ ID NO: 2212191 - RNA, 19 nt, Artificial Sequence
  Description of Artificial Sequence: Synthetic oligonucleotide
ucucaccaggguccucgau

SEQ ID NO: 2212192 - RNA, 19 nt, Artificial Sequence
  Description of Artificial Sequence: Synthetic oligonucleotide
cacgagccaggcauaggca

SEQ ID NO: 2212193 - RNA, 19 nt, Artificial Sequence
  Description of Artificial Sequence: Synthetic oligonucleotide
gggcaucaaagaaguaagc

SEQ ID NO: 2212194 - RNA, 19 nt, Artificial Sequence
  Description of Artificial Sequence: Synthetic oligonucleotide
cuggguuugcugcuagcaa

SEQ ID NO: 2212195 - RNA, 19 nt, Artificial Sequence
  Description of Artificial Sequence: Synthetic oligonucleotide
cucgucagagucauuguuu

SEQ ID NO: 2212196 - RNA, 19 nt, Artificial Sequence
  Description of Artificial Sequence: Synthetic oligonucleotide
uugucacaaugguggccaa

SEQ ID NO: 2212197 - RNA, 19 nt, Artificial Sequence
  Description of Artificial Sequence: Synthetic oligonucleotide
aggcacgagccaggcauag

SEQ ID NO: 2212198 - RNA, 19 nt, Artificial Sequence
  Description of Artificial Sequence: Synthetic oligonucleotide
cacgugaagcaacacaauu

SEQ ID NO: 2212199 - RNA, 19 nt, Artificial Sequence
  Description of Artificial Sequence: Synthetic oligonucleotide
ccacaguacugcugugggg

SEQ ID NO: 2212200 - RNA, 19 nt, Artificial Sequence
  Description of Artificial Sequence: Synthetic oligonucleotide
gccaacacagaccccgaga

SEQ ID NO: 2212201 - RNA, 19 nt, Artificial Sequence
  Description of Artificial Sequence: Synthetic oligonucleotide
caaggccacacgucgguua

SEQ ID NO: 2212202 - RNA, 19 nt, Artificial Sequence
  Description of Artificial Sequence: Synthetic oligonucleotide
cugcuguggggauauaaau

SEQ ID NO: 2212203 - RNA, 19 nt, Artificial Sequence
  Description of Artificial Sequence: Synthetic oligonucleotide
guaauuguugggagauggu

SEQ ID NO: 2212204 - RNA, 19 nt, Artificial Sequence
  Description of Artificial Sequence: Synthetic oligonucleotide
guggccaaggccacacguc

SEQ ID NO: 2212205 - RNA, 19 nt, Artificial Sequence
  Description of Artificial Sequence: Synthetic oligonucleotide
cgaucuccagaaaagaaua

SEQ ID NO: 2212206 - RNA, 19 nt, Artificial Sequence
  Description of Artificial Sequence: Synthetic oligonucleotide
caggaaccggcaacagaga

SEQ ID NO: 2212207 - RNA, 19 nt, Artificial Sequence
  Description of Artificial Sequence: Synthetic oligonucleotide
gcuguaauuguugggagau

SEQ ID NO: 2212208 - RNA, 19 nt, Artificial Sequence
  Description of Artificial Sequence: Synthetic oligonucleotide
gggcacauaacgguacguc

SEQ ID NO: 2212209 - RNA, 19 nt, Artificial Sequence
  Description of Artificial Sequence: Synthetic oligonucleotide
gccucacgaaguucuuccc

SEQ ID NO: 2212210 - RNA, 19 nt, Artificial Sequence
  Description of Artificial Sequence: Synthetic oligonucleotide
guacgucuucucucccaga

SEQ ID NO: 2212211 - RNA, 19 nt, Artificial Sequence
  Description of Artificial Sequence: Synthetic oligonucleotide
ggcaacagagacccuuuua

SEQ ID NO: 2212212 - RNA, 19 nt, Artificial Sequence
  Description of Artificial Sequence: Synthetic oligonucleotide
cuccaucgccaaacucuuc

SEQ ID NO: 2212213 - RNA, 19 nt, Artificial Sequence
  Description of Artificial Sequence: Synthetic oligonucleotide
ccaacagacagcagcacgu

SEQ ID NO: 2212214 - RNA, 19 nt, Artificial Sequence
  Description of Artificial Sequence: Synthetic oligonucleotide
acccaacgaacaacucucu

SEQ ID NO: 2212215 - RNA, 19 nt, Artificial Sequence
  Description of Artificial Sequence: Synthetic oligonucleotide
acucgggcacauaacggua

SEQ ID NO: 2212216 - RNA, 19 nt, Artificial Sequence
  Description of Artificial Sequence: Synthetic oligonucleotide
ggccauagagaucuggguu

SEQ ID NO: 2212217 - RNA, 19 nt, Artificial Sequence
  Description of Artificial Sequence: Synthetic oligonucleotide
gaccaagguggcacauauc

SEQ ID NO: 2212218 - RNA, 19 nt, Artificial Sequence
  Description of Artificial Sequence: Synthetic oligonucleotide
caacugucugguugggagu

SEQ ID NO: 2212219 - RNA, 19 nt, Artificial Sequence
  Description of Artificial Sequence: Synthetic oligonucleotide
cgugaagcaacacaauugu

SEQ ID NO: 2212220 - RNA, 19 nt, Artificial Sequence
  Description of Artificial Sequence: Synthetic oligonucleotide
cgguuauccucucgaacag

SEQ ID NO: 2212221 - RNA, 19 nt, Artificial Sequence
  Description of Artificial Sequence: Synthetic oligonucleotide
guagccgcuauggacacuu

SEQ ID NO: 2212222 - RNA, 19 nt, Artificial Sequence
  Description of Artificial Sequence: Synthetic oligonucleotide
caacagagacccuuuuauu

SEQ ID NO: 2212223 - RNA, 19 nt, Artificial Sequence
  Description of Artificial Sequence: Synthetic oligonucleotide
ucccaagggugaggaagaa

SEQ ID NO: 2212224 - RNA, 19 nt, Artificial Sequence
  Description of Artificial Sequence: Synthetic oligonucleotide
ucucucccagauggauuaa

SEQ ID NO: 2212225 - RNA, 19 nt, Artificial Sequence
  Description of Artificial Sequence: Synthetic oligonucleotide
gcaaguaacucagucucgu

SEQ ID NO: 2212226 - RNA, 19 nt, Artificial Sequence
  Description of Artificial Sequence: Synthetic oligonucleotide
gguggccaaggccacacgu

SEQ ID NO: 2212227 - RNA, 19 nt, Artificial Sequence
  Description of Artificial Sequence: Synthetic oligonucleotide
ggccaaggccacacgucgg

SEQ ID NO: 2212228 - RNA, 19 nt, Artificial Sequence
  Description of Artificial Sequence: Synthetic oligonucleotide
aggguccucgauguuuauu

SEQ ID NO: 2212229 - RNA, 19 nt, Artificial Sequence
  Description of Artificial Sequence: Synthetic oligonucleotide
cgaguagccguagacgcac

SEQ ID NO: 2212230 - RNA, 19 nt, Artificial Sequence
  Description of Artificial Sequence: Synthetic oligonucleotide
gguucccacuaauugcuau

SEQ ID NO: 2212231 - RNA, 19 nt, Artificial Sequence
  Description of Artificial Sequence: Synthetic oligonucleotide
guccagaagggagagcuuu

SEQ ID NO: 2212232 - RNA, 19 nt, Artificial Sequence
  Description of Artificial Sequence: Synthetic oligonucleotide
ccucacgaaguucuuccca

SEQ ID NO: 2212233 - RNA, 19 nt, Artificial Sequence
  Description of Artificial Sequence: Synthetic oligonucleotide
gaacaacucucuggggaau

SEQ ID NO: 2212234 - RNA, 19 nt, Artificial Sequence
  Description of Artificial Sequence: Synthetic oligonucleotide
ggcacgagccaggcauagg

SEQ ID NO: 2212235 - RNA, 19 nt, Artificial Sequence
  Description of Artificial Sequence: Synthetic oligonucleotide
aggccacacgucgguuauc

SEQ ID NO: 2212236 - RNA, 19 nt, Artificial Sequence
  Description of Artificial Sequence: Synthetic oligonucleotide
gaagccccagagagcuaga

SEQ ID NO: 2212237 - RNA, 19 nt, Artificial Sequence
  Description of Artificial Sequence: Synthetic oligonucleotide
gaguagccguagacgcaca

SEQ ID NO: 2212238 - RNA, 19 nt, Artificial Sequence
  Description of Artificial Sequence: Synthetic oligonucleotide
ccagaagggagagcuuuuc

SEQ ID NO: 2212239 - RNA, 19 nt, Artificial Sequence
  Description of Artificial Sequence: Synthetic oligonucleotide
ccguagacgcacacgaucu

SEQ ID NO: 2212240 - RNA, 19 nt, Artificial Sequence
  Description of Artificial Sequence: Synthetic oligonucleotide
ggguugguguuuggaaguc

SEQ ID NO: 2212241 - RNA, 19 nt, Artificial Sequence
  Description of Artificial Sequence: Synthetic oligonucleotide
ggcaaagaccaagguggca

SEQ ID NO: 2212242 - RNA, 19 nt, Artificial Sequence
  Description of Artificial Sequence: Synthetic oligonucleotide
gguccucgauguuuauugu

SEQ ID NO: 2212243 - RNA, 19 nt, Artificial Sequence
  Description of Artificial Sequence: Synthetic oligonucleotide
ggaaagguucccacuaauu

SEQ ID NO: 2212244 - RNA, 19 nt, Artificial Sequence
  Description of Artificial Sequence: Synthetic oligonucleotide
gcucuucucccaaggguga

SEQ ID NO: 2212245 - RNA, 19 nt, Artificial Sequence
  Description of Artificial Sequence: Synthetic oligonucleotide
uagccgcuauggacacuuu

SEQ ID NO: 2212246 - RNA, 19 nt, Artificial Sequence
  Description of Artificial Sequence: Synthetic oligonucleotide
agccguagacgcacacgau

SEQ ID NO: 2212247 - RNA, 19 nt, Artificial Sequence
  Description of Artificial Sequence: Synthetic oligonucleotide
gaggcacgagccaggcaua

SEQ ID NO: 2212248 - RNA, 19 nt, Artificial Sequence
  Description of Artificial Sequence: Synthetic oligonucleotide
cccgagaugcccagggcaa

SEQ ID NO: 2212249 - RNA, 19 nt, Artificial Sequence
  Description of Artificial Sequence: Synthetic oligonucleotide
gcacauaacgguacgucuu

SEQ ID NO: 2212250 - RNA, 19 nt, Artificial Sequence
  Description of Artificial Sequence: Synthetic oligonucleotide
gcgaguagccguagacgca

SEQ ID NO: 2212251 - RNA, 19 nt, Artificial Sequence
  Description of Artificial Sequence: Synthetic oligonucleotide
ccccagagagcuagaggca

SEQ ID NO: 2212252 - RNA, 19 nt, Artificial Sequence
  Description of Artificial Sequence: Synthetic oligonucleotide
gguugggaguggcuguaau

SEQ ID NO: 2212253 - RNA, 19 nt, Artificial Sequence
  Description of Artificial Sequence: Synthetic oligonucleotide
gccaggcauaggcauagau

SEQ ID NO: 2212254 - RNA, 19 nt, Artificial Sequence
  Description of Artificial Sequence: Synthetic oligonucleotide
gccaaggccacacgucggu

SEQ ID NO: 2212255 - RNA, 19 nt, Artificial Sequence
  Description of Artificial Sequence: Synthetic oligonucleotide
ccucgauguuuauuguggu

SEQ ID NO: 2212256 - RNA, 19 nt, Artificial Sequence
  Description of Artificial Sequence: Synthetic oligonucleotide
cauauccaaaaggggccau

SEQ ID NO: 2212257 - RNA, 19 nt, Artificial Sequence
  Description of Artificial Sequence: Synthetic oligonucleotide
cucgaacagcuggccaaaa

SEQ ID NO: 2212258 - RNA, 19 nt, Artificial Sequence
  Description of Artificial Sequence: Synthetic oligonucleotide
aaccggcaacagagacccu

SEQ ID NO: 2212259 - RNA, 19 nt, Artificial Sequence
  Description of Artificial Sequence: Synthetic oligonucleotide
caguacugcuguggggaua

SEQ ID NO: 2212260 - RNA, 19 nt, Artificial Sequence
  Description of Artificial Sequence: Synthetic oligonucleotide
cauucagccagaggcucuu

SEQ ID NO: 2212261 - RNA, 19 nt, Artificial Sequence
  Description of Artificial Sequence: Synthetic oligonucleotide
caacucucuggggaaugau

SEQ ID NO: 2212262 - RNA, 19 nt, Artificial Sequence
  Description of Artificial Sequence: Synthetic oligonucleotide
gggaguggcuguaauuguu

SEQ ID NO: 2212263 - RNA, 19 nt, Artificial Sequence
  Description of Artificial Sequence: Synthetic oligonucleotide
ccagaggcucuucucccaa

SEQ ID NO: 2212264 - RNA, 19 nt, Artificial Sequence
  Description of Artificial Sequence: Synthetic oligonucleotide
gguccaucucuggggcauc

SEQ ID NO: 2212265 - RNA, 19 nt, Artificial Sequence
  Description of Artificial Sequence: Synthetic oligonucleotide
cccagagccuccucggggu

SEQ ID NO: 2212266 - RNA, 19 nt, Artificial Sequence
  Description of Artificial Sequence: Synthetic oligonucleotide
cgagaugcccagggcaauc

SEQ ID NO: 2212267 - RNA, 19 nt, Artificial Sequence
  Description of Artificial Sequence: Synthetic oligonucleotide
cgguacgucuucucuccca

SEQ ID NO: 2212268 - RNA, 19 nt, Artificial Sequence
  Description of Artificial Sequence: Synthetic oligonucleotide
gcuccaucgccaaacucuu

SEQ ID NO: 2212269 - RNA, 19 nt, Artificial Sequence
  Description of Artificial Sequence: Synthetic oligonucleotide
cgucgguuauccucucgaa

SEQ ID NO: 2212270 - RNA, 19 nt, Artificial Sequence
  Description of Artificial Sequence: Synthetic oligonucleotide
cuggguugcugcggacaua

SEQ ID NO: 2212271 - RNA, 19 nt, Artificial Sequence
  Description of Artificial Sequence: Synthetic oligonucleotide
ccagggcaaucaugacuaa

SEQ ID NO: 2212272 - RNA, 19 nt, Artificial Sequence
  Description of Artificial Sequence: Synthetic oligonucleotide
gccacacgucgguuauccu

SEQ ID NO: 2212273 - RNA, 19 nt, Artificial Sequence
  Description of Artificial Sequence: Synthetic oligonucleotide
ggguugcugcggacauaca

SEQ ID NO: 2212274 - RNA, 19 nt, Artificial Sequence
  Description of Artificial Sequence: Synthetic oligonucleotide
guacugcuguggggauaua

SEQ ID NO: 2212275 - RNA, 19 nt, Artificial Sequence
  Description of Artificial Sequence: Synthetic oligonucleotide
ccggcaacagagacccuuu

SEQ ID NO: 2212276 - RNA, 19 nt, Artificial Sequence
  Description of Artificial Sequence: Synthetic oligonucleotide
cgcacacgaucuccagaaa

SEQ ID NO: 2212277 - RNA, 19 nt, Artificial Sequence
  Description of Artificial Sequence: Synthetic oligonucleotide
caccaggguccucgauguu

SEQ ID NO: 2212278 - RNA, 19 nt, Artificial Sequence
  Description of Artificial Sequence: Synthetic oligonucleotide
cagucucgucagagucauu

SEQ ID NO: 2212279 - RNA, 19 nt, Artificial Sequence
  Description of Artificial Sequence: Synthetic oligonucleotide
ccgagaugcccagggcaau

SEQ ID NO: 2212280 - RNA, 19 nt, Artificial Sequence
  Description of Artificial Sequence: Synthetic oligonucleotide
ccaaggccacacgucgguu

SEQ ID NO: 2212281 - RNA, 19 nt, Artificial Sequence
  Description of Artificial Sequence: Synthetic oligonucleotide
cggcaacagagacccuuuu

SEQ ID NO: 2212282 - RNA, 19 nt, Artificial Sequence
  Description of Artificial Sequence: Synthetic oligonucleotide
ugugguauccaccugaggc

SEQ ID NO: 2212283 - RNA, 19 nt, Artificial Sequence
  Description of Artificial Sequence: Synthetic oligonucleotide
aaagccuucgcgcugcagc

SEQ ID NO: 2212284 - RNA, 19 nt, Artificial Sequence
  Description of Artificial Sequence: Synthetic oligonucleotide
auacauguagcccagcucg

SEQ ID NO: 2212285 - RNA, 19 nt, Artificial Sequence
  Description of Artificial Sequence: Synthetic oligonucleotide
aauacauguagcccagcuc

SEQ ID NO: 2212286 - RNA, 19 nt, Artificial Sequence
  Description of Artificial Sequence: Synthetic oligonucleotide
aaucgguugccucagcagg

SEQ ID NO: 2212287 - RNA, 19 nt, Artificial Sequence
  Description of Artificial Sequence: Synthetic oligonucleotide
ucugucgagggucaaagcc

SEQ ID NO: 2212288 - RNA, 19 nt, Artificial Sequence
  Description of Artificial Sequence: Synthetic oligonucleotide
auucaccuugaccagacgg

SEQ ID NO: 2212289 - RNA, 19 nt, Artificial Sequence
  Description of Artificial Sequence: Synthetic oligonucleotide
aaauacauguagcccagcu

SEQ ID NO: 2212290 - RNA, 19 nt, Artificial Sequence
  Description of Artificial Sequence: Synthetic oligonucleotide
agggucaaagccuucgcgc

SEQ ID NO: 2212291 - RNA, 19 nt, Artificial Sequence
  Description of Artificial Sequence: Synthetic oligonucleotide
ugggcgaucuucuugcugg

SEQ ID NO: 2212292 - RNA, 19 nt, Artificial Sequence
  Description of Artificial Sequence: Synthetic oligonucleotide
accuugaccagacggaugg

SEQ ID NO: 2212293 - RNA, 19 nt, Artificial Sequence
  Description of Artificial Sequence: Synthetic oligonucleotide
aacguagccgucgaagcgc

SEQ ID NO: 2212294 - RNA, 19 nt, Artificial Sequence
  Description of Artificial Sequence: Synthetic oligonucleotide
acggcuuccaccucggugg

SEQ ID NO: 2212295 - RNA, 19 nt, Artificial Sequence
  Description of Artificial Sequence: Synthetic oligonucleotide
aagccuucgcgcugcagcc

SEQ ID NO: 2212296 - RNA, 19 nt, Artificial Sequence
  Description of Artificial Sequence: Synthetic oligonucleotide
uggggaucugcaauggccg

SEQ ID NO: 2212297 - RNA, 19 nt, Artificial Sequence
  Description of Artificial Sequence: Synthetic oligonucleotide
guuaggguccaacuggccg

SEQ ID NO: 2212298 - RNA, 19 nt, Artificial Sequence
  Description of Artificial Sequence: Synthetic oligonucleotide
ucaccugagagguaggcgc

SEQ ID NO: 2212299 - RNA, 19 nt, Artificial Sequence
  Description of Artificial Sequence: Synthetic oligonucleotide
acggaugggguacacgugc

SEQ ID NO: 2212300 - RNA, 19 nt, Artificial Sequence
  Description of Artificial Sequence: Synthetic oligonucleotide
uugcggaacacgcuguggg

SEQ ID NO: 2212301 - RNA, 19 nt, Artificial Sequence
  Description of Artificial Sequence: Synthetic oligonucleotide
uaacguagccgucgaagcg

SEQ ID NO: 2212302 - RNA, 19 nt, Artificial Sequence
  Description of Artificial Sequence: Synthetic oligonucleotide
  modified_base (14)..(14): a, c, u, g, unknown or other
gaagguguccccgnugcgg

SEQ ID NO: 2212303 - RNA, 19 nt, Artificial Sequence
  Description of Artificial Sequence: Synthetic oligonucleotide
cuaacguagccgucgaagc

SEQ ID NO: 2212304 - RNA, 19 nt, Artificial Sequence
  Description of Artificial Sequence: Synthetic oligonucleotide
agcgagaagucuccggcgc

SEQ ID NO: 2212305 - RNA, 19 nt, Artificial Sequence
  Description of Artificial Sequence: Synthetic oligonucleotide
ucguccaucaccagcacgu

SEQ ID NO: 2212306 - RNA, 19 nt, Artificial Sequence
  Description of Artificial Sequence: Synthetic oligonucleotide
gucgcggaaauacauguag

SEQ ID NO: 2212307 - RNA, 19 nt, Artificial Sequence
  Description of Artificial Sequence: Synthetic oligonucleotide
  modified_base (2)..(2): a, c, u, g, unknown or other
gnugcggucgcggaaauac

SEQ ID NO: 2212308 - RNA, 19 nt, Artificial Sequence
  Description of Artificial Sequence: Synthetic oligonucleotide
uguggacucccucauccag

SEQ ID NO: 2212309 - RNA, 19 nt, Artificial Sequence
  Description of Artificial Sequence: Synthetic oligonucleotide
agacgcaggaagaugggcc

SEQ ID NO: 2212310 - RNA, 19 nt, Artificial Sequence
  Description of Artificial Sequence: Synthetic oligonucleotide
gaaucgguugccucagcag

SEQ ID NO: 2212311 - RNA, 19 nt, Artificial Sequence
  Description of Artificial Sequence: Synthetic oligonucleotide
agacggaugggguacacgu

SEQ ID NO: 2212312 - RNA, 19 nt, Artificial Sequence
  Description of Artificial Sequence: Synthetic oligonucleotide
ugguacaugguguuagggu

SEQ ID NO: 2212313 - RNA, 19 nt, Artificial Sequence
  Description of Artificial Sequence: Synthetic oligonucleotide
gaugcggcuguugaagccg

SEQ ID NO: 2212314 - RNA, 19 nt, Artificial Sequence
  Description of Artificial Sequence: Synthetic oligonucleotide
ucauucaccuugaccagac

SEQ ID NO: 2212315 - RNA, 19 nt, Artificial Sequence
  Description of Artificial Sequence: Synthetic oligonucleotide
uacacggccacaucagucu

SEQ ID NO: 2212316 - RNA, 19 nt, Artificial Sequence
  Description of Artificial Sequence: Synthetic oligonucleotide
ggcgcuaucgcuaacguag

SEQ ID NO: 2212317 - RNA, 19 nt, Artificial Sequence
  Description of Artificial Sequence: Synthetic oligonucleotide
caucguguccucauucacc

SEQ ID NO: 2212318 - RNA, 19 nt, Artificial Sequence
  Description of Artificial Sequence: Synthetic oligonucleotide
uuaggguccaacuggccgu

SEQ ID NO: 2212319 - RNA, 19 nt, Artificial Sequence
  Description of Artificial Sequence: Synthetic oligonucleotide
uagaacucgccgaucugcc

SEQ ID NO: 2212320 - RNA, 19 nt, Artificial Sequence
  Description of Artificial Sequence: Synthetic oligonucleotide
ucacgaaucgguugccuca

SEQ ID NO: 2212321 - RNA, 19 nt, Artificial Sequence
  Description of Artificial Sequence: Synthetic oligonucleotide
gaacucgccgaucugccgc

SEQ ID NO: 2212322 - RNA, 19 nt, Artificial Sequence
  Description of Artificial Sequence: Synthetic oligonucleotide
ucugccgcacgccgaagcg

SEQ ID NO: 2212323 - RNA, 19 nt, Artificial Sequence
  Description of Artificial Sequence: Synthetic oligonucleotide
cacgucacgaaucgguugc

SEQ ID NO: 2212324 - RNA, 19 nt, Artificial Sequence
  Description of Artificial Sequence: Synthetic oligonucleotide
aucgcuaacguagccgucg

SEQ ID NO: 2212325 - RNA, 19 nt, Artificial Sequence
  Description of Artificial Sequence: Synthetic oligonucleotide
aucagagcgagaagucucc

SEQ ID NO: 2212326 - RNA, 19 nt, Artificial Sequence
  Description of Artificial Sequence: Synthetic oligonucleotide
cugugggcgaucuucuugc

SEQ ID NO: 2212327 - RNA, 19 nt, Artificial Sequence
  Description of Artificial Sequence: Synthetic oligonucleotide
ucgcggaaauacauguagc

SEQ ID NO: 2212328 - RNA, 19 nt, Artificial Sequence
  Description of Artificial Sequence: Synthetic oligonucleotide
gacacguucuccccgcgcc

SEQ ID NO: 2212329 - RNA, 19 nt, Artificial Sequence
  Description of Artificial Sequence: Synthetic oligonucleotide
aucugccgcacgccgaagc

SEQ ID NO: 2212330 - RNA, 19 nt, Artificial Sequence
  Description of Artificial Sequence: Synthetic oligonucleotide
uugaccagacggauggggu

SEQ ID NO: 2212331 - RNA, 19 nt, Artificial Sequence
  Description of Artificial Sequence: Synthetic oligonucleotide
cucgccaggugcaucagag

SEQ ID NO: 2212332 - RNA, 19 nt, Artificial Sequence
  Description of Artificial Sequence: Synthetic oligonucleotide
uugccguccauguuggcga

SEQ ID NO: 2212333 - RNA, 19 nt, Artificial Sequence
  Description of Artificial Sequence: Synthetic oligonucleotide
ucgagggucaaagccuucg

SEQ ID NO: 2212334 - RNA, 19 nt, Artificial Sequence
  Description of Artificial Sequence: Synthetic oligonucleotide
caccugaggcagaagacgc

SEQ ID NO: 2212335 - RNA, 19 nt, Artificial Sequence
  Description of Artificial Sequence: Synthetic oligonucleotide
aagggcuccaucguguccu

SEQ ID NO: 2212336 - RNA, 19 nt, Artificial Sequence
  Description of Artificial Sequence: Synthetic oligonucleotide
uggcccaccagaaggccgg

SEQ ID NO: 2212337 - RNA, 19 nt, Artificial Sequence
  Description of Artificial Sequence: Synthetic oligonucleotide
caucagagcgagaagucuc

SEQ ID NO: 2212338 - RNA, 19 nt, Artificial Sequence
  Description of Artificial Sequence: Synthetic oligonucleotide
agcacgucaccugagaggu

SEQ ID NO: 2212339 - RNA, 19 nt, Artificial Sequence
  Description of Artificial Sequence: Synthetic oligonucleotide
guugccucagcagguagcg

SEQ ID NO: 2212340 - RNA, 19 nt, Artificial Sequence
  Description of Artificial Sequence: Synthetic oligonucleotide
cuugcugguggcgcuaucg

SEQ ID NO: 2212341 - RNA, 19 nt, Artificial Sequence
  Description of Artificial Sequence: Synthetic oligonucleotide
ucuccggcgcagaugcggg

SEQ ID NO: 2212342 - RNA, 19 nt, Artificial Sequence
  Description of Artificial Sequence: Synthetic oligonucleotide
ugcaucagagcgagaaguc

SEQ ID NO: 2212343 - RNA, 19 nt, Artificial Sequence
  Description of Artificial Sequence: Synthetic oligonucleotide
augguguuaggguccaacu

SEQ ID NO: 2212344 - RNA, 19 nt, Artificial Sequence
  Description of Artificial Sequence: Synthetic oligonucleotide
gaaggugccugugguaucc

SEQ ID NO: 2212345 - RNA, 19 nt, Artificial Sequence
  Description of Artificial Sequence: Synthetic oligonucleotide
aaggccgggcgucuuccgg

SEQ ID NO: 2212346 - RNA, 19 nt, Artificial Sequence
  Description of Artificial Sequence: Synthetic oligonucleotide
agaacucgccgaucugccg

SEQ ID NO: 2212347 - RNA, 19 nt, Artificial Sequence
  Description of Artificial Sequence: Synthetic oligonucleotide
uguuaggguccaacuggcc

SEQ ID NO: 2212348 - RNA, 19 nt, Artificial Sequence
  Description of Artificial Sequence: Synthetic oligonucleotide
ucggugguggacacguucu

SEQ ID NO: 2212349 - RNA, 19 nt, Artificial Sequence
  Description of Artificial Sequence: Synthetic oligonucleotide
ucggcccugcuucaugucc

SEQ ID NO: 2212350 - RNA, 19 nt, Artificial Sequence
  Description of Artificial Sequence: Synthetic oligonucleotide
acgugcgugaggaugcggc

SEQ ID NO: 2212351 - RNA, 19 nt, Artificial Sequence
  Description of Artificial Sequence: Synthetic oligonucleotide
auaggaugccagaaccuuc

SEQ ID NO: 2212352 - RNA, 19 nt, Artificial Sequence
  Description of Artificial Sequence: Synthetic oligonucleotide
cagguaucggcccugcuuc

SEQ ID NO: 2212353 - RNA, 19 nt, Artificial Sequence
  Description of Artificial Sequence: Synthetic oligonucleotide
gcgaucuucuugcuggugg

SEQ ID NO: 2212354 - RNA, 19 nt, Artificial Sequence
  Description of Artificial Sequence: Synthetic oligonucleotide
guugcccacggccaggcgc

SEQ ID NO: 2212355 - RNA, 19 nt, Artificial Sequence
  Description of Artificial Sequence: Synthetic oligonucleotide
ggcgcugucgcccuugcgg

SEQ ID NO: 2212356 - RNA, 19 nt, Artificial Sequence
  Description of Artificial Sequence: Synthetic oligonucleotide
guggggaucugcaauggcc

SEQ ID NO: 2212357 - RNA, 19 nt, Artificial Sequence
  Description of Artificial Sequence: Synthetic oligonucleotide
guugaagccgcaggagccg

SEQ ID NO: 2212358 - RNA, 19 nt, Artificial Sequence
  Description of Artificial Sequence: Synthetic oligonucleotide
uaucggcccugcuucaugu

SEQ ID NO: 2212359 - RNA, 19 nt, Artificial Sequence
  Description of Artificial Sequence: Synthetic oligonucleotide
agaaggccgggcgucuucc

SEQ ID NO: 2212360 - RNA, 19 nt, Artificial Sequence
  Description of Artificial Sequence: Synthetic oligonucleotide
aggggucuuggcugguugg

SEQ ID NO: 2212361 - RNA, 19 nt, Artificial Sequence
  Description of Artificial Sequence: Synthetic oligonucleotide
cugguacaugguguuaggg

SEQ ID NO: 2212362 - RNA, 19 nt, Artificial Sequence
  Description of Artificial Sequence: Synthetic oligonucleotide
gcuaucgcuaacguagccg

SEQ ID NO: 2212363 - RNA, 19 nt, Artificial Sequence
  Description of Artificial Sequence: Synthetic oligonucleotide
cagagcgagaagucuccgg

SEQ ID NO: 2212364 - RNA, 19 nt, Artificial Sequence
  Description of Artificial Sequence: Synthetic oligonucleotide
guacaugguguuagggucc

SEQ ID NO: 2212365 - RNA, 19 nt, Artificial Sequence
  Description of Artificial Sequence: Synthetic oligonucleotide
ugcgugaggaugcggcugu

SEQ ID NO: 2212366 - RNA, 19 nt, Artificial Sequence
  Description of Artificial Sequence: Synthetic oligonucleotide
ugcggucgcggaaauacau

SEQ ID NO: 2212367 - RNA, 19 nt, Artificial Sequence
  Description of Artificial Sequence: Synthetic oligonucleotide
uuugcccuccacuccuggc

SEQ ID NO: 2212368 - RNA, 19 nt, Artificial Sequence
  Description of Artificial Sequence: Synthetic oligonucleotide
guacacgugcgugaggaug

SEQ ID NO: 2212369 - RNA, 19 nt, Artificial Sequence
  Description of Artificial Sequence: Synthetic oligonucleotide
ucagagcgagaagucuccg

SEQ ID NO: 2212370 - RNA, 19 nt, Artificial Sequence
  Description of Artificial Sequence: Synthetic oligonucleotide
ugcggaacacgcugugggc

SEQ ID NO: 2212371 - RNA, 19 nt, Artificial Sequence
  Description of Artificial Sequence: Synthetic oligonucleotide
ucgccgaucugccgcacgc

SEQ ID NO: 2212372 - RNA, 19 nt, Artificial Sequence
  Description of Artificial Sequence: Synthetic oligonucleotide
gcuaacguagccgucgaag

SEQ ID NO: 2212373 - RNA, 19 nt, Artificial Sequence
  Description of Artificial Sequence: Synthetic oligonucleotide
ugucgagggucaaagccuu

SEQ ID NO: 2212374 - RNA, 19 nt, Artificial Sequence
  Description of Artificial Sequence: Synthetic oligonucleotide
aucuccccgauguacugca

SEQ ID NO: 2212375 - RNA, 19 nt, Artificial Sequence
  Description of Artificial Sequence: Synthetic oligonucleotide
caugguguuaggguccaac

SEQ ID NO: 2212376 - RNA, 19 nt, Artificial Sequence
  Description of Artificial Sequence: Synthetic oligonucleotide
aacucgccgaucugccgca

SEQ ID NO: 2212377 - RNA, 19 nt, Artificial Sequence
  Description of Artificial Sequence: Synthetic oligonucleotide
agccgggucuucuggaucu

SEQ ID NO: 2212378 - RNA, 19 nt, Artificial Sequence
  Description of Artificial Sequence: Synthetic oligonucleotide
gcaauggccgccaugccgg

SEQ ID NO: 2212379 - RNA, 19 nt, Artificial Sequence
  Description of Artificial Sequence: Synthetic oligonucleotide
cuuggcugguuggaucugg

SEQ ID NO: 2212380 - RNA, 19 nt, Artificial Sequence
  Description of Artificial Sequence: Synthetic oligonucleotide
ugggguacacgugcgugag

SEQ ID NO: 2212381 - RNA, 19 nt, Artificial Sequence
  Description of Artificial Sequence: Synthetic oligonucleotide
ggcgccguagaacucgccg

SEQ ID NO: 2212382 - RNA, 19 nt, Artificial Sequence
  Description of Artificial Sequence: Synthetic oligonucleotide
  modified_base (13)..(13): a, c, u, g, unknown or other
aagguguccccgnugcggu

SEQ ID NO: 2212383 - RNA, 19 nt, Artificial Sequence
  Description of Artificial Sequence: Synthetic oligonucleotide
cagaaccuucugcaacucc

SEQ ID NO: 2212384 - RNA, 19 nt, Artificial Sequence
  Description of Artificial Sequence: Synthetic oligonucleotide
cauguuggcgaugcugcag

SEQ ID NO: 2212385 - RNA, 19 nt, Artificial Sequence
  Description of Artificial Sequence: Synthetic oligonucleotide
uccacgucacgaaucgguu

SEQ ID NO: 2212386 - RNA, 19 nt, Artificial Sequence
  Description of Artificial Sequence: Synthetic oligonucleotide
uggacacguucuccccgcg

SEQ ID NO: 2212387 - RNA, 19 nt, Artificial Sequence
  Description of Artificial Sequence: Synthetic oligonucleotide
ugccgcacgccgaagcgcu

SEQ ID NO: 2212388 - RNA, 19 nt, Artificial Sequence
  Description of Artificial Sequence: Synthetic oligonucleotide
cuugcggaacacgcugugg

SEQ ID NO: 2212389 - RNA, 19 nt, Artificial Sequence
  Description of Artificial Sequence: Synthetic oligonucleotide
acgaaucgguugccucagc

SEQ ID NO: 2212390 - RNA, 19 nt, Artificial Sequence
  Description of Artificial Sequence: Synthetic oligonucleotide
cuuugcccuccacuccugg

SEQ ID NO: 2212391 - RNA, 19 nt, Artificial Sequence
  Description of Artificial Sequence: Synthetic oligonucleotide
gucacgaaucgguugccuc

SEQ ID NO: 2212392 - RNA, 19 nt, Artificial Sequence
  Description of Artificial Sequence: Synthetic oligonucleotide
ugaccagacggauggggua

SEQ ID NO: 2212393 - RNA, 19 nt, Artificial Sequence
  Description of Artificial Sequence: Synthetic oligonucleotide
gucaaagccuucgcgcugc

SEQ ID NO: 2212394 - RNA, 19 nt, Artificial Sequence
  Description of Artificial Sequence: Synthetic oligonucleotide
ugcgugaacuccucccaaa

SEQ ID NO: 2212395 - RNA, 19 nt, Artificial Sequence
  Description of Artificial Sequence: Synthetic oligonucleotide
cauucaccuugaccagacg

SEQ ID NO: 2212396 - RNA, 19 nt, Artificial Sequence
  Description of Artificial Sequence: Synthetic oligonucleotide
gaucuccccgauguacugc

SEQ ID NO: 2212397 - RNA, 19 nt, Artificial Sequence
  Description of Artificial Sequence: Synthetic oligonucleotide
gguggcgcuaucgcuaacg

SEQ ID NO: 2212398 - RNA, 19 nt, Artificial Sequence
  Description of Artificial Sequence: Synthetic oligonucleotide
cacggccaggcgcacacgg

SEQ ID NO: 2212399 - RNA, 19 nt, Artificial Sequence
  Description of Artificial Sequence: Synthetic oligonucleotide
cuaucgcuaacguagccgu

SEQ ID NO: 2212400 - RNA, 19 nt, Artificial Sequence
  Description of Artificial Sequence: Synthetic oligonucleotide
uucuccccgcgccagcgga

SEQ ID NO: 2212401 - RNA, 19 nt, Artificial Sequence
  Description of Artificial Sequence: Synthetic oligonucleotide
ucgcuaacguagccgucga

SEQ ID NO: 2212402 - RNA, 19 nt, Artificial Sequence
  Description of Artificial Sequence: Synthetic oligonucleotide
aggccgggcgucuuccggg

SEQ ID NO: 2212403 - RNA, 19 nt, Artificial Sequence
  Description of Artificial Sequence: Synthetic oligonucleotide
cgcggaaauacauguagcc

SEQ ID NO: 2212404 - RNA, 19 nt, Artificial Sequence
  Description of Artificial Sequence: Synthetic oligonucleotide
cacggccacaucagucugg

SEQ ID NO: 2212405 - RNA, 19 nt, Artificial Sequence
  Description of Artificial Sequence: Synthetic oligonucleotide
gaccagacggaugggguac

SEQ ID NO: 2212406 - RNA, 19 nt, Artificial Sequence
  Description of Artificial Sequence: Synthetic oligonucleotide
ggucugucgagggucaaag

SEQ ID NO: 2212407 - RNA, 19 nt, Artificial Sequence
  Description of Artificial Sequence: Synthetic oligonucleotide
gguagcggcagaucucccc

SEQ ID NO: 2212408 - RNA, 19 nt, Artificial Sequence
  Description of Artificial Sequence: Synthetic oligonucleotide
ucaccuugaccagacggau

SEQ ID NO: 2212409 - RNA, 19 nt, Artificial Sequence
  Description of Artificial Sequence: Synthetic oligonucleotide
accagcacgucaccugaga

SEQ ID NO: 2212410 - RNA, 19 nt, Artificial Sequence
  Description of Artificial Sequence: Synthetic oligonucleotide
cacgcugugggcgaucuuc

SEQ ID NO: 2212411 - RNA, 19 nt, Artificial Sequence
  Description of Artificial Sequence: Synthetic oligonucleotide
acguagccgucgaagcgcc

SEQ ID NO: 2212412 - RNA, 19 nt, Artificial Sequence
  Description of Artificial Sequence: Synthetic oligonucleotide
cugggcgucccgcaagggc

SEQ ID NO: 2212413 - RNA, 19 nt, Artificial Sequence
  Description of Artificial Sequence: Synthetic oligonucleotide
gaugcggguguggacuccc

SEQ ID NO: 2212414 - RNA, 19 nt, Artificial Sequence
  Description of Artificial Sequence: Synthetic oligonucleotide
gcggaaauacauguagccc

SEQ ID NO: 2212415 - RNA, 19 nt, Artificial Sequence
  Description of Artificial Sequence: Synthetic oligonucleotide
cucccaaauggccggccgc

SEQ ID NO: 2212416 - RNA, 19 nt, Artificial Sequence
  Description of Artificial Sequence: Synthetic oligonucleotide
cugugguauccaccugagg

SEQ ID NO: 2212417 - RNA, 19 nt, Artificial Sequence
  Description of Artificial Sequence: Synthetic oligonucleotide
gaaggccgggcgucuuccg

SEQ ID NO: 2212418 - RNA, 19 nt, Artificial Sequence
  Description of Artificial Sequence: Synthetic oligonucleotide
uuccgggcuggcaugggau

SEQ ID NO: 2212419 - RNA, 19 nt, Artificial Sequence
  Description of Artificial Sequence: Synthetic oligonucleotide
cacacggugccgccgcucc

SEQ ID NO: 2212420 - RNA, 19 nt, Artificial Sequence
  Description of Artificial Sequence: Synthetic oligonucleotide
guaucggcccugcuucaug

SEQ ID NO: 2212421 - RNA, 19 nt, Artificial Sequence
  Description of Artificial Sequence: Synthetic oligonucleotide
ggugcaucagagcgagaag

SEQ ID NO: 2212422 - RNA, 19 nt, Artificial Sequence
  Description of Artificial Sequence: Synthetic oligonucleotide
ucgcgcugcagccgggucu

SEQ ID NO: 2212423 - RNA, 19 nt, Artificial Sequence
  Description of Artificial Sequence: Synthetic oligonucleotide
ucgaagcgccgcagagggg

SEQ ID NO: 2212424 - RNA, 19 nt, Artificial Sequence
  Description of Artificial Sequence: Synthetic oligonucleotide
ucccaaauggccggccgca

SEQ ID NO: 2212425 - RNA, 19 nt, Artificial Sequence
  Description of Artificial Sequence: Synthetic oligonucleotide
accucggugguggacacgu

SEQ ID NO: 2212426 - RNA, 19 nt, Artificial Sequence
  Description of Artificial Sequence: Synthetic oligonucleotide
uaucgcuaacguagccguc

SEQ ID NO: 2212427 - RNA, 19 nt, Artificial Sequence
  Description of Artificial Sequence: Synthetic oligonucleotide
gaagccgcaggagccgacc

SEQ ID NO: 2212428 - RNA, 19 nt, Artificial Sequence
  Description of Artificial Sequence: Synthetic oligonucleotide
caagggcuccaucgugucc

SEQ ID NO: 2212429 - RNA, 19 nt, Artificial Sequence
  Description of Artificial Sequence: Synthetic oligonucleotide
gucugucgagggucaaagc

SEQ ID NO: 2212430 - RNA, 19 nt, Artificial Sequence
  Description of Artificial Sequence: Synthetic oligonucleotide
acgucacgaaucgguugcc

SEQ ID NO: 2212431 - RNA, 19 nt, Artificial Sequence
  Description of Artificial Sequence: Synthetic oligonucleotide
agaugcggguguggacucc

SEQ ID NO: 2212432 - RNA, 19 nt, Artificial Sequence
  Description of Artificial Sequence: Synthetic oligonucleotide
agaagucuccggcgcagau

SEQ ID NO: 2212433 - RNA, 19 nt, Artificial Sequence
  Description of Artificial Sequence: Synthetic oligonucleotide
cacgccgaagcgcugcgug

SEQ ID NO: 2212434 - RNA, 19 nt, Artificial Sequence
  Description of Artificial Sequence: Synthetic oligonucleotide
gcugugggcgaucuucuug

SEQ ID NO: 2212435 - RNA, 19 nt, Artificial Sequence
  Description of Artificial Sequence: Synthetic oligonucleotide
aucggcccugcuucauguc

SEQ ID NO: 2212436 - RNA, 19 nt, Artificial Sequence
  Description of Artificial Sequence: Synthetic oligonucleotide
guacacggccacaucaguc

SEQ ID NO: 2212437 - RNA, 19 nt, Artificial Sequence
  Description of Artificial Sequence: Synthetic oligonucleotide
cacgaaucgguugccucag

SEQ ID NO: 2212438 - RNA, 19 nt, Artificial Sequence
  Description of Artificial Sequence: Synthetic oligonucleotide
caccuugaccagacggaug

SEQ ID NO: 2212439 - RNA, 19 nt, Artificial Sequence
  Description of Artificial Sequence: Synthetic oligonucleotide
ggaugcggcuguugaagcc

SEQ ID NO: 2212440 - RNA, 19 nt, Artificial Sequence
  Description of Artificial Sequence: Synthetic oligonucleotide
  modified_base (7)..(7): a, c, u, g, unknown or other
uccccgnugcggucgcgga

SEQ ID NO: 2212441 - RNA, 19 nt, Artificial Sequence
  Description of Artificial Sequence: Synthetic oligonucleotide
cucgguggcgccguagaac

SEQ ID NO: 2212442 - RNA, 19 nt, Artificial Sequence
  Description of Artificial Sequence: Synthetic oligonucleotide
ccaccugaggcagaagacg

SEQ ID NO: 2212443 - RNA, 19 nt, Artificial Sequence
  Description of Artificial Sequence: Synthetic oligonucleotide
  modified_base (15)..(15): a, c, u, g, unknown or other
ggaagguguccccgnugcg

SEQ ID NO: 2212444 - RNA, 19 nt, Artificial Sequence
  Description of Artificial Sequence: Synthetic oligonucleotide
  modified_base (11)..(11): a, c, u, g, unknown or other
gguguccccgnugcggucg

SEQ ID NO: 2212445 - RNA, 19 nt, Artificial Sequence
  Description of Artificial Sequence: Synthetic oligonucleotide
gccggucugaggucugucg

SEQ ID NO: 2212446 - RNA, 19 nt, Artificial Sequence
  Description of Artificial Sequence: Synthetic oligonucleotide
cagacggaugggguacacg

SEQ ID NO: 2212447 - RNA, 19 nt, Artificial Sequence
  Description of Artificial Sequence: Synthetic oligonucleotide
ugaagccgcaggagccgac

SEQ ID NO: 2212448 - RNA, 19 nt, Artificial Sequence
  Description of Artificial Sequence: Synthetic oligonucleotide
  modified_base (12)..(12): a, c, u, g, unknown or other
agguguccccgnugcgguc

SEQ ID NO: 2212449 - RNA, 19 nt, Artificial Sequence
  Description of Artificial Sequence: Synthetic oligonucleotide
gguuggaucuggcccacca

SEQ ID NO: 2212450 - RNA, 19 nt, Artificial Sequence
  Description of Artificial Sequence: Synthetic oligonucleotide
ggucaaagccuucgcgcug

SEQ ID NO: 2212451 - RNA, 19 nt, Artificial Sequence
  Description of Artificial Sequence: Synthetic oligonucleotide
gcggaacacgcugugggcg

SEQ ID NO: 2212452 - RNA, 19 nt, Artificial Sequence
  Description of Artificial Sequence: Synthetic oligonucleotide
uccggcgcagaugcgggug

SEQ ID NO: 2212453 - RNA, 19 nt, Artificial Sequence
  Description of Artificial Sequence: Synthetic oligonucleotide
uaggguccaacuggccgug

SEQ ID NO: 2212454 - RNA, 19 nt, Artificial Sequence
  Description of Artificial Sequence: Synthetic oligonucleotide
ggucuuggcugguuggauc

SEQ ID NO: 2212455 - RNA, 19 nt, Artificial Sequence
  Description of Artificial Sequence: Synthetic oligonucleotide
gccgaucugccgcacgccg

SEQ ID NO: 2212456 - RNA, 19 nt, Artificial Sequence
  Description of Artificial Sequence: Synthetic oligonucleotide
aucgguugccucagcaggu

SEQ ID NO: 2212457 - RNA, 19 nt, Artificial Sequence
  Description of Artificial Sequence: Synthetic oligonucleotide
cuccacgucacgaaucggu

SEQ ID NO: 2212458 - RNA, 19 nt, Artificial Sequence
  Description of Artificial Sequence: Synthetic oligonucleotide
ggguacacgugcgugagga

SEQ ID NO: 2212459 - RNA, 19 nt, Artificial Sequence
  Description of Artificial Sequence: Synthetic oligonucleotide
uaggcgcugucgcccuugc

SEQ ID NO: 2212460 - RNA, 19 nt, Artificial Sequence
  Description of Artificial Sequence: Synthetic oligonucleotide
gucgcccuugcggaacacg

SEQ ID NO: 2212461 - RNA, 19 nt, Artificial Sequence
  Description of Artificial Sequence: Synthetic oligonucleotide
cagaugcggguguggacuc

SEQ ID NO: 2212462 - RNA, 19 nt, Artificial Sequence
  Description of Artificial Sequence: Synthetic oligonucleotide
aggggcagguaucggcccu

SEQ ID NO: 2212463 - RNA, 19 nt, Artificial Sequence
  Description of Artificial Sequence: Synthetic oligonucleotide
ggguccaacuggccguggg

SEQ ID NO: 2212464 - RNA, 19 nt, Artificial Sequence
  Description of Artificial Sequence: Synthetic oligonucleotide
cucgccgaucugccgcacg

SEQ ID NO: 2212465 - RNA, 19 nt, Artificial Sequence
  Description of Artificial Sequence: Synthetic oligonucleotide
uauccaccugaggcagaag

SEQ ID NO: 2212466 - RNA, 19 nt, Artificial Sequence
  Description of Artificial Sequence: Synthetic oligonucleotide
gggcauaggaugccagaac

SEQ ID NO: 2212467 - RNA, 19 nt, Artificial Sequence
  Description of Artificial Sequence: Synthetic oligonucleotide
agguaucggcccugcuuca

SEQ ID NO: 2212468 - RNA, 19 nt, Artificial Sequence
  Description of Artificial Sequence: Synthetic oligonucleotide
ccaggugcaucagagcgag

SEQ ID NO: 2212469 - RNA, 19 nt, Artificial Sequence
  Description of Artificial Sequence: Synthetic oligonucleotide
uccccgcgccagcggaagg

SEQ ID NO: 2212470 - RNA, 19 nt, Artificial Sequence
  Description of Artificial Sequence: Synthetic oligonucleotide
uggcgcuaucgcuaacgua

SEQ ID NO: 2212471 - RNA, 19 nt, Artificial Sequence
  Description of Artificial Sequence: Synthetic oligonucleotide
gguugccucagcagguagc

SEQ ID NO: 2212472 - RNA, 19 nt, Artificial Sequence
  Description of Artificial Sequence: Synthetic oligonucleotide
uagcggcagaucuccccga

SEQ ID NO: 2212473 - RNA, 19 nt, Artificial Sequence
  Description of Artificial Sequence: Synthetic oligonucleotide
acacgugcgugaggaugcg

SEQ ID NO: 2212474 - RNA, 19 nt, Artificial Sequence
  Description of Artificial Sequence: Synthetic oligonucleotide
cagaucuccccgauguacu

SEQ ID NO: 2212475 - RNA, 19 nt, Artificial Sequence
  Description of Artificial Sequence: Synthetic oligonucleotide
guguggacucccucaucca

SEQ ID NO: 2212476 - RNA, 19 nt, Artificial Sequence
  Description of Artificial Sequence: Synthetic oligonucleotide
gugcgugaggaugcggcug

SEQ ID NO: 2212477 - RNA, 19 nt, Artificial Sequence
  Description of Artificial Sequence: Synthetic oligonucleotide
acgccgaagcgcugcguga

SEQ ID NO: 2212478 - RNA, 19 nt, Artificial Sequence
  Description of Artificial Sequence: Synthetic oligonucleotide
uguuggcgaugcugcaguu

SEQ ID NO: 2212479 - RNA, 19 nt, Artificial Sequence
  Description of Artificial Sequence: Synthetic oligonucleotide
caccagcacgucaccugag

SEQ ID NO: 2212480 - RNA, 19 nt, Artificial Sequence
  Description of Artificial Sequence: Synthetic oligonucleotide
acggugccgccgcuccacg

SEQ ID NO: 2212481 - RNA, 19 nt, Artificial Sequence
  Description of Artificial Sequence: Synthetic oligonucleotide
ccguacacggccacaucag

SEQ ID NO: 2212482 - RNA, 19 nt, Artificial Sequence
  Description of Artificial Sequence: Synthetic oligonucleotide
  modified_base (10)..(10): a, c, u, g, unknown or other
guguccccgnugcggucgc

SEQ ID NO: 2212483 - RNA, 19 nt, Artificial Sequence
  Description of Artificial Sequence: Synthetic oligonucleotide
aaggugccugugguaucca

SEQ ID NO: 2212484 - RNA, 19 nt, Artificial Sequence
  Description of Artificial Sequence: Synthetic oligonucleotide
ucuugcugguggcgcuauc

SEQ ID NO: 2212485 - RNA, 19 nt, Artificial Sequence
  Description of Artificial Sequence: Synthetic oligonucleotide
gagccgaccuugccgucca

SEQ ID NO: 2212486 - RNA, 19 nt, Artificial Sequence
  Description of Artificial Sequence: Synthetic oligonucleotide
caauggccgccaugccggc

SEQ ID NO: 2212487 - RNA, 19 nt, Artificial Sequence
  Description of Artificial Sequence: Synthetic oligonucleotide
ugcggcuguugaagccgca

SEQ ID NO: 2212488 - RNA, 19 nt, Artificial Sequence
  Description of Artificial Sequence: Synthetic oligonucleotide
  modified_base (8)..(8): a, c, u, g, unknown or other
guccccgnugcggucgcgg

SEQ ID NO: 2212489 - RNA, 19 nt, Artificial Sequence
  Description of Artificial Sequence: Synthetic oligonucleotide
agcggcagaucuccccgau

SEQ ID NO: 2212490 - RNA, 19 nt, Artificial Sequence
  Description of Artificial Sequence: Synthetic oligonucleotide
cgcuccacgucacgaaucg

SEQ ID NO: 2212491 - RNA, 19 nt, Artificial Sequence
  Description of Artificial Sequence: Synthetic oligonucleotide
agccuucgcgcugcagccg

SEQ ID NO: 2212492 - RNA, 19 nt, Artificial Sequence
  Description of Artificial Sequence: Synthetic oligonucleotide
acucgguggcgccguagaa

SEQ ID NO: 2212493 - RNA, 19 nt, Artificial Sequence
  Description of Artificial Sequence: Synthetic oligonucleotide
cugagagguaggcgcuguc

SEQ ID NO: 2212494 - RNA, 19 nt, Artificial Sequence
  Description of Artificial Sequence: Synthetic oligonucleotide
ccguccauguuggcgaugc

SEQ ID NO: 2212495 - RNA, 19 nt, Artificial Sequence
  Description of Artificial Sequence: Synthetic oligonucleotide
gggaucugcaauggccgcc

SEQ ID NO: 2212496 - RNA, 19 nt, Artificial Sequence
  Description of Artificial Sequence: Synthetic oligonucleotide
ccacgucacgaaucgguug

SEQ ID NO: 2212497 - RNA, 19 nt, Artificial Sequence
  Description of Artificial Sequence: Synthetic oligonucleotide
uggccguggggaucugcaa

SEQ ID NO: 2212498 - RNA, 19 nt, Artificial Sequence
  Description of Artificial Sequence: Synthetic oligonucleotide
uggcgccguagaacucgcc

SEQ ID NO: 2212499 - RNA, 19 nt, Artificial Sequence
  Description of Artificial Sequence: Synthetic oligonucleotide
cugccgcacgccgaagcgc

SEQ ID NO: 2212500 - RNA, 19 nt, Artificial Sequence
  Description of Artificial Sequence: Synthetic oligonucleotide
ccaaauggccggccgcagc

SEQ ID NO: 2212501 - RNA, 19 nt, Artificial Sequence
  Description of Artificial Sequence: Synthetic oligonucleotide
cagaaggccgggcgucuuc

SEQ ID NO: 2212502 - RNA, 19 nt, Artificial Sequence
  Description of Artificial Sequence: Synthetic oligonucleotide
gaucugccgcacgccgaag

SEQ ID NO: 2212503 - RNA, 19 nt, Artificial Sequence
  Description of Artificial Sequence: Synthetic oligonucleotide
cagccgggucuucuggauc

SEQ ID NO: 2212504 - RNA, 19 nt, Artificial Sequence
  Description of Artificial Sequence: Synthetic oligonucleotide
uucuugcugguggcgcuau

SEQ ID NO: 2212505 - RNA, 19 nt, Artificial Sequence
  Description of Artificial Sequence: Synthetic oligonucleotide
caaagccuucgcgcugcag

SEQ ID NO: 2212506 - RNA, 19 nt, Artificial Sequence
  Description of Artificial Sequence: Synthetic oligonucleotide
cgccaugccggcuuugccc

SEQ ID NO: 2212507 - RNA, 19 nt, Artificial Sequence
  Description of Artificial Sequence: Synthetic oligonucleotide
ucuccccgcgccagcggaa

SEQ ID NO: 2212508 - RNA, 19 nt, Artificial Sequence
  Description of Artificial Sequence: Synthetic oligonucleotide
ucgguugccucagcaggua

SEQ ID NO: 2212509 - RNA, 19 nt, Artificial Sequence
  Description of Artificial Sequence: Synthetic oligonucleotide
agccggucugaggucuguc

SEQ ID NO: 2212510 - RNA, 19 nt, Artificial Sequence
  Description of Artificial Sequence: Synthetic oligonucleotide
cuuccgggcuggcauggga

SEQ ID NO: 2212511 - RNA, 19 nt, Artificial Sequence
  Description of Artificial Sequence: Synthetic oligonucleotide
gggucaaagccuucgcgcu

SEQ ID NO: 2212512 - RNA, 19 nt, Artificial Sequence
  Description of Artificial Sequence: Synthetic oligonucleotide
uugcacucgguggcgccgu

SEQ ID NO: 2212513 - RNA, 19 nt, Artificial Sequence
  Description of Artificial Sequence: Synthetic oligonucleotide
cacucgguggcgccguaga

SEQ ID NO: 2212514 - RNA, 19 nt, Artificial Sequence
  Description of Artificial Sequence: Synthetic oligonucleotide
cacaucagucuggcccagc

SEQ ID NO: 2212515 - RNA, 19 nt, Artificial Sequence
  Description of Artificial Sequence: Synthetic oligonucleotide
cugguggcgcuaucgcuaa

SEQ ID NO: 2212516 - RNA, 19 nt, Artificial Sequence
  Description of Artificial Sequence: Synthetic oligonucleotide
cgugaacuccucccaaaug

SEQ ID NO: 2212517 - RNA, 19 nt, Artificial Sequence
  Description of Artificial Sequence: Synthetic oligonucleotide
cccguacacggccacauca

SEQ ID NO: 2212518 - RNA, 19 nt, Artificial Sequence
  Description of Artificial Sequence: Synthetic oligonucleotide
gggguacacgugcgugagg

SEQ ID NO: 2212519 - RNA, 19 nt, Artificial Sequence
  Description of Artificial Sequence: Synthetic oligonucleotide
gcggguguggacucccuca

SEQ ID NO: 2212520 - RNA, 19 nt, Artificial Sequence
  Description of Artificial Sequence: Synthetic oligonucleotide
  modified_base (9)..(9): a, c, u, g, unknown or other
uguccccgnugcggucgcg

SEQ ID NO: 2212521 - RNA, 19 nt, Artificial Sequence
  Description of Artificial Sequence: Synthetic oligonucleotide
ggagccgaccuugccgucc

SEQ ID NO: 2212522 - RNA, 19 nt, Artificial Sequence
  Description of Artificial Sequence: Synthetic oligonucleotide
cugguuggaucuggcccac

SEQ ID NO: 2212523 - RNA, 19 nt, Artificial Sequence
  Description of Artificial Sequence: Synthetic oligonucleotide
gcaagggcuccaucguguc

SEQ ID NO: 2212524 - RNA, 19 nt, Artificial Sequence
  Description of Artificial Sequence: Synthetic oligonucleotide
ugccguccauguuggcgau

SEQ ID NO: 2212525 - RNA, 19 nt, Artificial Sequence
  Description of Artificial Sequence: Synthetic oligonucleotide
gcagaugcggguguggacu

SEQ ID NO: 2212526 - RNA, 19 nt, Artificial Sequence
  Description of Artificial Sequence: Synthetic oligonucleotide
cacggugccgccgcuccac

SEQ ID NO: 2212527 - RNA, 19 nt, Artificial Sequence
  Description of Artificial Sequence: Synthetic oligonucleotide
ggacucccucauccagggg

SEQ ID NO: 2212528 - RNA, 19 nt, Artificial Sequence
  Description of Artificial Sequence: Synthetic oligonucleotide
guggcgcuaucgcuaacgu

SEQ ID NO: 2212529 - RNA, 19 nt, Artificial Sequence
  Description of Artificial Sequence: Synthetic oligonucleotide
cugcaacuccugguacaug

SEQ ID NO: 2212530 - RNA, 19 nt, Artificial Sequence
  Description of Artificial Sequence: Synthetic oligonucleotide
acucgccgaucugccgcac

SEQ ID NO: 2212531 - RNA, 19 nt, Artificial Sequence
  Description of Artificial Sequence: Synthetic oligonucleotide
ugguuggaucuggcccacc

SEQ ID NO: 2212532 - RNA, 19 nt, Artificial Sequence
  Description of Artificial Sequence: Synthetic oligonucleotide
ugguggcgcuaucgcuaac

SEQ ID NO: 2212533 - RNA, 19 nt, Artificial Sequence
  Description of Artificial Sequence: Synthetic oligonucleotide
ggcuuugcccuccacuccu

SEQ ID NO: 2212534 - RNA, 19 nt, Artificial Sequence
  Description of Artificial Sequence: Synthetic oligonucleotide
gcgccguagaacucgccga

SEQ ID NO: 2212535 - RNA, 19 nt, Artificial Sequence
  Description of Artificial Sequence: Synthetic oligonucleotide
cugcgugaacuccucccaa

SEQ ID NO: 2212536 - RNA, 19 nt, Artificial Sequence
  Description of Artificial Sequence: Synthetic oligonucleotide
ggcgcagaugcgggugugg

SEQ ID NO: 2212537 - RNA, 19 nt, Artificial Sequence
  Description of Artificial Sequence: Synthetic oligonucleotide
aggguccaacuggccgugg

SEQ ID NO: 2212538 - RNA, 19 nt, Artificial Sequence
  Description of Artificial Sequence: Synthetic oligonucleotide
guggcgccguagaacucgc

SEQ ID NO: 2212539 - RNA, 19 nt, Artificial Sequence
  Description of Artificial Sequence: Synthetic oligonucleotide
gaacacgcugugggcgauc

SEQ ID NO: 2212540 - RNA, 19 nt, Artificial Sequence
  Description of Artificial Sequence: Synthetic oligonucleotide
ccaggcccaucacacucgc

SEQ ID NO: 2212541 - RNA, 19 nt, Artificial Sequence
  Description of Artificial Sequence: Synthetic oligonucleotide
cuccccgcgccagcggaag

SEQ ID NO: 2212542 - RNA, 19 nt, Artificial Sequence
  Description of Artificial Sequence: Synthetic oligonucleotide
cgagggucaaagccuucgc

SEQ ID NO: 2212543 - RNA, 19 nt, Artificial Sequence
  Description of Artificial Sequence: Synthetic oligonucleotide
cugucgcccuugcggaaca

SEQ ID NO: 2212544 - RNA, 19 nt, Artificial Sequence
  Description of Artificial Sequence: Synthetic oligonucleotide
agucuccggcgcagaugcg

SEQ ID NO: 2212545 - RNA, 19 nt, Artificial Sequence
  Description of Artificial Sequence: Synthetic oligonucleotide
gcugguggcgcuaucgcua

SEQ ID NO: 2212546 - RNA, 19 nt, Artificial Sequence
  Description of Artificial Sequence: Synthetic oligonucleotide
agagccggucugaggucug

SEQ ID NO: 2212547 - RNA, 19 nt, Artificial Sequence
  Description of Artificial Sequence: Synthetic oligonucleotide
cccacggccaggcgcacac

SEQ ID NO: 2212548 - RNA, 19 nt, Artificial Sequence
  Description of Artificial Sequence: Synthetic oligonucleotide
gcgcugucgcccuugcgga

SEQ ID NO: 2212549 - RNA, 19 nt, Artificial Sequence
  Description of Artificial Sequence: Synthetic oligonucleotide
cacucgccaggugcaucag

SEQ ID NO: 2212550 - RNA, 19 nt, Artificial Sequence
  Description of Artificial Sequence: Synthetic oligonucleotide
cccugggcgucccgcaagg

SEQ ID NO: 2212551 - RNA, 19 nt, Artificial Sequence
  Description of Artificial Sequence: Synthetic oligonucleotide
cgaaucgguugccucagca

SEQ ID NO: 2212552 - RNA, 19 nt, Artificial Sequence
  Description of Artificial Sequence: Synthetic oligonucleotide
gcaucagagcgagaagucu

SEQ ID NO: 2212553 - RNA, 19 nt, Artificial Sequence
  Description of Artificial Sequence: Synthetic oligonucleotide
ugucgcccuugcggaacac

SEQ ID NO: 2212554 - RNA, 19 nt, Artificial Sequence
  Description of Artificial Sequence: Synthetic oligonucleotide
caccucggugguggacacg

SEQ ID NO: 2212555 - RNA, 19 nt, Artificial Sequence
  Description of Artificial Sequence: Synthetic oligonucleotide
gcugucgcccuugcggaac

SEQ ID NO: 2212556 - RNA, 19 nt, Artificial Sequence
  Description of Artificial Sequence: Synthetic oligonucleotide
ccguggggaucugcaaugg

SEQ ID NO: 2212557 - RNA, 19 nt, Artificial Sequence
  Description of Artificial Sequence: Synthetic oligonucleotide
gcgcuaucgcuaacguagc

SEQ ID NO: 2212558 - RNA, 19 nt, Artificial Sequence
  Description of Artificial Sequence: Synthetic oligonucleotide
ggcgcacacggugccgccg

SEQ ID NO: 2212559 - RNA, 19 nt, Artificial Sequence
  Description of Artificial Sequence: Synthetic oligonucleotide
gcggcagaucuccccgaug

SEQ ID NO: 2212560 - RNA, 19 nt, Artificial Sequence
  Description of Artificial Sequence: Synthetic oligonucleotide
cuuccaccucgguggugga

SEQ ID NO: 2212561 - RNA, 19 nt, Artificial Sequence
  Description of Artificial Sequence: Synthetic oligonucleotide
cgcuaucgcuaacguagcc

SEQ ID NO: 2212562 - RNA, 19 nt, Artificial Sequence
  Description of Artificial Sequence: Synthetic oligonucleotide
ggccgggcgucuuccgggc

SEQ ID NO: 2212563 - RNA, 19 nt, Artificial Sequence
  Description of Artificial Sequence: Synthetic oligonucleotide
caacuggccguggggaucu

SEQ ID NO: 2212564 - RNA, 19 nt, Artificial Sequence
  Description of Artificial Sequence: Synthetic oligonucleotide
ccggucugaggucugucga

SEQ ID NO: 2212565 - RNA, 19 nt, Artificial Sequence
  Description of Artificial Sequence: Synthetic oligonucleotide
ccgcaagggcuccaucgug

SEQ ID NO: 2212566 - RNA, 19 nt, Artificial Sequence
  Description of Artificial Sequence: Synthetic oligonucleotide
aacuggccguggggaucug

SEQ ID NO: 2212567 - RNA, 19 nt, Artificial Sequence
  Description of Artificial Sequence: Synthetic oligonucleotide
ggggucuuggcugguugga

SEQ ID NO: 2212568 - RNA, 19 nt, Artificial Sequence
  Description of Artificial Sequence: Synthetic oligonucleotide
ccaacuggccguggggauc

SEQ ID NO: 2212569 - RNA, 19 nt, Artificial Sequence
  Description of Artificial Sequence: Synthetic oligonucleotide
ggguguggacucccucauc

SEQ ID NO: 2212570 - RNA, 19 nt, Artificial Sequence
  Description of Artificial Sequence: Synthetic oligonucleotide
ccagaaccuucugcaacuc

SEQ ID NO: 2212571 - RNA, 19 nt, Artificial Sequence
  Description of Artificial Sequence: Synthetic oligonucleotide
ccaccucggugguggacac

SEQ ID NO: 2212572 - RNA, 19 nt, Artificial Sequence
  Description of Artificial Sequence: Synthetic oligonucleotide
gccgccaugccggcuuugc

SEQ ID NO: 2212573 - RNA, 19 nt, Artificial Sequence
  Description of Artificial Sequence: Synthetic oligonucleotide
gcgucuuccgggcuggcau

SEQ ID NO: 2212574 - RNA, 19 nt, Artificial Sequence
  Description of Artificial Sequence: Synthetic oligonucleotide
gccgaccuugccguccaug

SEQ ID NO: 2212575 - RNA, 19 nt, Artificial Sequence
  Description of Artificial Sequence: Synthetic oligonucleotide
gcgugaacuccucccaaau

SEQ ID NO: 2212576 - RNA, 19 nt, Artificial Sequence
  Description of Artificial Sequence: Synthetic oligonucleotide
gccgucgaagcgccgcaga

SEQ ID NO: 2212577 - RNA, 19 nt, Artificial Sequence
  Description of Artificial Sequence: Synthetic oligonucleotide
gccgaagcgcugcgugaac

SEQ ID NO: 2212578 - RNA, 19 nt, Artificial Sequence
  Description of Artificial Sequence: Synthetic oligonucleotide
ccgggcauaggaugccaga

SEQ ID NO: 2212579 - RNA, 19 nt, Artificial Sequence
  Description of Artificial Sequence: Synthetic oligonucleotide
ggcagaucuccccgaugua

SEQ ID NO: 2212580 - RNA, 19 nt, Artificial Sequence
  Description of Artificial Sequence: Synthetic oligonucleotide
gcgaugcugcaguugcacu

SEQ ID NO: 2212581 - RNA, 19 nt, Artificial Sequence
  Description of Artificial Sequence: Synthetic oligonucleotide
ccgccaugccggcuuugcc

SEQ ID NO: 2212582 - RNA, 19 nt, Artificial Sequence
  Description of Artificial Sequence: Synthetic oligonucleotide
cgucuuccgggcuggcaug

SEQ ID NO: 2212583 - RNA, 19 nt, Artificial Sequence
  Description of Artificial Sequence: Synthetic oligonucleotide
gccgcagcccguugcccac

SEQ ID NO: 2212584 - RNA, 19 nt, Artificial Sequence
  Description of Artificial Sequence: Synthetic oligonucleotide
ccggccgcagcccguugcc

SEQ ID NO: 2212585 - RNA, 19 nt, Artificial Sequence
  Description of Artificial Sequence: Synthetic oligonucleotide
ccgaccuugccguccaugu

SEQ ID NO: 2212586 - RNA, 19 nt, Artificial Sequence
  Description of Artificial Sequence: Synthetic oligonucleotide
ggccguggggaucugcaau

SEQ ID NO: 2212587 - RNA, 19 nt, Artificial Sequence
  Description of Artificial Sequence: Synthetic oligonucleotide
cgguugccucagcagguag

SEQ ID NO: 2212588 - RNA, 19 nt, Artificial Sequence
  Description of Artificial Sequence: Synthetic oligonucleotide
cccaaauggccggccgcag

SEQ ID NO: 2212589 - RNA, 19 nt, Artificial Sequence
  Description of Artificial Sequence: Synthetic oligonucleotide
augcggguguggacucccu

SEQ ID NO: 2212590 - RNA, 19 nt, Artificial Sequence
  Description of Artificial Sequence: Synthetic oligonucleotide
ccgggcgucuuccgggcug

SEQ ID NO: 2212591 - RNA, 19 nt, Artificial Sequence
  Description of Artificial Sequence: Synthetic oligonucleotide
acaugguguuaggguccaa

SEQ ID NO: 2212592 - RNA, 19 nt, Artificial Sequence
  Description of Artificial Sequence: Synthetic oligonucleotide
cuccugguacaugguguua

SEQ ID NO: 2212593 - RNA, 19 nt, Artificial Sequence
  Description of Artificial Sequence: Synthetic oligonucleotide
agcgccgcagaggggucuu

SEQ ID NO: 2212594 - RNA, 19 nt, Artificial Sequence
  Description of Artificial Sequence: Synthetic oligonucleotide
ccgcacgccgaagcgcugc

SEQ ID NO: 2212595 - RNA, 19 nt, Artificial Sequence
  Description of Artificial Sequence: Synthetic oligonucleotide
cggaacacgcugugggcga

SEQ ID NO: 2212596 - RNA, 19 nt, Artificial Sequence
  Description of Artificial Sequence: Synthetic oligonucleotide
gccguagaacucgccgauc

SEQ ID NO: 2212597 - RNA, 19 nt, Artificial Sequence
  Description of Artificial Sequence: Synthetic oligonucleotide
ccagacggaugggguacac

SEQ ID NO: 2212598 - RNA, 19 nt, Artificial Sequence
  Description of Artificial Sequence: Synthetic oligonucleotide
gguacacgugcgugaggau

SEQ ID NO: 2212599 - RNA, 19 nt, Artificial Sequence
  Description of Artificial Sequence: Synthetic oligonucleotide
cguagccgucgaagcgccg

SEQ ID NO: 2212600 - RNA, 19 nt, Artificial Sequence
  Description of Artificial Sequence: Synthetic oligonucleotide
auggccggccgcagcccgu

SEQ ID NO: 2212601 - RNA, 19 nt, Artificial Sequence
  Description of Artificial Sequence: Synthetic oligonucleotide
ccugggcgucccgcaaggg

SEQ ID NO: 2212602 - RNA, 19 nt, Artificial Sequence
  Description of Artificial Sequence: Synthetic oligonucleotide
uggccggccgcagcccguu

SEQ ID NO: 2212603 - RNA, 19 nt, Artificial Sequence
  Description of Artificial Sequence: Synthetic oligonucleotide
cgcacgccgaagcgcugcg

SEQ ID NO: 2212604 - RNA, 19 nt, Artificial Sequence
  Description of Artificial Sequence: Synthetic oligonucleotide
ggcgucuuccgggcuggca

SEQ ID NO: 2212605 - RNA, 19 nt, Artificial Sequence
  Description of Artificial Sequence: Synthetic oligonucleotide
gagccggucugaggucugu

SEQ ID NO: 2212606 - RNA, 19 nt, Artificial Sequence
  Description of Artificial Sequence: Synthetic oligonucleotide
ccaccccguacacggccac

SEQ ID NO: 2212607 - RNA, 19 nt, Artificial Sequence
  Description of Artificial Sequence: Synthetic oligonucleotide
agccgaccuugccguccau

SEQ ID NO: 2212608 - RNA, 19 nt, Artificial Sequence
  Description of Artificial Sequence: Synthetic oligonucleotide
ccgggucuucuggaucuug

SEQ ID NO: 2212609 - RNA, 19 nt, Artificial Sequence
  Description of Artificial Sequence: Synthetic oligonucleotide
  modified_base (5)..(5): a, c, u, g, unknown or other
cccgnugcggucgcggaaa

SEQ ID NO: 2212610 - RNA, 19 nt, Artificial Sequence
  Description of Artificial Sequence: Synthetic oligonucleotide
ccgcagaggggucuuggcu

SEQ ID NO: 2212611 - RNA, 19 nt, Artificial Sequence
  Description of Artificial Sequence: Synthetic oligonucleotide
cgggcauaggaugccagaa

SEQ ID NO: 2212612 - RNA, 19 nt, Artificial Sequence
  Description of Artificial Sequence: Synthetic oligonucleotide
ccccguacacggccacauc

SEQ ID NO: 2212613 - RNA, 19 nt, Artificial Sequence
  Description of Artificial Sequence: Synthetic oligonucleotide
cgggcgucuuccgggcugg

SEQ ID NO: 2212614 - RNA, 19 nt, Artificial Sequence
  Description of Artificial Sequence: Synthetic oligonucleotide
cgaucugccgcacgccgaa

SEQ ID NO: 2212615 - RNA, 19 nt, Artificial Sequence
  Description of Artificial Sequence: Synthetic oligonucleotide
cuccggcgcagaugcgggu

SEQ ID NO: 2212616 - RNA, 19 nt, Artificial Sequence
  Description of Artificial Sequence: Synthetic oligonucleotide
ccuccacuccuggcacggc

SEQ ID NO: 2212617 - RNA, 19 nt, Artificial Sequence
  Description of Artificial Sequence: Synthetic oligonucleotide
cccgcaagggcuccaucgu

SEQ ID NO: 2212618 - RNA, 19 nt, Artificial Sequence
  Description of Artificial Sequence: Synthetic oligonucleotide
gcacacggugccgccgcuc

SEQ ID NO: 2212619 - RNA, 19 nt, Artificial Sequence
  Description of Artificial Sequence: Synthetic oligonucleotide
ggcagguaucggcccugcu

SEQ ID NO: 2212620 - RNA, 19 nt, Artificial Sequence
  Description of Artificial Sequence: Synthetic oligonucleotide
ccacggccaggcgcacacg

SEQ ID NO: 2212621 - RNA, 19 nt, Artificial Sequence
  Description of Artificial Sequence: Synthetic oligonucleotide
ccgaagcgcugcgugaacu

SEQ ID NO: 2212622 - RNA, 19 nt, Artificial Sequence
  Description of Artificial Sequence: Synthetic oligonucleotide
cggccacaucagucuggcc

SEQ ID NO: 2212623 - RNA, 19 nt, Artificial Sequence
  Description of Artificial Sequence: Synthetic oligonucleotide
cgugcgugaggaugcggcu

SEQ ID NO: 2212624 - RNA, 19 nt, Artificial Sequence
  Description of Artificial Sequence: Synthetic oligonucleotide
ggaacacgcugugggcgau

SEQ ID NO: 2212625 - RNA, 19 nt, Artificial Sequence
  Description of Artificial Sequence: Synthetic oligonucleotide
ggccggccgcagcccguug

SEQ ID NO: 2212626 - RNA, 19 nt, Artificial Sequence
  Description of Artificial Sequence: Synthetic oligonucleotide
gccgcacgccgaagcgcug

SEQ ID NO: 2212627 - RNA, 19 nt, Artificial Sequence
  Description of Artificial Sequence: Synthetic oligonucleotide
ggccgccaugccggcuuug

SEQ ID NO: 2212628 - RNA, 19 nt, Artificial Sequence
  Description of Artificial Sequence: Synthetic oligonucleotide
  modified_base (6)..(6): a, c, u, g, unknown or other
ccccgnugcggucgcggaa

SEQ ID NO: 2212629 - RNA, 19 nt, Artificial Sequence
  Description of Artificial Sequence: Synthetic oligonucleotide
cgguggcgccguagaacuc

SEQ ID NO: 2212630 - RNA, 19 nt, Artificial Sequence
  Description of Artificial Sequence: Synthetic oligonucleotide
cgccgaagcgcugcgugaa

SEQ ID NO: 2212631 - RNA, 19 nt, Artificial Sequence
  Description of Artificial Sequence: Synthetic oligonucleotide
cgccguagaacucgccgau

SEQ ID NO: 2212632 - RNA, 19 nt, Artificial Sequence
  Description of Artificial Sequence: Synthetic oligonucleotide
cgcuaacguagccgucgaa

SEQ ID NO: 2212633 - RNA, 19 nt, Artificial Sequence
  Description of Artificial Sequence: Synthetic oligonucleotide
cggccgcagcccguugccc

SEQ ID NO: 2212634 - RNA, 19 nt, Artificial Sequence
  Description of Artificial Sequence: Synthetic oligonucleotide
gcacgucaccugagaggua

SEQ ID NO: 2212635 - RNA, 19 nt, Artificial Sequence
  Description of Artificial Sequence: Synthetic oligonucleotide
ccggcgcagaugcgggugu

SEQ ID NO: 2212636 - RNA, 19 nt, Artificial Sequence
  Description of Artificial Sequence: Synthetic oligonucleotide
gcccacggccaggcgcaca

SEQ ID NO: 2212637 - RNA, 19 nt, Artificial Sequence
  Description of Artificial Sequence: Synthetic oligonucleotide
cgucacgaaucgguugccu

SEQ ID NO: 2212638 - RNA, 19 nt, Artificial Sequence
  Description of Artificial Sequence: Synthetic oligonucleotide
cgcccuugcggaacacgcu

SEQ ID NO: 2212639 - RNA, 19 nt, Artificial Sequence
  Description of Artificial Sequence: Synthetic oligonucleotide
cggcgcagaugcgggugug

SEQ ID NO: 2212640 - RNA, 19 nt, Artificial Sequence
  Description of Artificial Sequence: Synthetic oligonucleotide
gcgucccgcaagggcucca

SEQ ID NO: 2212641 - RNA, 19 nt, Artificial Sequence
  Description of Artificial Sequence: Synthetic oligonucleotide
cgcugucgcccuugcggaa

SEQ ID NO: 2212642 - RNA, 19 nt, Artificial Sequence
  Description of Artificial Sequence: Synthetic oligonucleotide
ccgcgccagcggaaggugu

SEQ ID NO: 2212643 - RNA, 19 nt, Artificial Sequence
  Description of Artificial Sequence: Synthetic oligonucleotide
gccgggcgucuuccgggcu

SEQ ID NO: 2212644 - RNA, 19 nt, Artificial Sequence
  Description of Artificial Sequence: Synthetic oligonucleotide
  modified_base (4)..(4): a, c, u, g, unknown or other
ccgnugcggucgcggaaau

SEQ ID NO: 2212645 - RNA, 19 nt, Artificial Sequence
  Description of Artificial Sequence: Synthetic oligonucleotide
ccccgcgccagcggaaggu

SEQ ID NO: 2212646 - RNA, 19 nt, Artificial Sequence
  Description of Artificial Sequence: Synthetic oligonucleotide
  modified_base (3)..(3): a, c, u, g, unknown or other
cgnugcggucgcggaaaua

SEQ ID NO: 2212647 - RNA, 19 nt, Artificial Sequence
  Description of Artificial Sequence: Synthetic oligonucleotide
gcgcugcagccgggucuuc

SEQ ID NO: 2212648 - RNA, 19 nt, Artificial Sequence
  Description of Artificial Sequence: Synthetic oligonucleotide
gccgggucuucuggaucuu

SEQ ID NO: 2212649 - RNA, 19 nt, Artificial Sequence
  Description of Artificial Sequence: Synthetic oligonucleotide
gcgugaggaugcggcuguu

SEQ ID NO: 2212650 - RNA, 19 nt, Artificial Sequence
  Description of Artificial Sequence: Synthetic oligonucleotide
cggugccgccgcuccacgu

SEQ ID NO: 2212651 - RNA, 19 nt, Artificial Sequence
  Description of Artificial Sequence: Synthetic oligonucleotide
cgcgcugcagccgggucuu

SEQ ID NO: 2212652 - RNA, 19 nt, Artificial Sequence
  Description of Artificial Sequence: Synthetic oligonucleotide
cgcacacggugccgccgcu

SEQ ID NO: 2212653 - RNA, 19 nt, Artificial Sequence
  Description of Artificial Sequence: Synthetic oligonucleotide
cgucccgcaagggcuccau

SEQ ID NO: 2212654 - RNA, 19 nt, Artificial Sequence
  Description of Artificial Sequence: Synthetic oligonucleotide
  modified_base (1)..(1): a, c, u, g, unknown or other
nugcggucgcggaaauaca

SEQ ID NO: 2212655 - RNA, 19 nt, Artificial Sequence
  Description of Artificial Sequence: Synthetic oligonucleotide
ugaaaauagccacacaucg

SEQ ID NO: 2212656 - RNA, 19 nt, Artificial Sequence
  Description of Artificial Sequence: Synthetic oligonucleotide
aauguaauuuucuuuuggg

SEQ ID NO: 2212657 - RNA, 19 nt, Artificial Sequence
  Description of Artificial Sequence: Synthetic oligonucleotide
aaagacagacaaccgaugc

SEQ ID NO: 2212658 - RNA, 19 nt, Artificial Sequence
  Description of Artificial Sequence: Synthetic oligonucleotide
ugaaccuaccaucagaccc

SEQ ID NO: 2212659 - RNA, 19 nt, Artificial Sequence
  Description of Artificial Sequence: Synthetic oligonucleotide
aacucaugucccuuggacc

SEQ ID NO: 2212660 - RNA, 19 nt, Artificial Sequence
  Description of Artificial Sequence: Synthetic oligonucleotide
aaacucaugucccuuggac

SEQ ID NO: 2212661 - RNA, 19 nt, Artificial Sequence
  Description of Artificial Sequence: Synthetic oligonucleotide
aacugguagacaaucaggc

SEQ ID NO: 2212662 - RNA, 19 nt, Artificial Sequence
  Description of Artificial Sequence: Synthetic oligonucleotide
uuuccauugugauugaagc

SEQ ID NO: 2212663 - RNA, 19 nt, Artificial Sequence
  Description of Artificial Sequence: Synthetic oligonucleotide
caucauuagcccaugaucc

SEQ ID NO: 2212664 - RNA, 19 nt, Artificial Sequence
  Description of Artificial Sequence: Synthetic oligonucleotide
ugaaguuaucuuuugccgg

SEQ ID NO: 2212665 - RNA, 19 nt, Artificial Sequence
  Description of Artificial Sequence: Synthetic oligonucleotide
accagucguagcuagaagc

SEQ ID NO: 2212666 - RNA, 19 nt, Artificial Sequence
  Description of Artificial Sequence: Synthetic oligonucleotide
gaucgauggcauuugaagg

SEQ ID NO: 2212667 - RNA, 19 nt, Artificial Sequence
  Description of Artificial Sequence: Synthetic oligonucleotide
acaucauuagcccaugauc

SEQ ID NO: 2212668 - RNA, 19 nt, Artificial Sequence
  Description of Artificial Sequence: Synthetic oligonucleotide
uugucuuugaaaauagcca

SEQ ID NO: 2212669 - RNA, 19 nt, Artificial Sequence
  Description of Artificial Sequence: Synthetic oligonucleotide
uucgauguccuucauuggg

SEQ ID NO: 2212670 - RNA, 19 nt, Artificial Sequence
  Description of Artificial Sequence: Synthetic oligonucleotide
acuucgauguccuucauug

SEQ ID NO: 2212671 - RNA, 19 nt, Artificial Sequence
  Description of Artificial Sequence: Synthetic oligonucleotide
ugugauugaagcagcaggc

SEQ ID NO: 2212672 - RNA, 19 nt, Artificial Sequence
  Description of Artificial Sequence: Synthetic oligonucleotide
augacaucugcacaguaac

SEQ ID NO: 2212673 - RNA, 19 nt, Artificial Sequence
  Description of Artificial Sequence: Synthetic oligonucleotide
agaagcugaaccuaccauc

SEQ ID NO: 2212674 - RNA, 19 nt, Artificial Sequence
  Description of Artificial Sequence: Synthetic oligonucleotide
guauaugacaucugcacag

SEQ ID NO: 2212675 - RNA, 19 nt, Artificial Sequence
  Description of Artificial Sequence: Synthetic oligonucleotide
ugucuuugaaaauagccac

SEQ ID NO: 2212676 - RNA, 19 nt, Artificial Sequence
  Description of Artificial Sequence: Synthetic oligonucleotide
  modified_base (2)..(2): a, c, u, g, unknown or other
cnguuuuaucacaugaugc

SEQ ID NO: 2212677 - RNA, 19 nt, Artificial Sequence
  Description of Artificial Sequence: Synthetic oligonucleotide
aauuccguucacugcauag

SEQ ID NO: 2212678 - RNA, 19 nt, Artificial Sequence
  Description of Artificial Sequence: Synthetic oligonucleotide
uuuuaucacaugaugcugu

SEQ ID NO: 2212679 - RNA, 19 nt, Artificial Sequence
  Description of Artificial Sequence: Synthetic oligonucleotide
aaggcaauuccguucacug

SEQ ID NO: 2212680 - RNA, 19 nt, Artificial Sequence
  Description of Artificial Sequence: Synthetic oligonucleotide
aaaccaguuggcuuguucu

SEQ ID NO: 2212681 - RNA, 19 nt, Artificial Sequence
  Description of Artificial Sequence: Synthetic oligonucleotide
uuggggauuauaaaacuca

SEQ ID NO: 2212682 - RNA, 19 nt, Artificial Sequence
  Description of Artificial Sequence: Synthetic oligonucleotide
aaaaccaguuggcuuguuc

SEQ ID NO: 2212683 - RNA, 19 nt, Artificial Sequence
  Description of Artificial Sequence: Synthetic oligonucleotide
gugaaguuaucuuuugccg

SEQ ID NO: 2212684 - RNA, 19 nt, Artificial Sequence
  Description of Artificial Sequence: Synthetic oligonucleotide
ugaauggcaacucugcccu

SEQ ID NO: 2212685 - RNA, 19 nt, Artificial Sequence
  Description of Artificial Sequence: Synthetic oligonucleotide
uuggguauaugacaucugc

SEQ ID NO: 2212686 - RNA, 19 nt, Artificial Sequence
  Description of Artificial Sequence: Synthetic oligonucleotide
uuaucuguggcugugcucc

SEQ ID NO: 2212687 - RNA, 19 nt, Artificial Sequence
  Description of Artificial Sequence: Synthetic oligonucleotide
uucucuaacugguagacaa

SEQ ID NO: 2212688 - RNA, 19 nt, Artificial Sequence
  Description of Artificial Sequence: Synthetic oligonucleotide
cauaggcaaauauauuucc

SEQ ID NO: 2212689 - RNA, 19 nt, Artificial Sequence
  Description of Artificial Sequence: Synthetic oligonucleotide
uggguugugauuaucugug

SEQ ID NO: 2212690 - RNA, 19 nt, Artificial Sequence
  Description of Artificial Sequence: Synthetic oligonucleotide
uaucacaugaugcugugaa

SEQ ID NO: 2212691 - RNA, 19 nt, Artificial Sequence
  Description of Artificial Sequence: Synthetic oligonucleotide
aggagaagacguuacuucg

SEQ ID NO: 2212692 - RNA, 19 nt, Artificial Sequence
  Description of Artificial Sequence: Synthetic oligonucleotide
gaugcuaucaucaggagaa

SEQ ID NO: 2212693 - RNA, 19 nt, Artificial Sequence
  Description of Artificial Sequence: Synthetic oligonucleotide
uuugcucccaucaucacuc

SEQ ID NO: 2212694 - RNA, 19 nt, Artificial Sequence
  Description of Artificial Sequence: Synthetic oligonucleotide
uuuugccggauuuggaggg

SEQ ID NO: 2212695 - RNA, 19 nt, Artificial Sequence
  Description of Artificial Sequence: Synthetic oligonucleotide
acagccauuggguauauga

SEQ ID NO: 2212696 - RNA, 19 nt, Artificial Sequence
  Description of Artificial Sequence: Synthetic oligonucleotide
aaugaggaaauucccuggu

SEQ ID NO: 2212697 - RNA, 19 nt, Artificial Sequence
  Description of Artificial Sequence: Synthetic oligonucleotide
gaugcugguguuucagugg

SEQ ID NO: 2212698 - RNA, 19 nt, Artificial Sequence
  Description of Artificial Sequence: Synthetic oligonucleotide
uguuggugccguuggaucg

SEQ ID NO: 2212699 - RNA, 19 nt, Artificial Sequence
  Description of Artificial Sequence: Synthetic oligonucleotide
ugugcucccaaacaugcug

SEQ ID NO: 2212700 - RNA, 19 nt, Artificial Sequence
  Description of Artificial Sequence: Synthetic oligonucleotide
ugauugaagcagcaggcug

SEQ ID NO: 2212701 - RNA, 19 nt, Artificial Sequence
  Description of Artificial Sequence: Synthetic oligonucleotide
uugaaaauagccacacauc

SEQ ID NO: 2212702 - RNA, 19 nt, Artificial Sequence
  Description of Artificial Sequence: Synthetic oligonucleotide
ugaggaaauucccugguaa

SEQ ID NO: 2212703 - RNA, 19 nt, Artificial Sequence
  Description of Artificial Sequence: Synthetic oligonucleotide
ucccugguaagguuggugg

SEQ ID NO: 2212704 - RNA, 19 nt, Artificial Sequence
  Description of Artificial Sequence: Synthetic oligonucleotide
ugggcuuuuggaauggucu

SEQ ID NO: 2212705 - RNA, 19 nt, Artificial Sequence
  Description of Artificial Sequence: Synthetic oligonucleotide
uuauuccucggcuuuagcu

SEQ ID NO: 2212706 - RNA, 19 nt, Artificial Sequence
  Description of Artificial Sequence: Synthetic oligonucleotide
gacaucugcacaguaacag

SEQ ID NO: 2212707 - RNA, 19 nt, Artificial Sequence
  Description of Artificial Sequence: Synthetic oligonucleotide
acucuauucuccugaacuc

SEQ ID NO: 2212708 - RNA, 19 nt, Artificial Sequence
  Description of Artificial Sequence: Synthetic oligonucleotide
gaaguguuggugccguugg

SEQ ID NO: 2212709 - RNA, 19 nt, Artificial Sequence
  Description of Artificial Sequence: Synthetic oligonucleotide
gaagacguuacuucgaugu

SEQ ID NO: 2212710 - RNA, 19 nt, Artificial Sequence
  Description of Artificial Sequence: Synthetic oligonucleotide
  modified_base (9)..(9): a, c, u, g, unknown or other
aucuuggcnguuuuaucac

SEQ ID NO: 2212711 - RNA, 19 nt, Artificial Sequence
  Description of Artificial Sequence: Synthetic oligonucleotide
uuuggggauuauaaaacuc

SEQ ID NO: 2212712 - RNA, 19 nt, Artificial Sequence
  Description of Artificial Sequence: Synthetic oligonucleotide
  modified_base (5)..(5): a, c, u, g, unknown or other
uggcnguuuuaucacauga

SEQ ID NO: 2212713 - RNA, 19 nt, Artificial Sequence
  Description of Artificial Sequence: Synthetic oligonucleotide
cuuuugccggauuuggagg

SEQ ID NO: 2212714 - RNA, 19 nt, Artificial Sequence
  Description of Artificial Sequence: Synthetic oligonucleotide
agacguuacuucgaugucc

SEQ ID NO: 2212715 - RNA, 19 nt, Artificial Sequence
  Description of Artificial Sequence: Synthetic oligonucleotide
cucccaaacaugcuggucc

SEQ ID NO: 2212716 - RNA, 19 nt, Artificial Sequence
  Description of Artificial Sequence: Synthetic oligonucleotide
gcugaaaagacagacaacc

SEQ ID NO: 2212717 - RNA, 19 nt, Artificial Sequence
  Description of Artificial Sequence: Synthetic oligonucleotide
ggugaaguuaucuuuugcc

SEQ ID NO: 2212718 - RNA, 19 nt, Artificial Sequence
  Description of Artificial Sequence: Synthetic oligonucleotide
cugaaaagacagacaaccg

SEQ ID NO: 2212719 - RNA, 19 nt, Artificial Sequence
  Description of Artificial Sequence: Synthetic oligonucleotide
agcagcgaacaucauuagc

SEQ ID NO: 2212720 - RNA, 19 nt, Artificial Sequence
  Description of Artificial Sequence: Synthetic oligonucleotide
uguacuucccagcagcgaa

SEQ ID NO: 2212721 - RNA, 19 nt, Artificial Sequence
  Description of Artificial Sequence: Synthetic oligonucleotide
aacaucauuagcccaugau

SEQ ID NO: 2212722 - RNA, 19 nt, Artificial Sequence
  Description of Artificial Sequence: Synthetic oligonucleotide
aaacaugcuggucccacca

SEQ ID NO: 2212723 - RNA, 19 nt, Artificial Sequence
  Description of Artificial Sequence: Synthetic oligonucleotide
uguagugaauggcaacucu

SEQ ID NO: 2212724 - RNA, 19 nt, Artificial Sequence
  Description of Artificial Sequence: Synthetic oligonucleotide
aagacagacaaccgaugcu

SEQ ID NO: 2212725 - RNA, 19 nt, Artificial Sequence
  Description of Artificial Sequence: Synthetic oligonucleotide
aguggagacucuauucucc

SEQ ID NO: 2212726 - RNA, 19 nt, Artificial Sequence
  Description of Artificial Sequence: Synthetic oligonucleotide
gaacucugaaggcugauuc

SEQ ID NO: 2212727 - RNA, 19 nt, Artificial Sequence
  Description of Artificial Sequence: Synthetic oligonucleotide
gaggaaauucccugguaag

SEQ ID NO: 2212728 - RNA, 19 nt, Artificial Sequence
  Description of Artificial Sequence: Synthetic oligonucleotide
ugaaggugaaguuaucuuu

SEQ ID NO: 2212729 - RNA, 19 nt, Artificial Sequence
  Description of Artificial Sequence: Synthetic oligonucleotide
gauugaagcagcaggcugc

SEQ ID NO: 2212730 - RNA, 19 nt, Artificial Sequence
  Description of Artificial Sequence: Synthetic oligonucleotide
ugcauuacgcaggaaaaug

SEQ ID NO: 2212731 - RNA, 19 nt, Artificial Sequence
  Description of Artificial Sequence: Synthetic oligonucleotide
aucacuccagcagacgucc

SEQ ID NO: 2212732 - RNA, 19 nt, Artificial Sequence
  Description of Artificial Sequence: Synthetic oligonucleotide
uuuggaauggucuguccac

SEQ ID NO: 2212733 - RNA, 19 nt, Artificial Sequence
  Description of Artificial Sequence: Synthetic oligonucleotide
ugucccuuggaccagucgu

SEQ ID NO: 2212734 - RNA, 19 nt, Artificial Sequence
  Description of Artificial Sequence: Synthetic oligonucleotide
uuacgcaggaaaauguaau

SEQ ID NO: 2212735 - RNA, 19 nt, Artificial Sequence
  Description of Artificial Sequence: Synthetic oligonucleotide
uuuaucacaugaugcugug

SEQ ID NO: 2212736 - RNA, 19 nt, Artificial Sequence
  Description of Artificial Sequence: Synthetic oligonucleotide
uauuccucggcuuuagcuc

SEQ ID NO: 2212737 - RNA, 19 nt, Artificial Sequence
  Description of Artificial Sequence: Synthetic oligonucleotide
aucgauggcauuugaaggu

SEQ ID NO: 2212738 - RNA, 19 nt, Artificial Sequence
  Description of Artificial Sequence: Synthetic oligonucleotide
ugaaggcugauucucuaac

SEQ ID NO: 2212739 - RNA, 19 nt, Artificial Sequence
  Description of Artificial Sequence: Synthetic oligonucleotide
acucaugucccuuggacca

SEQ ID NO: 2212740 - RNA, 19 nt, Artificial Sequence
  Description of Artificial Sequence: Synthetic oligonucleotide
cagucccaaauccagaggc

SEQ ID NO: 2212741 - RNA, 19 nt, Artificial Sequence
  Description of Artificial Sequence: Synthetic oligonucleotide
aggcugauucucuaacugg

SEQ ID NO: 2212742 - RNA, 19 nt, Artificial Sequence
  Description of Artificial Sequence: Synthetic oligonucleotide
cugauucucuaacugguag

SEQ ID NO: 2212743 - RNA, 19 nt, Artificial Sequence
  Description of Artificial Sequence: Synthetic oligonucleotide
gaaguuaucuuuugccgga

SEQ ID NO: 2212744 - RNA, 19 nt, Artificial Sequence
  Description of Artificial Sequence: Synthetic oligonucleotide
gaugcugugaagacuuugc

SEQ ID NO: 2212745 - RNA, 19 nt, Artificial Sequence
  Description of Artificial Sequence: Synthetic oligonucleotide
ugauucucuaacugguaga

SEQ ID NO: 2212746 - RNA, 19 nt, Artificial Sequence
  Description of Artificial Sequence: Synthetic oligonucleotide
agacaaucaggccucucuc

SEQ ID NO: 2212747 - RNA, 19 nt, Artificial Sequence
  Description of Artificial Sequence: Synthetic oligonucleotide
ucuaacuguuccgaggucu

SEQ ID NO: 2212748 - RNA, 19 nt, Artificial Sequence
  Description of Artificial Sequence: Synthetic oligonucleotide
uacuucuuauuccucggcu

SEQ ID NO: 2212749 - RNA, 19 nt, Artificial Sequence
  Description of Artificial Sequence: Synthetic oligonucleotide
gacucuauucuccugaacu

SEQ ID NO: 2212750 - RNA, 19 nt, Artificial Sequence
  Description of Artificial Sequence: Synthetic oligonucleotide
aggcaauuccguucacugc

SEQ ID NO: 2212751 - RNA, 19 nt, Artificial Sequence
  Description of Artificial Sequence: Synthetic oligonucleotide
uucaguggagacucuauuc

SEQ ID NO: 2212752 - RNA, 19 nt, Artificial Sequence
  Description of Artificial Sequence: Synthetic oligonucleotide
uuggguugugauuaucugu

SEQ ID NO: 2212753 - RNA, 19 nt, Artificial Sequence
  Description of Artificial Sequence: Synthetic oligonucleotide
gugaauggcaacucugccc

SEQ ID NO: 2212754 - RNA, 19 nt, Artificial Sequence
  Description of Artificial Sequence: Synthetic oligonucleotide
aacucugaaggcugauucu

SEQ ID NO: 2212755 - RNA, 19 nt, Artificial Sequence
  Description of Artificial Sequence: Synthetic oligonucleotide
cagaggcugauccaaacag

SEQ ID NO: 2212756 - RNA, 19 nt, Artificial Sequence
  Description of Artificial Sequence: Synthetic oligonucleotide
gggauuauaaaacucaugu

SEQ ID NO: 2212757 - RNA, 19 nt, Artificial Sequence
  Description of Artificial Sequence: Synthetic oligonucleotide
  modified_base (11)..(11): a, c, u, g, unknown or other
acaucuuggcnguuuuauc

SEQ ID NO: 2212758 - RNA, 19 nt, Artificial Sequence
  Description of Artificial Sequence: Synthetic oligonucleotide
aggaaauucccugguaagg

SEQ ID NO: 2212759 - RNA, 19 nt, Artificial Sequence
  Description of Artificial Sequence: Synthetic oligonucleotide
auuggguugugauuaucug

SEQ ID NO: 2212760 - RNA, 19 nt, Artificial Sequence
  Description of Artificial Sequence: Synthetic oligonucleotide
auuaucuguggcugugcuc

SEQ ID NO: 2212761 - RNA, 19 nt, Artificial Sequence
  Description of Artificial Sequence: Synthetic oligonucleotide
uagcuagaagcauaggcaa

SEQ ID NO: 2212762 - RNA, 19 nt, Artificial Sequence
  Description of Artificial Sequence: Synthetic oligonucleotide
cuaccaucagaccccacgg

SEQ ID NO: 2212763 - RNA, 19 nt, Artificial Sequence
  Description of Artificial Sequence: Synthetic oligonucleotide
uagaagcauaggcaaauau

SEQ ID NO: 2212764 - RNA, 19 nt, Artificial Sequence
  Description of Artificial Sequence: Synthetic oligonucleotide
aaaagacagacaaccgaug

SEQ ID NO: 2212765 - RNA, 19 nt, Artificial Sequence
  Description of Artificial Sequence: Synthetic oligonucleotide
cauagaugucuugaggggc

SEQ ID NO: 2212766 - RNA, 19 nt, Artificial Sequence
  Description of Artificial Sequence: Synthetic oligonucleotide
aaccaguuggcuuguucug

SEQ ID NO: 2212767 - RNA, 19 nt, Artificial Sequence
  Description of Artificial Sequence: Synthetic oligonucleotide
ggugccguuggaucgaugg

SEQ ID NO: 2212768 - RNA, 19 nt, Artificial Sequence
  Description of Artificial Sequence: Synthetic oligonucleotide
guagcuagaagcauaggca

SEQ ID NO: 2212769 - RNA, 19 nt, Artificial Sequence
  Description of Artificial Sequence: Synthetic oligonucleotide
agcugcauuacgcaggaaa

SEQ ID NO: 2212770 - RNA, 19 nt, Artificial Sequence
  Description of Artificial Sequence: Synthetic oligonucleotide
caggauggaaggcaauucc

SEQ ID NO: 2212771 - RNA, 19 nt, Artificial Sequence
  Description of Artificial Sequence: Synthetic oligonucleotide
ugauguagugaauggcaac

SEQ ID NO: 2212772 - RNA, 19 nt, Artificial Sequence
  Description of Artificial Sequence: Synthetic oligonucleotide
auucuccugaacucugaag

SEQ ID NO: 2212773 - RNA, 19 nt, Artificial Sequence
  Description of Artificial Sequence: Synthetic oligonucleotide
ccaaacagacucauguugg

SEQ ID NO: 2212774 - RNA, 19 nt, Artificial Sequence
  Description of Artificial Sequence: Synthetic oligonucleotide
acaaccgaugcuaucauca

SEQ ID NO: 2212775 - RNA, 19 nt, Artificial Sequence
  Description of Artificial Sequence: Synthetic oligonucleotide
gcagcgaacaucauuagcc

SEQ ID NO: 2212776 - RNA, 19 nt, Artificial Sequence
  Description of Artificial Sequence: Synthetic oligonucleotide
  modified_base (3)..(3): a, c, u, g, unknown or other
gcnguuuuaucacaugaug

SEQ ID NO: 2212777 - RNA, 19 nt, Artificial Sequence
  Description of Artificial Sequence: Synthetic oligonucleotide
gaaccuaccaucagacccc

SEQ ID NO: 2212778 - RNA, 19 nt, Artificial Sequence
  Description of Artificial Sequence: Synthetic oligonucleotide
caaacagacucauguuggc

SEQ ID NO: 2212779 - RNA, 19 nt, Artificial Sequence
  Description of Artificial Sequence: Synthetic oligonucleotide
cauuagcccaugauccugc

SEQ ID NO: 2212780 - RNA, 19 nt, Artificial Sequence
  Description of Artificial Sequence: Synthetic oligonucleotide
gaagcauaggcaaauauau

SEQ ID NO: 2212781 - RNA, 19 nt, Artificial Sequence
  Description of Artificial Sequence: Synthetic oligonucleotide
ggcugauccaaacagacuc

SEQ ID NO: 2212782 - RNA, 19 nt, Artificial Sequence
  Description of Artificial Sequence: Synthetic oligonucleotide
ucgauguccuucauugggu

SEQ ID NO: 2212783 - RNA, 19 nt, Artificial Sequence
  Description of Artificial Sequence: Synthetic oligonucleotide
aggccacuacuucuuauuc

SEQ ID NO: 2212784 - RNA, 19 nt, Artificial Sequence
  Description of Artificial Sequence: Synthetic oligonucleotide
cugucuuguacuucccagc

SEQ ID NO: 2212785 - RNA, 19 nt, Artificial Sequence
  Description of Artificial Sequence: Synthetic oligonucleotide
ggguauaugacaucugcac

SEQ ID NO: 2212786 - RNA, 19 nt, Artificial Sequence
  Description of Artificial Sequence: Synthetic oligonucleotide
ugguagacaaucaggccuc

SEQ ID NO: 2212787 - RNA, 19 nt, Artificial Sequence
  Description of Artificial Sequence: Synthetic oligonucleotide
aaacagacucauguuggcu

SEQ ID NO: 2212788 - RNA, 19 nt, Artificial Sequence
  Description of Artificial Sequence: Synthetic oligonucleotide
gaucuaacuguuccgaggu

SEQ ID NO: 2212789 - RNA, 19 nt, Artificial Sequence
  Description of Artificial Sequence: Synthetic oligonucleotide
aauacuucccagagcaaaa

SEQ ID NO: 2212790 - RNA, 19 nt, Artificial Sequence
  Description of Artificial Sequence: Synthetic oligonucleotide
ugugauuaucuguggcugu

SEQ ID NO: 2212791 - RNA, 19 nt, Artificial Sequence
  Description of Artificial Sequence: Synthetic oligonucleotide
uggggauuauaaaacucau

SEQ ID NO: 2212792 - RNA, 19 nt, Artificial Sequence
  Description of Artificial Sequence: Synthetic oligonucleotide
auacuucccagagcaaaac

SEQ ID NO: 2212793 - RNA, 19 nt, Artificial Sequence
  Description of Artificial Sequence: Synthetic oligonucleotide
ucuuuaguuuuguccuggc

SEQ ID NO: 2212794 - RNA, 19 nt, Artificial Sequence
  Description of Artificial Sequence: Synthetic oligonucleotide
agguuggugggcugaaaag

SEQ ID NO: 2212795 - RNA, 19 nt, Artificial Sequence
  Description of Artificial Sequence: Synthetic oligonucleotide
acagacaaccgaugcuauc

SEQ ID NO: 2212796 - RNA, 19 nt, Artificial Sequence
  Description of Artificial Sequence: Synthetic oligonucleotide
cacaguaacagcgcucagg

SEQ ID NO: 2212797 - RNA, 19 nt, Artificial Sequence
  Description of Artificial Sequence: Synthetic oligonucleotide
cagcgaacaucauuagccc

SEQ ID NO: 2212798 - RNA, 19 nt, Artificial Sequence
  Description of Artificial Sequence: Synthetic oligonucleotide
aggguugauguagugaaug

SEQ ID NO: 2212799 - RNA, 19 nt, Artificial Sequence
  Description of Artificial Sequence: Synthetic oligonucleotide
ucuguuugucuuugaaaau

SEQ ID NO: 2212800 - RNA, 19 nt, Artificial Sequence
  Description of Artificial Sequence: Synthetic oligonucleotide
ugaaguguuggugccguug

SEQ ID NO: 2212801 - RNA, 19 nt, Artificial Sequence
  Description of Artificial Sequence: Synthetic oligonucleotide
agacucuauucuccugaac

SEQ ID NO: 2212802 - RNA, 19 nt, Artificial Sequence
  Description of Artificial Sequence: Synthetic oligonucleotide
  modified_base (8)..(8): a, c, u, g, unknown or other
ucuuggcnguuuuaucaca

SEQ ID NO: 2212803 - RNA, 19 nt, Artificial Sequence
  Description of Artificial Sequence: Synthetic oligonucleotide
aggauggaaggcaauuccg

SEQ ID NO: 2212804 - RNA, 19 nt, Artificial Sequence
  Description of Artificial Sequence: Synthetic oligonucleotide
augcuggucccaccagucc

SEQ ID NO: 2212805 - RNA, 19 nt, Artificial Sequence
  Description of Artificial Sequence: Synthetic oligonucleotide
guagugaauggcaacucug

SEQ ID NO: 2212806 - RNA, 19 nt, Artificial Sequence
  Description of Artificial Sequence: Synthetic oligonucleotide
uauaaaacucaugucccuu

SEQ ID NO: 2212807 - RNA, 19 nt, Artificial Sequence
  Description of Artificial Sequence: Synthetic oligonucleotide
aucauuagcccaugauccu

SEQ ID NO: 2212808 - RNA, 19 nt, Artificial Sequence
  Description of Artificial Sequence: Synthetic oligonucleotide
ucuuauuccucggcuuuag

SEQ ID NO: 2212809 - RNA, 19 nt, Artificial Sequence
  Description of Artificial Sequence: Synthetic oligonucleotide
accgaugcuaucaucagga

SEQ ID NO: 2212810 - RNA, 19 nt, Artificial Sequence
  Description of Artificial Sequence: Synthetic oligonucleotide
gaaaauagccacacaucga

SEQ ID NO: 2212811 - RNA, 19 nt, Artificial Sequence
  Description of Artificial Sequence: Synthetic oligonucleotide
acuguuccgaggucuuuag

SEQ ID NO: 2212812 - RNA, 19 nt, Artificial Sequence
  Description of Artificial Sequence: Synthetic oligonucleotide
uuccguucacugcauagau

SEQ ID NO: 2212813 - RNA, 19 nt, Artificial Sequence
  Description of Artificial Sequence: Synthetic oligonucleotide
uuuguccuggcaucuuugu

SEQ ID NO: 2212814 - RNA, 19 nt, Artificial Sequence
  Description of Artificial Sequence: Synthetic oligonucleotide
uauaugacaucugcacagu

SEQ ID NO: 2212815 - RNA, 19 nt, Artificial Sequence
  Description of Artificial Sequence: Synthetic oligonucleotide
auugaagcagcaggcugcg

SEQ ID NO: 2212816 - RNA, 19 nt, Artificial Sequence
  Description of Artificial Sequence: Synthetic oligonucleotide
cugaucuaacuguuccgag

SEQ ID NO: 2212817 - RNA, 19 nt, Artificial Sequence
  Description of Artificial Sequence: Synthetic oligonucleotide
agagcaaaaccaguuggcu

SEQ ID NO: 2212818 - RNA, 19 nt, Artificial Sequence
  Description of Artificial Sequence: Synthetic oligonucleotide
cuucgauguccuucauugg

SEQ ID NO: 2212819 - RNA, 19 nt, Artificial Sequence
  Description of Artificial Sequence: Synthetic oligonucleotide
aacagcgcucaggugaaug

SEQ ID NO: 2212820 - RNA, 19 nt, Artificial Sequence
  Description of Artificial Sequence: Synthetic oligonucleotide
cuacuucuuauuccucggc

SEQ ID NO: 2212821 - RNA, 19 nt, Artificial Sequence
  Description of Artificial Sequence: Synthetic oligonucleotide
ggauuauaaaacucauguc

SEQ ID NO: 2212822 - RNA, 19 nt, Artificial Sequence
  Description of Artificial Sequence: Synthetic oligonucleotide
cagccauuggguauaugac

SEQ ID NO: 2212823 - RNA, 19 nt, Artificial Sequence
  Description of Artificial Sequence: Synthetic oligonucleotide
gauguagugaauggcaacu

SEQ ID NO: 2212824 - RNA, 19 nt, Artificial Sequence
  Description of Artificial Sequence: Synthetic oligonucleotide
guaauuuucuuuuggggau

SEQ ID NO: 2212825 - RNA, 19 nt, Artificial Sequence
  Description of Artificial Sequence: Synthetic oligonucleotide
uccguucacugcauagaug

SEQ ID NO: 2212826 - RNA, 19 nt, Artificial Sequence
  Description of Artificial Sequence: Synthetic oligonucleotide
uacgcaggaaaauguaauu

SEQ ID NO: 2212827 - RNA, 19 nt, Artificial Sequence
  Description of Artificial Sequence: Synthetic oligonucleotide
agaagcauaggcaaauaua

SEQ ID NO: 2212828 - RNA, 19 nt, Artificial Sequence
  Description of Artificial Sequence: Synthetic oligonucleotide
agaagacguuacuucgaug

SEQ ID NO: 2212829 - RNA, 19 nt, Artificial Sequence
  Description of Artificial Sequence: Synthetic oligonucleotide
uccgaggucuuuaguuuug

SEQ ID NO: 2212830 - RNA, 19 nt, Artificial Sequence
  Description of Artificial Sequence: Synthetic oligonucleotide
gaaaagacagacaaccgau

SEQ ID NO: 2212831 - RNA, 19 nt, Artificial Sequence
  Description of Artificial Sequence: Synthetic oligonucleotide
  modified_base (6)..(6): a, c, u, g, unknown or other
uuggcnguuuuaucacaug

SEQ ID NO: 2212832 - RNA, 19 nt, Artificial Sequence
  Description of Artificial Sequence: Synthetic oligonucleotide
gguauaugacaucugcaca

SEQ ID NO: 2212833 - RNA, 19 nt, Artificial Sequence
  Description of Artificial Sequence: Synthetic oligonucleotide
gucguagcuagaagcauag

SEQ ID NO: 2212834 - RNA, 19 nt, Artificial Sequence
  Description of Artificial Sequence: Synthetic oligonucleotide
ugaugcugugaagacuuug

SEQ ID NO: 2212835 - RNA, 19 nt, Artificial Sequence
  Description of Artificial Sequence: Synthetic oligonucleotide
cucggcuuuagcucuucag

SEQ ID NO: 2212836 - RNA, 19 nt, Artificial Sequence
  Description of Artificial Sequence: Synthetic oligonucleotide
agcgaacaucauuagccca

SEQ ID NO: 2212837 - RNA, 19 nt, Artificial Sequence
  Description of Artificial Sequence: Synthetic oligonucleotide
uggaucgauggcauuugaa

SEQ ID NO: 2212838 - RNA, 19 nt, Artificial Sequence
  Description of Artificial Sequence: Synthetic oligonucleotide
ucccagaagcugaaccuac

SEQ ID NO: 2212839 - RNA, 19 nt, Artificial Sequence
  Description of Artificial Sequence: Synthetic oligonucleotide
caaacaugcuggucccacc

SEQ ID NO: 2212840 - RNA, 19 nt, Artificial Sequence
  Description of Artificial Sequence: Synthetic oligonucleotide
uccugcaaugaggaaauuc

SEQ ID NO: 2212841 - RNA, 19 nt, Artificial Sequence
  Description of Artificial Sequence: Synthetic oligonucleotide
caaucaggccucucucugc

SEQ ID NO: 2212842 - RNA, 19 nt, Artificial Sequence
  Description of Artificial Sequence: Synthetic oligonucleotide
ccaugauccugcaaugagg

SEQ ID NO: 2212843 - RNA, 19 nt, Artificial Sequence
  Description of Artificial Sequence: Synthetic oligonucleotide
cucuaacugguagacaauc

SEQ ID NO: 2212844 - RNA, 19 nt, Artificial Sequence
  Description of Artificial Sequence: Synthetic oligonucleotide
ugccguuggaucgauggca

SEQ ID NO: 2212845 - RNA, 19 nt, Artificial Sequence
  Description of Artificial Sequence: Synthetic oligonucleotide
ugauuaucuguggcugugc

SEQ ID NO: 2212846 - RNA, 19 nt, Artificial Sequence
  Description of Artificial Sequence: Synthetic oligonucleotide
agcgcucaggugaauggcc

SEQ ID NO: 2212847 - RNA, 19 nt, Artificial Sequence
  Description of Artificial Sequence: Synthetic oligonucleotide
aucuaacuguuccgagguc

SEQ ID NO: 2212848 - RNA, 19 nt, Artificial Sequence
  Description of Artificial Sequence: Synthetic oligonucleotide
cuucauuggguugugauua

SEQ ID NO: 2212849 - RNA, 19 nt, Artificial Sequence
  Description of Artificial Sequence: Synthetic oligonucleotide
cugaaccuaccaucagacc

SEQ ID NO: 2212850 - RNA, 19 nt, Artificial Sequence
  Description of Artificial Sequence: Synthetic oligonucleotide
uagcaagggugccauggac

SEQ ID NO: 2212851 - RNA, 19 nt, Artificial Sequence
  Description of Artificial Sequence: Synthetic oligonucleotide
ugcuaucaucaggagaaga

SEQ ID NO: 2212852 - RNA, 19 nt, Artificial Sequence
  Description of Artificial Sequence: Synthetic oligonucleotide
uccagaggcugauccaaac

SEQ ID NO: 2212853 - RNA, 19 nt, Artificial Sequence
  Description of Artificial Sequence: Synthetic oligonucleotide
ugguguuucaguggagacu

SEQ ID NO: 2212854 - RNA, 19 nt, Artificial Sequence
  Description of Artificial Sequence: Synthetic oligonucleotide
gaccccacgguagcaaggg

SEQ ID NO: 2212855 - RNA, 19 nt, Artificial Sequence
  Description of Artificial Sequence: Synthetic oligonucleotide
agacagacaaccgaugcua

SEQ ID NO: 2212856 - RNA, 19 nt, Artificial Sequence
  Description of Artificial Sequence: Synthetic oligonucleotide
aucaucacuccagcagacg

SEQ ID NO: 2212857 - RNA, 19 nt, Artificial Sequence
  Description of Artificial Sequence: Synthetic oligonucleotide
guggccaccacagccauug

SEQ ID NO: 2212858 - RNA, 19 nt, Artificial Sequence
  Description of Artificial Sequence: Synthetic oligonucleotide
ucucuaacugguagacaau

SEQ ID NO: 2212859 - RNA, 19 nt, Artificial Sequence
  Description of Artificial Sequence: Synthetic oligonucleotide
gaccagucguagcuagaag

SEQ ID NO: 2212860 - RNA, 19 nt, Artificial Sequence
  Description of Artificial Sequence: Synthetic oligonucleotide
cuuauuccucggcuuuagc

SEQ ID NO: 2212861 - RNA, 19 nt, Artificial Sequence
  Description of Artificial Sequence: Synthetic oligonucleotide
auuacgcaggaaaauguaa

SEQ ID NO: 2212862 - RNA, 19 nt, Artificial Sequence
  Description of Artificial Sequence: Synthetic oligonucleotide
ucaauacuucccagagcaa

SEQ ID NO: 2212863 - RNA, 19 nt, Artificial Sequence
  Description of Artificial Sequence: Synthetic oligonucleotide
ggaggguugauguagugaa

SEQ ID NO: 2212864 - RNA, 19 nt, Artificial Sequence
  Description of Artificial Sequence: Synthetic oligonucleotide
cugugaagacuuugcuccc

SEQ ID NO: 2212865 - RNA, 19 nt, Artificial Sequence
  Description of Artificial Sequence: Synthetic oligonucleotide
gcuaucaucaggagaagac

SEQ ID NO: 2212866 - RNA, 19 nt, Artificial Sequence
  Description of Artificial Sequence: Synthetic oligonucleotide
aucgaugcugguguuucag

SEQ ID NO: 2212867 - RNA, 19 nt, Artificial Sequence
  Description of Artificial Sequence: Synthetic oligonucleotide
cagacaaccgaugcuauca

SEQ ID NO: 2212868 - RNA, 19 nt, Artificial Sequence
  Description of Artificial Sequence: Synthetic oligonucleotide
caucagaccccacgguagc

SEQ ID NO: 2212869 - RNA, 19 nt, Artificial Sequence
  Description of Artificial Sequence: Synthetic oligonucleotide
auagaugucuugaggggcu

SEQ ID NO: 2212870 - RNA, 19 nt, Artificial Sequence
  Description of Artificial Sequence: Synthetic oligonucleotide
cauuugaaggugaaguuau

SEQ ID NO: 2212871 - RNA, 19 nt, Artificial Sequence
  Description of Artificial Sequence: Synthetic oligonucleotide
gcaagggugccauggacag

SEQ ID NO: 2212872 - RNA, 19 nt, Artificial Sequence
  Description of Artificial Sequence: Synthetic oligonucleotide
auuccguucacugcauaga

SEQ ID NO: 2212873 - RNA, 19 nt, Artificial Sequence
  Description of Artificial Sequence: Synthetic oligonucleotide
ggcugaucuaacuguuccg

SEQ ID NO: 2212874 - RNA, 19 nt, Artificial Sequence
  Description of Artificial Sequence: Synthetic oligonucleotide
acaugaugcugugaagacu

SEQ ID NO: 2212875 - RNA, 19 nt, Artificial Sequence
  Description of Artificial Sequence: Synthetic oligonucleotide
uuaucacaugaugcuguga

SEQ ID NO: 2212876 - RNA, 19 nt, Artificial Sequence
  Description of Artificial Sequence: Synthetic oligonucleotide
uuggaggguugauguagug

SEQ ID NO: 2212877 - RNA, 19 nt, Artificial Sequence
  Description of Artificial Sequence: Synthetic oligonucleotide
aaguguuggugccguugga

SEQ ID NO: 2212878 - RNA, 19 nt, Artificial Sequence
  Description of Artificial Sequence: Synthetic oligonucleotide
accaucagaccccacggua

SEQ ID NO: 2212879 - RNA, 19 nt, Artificial Sequence
  Description of Artificial Sequence: Synthetic oligonucleotide
agcccaugauccugcaaug

SEQ ID NO: 2212880 - RNA, 19 nt, Artificial Sequence
  Description of Artificial Sequence: Synthetic oligonucleotide
uaccaucagaccccacggu

SEQ ID NO: 2212881 - RNA, 19 nt, Artificial Sequence
  Description of Artificial Sequence: Synthetic oligonucleotide
ugcgaugggcugaucuaac

SEQ ID NO: 2212882 - RNA, 19 nt, Artificial Sequence
  Description of Artificial Sequence: Synthetic oligonucleotide
auccaaacagacucauguu

SEQ ID NO: 2212883 - RNA, 19 nt, Artificial Sequence
  Description of Artificial Sequence: Synthetic oligonucleotide
cauugugauugaagcagca

SEQ ID NO: 2212884 - RNA, 19 nt, Artificial Sequence
  Description of Artificial Sequence: Synthetic oligonucleotide
gacaaccgaugcuaucauc

SEQ ID NO: 2212885 - RNA, 19 nt, Artificial Sequence
  Description of Artificial Sequence: Synthetic oligonucleotide
guuggaucgauggcauuug

SEQ ID NO: 2212886 - RNA, 19 nt, Artificial Sequence
  Description of Artificial Sequence: Synthetic oligonucleotide
cauuggguugugauuaucu

SEQ ID NO: 2212887 - RNA, 19 nt, Artificial Sequence
  Description of Artificial Sequence: Synthetic oligonucleotide
cauuacgcaggaaaaugua

SEQ ID NO: 2212888 - RNA, 19 nt, Artificial Sequence
  Description of Artificial Sequence: Synthetic oligonucleotide
auaugacaucugcacagua

SEQ ID NO: 2212889 - RNA, 19 nt, Artificial Sequence
  Description of Artificial Sequence: Synthetic oligonucleotide
uacuucgauguccuucauu

SEQ ID NO: 2212890 - RNA, 19 nt, Artificial Sequence
  Description of Artificial Sequence: Synthetic oligonucleotide
uguuucaguggagacucua

SEQ ID NO: 2212891 - RNA, 19 nt, Artificial Sequence
  Description of Artificial Sequence: Synthetic oligonucleotide
uuccgaggucuuuaguuuu

SEQ ID NO: 2212892 - RNA, 19 nt, Artificial Sequence
  Description of Artificial Sequence: Synthetic oligonucleotide
guguuggugccguuggauc

SEQ ID NO: 2212893 - RNA, 19 nt, Artificial Sequence
  Description of Artificial Sequence: Synthetic oligonucleotide
guggcugugcucccaaaca

SEQ ID NO: 2212894 - RNA, 19 nt, Artificial Sequence
  Description of Artificial Sequence: Synthetic oligonucleotide
caauacuucccagagcaaa

SEQ ID NO: 2212895 - RNA, 19 nt, Artificial Sequence
  Description of Artificial Sequence: Synthetic oligonucleotide
aagcauaggcaaauauauu

SEQ ID NO: 2212896 - RNA, 19 nt, Artificial Sequence
  Description of Artificial Sequence: Synthetic oligonucleotide
gaacaucauuagcccauga

SEQ ID NO: 2212897 - RNA, 19 nt, Artificial Sequence
  Description of Artificial Sequence: Synthetic oligonucleotide
ugggcugaucuaacuguuc

SEQ ID NO: 2212898 - RNA, 19 nt, Artificial Sequence
  Description of Artificial Sequence: Synthetic oligonucleotide
ugccggauuuggaggguug

SEQ ID NO: 2212899 - RNA, 19 nt, Artificial Sequence
  Description of Artificial Sequence: Synthetic oligonucleotide
ggccacuacuucuuauucc

SEQ ID NO: 2212900 - RNA, 19 nt, Artificial Sequence
  Description of Artificial Sequence: Synthetic oligonucleotide
ugcugguguuucaguggag

SEQ ID NO: 2212901 - RNA, 19 nt, Artificial Sequence
  Description of Artificial Sequence: Synthetic oligonucleotide
uuguacuucccagcagcga

SEQ ID NO: 2212902 - RNA, 19 nt, Artificial Sequence
  Description of Artificial Sequence: Synthetic oligonucleotide
uucauuggguugugauuau

SEQ ID NO: 2212903 - RNA, 19 nt, Artificial Sequence
  Description of Artificial Sequence: Synthetic oligonucleotide
uuagcccaugauccugcaa

SEQ ID NO: 2212904 - RNA, 19 nt, Artificial Sequence
  Description of Artificial Sequence: Synthetic oligonucleotide
ccauugugauugaagcagc

SEQ ID NO: 2212905 - RNA, 19 nt, Artificial Sequence
  Description of Artificial Sequence: Synthetic oligonucleotide
uguccacugucuuguacuu

SEQ ID NO: 2212906 - RNA, 19 nt, Artificial Sequence
  Description of Artificial Sequence: Synthetic oligonucleotide
ggguugugauuaucugugg

SEQ ID NO: 2212907 - RNA, 19 nt, Artificial Sequence
  Description of Artificial Sequence: Synthetic oligonucleotide
gcugugcucccaaacaugc

SEQ ID NO: 2212908 - RNA, 19 nt, Artificial Sequence
  Description of Artificial Sequence: Synthetic oligonucleotide
cauuggguauaugacaucu

SEQ ID NO: 2212909 - RNA, 19 nt, Artificial Sequence
  Description of Artificial Sequence: Synthetic oligonucleotide
gacaaucaggccucucucu

SEQ ID NO: 2212910 - RNA, 19 nt, Artificial Sequence
  Description of Artificial Sequence: Synthetic oligonucleotide
augaggaaauucccuggua

SEQ ID NO: 2212911 - RNA, 19 nt, Artificial Sequence
  Description of Artificial Sequence: Synthetic oligonucleotide
auuagcccaugauccugca

SEQ ID NO: 2212912 - RNA, 19 nt, Artificial Sequence
  Description of Artificial Sequence: Synthetic oligonucleotide
agacaaccgaugcuaucau

SEQ ID NO: 2212913 - RNA, 19 nt, Artificial Sequence
  Description of Artificial Sequence: Synthetic oligonucleotide
cuauucuccugaacucuga

SEQ ID NO: 2212914 - RNA, 19 nt, Artificial Sequence
  Description of Artificial Sequence: Synthetic oligonucleotide
cacugcauagaugucuuga

SEQ ID NO: 2212915 - RNA, 19 nt, Artificial Sequence
  Description of Artificial Sequence: Synthetic oligonucleotide
gagacucuauucuccugaa

SEQ ID NO: 2212916 - RNA, 19 nt, Artificial Sequence
  Description of Artificial Sequence: Synthetic oligonucleotide
gagaagacguuacuucgau

SEQ ID NO: 2212917 - RNA, 19 nt, Artificial Sequence
  Description of Artificial Sequence: Synthetic oligonucleotide
ccaucagaccccacgguag

SEQ ID NO: 2212918 - RNA, 19 nt, Artificial Sequence
  Description of Artificial Sequence: Synthetic oligonucleotide
agaggcugauccaaacaga

SEQ ID NO: 2212919 - RNA, 19 nt, Artificial Sequence
  Description of Artificial Sequence: Synthetic oligonucleotide
  modified_base (7)..(7): a, c, u, g, unknown or other
cuuggcnguuuuaucacau

SEQ ID NO: 2212920 - RNA, 19 nt, Artificial Sequence
  Description of Artificial Sequence: Synthetic oligonucleotide
gauggaaggcaauuccguu

SEQ ID NO: 2212921 - RNA, 19 nt, Artificial Sequence
  Description of Artificial Sequence: Synthetic oligonucleotide
gaaggugaaguuaucuuuu

SEQ ID NO: 2212922 - RNA, 19 nt, Artificial Sequence
  Description of Artificial Sequence: Synthetic oligonucleotide
ugguaagguuggugggcug

SEQ ID NO: 2212923 - RNA, 19 nt, Artificial Sequence
  Description of Artificial Sequence: Synthetic oligonucleotide
cugcacaguaacagcgcuc

SEQ ID NO: 2212924 - RNA, 19 nt, Artificial Sequence
  Description of Artificial Sequence: Synthetic oligonucleotide
uagaugucuugaggggcug

SEQ ID NO: 2212925 - RNA, 19 nt, Artificial Sequence
  Description of Artificial Sequence: Synthetic oligonucleotide
gaaauucccugguaagguu

SEQ ID NO: 2212926 - RNA, 19 nt, Artificial Sequence
  Description of Artificial Sequence: Synthetic oligonucleotide
ccagugugcaucugcuggg

SEQ ID NO: 2212927 - RNA, 19 nt, Artificial Sequence
  Description of Artificial Sequence: Synthetic oligonucleotide
gacguuacuucgauguccu

SEQ ID NO: 2212928 - RNA, 19 nt, Artificial Sequence
  Description of Artificial Sequence: Synthetic oligonucleotide
ggggauuauaaaacucaug

SEQ ID NO: 2212929 - RNA, 19 nt, Artificial Sequence
  Description of Artificial Sequence: Synthetic oligonucleotide
ucauuggguugugauuauc

SEQ ID NO: 2212930 - RNA, 19 nt, Artificial Sequence
  Description of Artificial Sequence: Synthetic oligonucleotide
aaccuaccaucagacccca

SEQ ID NO: 2212931 - RNA, 19 nt, Artificial Sequence
  Description of Artificial Sequence: Synthetic oligonucleotide
cagcagcgaacaucauuag

SEQ ID NO: 2212932 - RNA, 19 nt, Artificial Sequence
  Description of Artificial Sequence: Synthetic oligonucleotide
cccacgguagcaagggugc

SEQ ID NO: 2212933 - RNA, 19 nt, Artificial Sequence
  Description of Artificial Sequence: Synthetic oligonucleotide
ccagcagcgaacaucauua

SEQ ID NO: 2212934 - RNA, 19 nt, Artificial Sequence
  Description of Artificial Sequence: Synthetic oligonucleotide
ucagaccccacgguagcaa

SEQ ID NO: 2212935 - RNA, 19 nt, Artificial Sequence
  Description of Artificial Sequence: Synthetic oligonucleotide
uucuuauuccucggcuuua

SEQ ID NO: 2212936 - RNA, 19 nt, Artificial Sequence
  Description of Artificial Sequence: Synthetic oligonucleotide
uguucaggucccacaucuu

SEQ ID NO: 2212937 - RNA, 19 nt, Artificial Sequence
  Description of Artificial Sequence: Synthetic oligonucleotide
agucguagcuagaagcaua

SEQ ID NO: 2212938 - RNA, 19 nt, Artificial Sequence
  Description of Artificial Sequence: Synthetic oligonucleotide
gagcaaaaccaguuggcuu

SEQ ID NO: 2212939 - RNA, 19 nt, Artificial Sequence
  Description of Artificial Sequence: Synthetic oligonucleotide
gugccguuggaucgauggc

SEQ ID NO: 2212940 - RNA, 19 nt, Artificial Sequence
  Description of Artificial Sequence: Synthetic oligonucleotide
gugaauggccugguugcug

SEQ ID NO: 2212941 - RNA, 19 nt, Artificial Sequence
  Description of Artificial Sequence: Synthetic oligonucleotide
ucaggugaauggccugguu

SEQ ID NO: 2212942 - RNA, 19 nt, Artificial Sequence
  Description of Artificial Sequence: Synthetic oligonucleotide
agaccccacgguagcaagg

SEQ ID NO: 2212943 - RNA, 19 nt, Artificial Sequence
  Description of Artificial Sequence: Synthetic oligonucleotide
gcugaucuaacuguuccga

SEQ ID NO: 2212944 - RNA, 19 nt, Artificial Sequence
  Description of Artificial Sequence: Synthetic oligonucleotide
agucccaaauccagaggcu

SEQ ID NO: 2212945 - RNA, 19 nt, Artificial Sequence
  Description of Artificial Sequence: Synthetic oligonucleotide
uuugccggauuuggagggu

SEQ ID NO: 2212946 - RNA, 19 nt, Artificial Sequence
  Description of Artificial Sequence: Synthetic oligonucleotide
cugaaggcugauucucuaa

SEQ ID NO: 2212947 - RNA, 19 nt, Artificial Sequence
  Description of Artificial Sequence: Synthetic oligonucleotide
aucuuuugccggauuugga

SEQ ID NO: 2212948 - RNA, 19 nt, Artificial Sequence
  Description of Artificial Sequence: Synthetic oligonucleotide
gccacuacuucuuauuccu

SEQ ID NO: 2212949 - RNA, 19 nt, Artificial Sequence
  Description of Artificial Sequence: Synthetic oligonucleotide
augcuaucaucaggagaag

SEQ ID NO: 2212950 - RNA, 19 nt, Artificial Sequence
  Description of Artificial Sequence: Synthetic oligonucleotide
auggucuguccacugucuu

SEQ ID NO: 2212951 - RNA, 19 nt, Artificial Sequence
  Description of Artificial Sequence: Synthetic oligonucleotide
uuacuucgauguccuucau

SEQ ID NO: 2212952 - RNA, 19 nt, Artificial Sequence
  Description of Artificial Sequence: Synthetic oligonucleotide
acguccagcacuggcccag

SEQ ID NO: 2212953 - RNA, 19 nt, Artificial Sequence
  Description of Artificial Sequence: Synthetic oligonucleotide
cagcgcucaggugaauggc

SEQ ID NO: 2212954 - RNA, 19 nt, Artificial Sequence
  Description of Artificial Sequence: Synthetic oligonucleotide
caguaacagcgcucaggug

SEQ ID NO: 2212955 - RNA, 19 nt, Artificial Sequence
  Description of Artificial Sequence: Synthetic oligonucleotide
cagugugcaucugcugggc

SEQ ID NO: 2212956 - RNA, 19 nt, Artificial Sequence
  Description of Artificial Sequence: Synthetic oligonucleotide
ucaugucccuuggaccagu

SEQ ID NO: 2212957 - RNA, 19 nt, Artificial Sequence
  Description of Artificial Sequence: Synthetic oligonucleotide
gaaggcaauuccguucacu

SEQ ID NO: 2212958 - RNA, 19 nt, Artificial Sequence
  Description of Artificial Sequence: Synthetic oligonucleotide
ccucaauacuucccagagc

SEQ ID NO: 2212959 - RNA, 19 nt, Artificial Sequence
  Description of Artificial Sequence: Synthetic oligonucleotide
cuuugucccagaagcugaa

SEQ ID NO: 2212960 - RNA, 19 nt, Artificial Sequence
  Description of Artificial Sequence: Synthetic oligonucleotide
ccagucguagcuagaagca

SEQ ID NO: 2212961 - RNA, 19 nt, Artificial Sequence
  Description of Artificial Sequence: Synthetic oligonucleotide
guuccgaggucuuuaguuu

SEQ ID NO: 2212962 - RNA, 19 nt, Artificial Sequence
  Description of Artificial Sequence: Synthetic oligonucleotide
acgguagcaagggugccau

SEQ ID NO: 2212963 - RNA, 19 nt, Artificial Sequence
  Description of Artificial Sequence: Synthetic oligonucleotide
cucaugucccuuggaccag

SEQ ID NO: 2212964 - RNA, 19 nt, Artificial Sequence
  Description of Artificial Sequence: Synthetic oligonucleotide
uaagguuggugggcugaaa

SEQ ID NO: 2212965 - RNA, 19 nt, Artificial Sequence
  Description of Artificial Sequence: Synthetic oligonucleotide
ugccauggacaggauggaa

SEQ ID NO: 2212966 - RNA, 19 nt, Artificial Sequence
  Description of Artificial Sequence: Synthetic oligonucleotide
caagggugccauggacagg

SEQ ID NO: 2212967 - RNA, 19 nt, Artificial Sequence
  Description of Artificial Sequence: Synthetic oligonucleotide
ggagaagacguuacuucga

SEQ ID NO: 2212968 - RNA, 19 nt, Artificial Sequence
  Description of Artificial Sequence: Synthetic oligonucleotide
aggcugauccaaacagacu

SEQ ID NO: 2212969 - RNA, 19 nt, Artificial Sequence
  Description of Artificial Sequence: Synthetic oligonucleotide
ccuggcaucuuugucccag

SEQ ID NO: 2212970 - RNA, 19 nt, Artificial Sequence
  Description of Artificial Sequence: Synthetic oligonucleotide
gcugcauuacgcaggaaaa

SEQ ID NO: 2212971 - RNA, 19 nt, Artificial Sequence
  Description of Artificial Sequence: Synthetic oligonucleotide
gguaagguuggugggcuga

SEQ ID NO: 2212972 - RNA, 19 nt, Artificial Sequence
  Description of Artificial Sequence: Synthetic oligonucleotide
ggcugaaguguuggugccg

SEQ ID NO: 2212973 - RNA, 19 nt, Artificial Sequence
  Description of Artificial Sequence: Synthetic oligonucleotide
ccccacgguagcaagggug

SEQ ID NO: 2212974 - RNA, 19 nt, Artificial Sequence
  Description of Artificial Sequence: Synthetic oligonucleotide
agaugucuugaggggcuga

SEQ ID NO: 2212975 - RNA, 19 nt, Artificial Sequence
  Description of Artificial Sequence: Synthetic oligonucleotide
aucagaccccacgguagca

SEQ ID NO: 2212976 - RNA, 19 nt, Artificial Sequence
  Description of Artificial Sequence: Synthetic oligonucleotide
gucccaccagucccaaauc

SEQ ID NO: 2212977 - RNA, 19 nt, Artificial Sequence
  Description of Artificial Sequence: Synthetic oligonucleotide
guuggugccguuggaucga

SEQ ID NO: 2212978 - RNA, 19 nt, Artificial Sequence
  Description of Artificial Sequence: Synthetic oligonucleotide
ggcugaaaagacagacaac

SEQ ID NO: 2212979 - RNA, 19 nt, Artificial Sequence
  Description of Artificial Sequence: Synthetic oligonucleotide
gugauugaagcagcaggcu

SEQ ID NO: 2212980 - RNA, 19 nt, Artificial Sequence
  Description of Artificial Sequence: Synthetic oligonucleotide
aguuuuguccuggcaucuu

SEQ ID NO: 2212981 - RNA, 19 nt, Artificial Sequence
  Description of Artificial Sequence: Synthetic oligonucleotide
  modified_base (12)..(12): a, c, u, g, unknown or other
cacaucuuggcnguuuuau

SEQ ID NO: 2212982 - RNA, 19 nt, Artificial Sequence
  Description of Artificial Sequence: Synthetic oligonucleotide
acuucccagcagcgaacau

SEQ ID NO: 2212983 - RNA, 19 nt, Artificial Sequence
  Description of Artificial Sequence: Synthetic oligonucleotide
uaacuguuccgaggucuuu

SEQ ID NO: 2212984 - RNA, 19 nt, Artificial Sequence
  Description of Artificial Sequence: Synthetic oligonucleotide
cuagaagcauaggcaaaua

SEQ ID NO: 2212985 - RNA, 19 nt, Artificial Sequence
  Description of Artificial Sequence: Synthetic oligonucleotide
ggucccaccagucccaaau

SEQ ID NO: 2212986 - RNA, 19 nt, Artificial Sequence
  Description of Artificial Sequence: Synthetic oligonucleotide
gcugauccaaacagacuca

SEQ ID NO: 2212987 - RNA, 19 nt, Artificial Sequence
  Description of Artificial Sequence: Synthetic oligonucleotide
  modified_base (15)..(15): a, c, u, g, unknown or other
ucccacaucuuggcnguuu

SEQ ID NO: 2212988 - RNA, 19 nt, Artificial Sequence
  Description of Artificial Sequence: Synthetic oligonucleotide
gcauuacgcaggaaaaugu

SEQ ID NO: 2212989 - RNA, 19 nt, Artificial Sequence
  Description of Artificial Sequence: Synthetic oligonucleotide
agcagacguccagcacugg

SEQ ID NO: 2212990 - RNA, 19 nt, Artificial Sequence
  Description of Artificial Sequence: Synthetic oligonucleotide
cagaagcugaaccuaccau

SEQ ID NO: 2212991 - RNA, 19 nt, Artificial Sequence
  Description of Artificial Sequence: Synthetic oligonucleotide
guagacaaucaggccucuc

SEQ ID NO: 2212992 - RNA, 19 nt, Artificial Sequence
  Description of Artificial Sequence: Synthetic oligonucleotide
cacgguagcaagggugcca

SEQ ID NO: 2212993 - RNA, 19 nt, Artificial Sequence
  Description of Artificial Sequence: Synthetic oligonucleotide
cuaacuguuccgaggucuu

SEQ ID NO: 2212994 - RNA, 19 nt, Artificial Sequence
  Description of Artificial Sequence: Synthetic oligonucleotide
ggucuguccacugucuugu

SEQ ID NO: 2212995 - RNA, 19 nt, Artificial Sequence
  Description of Artificial Sequence: Synthetic oligonucleotide
ggauggaaggcaauuccgu

SEQ ID NO: 2212996 - RNA, 19 nt, Artificial Sequence
  Description of Artificial Sequence: Synthetic oligonucleotide
uugccggauuuggaggguu

SEQ ID NO: 2212997 - RNA, 19 nt, Artificial Sequence
  Description of Artificial Sequence: Synthetic oligonucleotide
cuugaggggcugaaguguu

SEQ ID NO: 2212998 - RNA, 19 nt, Artificial Sequence
  Description of Artificial Sequence: Synthetic oligonucleotide
gcuagaagcauaggcaaau

SEQ ID NO: 2212999 - RNA, 19 nt, Artificial Sequence
  Description of Artificial Sequence: Synthetic oligonucleotide
ggaccagucguagcuagaa

SEQ ID NO: 2213000 - RNA, 19 nt, Artificial Sequence
  Description of Artificial Sequence: Synthetic oligonucleotide
gacagacaaccgaugcuau

SEQ ID NO: 2213001 - RNA, 19 nt, Artificial Sequence
  Description of Artificial Sequence: Synthetic oligonucleotide
ccauuggguauaugacauc

SEQ ID NO: 2213002 - RNA, 19 nt, Artificial Sequence
  Description of Artificial Sequence: Synthetic oligonucleotide
auucccugguaagguuggu

SEQ ID NO: 2213003 - RNA, 19 nt, Artificial Sequence
  Description of Artificial Sequence: Synthetic oligonucleotide
  modified_base (4)..(4): a, c, u, g, unknown or other
ggcnguuuuaucacaugau

SEQ ID NO: 2213004 - RNA, 19 nt, Artificial Sequence
  Description of Artificial Sequence: Synthetic oligonucleotide
ggcuuguucuguuugucuu

SEQ ID NO: 2213005 - RNA, 19 nt, Artificial Sequence
  Description of Artificial Sequence: Synthetic oligonucleotide
cgaugcuaucaucaggaga

SEQ ID NO: 2213006 - RNA, 19 nt, Artificial Sequence
  Description of Artificial Sequence: Synthetic oligonucleotide
gcugcgaugggcugaucua

SEQ ID NO: 2213007 - RNA, 19 nt, Artificial Sequence
  Description of Artificial Sequence: Synthetic oligonucleotide
cugguaagguuggugggcu

SEQ ID NO: 2213008 - RNA, 19 nt, Artificial Sequence
  Description of Artificial Sequence: Synthetic oligonucleotide
cuuggaccagucguagcua

SEQ ID NO: 2213009 - RNA, 19 nt, Artificial Sequence
  Description of Artificial Sequence: Synthetic oligonucleotide
ccuuggaccagucguagcu

SEQ ID NO: 2213010 - RNA, 19 nt, Artificial Sequence
  Description of Artificial Sequence: Synthetic oligonucleotide
ccacuacuucuuauuccuc

SEQ ID NO: 2213011 - RNA, 19 nt, Artificial Sequence
  Description of Artificial Sequence: Synthetic oligonucleotide
caauuccguucacugcaua

SEQ ID NO: 2213012 - RNA, 19 nt, Artificial Sequence
  Description of Artificial Sequence: Synthetic oligonucleotide
ccagcagacguccagcacu

SEQ ID NO: 2213013 - RNA, 19 nt, Artificial Sequence
  Description of Artificial Sequence: Synthetic oligonucleotide
cccuuggaccagucguagc

SEQ ID NO: 2213014 - RNA, 19 nt, Artificial Sequence
  Description of Artificial Sequence: Synthetic oligonucleotide
cggauuuggaggguugaug

SEQ ID NO: 2213015 - RNA, 19 nt, Artificial Sequence
  Description of Artificial Sequence: Synthetic oligonucleotide
gcacaguaacagcgcucag

SEQ ID NO: 2213016 - RNA, 19 nt, Artificial Sequence
  Description of Artificial Sequence: Synthetic oligonucleotide
acguuacuucgauguccuu

SEQ ID NO: 2213017 - RNA, 19 nt, Artificial Sequence
  Description of Artificial Sequence: Synthetic oligonucleotide
uggucccaccagucccaaa

SEQ ID NO: 2213018 - RNA, 19 nt, Artificial Sequence
  Description of Artificial Sequence: Synthetic oligonucleotide
gcgaacaucauuagcccau

SEQ ID NO: 2213019 - RNA, 19 nt, Artificial Sequence
  Description of Artificial Sequence: Synthetic oligonucleotide
cugugcucccaaacaugcu

SEQ ID NO: 2213020 - RNA, 19 nt, Artificial Sequence
  Description of Artificial Sequence: Synthetic oligonucleotide
cacagccauuggguauaug

SEQ ID NO: 2213021 - RNA, 19 nt, Artificial Sequence
  Description of Artificial Sequence: Synthetic oligonucleotide
augaugcugugaagacuuu

SEQ ID NO: 2213022 - RNA, 19 nt, Artificial Sequence
  Description of Artificial Sequence: Synthetic oligonucleotide
ggcuuuuggaauggucugu

SEQ ID NO: 2213023 - RNA, 19 nt, Artificial Sequence
  Description of Artificial Sequence: Synthetic oligonucleotide
gcugaaguguuggugccgu

SEQ ID NO: 2213024 - RNA, 19 nt, Artificial Sequence
  Description of Artificial Sequence: Synthetic oligonucleotide
gcccaugauccugcaauga

SEQ ID NO: 2213025 - RNA, 19 nt, Artificial Sequence
  Description of Artificial Sequence: Synthetic oligonucleotide
cgaacaucauuagcccaug

SEQ ID NO: 2213026 - RNA, 19 nt, Artificial Sequence
  Description of Artificial Sequence: Synthetic oligonucleotide
gcgaugggcugaucuaacu

SEQ ID NO: 2213027 - RNA, 19 nt, Artificial Sequence
  Description of Artificial Sequence: Synthetic oligonucleotide
cguucacugcauagauguc

SEQ ID NO: 2213028 - RNA, 19 nt, Artificial Sequence
  Description of Artificial Sequence: Synthetic oligonucleotide
gccggauuuggaggguuga

SEQ ID NO: 2213029 - RNA, 19 nt, Artificial Sequence
  Description of Artificial Sequence: Synthetic oligonucleotide
cgcaggaaaauguaauuuu

SEQ ID NO: 2213030 - RNA, 19 nt, Artificial Sequence
  Description of Artificial Sequence: Synthetic oligonucleotide
cagucguagcuagaagcau

SEQ ID NO: 2213031 - RNA, 19 nt, Artificial Sequence
  Description of Artificial Sequence: Synthetic oligonucleotide
cgcucaggugaauggccug

SEQ ID NO: 2213032 - RNA, 19 nt, Artificial Sequence
  Description of Artificial Sequence: Synthetic oligonucleotide
cggcuuuagcucuucagcu

SEQ ID NO: 2213033 - RNA, 19 nt, Artificial Sequence
  Description of Artificial Sequence: Synthetic oligonucleotide
cucaggugaauggccuggu

SEQ ID NO: 2213034 - RNA, 19 nt, Artificial Sequence
  Description of Artificial Sequence: Synthetic oligonucleotide
auccugcaaugaggaaauu

SEQ ID NO: 2213035 - RNA, 19 nt, Artificial Sequence
  Description of Artificial Sequence: Synthetic oligonucleotide
ccaccacagccauugggua

SEQ ID NO: 2213036 - RNA, 19 nt, Artificial Sequence
  Description of Artificial Sequence: Synthetic oligonucleotide
ccacgguagcaagggugcc

SEQ ID NO: 2213037 - RNA, 19 nt, Artificial Sequence
  Description of Artificial Sequence: Synthetic oligonucleotide
gcaaaaccaguuggcuugu

SEQ ID NO: 2213038 - RNA, 19 nt, Artificial Sequence
  Description of Artificial Sequence: Synthetic oligonucleotide
gguugcuguucagguccca

SEQ ID NO: 2213039 - RNA, 19 nt, Artificial Sequence
  Description of Artificial Sequence: Synthetic oligonucleotide
  modified_base (13)..(13): a, c, u, g, unknown or other
ccacaucuuggcnguuuua

SEQ ID NO: 2213040 - RNA, 19 nt, Artificial Sequence
  Description of Artificial Sequence: Synthetic oligonucleotide
gguagacaaucaggccucu

SEQ ID NO: 2213041 - RNA, 19 nt, Artificial Sequence
  Description of Artificial Sequence: Synthetic oligonucleotide
aggcugcgaugggcugauc

SEQ ID NO: 2213042 - RNA, 19 nt, Artificial Sequence
  Description of Artificial Sequence: Synthetic oligonucleotide
cacaucgaugcugguguuu

SEQ ID NO: 2213043 - RNA, 19 nt, Artificial Sequence
  Description of Artificial Sequence: Synthetic oligonucleotide
guguuucaguggagacucu

SEQ ID NO: 2213044 - RNA, 19 nt, Artificial Sequence
  Description of Artificial Sequence: Synthetic oligonucleotide
gcgcucaggugaauggccu

SEQ ID NO: 2213045 - RNA, 19 nt, Artificial Sequence
  Description of Artificial Sequence: Synthetic oligonucleotide
gccguuggaucgauggcau

SEQ ID NO: 2213046 - RNA, 19 nt, Artificial Sequence
  Description of Artificial Sequence: Synthetic oligonucleotide
gcaauuccguucacugcau

SEQ ID NO: 2213047 - RNA, 19 nt, Artificial Sequence
  Description of Artificial Sequence: Synthetic oligonucleotide
cugaaguguuggugccguu

SEQ ID NO: 2213048 - RNA, 19 nt, Artificial Sequence
  Description of Artificial Sequence: Synthetic oligonucleotide
cguuggaucgauggcauuu

SEQ ID NO: 2213049 - RNA, 19 nt, Artificial Sequence
  Description of Artificial Sequence: Synthetic oligonucleotide
cgauguccuucauuggguu

SEQ ID NO: 2213050 - RNA, 19 nt, Artificial Sequence
  Description of Artificial Sequence: Synthetic oligonucleotide
gccacacaucgaugcuggu

SEQ ID NO: 2213051 - RNA, 19 nt, Artificial Sequence
  Description of Artificial Sequence: Synthetic oligonucleotide
ccgaggucuuuaguuuugu

SEQ ID NO: 2213052 - RNA, 19 nt, Artificial Sequence
  Description of Artificial Sequence: Synthetic oligonucleotide
  modified_base (16)..(16): a, c, u, g, unknown or other
gucccacaucuuggcnguu

SEQ ID NO: 2213053 - RNA, 19 nt, Artificial Sequence
  Description of Artificial Sequence: Synthetic oligonucleotide
ccggauuuggaggguugau

SEQ ID NO: 2213054 - RNA, 19 nt, Artificial Sequence
  Description of Artificial Sequence: Synthetic oligonucleotide
ccguuggaucgauggcauu

SEQ ID NO: 2213055 - RNA, 19 nt, Artificial Sequence
  Description of Artificial Sequence: Synthetic oligonucleotide
aaauggauagcauacaguc

SEQ ID NO: 2213056 - RNA, 19 nt, Artificial Sequence
  Description of Artificial Sequence: Synthetic oligonucleotide
agugcuauuaccuaaaaug

SEQ ID NO: 2213057 - RNA, 19 nt, Artificial Sequence
  Description of Artificial Sequence: Synthetic oligonucleotide
uaugauagcacacugaaaa

SEQ ID NO: 2213058 - RNA, 19 nt, Artificial Sequence
  Description of Artificial Sequence: Synthetic oligonucleotide
uguugaguagagaugaugg

SEQ ID NO: 2213059 - RNA, 19 nt, Artificial Sequence
  Description of Artificial Sequence: Synthetic oligonucleotide
aagauuaucugacauacca

SEQ ID NO: 2213060 - RNA, 19 nt, Artificial Sequence
  Description of Artificial Sequence: Synthetic oligonucleotide
ugugauaaacacaagaaaa

SEQ ID NO: 2213061 - RNA, 19 nt, Artificial Sequence
  Description of Artificial Sequence: Synthetic oligonucleotide
aaaugugcuagauacagca

SEQ ID NO: 2213062 - RNA, 19 nt, Artificial Sequence
  Description of Artificial Sequence: Synthetic oligonucleotide
auauuuaggagucauaccu

SEQ ID NO: 2213063 - RNA, 19 nt, Artificial Sequence
  Description of Artificial Sequence: Synthetic oligonucleotide
gauagagcagcauuuacag

SEQ ID NO: 2213064 - RNA, 19 nt, Artificial Sequence
  Description of Artificial Sequence: Synthetic oligonucleotide
uuaauagaggaccauuugc

SEQ ID NO: 2213065 - RNA, 19 nt, Artificial Sequence
  Description of Artificial Sequence: Synthetic oligonucleotide
uuuacagauuuauauagca

SEQ ID NO: 2213066 - RNA, 19 nt, Artificial Sequence
  Description of Artificial Sequence: Synthetic oligonucleotide
ucagacaguaaucagaguc

SEQ ID NO: 2213067 - RNA, 19 nt, Artificial Sequence
  Description of Artificial Sequence: Synthetic oligonucleotide
uguaaacagauauuuagga

SEQ ID NO: 2213068 - RNA, 19 nt, Artificial Sequence
  Description of Artificial Sequence: Synthetic oligonucleotide
uuauauagcacauacucuc

SEQ ID NO: 2213069 - RNA, 19 nt, Artificial Sequence
  Description of Artificial Sequence: Synthetic oligonucleotide
agauauuuaggagucauac

SEQ ID NO: 2213070 - RNA, 19 nt, Artificial Sequence
  Description of Artificial Sequence: Synthetic oligonucleotide
aaucacaucacuuuuccau

SEQ ID NO: 2213071 - RNA, 19 nt, Artificial Sequence
  Description of Artificial Sequence: Synthetic oligonucleotide
agaacaauuggucauuaag

SEQ ID NO: 2213072 - RNA, 19 nt, Artificial Sequence
  Description of Artificial Sequence: Synthetic oligonucleotide
uuaagauuaucugacauac

SEQ ID NO: 2213073 - RNA, 19 nt, Artificial Sequence
  Description of Artificial Sequence: Synthetic oligonucleotide
aagaaaacuaugauagcac

SEQ ID NO: 2213074 - RNA, 19 nt, Artificial Sequence
  Description of Artificial Sequence: Synthetic oligonucleotide
uuuccauguaaacagauau

SEQ ID NO: 2213075 - RNA, 19 nt, Artificial Sequence
  Description of Artificial Sequence: Synthetic oligonucleotide
acaguaaucagagucuacc

SEQ ID NO: 2213076 - RNA, 19 nt, Artificial Sequence
  Description of Artificial Sequence: Synthetic oligonucleotide
gagucuaccacauuauuug

SEQ ID NO: 2213077 - RNA, 19 nt, Artificial Sequence
  Description of Artificial Sequence: Synthetic oligonucleotide
aacaauuggucauuaagau

SEQ ID NO: 2213078 - RNA, 19 nt, Artificial Sequence
  Description of Artificial Sequence: Synthetic oligonucleotide
uuuauauagcacauacucu

SEQ ID NO: 2213079 - RNA, 19 nt, Artificial Sequence
  Description of Artificial Sequence: Synthetic oligonucleotide
uuuacuuaauagaggacca

SEQ ID NO: 2213080 - RNA, 19 nt, Artificial Sequence
  Description of Artificial Sequence: Synthetic oligonucleotide
agcauuuacagauuuauau

SEQ ID NO: 2213081 - RNA, 19 nt, Artificial Sequence
  Description of Artificial Sequence: Synthetic oligonucleotide
aguaaucagagucuaccac

SEQ ID NO: 2213082 - RNA, 19 nt, Artificial Sequence
  Description of Artificial Sequence: Synthetic oligonucleotide
auuaccuaaaaugugcuag

SEQ ID NO: 2213083 - RNA, 19 nt, Artificial Sequence
  Description of Artificial Sequence: Synthetic oligonucleotide
uaauagaggaccauuugcu

SEQ ID NO: 2213084 - RNA, 19 nt, Artificial Sequence
  Description of Artificial Sequence: Synthetic oligonucleotide
ugaaacucgaaccugccac

SEQ ID NO: 2213085 - RNA, 19 nt, Artificial Sequence
  Description of Artificial Sequence: Synthetic oligonucleotide
cauuauuuggucaucuuug

SEQ ID NO: 2213086 - RNA, 19 nt, Artificial Sequence
  Description of Artificial Sequence: Synthetic oligonucleotide
aaaacuaugauagcacacu

SEQ ID NO: 2213087 - RNA, 19 nt, Artificial Sequence
  Description of Artificial Sequence: Synthetic oligonucleotide
ucugacauaccacugcccc

SEQ ID NO: 2213088 - RNA, 19 nt, Artificial Sequence
  Description of Artificial Sequence: Synthetic oligonucleotide
caaguuaagugcuauuacc

SEQ ID NO: 2213089 - RNA, 19 nt, Artificial Sequence
  Description of Artificial Sequence: Synthetic oligonucleotide
cuuggauagccacaggucg

SEQ ID NO: 2213090 - RNA, 19 nt, Artificial Sequence
  Description of Artificial Sequence: Synthetic oligonucleotide
ugaguagagaugaugggca

SEQ ID NO: 2213091 - RNA, 19 nt, Artificial Sequence
  Description of Artificial Sequence: Synthetic oligonucleotide
gacggguucaaguucaugc

SEQ ID NO: 2213092 - RNA, 19 nt, Artificial Sequence
  Description of Artificial Sequence: Synthetic oligonucleotide
uagagcagcauuuacagau

SEQ ID NO: 2213093 - RNA, 19 nt, Artificial Sequence
  Description of Artificial Sequence: Synthetic oligonucleotide
aaacuaugauagcacacug

SEQ ID NO: 2213094 - RNA, 19 nt, Artificial Sequence
  Description of Artificial Sequence: Synthetic oligonucleotide
uuaucugacauaccacugc

SEQ ID NO: 2213095 - RNA, 19 nt, Artificial Sequence
  Description of Artificial Sequence: Synthetic oligonucleotide
uauuuggucaucuuugguc

SEQ ID NO: 2213096 - RNA, 19 nt, Artificial Sequence
  Description of Artificial Sequence: Synthetic oligonucleotide
acaagaaaacuaugauagc

SEQ ID NO: 2213097 - RNA, 19 nt, Artificial Sequence
  Description of Artificial Sequence: Synthetic oligonucleotide
ugcuagauacagcaaagug

SEQ ID NO: 2213098 - RNA, 19 nt, Artificial Sequence
  Description of Artificial Sequence: Synthetic oligonucleotide
ugugcuagauacagcaaag

SEQ ID NO: 2213099 - RNA, 19 nt, Artificial Sequence
  Description of Artificial Sequence: Synthetic oligonucleotide
gauauuuaggagucauacc

SEQ ID NO: 2213100 - RNA, 19 nt, Artificial Sequence
  Description of Artificial Sequence: Synthetic oligonucleotide
cuagauacagcaaagugga

SEQ ID NO: 2213101 - RNA, 19 nt, Artificial Sequence
  Description of Artificial Sequence: Synthetic oligonucleotide
auuuaggagucauaccuag

SEQ ID NO: 2213102 - RNA, 19 nt, Artificial Sequence
  Description of Artificial Sequence: Synthetic oligonucleotide
ugauaaacacaagaaaacu

SEQ ID NO: 2213103 - RNA, 19 nt, Artificial Sequence
  Description of Artificial Sequence: Synthetic oligonucleotide
uggucauuaagauuaucug

SEQ ID NO: 2213104 - RNA, 19 nt, Artificial Sequence
  Description of Artificial Sequence: Synthetic oligonucleotide
auuuggucaucuuuggucu

SEQ ID NO: 2213105 - RNA, 19 nt, Artificial Sequence
  Description of Artificial Sequence: Synthetic oligonucleotide
auaccuaguggucacguag

SEQ ID NO: 2213106 - RNA, 19 nt, Artificial Sequence
  Description of Artificial Sequence: Synthetic oligonucleotide
ucaaguuaagugcuauuac

SEQ ID NO: 2213107 - RNA, 19 nt, Artificial Sequence
  Description of Artificial Sequence: Synthetic oligonucleotide
ugcuauuaccuaaaaugug

SEQ ID NO: 2213108 - RNA, 19 nt, Artificial Sequence
  Description of Artificial Sequence: Synthetic oligonucleotide
acuaugauagcacacugaa

SEQ ID NO: 2213109 - RNA, 19 nt, Artificial Sequence
  Description of Artificial Sequence: Synthetic oligonucleotide
uaucugacauaccacugcc

SEQ ID NO: 2213110 - RNA, 19 nt, Artificial Sequence
  Description of Artificial Sequence: Synthetic oligonucleotide
agaaaacuaugauagcaca

SEQ ID NO: 2213111 - RNA, 19 nt, Artificial Sequence
  Description of Artificial Sequence: Synthetic oligonucleotide
aaguuaagugcuauuaccu

SEQ ID NO: 2213112 - RNA, 19 nt, Artificial Sequence
  Description of Artificial Sequence: Synthetic oligonucleotide
uugaguagagaugaugggc

SEQ ID NO: 2213113 - RNA, 19 nt, Artificial Sequence
  Description of Artificial Sequence: Synthetic oligonucleotide
augacugaaacucgaaccu

SEQ ID NO: 2213114 - RNA, 19 nt, Artificial Sequence
  Description of Artificial Sequence: Synthetic oligonucleotide
acucgaaccugccaccgcc

SEQ ID NO: 2213115 - RNA, 19 nt, Artificial Sequence
  Description of Artificial Sequence: Synthetic oligonucleotide
gaacaauuggucauuaaga

SEQ ID NO: 2213116 - RNA, 19 nt, Artificial Sequence
  Description of Artificial Sequence: Synthetic oligonucleotide
gcuagauacagcaaagugg

SEQ ID NO: 2213117 - RNA, 19 nt, Artificial Sequence
  Description of Artificial Sequence: Synthetic oligonucleotide
aguggaauugauaugaaaa

SEQ ID NO: 2213118 - RNA, 19 nt, Artificial Sequence
  Description of Artificial Sequence: Synthetic oligonucleotide
ucuaccacauuauuugguc

SEQ ID NO: 2213119 - RNA, 19 nt, Artificial Sequence
  Description of Artificial Sequence: Synthetic oligonucleotide
ugcucuguugaguagagau

SEQ ID NO: 2213120 - RNA, 19 nt, Artificial Sequence
  Description of Artificial Sequence: Synthetic oligonucleotide
guugaguagagaugauggg

SEQ ID NO: 2213121 - RNA, 19 nt, Artificial Sequence
  Description of Artificial Sequence: Synthetic oligonucleotide
cuuaauagaggaccauuug

SEQ ID NO: 2213122 - RNA, 19 nt, Artificial Sequence
  Description of Artificial Sequence: Synthetic oligonucleotide
uuaagugcuauuaccuaaa

SEQ ID NO: 2213123 - RNA, 19 nt, Artificial Sequence
  Description of Artificial Sequence: Synthetic oligonucleotide
gucuuuccaggucagacag

SEQ ID NO: 2213124 - RNA, 19 nt, Artificial Sequence
  Description of Artificial Sequence: Synthetic oligonucleotide
uaccuaguggucacguagg

SEQ ID NO: 2213125 - RNA, 19 nt, Artificial Sequence
  Description of Artificial Sequence: Synthetic oligonucleotide
aaaauggauagcauacagu

SEQ ID NO: 2213126 - RNA, 19 nt, Artificial Sequence
  Description of Artificial Sequence: Synthetic oligonucleotide
ugagugaacagcuuuccau

SEQ ID NO: 2213127 - RNA, 19 nt, Artificial Sequence
  Description of Artificial Sequence: Synthetic oligonucleotide
auuaagauuaucugacaua

SEQ ID NO: 2213128 - RNA, 19 nt, Artificial Sequence
  Description of Artificial Sequence: Synthetic oligonucleotide
guaaucagagucuaccaca

SEQ ID NO: 2213129 - RNA, 19 nt, Artificial Sequence
  Description of Artificial Sequence: Synthetic oligonucleotide
gccccagugauuuaaaggg

SEQ ID NO: 2213130 - RNA, 19 nt, Artificial Sequence
  Description of Artificial Sequence: Synthetic oligonucleotide
agucuaccacauuauuugg

SEQ ID NO: 2213131 - RNA, 19 nt, Artificial Sequence
  Description of Artificial Sequence: Synthetic oligonucleotide
agucauaccuaguggucac

SEQ ID NO: 2213132 - RNA, 19 nt, Artificial Sequence
  Description of Artificial Sequence: Synthetic oligonucleotide
auagcauacagucuucuuu

SEQ ID NO: 2213133 - RNA, 19 nt, Artificial Sequence
  Description of Artificial Sequence: Synthetic oligonucleotide
auagcacauacucucuuug

SEQ ID NO: 2213134 - RNA, 19 nt, Artificial Sequence
  Description of Artificial Sequence: Synthetic oligonucleotide
caaaguggaauugauauga

SEQ ID NO: 2213135 - RNA, 19 nt, Artificial Sequence
  Description of Artificial Sequence: Synthetic oligonucleotide
uccauguaaacagauauuu

SEQ ID NO: 2213136 - RNA, 19 nt, Artificial Sequence
  Description of Artificial Sequence: Synthetic oligonucleotide
uuaccuaaaaugugcuaga

SEQ ID NO: 2213137 - RNA, 19 nt, Artificial Sequence
  Description of Artificial Sequence: Synthetic oligonucleotide
uagcacauacucucuuugg

SEQ ID NO: 2213138 - RNA, 19 nt, Artificial Sequence
  Description of Artificial Sequence: Synthetic oligonucleotide
uucaucaggggucgcacgc

SEQ ID NO: 2213139 - RNA, 19 nt, Artificial Sequence
  Description of Artificial Sequence: Synthetic oligonucleotide
ucacguagggcaauaggcu

SEQ ID NO: 2213140 - RNA, 19 nt, Artificial Sequence
  Description of Artificial Sequence: Synthetic oligonucleotide
ugauuuaaaggguuucuuu

SEQ ID NO: 2213141 - RNA, 19 nt, Artificial Sequence
  Description of Artificial Sequence: Synthetic oligonucleotide
uucaaguucaugcggucgu

SEQ ID NO: 2213142 - RNA, 19 nt, Artificial Sequence
  Description of Artificial Sequence: Synthetic oligonucleotide
uucaaguuaagugcuauua

SEQ ID NO: 2213143 - RNA, 19 nt, Artificial Sequence
  Description of Artificial Sequence: Synthetic oligonucleotide
aacucgaaccugccaccgc

SEQ ID NO: 2213144 - RNA, 19 nt, Artificial Sequence
  Description of Artificial Sequence: Synthetic oligonucleotide
gaaaacuaugauagcacac

SEQ ID NO: 2213145 - RNA, 19 nt, Artificial Sequence
  Description of Artificial Sequence: Synthetic oligonucleotide
uaagauuaucugacauacc

SEQ ID NO: 2213146 - RNA, 19 nt, Artificial Sequence
  Description of Artificial Sequence: Synthetic oligonucleotide
aaaucacaucacuuuucca

SEQ ID NO: 2213147 - RNA, 19 nt, Artificial Sequence
  Description of Artificial Sequence: Synthetic oligonucleotide
agauuaucugacauaccac

SEQ ID NO: 2213148 - RNA, 19 nt, Artificial Sequence
  Description of Artificial Sequence: Synthetic oligonucleotide
aggagucauaccuaguggu

SEQ ID NO: 2213149 - RNA, 19 nt, Artificial Sequence
  Description of Artificial Sequence: Synthetic oligonucleotide
agcaacuucaucagggguc

SEQ ID NO: 2213150 - RNA, 19 nt, Artificial Sequence
  Description of Artificial Sequence: Synthetic oligonucleotide
uccgagagaggcuucccgg

SEQ ID NO: 2213151 - RNA, 19 nt, Artificial Sequence
  Description of Artificial Sequence: Synthetic oligonucleotide
gaaacucgaaccugccacc

SEQ ID NO: 2213152 - RNA, 19 nt, Artificial Sequence
  Description of Artificial Sequence: Synthetic oligonucleotide
uuauuuggucaucuuuggu

SEQ ID NO: 2213153 - RNA, 19 nt, Artificial Sequence
  Description of Artificial Sequence: Synthetic oligonucleotide
aaguggaauugauaugaaa

SEQ ID NO: 2213154 - RNA, 19 nt, Artificial Sequence
  Description of Artificial Sequence: Synthetic oligonucleotide
uaaucagagucuaccacau

SEQ ID NO: 2213155 - RNA, 19 nt, Artificial Sequence
  Description of Artificial Sequence: Synthetic oligonucleotide
acagcuuuccauguaaaca

SEQ ID NO: 2213156 - RNA, 19 nt, Artificial Sequence
  Description of Artificial Sequence: Synthetic oligonucleotide
ugacauaccacugccccag

SEQ ID NO: 2213157 - RNA, 19 nt, Artificial Sequence
  Description of Artificial Sequence: Synthetic oligonucleotide
aagugcuauuaccuaaaau

SEQ ID NO: 2213158 - RNA, 19 nt, Artificial Sequence
  Description of Artificial Sequence: Synthetic oligonucleotide
gaaggagccgcaccggugc

SEQ ID NO: 2213159 - RNA, 19 nt, Artificial Sequence
  Description of Artificial Sequence: Synthetic oligonucleotide
gucacguagggcaauaggc

SEQ ID NO: 2213160 - RNA, 19 nt, Artificial Sequence
  Description of Artificial Sequence: Synthetic oligonucleotide
aaacucgaaccugccaccg

SEQ ID NO: 2213161 - RNA, 19 nt, Artificial Sequence
  Description of Artificial Sequence: Synthetic oligonucleotide
uauuuaggagucauaccua

SEQ ID NO: 2213162 - RNA, 19 nt, Artificial Sequence
  Description of Artificial Sequence: Synthetic oligonucleotide
uccagauagagcagcauuu

SEQ ID NO: 2213163 - RNA, 19 nt, Artificial Sequence
  Description of Artificial Sequence: Synthetic oligonucleotide
uuccgagagaggcuucccg

SEQ ID NO: 2213164 - RNA, 19 nt, Artificial Sequence
  Description of Artificial Sequence: Synthetic oligonucleotide
aggcgugugagugaacagc

SEQ ID NO: 2213165 - RNA, 19 nt, Artificial Sequence
  Description of Artificial Sequence: Synthetic oligonucleotide
aauggauagcauacagucu

SEQ ID NO: 2213166 - RNA, 19 nt, Artificial Sequence
  Description of Artificial Sequence: Synthetic oligonucleotide
guuaagugcuauuaccuaa

SEQ ID NO: 2213167 - RNA, 19 nt, Artificial Sequence
  Description of Artificial Sequence: Synthetic oligonucleotide
augugcuagauacagcaaa

SEQ ID NO: 2213168 - RNA, 19 nt, Artificial Sequence
  Description of Artificial Sequence: Synthetic oligonucleotide
agcacauacucucuuuggu

SEQ ID NO: 2213169 - RNA, 19 nt, Artificial Sequence
  Description of Artificial Sequence: Synthetic oligonucleotide
ggucauuaagauuaucuga

SEQ ID NO: 2213170 - RNA, 19 nt, Artificial Sequence
  Description of Artificial Sequence: Synthetic oligonucleotide
ucagagucuaccacauuau

SEQ ID NO: 2213171 - RNA, 19 nt, Artificial Sequence
  Description of Artificial Sequence: Synthetic oligonucleotide
aaguucaugcggucguccu

SEQ ID NO: 2213172 - RNA, 19 nt, Artificial Sequence
  Description of Artificial Sequence: Synthetic oligonucleotide
ugugagugaacagcuuucc

SEQ ID NO: 2213173 - RNA, 19 nt, Artificial Sequence
  Description of Artificial Sequence: Synthetic oligonucleotide
gacugaaacucgaaccugc

SEQ ID NO: 2213174 - RNA, 19 nt, Artificial Sequence
  Description of Artificial Sequence: Synthetic oligonucleotide
uuggauagccacaggucga

SEQ ID NO: 2213175 - RNA, 19 nt, Artificial Sequence
  Description of Artificial Sequence: Synthetic oligonucleotide
caugcggucguccucgggc

SEQ ID NO: 2213176 - RNA, 19 nt, Artificial Sequence
  Description of Artificial Sequence: Synthetic oligonucleotide
uuccagauagagcagcauu

SEQ ID NO: 2213177 - RNA, 19 nt, Artificial Sequence
  Description of Artificial Sequence: Synthetic oligonucleotide
agugaacagcuuuccaugu

SEQ ID NO: 2213178 - RNA, 19 nt, Artificial Sequence
  Description of Artificial Sequence: Synthetic oligonucleotide
acaauuggucauuaagauu

SEQ ID NO: 2213179 - RNA, 19 nt, Artificial Sequence
  Description of Artificial Sequence: Synthetic oligonucleotide
gaguagagaugaugggcag

SEQ ID NO: 2213180 - RNA, 19 nt, Artificial Sequence
  Description of Artificial Sequence: Synthetic oligonucleotide
uuuaggagucauaccuagu

SEQ ID NO: 2213181 - RNA, 19 nt, Artificial Sequence
  Description of Artificial Sequence: Synthetic oligonucleotide
aacuaugauagcacacuga

SEQ ID NO: 2213182 - RNA, 19 nt, Artificial Sequence
  Description of Artificial Sequence: Synthetic oligonucleotide
agauagagcagcauuuaca

SEQ ID NO: 2213183 - RNA, 19 nt, Artificial Sequence
  Description of Artificial Sequence: Synthetic oligonucleotide
agugauuuaaaggguuucu

SEQ ID NO: 2213184 - RNA, 19 nt, Artificial Sequence
  Description of Artificial Sequence: Synthetic oligonucleotide
aguuaagugcuauuaccua

SEQ ID NO: 2213185 - RNA, 19 nt, Artificial Sequence
  Description of Artificial Sequence: Synthetic oligonucleotide
aguuccgagagaggcuucc

SEQ ID NO: 2213186 - RNA, 19 nt, Artificial Sequence
  Description of Artificial Sequence: Synthetic oligonucleotide
uauagcacauacucucuuu

SEQ ID NO: 2213187 - RNA, 19 nt, Artificial Sequence
  Description of Artificial Sequence: Synthetic oligonucleotide
auuaucugacauaccacug

SEQ ID NO: 2213188 - RNA, 19 nt, Artificial Sequence
  Description of Artificial Sequence: Synthetic oligonucleotide
uauuaccuaaaaugugcua

SEQ ID NO: 2213189 - RNA, 19 nt, Artificial Sequence
  Description of Artificial Sequence: Synthetic oligonucleotide
agcgggaaggagccgcacc

SEQ ID NO: 2213190 - RNA, 19 nt, Artificial Sequence
  Description of Artificial Sequence: Synthetic oligonucleotide
cagcaaugacugaaacucg

SEQ ID NO: 2213191 - RNA, 19 nt, Artificial Sequence
  Description of Artificial Sequence: Synthetic oligonucleotide
acuucaucaggggucgcac

SEQ ID NO: 2213192 - RNA, 19 nt, Artificial Sequence
  Description of Artificial Sequence: Synthetic oligonucleotide
aaggacggguucaaguuca

SEQ ID NO: 2213193 - RNA, 19 nt, Artificial Sequence
  Description of Artificial Sequence: Synthetic oligonucleotide
cucuguugaguagagauga

SEQ ID NO: 2213194 - RNA, 19 nt, Artificial Sequence
  Description of Artificial Sequence: Synthetic oligonucleotide
cuuuggucuuaugacuggg

SEQ ID NO: 2213195 - RNA, 19 nt, Artificial Sequence
  Description of Artificial Sequence: Synthetic oligonucleotide
cuuuccccggcgcacaccc

SEQ ID NO: 2213196 - RNA, 19 nt, Artificial Sequence
  Description of Artificial Sequence: Synthetic oligonucleotide
gaaggacggguucaaguuc

SEQ ID NO: 2213197 - RNA, 19 nt, Artificial Sequence
  Description of Artificial Sequence: Synthetic oligonucleotide
accuaguggucacguaggg

SEQ ID NO: 2213198 - RNA, 19 nt, Artificial Sequence
  Description of Artificial Sequence: Synthetic oligonucleotide
uuccauguaaacagauauu

SEQ ID NO: 2213199 - RNA, 19 nt, Artificial Sequence
  Description of Artificial Sequence: Synthetic oligonucleotide
auagcagccaggggaugcc

SEQ ID NO: 2213200 - RNA, 19 nt, Artificial Sequence
  Description of Artificial Sequence: Synthetic oligonucleotide
aucacaucacuuuuccauu

SEQ ID NO: 2213201 - RNA, 19 nt, Artificial Sequence
  Description of Artificial Sequence: Synthetic oligonucleotide
auuucaaguuaagugcuau

SEQ ID NO: 2213202 - RNA, 19 nt, Artificial Sequence
  Description of Artificial Sequence: Synthetic oligonucleotide
agggcgaugcccaggaagg

SEQ ID NO: 2213203 - RNA, 19 nt, Artificial Sequence
  Description of Artificial Sequence: Synthetic oligonucleotide
cagauagagcagcauuuac

SEQ ID NO: 2213204 - RNA, 19 nt, Artificial Sequence
  Description of Artificial Sequence: Synthetic oligonucleotide
uacuuaauagaggaccauu

SEQ ID NO: 2213205 - RNA, 19 nt, Artificial Sequence
  Description of Artificial Sequence: Synthetic oligonucleotide
caauaggcucuccugaaga

SEQ ID NO: 2213206 - RNA, 19 nt, Artificial Sequence
  Description of Artificial Sequence: Synthetic oligonucleotide
gagucauaccuagugguca

SEQ ID NO: 2213207 - RNA, 19 nt, Artificial Sequence
  Description of Artificial Sequence: Synthetic oligonucleotide
aucugacauaccacugccc

SEQ ID NO: 2213208 - RNA, 19 nt, Artificial Sequence
  Description of Artificial Sequence: Synthetic oligonucleotide
acuuaauagaggaccauuu

SEQ ID NO: 2213209 - RNA, 19 nt, Artificial Sequence
  Description of Artificial Sequence: Synthetic oligonucleotide
aacagauauuuaggaguca

SEQ ID NO: 2213210 - RNA, 19 nt, Artificial Sequence
  Description of Artificial Sequence: Synthetic oligonucleotide
cauuugcucuguugaguag

SEQ ID NO: 2213211 - RNA, 19 nt, Artificial Sequence
  Description of Artificial Sequence: Synthetic oligonucleotide
cacguagggcaauaggcuc

SEQ ID NO: 2213212 - RNA, 19 nt, Artificial Sequence
  Description of Artificial Sequence: Synthetic oligonucleotide
cauagcagccaggggaugc

SEQ ID NO: 2213213 - RNA, 19 nt, Artificial Sequence
  Description of Artificial Sequence: Synthetic oligonucleotide
caggucagacaguaaucag

SEQ ID NO: 2213214 - RNA, 19 nt, Artificial Sequence
  Description of Artificial Sequence: Synthetic oligonucleotide
uuucaaguuaagugcuauu

SEQ ID NO: 2213215 - RNA, 19 nt, Artificial Sequence
  Description of Artificial Sequence: Synthetic oligonucleotide
aggucagacaguaaucaga

SEQ ID NO: 2213216 - RNA, 19 nt, Artificial Sequence
  Description of Artificial Sequence: Synthetic oligonucleotide
agcgaccgucccucgaugg

SEQ ID NO: 2213217 - RNA, 19 nt, Artificial Sequence
  Description of Artificial Sequence: Synthetic oligonucleotide
ggucacguagggcaauagg

SEQ ID NO: 2213218 - RNA, 19 nt, Artificial Sequence
  Description of Artificial Sequence: Synthetic oligonucleotide
ucauaccuaguggucacgu

SEQ ID NO: 2213219 - RNA, 19 nt, Artificial Sequence
  Description of Artificial Sequence: Synthetic oligonucleotide
cagggcgaugcccaggaag

SEQ ID NO: 2213220 - RNA, 19 nt, Artificial Sequence
  Description of Artificial Sequence: Synthetic oligonucleotide
augcggucguccucgggcg

SEQ ID NO: 2213221 - RNA, 19 nt, Artificial Sequence
  Description of Artificial Sequence: Synthetic oligonucleotide
caguaaucagagucuacca

SEQ ID NO: 2213222 - RNA, 19 nt, Artificial Sequence
  Description of Artificial Sequence: Synthetic oligonucleotide
auaccacugccccagugau

SEQ ID NO: 2213223 - RNA, 19 nt, Artificial Sequence
  Description of Artificial Sequence: Synthetic oligonucleotide
accuaaaaugugcuagaua

SEQ ID NO: 2213224 - RNA, 19 nt, Artificial Sequence
  Description of Artificial Sequence: Synthetic oligonucleotide
agagucuaccacauuauuu

SEQ ID NO: 2213225 - RNA, 19 nt, Artificial Sequence
  Description of Artificial Sequence: Synthetic oligonucleotide
uggauagcauacagucuuc

SEQ ID NO: 2213226 - RNA, 19 nt, Artificial Sequence
  Description of Artificial Sequence: Synthetic oligonucleotide
aauuucaaguuaagugcua

SEQ ID NO: 2213227 - RNA, 19 nt, Artificial Sequence
  Description of Artificial Sequence: Synthetic oligonucleotide
agcaaugacugaaacucga

SEQ ID NO: 2213228 - RNA, 19 nt, Artificial Sequence
  Description of Artificial Sequence: Synthetic oligonucleotide
gaggcgugugagugaacag

SEQ ID NO: 2213229 - RNA, 19 nt, Artificial Sequence
  Description of Artificial Sequence: Synthetic oligonucleotide
cuaccacauuauuugguca

SEQ ID NO: 2213230 - RNA, 19 nt, Artificial Sequence
  Description of Artificial Sequence: Synthetic oligonucleotide
cagcuucuuggauagccac

SEQ ID NO: 2213231 - RNA, 19 nt, Artificial Sequence
  Description of Artificial Sequence: Synthetic oligonucleotide
cauaccacugccccaguga

SEQ ID NO: 2213232 - RNA, 19 nt, Artificial Sequence
  Description of Artificial Sequence: Synthetic oligonucleotide
gcaacuucaucaggggucg

SEQ ID NO: 2213233 - RNA, 19 nt, Artificial Sequence
  Description of Artificial Sequence: Synthetic oligonucleotide
accauuugcucuguugagu

SEQ ID NO: 2213234 - RNA, 19 nt, Artificial Sequence
  Description of Artificial Sequence: Synthetic oligonucleotide
aggccagcgggaaggagcc

SEQ ID NO: 2213235 - RNA, 19 nt, Artificial Sequence
  Description of Artificial Sequence: Synthetic oligonucleotide
acgggagcucagcaaugac

SEQ ID NO: 2213236 - RNA, 19 nt, Artificial Sequence
  Description of Artificial Sequence: Synthetic oligonucleotide
uuacuuaauagaggaccau

SEQ ID NO: 2213237 - RNA, 19 nt, Artificial Sequence
  Description of Artificial Sequence: Synthetic oligonucleotide
aaugugcuagauacagcaa

SEQ ID NO: 2213238 - RNA, 19 nt, Artificial Sequence
  Description of Artificial Sequence: Synthetic oligonucleotide
cuauuaccuaaaaugugcu

SEQ ID NO: 2213239 - RNA, 19 nt, Artificial Sequence
  Description of Artificial Sequence: Synthetic oligonucleotide
agcauacagucuucuuugu

SEQ ID NO: 2213240 - RNA, 19 nt, Artificial Sequence
  Description of Artificial Sequence: Synthetic oligonucleotide
gugcuauuaccuaaaaugu

SEQ ID NO: 2213241 - RNA, 19 nt, Artificial Sequence
  Description of Artificial Sequence: Synthetic oligonucleotide
cacauacucucuuuggucu

SEQ ID NO: 2213242 - RNA, 19 nt, Artificial Sequence
  Description of Artificial Sequence: Synthetic oligonucleotide
augccccgagaucuccagc

SEQ ID NO: 2213243 - RNA, 19 nt, Artificial Sequence
  Description of Artificial Sequence: Synthetic oligonucleotide
acauaccacugccccagug

SEQ ID NO: 2213244 - RNA, 19 nt, Artificial Sequence
  Description of Artificial Sequence: Synthetic oligonucleotide
uugagcggggcccgcggag

SEQ ID NO: 2213245 - RNA, 19 nt, Artificial Sequence
  Description of Artificial Sequence: Synthetic oligonucleotide
caaguucaugcggucgucc

SEQ ID NO: 2213246 - RNA, 19 nt, Artificial Sequence
  Description of Artificial Sequence: Synthetic oligonucleotide
uaccuaaaaugugcuagau

SEQ ID NO: 2213247 - RNA, 19 nt, Artificial Sequence
  Description of Artificial Sequence: Synthetic oligonucleotide
ucaugcggucguccucggg

SEQ ID NO: 2213248 - RNA, 19 nt, Artificial Sequence
  Description of Artificial Sequence: Synthetic oligonucleotide
agggagcgcagggcgaugc

SEQ ID NO: 2213249 - RNA, 19 nt, Artificial Sequence
  Description of Artificial Sequence: Synthetic oligonucleotide
cucgaaccugccaccgccg

SEQ ID NO: 2213250 - RNA, 19 nt, Artificial Sequence
  Description of Artificial Sequence: Synthetic oligonucleotide
caggggaugccaugccccg

SEQ ID NO: 2213251 - RNA, 19 nt, Artificial Sequence
  Description of Artificial Sequence: Synthetic oligonucleotide
ucgaaccugccaccgccgc

SEQ ID NO: 2213252 - RNA, 19 nt, Artificial Sequence
  Description of Artificial Sequence: Synthetic oligonucleotide
cuuuccauguaaacagaua

SEQ ID NO: 2213253 - RNA, 19 nt, Artificial Sequence
  Description of Artificial Sequence: Synthetic oligonucleotide
cuucuuggauagccacagg

SEQ ID NO: 2213254 - RNA, 19 nt, Artificial Sequence
  Description of Artificial Sequence: Synthetic oligonucleotide
aggccgagcuuuccccggc

SEQ ID NO: 2213255 - RNA, 19 nt, Artificial Sequence
  Description of Artificial Sequence: Synthetic oligonucleotide
cagugauuuaaaggguuuc

SEQ ID NO: 2213256 - RNA, 19 nt, Artificial Sequence
  Description of Artificial Sequence: Synthetic oligonucleotide
caugccccgagaucuccag

SEQ ID NO: 2213257 - RNA, 19 nt, Artificial Sequence
  Description of Artificial Sequence: Synthetic oligonucleotide
cucggcaucgcggcgggcg

SEQ ID NO: 2213258 - RNA, 19 nt, Artificial Sequence
  Description of Artificial Sequence: Synthetic oligonucleotide
cugccccagugauuuaaag

SEQ ID NO: 2213259 - RNA, 19 nt, Artificial Sequence
  Description of Artificial Sequence: Synthetic oligonucleotide
gcaauaggcucuccugaag

SEQ ID NO: 2213260 - RNA, 19 nt, Artificial Sequence
  Description of Artificial Sequence: Synthetic oligonucleotide
gcgggaaggagccgcaccg

SEQ ID NO: 2213261 - RNA, 19 nt, Artificial Sequence
  Description of Artificial Sequence: Synthetic oligonucleotide
cuaugauagcacacugaaa

SEQ ID NO: 2213262 - RNA, 19 nt, Artificial Sequence
  Description of Artificial Sequence: Synthetic oligonucleotide
gcacauacucucuuugguc

SEQ ID NO: 2213263 - RNA, 19 nt, Artificial Sequence
  Description of Artificial Sequence: Synthetic oligonucleotide
gucggacgcgcgcagccgg

SEQ ID NO: 2213264 - RNA, 19 nt, Artificial Sequence
  Description of Artificial Sequence: Synthetic oligonucleotide
gcauacagucuucuuugug

SEQ ID NO: 2213265 - RNA, 19 nt, Artificial Sequence
  Description of Artificial Sequence: Synthetic oligonucleotide
uucaugcggucguccucgg

SEQ ID NO: 2213266 - RNA, 19 nt, Artificial Sequence
  Description of Artificial Sequence: Synthetic oligonucleotide
gucauaccuaguggucacg

SEQ ID NO: 2213267 - RNA, 19 nt, Artificial Sequence
  Description of Artificial Sequence: Synthetic oligonucleotide
agaggcuucccggcuccgc

SEQ ID NO: 2213268 - RNA, 19 nt, Artificial Sequence
  Description of Artificial Sequence: Synthetic oligonucleotide
acauacucucuuuggucuu

SEQ ID NO: 2213269 - RNA, 19 nt, Artificial Sequence
  Description of Artificial Sequence: Synthetic oligonucleotide
agcuuuccccggcgcacac

SEQ ID NO: 2213270 - RNA, 19 nt, Artificial Sequence
  Description of Artificial Sequence: Synthetic oligonucleotide
cugucggacgcgcgcagcc

SEQ ID NO: 2213271 - RNA, 19 nt, Artificial Sequence
  Description of Artificial Sequence: Synthetic oligonucleotide
ggccggggcugcuugagcg

SEQ ID NO: 2213272 - RNA, 19 nt, Artificial Sequence
  Description of Artificial Sequence: Synthetic oligonucleotide
auaggcucuccugaagaau

SEQ ID NO: 2213273 - RNA, 19 nt, Artificial Sequence
  Description of Artificial Sequence: Synthetic oligonucleotide
agacaguaaucagagucua

SEQ ID NO: 2213274 - RNA, 19 nt, Artificial Sequence
  Description of Artificial Sequence: Synthetic oligonucleotide
gcuucauagcagccagggg

SEQ ID NO: 2213275 - RNA, 19 nt, Artificial Sequence
  Description of Artificial Sequence: Synthetic oligonucleotide
ugcggucguccucgggcgg

SEQ ID NO: 2213276 - RNA, 19 nt, Artificial Sequence
  Description of Artificial Sequence: Synthetic oligonucleotide
ugucggacgcgcgcagccg

SEQ ID NO: 2213277 - RNA, 19 nt, Artificial Sequence
  Description of Artificial Sequence: Synthetic oligonucleotide
uggucacguagggcaauag

SEQ ID NO: 2213278 - RNA, 19 nt, Artificial Sequence
  Description of Artificial Sequence: Synthetic oligonucleotide
gugugagugaacagcuuuc

SEQ ID NO: 2213279 - RNA, 19 nt, Artificial Sequence
  Description of Artificial Sequence: Synthetic oligonucleotide
cugaaacucgaaccugcca

SEQ ID NO: 2213280 - RNA, 19 nt, Artificial Sequence
  Description of Artificial Sequence: Synthetic oligonucleotide
uggauagccacaggucgau

SEQ ID NO: 2213281 - RNA, 19 nt, Artificial Sequence
  Description of Artificial Sequence: Synthetic oligonucleotide
aaggagccgcaccggugca

SEQ ID NO: 2213282 - RNA, 19 nt, Artificial Sequence
  Description of Artificial Sequence: Synthetic oligonucleotide
cccucgaugguccuccggg

SEQ ID NO: 2213283 - RNA, 19 nt, Artificial Sequence
  Description of Artificial Sequence: Synthetic oligonucleotide
gacccggccaguuccgaga

SEQ ID NO: 2213284 - RNA, 19 nt, Artificial Sequence
  Description of Artificial Sequence: Synthetic oligonucleotide
caucaggggucgcacgcug

SEQ ID NO: 2213285 - RNA, 19 nt, Artificial Sequence
  Description of Artificial Sequence: Synthetic oligonucleotide
gauagcauacagucuucuu

SEQ ID NO: 2213286 - RNA, 19 nt, Artificial Sequence
  Description of Artificial Sequence: Synthetic oligonucleotide
gaggcuucccggcuccgca

SEQ ID NO: 2213287 - RNA, 19 nt, Artificial Sequence
  Description of Artificial Sequence: Synthetic oligonucleotide
cugacauaccacugcccca

SEQ ID NO: 2213288 - RNA, 19 nt, Artificial Sequence
  Description of Artificial Sequence: Synthetic oligonucleotide
acguagggcaauaggcucu

SEQ ID NO: 2213289 - RNA, 19 nt, Artificial Sequence
  Description of Artificial Sequence: Synthetic oligonucleotide
acgcuguucccgcccgagg

SEQ ID NO: 2213290 - RNA, 19 nt, Artificial Sequence
  Description of Artificial Sequence: Synthetic oligonucleotide
caggccgagcuuuccccgg

SEQ ID NO: 2213291 - RNA, 19 nt, Artificial Sequence
  Description of Artificial Sequence: Synthetic oligonucleotide
ccaggggaugccaugcccc

SEQ ID NO: 2213292 - RNA, 19 nt, Artificial Sequence
  Description of Artificial Sequence: Synthetic oligonucleotide
gacgcuguucccgcccgag

SEQ ID NO: 2213293 - RNA, 19 nt, Artificial Sequence
  Description of Artificial Sequence: Synthetic oligonucleotide
gggcaauaggcucuccuga

SEQ ID NO: 2213294 - RNA, 19 nt, Artificial Sequence
  Description of Artificial Sequence: Synthetic oligonucleotide
cagauauuuaggagucaua

SEQ ID NO: 2213295 - RNA, 19 nt, Artificial Sequence
  Description of Artificial Sequence: Synthetic oligonucleotide
gcuguucccgcccgaggcg

SEQ ID NO: 2213296 - RNA, 19 nt, Artificial Sequence
  Description of Artificial Sequence: Synthetic oligonucleotide
uccgcgcccgcacgggagc

SEQ ID NO: 2213297 - RNA, 19 nt, Artificial Sequence
  Description of Artificial Sequence: Synthetic oligonucleotide
ggaggcgugugagugaaca

SEQ ID NO: 2213298 - RNA, 19 nt, Artificial Sequence
  Description of Artificial Sequence: Synthetic oligonucleotide
aggcuucccggcuccgcag

SEQ ID NO: 2213299 - RNA, 19 nt, Artificial Sequence
  Description of Artificial Sequence: Synthetic oligonucleotide
gacgcgcgcagccgggcgc

SEQ ID NO: 2213300 - RNA, 19 nt, Artificial Sequence
  Description of Artificial Sequence: Synthetic oligonucleotide
gugaacagcuuuccaugua

SEQ ID NO: 2213301 - RNA, 19 nt, Artificial Sequence
  Description of Artificial Sequence: Synthetic oligonucleotide
gcggaggccagcgggaagg

SEQ ID NO: 2213302 - RNA, 19 nt, Artificial Sequence
  Description of Artificial Sequence: Synthetic oligonucleotide
uuuccccggcgcacacccc

SEQ ID NO: 2213303 - RNA, 19 nt, Artificial Sequence
  Description of Artificial Sequence: Synthetic oligonucleotide
ggcaauaggcucuccugaa

SEQ ID NO: 2213304 - RNA, 19 nt, Artificial Sequence
  Description of Artificial Sequence: Synthetic oligonucleotide
caggcaggauccgcgcccg

SEQ ID NO: 2213305 - RNA, 19 nt, Artificial Sequence
  Description of Artificial Sequence: Synthetic oligonucleotide
gucgcacgcugccccaggc

SEQ ID NO: 2213306 - RNA, 19 nt, Artificial Sequence
  Description of Artificial Sequence: Synthetic oligonucleotide
guuccgagagaggcuuccc

SEQ ID NO: 2213307 - RNA, 19 nt, Artificial Sequence
  Description of Artificial Sequence: Synthetic oligonucleotide
cagauuuauauagcacaua

SEQ ID NO: 2213308 - RNA, 19 nt, Artificial Sequence
  Description of Artificial Sequence: Synthetic oligonucleotide
ggaaggacggguucaaguu

SEQ ID NO: 2213309 - RNA, 19 nt, Artificial Sequence
  Description of Artificial Sequence: Synthetic oligonucleotide
gagcgcagggcgaugccca

SEQ ID NO: 2213310 - RNA, 19 nt, Artificial Sequence
  Description of Artificial Sequence: Synthetic oligonucleotide
ccaggucagacaguaauca

SEQ ID NO: 2213311 - RNA, 19 nt, Artificial Sequence
  Description of Artificial Sequence: Synthetic oligonucleotide
ccggccaguuccgagagag

SEQ ID NO: 2213312 - RNA, 19 nt, Artificial Sequence
  Description of Artificial Sequence: Synthetic oligonucleotide
ccgagagaggcuucccggc

SEQ ID NO: 2213313 - RNA, 19 nt, Artificial Sequence
  Description of Artificial Sequence: Synthetic oligonucleotide
ccucgaugguccuccgggg

SEQ ID NO: 2213314 - RNA, 19 nt, Artificial Sequence
  Description of Artificial Sequence: Synthetic oligonucleotide
ccgggcgcaggcaggaucc

SEQ ID NO: 2213315 - RNA, 19 nt, Artificial Sequence
  Description of Artificial Sequence: Synthetic oligonucleotide
cauaccuaguggucacgua

SEQ ID NO: 2213316 - RNA, 19 nt, Artificial Sequence
  Description of Artificial Sequence: Synthetic oligonucleotide
gagaggcuucccggcuccg

SEQ ID NO: 2213317 - RNA, 19 nt, Artificial Sequence
  Description of Artificial Sequence: Synthetic oligonucleotide
gaggcgcccagcgaccguc

SEQ ID NO: 2213318 - RNA, 19 nt, Artificial Sequence
  Description of Artificial Sequence: Synthetic oligonucleotide
gauccgcgcccgcacggga

SEQ ID NO: 2213319 - RNA, 19 nt, Artificial Sequence
  Description of Artificial Sequence: Synthetic oligonucleotide
agaggaccauuugcucugu

SEQ ID NO: 2213320 - RNA, 19 nt, Artificial Sequence
  Description of Artificial Sequence: Synthetic oligonucleotide
gugcuagauacagcaaagu

SEQ ID NO: 2213321 - RNA, 19 nt, Artificial Sequence
  Description of Artificial Sequence: Synthetic oligonucleotide
gucccucgaugguccuccg

SEQ ID NO: 2213322 - RNA, 19 nt, Artificial Sequence
  Description of Artificial Sequence: Synthetic oligonucleotide
ggucgcacgcugccccagg

SEQ ID NO: 2213323 - RNA, 19 nt, Artificial Sequence
  Description of Artificial Sequence: Synthetic oligonucleotide
ggagcgcagggcgaugccc

SEQ ID NO: 2213324 - RNA, 19 nt, Artificial Sequence
  Description of Artificial Sequence: Synthetic oligonucleotide
cagcgaccgucccucgaug

SEQ ID NO: 2213325 - RNA, 19 nt, Artificial Sequence
  Description of Artificial Sequence: Synthetic oligonucleotide
ggacccggccaguuccgag

SEQ ID NO: 2213326 - RNA, 19 nt, Artificial Sequence
  Description of Artificial Sequence: Synthetic oligonucleotide
caguuccgagagaggcuuc

SEQ ID NO: 2213327 - RNA, 19 nt, Artificial Sequence
  Description of Artificial Sequence: Synthetic oligonucleotide
gccagcgggaaggagccgc

SEQ ID NO: 2213328 - RNA, 19 nt, Artificial Sequence
  Description of Artificial Sequence: Synthetic oligonucleotide
ugccccaggccgagcuuuc

SEQ ID NO: 2213329 - RNA, 19 nt, Artificial Sequence
  Description of Artificial Sequence: Synthetic oligonucleotide
agggccggggcugcuugag

SEQ ID NO: 2213330 - RNA, 19 nt, Artificial Sequence
  Description of Artificial Sequence: Synthetic oligonucleotide
cacauuauuuggucaucuu

SEQ ID NO: 2213331 - RNA, 19 nt, Artificial Sequence
  Description of Artificial Sequence: Synthetic oligonucleotide
gccgcaccggugcaccggg

SEQ ID NO: 2213332 - RNA, 19 nt, Artificial Sequence
  Description of Artificial Sequence: Synthetic oligonucleotide
ccagcuucuuggauagcca

SEQ ID NO: 2213333 - RNA, 19 nt, Artificial Sequence
  Description of Artificial Sequence: Synthetic oligonucleotide
ggagcucagcaaugacuga

SEQ ID NO: 2213334 - RNA, 19 nt, Artificial Sequence
  Description of Artificial Sequence: Synthetic oligonucleotide
ggacgcgcgcagccgggcg

SEQ ID NO: 2213335 - RNA, 19 nt, Artificial Sequence
  Description of Artificial Sequence: Synthetic oligonucleotide
gcaccgggcugucggacgc

SEQ ID NO: 2213336 - RNA, 19 nt, Artificial Sequence
  Description of Artificial Sequence: Synthetic oligonucleotide
gcaaugacugaaacucgaa

SEQ ID NO: 2213337 - RNA, 19 nt, Artificial Sequence
  Description of Artificial Sequence: Synthetic oligonucleotide
acugccccagugauuuaaa

SEQ ID NO: 2213338 - RNA, 19 nt, Artificial Sequence
  Description of Artificial Sequence: Synthetic oligonucleotide
cuugagcggggcccgcgga

SEQ ID NO: 2213339 - RNA, 19 nt, Artificial Sequence
  Description of Artificial Sequence: Synthetic oligonucleotide
ggccgagcuuuccccggcg

SEQ ID NO: 2213340 - RNA, 19 nt, Artificial Sequence
  Description of Artificial Sequence: Synthetic oligonucleotide
gcccgaggcgcccagcgac

SEQ ID NO: 2213341 - RNA, 19 nt, Artificial Sequence
  Description of Artificial Sequence: Synthetic oligonucleotide
caggggucgcacgcugccc

SEQ ID NO: 2213342 - RNA, 19 nt, Artificial Sequence
  Description of Artificial Sequence: Synthetic oligonucleotide
auccgcgcccgcacgggag

SEQ ID NO: 2213343 - RNA, 19 nt, Artificial Sequence
  Description of Artificial Sequence: Synthetic oligonucleotide
gggcucggcaucgcggcgg

SEQ ID NO: 2213344 - RNA, 19 nt, Artificial Sequence
  Description of Artificial Sequence: Synthetic oligonucleotide
caacuucaucaggggucgc

SEQ ID NO: 2213345 - RNA, 19 nt, Artificial Sequence
  Description of Artificial Sequence: Synthetic oligonucleotide
aggcgcccagcgaccgucc

SEQ ID NO: 2213346 - RNA, 19 nt, Artificial Sequence
  Description of Artificial Sequence: Synthetic oligonucleotide
cacgcugccccaggccgag

SEQ ID NO: 2213347 - RNA, 19 nt, Artificial Sequence
  Description of Artificial Sequence: Synthetic oligonucleotide
cgagaucuccagcaacuuc

SEQ ID NO: 2213348 - RNA, 19 nt, Artificial Sequence
  Description of Artificial Sequence: Synthetic oligonucleotide
ggcgugugagugaacagcu

SEQ ID NO: 2213349 - RNA, 19 nt, Artificial Sequence
  Description of Artificial Sequence: Synthetic oligonucleotide
ggauccgcgcccgcacggg

SEQ ID NO: 2213350 - RNA, 19 nt, Artificial Sequence
  Description of Artificial Sequence: Synthetic oligonucleotide
cggugcaccgggcugucgg

SEQ ID NO: 2213351 - RNA, 19 nt, Artificial Sequence
  Description of Artificial Sequence: Synthetic oligonucleotide
ggauagcauacagucuucu

SEQ ID NO: 2213352 - RNA, 19 nt, Artificial Sequence
  Description of Artificial Sequence: Synthetic oligonucleotide
gcaccggugcaccgggcug

SEQ ID NO: 2213353 - RNA, 19 nt, Artificial Sequence
  Description of Artificial Sequence: Synthetic oligonucleotide
cagagucuaccacauuauu

SEQ ID NO: 2213354 - RNA, 19 nt, Artificial Sequence
  Description of Artificial Sequence: Synthetic oligonucleotide
ggacggguucaaguucaug

SEQ ID NO: 2213355 - RNA, 19 nt, Artificial Sequence
  Description of Artificial Sequence: Synthetic oligonucleotide
accggugcaccgggcuguc

SEQ ID NO: 2213356 - RNA, 19 nt, Artificial Sequence
  Description of Artificial Sequence: Synthetic oligonucleotide
ccccgagaucuccagcaac

SEQ ID NO: 2213357 - RNA, 19 nt, Artificial Sequence
  Description of Artificial Sequence: Synthetic oligonucleotide
gcagggccggggcugcuug

SEQ ID NO: 2213358 - RNA, 19 nt, Artificial Sequence
  Description of Artificial Sequence: Synthetic oligonucleotide
ggauagccacaggucgaug

SEQ ID NO: 2213359 - RNA, 19 nt, Artificial Sequence
  Description of Artificial Sequence: Synthetic oligonucleotide
cggggacccggccaguucc

SEQ ID NO: 2213360 - RNA, 19 nt, Artificial Sequence
  Description of Artificial Sequence: Synthetic oligonucleotide
ggcaucgcggcgggcggcg

SEQ ID NO: 2213361 - RNA, 19 nt, Artificial Sequence
  Description of Artificial Sequence: Synthetic oligonucleotide
gacauaccacugccccagu

SEQ ID NO: 2213362 - RNA, 19 nt, Artificial Sequence
  Description of Artificial Sequence: Synthetic oligonucleotide
ggugcaccgggcugucgga

SEQ ID NO: 2213363 - RNA, 19 nt, Artificial Sequence
  Description of Artificial Sequence: Synthetic oligonucleotide
gcuuuccauguaaacagau

SEQ ID NO: 2213364 - RNA, 19 nt, Artificial Sequence
  Description of Artificial Sequence: Synthetic oligonucleotide
guucccgcccgaggcgccc

SEQ ID NO: 2213365 - RNA, 19 nt, Artificial Sequence
  Description of Artificial Sequence: Synthetic oligonucleotide
gugcaccgggcugucggac

SEQ ID NO: 2213366 - RNA, 19 nt, Artificial Sequence
  Description of Artificial Sequence: Synthetic oligonucleotide
cccgagaucuccagcaacu

SEQ ID NO: 2213367 - RNA, 19 nt, Artificial Sequence
  Description of Artificial Sequence: Synthetic oligonucleotide
caccgggcugucggacgcg

SEQ ID NO: 2213368 - RNA, 19 nt, Artificial Sequence
  Description of Artificial Sequence: Synthetic oligonucleotide
gcacgggagcucagcaaug

SEQ ID NO: 2213369 - RNA, 19 nt, Artificial Sequence
  Description of Artificial Sequence: Synthetic oligonucleotide
ggcggucccggggacccgg

SEQ ID NO: 2213370 - RNA, 19 nt, Artificial Sequence
  Description of Artificial Sequence: Synthetic oligonucleotide
ggggacccggccaguuccg

SEQ ID NO: 2213371 - RNA, 19 nt, Artificial Sequence
  Description of Artificial Sequence: Synthetic oligonucleotide
ggggaggcgugugagugaa

SEQ ID NO: 2213372 - RNA, 19 nt, Artificial Sequence
  Description of Artificial Sequence: Synthetic oligonucleotide
ccagauagagcagcauuua

SEQ ID NO: 2213373 - RNA, 19 nt, Artificial Sequence
  Description of Artificial Sequence: Synthetic oligonucleotide
gccgggcgcaggcaggauc

SEQ ID NO: 2213374 - RNA, 19 nt, Artificial Sequence
  Description of Artificial Sequence: Synthetic oligonucleotide
cagcgggaaggagccgcac

SEQ ID NO: 2213375 - RNA, 19 nt, Artificial Sequence
  Description of Artificial Sequence: Synthetic oligonucleotide
ccacauuauuuggucaucu

SEQ ID NO: 2213376 - RNA, 19 nt, Artificial Sequence
  Description of Artificial Sequence: Synthetic oligonucleotide
cugcuugagcggggcccgc

SEQ ID NO: 2213377 - RNA, 19 nt, Artificial Sequence
  Description of Artificial Sequence: Synthetic oligonucleotide
cauacucucuuuggucuuu

SEQ ID NO: 2213378 - RNA, 19 nt, Artificial Sequence
  Description of Artificial Sequence: Synthetic oligonucleotide
ccagugauuuaaaggguuu

SEQ ID NO: 2213379 - RNA, 19 nt, Artificial Sequence
  Description of Artificial Sequence: Synthetic oligonucleotide
aggacggguucaaguucau

SEQ ID NO: 2213380 - RNA, 19 nt, Artificial Sequence
  Description of Artificial Sequence: Synthetic oligonucleotide
cgggcugucggacgcgcgc

SEQ ID NO: 2213381 - RNA, 19 nt, Artificial Sequence
  Description of Artificial Sequence: Synthetic oligonucleotide
cgagcuuuccccggcgcac

SEQ ID NO: 2213382 - RNA, 19 nt, Artificial Sequence
  Description of Artificial Sequence: Synthetic oligonucleotide
ggguuucuuuccagauaga

SEQ ID NO: 2213383 - RNA, 19 nt, Artificial Sequence
  Description of Artificial Sequence: Synthetic oligonucleotide
cagggagcgcagggcgaug

SEQ ID NO: 2213384 - RNA, 19 nt, Artificial Sequence
  Description of Artificial Sequence: Synthetic oligonucleotide
ucgcggcgggcggcggucc

SEQ ID NO: 2213385 - RNA, 19 nt, Artificial Sequence
  Description of Artificial Sequence: Synthetic oligonucleotide
ggcgcccagcgaccguccc

SEQ ID NO: 2213386 - RNA, 19 nt, Artificial Sequence
  Description of Artificial Sequence: Synthetic oligonucleotide
gcggcggucccggggaccc

SEQ ID NO: 2213387 - RNA, 19 nt, Artificial Sequence
  Description of Artificial Sequence: Synthetic oligonucleotide
gcuuuccccggcgcacacc

SEQ ID NO: 2213388 - RNA, 19 nt, Artificial Sequence
  Description of Artificial Sequence: Synthetic oligonucleotide
gaggaccauuugcucuguu

SEQ ID NO: 2213389 - RNA, 19 nt, Artificial Sequence
  Description of Artificial Sequence: Synthetic oligonucleotide
ccgaggcgcccagcgaccg

SEQ ID NO: 2213390 - RNA, 19 nt, Artificial Sequence
  Description of Artificial Sequence: Synthetic oligonucleotide
gcggucguccucgggcggc

SEQ ID NO: 2213391 - RNA, 19 nt, Artificial Sequence
  Description of Artificial Sequence: Synthetic oligonucleotide
cgugugagugaacagcuuu

SEQ ID NO: 2213392 - RNA, 19 nt, Artificial Sequence
  Description of Artificial Sequence: Synthetic oligonucleotide
cagggccggggcugcuuga

SEQ ID NO: 2213393 - RNA, 19 nt, Artificial Sequence
  Description of Artificial Sequence: Synthetic oligonucleotide
gcccagcgaccgucccucg

SEQ ID NO: 2213394 - RNA, 19 nt, Artificial Sequence
  Description of Artificial Sequence: Synthetic oligonucleotide
cgcgcagccgggcgcaggc

SEQ ID NO: 2213395 - RNA, 19 nt, Artificial Sequence
  Description of Artificial Sequence: Synthetic oligonucleotide
gccagaacaauuggucauu

SEQ ID NO: 2213396 - RNA, 19 nt, Artificial Sequence
  Description of Artificial Sequence: Synthetic oligonucleotide
cggccaguuccgagagagg

SEQ ID NO: 2213397 - RNA, 19 nt, Artificial Sequence
  Description of Artificial Sequence: Synthetic oligonucleotide
gggucgcacgcugccccag

SEQ ID NO: 2213398 - RNA, 19 nt, Artificial Sequence
  Description of Artificial Sequence: Synthetic oligonucleotide
ccgagcuuuccccggcgca

SEQ ID NO: 2213399 - RNA, 19 nt, Artificial Sequence
  Description of Artificial Sequence: Synthetic oligonucleotide
ggggucgcacgcugcccca

SEQ ID NO: 2213400 - RNA, 19 nt, Artificial Sequence
  Description of Artificial Sequence: Synthetic oligonucleotide
cccgcacgggagcucagca

SEQ ID NO: 2213401 - RNA, 19 nt, Artificial Sequence
  Description of Artificial Sequence: Synthetic oligonucleotide
gccccgagaucuccagcaa

SEQ ID NO: 2213402 - RNA, 19 nt, Artificial Sequence
  Description of Artificial Sequence: Synthetic oligonucleotide
ccgggacgcuguucccgcc

SEQ ID NO: 2213403 - RNA, 19 nt, Artificial Sequence
  Description of Artificial Sequence: Synthetic oligonucleotide
cgggaaggagccgcaccgg

SEQ ID NO: 2213404 - RNA, 19 nt, Artificial Sequence
  Description of Artificial Sequence: Synthetic oligonucleotide
ggccagcgggaaggagccg

SEQ ID NO: 2213405 - RNA, 19 nt, Artificial Sequence
  Description of Artificial Sequence: Synthetic oligonucleotide
ggacgcuguucccgcccga

SEQ ID NO: 2213406 - RNA, 19 nt, Artificial Sequence
  Description of Artificial Sequence: Synthetic oligonucleotide
caccggugcaccgggcugu

SEQ ID NO: 2213407 - RNA, 19 nt, Artificial Sequence
  Description of Artificial Sequence: Synthetic oligonucleotide
gcgaccgucccucgauggu

SEQ ID NO: 2213408 - RNA, 19 nt, Artificial Sequence
  Description of Artificial Sequence: Synthetic oligonucleotide
ccaguuccgagagaggcuu

SEQ ID NO: 2213409 - RNA, 19 nt, Artificial Sequence
  Description of Artificial Sequence: Synthetic oligonucleotide
gcccgcacgggagcucagc

SEQ ID NO: 2213410 - RNA, 19 nt, Artificial Sequence
  Description of Artificial Sequence: Synthetic oligonucleotide
ggcggcggucccggggacc

SEQ ID NO: 2213411 - RNA, 19 nt, Artificial Sequence
  Description of Artificial Sequence: Synthetic oligonucleotide
gcugcccgggacgcuguuc

SEQ ID NO: 2213412 - RNA, 19 nt, Artificial Sequence
  Description of Artificial Sequence: Synthetic oligonucleotide
cuucccggcuccgcagccu

SEQ ID NO: 2213413 - RNA, 19 nt, Artificial Sequence
  Description of Artificial Sequence: Synthetic oligonucleotide
cgcccagcgaccgucccuc

SEQ ID NO: 2213414 - RNA, 19 nt, Artificial Sequence
  Description of Artificial Sequence: Synthetic oligonucleotide
ccgcacgggagcucagcaa

SEQ ID NO: 2213415 - RNA, 19 nt, Artificial Sequence
  Description of Artificial Sequence: Synthetic oligonucleotide
cgcacgggagcucagcaau

SEQ ID NO: 2213416 - RNA, 19 nt, Artificial Sequence
  Description of Artificial Sequence: Synthetic oligonucleotide
gcacgcugccccaggccga

SEQ ID NO: 2213417 - RNA, 19 nt, Artificial Sequence
  Description of Artificial Sequence: Synthetic oligonucleotide
ccgccgugggccgggcugc

SEQ ID NO: 2213418 - RNA, 19 nt, Artificial Sequence
  Description of Artificial Sequence: Synthetic oligonucleotide
ccagcgaccgucccucgau

SEQ ID NO: 2213419 - RNA, 19 nt, Artificial Sequence
  Description of Artificial Sequence: Synthetic oligonucleotide
gggacccggccaguuccga

SEQ ID NO: 2213420 - RNA, 19 nt, Artificial Sequence
  Description of Artificial Sequence: Synthetic oligonucleotide
gcgcccgcacgggagcuca

SEQ ID NO: 2213421 - RNA, 19 nt, Artificial Sequence
  Description of Artificial Sequence: Synthetic oligonucleotide
caucgcggcgggcggcggu

SEQ ID NO: 2213422 - RNA, 19 nt, Artificial Sequence
  Description of Artificial Sequence: Synthetic oligonucleotide
cccagcgaccgucccucga

SEQ ID NO: 2213423 - RNA, 19 nt, Artificial Sequence
  Description of Artificial Sequence: Synthetic oligonucleotide
agccgggcgcaggcaggau

SEQ ID NO: 2213424 - RNA, 19 nt, Artificial Sequence
  Description of Artificial Sequence: Synthetic oligonucleotide
ccgcaccggugcaccgggc

SEQ ID NO: 2213425 - RNA, 19 nt, Artificial Sequence
  Description of Artificial Sequence: Synthetic oligonucleotide
gcagggagcgcagggcgau

SEQ ID NO: 2213426 - RNA, 19 nt, Artificial Sequence
  Description of Artificial Sequence: Synthetic oligonucleotide
ccggugcaccgggcugucg

SEQ ID NO: 2213427 - RNA, 19 nt, Artificial Sequence
  Description of Artificial Sequence: Synthetic oligonucleotide
gcgcccagcgaccgucccu

SEQ ID NO: 2213428 - RNA, 19 nt, Artificial Sequence
  Description of Artificial Sequence: Synthetic oligonucleotide
gcgugugagugaacagcuu

SEQ ID NO: 2213429 - RNA, 19 nt, Artificial Sequence
  Description of Artificial Sequence: Synthetic oligonucleotide
cccggccaguuccgagaga

SEQ ID NO: 2213430 - RNA, 19 nt, Artificial Sequence
  Description of Artificial Sequence: Synthetic oligonucleotide
gcgcagccgggcgcaggca

SEQ ID NO: 2213431 - RNA, 19 nt, Artificial Sequence
  Description of Artificial Sequence: Synthetic oligonucleotide
cgcccgcacgggagcucag

SEQ ID NO: 2213432 - RNA, 19 nt, Artificial Sequence
  Description of Artificial Sequence: Synthetic oligonucleotide
ccgcggaggccagcgggaa

SEQ ID NO: 2213433 - RNA, 19 nt, Artificial Sequence
  Description of Artificial Sequence: Synthetic oligonucleotide
cggucguccucgggcggca

SEQ ID NO: 2213434 - RNA, 19 nt, Artificial Sequence
  Description of Artificial Sequence: Synthetic oligonucleotide
cggcggucccggggacccg

SEQ ID NO: 2213435 - RNA, 19 nt, Artificial Sequence
  Description of Artificial Sequence: Synthetic oligonucleotide
cgcgcccgcacgggagcuc

SEQ ID NO: 2213436 - RNA, 19 nt, Artificial Sequence
  Description of Artificial Sequence: Synthetic oligonucleotide
cgaggcgcccagcgaccgu

SEQ ID NO: 2213437 - RNA, 19 nt, Artificial Sequence
  Description of Artificial Sequence: Synthetic oligonucleotide
cccggcuccgcagccucuu

SEQ ID NO: 2213438 - RNA, 19 nt, Artificial Sequence
  Description of Artificial Sequence: Synthetic oligonucleotide
ccgcgcccgcacgggagcu

SEQ ID NO: 2213439 - RNA, 19 nt, Artificial Sequence
  Description of Artificial Sequence: Synthetic oligonucleotide
aauaaagcagcuuaguuac

SEQ ID NO: 2213440 - RNA, 19 nt, Artificial Sequence
  Description of Artificial Sequence: Synthetic oligonucleotide
uaaacaacuaaccaguugc

SEQ ID NO: 2213441 - RNA, 19 nt, Artificial Sequence
  Description of Artificial Sequence: Synthetic oligonucleotide
auuguuuacacacucuugc

SEQ ID NO: 2213442 - RNA, 19 nt, Artificial Sequence
  Description of Artificial Sequence: Synthetic oligonucleotide
aauauguuuccuuaacuuc

SEQ ID NO: 2213443 - RNA, 19 nt, Artificial Sequence
  Description of Artificial Sequence: Synthetic oligonucleotide
uuaguuacaaaauuugaag

SEQ ID NO: 2213444 - RNA, 19 nt, Artificial Sequence
  Description of Artificial Sequence: Synthetic oligonucleotide
ucaauuuagauccagcuga

SEQ ID NO: 2213445 - RNA, 19 nt, Artificial Sequence
  Description of Artificial Sequence: Synthetic oligonucleotide
aauucgcacugcuugaugc

SEQ ID NO: 2213446 - RNA, 19 nt, Artificial Sequence
  Description of Artificial Sequence: Synthetic oligonucleotide
uaugacauuauucuaaagu

SEQ ID NO: 2213447 - RNA, 19 nt, Artificial Sequence
  Description of Artificial Sequence: Synthetic oligonucleotide
ugcauguucaaucauauga

SEQ ID NO: 2213448 - RNA, 19 nt, Artificial Sequence
  Description of Artificial Sequence: Synthetic oligonucleotide
aguccuuucaaucucauag

SEQ ID NO: 2213449 - RNA, 19 nt, Artificial Sequence
  Description of Artificial Sequence: Synthetic oligonucleotide
ucugcuacaaaauaugaca

SEQ ID NO: 2213450 - RNA, 19 nt, Artificial Sequence
  Description of Artificial Sequence: Synthetic oligonucleotide
aaucaagaacuucugcuac

SEQ ID NO: 2213451 - RNA, 19 nt, Artificial Sequence
  Description of Artificial Sequence: Synthetic oligonucleotide
auuuugcuaacacacacac

SEQ ID NO: 2213452 - RNA, 19 nt, Artificial Sequence
  Description of Artificial Sequence: Synthetic oligonucleotide
ucuaaagucauacucauuu

SEQ ID NO: 2213453 - RNA, 19 nt, Artificial Sequence
  Description of Artificial Sequence: Synthetic oligonucleotide
ugcugaguaauucaauugg

SEQ ID NO: 2213454 - RNA, 19 nt, Artificial Sequence
  Description of Artificial Sequence: Synthetic oligonucleotide
auuaugucaguuucaaagg

SEQ ID NO: 2213455 - RNA, 19 nt, Artificial Sequence
  Description of Artificial Sequence: Synthetic oligonucleotide
uuauucuaaagucauacuc

SEQ ID NO: 2213456 - RNA, 19 nt, Artificial Sequence
  Description of Artificial Sequence: Synthetic oligonucleotide
ucucuaaacaacuaaccag

SEQ ID NO: 2213457 - RNA, 19 nt, Artificial Sequence
  Description of Artificial Sequence: Synthetic oligonucleotide
uauaaagcaacacaacagu

SEQ ID NO: 2213458 - RNA, 19 nt, Artificial Sequence
  Description of Artificial Sequence: Synthetic oligonucleotide
uuuccuuaacuucugaagc

SEQ ID NO: 2213459 - RNA, 19 nt, Artificial Sequence
  Description of Artificial Sequence: Synthetic oligonucleotide
uucauuauauacuuuccag

SEQ ID NO: 2213460 - RNA, 19 nt, Artificial Sequence
  Description of Artificial Sequence: Synthetic oligonucleotide
auuuagauccagcugagag

SEQ ID NO: 2213461 - RNA, 19 nt, Artificial Sequence
  Description of Artificial Sequence: Synthetic oligonucleotide
aauuugaagccuucaauca

SEQ ID NO: 2213462 - RNA, 19 nt, Artificial Sequence
  Description of Artificial Sequence: Synthetic oligonucleotide
uguucaaucauaugaacga

SEQ ID NO: 2213463 - RNA, 19 nt, Artificial Sequence
  Description of Artificial Sequence: Synthetic oligonucleotide
aaucauaugaacgagguuu

SEQ ID NO: 2213464 - RNA, 19 nt, Artificial Sequence
  Description of Artificial Sequence: Synthetic oligonucleotide
cauggaauuguuuacacac

SEQ ID NO: 2213465 - RNA, 19 nt, Artificial Sequence
  Description of Artificial Sequence: Synthetic oligonucleotide
ugaguaauucaauugguug

SEQ ID NO: 2213466 - RNA, 19 nt, Artificial Sequence
  Description of Artificial Sequence: Synthetic oligonucleotide
uaguuacaaaauuugaagc

SEQ ID NO: 2213467 - RNA, 19 nt, Artificial Sequence
  Description of Artificial Sequence: Synthetic oligonucleotide
aauucaauugguugucgag

SEQ ID NO: 2213468 - RNA, 19 nt, Artificial Sequence
  Description of Artificial Sequence: Synthetic oligonucleotide
ugucagguagcucagguag

SEQ ID NO: 2213469 - RNA, 19 nt, Artificial Sequence
  Description of Artificial Sequence: Synthetic oligonucleotide
uuauuuugcuaacacacac

SEQ ID NO: 2213470 - RNA, 19 nt, Artificial Sequence
  Description of Artificial Sequence: Synthetic oligonucleotide
aaauccuuauuuugcuaac

SEQ ID NO: 2213471 - RNA, 19 nt, Artificial Sequence
  Description of Artificial Sequence: Synthetic oligonucleotide
gauuugacagaucucauuc

SEQ ID NO: 2213472 - RNA, 19 nt, Artificial Sequence
  Description of Artificial Sequence: Synthetic oligonucleotide
ucaaauucguuucucauua

SEQ ID NO: 2213473 - RNA, 19 nt, Artificial Sequence
  Description of Artificial Sequence: Synthetic oligonucleotide
uuucauuauauacuuucca

SEQ ID NO: 2213474 - RNA, 19 nt, Artificial Sequence
  Description of Artificial Sequence: Synthetic oligonucleotide
uuauauacuuuccaggcau

SEQ ID NO: 2213475 - RNA, 19 nt, Artificial Sequence
  Description of Artificial Sequence: Synthetic oligonucleotide
ugcuugauuugacagaucu

SEQ ID NO: 2213476 - RNA, 19 nt, Artificial Sequence
  Description of Artificial Sequence: Synthetic oligonucleotide
aauaugacauuauucuaaa

SEQ ID NO: 2213477 - RNA, 19 nt, Artificial Sequence
  Description of Artificial Sequence: Synthetic oligonucleotide
ugacauuauucuaaaguca

SEQ ID NO: 2213478 - RNA, 19 nt, Artificial Sequence
  Description of Artificial Sequence: Synthetic oligonucleotide
auuacacccaugcugugac

SEQ ID NO: 2213479 - RNA, 19 nt, Artificial Sequence
  Description of Artificial Sequence: Synthetic oligonucleotide
uugguugucgagcagcuag

SEQ ID NO: 2213480 - RNA, 19 nt, Artificial Sequence
  Description of Artificial Sequence: Synthetic oligonucleotide
auuggauuccauuucucuc

SEQ ID NO: 2213481 - RNA, 19 nt, Artificial Sequence
  Description of Artificial Sequence: Synthetic oligonucleotide
aaaggcagaauaauccggg

SEQ ID NO: 2213482 - RNA, 19 nt, Artificial Sequence
  Description of Artificial Sequence: Synthetic oligonucleotide
ugaauauguuuccuuaacu

SEQ ID NO: 2213483 - RNA, 19 nt, Artificial Sequence
  Description of Artificial Sequence: Synthetic oligonucleotide
guuuccuuaacuucugaag

SEQ ID NO: 2213484 - RNA, 19 nt, Artificial Sequence
  Description of Artificial Sequence: Synthetic oligonucleotide
auauaaagcaacacaacag

SEQ ID NO: 2213485 - RNA, 19 nt, Artificial Sequence
  Description of Artificial Sequence: Synthetic oligonucleotide
uccauuucucucaauuuag

SEQ ID NO: 2213486 - RNA, 19 nt, Artificial Sequence
  Description of Artificial Sequence: Synthetic oligonucleotide
caaaauaugacauuauucu

SEQ ID NO: 2213487 - RNA, 19 nt, Artificial Sequence
  Description of Artificial Sequence: Synthetic oligonucleotide
aaaguacggcaacgcaucc

SEQ ID NO: 2213488 - RNA, 19 nt, Artificial Sequence
  Description of Artificial Sequence: Synthetic oligonucleotide
uaaccaguugcucugagaa

SEQ ID NO: 2213489 - RNA, 19 nt, Artificial Sequence
  Description of Artificial Sequence: Synthetic oligonucleotide
aaagcaacacaacaguaua

SEQ ID NO: 2213490 - RNA, 19 nt, Artificial Sequence
  Description of Artificial Sequence: Synthetic oligonucleotide
aguacggcaacgcauccac

SEQ ID NO: 2213491 - RNA, 19 nt, Artificial Sequence
  Description of Artificial Sequence: Synthetic oligonucleotide
uucauaucgcuucaugcug

SEQ ID NO: 2213492 - RNA, 19 nt, Artificial Sequence
  Description of Artificial Sequence: Synthetic oligonucleotide
ucucaauuuagauccagcu

SEQ ID NO: 2213493 - RNA, 19 nt, Artificial Sequence
  Description of Artificial Sequence: Synthetic oligonucleotide
acaauaguccuuucaaucu

SEQ ID NO: 2213494 - RNA, 19 nt, Artificial Sequence
  Description of Artificial Sequence: Synthetic oligonucleotide
guaucugcgaguuuccucc

SEQ ID NO: 2213495 - RNA, 19 nt, Artificial Sequence
  Description of Artificial Sequence: Synthetic oligonucleotide
uucgcugccaguuuaaauc

SEQ ID NO: 2213496 - RNA, 19 nt, Artificial Sequence
  Description of Artificial Sequence: Synthetic oligonucleotide
uagccuuggucaaaguacg

SEQ ID NO: 2213497 - RNA, 19 nt, Artificial Sequence
  Description of Artificial Sequence: Synthetic oligonucleotide
uucguuucucauuauguca

SEQ ID NO: 2213498 - RNA, 19 nt, Artificial Sequence
  Description of Artificial Sequence: Synthetic oligonucleotide
guauacacaguccacaguc

SEQ ID NO: 2213499 - RNA, 19 nt, Artificial Sequence
  Description of Artificial Sequence: Synthetic oligonucleotide
uugaauauguuuccuuaac

SEQ ID NO: 2213500 - RNA, 19 nt, Artificial Sequence
  Description of Artificial Sequence: Synthetic oligonucleotide
uauuuugcuaacacacaca

SEQ ID NO: 2213501 - RNA, 19 nt, Artificial Sequence
  Description of Artificial Sequence: Synthetic oligonucleotide
auguucaaucauaugaacg

SEQ ID NO: 2213502 - RNA, 19 nt, Artificial Sequence
  Description of Artificial Sequence: Synthetic oligonucleotide
uuuagauccagcugagagu

SEQ ID NO: 2213503 - RNA, 19 nt, Artificial Sequence
  Description of Artificial Sequence: Synthetic oligonucleotide
uaucgcuucaugcugagua

SEQ ID NO: 2213504 - RNA, 19 nt, Artificial Sequence
  Description of Artificial Sequence: Synthetic oligonucleotide
aggcagaauaauccggggc

SEQ ID NO: 2213505 - RNA, 19 nt, Artificial Sequence
  Description of Artificial Sequence: Synthetic oligonucleotide
ucuaacugggccauggaau

SEQ ID NO: 2213506 - RNA, 19 nt, Artificial Sequence
  Description of Artificial Sequence: Synthetic oligonucleotide
ugcuaacacacacacauau

SEQ ID NO: 2213507 - RNA, 19 nt, Artificial Sequence
  Description of Artificial Sequence: Synthetic oligonucleotide
ugcacaauaguccuuucaa

SEQ ID NO: 2213508 - RNA, 19 nt, Artificial Sequence
  Description of Artificial Sequence: Synthetic oligonucleotide
caaaggcagaauaauccgg

SEQ ID NO: 2213509 - RNA, 19 nt, Artificial Sequence
  Description of Artificial Sequence: Synthetic oligonucleotide
uucaauugguugucgagca

SEQ ID NO: 2213510 - RNA, 19 nt, Artificial Sequence
  Description of Artificial Sequence: Synthetic oligonucleotide
uuugacagaucucauucuc

SEQ ID NO: 2213511 - RNA, 19 nt, Artificial Sequence
  Description of Artificial Sequence: Synthetic oligonucleotide
accagggauacccaauugg

SEQ ID NO: 2213512 - RNA, 19 nt, Artificial Sequence
  Description of Artificial Sequence: Synthetic oligonucleotide
aguaauucaauugguuguc

SEQ ID NO: 2213513 - RNA, 19 nt, Artificial Sequence
  Description of Artificial Sequence: Synthetic oligonucleotide
cacaacaguauacacaguc

SEQ ID NO: 2213514 - RNA, 19 nt, Artificial Sequence
  Description of Artificial Sequence: Synthetic oligonucleotide
ucaaaguacggcaacgcau

SEQ ID NO: 2213515 - RNA, 19 nt, Artificial Sequence
  Description of Artificial Sequence: Synthetic oligonucleotide
cacaauaguccuuucaauc

SEQ ID NO: 2213516 - RNA, 19 nt, Artificial Sequence
  Description of Artificial Sequence: Synthetic oligonucleotide
gguaguucuugguaggucg

SEQ ID NO: 2213517 - RNA, 19 nt, Artificial Sequence
  Description of Artificial Sequence: Synthetic oligonucleotide
aaguucauaucgcuucaug

SEQ ID NO: 2213518 - RNA, 19 nt, Artificial Sequence
  Description of Artificial Sequence: Synthetic oligonucleotide
aacaguauacacaguccac

SEQ ID NO: 2213519 - RNA, 19 nt, Artificial Sequence
  Description of Artificial Sequence: Synthetic oligonucleotide
cacauauaaagcaacacaa

SEQ ID NO: 2213520 - RNA, 19 nt, Artificial Sequence
  Description of Artificial Sequence: Synthetic oligonucleotide
ucagguaguucuugguagg

SEQ ID NO: 2213521 - RNA, 19 nt, Artificial Sequence
  Description of Artificial Sequence: Synthetic oligonucleotide
ugacaucaguuccagauuc

SEQ ID NO: 2213522 - RNA, 19 nt, Artificial Sequence
  Description of Artificial Sequence: Synthetic oligonucleotide
uugcuuaccagggauaccc

SEQ ID NO: 2213523 - RNA, 19 nt, Artificial Sequence
  Description of Artificial Sequence: Synthetic oligonucleotide
auuauauacuuuccaggca

SEQ ID NO: 2213524 - RNA, 19 nt, Artificial Sequence
  Description of Artificial Sequence: Synthetic oligonucleotide
agauucucaauucgcacug

SEQ ID NO: 2213525 - RNA, 19 nt, Artificial Sequence
  Description of Artificial Sequence: Synthetic oligonucleotide
aggcauuacacccaugcug

SEQ ID NO: 2213526 - RNA, 19 nt, Artificial Sequence
  Description of Artificial Sequence: Synthetic oligonucleotide
uggaauuguuuacacacuc

SEQ ID NO: 2213527 - RNA, 19 nt, Artificial Sequence
  Description of Artificial Sequence: Synthetic oligonucleotide
agauccagcugagaguugc

SEQ ID NO: 2213528 - RNA, 19 nt, Artificial Sequence
  Description of Artificial Sequence: Synthetic oligonucleotide
uccagauucucaauucgca

SEQ ID NO: 2213529 - RNA, 19 nt, Artificial Sequence
  Description of Artificial Sequence: Synthetic oligonucleotide
cuugauuugacagaucuca

SEQ ID NO: 2213530 - RNA, 19 nt, Artificial Sequence
  Description of Artificial Sequence: Synthetic oligonucleotide
acauauaaagcaacacaac

SEQ ID NO: 2213531 - RNA, 19 nt, Artificial Sequence
  Description of Artificial Sequence: Synthetic oligonucleotide
auuauucuaaagucauacu

SEQ ID NO: 2213532 - RNA, 19 nt, Artificial Sequence
  Description of Artificial Sequence: Synthetic oligonucleotide
ugugcauguucaaucauau

SEQ ID NO: 2213533 - RNA, 19 nt, Artificial Sequence
  Description of Artificial Sequence: Synthetic oligonucleotide
cucagguaguucuugguag

SEQ ID NO: 2213534 - RNA, 19 nt, Artificial Sequence
  Description of Artificial Sequence: Synthetic oligonucleotide
auacacaguccacagucuc

SEQ ID NO: 2213535 - RNA, 19 nt, Artificial Sequence
  Description of Artificial Sequence: Synthetic oligonucleotide
aauuguuuacacacucuug

SEQ ID NO: 2213536 - RNA, 19 nt, Artificial Sequence
  Description of Artificial Sequence: Synthetic oligonucleotide
uuccagauucucaauucgc

SEQ ID NO: 2213537 - RNA, 19 nt, Artificial Sequence
  Description of Artificial Sequence: Synthetic oligonucleotide
aagucauacucauuuugaa

SEQ ID NO: 2213538 - RNA, 19 nt, Artificial Sequence
  Description of Artificial Sequence: Synthetic oligonucleotide
uugaugcucuaacugggcc

SEQ ID NO: 2213539 - RNA, 19 nt, Artificial Sequence
  Description of Artificial Sequence: Synthetic oligonucleotide
uaauucaauugguugucga

SEQ ID NO: 2213540 - RNA, 19 nt, Artificial Sequence
  Description of Artificial Sequence: Synthetic oligonucleotide
cucaauuuagauccagcug

SEQ ID NO: 2213541 - RNA, 19 nt, Artificial Sequence
  Description of Artificial Sequence: Synthetic oligonucleotide
uuguuuacacacucuugcc

SEQ ID NO: 2213542 - RNA, 19 nt, Artificial Sequence
  Description of Artificial Sequence: Synthetic oligonucleotide
uucaugcugaguaauucaa

SEQ ID NO: 2213543 - RNA, 19 nt, Artificial Sequence
  Description of Artificial Sequence: Synthetic oligonucleotide
augaacgagguuuucauua

SEQ ID NO: 2213544 - RNA, 19 nt, Artificial Sequence
  Description of Artificial Sequence: Synthetic oligonucleotide
auacucauuuugaaaacuc

SEQ ID NO: 2213545 - RNA, 19 nt, Artificial Sequence
  Description of Artificial Sequence: Synthetic oligonucleotide
ucauacucauuuugaaaac

SEQ ID NO: 2213546 - RNA, 19 nt, Artificial Sequence
  Description of Artificial Sequence: Synthetic oligonucleotide
augcugaguaauucaauug

SEQ ID NO: 2213547 - RNA, 19 nt, Artificial Sequence
  Description of Artificial Sequence: Synthetic oligonucleotide
cuaaacaacuaaccaguug

SEQ ID NO: 2213548 - RNA, 19 nt, Artificial Sequence
  Description of Artificial Sequence: Synthetic oligonucleotide
cuuguuugccuccccaugc

SEQ ID NO: 2213549 - RNA, 19 nt, Artificial Sequence
  Description of Artificial Sequence: Synthetic oligonucleotide
auaugaacgagguuuucau

SEQ ID NO: 2213550 - RNA, 19 nt, Artificial Sequence
  Description of Artificial Sequence: Synthetic oligonucleotide
auauguuuccuuaacuucu

SEQ ID NO: 2213551 - RNA, 19 nt, Artificial Sequence
  Description of Artificial Sequence: Synthetic oligonucleotide
ucauaucgcuucaugcuga

SEQ ID NO: 2213552 - RNA, 19 nt, Artificial Sequence
  Description of Artificial Sequence: Synthetic oligonucleotide
aacauguugaaaauccuua

SEQ ID NO: 2213553 - RNA, 19 nt, Artificial Sequence
  Description of Artificial Sequence: Synthetic oligonucleotide
caaaguacggcaacgcauc

SEQ ID NO: 2213554 - RNA, 19 nt, Artificial Sequence
  Description of Artificial Sequence: Synthetic oligonucleotide
uuccuuaacuucugaagcu

SEQ ID NO: 2213555 - RNA, 19 nt, Artificial Sequence
  Description of Artificial Sequence: Synthetic oligonucleotide
uuagauccagcugagaguu

SEQ ID NO: 2213556 - RNA, 19 nt, Artificial Sequence
  Description of Artificial Sequence: Synthetic oligonucleotide
ucucauuaugucaguuuca

SEQ ID NO: 2213557 - RNA, 19 nt, Artificial Sequence
  Description of Artificial Sequence: Synthetic oligonucleotide
uuacaaaauuugaagccuu

SEQ ID NO: 2213558 - RNA, 19 nt, Artificial Sequence
  Description of Artificial Sequence: Synthetic oligonucleotide
gucucuaaacaacuaacca

SEQ ID NO: 2213559 - RNA, 19 nt, Artificial Sequence
  Description of Artificial Sequence: Synthetic oligonucleotide
cagucucuaaacaacuaac

SEQ ID NO: 2213560 - RNA, 19 nt, Artificial Sequence
  Description of Artificial Sequence: Synthetic oligonucleotide
ucugcgaguuuccuccucc

SEQ ID NO: 2213561 - RNA, 19 nt, Artificial Sequence
  Description of Artificial Sequence: Synthetic oligonucleotide
auaugacauuauucuaaag

SEQ ID NO: 2213562 - RNA, 19 nt, Artificial Sequence
  Description of Artificial Sequence: Synthetic oligonucleotide
ugaugcucuaacugggcca

SEQ ID NO: 2213563 - RNA, 19 nt, Artificial Sequence
  Description of Artificial Sequence: Synthetic oligonucleotide
uccccggcuaccaaacccg

SEQ ID NO: 2213564 - RNA, 19 nt, Artificial Sequence
  Description of Artificial Sequence: Synthetic oligonucleotide
auuugaagccuucaaucaa

SEQ ID NO: 2213565 - RNA, 19 nt, Artificial Sequence
  Description of Artificial Sequence: Synthetic oligonucleotide
uauacacaguccacagucu

SEQ ID NO: 2213566 - RNA, 19 nt, Artificial Sequence
  Description of Artificial Sequence: Synthetic oligonucleotide
aauccuuauuuugcuaaca

SEQ ID NO: 2213567 - RNA, 19 nt, Artificial Sequence
  Description of Artificial Sequence: Synthetic oligonucleotide
aauaguccuuucaaucuca

SEQ ID NO: 2213568 - RNA, 19 nt, Artificial Sequence
  Description of Artificial Sequence: Synthetic oligonucleotide
ugggccauggaauuguuua

SEQ ID NO: 2213569 - RNA, 19 nt, Artificial Sequence
  Description of Artificial Sequence: Synthetic oligonucleotide
aacuucugcuacaaaauau

SEQ ID NO: 2213570 - RNA, 19 nt, Artificial Sequence
  Description of Artificial Sequence: Synthetic oligonucleotide
guagccuuggucaaaguac

SEQ ID NO: 2213571 - RNA, 19 nt, Artificial Sequence
  Description of Artificial Sequence: Synthetic oligonucleotide
cuugccaugcaguaauguc

SEQ ID NO: 2213572 - RNA, 19 nt, Artificial Sequence
  Description of Artificial Sequence: Synthetic oligonucleotide
caauuuagauccagcugag

SEQ ID NO: 2213573 - RNA, 19 nt, Artificial Sequence
  Description of Artificial Sequence: Synthetic oligonucleotide
uugaagccuucaaucaaga

SEQ ID NO: 2213574 - RNA, 19 nt, Artificial Sequence
  Description of Artificial Sequence: Synthetic oligonucleotide
caacacaacaguauacaca

SEQ ID NO: 2213575 - RNA, 19 nt, Artificial Sequence
  Description of Artificial Sequence: Synthetic oligonucleotide
ucccuucugcccaagguca

SEQ ID NO: 2213576 - RNA, 19 nt, Artificial Sequence
  Description of Artificial Sequence: Synthetic oligonucleotide
uggucaaaguacggcaacg

SEQ ID NO: 2213577 - RNA, 19 nt, Artificial Sequence
  Description of Artificial Sequence: Synthetic oligonucleotide
gaauauguuuccuuaacuu

SEQ ID NO: 2213578 - RNA, 19 nt, Artificial Sequence
  Description of Artificial Sequence: Synthetic oligonucleotide
cuuauuuugcuaacacaca

SEQ ID NO: 2213579 - RNA, 19 nt, Artificial Sequence
  Description of Artificial Sequence: Synthetic oligonucleotide
uuuugacccgaggaagggg

SEQ ID NO: 2213580 - RNA, 19 nt, Artificial Sequence
  Description of Artificial Sequence: Synthetic oligonucleotide
guaauucaauugguugucg

SEQ ID NO: 2213581 - RNA, 19 nt, Artificial Sequence
  Description of Artificial Sequence: Synthetic oligonucleotide
aacgagguuuucauuauau

SEQ ID NO: 2213582 - RNA, 19 nt, Artificial Sequence
  Description of Artificial Sequence: Synthetic oligonucleotide
ugcucuaacugggccaugg

SEQ ID NO: 2213583 - RNA, 19 nt, Artificial Sequence
  Description of Artificial Sequence: Synthetic oligonucleotide
cucuaaacaacuaaccagu

SEQ ID NO: 2213584 - RNA, 19 nt, Artificial Sequence
  Description of Artificial Sequence: Synthetic oligonucleotide
acauguugaaaauccuuau

SEQ ID NO: 2213585 - RNA, 19 nt, Artificial Sequence
  Description of Artificial Sequence: Synthetic oligonucleotide
acaguauacacaguccaca

SEQ ID NO: 2213586 - RNA, 19 nt, Artificial Sequence
  Description of Artificial Sequence: Synthetic oligonucleotide
agggauacccaauuggauu

SEQ ID NO: 2213587 - RNA, 19 nt, Artificial Sequence
  Description of Artificial Sequence: Synthetic oligonucleotide
gggcuggaaguucauaucg

SEQ ID NO: 2213588 - RNA, 19 nt, Artificial Sequence
  Description of Artificial Sequence: Synthetic oligonucleotide
uuuacacacucuugccaug

SEQ ID NO: 2213589 - RNA, 19 nt, Artificial Sequence
  Description of Artificial Sequence: Synthetic oligonucleotide
caguccacagucucuaaac

SEQ ID NO: 2213590 - RNA, 19 nt, Artificial Sequence
  Description of Artificial Sequence: Synthetic oligonucleotide
uccuuucaaucucauaguu

SEQ ID NO: 2213591 - RNA, 19 nt, Artificial Sequence
  Description of Artificial Sequence: Synthetic oligonucleotide
aucucauaguucuugcuua

SEQ ID NO: 2213592 - RNA, 19 nt, Artificial Sequence
  Description of Artificial Sequence: Synthetic oligonucleotide
uacacaguccacagucucu

SEQ ID NO: 2213593 - RNA, 19 nt, Artificial Sequence
  Description of Artificial Sequence: Synthetic oligonucleotide
caacgcauccaccaccacc

SEQ ID NO: 2213594 - RNA, 19 nt, Artificial Sequence
  Description of Artificial Sequence: Synthetic oligonucleotide
ucuugcuuaccagggauac

SEQ ID NO: 2213595 - RNA, 19 nt, Artificial Sequence
  Description of Artificial Sequence: Synthetic oligonucleotide
aguauacacaguccacagu

SEQ ID NO: 2213596 - RNA, 19 nt, Artificial Sequence
  Description of Artificial Sequence: Synthetic oligonucleotide
uccagcugagaguugcaug

SEQ ID NO: 2213597 - RNA, 19 nt, Artificial Sequence
  Description of Artificial Sequence: Synthetic oligonucleotide
caauaguccuuucaaucuc

SEQ ID NO: 2213598 - RNA, 19 nt, Artificial Sequence
  Description of Artificial Sequence: Synthetic oligonucleotide
aaaacauguuagaagucuu

SEQ ID NO: 2213599 - RNA, 19 nt, Artificial Sequence
  Description of Artificial Sequence: Synthetic oligonucleotide
ucuaaacaacuaaccaguu

SEQ ID NO: 2213600 - RNA, 19 nt, Artificial Sequence
  Description of Artificial Sequence: Synthetic oligonucleotide
ucucucaauuuagauccag

SEQ ID NO: 2213601 - RNA, 19 nt, Artificial Sequence
  Description of Artificial Sequence: Synthetic oligonucleotide
auucucaauucgcacugcu

SEQ ID NO: 2213602 - RNA, 19 nt, Artificial Sequence
  Description of Artificial Sequence: Synthetic oligonucleotide
ucgcugccaguuuaaaucu

SEQ ID NO: 2213603 - RNA, 19 nt, Artificial Sequence
  Description of Artificial Sequence: Synthetic oligonucleotide
aguccacagucucuaaaca

SEQ ID NO: 2213604 - RNA, 19 nt, Artificial Sequence
  Description of Artificial Sequence: Synthetic oligonucleotide
ugaacgagguuuucauuau

SEQ ID NO: 2213605 - RNA, 19 nt, Artificial Sequence
  Description of Artificial Sequence: Synthetic oligonucleotide
aaacccgugccugccauug

SEQ ID NO: 2213606 - RNA, 19 nt, Artificial Sequence
  Description of Artificial Sequence: Synthetic oligonucleotide
acaaaauuugaagccuuca

SEQ ID NO: 2213607 - RNA, 19 nt, Artificial Sequence
  Description of Artificial Sequence: Synthetic oligonucleotide
ugccaugcaguaaugucau

SEQ ID NO: 2213608 - RNA, 19 nt, Artificial Sequence
  Description of Artificial Sequence: Synthetic oligonucleotide
acauguuagaagucuuaaa

SEQ ID NO: 2213609 - RNA, 19 nt, Artificial Sequence
  Description of Artificial Sequence: Synthetic oligonucleotide
uugauuugacagaucucau

SEQ ID NO: 2213610 - RNA, 19 nt, Artificial Sequence
  Description of Artificial Sequence: Synthetic oligonucleotide
acccaauuggauuccauuu

SEQ ID NO: 2213611 - RNA, 19 nt, Artificial Sequence
  Description of Artificial Sequence: Synthetic oligonucleotide
ucaugcugaguaauucaau

SEQ ID NO: 2213612 - RNA, 19 nt, Artificial Sequence
  Description of Artificial Sequence: Synthetic oligonucleotide
cuucugcuacaaaauauga

SEQ ID NO: 2213613 - RNA, 19 nt, Artificial Sequence
  Description of Artificial Sequence: Synthetic oligonucleotide
caaaauuugaagccuucaa

SEQ ID NO: 2213614 - RNA, 19 nt, Artificial Sequence
  Description of Artificial Sequence: Synthetic oligonucleotide
agcagcuagccucucaaau

SEQ ID NO: 2213615 - RNA, 19 nt, Artificial Sequence
  Description of Artificial Sequence: Synthetic oligonucleotide
guuacaaaauuugaagccu

SEQ ID NO: 2213616 - RNA, 19 nt, Artificial Sequence
  Description of Artificial Sequence: Synthetic oligonucleotide
cagcuagccucucaaauuc

SEQ ID NO: 2213617 - RNA, 19 nt, Artificial Sequence
  Description of Artificial Sequence: Synthetic oligonucleotide
aauuuagauccagcugaga

SEQ ID NO: 2213618 - RNA, 19 nt, Artificial Sequence
  Description of Artificial Sequence: Synthetic oligonucleotide
ugguugucgagcagcuagc

SEQ ID NO: 2213619 - RNA, 19 nt, Artificial Sequence
  Description of Artificial Sequence: Synthetic oligonucleotide
aacccgugccugccauugc

SEQ ID NO: 2213620 - RNA, 19 nt, Artificial Sequence
  Description of Artificial Sequence: Synthetic oligonucleotide
gacauuauucuaaagucau

SEQ ID NO: 2213621 - RNA, 19 nt, Artificial Sequence
  Description of Artificial Sequence: Synthetic oligonucleotide
caaucaagaacuucugcua

SEQ ID NO: 2213622 - RNA, 19 nt, Artificial Sequence
  Description of Artificial Sequence: Synthetic oligonucleotide
ccaggcauuacacccaugc

SEQ ID NO: 2213623 - RNA, 19 nt, Artificial Sequence
  Description of Artificial Sequence: Synthetic oligonucleotide
ugcuacaaaauaugacauu

SEQ ID NO: 2213624 - RNA, 19 nt, Artificial Sequence
  Description of Artificial Sequence: Synthetic oligonucleotide
uauauacuuuccaggcauu

SEQ ID NO: 2213625 - RNA, 19 nt, Artificial Sequence
  Description of Artificial Sequence: Synthetic oligonucleotide
cuugaauauguuuccuuaa

SEQ ID NO: 2213626 - RNA, 19 nt, Artificial Sequence
  Description of Artificial Sequence: Synthetic oligonucleotide
uaccagggauacccaauug

SEQ ID NO: 2213627 - RNA, 19 nt, Artificial Sequence
  Description of Artificial Sequence: Synthetic oligonucleotide
acuaaccaguugcucugag

SEQ ID NO: 2213628 - RNA, 19 nt, Artificial Sequence
  Description of Artificial Sequence: Synthetic oligonucleotide
acggcaacgcauccaccac

SEQ ID NO: 2213629 - RNA, 19 nt, Artificial Sequence
  Description of Artificial Sequence: Synthetic oligonucleotide
aaacauguuagaagucuua

SEQ ID NO: 2213630 - RNA, 19 nt, Artificial Sequence
  Description of Artificial Sequence: Synthetic oligonucleotide
ucauuaugucaguuucaaa

SEQ ID NO: 2213631 - RNA, 19 nt, Artificial Sequence
  Description of Artificial Sequence: Synthetic oligonucleotide
uuucgcugccaguuuaaau

SEQ ID NO: 2213632 - RNA, 19 nt, Artificial Sequence
  Description of Artificial Sequence: Synthetic oligonucleotide
gucgguaucugcgaguuuc

SEQ ID NO: 2213633 - RNA, 19 nt, Artificial Sequence
  Description of Artificial Sequence: Synthetic oligonucleotide
guaggucgguaucugcgag

SEQ ID NO: 2213634 - RNA, 19 nt, Artificial Sequence
  Description of Artificial Sequence: Synthetic oligonucleotide
guaguucuugguaggucgg

SEQ ID NO: 2213635 - RNA, 19 nt, Artificial Sequence
  Description of Artificial Sequence: Synthetic oligonucleotide
agaauaauccggggcuguc

SEQ ID NO: 2213636 - RNA, 19 nt, Artificial Sequence
  Description of Artificial Sequence: Synthetic oligonucleotide
ucgguaucugcgaguuucc

SEQ ID NO: 2213637 - RNA, 19 nt, Artificial Sequence
  Description of Artificial Sequence: Synthetic oligonucleotide
cacugcuugaugcucuaac

SEQ ID NO: 2213638 - RNA, 19 nt, Artificial Sequence
  Description of Artificial Sequence: Synthetic oligonucleotide
cauaucgcuucaugcugag

SEQ ID NO: 2213639 - RNA, 19 nt, Artificial Sequence
  Description of Artificial Sequence: Synthetic oligonucleotide
uacccaauuggauuccauu

SEQ ID NO: 2213640 - RNA, 19 nt, Artificial Sequence
  Description of Artificial Sequence: Synthetic oligonucleotide
cuaccaaacccgugccugc

SEQ ID NO: 2213641 - RNA, 19 nt, Artificial Sequence
  Description of Artificial Sequence: Synthetic oligonucleotide
ugucgagcagcuagccucu

SEQ ID NO: 2213642 - RNA, 19 nt, Artificial Sequence
  Description of Artificial Sequence: Synthetic oligonucleotide
caauuggauuccauuucuc

SEQ ID NO: 2213643 - RNA, 19 nt, Artificial Sequence
  Description of Artificial Sequence: Synthetic oligonucleotide
acccgugccugccauugcg

SEQ ID NO: 2213644 - RNA, 19 nt, Artificial Sequence
  Description of Artificial Sequence: Synthetic oligonucleotide
ugccaguuuaaaucuugaa

SEQ ID NO: 2213645 - RNA, 19 nt, Artificial Sequence
  Description of Artificial Sequence: Synthetic oligonucleotide
ucugugcauguucaaucau

SEQ ID NO: 2213646 - RNA, 19 nt, Artificial Sequence
  Description of Artificial Sequence: Synthetic oligonucleotide
gucaaaguacggcaacgca

SEQ ID NO: 2213647 - RNA, 19 nt, Artificial Sequence
  Description of Artificial Sequence: Synthetic oligonucleotide
gggauacccaauuggauuc

SEQ ID NO: 2213648 - RNA, 19 nt, Artificial Sequence
  Description of Artificial Sequence: Synthetic oligonucleotide
auucgcacugcuugaugcu

SEQ ID NO: 2213649 - RNA, 19 nt, Artificial Sequence
  Description of Artificial Sequence: Synthetic oligonucleotide
cucucaaauucguuucuca

SEQ ID NO: 2213650 - RNA, 19 nt, Artificial Sequence
  Description of Artificial Sequence: Synthetic oligonucleotide
ucuugccaugcaguaaugu

SEQ ID NO: 2213651 - RNA, 19 nt, Artificial Sequence
  Description of Artificial Sequence: Synthetic oligonucleotide
acacacauauaaagcaaca

SEQ ID NO: 2213652 - RNA, 19 nt, Artificial Sequence
  Description of Artificial Sequence: Synthetic oligonucleotide
agccgcuucccgcacgccg

SEQ ID NO: 2213653 - RNA, 19 nt, Artificial Sequence
  Description of Artificial Sequence: Synthetic oligonucleotide
cuccccggcuaccaaaccc

SEQ ID NO: 2213654 - RNA, 19 nt, Artificial Sequence
  Description of Artificial Sequence: Synthetic oligonucleotide
uucucucaauuuagaucca

SEQ ID NO: 2213655 - RNA, 19 nt, Artificial Sequence
  Description of Artificial Sequence: Synthetic oligonucleotide
agguaguucuugguagguc

SEQ ID NO: 2213656 - RNA, 19 nt, Artificial Sequence
  Description of Artificial Sequence: Synthetic oligonucleotide
gaagcuccuucugugcaug

SEQ ID NO: 2213657 - RNA, 19 nt, Artificial Sequence
  Description of Artificial Sequence: Synthetic oligonucleotide
guuuacacacucuugccau

SEQ ID NO: 2213658 - RNA, 19 nt, Artificial Sequence
  Description of Artificial Sequence: Synthetic oligonucleotide
ucuuggcggauguuuuccu

SEQ ID NO: 2213659 - RNA, 19 nt, Artificial Sequence
  Description of Artificial Sequence: Synthetic oligonucleotide
acgccgggagccucguagc

SEQ ID NO: 2213660 - RNA, 19 nt, Artificial Sequence
  Description of Artificial Sequence: Synthetic oligonucleotide
acacccaugcugugacauc

SEQ ID NO: 2213661 - RNA, 19 nt, Artificial Sequence
  Description of Artificial Sequence: Synthetic oligonucleotide
ugcccaaggucagaagucu

SEQ ID NO: 2213662 - RNA, 19 nt, Artificial Sequence
  Description of Artificial Sequence: Synthetic oligonucleotide
cacgccgggagccucguag

SEQ ID NO: 2213663 - RNA, 19 nt, Artificial Sequence
  Description of Artificial Sequence: Synthetic oligonucleotide
gcaacacaacaguauacac

SEQ ID NO: 2213664 - RNA, 19 nt, Artificial Sequence
  Description of Artificial Sequence: Synthetic oligonucleotide
agcagcuuaguuacaaaau

SEQ ID NO: 2213665 - RNA, 19 nt, Artificial Sequence
  Description of Artificial Sequence: Synthetic oligonucleotide
uagcaacauguugaaaauc

SEQ ID NO: 2213666 - RNA, 19 nt, Artificial Sequence
  Description of Artificial Sequence: Synthetic oligonucleotide
gauucucaauucgcacugc

SEQ ID NO: 2213667 - RNA, 19 nt, Artificial Sequence
  Description of Artificial Sequence: Synthetic oligonucleotide
ucgcacugcuugaugcucu

SEQ ID NO: 2213668 - RNA, 19 nt, Artificial Sequence
  Description of Artificial Sequence: Synthetic oligonucleotide
aaguacggcaacgcaucca

SEQ ID NO: 2213669 - RNA, 19 nt, Artificial Sequence
  Description of Artificial Sequence: Synthetic oligonucleotide
caguuucaaaggcagaaua

SEQ ID NO: 2213670 - RNA, 19 nt, Artificial Sequence
  Description of Artificial Sequence: Synthetic oligonucleotide
cucaauucgcacugcuuga

SEQ ID NO: 2213671 - RNA, 19 nt, Artificial Sequence
  Description of Artificial Sequence: Synthetic oligonucleotide
aucgcuucaugcugaguaa

SEQ ID NO: 2213672 - RNA, 19 nt, Artificial Sequence
  Description of Artificial Sequence: Synthetic oligonucleotide
uacacacucuugccaugca

SEQ ID NO: 2213673 - RNA, 19 nt, Artificial Sequence
  Description of Artificial Sequence: Synthetic oligonucleotide
cucauaguucuugcuuacc

SEQ ID NO: 2213674 - RNA, 19 nt, Artificial Sequence
  Description of Artificial Sequence: Synthetic oligonucleotide
caauucgcacugcuugaug

SEQ ID NO: 2213675 - RNA, 19 nt, Artificial Sequence
  Description of Artificial Sequence: Synthetic oligonucleotide
ugcgaguuuccuccuccac

SEQ ID NO: 2213676 - RNA, 19 nt, Artificial Sequence
  Description of Artificial Sequence: Synthetic oligonucleotide
ugcuuaccagggauaccca

SEQ ID NO: 2213677 - RNA, 19 nt, Artificial Sequence
  Description of Artificial Sequence: Synthetic oligonucleotide
cucauuaugucaguuucaa

SEQ ID NO: 2213678 - RNA, 19 nt, Artificial Sequence
  Description of Artificial Sequence: Synthetic oligonucleotide
cugcccaaggucagaaguc

SEQ ID NO: 2213679 - RNA, 19 nt, Artificial Sequence
  Description of Artificial Sequence: Synthetic oligonucleotide
aacuaaccaguugcucuga

SEQ ID NO: 2213680 - RNA, 19 nt, Artificial Sequence
  Description of Artificial Sequence: Synthetic oligonucleotide
cuccccaugcugcugcuug

SEQ ID NO: 2213681 - RNA, 19 nt, Artificial Sequence
  Description of Artificial Sequence: Synthetic oligonucleotide
gucuuggcggauguuuucc

SEQ ID NO: 2213682 - RNA, 19 nt, Artificial Sequence
  Description of Artificial Sequence: Synthetic oligonucleotide
ucaauucgcacugcuugau

SEQ ID NO: 2213683 - RNA, 19 nt, Artificial Sequence
  Description of Artificial Sequence: Synthetic oligonucleotide
aucugcgaguuuccuccuc

SEQ ID NO: 2213684 - RNA, 19 nt, Artificial Sequence
  Description of Artificial Sequence: Synthetic oligonucleotide
acgagguuuucauuauaua

SEQ ID NO: 2213685 - RNA, 19 nt, Artificial Sequence
  Description of Artificial Sequence: Synthetic oligonucleotide
cuugguaggucgguaucug

SEQ ID NO: 2213686 - RNA, 19 nt, Artificial Sequence
  Description of Artificial Sequence: Synthetic oligonucleotide
cuaaccaguugcucugaga

SEQ ID NO: 2213687 - RNA, 19 nt, Artificial Sequence
  Description of Artificial Sequence: Synthetic oligonucleotide
uaggucgguaucugcgagu

SEQ ID NO: 2213688 - RNA, 19 nt, Artificial Sequence
  Description of Artificial Sequence: Synthetic oligonucleotide
cagauucucaauucgcacu

SEQ ID NO: 2213689 - RNA, 19 nt, Artificial Sequence
  Description of Artificial Sequence: Synthetic oligonucleotide
auauacuuuccaggcauua

SEQ ID NO: 2213690 - RNA, 19 nt, Artificial Sequence
  Description of Artificial Sequence: Synthetic oligonucleotide
acacucuugccaugcagua

SEQ ID NO: 2213691 - RNA, 19 nt, Artificial Sequence
  Description of Artificial Sequence: Synthetic oligonucleotide
ccagauucucaauucgcac

SEQ ID NO: 2213692 - RNA, 19 nt, Artificial Sequence
  Description of Artificial Sequence: Synthetic oligonucleotide
gcgaguuuccuccuccacc

SEQ ID NO: 2213693 - RNA, 19 nt, Artificial Sequence
  Description of Artificial Sequence: Synthetic oligonucleotide
gcuuaguuacaaaauuuga

SEQ ID NO: 2213694 - RNA, 19 nt, Artificial Sequence
  Description of Artificial Sequence: Synthetic oligonucleotide
uccuuguuugccuccccau

SEQ ID NO: 2213695 - RNA, 19 nt, Artificial Sequence
  Description of Artificial Sequence: Synthetic oligonucleotide
gacccgaggaaggggcugg

SEQ ID NO: 2213696 - RNA, 19 nt, Artificial Sequence
  Description of Artificial Sequence: Synthetic oligonucleotide
aucauaugaacgagguuuu

SEQ ID NO: 2213697 - RNA, 19 nt, Artificial Sequence
  Description of Artificial Sequence: Synthetic oligonucleotide
ggucaaaguacggcaacgc

SEQ ID NO: 2213698 - RNA, 19 nt, Artificial Sequence
  Description of Artificial Sequence: Synthetic oligonucleotide
agcuagccucucaaauucg

SEQ ID NO: 2213699 - RNA, 19 nt, Artificial Sequence
  Description of Artificial Sequence: Synthetic oligonucleotide
uugacccgaggaaggggcu

SEQ ID NO: 2213700 - RNA, 19 nt, Artificial Sequence
  Description of Artificial Sequence: Synthetic oligonucleotide
cuugcuuaccagggauacc

SEQ ID NO: 2213701 - RNA, 19 nt, Artificial Sequence
  Description of Artificial Sequence: Synthetic oligonucleotide
cugugcauguucaaucaua

SEQ ID NO: 2213702 - RNA, 19 nt, Artificial Sequence
  Description of Artificial Sequence: Synthetic oligonucleotide
uaccaaacccgugccugcc

SEQ ID NO: 2213703 - RNA, 19 nt, Artificial Sequence
  Description of Artificial Sequence: Synthetic oligonucleotide
cugcuacaaaauaugacau

SEQ ID NO: 2213704 - RNA, 19 nt, Artificial Sequence
  Description of Artificial Sequence: Synthetic oligonucleotide
ggaaguucauaucgcuuca

SEQ ID NO: 2213705 - RNA, 19 nt, Artificial Sequence
  Description of Artificial Sequence: Synthetic oligonucleotide
agcugagaguugcauguuu

SEQ ID NO: 2213706 - RNA, 19 nt, Artificial Sequence
  Description of Artificial Sequence: Synthetic oligonucleotide
gcuaccaaacccgugccug

SEQ ID NO: 2213707 - RNA, 19 nt, Artificial Sequence
  Description of Artificial Sequence: Synthetic oligonucleotide
uagauccagcugagaguug

SEQ ID NO: 2213708 - RNA, 19 nt, Artificial Sequence
  Description of Artificial Sequence: Synthetic oligonucleotide
gccauggaauuguuuacac

SEQ ID NO: 2213709 - RNA, 19 nt, Artificial Sequence
  Description of Artificial Sequence: Synthetic oligonucleotide
uuuucgcugccaguuuaaa

SEQ ID NO: 2213710 - RNA, 19 nt, Artificial Sequence
  Description of Artificial Sequence: Synthetic oligonucleotide
uucgcacugcuugaugcuc

SEQ ID NO: 2213711 - RNA, 19 nt, Artificial Sequence
  Description of Artificial Sequence: Synthetic oligonucleotide
uuacacccaugcugugaca

SEQ ID NO: 2213712 - RNA, 19 nt, Artificial Sequence
  Description of Artificial Sequence: Synthetic oligonucleotide
ccggcuaccaaacccgugc

SEQ ID NO: 2213713 - RNA, 19 nt, Artificial Sequence
  Description of Artificial Sequence: Synthetic oligonucleotide
cucuaacugggccauggaa

SEQ ID NO: 2213714 - RNA, 19 nt, Artificial Sequence
  Description of Artificial Sequence: Synthetic oligonucleotide
gauacccaauuggauucca

SEQ ID NO: 2213715 - RNA, 19 nt, Artificial Sequence
  Description of Artificial Sequence: Synthetic oligonucleotide
uaucugcgaguuuccuccu

SEQ ID NO: 2213716 - RNA, 19 nt, Artificial Sequence
  Description of Artificial Sequence: Synthetic oligonucleotide
cugccaguuuaaaucuuga

SEQ ID NO: 2213717 - RNA, 19 nt, Artificial Sequence
  Description of Artificial Sequence: Synthetic oligonucleotide
ccaaggucagaagucuugg

SEQ ID NO: 2213718 - RNA, 19 nt, Artificial Sequence
  Description of Artificial Sequence: Synthetic oligonucleotide
cauuacacccaugcuguga

SEQ ID NO: 2213719 - RNA, 19 nt, Artificial Sequence
  Description of Artificial Sequence: Synthetic oligonucleotide
uaguccuuucaaucucaua

SEQ ID NO: 2213720 - RNA, 19 nt, Artificial Sequence
  Description of Artificial Sequence: Synthetic oligonucleotide
gaacgagguuuucauuaua

SEQ ID NO: 2213721 - RNA, 19 nt, Artificial Sequence
  Description of Artificial Sequence: Synthetic oligonucleotide
uaguucuugguaggucggu

SEQ ID NO: 2213722 - RNA, 19 nt, Artificial Sequence
  Description of Artificial Sequence: Synthetic oligonucleotide
cccaauuggauuccauuuc

SEQ ID NO: 2213723 - RNA, 19 nt, Artificial Sequence
  Description of Artificial Sequence: Synthetic oligonucleotide
accuccccggcuaccaaac

SEQ ID NO: 2213724 - RNA, 19 nt, Artificial Sequence
  Description of Artificial Sequence: Synthetic oligonucleotide
gguaggucgguaucugcga

SEQ ID NO: 2213725 - RNA, 19 nt, Artificial Sequence
  Description of Artificial Sequence: Synthetic oligonucleotide
cucuugccaugcaguaaug

SEQ ID NO: 2213726 - RNA, 19 nt, Artificial Sequence
  Description of Artificial Sequence: Synthetic oligonucleotide
gagccucguagccuugguc

SEQ ID NO: 2213727 - RNA, 19 nt, Artificial Sequence
  Description of Artificial Sequence: Synthetic oligonucleotide
ggucagaagucuuggcgga

SEQ ID NO: 2213728 - RNA, 19 nt, Artificial Sequence
  Description of Artificial Sequence: Synthetic oligonucleotide
caguugcucugagaaaguc

SEQ ID NO: 2213729 - RNA, 19 nt, Artificial Sequence
  Description of Artificial Sequence: Synthetic oligonucleotide
cugaguaauucaauugguu

SEQ ID NO: 2213730 - RNA, 19 nt, Artificial Sequence
  Description of Artificial Sequence: Synthetic oligonucleotide
agggccgcagccgcuuccc

SEQ ID NO: 2213731 - RNA, 19 nt, Artificial Sequence
  Description of Artificial Sequence: Synthetic oligonucleotide
cacccaugcugugacauca

SEQ ID NO: 2213732 - RNA, 19 nt, Artificial Sequence
  Description of Artificial Sequence: Synthetic oligonucleotide
ugacccgaggaaggggcug

SEQ ID NO: 2213733 - RNA, 19 nt, Artificial Sequence
  Description of Artificial Sequence: Synthetic oligonucleotide
agccuuggucaaaguacgg

SEQ ID NO: 2213734 - RNA, 19 nt, Artificial Sequence
  Description of Artificial Sequence: Synthetic oligonucleotide
cagcuuaguuacaaaauuu

SEQ ID NO: 2213735 - RNA, 19 nt, Artificial Sequence
  Description of Artificial Sequence: Synthetic oligonucleotide
caacauguugaaaauccuu

SEQ ID NO: 2213736 - RNA, 19 nt, Artificial Sequence
  Description of Artificial Sequence: Synthetic oligonucleotide
ggcauuacacccaugcugu

SEQ ID NO: 2213737 - RNA, 19 nt, Artificial Sequence
  Description of Artificial Sequence: Synthetic oligonucleotide
ucgcuucaugcugaguaau

SEQ ID NO: 2213738 - RNA, 19 nt, Artificial Sequence
  Description of Artificial Sequence: Synthetic oligonucleotide
ccagggauacccaauugga

SEQ ID NO: 2213739 - RNA, 19 nt, Artificial Sequence
  Description of Artificial Sequence: Synthetic oligonucleotide
acauuauucuaaagucaua

SEQ ID NO: 2213740 - RNA, 19 nt, Artificial Sequence
  Description of Artificial Sequence: Synthetic oligonucleotide
uccaggcauuacacccaug

SEQ ID NO: 2213741 - RNA, 19 nt, Artificial Sequence
  Description of Artificial Sequence: Synthetic oligonucleotide
aauccggggcugucaggua

SEQ ID NO: 2213742 - RNA, 19 nt, Artificial Sequence
  Description of Artificial Sequence: Synthetic oligonucleotide
uucccgcacgccgggagcc

SEQ ID NO: 2213743 - RNA, 19 nt, Artificial Sequence
  Description of Artificial Sequence: Synthetic oligonucleotide
aguucuugguaggucggua

SEQ ID NO: 2213744 - RNA, 19 nt, Artificial Sequence
  Description of Artificial Sequence: Synthetic oligonucleotide
caaucucauaguucuugcu

SEQ ID NO: 2213745 - RNA, 19 nt, Artificial Sequence
  Description of Artificial Sequence: Synthetic oligonucleotide
cuuaccagggauacccaau

SEQ ID NO: 2213746 - RNA, 19 nt, Artificial Sequence
  Description of Artificial Sequence: Synthetic oligonucleotide
ccgaggaaggggcuggaag

SEQ ID NO: 2213747 - RNA, 19 nt, Artificial Sequence
  Description of Artificial Sequence: Synthetic oligonucleotide
ggcuggaaguucauaucgc

SEQ ID NO: 2213748 - RNA, 19 nt, Artificial Sequence
  Description of Artificial Sequence: Synthetic oligonucleotide
aggucgguaucugcgaguu

SEQ ID NO: 2213749 - RNA, 19 nt, Artificial Sequence
  Description of Artificial Sequence: Synthetic oligonucleotide
ggauacccaauuggauucc

SEQ ID NO: 2213750 - RNA, 19 nt, Artificial Sequence
  Description of Artificial Sequence: Synthetic oligonucleotide
gguugucgagcagcuagcc

SEQ ID NO: 2213751 - RNA, 19 nt, Artificial Sequence
  Description of Artificial Sequence: Synthetic oligonucleotide
auaguccuuucaaucucau

SEQ ID NO: 2213752 - RNA, 19 nt, Artificial Sequence
  Description of Artificial Sequence: Synthetic oligonucleotide
ucguagccuuggucaaagu

SEQ ID NO: 2213753 - RNA, 19 nt, Artificial Sequence
  Description of Artificial Sequence: Synthetic oligonucleotide
ggggcuggaaguucauauc

SEQ ID NO: 2213754 - RNA, 19 nt, Artificial Sequence
  Description of Artificial Sequence: Synthetic oligonucleotide
uccaggggccugagguuuc

SEQ ID NO: 2213755 - RNA, 19 nt, Artificial Sequence
  Description of Artificial Sequence: Synthetic oligonucleotide
ccuuguuugccuccccaug

SEQ ID NO: 2213756 - RNA, 19 nt, Artificial Sequence
  Description of Artificial Sequence: Synthetic oligonucleotide
acgcauccaccaccaccuc

SEQ ID NO: 2213757 - RNA, 19 nt, Artificial Sequence
  Description of Artificial Sequence: Synthetic oligonucleotide
gcuggaaguucauaucgcu

SEQ ID NO: 2213758 - RNA, 19 nt, Artificial Sequence
  Description of Artificial Sequence: Synthetic oligonucleotide
guugucgagcagcuagccu

SEQ ID NO: 2213759 - RNA, 19 nt, Artificial Sequence
  Description of Artificial Sequence: Synthetic oligonucleotide
gauccagcugagaguugca

SEQ ID NO: 2213760 - RNA, 19 nt, Artificial Sequence
  Description of Artificial Sequence: Synthetic oligonucleotide
auaucgcuucaugcugagu

SEQ ID NO: 2213761 - RNA, 19 nt, Artificial Sequence
  Description of Artificial Sequence: Synthetic oligonucleotide
gacaucaguuccagauucu

SEQ ID NO: 2213762 - RNA, 19 nt, Artificial Sequence
  Description of Artificial Sequence: Synthetic oligonucleotide
ggccauggaauuguuuaca

SEQ ID NO: 2213763 - RNA, 19 nt, Artificial Sequence
  Description of Artificial Sequence: Synthetic oligonucleotide
ccauggaauuguuuacaca

SEQ ID NO: 2213764 - RNA, 19 nt, Artificial Sequence
  Description of Artificial Sequence: Synthetic oligonucleotide
cugucagguagcucaggua

SEQ ID NO: 2213765 - RNA, 19 nt, Artificial Sequence
  Description of Artificial Sequence: Synthetic oligonucleotide
auacccaauuggauuccau

SEQ ID NO: 2213766 - RNA, 19 nt, Artificial Sequence
  Description of Artificial Sequence: Synthetic oligonucleotide
gagcagcuagccucucaaa

SEQ ID NO: 2213767 - RNA, 19 nt, Artificial Sequence
  Description of Artificial Sequence: Synthetic oligonucleotide
ggaauuguuuacacacucu

SEQ ID NO: 2213768 - RNA, 19 nt, Artificial Sequence
  Description of Artificial Sequence: Synthetic oligonucleotide
cuggaaguucauaucgcuu

SEQ ID NO: 2213769 - RNA, 19 nt, Artificial Sequence
  Description of Artificial Sequence: Synthetic oligonucleotide
ccgugccugccauugcgcg

SEQ ID NO: 2213770 - RNA, 19 nt, Artificial Sequence
  Description of Artificial Sequence: Synthetic oligonucleotide
ggcaacgcauccaccacca

SEQ ID NO: 2213771 - RNA, 19 nt, Artificial Sequence
  Description of Artificial Sequence: Synthetic oligonucleotide
cagggauacccaauuggau

SEQ ID NO: 2213772 - RNA, 19 nt, Artificial Sequence
  Description of Artificial Sequence: Synthetic oligonucleotide
guacggcaacgcauccacc

SEQ ID NO: 2213773 - RNA, 19 nt, Artificial Sequence
  Description of Artificial Sequence: Synthetic oligonucleotide
ccaauuggauuccauuucu

SEQ ID NO: 2213774 - RNA, 19 nt, Artificial Sequence
  Description of Artificial Sequence: Synthetic oligonucleotide
gcuugauuugacagaucuc

SEQ ID NO: 2213775 - RNA, 19 nt, Artificial Sequence
  Description of Artificial Sequence: Synthetic oligonucleotide
acccaugcugugacaucag

SEQ ID NO: 2213776 - RNA, 19 nt, Artificial Sequence
  Description of Artificial Sequence: Synthetic oligonucleotide
gggccugagguuucucuuc

SEQ ID NO: 2213777 - RNA, 19 nt, Artificial Sequence
  Description of Artificial Sequence: Synthetic oligonucleotide
gcuuaccagggauacccaa

SEQ ID NO: 2213778 - RNA, 19 nt, Artificial Sequence
  Description of Artificial Sequence: Synthetic oligonucleotide
cugcgaguuuccuccucca

SEQ ID NO: 2213779 - RNA, 19 nt, Artificial Sequence
  Description of Artificial Sequence: Synthetic oligonucleotide
gcugaguaauucaauuggu

SEQ ID NO: 2213780 - RNA, 19 nt, Artificial Sequence
  Description of Artificial Sequence: Synthetic oligonucleotide
gaaguucauaucgcuucau

SEQ ID NO: 2213781 - RNA, 19 nt, Artificial Sequence
  Description of Artificial Sequence: Synthetic oligonucleotide
gcugcuugauuugacagau

SEQ ID NO: 2213782 - RNA, 19 nt, Artificial Sequence
  Description of Artificial Sequence: Synthetic oligonucleotide
gcagccgcuucccgcacgc

SEQ ID NO: 2213783 - RNA, 19 nt, Artificial Sequence
  Description of Artificial Sequence: Synthetic oligonucleotide
ccagcugcacaauaguccu

SEQ ID NO: 2213784 - RNA, 19 nt, Artificial Sequence
  Description of Artificial Sequence: Synthetic oligonucleotide
cagggccgcagccgcuucc

SEQ ID NO: 2213785 - RNA, 19 nt, Artificial Sequence
  Description of Artificial Sequence: Synthetic oligonucleotide
gccgcuucccgcacgccgg

SEQ ID NO: 2213786 - RNA, 19 nt, Artificial Sequence
  Description of Artificial Sequence: Synthetic oligonucleotide
gcacaauaguccuuucaau

SEQ ID NO: 2213787 - RNA, 19 nt, Artificial Sequence
  Description of Artificial Sequence: Synthetic oligonucleotide
caggcauuacacccaugcu

SEQ ID NO: 2213788 - RNA, 19 nt, Artificial Sequence
  Description of Artificial Sequence: Synthetic oligonucleotide
cuagccucucaaauucguu

SEQ ID NO: 2213789 - RNA, 19 nt, Artificial Sequence
  Description of Artificial Sequence: Synthetic oligonucleotide
caaauucguuucucauuau

SEQ ID NO: 2213790 - RNA, 19 nt, Artificial Sequence
  Description of Artificial Sequence: Synthetic oligonucleotide
gcagcuagccucucaaauu

SEQ ID NO: 2213791 - RNA, 19 nt, Artificial Sequence
  Description of Artificial Sequence: Synthetic oligonucleotide
gcuaacacacacacauaua

SEQ ID NO: 2213792 - RNA, 19 nt, Artificial Sequence
  Description of Artificial Sequence: Synthetic oligonucleotide
cacucuugccaugcaguaa

SEQ ID NO: 2213793 - RNA, 19 nt, Artificial Sequence
  Description of Artificial Sequence: Synthetic oligonucleotide
ccucucaaauucguuucuc

SEQ ID NO: 2213794 - RNA, 19 nt, Artificial Sequence
  Description of Artificial Sequence: Synthetic oligonucleotide
cagaauaauccggggcugu

SEQ ID NO: 2213795 - RNA, 19 nt, Artificial Sequence
  Description of Artificial Sequence: Synthetic oligonucleotide
cacaguccacagucucuaa

SEQ ID NO: 2213796 - RNA, 19 nt, Artificial Sequence
  Description of Artificial Sequence: Synthetic oligonucleotide
gcugcacaauaguccuuuc

SEQ ID NO: 2213797 - RNA, 19 nt, Artificial Sequence
  Description of Artificial Sequence: Synthetic oligonucleotide
cuuggcggauguuuuccuu

SEQ ID NO: 2213798 - RNA, 19 nt, Artificial Sequence
  Description of Artificial Sequence: Synthetic oligonucleotide
gucagguagcucagguagu

SEQ ID NO: 2213799 - RNA, 19 nt, Artificial Sequence
  Description of Artificial Sequence: Synthetic oligonucleotide
agccuucaaucaagaacuu

SEQ ID NO: 2213800 - RNA, 19 nt, Artificial Sequence
  Description of Artificial Sequence: Synthetic oligonucleotide
cguagccuuggucaaagua

SEQ ID NO: 2213801 - RNA, 19 nt, Artificial Sequence
  Description of Artificial Sequence: Synthetic oligonucleotide
cagguaguucuugguaggu

SEQ ID NO: 2213802 - RNA, 19 nt, Artificial Sequence
  Description of Artificial Sequence: Synthetic oligonucleotide
gcuagccucucaaauucgu

SEQ ID NO: 2213803 - RNA, 19 nt, Artificial Sequence
  Description of Artificial Sequence: Synthetic oligonucleotide
gcaacgcauccaccaccac

SEQ ID NO: 2213804 - RNA, 19 nt, Artificial Sequence
  Description of Artificial Sequence: Synthetic oligonucleotide
gcugagaguugcauguuuu

SEQ ID NO: 2213805 - RNA, 19 nt, Artificial Sequence
  Description of Artificial Sequence: Synthetic oligonucleotide
ccuccccggcuaccaaacc

SEQ ID NO: 2213806 - RNA, 19 nt, Artificial Sequence
  Description of Artificial Sequence: Synthetic oligonucleotide
cccggcuaccaaacccgug

SEQ ID NO: 2213807 - RNA, 19 nt, Artificial Sequence
  Description of Artificial Sequence: Synthetic oligonucleotide
ccaugcugugacaucaguu

SEQ ID NO: 2213808 - RNA, 19 nt, Artificial Sequence
  Description of Artificial Sequence: Synthetic oligonucleotide
gucagaagucuuggcggau

SEQ ID NO: 2213809 - RNA, 19 nt, Artificial Sequence
  Description of Artificial Sequence: Synthetic oligonucleotide
cugggccauggaauuguuu

SEQ ID NO: 2213810 - RNA, 19 nt, Artificial Sequence
  Description of Artificial Sequence: Synthetic oligonucleotide
ggagccucguagccuuggu

SEQ ID NO: 2213811 - RNA, 19 nt, Artificial Sequence
  Description of Artificial Sequence: Synthetic oligonucleotide
caaacccgugccugccauu

SEQ ID NO: 2213812 - RNA, 19 nt, Artificial Sequence
  Description of Artificial Sequence: Synthetic oligonucleotide
cgcagccgcuucccgcacg

SEQ ID NO: 2213813 - RNA, 19 nt, Artificial Sequence
  Description of Artificial Sequence: Synthetic oligonucleotide
ccaaacccgugccugccau

SEQ ID NO: 2213814 - RNA, 19 nt, Artificial Sequence
  Description of Artificial Sequence: Synthetic oligonucleotide
ccagggccgcagccgcuuc

SEQ ID NO: 2213815 - RNA, 19 nt, Artificial Sequence
  Description of Artificial Sequence: Synthetic oligonucleotide
ccucguagccuuggucaaa

SEQ ID NO: 2213816 - RNA, 19 nt, Artificial Sequence
  Description of Artificial Sequence: Synthetic oligonucleotide
ggucgguaucugcgaguuu

SEQ ID NO: 2213817 - RNA, 19 nt, Artificial Sequence
  Description of Artificial Sequence: Synthetic oligonucleotide
gcccaaggucagaagucuu

SEQ ID NO: 2213818 - RNA, 19 nt, Artificial Sequence
  Description of Artificial Sequence: Synthetic oligonucleotide
ccccggcuaccaaacccgu

SEQ ID NO: 2213819 - RNA, 19 nt, Artificial Sequence
  Description of Artificial Sequence: Synthetic oligonucleotide
cccaugcugcugcuugauu

SEQ ID NO: 2213820 - RNA, 19 nt, Artificial Sequence
  Description of Artificial Sequence: Synthetic oligonucleotide
cgguaucugcgaguuuccu

SEQ ID NO: 2213821 - RNA, 19 nt, Artificial Sequence
  Description of Artificial Sequence: Synthetic oligonucleotide
cgcugccaguuuaaaucuu

SEQ ID NO: 2213822 - RNA, 19 nt, Artificial Sequence
  Description of Artificial Sequence: Synthetic oligonucleotide
gcacgccgggagccucgua

SEQ ID NO: 2213823 - RNA, 19 nt, Artificial Sequence
  Description of Artificial Sequence: Synthetic oligonucleotide
ccaggggccugagguuucu

SEQ ID NO: 2213824 - RNA, 19 nt, Artificial Sequence
  Description of Artificial Sequence: Synthetic oligonucleotide
cgcacgccgggagccucgu

SEQ ID NO: 2213825 - RNA, 19 nt, Artificial Sequence
  Description of Artificial Sequence: Synthetic oligonucleotide
uaaaauuugagaaagaaug

SEQ ID NO: 2213826 - RNA, 19 nt, Artificial Sequence
  Description of Artificial Sequence: Synthetic oligonucleotide
aaaacauccccacagcccc

SEQ ID NO: 2213827 - RNA, 19 nt, Artificial Sequence
  Description of Artificial Sequence: Synthetic oligonucleotide
aaaacuggcaaaucgccgc

SEQ ID NO: 2213828 - RNA, 19 nt, Artificial Sequence
  Description of Artificial Sequence: Synthetic oligonucleotide
aauaccuuuucuucaaaac

SEQ ID NO: 2213829 - RNA, 19 nt, Artificial Sequence
  Description of Artificial Sequence: Synthetic oligonucleotide
aauuaaaauucucuuccag

SEQ ID NO: 2213830 - RNA, 19 nt, Artificial Sequence
  Description of Artificial Sequence: Synthetic oligonucleotide
aucucaaccaugcugagac

SEQ ID NO: 2213831 - RNA, 19 nt, Artificial Sequence
  Description of Artificial Sequence: Synthetic oligonucleotide
accagaauucuucacaagc

SEQ ID NO: 2213832 - RNA, 19 nt, Artificial Sequence
  Description of Artificial Sequence: Synthetic oligonucleotide
aaugagaagacauaaucaa

SEQ ID NO: 2213833 - RNA, 19 nt, Artificial Sequence
  Description of Artificial Sequence: Synthetic oligonucleotide
gaagacauaaucaaaggag

SEQ ID NO: 2213834 - RNA, 19 nt, Artificial Sequence
  Description of Artificial Sequence: Synthetic oligonucleotide
ucugacaguaaucucaggc

SEQ ID NO: 2213835 - RNA, 19 nt, Artificial Sequence
  Description of Artificial Sequence: Synthetic oligonucleotide
uuaaagggaagaaugcaag

SEQ ID NO: 2213836 - RNA, 19 nt, Artificial Sequence
  Description of Artificial Sequence: Synthetic oligonucleotide
gaacauacuggccaggagg

SEQ ID NO: 2213837 - RNA, 19 nt, Artificial Sequence
  Description of Artificial Sequence: Synthetic oligonucleotide
aaauuugagaaagaaugag

SEQ ID NO: 2213838 - RNA, 19 nt, Artificial Sequence
  Description of Artificial Sequence: Synthetic oligonucleotide
aagacauaaucaaaggagg

SEQ ID NO: 2213839 - RNA, 19 nt, Artificial Sequence
  Description of Artificial Sequence: Synthetic oligonucleotide
acaucuggaaaacaucccc

SEQ ID NO: 2213840 - RNA, 19 nt, Artificial Sequence
  Description of Artificial Sequence: Synthetic oligonucleotide
uguugacauagucagaggc

SEQ ID NO: 2213841 - RNA, 19 nt, Artificial Sequence
  Description of Artificial Sequence: Synthetic oligonucleotide
aagacaguucuucugcagg

SEQ ID NO: 2213842 - RNA, 19 nt, Artificial Sequence
  Description of Artificial Sequence: Synthetic oligonucleotide
aaguauacuugcgaugacc

SEQ ID NO: 2213843 - RNA, 19 nt, Artificial Sequence
  Description of Artificial Sequence: Synthetic oligonucleotide
acuaaaauuaaaauuugag

SEQ ID NO: 2213844 - RNA, 19 nt, Artificial Sequence
  Description of Artificial Sequence: Synthetic oligonucleotide
cuucaaaacuggcaaaucg

SEQ ID NO: 2213845 - RNA, 19 nt, Artificial Sequence
  Description of Artificial Sequence: Synthetic oligonucleotide
uucaaaacuggcaaaucgc

SEQ ID NO: 2213846 - RNA, 19 nt, Artificial Sequence
  Description of Artificial Sequence: Synthetic oligonucleotide
uaggauggaacuaaaauua

SEQ ID NO: 2213847 - RNA, 19 nt, Artificial Sequence
  Description of Artificial Sequence: Synthetic oligonucleotide
ucuguugacauagucagag

SEQ ID NO: 2213848 - RNA, 19 nt, Artificial Sequence
  Description of Artificial Sequence: Synthetic oligonucleotide
ucuaggauggaacuaaaau

SEQ ID NO: 2213849 - RNA, 19 nt, Artificial Sequence
  Description of Artificial Sequence: Synthetic oligonucleotide
cucaauacagucuuucagc

SEQ ID NO: 2213850 - RNA, 19 nt, Artificial Sequence
  Description of Artificial Sequence: Synthetic oligonucleotide
acauaaucaaaggaggaac

SEQ ID NO: 2213851 - RNA, 19 nt, Artificial Sequence
  Description of Artificial Sequence: Synthetic oligonucleotide
agaggcaugcucucuaagc

SEQ ID NO: 2213852 - RNA, 19 nt, Artificial Sequence
  Description of Artificial Sequence: Synthetic oligonucleotide
cuguaggguacuuaaaggg

SEQ ID NO: 2213853 - RNA, 19 nt, Artificial Sequence
  Description of Artificial Sequence: Synthetic oligonucleotide
uucauauugauggugaagu

SEQ ID NO: 2213854 - RNA, 19 nt, Artificial Sequence
  Description of Artificial Sequence: Synthetic oligonucleotide
uugcauuuguuguagaugu

SEQ ID NO: 2213855 - RNA, 19 nt, Artificial Sequence
  Description of Artificial Sequence: Synthetic oligonucleotide
gauggcuauaaauccagag

SEQ ID NO: 2213856 - RNA, 19 nt, Artificial Sequence
  Description of Artificial Sequence: Synthetic oligonucleotide
ugaaguauacuugcgauga

SEQ ID NO: 2213857 - RNA, 19 nt, Artificial Sequence
  Description of Artificial Sequence: Synthetic oligonucleotide
aguaaucucaggcaggacu

SEQ ID NO: 2213858 - RNA, 19 nt, Artificial Sequence
  Description of Artificial Sequence: Synthetic oligonucleotide
ugacaguaaucucaggcag

SEQ ID NO: 2213859 - RNA, 19 nt, Artificial Sequence
  Description of Artificial Sequence: Synthetic oligonucleotide
uacuuaaagggaagaaugc

SEQ ID NO: 2213860 - RNA, 19 nt, Artificial Sequence
  Description of Artificial Sequence: Synthetic oligonucleotide
uauacagacgucuccaaga

SEQ ID NO: 2213861 - RNA, 19 nt, Artificial Sequence
  Description of Artificial Sequence: Synthetic oligonucleotide
gacuguaggguacuuaaag

SEQ ID NO: 2213862 - RNA, 19 nt, Artificial Sequence
  Description of Artificial Sequence: Synthetic oligonucleotide
uuaagaacugauacagcug

SEQ ID NO: 2213863 - RNA, 19 nt, Artificial Sequence
  Description of Artificial Sequence: Synthetic oligonucleotide
cugaccaaaguccaugugg

SEQ ID NO: 2213864 - RNA, 19 nt, Artificial Sequence
  Description of Artificial Sequence: Synthetic oligonucleotide
agaagacauaaucaaagga

SEQ ID NO: 2213865 - RNA, 19 nt, Artificial Sequence
  Description of Artificial Sequence: Synthetic oligonucleotide
uaugcgaucagaucugugu

SEQ ID NO: 2213866 - RNA, 19 nt, Artificial Sequence
  Description of Artificial Sequence: Synthetic oligonucleotide
uugaccagaauucuucaca

SEQ ID NO: 2213867 - RNA, 19 nt, Artificial Sequence
  Description of Artificial Sequence: Synthetic oligonucleotide
uaaucaaaggaggaacagg

SEQ ID NO: 2213868 - RNA, 19 nt, Artificial Sequence
  Description of Artificial Sequence: Synthetic oligonucleotide
auacagacgucuccaagac

SEQ ID NO: 2213869 - RNA, 19 nt, Artificial Sequence
  Description of Artificial Sequence: Synthetic oligonucleotide
auuguccucuucucaauac

SEQ ID NO: 2213870 - RNA, 19 nt, Artificial Sequence
  Description of Artificial Sequence: Synthetic oligonucleotide
guacuuaaagggaagaaug

SEQ ID NO: 2213871 - RNA, 19 nt, Artificial Sequence
  Description of Artificial Sequence: Synthetic oligonucleotide
aguauacuugcgaugaccg

SEQ ID NO: 2213872 - RNA, 19 nt, Artificial Sequence
  Description of Artificial Sequence: Synthetic oligonucleotide
gaaugcaagacagagaaaa

SEQ ID NO: 2213873 - RNA, 19 nt, Artificial Sequence
  Description of Artificial Sequence: Synthetic oligonucleotide
agaacugauacagcugacc

SEQ ID NO: 2213874 - RNA, 19 nt, Artificial Sequence
  Description of Artificial Sequence: Synthetic oligonucleotide
aaaucgccgcuguuucucc

SEQ ID NO: 2213875 - RNA, 19 nt, Artificial Sequence
  Description of Artificial Sequence: Synthetic oligonucleotide
ucaguauacagacgucucc

SEQ ID NO: 2213876 - RNA, 19 nt, Artificial Sequence
  Description of Artificial Sequence: Synthetic oligonucleotide
ggaggucuaacucugagag

SEQ ID NO: 2213877 - RNA, 19 nt, Artificial Sequence
  Description of Artificial Sequence: Synthetic oligonucleotide
uguccuuccacaccaaagu

SEQ ID NO: 2213878 - RNA, 19 nt, Artificial Sequence
  Description of Artificial Sequence: Synthetic oligonucleotide
aaguccaugugguuuccuc

SEQ ID NO: 2213879 - RNA, 19 nt, Artificial Sequence
  Description of Artificial Sequence: Synthetic oligonucleotide
uuugcauuuguuguagaug

SEQ ID NO: 2213880 - RNA, 19 nt, Artificial Sequence
  Description of Artificial Sequence: Synthetic oligonucleotide
gcaugcuaaacccagacag

SEQ ID NO: 2213881 - RNA, 19 nt, Artificial Sequence
  Description of Artificial Sequence: Synthetic oligonucleotide
gagaaaacaucuccauugc

SEQ ID NO: 2213882 - RNA, 19 nt, Artificial Sequence
  Description of Artificial Sequence: Synthetic oligonucleotide
acagacgucuccaagacag

SEQ ID NO: 2213883 - RNA, 19 nt, Artificial Sequence
  Description of Artificial Sequence: Synthetic oligonucleotide
caaaacuggcaaaucgccg

SEQ ID NO: 2213884 - RNA, 19 nt, Artificial Sequence
  Description of Artificial Sequence: Synthetic oligonucleotide
uguggcguucaguauacag

SEQ ID NO: 2213885 - RNA, 19 nt, Artificial Sequence
  Description of Artificial Sequence: Synthetic oligonucleotide
cucuaagccagucuguggc

SEQ ID NO: 2213886 - RNA, 19 nt, Artificial Sequence
  Description of Artificial Sequence: Synthetic oligonucleotide
uggcgaauuaaaauucucu

SEQ ID NO: 2213887 - RNA, 19 nt, Artificial Sequence
  Description of Artificial Sequence: Synthetic oligonucleotide
ucgauggcgaauuaaaauu

SEQ ID NO: 2213888 - RNA, 19 nt, Artificial Sequence
  Description of Artificial Sequence: Synthetic oligonucleotide
ugaccaaaguccauguggu

SEQ ID NO: 2213889 - RNA, 19 nt, Artificial Sequence
  Description of Artificial Sequence: Synthetic oligonucleotide
agaugugauggcuauaaau

SEQ ID NO: 2213890 - RNA, 19 nt, Artificial Sequence
  Description of Artificial Sequence: Synthetic oligonucleotide
guacaucuggaaaacaucc

SEQ ID NO: 2213891 - RNA, 19 nt, Artificial Sequence
  Description of Artificial Sequence: Synthetic oligonucleotide
gaaaacauccccacagccc

SEQ ID NO: 2213892 - RNA, 19 nt, Artificial Sequence
  Description of Artificial Sequence: Synthetic oligonucleotide
aggucuaacucugagagcu

SEQ ID NO: 2213893 - RNA, 19 nt, Artificial Sequence
  Description of Artificial Sequence: Synthetic oligonucleotide
gacauagucagaggcaugc

SEQ ID NO: 2213894 - RNA, 19 nt, Artificial Sequence
  Description of Artificial Sequence: Synthetic oligonucleotide
uuuaguuuucugagucuug

SEQ ID NO: 2213895 - RNA, 19 nt, Artificial Sequence
  Description of Artificial Sequence: Synthetic oligonucleotide
uucccaggcaugcuaaacc

SEQ ID NO: 2213896 - RNA, 19 nt, Artificial Sequence
  Description of Artificial Sequence: Synthetic oligonucleotide
auuuaagaacugauacagc

SEQ ID NO: 2213897 - RNA, 19 nt, Artificial Sequence
  Description of Artificial Sequence: Synthetic oligonucleotide
gugagggugagauccacgg

SEQ ID NO: 2213898 - RNA, 19 nt, Artificial Sequence
  Description of Artificial Sequence: Synthetic oligonucleotide
aagacagagaaaacaucuc

SEQ ID NO: 2213899 - RNA, 19 nt, Artificial Sequence
  Description of Artificial Sequence: Synthetic oligonucleotide
uacaucuggaaaacauccc

SEQ ID NO: 2213900 - RNA, 19 nt, Artificial Sequence
  Description of Artificial Sequence: Synthetic oligonucleotide
cucaccagggaacauacug

SEQ ID NO: 2213901 - RNA, 19 nt, Artificial Sequence
  Description of Artificial Sequence: Synthetic oligonucleotide
uggcguucaguauacagac

SEQ ID NO: 2213902 - RNA, 19 nt, Artificial Sequence
  Description of Artificial Sequence: Synthetic oligonucleotide
cgaauuaaaauucucuucc

SEQ ID NO: 2213903 - RNA, 19 nt, Artificial Sequence
  Description of Artificial Sequence: Synthetic oligonucleotide
agccccuuugcucagucac

SEQ ID NO: 2213904 - RNA, 19 nt, Artificial Sequence
  Description of Artificial Sequence: Synthetic oligonucleotide
uuaguuuucugagucuuga

SEQ ID NO: 2213905 - RNA, 19 nt, Artificial Sequence
  Description of Artificial Sequence: Synthetic oligonucleotide
augcuaaacccagacaggg

SEQ ID NO: 2213906 - RNA, 19 nt, Artificial Sequence
  Description of Artificial Sequence: Synthetic oligonucleotide
uauugauggugaaguauac

SEQ ID NO: 2213907 - RNA, 19 nt, Artificial Sequence
  Description of Artificial Sequence: Synthetic oligonucleotide
uggugaaguauacuugcga

SEQ ID NO: 2213908 - RNA, 19 nt, Artificial Sequence
  Description of Artificial Sequence: Synthetic oligonucleotide
gaauuaaaauucucuucca

SEQ ID NO: 2213909 - RNA, 19 nt, Artificial Sequence
  Description of Artificial Sequence: Synthetic oligonucleotide
caugcuaaacccagacagg

SEQ ID NO: 2213910 - RNA, 19 nt, Artificial Sequence
  Description of Artificial Sequence: Synthetic oligonucleotide
aggcaugcuaaacccagac

SEQ ID NO: 2213911 - RNA, 19 nt, Artificial Sequence
  Description of Artificial Sequence: Synthetic oligonucleotide
agucuuucagcucugcuaa

SEQ ID NO: 2213912 - RNA, 19 nt, Artificial Sequence
  Description of Artificial Sequence: Synthetic oligonucleotide
uucucgauggcgaauuaaa

SEQ ID NO: 2213913 - RNA, 19 nt, Artificial Sequence
  Description of Artificial Sequence: Synthetic oligonucleotide
uggaaaacauccccacagc

SEQ ID NO: 2213914 - RNA, 19 nt, Artificial Sequence
  Description of Artificial Sequence: Synthetic oligonucleotide
acuuuguaggccuucuaca

SEQ ID NO: 2213915 - RNA, 19 nt, Artificial Sequence
  Description of Artificial Sequence: Synthetic oligonucleotide
ugugccauccaaaggcaug

SEQ ID NO: 2213916 - RNA, 19 nt, Artificial Sequence
  Description of Artificial Sequence: Synthetic oligonucleotide
ucuaagccagucuguggcg

SEQ ID NO: 2213917 - RNA, 19 nt, Artificial Sequence
  Description of Artificial Sequence: Synthetic oligonucleotide
uauacuugcgaugaccguc

SEQ ID NO: 2213918 - RNA, 19 nt, Artificial Sequence
  Description of Artificial Sequence: Synthetic oligonucleotide
cuuucagcucugcuaaugc

SEQ ID NO: 2213919 - RNA, 19 nt, Artificial Sequence
  Description of Artificial Sequence: Synthetic oligonucleotide
uccucuucucaauacaguc

SEQ ID NO: 2213920 - RNA, 19 nt, Artificial Sequence
  Description of Artificial Sequence: Synthetic oligonucleotide
uccuuccacaccaaaguac

SEQ ID NO: 2213921 - RNA, 19 nt, Artificial Sequence
  Description of Artificial Sequence: Synthetic oligonucleotide
uuugugccauccaaaggca

SEQ ID NO: 2213922 - RNA, 19 nt, Artificial Sequence
  Description of Artificial Sequence: Synthetic oligonucleotide
caguuuaguuuucugaguc

SEQ ID NO: 2213923 - RNA, 19 nt, Artificial Sequence
  Description of Artificial Sequence: Synthetic oligonucleotide
cuuugcucagucacugucc

SEQ ID NO: 2213924 - RNA, 19 nt, Artificial Sequence
  Description of Artificial Sequence: Synthetic oligonucleotide
uuuugcauuuguuguagau

SEQ ID NO: 2213925 - RNA, 19 nt, Artificial Sequence
  Description of Artificial Sequence: Synthetic oligonucleotide
ucucuaagccagucugugg

SEQ ID NO: 2213926 - RNA, 19 nt, Artificial Sequence
  Description of Artificial Sequence: Synthetic oligonucleotide
uuugcucagucacuguccu

SEQ ID NO: 2213927 - RNA, 19 nt, Artificial Sequence
  Description of Artificial Sequence: Synthetic oligonucleotide
ucuggcuccauggacacug

SEQ ID NO: 2213928 - RNA, 19 nt, Artificial Sequence
  Description of Artificial Sequence: Synthetic oligonucleotide
cacugaauaccuuuucuuc

SEQ ID NO: 2213929 - RNA, 19 nt, Artificial Sequence
  Description of Artificial Sequence: Synthetic oligonucleotide
ugauacagcugaccaaagu

SEQ ID NO: 2213930 - RNA, 19 nt, Artificial Sequence
  Description of Artificial Sequence: Synthetic oligonucleotide
cugggaucuacucagcgug

SEQ ID NO: 2213931 - RNA, 19 nt, Artificial Sequence
  Description of Artificial Sequence: Synthetic oligonucleotide
auacuugcgaugaccgucc

SEQ ID NO: 2213932 - RNA, 19 nt, Artificial Sequence
  Description of Artificial Sequence: Synthetic oligonucleotide
auugcuuccccggagaagu

SEQ ID NO: 2213933 - RNA, 19 nt, Artificial Sequence
  Description of Artificial Sequence: Synthetic oligonucleotide
uuucagcucugcuaaugcc

SEQ ID NO: 2213934 - RNA, 19 nt, Artificial Sequence
  Description of Artificial Sequence: Synthetic oligonucleotide
ucacaagcacuuuguaggc

SEQ ID NO: 2213935 - RNA, 19 nt, Artificial Sequence
  Description of Artificial Sequence: Synthetic oligonucleotide
cauaaucaaaggaggaaca

SEQ ID NO: 2213936 - RNA, 19 nt, Artificial Sequence
  Description of Artificial Sequence: Synthetic oligonucleotide
aacauacuggccaggaggu

SEQ ID NO: 2213937 - RNA, 19 nt, Artificial Sequence
  Description of Artificial Sequence: Synthetic oligonucleotide
acuuaaagggaagaaugca

SEQ ID NO: 2213938 - RNA, 19 nt, Artificial Sequence
  Description of Artificial Sequence: Synthetic oligonucleotide
gugaaguauacuugcgaug

SEQ ID NO: 2213939 - RNA, 19 nt, Artificial Sequence
  Description of Artificial Sequence: Synthetic oligonucleotide
aguuuaguuuucugagucu

SEQ ID NO: 2213940 - RNA, 19 nt, Artificial Sequence
  Description of Artificial Sequence: Synthetic oligonucleotide
aacugauacagcugaccaa

SEQ ID NO: 2213941 - RNA, 19 nt, Artificial Sequence
  Description of Artificial Sequence: Synthetic oligonucleotide
uccaugugguuuccucugg

SEQ ID NO: 2213942 - RNA, 19 nt, Artificial Sequence
  Description of Artificial Sequence: Synthetic oligonucleotide
aaacuggcaaaucgccgcu

SEQ ID NO: 2213943 - RNA, 19 nt, Artificial Sequence
  Description of Artificial Sequence: Synthetic oligonucleotide
guaaucucaggcaggacug

SEQ ID NO: 2213944 - RNA, 19 nt, Artificial Sequence
  Description of Artificial Sequence: Synthetic oligonucleotide
ucuguggcguucaguauac

SEQ ID NO: 2213945 - RNA, 19 nt, Artificial Sequence
  Description of Artificial Sequence: Synthetic oligonucleotide
aggacuguaggguacuuaa

SEQ ID NO: 2213946 - RNA, 19 nt, Artificial Sequence
  Description of Artificial Sequence: Synthetic oligonucleotide
cacuuuguaggccuucuac

SEQ ID NO: 2213947 - RNA, 19 nt, Artificial Sequence
  Description of Artificial Sequence: Synthetic oligonucleotide
acgucuccaagacaguucu

SEQ ID NO: 2213948 - RNA, 19 nt, Artificial Sequence
  Description of Artificial Sequence: Synthetic oligonucleotide
agaaaacaucuccauugcu

SEQ ID NO: 2213949 - RNA, 19 nt, Artificial Sequence
  Description of Artificial Sequence: Synthetic oligonucleotide
acucagcgugaucugacag

SEQ ID NO: 2213950 - RNA, 19 nt, Artificial Sequence
  Description of Artificial Sequence: Synthetic oligonucleotide
uugacauagucagaggcau

SEQ ID NO: 2213951 - RNA, 19 nt, Artificial Sequence
  Description of Artificial Sequence: Synthetic oligonucleotide
aaaguacaucuggaaaaca

SEQ ID NO: 2213952 - RNA, 19 nt, Artificial Sequence
  Description of Artificial Sequence: Synthetic oligonucleotide
ucucgauggcgaauuaaaa

SEQ ID NO: 2213953 - RNA, 19 nt, Artificial Sequence
  Description of Artificial Sequence: Synthetic oligonucleotide
aaauucucuuccaguuuag

SEQ ID NO: 2213954 - RNA, 19 nt, Artificial Sequence
  Description of Artificial Sequence: Synthetic oligonucleotide
cuuugcccacuccagaaug

SEQ ID NO: 2213955 - RNA, 19 nt, Artificial Sequence
  Description of Artificial Sequence: Synthetic oligonucleotide
caccagggaacauacuggc

SEQ ID NO: 2213956 - RNA, 19 nt, Artificial Sequence
  Description of Artificial Sequence: Synthetic oligonucleotide
agauccacgggcugggcug

SEQ ID NO: 2213957 - RNA, 19 nt, Artificial Sequence
  Description of Artificial Sequence: Synthetic oligonucleotide
cuguccuuccacaccaaag

SEQ ID NO: 2213958 - RNA, 19 nt, Artificial Sequence
  Description of Artificial Sequence: Synthetic oligonucleotide
gagaaguccagguucauau

SEQ ID NO: 2213959 - RNA, 19 nt, Artificial Sequence
  Description of Artificial Sequence: Synthetic oligonucleotide
ugcagguaugcgaucagau

SEQ ID NO: 2213960 - RNA, 19 nt, Artificial Sequence
  Description of Artificial Sequence: Synthetic oligonucleotide
agacaguucuucugcaggu

SEQ ID NO: 2213961 - RNA, 19 nt, Artificial Sequence
  Description of Artificial Sequence: Synthetic oligonucleotide
agcgugaucugacaguaau

SEQ ID NO: 2213962 - RNA, 19 nt, Artificial Sequence
  Description of Artificial Sequence: Synthetic oligonucleotide
uccauugcuuccccggaga

SEQ ID NO: 2213963 - RNA, 19 nt, Artificial Sequence
  Description of Artificial Sequence: Synthetic oligonucleotide
ucacugugagcucauucuc

SEQ ID NO: 2213964 - RNA, 19 nt, Artificial Sequence
  Description of Artificial Sequence: Synthetic oligonucleotide
cuugcgaugaccgucccuc

SEQ ID NO: 2213965 - RNA, 19 nt, Artificial Sequence
  Description of Artificial Sequence: Synthetic oligonucleotide
gcuaaacccagacagggac

SEQ ID NO: 2213966 - RNA, 19 nt, Artificial Sequence
  Description of Artificial Sequence: Synthetic oligonucleotide
aauccagagccuggugagg

SEQ ID NO: 2213967 - RNA, 19 nt, Artificial Sequence
  Description of Artificial Sequence: Synthetic oligonucleotide
uucuaggauggaacuaaaa

SEQ ID NO: 2213968 - RNA, 19 nt, Artificial Sequence
  Description of Artificial Sequence: Synthetic oligonucleotide
acacugaauaccuuuucuu

SEQ ID NO: 2213969 - RNA, 19 nt, Artificial Sequence
  Description of Artificial Sequence: Synthetic oligonucleotide
auauugauggugaaguaua

SEQ ID NO: 2213970 - RNA, 19 nt, Artificial Sequence
  Description of Artificial Sequence: Synthetic oligonucleotide
gagcucauucucaccaggg

SEQ ID NO: 2213971 - RNA, 19 nt, Artificial Sequence
  Description of Artificial Sequence: Synthetic oligonucleotide
cuugaccagaauucuucac

SEQ ID NO: 2213972 - RNA, 19 nt, Artificial Sequence
  Description of Artificial Sequence: Synthetic oligonucleotide
gaucuacucagcgugaucu

SEQ ID NO: 2213973 - RNA, 19 nt, Artificial Sequence
  Description of Artificial Sequence: Synthetic oligonucleotide
auggacacugaauaccuuu

SEQ ID NO: 2213974 - RNA, 19 nt, Artificial Sequence
  Description of Artificial Sequence: Synthetic oligonucleotide
gucuaacucugagagcugg

SEQ ID NO: 2213975 - RNA, 19 nt, Artificial Sequence
  Description of Artificial Sequence: Synthetic oligonucleotide
ugcuaaacccagacaggga

SEQ ID NO: 2213976 - RNA, 19 nt, Artificial Sequence
  Description of Artificial Sequence: Synthetic oligonucleotide
ugauggcuauaaauccaga

SEQ ID NO: 2213977 - RNA, 19 nt, Artificial Sequence
  Description of Artificial Sequence: Synthetic oligonucleotide
ucuacucagcgugaucuga

SEQ ID NO: 2213978 - RNA, 19 nt, Artificial Sequence
  Description of Artificial Sequence: Synthetic oligonucleotide
agacauaaucaaaggagga

SEQ ID NO: 2213979 - RNA, 19 nt, Artificial Sequence
  Description of Artificial Sequence: Synthetic oligonucleotide
ucauauugauggugaagua

SEQ ID NO: 2213980 - RNA, 19 nt, Artificial Sequence
  Description of Artificial Sequence: Synthetic oligonucleotide
accacaccagguuucccag

SEQ ID NO: 2213981 - RNA, 19 nt, Artificial Sequence
  Description of Artificial Sequence: Synthetic oligonucleotide
cuucuacacaaaccacacc

SEQ ID NO: 2213982 - RNA, 19 nt, Artificial Sequence
  Description of Artificial Sequence: Synthetic oligonucleotide
gaugaccgucccuccauug

SEQ ID NO: 2213983 - RNA, 19 nt, Artificial Sequence
  Description of Artificial Sequence: Synthetic oligonucleotide
auggcgaauuaaaauucuc

SEQ ID NO: 2213984 - RNA, 19 nt, Artificial Sequence
  Description of Artificial Sequence: Synthetic oligonucleotide
cagguaugcgaucagaucu

SEQ ID NO: 2213985 - RNA, 19 nt, Artificial Sequence
  Description of Artificial Sequence: Synthetic oligonucleotide
aggaggucuaacucugaga

SEQ ID NO: 2213986 - RNA, 19 nt, Artificial Sequence
  Description of Artificial Sequence: Synthetic oligonucleotide
gcgaauuaaaauucucuuc

SEQ ID NO: 2213987 - RNA, 19 nt, Artificial Sequence
  Description of Artificial Sequence: Synthetic oligonucleotide
acaguucuucugcagguau

SEQ ID NO: 2213988 - RNA, 19 nt, Artificial Sequence
  Description of Artificial Sequence: Synthetic oligonucleotide
cuacucagcgugaucugac

SEQ ID NO: 2213989 - RNA, 19 nt, Artificial Sequence
  Description of Artificial Sequence: Synthetic oligonucleotide
gacacugaauaccuuuucu

SEQ ID NO: 2213990 - RNA, 19 nt, Artificial Sequence
  Description of Artificial Sequence: Synthetic oligonucleotide
uacagacgucuccaagaca

SEQ ID NO: 2213991 - RNA, 19 nt, Artificial Sequence
  Description of Artificial Sequence: Synthetic oligonucleotide
uggacacugaauaccuuuu

SEQ ID NO: 2213992 - RNA, 19 nt, Artificial Sequence
  Description of Artificial Sequence: Synthetic oligonucleotide
agguucauauugaugguga

SEQ ID NO: 2213993 - RNA, 19 nt, Artificial Sequence
  Description of Artificial Sequence: Synthetic oligonucleotide
uaguuuucugagucuugac

SEQ ID NO: 2213994 - RNA, 19 nt, Artificial Sequence
  Description of Artificial Sequence: Synthetic oligonucleotide
gaggucuaacucugagagc

SEQ ID NO: 2213995 - RNA, 19 nt, Artificial Sequence
  Description of Artificial Sequence: Synthetic oligonucleotide
gaaguauacuugcgaugac

SEQ ID NO: 2213996 - RNA, 19 nt, Artificial Sequence
  Description of Artificial Sequence: Synthetic oligonucleotide
agaucuguguucagcuggg

SEQ ID NO: 2213997 - RNA, 19 nt, Artificial Sequence
  Description of Artificial Sequence: Synthetic oligonucleotide
ugcgaucagaucuguguuc

SEQ ID NO: 2213998 - RNA, 19 nt, Artificial Sequence
  Description of Artificial Sequence: Synthetic oligonucleotide
ucagcgugaucugacagua

SEQ ID NO: 2213999 - RNA, 19 nt, Artificial Sequence
  Description of Artificial Sequence: Synthetic oligonucleotide
auggugaaguauacuugcg

SEQ ID NO: 2214000 - RNA, 19 nt, Artificial Sequence
  Description of Artificial Sequence: Synthetic oligonucleotide
gcuauaaauccagagccug

SEQ ID NO: 2214001 - RNA, 19 nt, Artificial Sequence
  Description of Artificial Sequence: Synthetic oligonucleotide
aguauacagacgucuccaa

SEQ ID NO: 2214002 - RNA, 19 nt, Artificial Sequence
  Description of Artificial Sequence: Synthetic oligonucleotide
cagggaacauacuggccag

SEQ ID NO: 2214003 - RNA, 19 nt, Artificial Sequence
  Description of Artificial Sequence: Synthetic oligonucleotide
agcucauucucaccaggga

SEQ ID NO: 2214004 - RNA, 19 nt, Artificial Sequence
  Description of Artificial Sequence: Synthetic oligonucleotide
cuccauggacacugaauac

SEQ ID NO: 2214005 - RNA, 19 nt, Artificial Sequence
  Description of Artificial Sequence: Synthetic oligonucleotide
uccgacagccccuuugcuc

SEQ ID NO: 2214006 - RNA, 19 nt, Artificial Sequence
  Description of Artificial Sequence: Synthetic oligonucleotide
agcugaccaaaguccaugu

SEQ ID NO: 2214007 - RNA, 19 nt, Artificial Sequence
  Description of Artificial Sequence: Synthetic oligonucleotide
cugggcuuuccuuggcagg

SEQ ID NO: 2214008 - RNA, 19 nt, Artificial Sequence
  Description of Artificial Sequence: Synthetic oligonucleotide
caauacagucuuucagcuc

SEQ ID NO: 2214009 - RNA, 19 nt, Artificial Sequence
  Description of Artificial Sequence: Synthetic oligonucleotide
aggcaugcucucuaagcca

SEQ ID NO: 2214010 - RNA, 19 nt, Artificial Sequence
  Description of Artificial Sequence: Synthetic oligonucleotide
uacucagcgugaucugaca

SEQ ID NO: 2214011 - RNA, 19 nt, Artificial Sequence
  Description of Artificial Sequence: Synthetic oligonucleotide
cauucuaggauggaacuaa

SEQ ID NO: 2214012 - RNA, 19 nt, Artificial Sequence
  Description of Artificial Sequence: Synthetic oligonucleotide
cugaauaccuuuucuucaa

SEQ ID NO: 2214013 - RNA, 19 nt, Artificial Sequence
  Description of Artificial Sequence: Synthetic oligonucleotide
cuaucucaaccaugcugag

SEQ ID NO: 2214014 - RNA, 19 nt, Artificial Sequence
  Description of Artificial Sequence: Synthetic oligonucleotide
ccuucuacacaaaccacac

SEQ ID NO: 2214015 - RNA, 19 nt, Artificial Sequence
  Description of Artificial Sequence: Synthetic oligonucleotide
ugggaucuacucagcguga

SEQ ID NO: 2214016 - RNA, 19 nt, Artificial Sequence
  Description of Artificial Sequence: Synthetic oligonucleotide
augaccgucccuccauugu

SEQ ID NO: 2214017 - RNA, 19 nt, Artificial Sequence
  Description of Artificial Sequence: Synthetic oligonucleotide
auucuaucucaaccaugcu

SEQ ID NO: 2214018 - RNA, 19 nt, Artificial Sequence
  Description of Artificial Sequence: Synthetic oligonucleotide
aagccagucuguggcguuc

SEQ ID NO: 2214019 - RNA, 19 nt, Artificial Sequence
  Description of Artificial Sequence: Synthetic oligonucleotide
accagggaacauacuggcc

SEQ ID NO: 2214020 - RNA, 19 nt, Artificial Sequence
  Description of Artificial Sequence: Synthetic oligonucleotide
aaucgccgcuguuucucca

SEQ ID NO: 2214021 - RNA, 19 nt, Artificial Sequence
  Description of Artificial Sequence: Synthetic oligonucleotide
uagaugugauggcuauaaa

SEQ ID NO: 2214022 - RNA, 19 nt, Artificial Sequence
  Description of Artificial Sequence: Synthetic oligonucleotide
ccaaaggcaugucuucucg

SEQ ID NO: 2214023 - RNA, 19 nt, Artificial Sequence
  Description of Artificial Sequence: Synthetic oligonucleotide
ugcgaugaccgucccucca

SEQ ID NO: 2214024 - RNA, 19 nt, Artificial Sequence
  Description of Artificial Sequence: Synthetic oligonucleotide
augcgaucagaucuguguu

SEQ ID NO: 2214025 - RNA, 19 nt, Artificial Sequence
  Description of Artificial Sequence: Synthetic oligonucleotide
ggugagauccacgggcugg

SEQ ID NO: 2214026 - RNA, 19 nt, Artificial Sequence
  Description of Artificial Sequence: Synthetic oligonucleotide
caaaucgccgcuguuucuc

SEQ ID NO: 2214027 - RNA, 19 nt, Artificial Sequence
  Description of Artificial Sequence: Synthetic oligonucleotide
guggcguucaguauacaga

SEQ ID NO: 2214028 - RNA, 19 nt, Artificial Sequence
  Description of Artificial Sequence: Synthetic oligonucleotide
gaaggugagguaucucugu

SEQ ID NO: 2214029 - RNA, 19 nt, Artificial Sequence
  Description of Artificial Sequence: Synthetic oligonucleotide
agguccgacagccccuuug

SEQ ID NO: 2214030 - RNA, 19 nt, Artificial Sequence
  Description of Artificial Sequence: Synthetic oligonucleotide
ugggccucggcccauucua

SEQ ID NO: 2214031 - RNA, 19 nt, Artificial Sequence
  Description of Artificial Sequence: Synthetic oligonucleotide
caucuccauugcuuccccg

SEQ ID NO: 2214032 - RNA, 19 nt, Artificial Sequence
  Description of Artificial Sequence: Synthetic oligonucleotide
uccccggagaaguccaggu

SEQ ID NO: 2214033 - RNA, 19 nt, Artificial Sequence
  Description of Artificial Sequence: Synthetic oligonucleotide
uccauccuuugugccaucc

SEQ ID NO: 2214034 - RNA, 19 nt, Artificial Sequence
  Description of Artificial Sequence: Synthetic oligonucleotide
gugaucugacaguaaucuc

SEQ ID NO: 2214035 - RNA, 19 nt, Artificial Sequence
  Description of Artificial Sequence: Synthetic oligonucleotide
ggaacauacuggccaggag

SEQ ID NO: 2214036 - RNA, 19 nt, Artificial Sequence
  Description of Artificial Sequence: Synthetic oligonucleotide
cugugagcucauucucacc

SEQ ID NO: 2214037 - RNA, 19 nt, Artificial Sequence
  Description of Artificial Sequence: Synthetic oligonucleotide
uugugccauccaaaggcau

SEQ ID NO: 2214038 - RNA, 19 nt, Artificial Sequence
  Description of Artificial Sequence: Synthetic oligonucleotide
guucaguauacagacgucu

SEQ ID NO: 2214039 - RNA, 19 nt, Artificial Sequence
  Description of Artificial Sequence: Synthetic oligonucleotide
agccccuggcauuuaagaa

SEQ ID NO: 2214040 - RNA, 19 nt, Artificial Sequence
  Description of Artificial Sequence: Synthetic oligonucleotide
caguauacagacgucucca

SEQ ID NO: 2214041 - RNA, 19 nt, Artificial Sequence
  Description of Artificial Sequence: Synthetic oligonucleotide
aggguacuuaaagggaaga

SEQ ID NO: 2214042 - RNA, 19 nt, Artificial Sequence
  Description of Artificial Sequence: Synthetic oligonucleotide
gugagauccacgggcuggg

SEQ ID NO: 2214043 - RNA, 19 nt, Artificial Sequence
  Description of Artificial Sequence: Synthetic oligonucleotide
guucuucugcagguaugcg

SEQ ID NO: 2214044 - RNA, 19 nt, Artificial Sequence
  Description of Artificial Sequence: Synthetic oligonucleotide
uagucagaggcaugcucuc

SEQ ID NO: 2214045 - RNA, 19 nt, Artificial Sequence
  Description of Artificial Sequence: Synthetic oligonucleotide
gauggcgaauuaaaauucu

SEQ ID NO: 2214046 - RNA, 19 nt, Artificial Sequence
  Description of Artificial Sequence: Synthetic oligonucleotide
aucucaggcaggacuguag

SEQ ID NO: 2214047 - RNA, 19 nt, Artificial Sequence
  Description of Artificial Sequence: Synthetic oligonucleotide
cauccuuugugccauccaa

SEQ ID NO: 2214048 - RNA, 19 nt, Artificial Sequence
  Description of Artificial Sequence: Synthetic oligonucleotide
ucucaaccaugcugagaca

SEQ ID NO: 2214049 - RNA, 19 nt, Artificial Sequence
  Description of Artificial Sequence: Synthetic oligonucleotide
agguaugcgaucagaucug

SEQ ID NO: 2214050 - RNA, 19 nt, Artificial Sequence
  Description of Artificial Sequence: Synthetic oligonucleotide
cucgauggcgaauuaaaau

SEQ ID NO: 2214051 - RNA, 19 nt, Artificial Sequence
  Description of Artificial Sequence: Synthetic oligonucleotide
aacuggcaaaucgccgcug

SEQ ID NO: 2214052 - RNA, 19 nt, Artificial Sequence
  Description of Artificial Sequence: Synthetic oligonucleotide
uacagucuuucagcucugc

SEQ ID NO: 2214053 - RNA, 19 nt, Artificial Sequence
  Description of Artificial Sequence: Synthetic oligonucleotide
uccuuggcaggggaaggug

SEQ ID NO: 2214054 - RNA, 19 nt, Artificial Sequence
  Description of Artificial Sequence: Synthetic oligonucleotide
ggcaugcucucuaagccag

SEQ ID NO: 2214055 - RNA, 19 nt, Artificial Sequence
  Description of Artificial Sequence: Synthetic oligonucleotide
caccaaaguacaucuggaa

SEQ ID NO: 2214056 - RNA, 19 nt, Artificial Sequence
  Description of Artificial Sequence: Synthetic oligonucleotide
ggugaaguauacuugcgau

SEQ ID NO: 2214057 - RNA, 19 nt, Artificial Sequence
  Description of Artificial Sequence: Synthetic oligonucleotide
uaaucucaggcaggacugu

SEQ ID NO: 2214058 - RNA, 19 nt, Artificial Sequence
  Description of Artificial Sequence: Synthetic oligonucleotide
aaucucaggcaggacugua

SEQ ID NO: 2214059 - RNA, 19 nt, Artificial Sequence
  Description of Artificial Sequence: Synthetic oligonucleotide
agguuucccaggcaugcua

SEQ ID NO: 2214060 - RNA, 19 nt, Artificial Sequence
  Description of Artificial Sequence: Synthetic oligonucleotide
uggcaaaucgccgcuguuu

SEQ ID NO: 2214061 - RNA, 19 nt, Artificial Sequence
  Description of Artificial Sequence: Synthetic oligonucleotide
acuguccuuccacaccaaa

SEQ ID NO: 2214062 - RNA, 19 nt, Artificial Sequence
  Description of Artificial Sequence: Synthetic oligonucleotide
aggauggaacuaaaauuaa

SEQ ID NO: 2214063 - RNA, 19 nt, Artificial Sequence
  Description of Artificial Sequence: Synthetic oligonucleotide
ucuucucgauggcgaauua

SEQ ID NO: 2214064 - RNA, 19 nt, Artificial Sequence
  Description of Artificial Sequence: Synthetic oligonucleotide
agccuggugagggugagau

SEQ ID NO: 2214065 - RNA, 19 nt, Artificial Sequence
  Description of Artificial Sequence: Synthetic oligonucleotide
cauauugauggugaaguau

SEQ ID NO: 2214066 - RNA, 19 nt, Artificial Sequence
  Description of Artificial Sequence: Synthetic oligonucleotide
uacuugcgaugaccguccc

SEQ ID NO: 2214067 - RNA, 19 nt, Artificial Sequence
  Description of Artificial Sequence: Synthetic oligonucleotide
gcguucaguauacagacgu

SEQ ID NO: 2214068 - RNA, 19 nt, Artificial Sequence
  Description of Artificial Sequence: Synthetic oligonucleotide
uguaggccuucuacacaaa

SEQ ID NO: 2214069 - RNA, 19 nt, Artificial Sequence
  Description of Artificial Sequence: Synthetic oligonucleotide
gguccgacagccccuuugc

SEQ ID NO: 2214070 - RNA, 19 nt, Artificial Sequence
  Description of Artificial Sequence: Synthetic oligonucleotide
cagggacaguuccuuugcc

SEQ ID NO: 2214071 - RNA, 19 nt, Artificial Sequence
  Description of Artificial Sequence: Synthetic oligonucleotide
gcuguuucuccauuccauc

SEQ ID NO: 2214072 - RNA, 19 nt, Artificial Sequence
  Description of Artificial Sequence: Synthetic oligonucleotide
caaaggcaugucuucucga

SEQ ID NO: 2214073 - RNA, 19 nt, Artificial Sequence
  Description of Artificial Sequence: Synthetic oligonucleotide
acauucuaggauggaacua

SEQ ID NO: 2214074 - RNA, 19 nt, Artificial Sequence
  Description of Artificial Sequence: Synthetic oligonucleotide
acauacuggccaggagguc

SEQ ID NO: 2214075 - RNA, 19 nt, Artificial Sequence
  Description of Artificial Sequence: Synthetic oligonucleotide
aggcaggacuguaggguac

SEQ ID NO: 2214076 - RNA, 19 nt, Artificial Sequence
  Description of Artificial Sequence: Synthetic oligonucleotide
uaaugccagcuggucauuc

SEQ ID NO: 2214077 - RNA, 19 nt, Artificial Sequence
  Description of Artificial Sequence: Synthetic oligonucleotide
cuccauuguccucuucuca

SEQ ID NO: 2214078 - RNA, 19 nt, Artificial Sequence
  Description of Artificial Sequence: Synthetic oligonucleotide
cgauggcgaauuaaaauuc

SEQ ID NO: 2214079 - RNA, 19 nt, Artificial Sequence
  Description of Artificial Sequence: Synthetic oligonucleotide
ccauucuaucucaaccaug

SEQ ID NO: 2214080 - RNA, 19 nt, Artificial Sequence
  Description of Artificial Sequence: Synthetic oligonucleotide
acuugcgaugaccgucccu

SEQ ID NO: 2214081 - RNA, 19 nt, Artificial Sequence
  Description of Artificial Sequence: Synthetic oligonucleotide
ccauuccauccuuugugcc

SEQ ID NO: 2214082 - RNA, 19 nt, Artificial Sequence
  Description of Artificial Sequence: Synthetic oligonucleotide
cagccccuggcauuuaaga

SEQ ID NO: 2214083 - RNA, 19 nt, Artificial Sequence
  Description of Artificial Sequence: Synthetic oligonucleotide
cccagacagggacaguucc

SEQ ID NO: 2214084 - RNA, 19 nt, Artificial Sequence
  Description of Artificial Sequence: Synthetic oligonucleotide
ggcgaauuaaaauucucuu

SEQ ID NO: 2214085 - RNA, 19 nt, Artificial Sequence
  Description of Artificial Sequence: Synthetic oligonucleotide
ggugagggugagauccacg

SEQ ID NO: 2214086 - RNA, 19 nt, Artificial Sequence
  Description of Artificial Sequence: Synthetic oligonucleotide
ccuuugcucagucacuguc

SEQ ID NO: 2214087 - RNA, 19 nt, Artificial Sequence
  Description of Artificial Sequence: Synthetic oligonucleotide
agacgucuccaagacaguu

SEQ ID NO: 2214088 - RNA, 19 nt, Artificial Sequence
  Description of Artificial Sequence: Synthetic oligonucleotide
gguacuuaaagggaagaau

SEQ ID NO: 2214089 - RNA, 19 nt, Artificial Sequence
  Description of Artificial Sequence: Synthetic oligonucleotide
gccuucuacacaaaccaca

SEQ ID NO: 2214090 - RNA, 19 nt, Artificial Sequence
  Description of Artificial Sequence: Synthetic oligonucleotide
guaugcgaucagaucugug

SEQ ID NO: 2214091 - RNA, 19 nt, Artificial Sequence
  Description of Artificial Sequence: Synthetic oligonucleotide
cccggagaaguccagguuc

SEQ ID NO: 2214092 - RNA, 19 nt, Artificial Sequence
  Description of Artificial Sequence: Synthetic oligonucleotide
cauuguccucuucucaaua

SEQ ID NO: 2214093 - RNA, 19 nt, Artificial Sequence
  Description of Artificial Sequence: Synthetic oligonucleotide
aaacauccccacagccccu

SEQ ID NO: 2214094 - RNA, 19 nt, Artificial Sequence
  Description of Artificial Sequence: Synthetic oligonucleotide
gucagaggcaugcucucua

SEQ ID NO: 2214095 - RNA, 19 nt, Artificial Sequence
  Description of Artificial Sequence: Synthetic oligonucleotide
ggauggaacuaaaauuaaa

SEQ ID NO: 2214096 - RNA, 19 nt, Artificial Sequence
  Description of Artificial Sequence: Synthetic oligonucleotide
agggugagauccacgggcu

SEQ ID NO: 2214097 - RNA, 19 nt, Artificial Sequence
  Description of Artificial Sequence: Synthetic oligonucleotide
cauacuggccaggaggucu

SEQ ID NO: 2214098 - RNA, 19 nt, Artificial Sequence
  Description of Artificial Sequence: Synthetic oligonucleotide
ccacagguccgacagcccc

SEQ ID NO: 2214099 - RNA, 19 nt, Artificial Sequence
  Description of Artificial Sequence: Synthetic oligonucleotide
agucagaggcaugcucucu

SEQ ID NO: 2214100 - RNA, 19 nt, Artificial Sequence
  Description of Artificial Sequence: Synthetic oligonucleotide
cuuccccggagaaguccag

SEQ ID NO: 2214101 - RNA, 19 nt, Artificial Sequence
  Description of Artificial Sequence: Synthetic oligonucleotide
cuucugcagguaugcgauc

SEQ ID NO: 2214102 - RNA, 19 nt, Artificial Sequence
  Description of Artificial Sequence: Synthetic oligonucleotide
ggcaugcuaaacccagaca

SEQ ID NO: 2214103 - RNA, 19 nt, Artificial Sequence
  Description of Artificial Sequence: Synthetic oligonucleotide
aucgccgcuguuucuccau

SEQ ID NO: 2214104 - RNA, 19 nt, Artificial Sequence
  Description of Artificial Sequence: Synthetic oligonucleotide
auucuaggauggaacuaaa

SEQ ID NO: 2214105 - RNA, 19 nt, Artificial Sequence
  Description of Artificial Sequence: Synthetic oligonucleotide
acagccccuggcauuuaag

SEQ ID NO: 2214106 - RNA, 19 nt, Artificial Sequence
  Description of Artificial Sequence: Synthetic oligonucleotide
gguucauauugauggugaa

SEQ ID NO: 2214107 - RNA, 19 nt, Artificial Sequence
  Description of Artificial Sequence: Synthetic oligonucleotide
cugcuaaugccagcugguc

SEQ ID NO: 2214108 - RNA, 19 nt, Artificial Sequence
  Description of Artificial Sequence: Synthetic oligonucleotide
ugggucugcugggaucuac

SEQ ID NO: 2214109 - RNA, 19 nt, Artificial Sequence
  Description of Artificial Sequence: Synthetic oligonucleotide
guauacuugcgaugaccgu

SEQ ID NO: 2214110 - RNA, 19 nt, Artificial Sequence
  Description of Artificial Sequence: Synthetic oligonucleotide
gcuaaugccagcuggucau

SEQ ID NO: 2214111 - RNA, 19 nt, Artificial Sequence
  Description of Artificial Sequence: Synthetic oligonucleotide
cuggccaggaggucuaacu

SEQ ID NO: 2214112 - RNA, 19 nt, Artificial Sequence
  Description of Artificial Sequence: Synthetic oligonucleotide
aaacccagacagggacagu

SEQ ID NO: 2214113 - RNA, 19 nt, Artificial Sequence
  Description of Artificial Sequence: Synthetic oligonucleotide
ggcguucaguauacagacg

SEQ ID NO: 2214114 - RNA, 19 nt, Artificial Sequence
  Description of Artificial Sequence: Synthetic oligonucleotide
caugugguuuccucuggcu

SEQ ID NO: 2214115 - RNA, 19 nt, Artificial Sequence
  Description of Artificial Sequence: Synthetic oligonucleotide
auacagucuuucagcucug

SEQ ID NO: 2214116 - RNA, 19 nt, Artificial Sequence
  Description of Artificial Sequence: Synthetic oligonucleotide
cucagcgugaucugacagu

SEQ ID NO: 2214117 - RNA, 19 nt, Artificial Sequence
  Description of Artificial Sequence: Synthetic oligonucleotide
agaaugcaagacagagaaa

SEQ ID NO: 2214118 - RNA, 19 nt, Artificial Sequence
  Description of Artificial Sequence: Synthetic oligonucleotide
agggacuccacagguccga

SEQ ID NO: 2214119 - RNA, 19 nt, Artificial Sequence
  Description of Artificial Sequence: Synthetic oligonucleotide
ccaugugguuuccucuggc

SEQ ID NO: 2214120 - RNA, 19 nt, Artificial Sequence
  Description of Artificial Sequence: Synthetic oligonucleotide
caggcaggacuguagggua

SEQ ID NO: 2214121 - RNA, 19 nt, Artificial Sequence
  Description of Artificial Sequence: Synthetic oligonucleotide
cuucucgauggcgaauuaa

SEQ ID NO: 2214122 - RNA, 19 nt, Artificial Sequence
  Description of Artificial Sequence: Synthetic oligonucleotide
ggaucuacucagcgugauc

SEQ ID NO: 2214123 - RNA, 19 nt, Artificial Sequence
  Description of Artificial Sequence: Synthetic oligonucleotide
ggucugcugggaucuacuc

SEQ ID NO: 2214124 - RNA, 19 nt, Artificial Sequence
  Description of Artificial Sequence: Synthetic oligonucleotide
ggucauucacugugagcuc

SEQ ID NO: 2214125 - RNA, 19 nt, Artificial Sequence
  Description of Artificial Sequence: Synthetic oligonucleotide
gggaacauacuggccagga

SEQ ID NO: 2214126 - RNA, 19 nt, Artificial Sequence
  Description of Artificial Sequence: Synthetic oligonucleotide
caguaaucucaggcaggac

SEQ ID NO: 2214127 - RNA, 19 nt, Artificial Sequence
  Description of Artificial Sequence: Synthetic oligonucleotide
ggguacuuaaagggaagaa

SEQ ID NO: 2214128 - RNA, 19 nt, Artificial Sequence
  Description of Artificial Sequence: Synthetic oligonucleotide
gugccauccaaaggcaugu

SEQ ID NO: 2214129 - RNA, 19 nt, Artificial Sequence
  Description of Artificial Sequence: Synthetic oligonucleotide
cugcagguaugcgaucaga

SEQ ID NO: 2214130 - RNA, 19 nt, Artificial Sequence
  Description of Artificial Sequence: Synthetic oligonucleotide
uugcucagucacuguccuu

SEQ ID NO: 2214131 - RNA, 19 nt, Artificial Sequence
  Description of Artificial Sequence: Synthetic oligonucleotide
ucgccgcuguuucuccauu

SEQ ID NO: 2214132 - RNA, 19 nt, Artificial Sequence
  Description of Artificial Sequence: Synthetic oligonucleotide
gguuucccaggcaugcuaa

SEQ ID NO: 2214133 - RNA, 19 nt, Artificial Sequence
  Description of Artificial Sequence: Synthetic oligonucleotide
gggugagauccacgggcug

SEQ ID NO: 2214134 - RNA, 19 nt, Artificial Sequence
  Description of Artificial Sequence: Synthetic oligonucleotide
agccagucuguggcguuca

SEQ ID NO: 2214135 - RNA, 19 nt, Artificial Sequence
  Description of Artificial Sequence: Synthetic oligonucleotide
ccuggcauuuaagaacuga

SEQ ID NO: 2214136 - RNA, 19 nt, Artificial Sequence
  Description of Artificial Sequence: Synthetic oligonucleotide
ggucuaacucugagagcug

SEQ ID NO: 2214137 - RNA, 19 nt, Artificial Sequence
  Description of Artificial Sequence: Synthetic oligonucleotide
ggccuucuacacaaaccac

SEQ ID NO: 2214138 - RNA, 19 nt, Artificial Sequence
  Description of Artificial Sequence: Synthetic oligonucleotide
auacuggccaggaggucua

SEQ ID NO: 2214139 - RNA, 19 nt, Artificial Sequence
  Description of Artificial Sequence: Synthetic oligonucleotide
uuccauccuuugugccauc

SEQ ID NO: 2214140 - RNA, 19 nt, Artificial Sequence
  Description of Artificial Sequence: Synthetic oligonucleotide
cguucaguauacagacguc

SEQ ID NO: 2214141 - RNA, 19 nt, Artificial Sequence
  Description of Artificial Sequence: Synthetic oligonucleotide
cgugaucugacaguaaucu

SEQ ID NO: 2214142 - RNA, 19 nt, Artificial Sequence
  Description of Artificial Sequence: Synthetic oligonucleotide
cuaagccagucuguggcgu

SEQ ID NO: 2214143 - RNA, 19 nt, Artificial Sequence
  Description of Artificial Sequence: Synthetic oligonucleotide
ggcuauaaauccagagccu

SEQ ID NO: 2214144 - RNA, 19 nt, Artificial Sequence
  Description of Artificial Sequence: Synthetic oligonucleotide
gucuucucgauggcgaauu

SEQ ID NO: 2214145 - RNA, 19 nt, Artificial Sequence
  Description of Artificial Sequence: Synthetic oligonucleotide
gccauccaaaggcaugucu

SEQ ID NO: 2214146 - RNA, 19 nt, Artificial Sequence
  Description of Artificial Sequence: Synthetic oligonucleotide
ccggagaaguccagguuca

SEQ ID NO: 2214147 - RNA, 19 nt, Artificial Sequence
  Description of Artificial Sequence: Synthetic oligonucleotide
ccccuuugcucagucacug

SEQ ID NO: 2214148 - RNA, 19 nt, Artificial Sequence
  Description of Artificial Sequence: Synthetic oligonucleotide
ccaguuuaguuuucugagu

SEQ ID NO: 2214149 - RNA, 19 nt, Artificial Sequence
  Description of Artificial Sequence: Synthetic oligonucleotide
acagguccgacagccccuu

SEQ ID NO: 2214150 - RNA, 19 nt, Artificial Sequence
  Description of Artificial Sequence: Synthetic oligonucleotide
gcuuccccggagaagucca

SEQ ID NO: 2214151 - RNA, 19 nt, Artificial Sequence
  Description of Artificial Sequence: Synthetic oligonucleotide
cacagguccgacagccccu

SEQ ID NO: 2214152 - RNA, 19 nt, Artificial Sequence
  Description of Artificial Sequence: Synthetic oligonucleotide
cacagccccuggcauuuaa

SEQ ID NO: 2214153 - RNA, 19 nt, Artificial Sequence
  Description of Artificial Sequence: Synthetic oligonucleotide
caggacuguaggguacuua

SEQ ID NO: 2214154 - RNA, 19 nt, Artificial Sequence
  Description of Artificial Sequence: Synthetic oligonucleotide
uacuggccaggaggucuaa

SEQ ID NO: 2214155 - RNA, 19 nt, Artificial Sequence
  Description of Artificial Sequence: Synthetic oligonucleotide
ggacuguaggguacuuaaa

SEQ ID NO: 2214156 - RNA, 19 nt, Artificial Sequence
  Description of Artificial Sequence: Synthetic oligonucleotide
cccaggcaugcuaaaccca

SEQ ID NO: 2214157 - RNA, 19 nt, Artificial Sequence
  Description of Artificial Sequence: Synthetic oligonucleotide
cagcgugaucugacaguaa

SEQ ID NO: 2214158 - RNA, 19 nt, Artificial Sequence
  Description of Artificial Sequence: Synthetic oligonucleotide
gguaugcgaucagaucugu

SEQ ID NO: 2214159 - RNA, 19 nt, Artificial Sequence
  Description of Artificial Sequence: Synthetic oligonucleotide
cagacgucuccaagacagu

SEQ ID NO: 2214160 - RNA, 19 nt, Artificial Sequence
  Description of Artificial Sequence: Synthetic oligonucleotide
gcaaaucgccgcuguuucu

SEQ ID NO: 2214161 - RNA, 19 nt, Artificial Sequence
  Description of Artificial Sequence: Synthetic oligonucleotide
gucuuucagcucugcuaau

SEQ ID NO: 2214162 - RNA, 19 nt, Artificial Sequence
  Description of Artificial Sequence: Synthetic oligonucleotide
guccgacagccccuuugcu

SEQ ID NO: 2214163 - RNA, 19 nt, Artificial Sequence
  Description of Artificial Sequence: Synthetic oligonucleotide
caagcacuuuguaggccuu

SEQ ID NO: 2214164 - RNA, 19 nt, Artificial Sequence
  Description of Artificial Sequence: Synthetic oligonucleotide
cccuggcauuuaagaacug

SEQ ID NO: 2214165 - RNA, 19 nt, Artificial Sequence
  Description of Artificial Sequence: Synthetic oligonucleotide
gcccacuccagaauguuuu

SEQ ID NO: 2214166 - RNA, 19 nt, Artificial Sequence
  Description of Artificial Sequence: Synthetic oligonucleotide
cccauucuaucucaaccau

SEQ ID NO: 2214167 - RNA, 19 nt, Artificial Sequence
  Description of Artificial Sequence: Synthetic oligonucleotide
cggcccauucuaucucaac

SEQ ID NO: 2214168 - RNA, 19 nt, Artificial Sequence
  Description of Artificial Sequence: Synthetic oligonucleotide
gcgaugaccgucccuccau

SEQ ID NO: 2214169 - RNA, 19 nt, Artificial Sequence
  Description of Artificial Sequence: Synthetic oligonucleotide
ggcaggacuguaggguacu

SEQ ID NO: 2214170 - RNA, 19 nt, Artificial Sequence
  Description of Artificial Sequence: Synthetic oligonucleotide
cuguggcguucaguauaca

SEQ ID NO: 2214171 - RNA, 19 nt, Artificial Sequence
  Description of Artificial Sequence: Synthetic oligonucleotide
gggucugcugggaucuacu

SEQ ID NO: 2214172 - RNA, 19 nt, Artificial Sequence
  Description of Artificial Sequence: Synthetic oligonucleotide
cgccgcuguuucuccauuc

SEQ ID NO: 2214173 - RNA, 19 nt, Artificial Sequence
  Description of Artificial Sequence: Synthetic oligonucleotide
cuaaugccagcuggucauu

SEQ ID NO: 2214174 - RNA, 19 nt, Artificial Sequence
  Description of Artificial Sequence: Synthetic oligonucleotide
agcugggccucggcccauu

SEQ ID NO: 2214175 - RNA, 19 nt, Artificial Sequence
  Description of Artificial Sequence: Synthetic oligonucleotide
gccccuuugcucagucacu

SEQ ID NO: 2214176 - RNA, 19 nt, Artificial Sequence
  Description of Artificial Sequence: Synthetic oligonucleotide
cccuuugcucagucacugu

SEQ ID NO: 2214177 - RNA, 19 nt, Artificial Sequence
  Description of Artificial Sequence: Synthetic oligonucleotide
gggccucggcccauucuau

SEQ ID NO: 2214178 - RNA, 19 nt, Artificial Sequence
  Description of Artificial Sequence: Synthetic oligonucleotide
gcaggacuguaggguacuu

SEQ ID NO: 2214179 - RNA, 19 nt, Artificial Sequence
  Description of Artificial Sequence: Synthetic oligonucleotide
cagguccgacagccccuuu

SEQ ID NO: 2214180 - RNA, 19 nt, Artificial Sequence
  Description of Artificial Sequence: Synthetic oligonucleotide
cgaugaccgucccuccauu

SEQ ID NO: 2214181 - RNA, 19 nt, Artificial Sequence
  Description of Artificial Sequence: Synthetic oligonucleotide
ccacagccccuggcauuua

SEQ ID NO: 2214182 - RNA, 19 nt, Artificial Sequence
  Description of Artificial Sequence: Synthetic oligonucleotide
cggagaaguccagguucau

SEQ ID NO: 2214183 - RNA, 19 nt, Artificial Sequence
  Description of Artificial Sequence: Synthetic oligonucleotide
aguaaaagcugccaggcac

SEQ ID NO: 2214184 - RNA, 19 nt, Artificial Sequence
  Description of Artificial Sequence: Synthetic oligonucleotide
aaucagacuuccccaaagc

SEQ ID NO: 2214185 - RNA, 19 nt, Artificial Sequence
  Description of Artificial Sequence: Synthetic oligonucleotide
uuuuaggggacaaccaggg

SEQ ID NO: 2214186 - RNA, 19 nt, Artificial Sequence
  Description of Artificial Sequence: Synthetic oligonucleotide
uguaaaacguucgauuagg

SEQ ID NO: 2214187 - RNA, 19 nt, Artificial Sequence
  Description of Artificial Sequence: Synthetic oligonucleotide
uuaggggacaaccagggug

SEQ ID NO: 2214188 - RNA, 19 nt, Artificial Sequence
  Description of Artificial Sequence: Synthetic oligonucleotide
ucagacuuccccaaagcag

SEQ ID NO: 2214189 - RNA, 19 nt, Artificial Sequence
  Description of Artificial Sequence: Synthetic oligonucleotide
aaaguucauggugaaaguc

SEQ ID NO: 2214190 - RNA, 19 nt, Artificial Sequence
  Description of Artificial Sequence: Synthetic oligonucleotide
aguugcuucgguuccaagg

SEQ ID NO: 2214191 - RNA, 19 nt, Artificial Sequence
  Description of Artificial Sequence: Synthetic oligonucleotide
aggauugacagugaauccc

SEQ ID NO: 2214192 - RNA, 19 nt, Artificial Sequence
  Description of Artificial Sequence: Synthetic oligonucleotide
uaggggacaaccagggugg

SEQ ID NO: 2214193 - RNA, 19 nt, Artificial Sequence
  Description of Artificial Sequence: Synthetic oligonucleotide
aaaaccgugcaggaucagc

SEQ ID NO: 2214194 - RNA, 19 nt, Artificial Sequence
  Description of Artificial Sequence: Synthetic oligonucleotide
guugcuucgguuccaaggg

SEQ ID NO: 2214195 - RNA, 19 nt, Artificial Sequence
  Description of Artificial Sequence: Synthetic oligonucleotide
aagcagagacuucuuacag

SEQ ID NO: 2214196 - RNA, 19 nt, Artificial Sequence
  Description of Artificial Sequence: Synthetic oligonucleotide
aggaucagcaccauguccc

SEQ ID NO: 2214197 - RNA, 19 nt, Artificial Sequence
  Description of Artificial Sequence: Synthetic oligonucleotide
cuuuuaggggacaaccagg

SEQ ID NO: 2214198 - RNA, 19 nt, Artificial Sequence
  Description of Artificial Sequence: Synthetic oligonucleotide
uccuagauccaacuggggc

SEQ ID NO: 2214199 - RNA, 19 nt, Artificial Sequence
  Description of Artificial Sequence: Synthetic oligonucleotide
caguagagcagguagacac

SEQ ID NO: 2214200 - RNA, 19 nt, Artificial Sequence
  Description of Artificial Sequence: Synthetic oligonucleotide
gugaaucccacguaaacgc

SEQ ID NO: 2214201 - RNA, 19 nt, Artificial Sequence
  Description of Artificial Sequence: Synthetic oligonucleotide
agugaaucccacguaaacg

SEQ ID NO: 2214202 - RNA, 19 nt, Artificial Sequence
  Description of Artificial Sequence: Synthetic oligonucleotide
guuucugggacuucggacc

SEQ ID NO: 2214203 - RNA, 19 nt, Artificial Sequence
  Description of Artificial Sequence: Synthetic oligonucleotide
gauaugggcuuuuagggga

SEQ ID NO: 2214204 - RNA, 19 nt, Artificial Sequence
  Description of Artificial Sequence: Synthetic oligonucleotide
agcaugugcgccaacacgc

SEQ ID NO: 2214205 - RNA, 19 nt, Artificial Sequence
  Description of Artificial Sequence: Synthetic oligonucleotide
ugcccaaucagacuucccc

SEQ ID NO: 2214206 - RNA, 19 nt, Artificial Sequence
  Description of Artificial Sequence: Synthetic oligonucleotide
ugaaucccacguaaacgcg

SEQ ID NO: 2214207 - RNA, 19 nt, Artificial Sequence
  Description of Artificial Sequence: Synthetic oligonucleotide
uguguaaugguggcgcugg

SEQ ID NO: 2214208 - RNA, 19 nt, Artificial Sequence
  Description of Artificial Sequence: Synthetic oligonucleotide
guaaacgcggccccgaugc

SEQ ID NO: 2214209 - RNA, 19 nt, Artificial Sequence
  Description of Artificial Sequence: Synthetic oligonucleotide
acuugcagcgaguugcuuc

SEQ ID NO: 2214210 - RNA, 19 nt, Artificial Sequence
  Description of Artificial Sequence: Synthetic oligonucleotide
aacacgcgcagguggaagg

SEQ ID NO: 2214211 - RNA, 19 nt, Artificial Sequence
  Description of Artificial Sequence: Synthetic oligonucleotide
uucuagaggcagaagcugc

SEQ ID NO: 2214212 - RNA, 19 nt, Artificial Sequence
  Description of Artificial Sequence: Synthetic oligonucleotide
auugacagugaaucccacg

SEQ ID NO: 2214213 - RNA, 19 nt, Artificial Sequence
  Description of Artificial Sequence: Synthetic oligonucleotide
ugaggaugcugccaggccc

SEQ ID NO: 2214214 - RNA, 19 nt, Artificial Sequence
  Description of Artificial Sequence: Synthetic oligonucleotide
cuugcagcgaguugcuucg

SEQ ID NO: 2214215 - RNA, 19 nt, Artificial Sequence
  Description of Artificial Sequence: Synthetic oligonucleotide
uguguugccggacccgacg

SEQ ID NO: 2214216 - RNA, 19 nt, Artificial Sequence
  Description of Artificial Sequence: Synthetic oligonucleotide
caaagcagagacuucuuac

SEQ ID NO: 2214217 - RNA, 19 nt, Artificial Sequence
  Description of Artificial Sequence: Synthetic oligonucleotide
aaaggcuaugggcaugugu

SEQ ID NO: 2214218 - RNA, 19 nt, Artificial Sequence
  Description of Artificial Sequence: Synthetic oligonucleotide
cauucaaaccgaagggcgg

SEQ ID NO: 2214219 - RNA, 19 nt, Artificial Sequence
  Description of Artificial Sequence: Synthetic oligonucleotide
aaucccacguaaacgcggc

SEQ ID NO: 2214220 - RNA, 19 nt, Artificial Sequence
  Description of Artificial Sequence: Synthetic oligonucleotide
agcgaguugcuucgguucc

SEQ ID NO: 2214221 - RNA, 19 nt, Artificial Sequence
  Description of Artificial Sequence: Synthetic oligonucleotide
auucaaaccgaagggcggc

SEQ ID NO: 2214222 - RNA, 19 nt, Artificial Sequence
  Description of Artificial Sequence: Synthetic oligonucleotide
cacagcagacggaaaaccg

SEQ ID NO: 2214223 - RNA, 19 nt, Artificial Sequence
  Description of Artificial Sequence: Synthetic oligonucleotide
agacggaaaaccgugcagg

SEQ ID NO: 2214224 - RNA, 19 nt, Artificial Sequence
  Description of Artificial Sequence: Synthetic oligonucleotide
cuggagaaaguucauggug

SEQ ID NO: 2214225 - RNA, 19 nt, Artificial Sequence
  Description of Artificial Sequence: Synthetic oligonucleotide
uagacaccgaagaagcgcu

SEQ ID NO: 2214226 - RNA, 19 nt, Artificial Sequence
  Description of Artificial Sequence: Synthetic oligonucleotide
ucuagaggcagaagcugcc

SEQ ID NO: 2214227 - RNA, 19 nt, Artificial Sequence
  Description of Artificial Sequence: Synthetic oligonucleotide
gaugccuaggaucaggucu

SEQ ID NO: 2214228 - RNA, 19 nt, Artificial Sequence
  Description of Artificial Sequence: Synthetic oligonucleotide
uuacagcuaggacaauggc

SEQ ID NO: 2214229 - RNA, 19 nt, Artificial Sequence
  Description of Artificial Sequence: Synthetic oligonucleotide
caggacuguaaaacguucg

SEQ ID NO: 2214230 - RNA, 19 nt, Artificial Sequence
  Description of Artificial Sequence: Synthetic oligonucleotide
aaucccaaguccucuuccu

SEQ ID NO: 2214231 - RNA, 19 nt, Artificial Sequence
  Description of Artificial Sequence: Synthetic oligonucleotide
ugcucaaguaaaagcugcc

SEQ ID NO: 2214232 - RNA, 19 nt, Artificial Sequence
  Description of Artificial Sequence: Synthetic oligonucleotide
uggagcucggagcaugugc

SEQ ID NO: 2214233 - RNA, 19 nt, Artificial Sequence
  Description of Artificial Sequence: Synthetic oligonucleotide
ugucagucucacuugcagc

SEQ ID NO: 2214234 - RNA, 19 nt, Artificial Sequence
  Description of Artificial Sequence: Synthetic oligonucleotide
cuguaaaacguucgauuag

SEQ ID NO: 2214235 - RNA, 19 nt, Artificial Sequence
  Description of Artificial Sequence: Synthetic oligonucleotide
aucagacuuccccaaagca

SEQ ID NO: 2214236 - RNA, 19 nt, Artificial Sequence
  Description of Artificial Sequence: Synthetic oligonucleotide
cucgcuguaugucccaucc

SEQ ID NO: 2214237 - RNA, 19 nt, Artificial Sequence
  Description of Artificial Sequence: Synthetic oligonucleotide
gaaucccacguaaacgcgg

SEQ ID NO: 2214238 - RNA, 19 nt, Artificial Sequence
  Description of Artificial Sequence: Synthetic oligonucleotide
aaggaagccucgcugcgca

SEQ ID NO: 2214239 - RNA, 19 nt, Artificial Sequence
  Description of Artificial Sequence: Synthetic oligonucleotide
uguucauggggaugccuag

SEQ ID NO: 2214240 - RNA, 19 nt, Artificial Sequence
  Description of Artificial Sequence: Synthetic oligonucleotide
guagacaccgaagaagcgc

SEQ ID NO: 2214241 - RNA, 19 nt, Artificial Sequence
  Description of Artificial Sequence: Synthetic oligonucleotide
cuaugggcauguguaaugg

SEQ ID NO: 2214242 - RNA, 19 nt, Artificial Sequence
  Description of Artificial Sequence: Synthetic oligonucleotide
cauggcacugcccaaucag

SEQ ID NO: 2214243 - RNA, 19 nt, Artificial Sequence
  Description of Artificial Sequence: Synthetic oligonucleotide
aaggcuaugggcaugugua

SEQ ID NO: 2214244 - RNA, 19 nt, Artificial Sequence
  Description of Artificial Sequence: Synthetic oligonucleotide
aaaccgugcaggaucagca

SEQ ID NO: 2214245 - RNA, 19 nt, Artificial Sequence
  Description of Artificial Sequence: Synthetic oligonucleotide
ucggaccucgcaaagggcu

SEQ ID NO: 2214246 - RNA, 19 nt, Artificial Sequence
  Description of Artificial Sequence: Synthetic oligonucleotide
aggcucuucccgcaggaac

SEQ ID NO: 2214247 - RNA, 19 nt, Artificial Sequence
  Description of Artificial Sequence: Synthetic oligonucleotide
gugaaagucaggucucagc

SEQ ID NO: 2214248 - RNA, 19 nt, Artificial Sequence
  Description of Artificial Sequence: Synthetic oligonucleotide
cauggggaugccuaggauc

SEQ ID NO: 2214249 - RNA, 19 nt, Artificial Sequence
  Description of Artificial Sequence: Synthetic oligonucleotide
guagagcagguagacaccg

SEQ ID NO: 2214250 - RNA, 19 nt, Artificial Sequence
  Description of Artificial Sequence: Synthetic oligonucleotide
caaucagacuuccccaaag

SEQ ID NO: 2214251 - RNA, 19 nt, Artificial Sequence
  Description of Artificial Sequence: Synthetic oligonucleotide
aguagagcagguagacacc

SEQ ID NO: 2214252 - RNA, 19 nt, Artificial Sequence
  Description of Artificial Sequence: Synthetic oligonucleotide
ucccauccggacuuucugg

SEQ ID NO: 2214253 - RNA, 19 nt, Artificial Sequence
  Description of Artificial Sequence: Synthetic oligonucleotide
uuugcgaccggcguugugu

SEQ ID NO: 2214254 - RNA, 19 nt, Artificial Sequence
  Description of Artificial Sequence: Synthetic oligonucleotide
ggguccuagauccaacugg

SEQ ID NO: 2214255 - RNA, 19 nt, Artificial Sequence
  Description of Artificial Sequence: Synthetic oligonucleotide
cauggugaaagucaggucu

SEQ ID NO: 2214256 - RNA, 19 nt, Artificial Sequence
  Description of Artificial Sequence: Synthetic oligonucleotide
agguggaaggcaaaggaag

SEQ ID NO: 2214257 - RNA, 19 nt, Artificial Sequence
  Description of Artificial Sequence: Synthetic oligonucleotide
gacagugaaucccacguaa

SEQ ID NO: 2214258 - RNA, 19 nt, Artificial Sequence
  Description of Artificial Sequence: Synthetic oligonucleotide
guaaugguggcgcuggaga

SEQ ID NO: 2214259 - RNA, 19 nt, Artificial Sequence
  Description of Artificial Sequence: Synthetic oligonucleotide
uaggaucaggucuccagca

SEQ ID NO: 2214260 - RNA, 19 nt, Artificial Sequence
  Description of Artificial Sequence: Synthetic oligonucleotide
ugcugucagucucacuugc

SEQ ID NO: 2214261 - RNA, 19 nt, Artificial Sequence
  Description of Artificial Sequence: Synthetic oligonucleotide
ccauucaaaccgaagggcg

SEQ ID NO: 2214262 - RNA, 19 nt, Artificial Sequence
  Description of Artificial Sequence: Synthetic oligonucleotide
aggacuguaaaacguucga

SEQ ID NO: 2214263 - RNA, 19 nt, Artificial Sequence
  Description of Artificial Sequence: Synthetic oligonucleotide
caggauugacagugaaucc

SEQ ID NO: 2214264 - RNA, 19 nt, Artificial Sequence
  Description of Artificial Sequence: Synthetic oligonucleotide
ucugggacuucggaccucg

SEQ ID NO: 2214265 - RNA, 19 nt, Artificial Sequence
  Description of Artificial Sequence: Synthetic oligonucleotide
guuagagggaggcgcaccc

SEQ ID NO: 2214266 - RNA, 19 nt, Artificial Sequence
  Description of Artificial Sequence: Synthetic oligonucleotide
gagaggggcaggaacagug

SEQ ID NO: 2214267 - RNA, 19 nt, Artificial Sequence
  Description of Artificial Sequence: Synthetic oligonucleotide
gacccgacgagcaggauug

SEQ ID NO: 2214268 - RNA, 19 nt, Artificial Sequence
  Description of Artificial Sequence: Synthetic oligonucleotide
ggccuuggguccuagaucc

SEQ ID NO: 2214269 - RNA, 19 nt, Artificial Sequence
  Description of Artificial Sequence: Synthetic oligonucleotide
caguguuagagggaggcgc

SEQ ID NO: 2214270 - RNA, 19 nt, Artificial Sequence
  Description of Artificial Sequence: Synthetic oligonucleotide
gcuuuuaggggacaaccag

SEQ ID NO: 2214271 - RNA, 19 nt, Artificial Sequence
  Description of Artificial Sequence: Synthetic oligonucleotide
ugcuucgguuccaagggcu

SEQ ID NO: 2214272 - RNA, 19 nt, Artificial Sequence
  Description of Artificial Sequence: Synthetic oligonucleotide
acaaggggcccucuucauc

SEQ ID NO: 2214273 - RNA, 19 nt, Artificial Sequence
  Description of Artificial Sequence: Synthetic oligonucleotide
ugcgccaacacgcgcaggu

SEQ ID NO: 2214274 - RNA, 19 nt, Artificial Sequence
  Description of Artificial Sequence: Synthetic oligonucleotide
uguaaugguggcgcuggag

SEQ ID NO: 2214275 - RNA, 19 nt, Artificial Sequence
  Description of Artificial Sequence: Synthetic oligonucleotide
uuucugggacuucggaccu

SEQ ID NO: 2214276 - RNA, 19 nt, Artificial Sequence
  Description of Artificial Sequence: Synthetic oligonucleotide
cagacuuccccaaagcaga

SEQ ID NO: 2214277 - RNA, 19 nt, Artificial Sequence
  Description of Artificial Sequence: Synthetic oligonucleotide
agcgcaguguuagagggag

SEQ ID NO: 2214278 - RNA, 19 nt, Artificial Sequence
  Description of Artificial Sequence: Synthetic oligonucleotide
agucuguccaguguuccuc

SEQ ID NO: 2214279 - RNA, 19 nt, Artificial Sequence
  Description of Artificial Sequence: Synthetic oligonucleotide
uuccccaaagcagagacuu

SEQ ID NO: 2214280 - RNA, 19 nt, Artificial Sequence
  Description of Artificial Sequence: Synthetic oligonucleotide
aaacgcggccccgaugccg

SEQ ID NO: 2214281 - RNA, 19 nt, Artificial Sequence
  Description of Artificial Sequence: Synthetic oligonucleotide
cagugaaucccacguaaac

SEQ ID NO: 2214282 - RNA, 19 nt, Artificial Sequence
  Description of Artificial Sequence: Synthetic oligonucleotide
uccaggacuguaaaacguu

SEQ ID NO: 2214283 - RNA, 19 nt, Artificial Sequence
  Description of Artificial Sequence: Synthetic oligonucleotide
cuguaugucccauccggac

SEQ ID NO: 2214284 - RNA, 19 nt, Artificial Sequence
  Description of Artificial Sequence: Synthetic oligonucleotide
uggguccuagauccaacug

SEQ ID NO: 2214285 - RNA, 19 nt, Artificial Sequence
  Description of Artificial Sequence: Synthetic oligonucleotide
caaucccaaguccucuucc

SEQ ID NO: 2214286 - RNA, 19 nt, Artificial Sequence
  Description of Artificial Sequence: Synthetic oligonucleotide
uggguauccaggacuguaa

SEQ ID NO: 2214287 - RNA, 19 nt, Artificial Sequence
  Description of Artificial Sequence: Synthetic oligonucleotide
uggcacugcccaaucagac

SEQ ID NO: 2214288 - RNA, 19 nt, Artificial Sequence
  Description of Artificial Sequence: Synthetic oligonucleotide
agagcagguagacaccgaa

SEQ ID NO: 2214289 - RNA, 19 nt, Artificial Sequence
  Description of Artificial Sequence: Synthetic oligonucleotide
uuggguccuagauccaacu

SEQ ID NO: 2214290 - RNA, 19 nt, Artificial Sequence
  Description of Artificial Sequence: Synthetic oligonucleotide
gguccuagauccaacuggg

SEQ ID NO: 2214291 - RNA, 19 nt, Artificial Sequence
  Description of Artificial Sequence: Synthetic oligonucleotide
uuuaggggacaaccagggu

SEQ ID NO: 2214292 - RNA, 19 nt, Artificial Sequence
  Description of Artificial Sequence: Synthetic oligonucleotide
augggcauguguaauggug

SEQ ID NO: 2214293 - RNA, 19 nt, Artificial Sequence
  Description of Artificial Sequence: Synthetic oligonucleotide
agcucggagcaugugcgcc

SEQ ID NO: 2214294 - RNA, 19 nt, Artificial Sequence
  Description of Artificial Sequence: Synthetic oligonucleotide
gaugccgaggguucuggca

SEQ ID NO: 2214295 - RNA, 19 nt, Artificial Sequence
  Description of Artificial Sequence: Synthetic oligonucleotide
gacuguaaaacguucgauu

SEQ ID NO: 2214296 - RNA, 19 nt, Artificial Sequence
  Description of Artificial Sequence: Synthetic oligonucleotide
gacuucggaccucgcaaag

SEQ ID NO: 2214297 - RNA, 19 nt, Artificial Sequence
  Description of Artificial Sequence: Synthetic oligonucleotide
cauccugcagcaugcgcgc

SEQ ID NO: 2214298 - RNA, 19 nt, Artificial Sequence
  Description of Artificial Sequence: Synthetic oligonucleotide
uucgguuccaagggcuggg

SEQ ID NO: 2214299 - RNA, 19 nt, Artificial Sequence
  Description of Artificial Sequence: Synthetic oligonucleotide
gaaaguucauggugaaagu

SEQ ID NO: 2214300 - RNA, 19 nt, Artificial Sequence
  Description of Artificial Sequence: Synthetic oligonucleotide
uguuagagggaggcgcacc

SEQ ID NO: 2214301 - RNA, 19 nt, Artificial Sequence
  Description of Artificial Sequence: Synthetic oligonucleotide
agcagacggaaaaccgugc

SEQ ID NO: 2214302 - RNA, 19 nt, Artificial Sequence
  Description of Artificial Sequence: Synthetic oligonucleotide
uugcuucgguuccaagggc

SEQ ID NO: 2214303 - RNA, 19 nt, Artificial Sequence
  Description of Artificial Sequence: Synthetic oligonucleotide
ucggcguccacauggcacu

SEQ ID NO: 2214304 - RNA, 19 nt, Artificial Sequence
  Description of Artificial Sequence: Synthetic oligonucleotide
cucggcguccacauggcac

SEQ ID NO: 2214305 - RNA, 19 nt, Artificial Sequence
  Description of Artificial Sequence: Synthetic oligonucleotide
ggugguuucugggacuucg

SEQ ID NO: 2214306 - RNA, 19 nt, Artificial Sequence
  Description of Artificial Sequence: Synthetic oligonucleotide
ugggacuucggaccucgca

SEQ ID NO: 2214307 - RNA, 19 nt, Artificial Sequence
  Description of Artificial Sequence: Synthetic oligonucleotide
caugcgcgcgcacaacacg

SEQ ID NO: 2214308 - RNA, 19 nt, Artificial Sequence
  Description of Artificial Sequence: Synthetic oligonucleotide
gacggaaaaccgugcagga

SEQ ID NO: 2214309 - RNA, 19 nt, Artificial Sequence
  Description of Artificial Sequence: Synthetic oligonucleotide
auggugaaagucaggucuc

SEQ ID NO: 2214310 - RNA, 19 nt, Artificial Sequence
  Description of Artificial Sequence: Synthetic oligonucleotide
acuucggaccucgcaaagg

SEQ ID NO: 2214311 - RNA, 19 nt, Artificial Sequence
  Description of Artificial Sequence: Synthetic oligonucleotide
ucgcuguaugucccauccg

SEQ ID NO: 2214312 - RNA, 19 nt, Artificial Sequence
  Description of Artificial Sequence: Synthetic oligonucleotide
uucggaccucgcaaagggc

SEQ ID NO: 2214313 - RNA, 19 nt, Artificial Sequence
  Description of Artificial Sequence: Synthetic oligonucleotide
cagacggaaaaccgugcag

SEQ ID NO: 2214314 - RNA, 19 nt, Artificial Sequence
  Description of Artificial Sequence: Synthetic oligonucleotide
augcgcgcgcacaacacgc

SEQ ID NO: 2214315 - RNA, 19 nt, Artificial Sequence
  Description of Artificial Sequence: Synthetic oligonucleotide
ucccacguaaacgcggccc

SEQ ID NO: 2214316 - RNA, 19 nt, Artificial Sequence
  Description of Artificial Sequence: Synthetic oligonucleotide
cuuggguccuagauccaac

SEQ ID NO: 2214317 - RNA, 19 nt, Artificial Sequence
  Description of Artificial Sequence: Synthetic oligonucleotide
uaugggcauguguaauggu

SEQ ID NO: 2214318 - RNA, 19 nt, Artificial Sequence
  Description of Artificial Sequence: Synthetic oligonucleotide
auaugggcuuuuaggggac

SEQ ID NO: 2214319 - RNA, 19 nt, Artificial Sequence
  Description of Artificial Sequence: Synthetic oligonucleotide
gguuucugggacuucggac

SEQ ID NO: 2214320 - RNA, 19 nt, Artificial Sequence
  Description of Artificial Sequence: Synthetic oligonucleotide
aucccacguaaacgcggcc

SEQ ID NO: 2214321 - RNA, 19 nt, Artificial Sequence
  Description of Artificial Sequence: Synthetic oligonucleotide
agauccaacuggggcuugc

SEQ ID NO: 2214322 - RNA, 19 nt, Artificial Sequence
  Description of Artificial Sequence: Synthetic oligonucleotide
gcauguguaaugguggcgc

SEQ ID NO: 2214323 - RNA, 19 nt, Artificial Sequence
  Description of Artificial Sequence: Synthetic oligonucleotide
ggagcucggagcaugugcg

SEQ ID NO: 2214324 - RNA, 19 nt, Artificial Sequence
  Description of Artificial Sequence: Synthetic oligonucleotide
uggccuuggguccuagauc

SEQ ID NO: 2214325 - RNA, 19 nt, Artificial Sequence
  Description of Artificial Sequence: Synthetic oligonucleotide
ggaacaguguucaugggga

SEQ ID NO: 2214326 - RNA, 19 nt, Artificial Sequence
  Description of Artificial Sequence: Synthetic oligonucleotide
cgcuggagaaaguucaugg

SEQ ID NO: 2214327 - RNA, 19 nt, Artificial Sequence
  Description of Artificial Sequence: Synthetic oligonucleotide
gaagaagcgcuccggucuc

SEQ ID NO: 2214328 - RNA, 19 nt, Artificial Sequence
  Description of Artificial Sequence: Synthetic oligonucleotide
augucccaggguccucgcc

SEQ ID NO: 2214329 - RNA, 19 nt, Artificial Sequence
  Description of Artificial Sequence: Synthetic oligonucleotide
gcuaugggcauguguaaug

SEQ ID NO: 2214330 - RNA, 19 nt, Artificial Sequence
  Description of Artificial Sequence: Synthetic oligonucleotide
uguugccggacccgacgag

SEQ ID NO: 2214331 - RNA, 19 nt, Artificial Sequence
  Description of Artificial Sequence: Synthetic oligonucleotide
acagcagacggaaaaccgu

SEQ ID NO: 2214332 - RNA, 19 nt, Artificial Sequence
  Description of Artificial Sequence: Synthetic oligonucleotide
uugccggacccgacgagca

SEQ ID NO: 2214333 - RNA, 19 nt, Artificial Sequence
  Description of Artificial Sequence: Synthetic oligonucleotide
aagggcggccacagcagac

SEQ ID NO: 2214334 - RNA, 19 nt, Artificial Sequence
  Description of Artificial Sequence: Synthetic oligonucleotide
guucauggggaugccuagg

SEQ ID NO: 2214335 - RNA, 19 nt, Artificial Sequence
  Description of Artificial Sequence: Synthetic oligonucleotide
cagcgaguugcuucgguuc

SEQ ID NO: 2214336 - RNA, 19 nt, Artificial Sequence
  Description of Artificial Sequence: Synthetic oligonucleotide
acacgcgcagguggaaggc

SEQ ID NO: 2214337 - RNA, 19 nt, Artificial Sequence
  Description of Artificial Sequence: Synthetic oligonucleotide
ucauggggaugccuaggau

SEQ ID NO: 2214338 - RNA, 19 nt, Artificial Sequence
  Description of Artificial Sequence: Synthetic oligonucleotide
ccccacgugagucaggcgg

SEQ ID NO: 2214339 - RNA, 19 nt, Artificial Sequence
  Description of Artificial Sequence: Synthetic oligonucleotide
agaagcgcuccggucucgc

SEQ ID NO: 2214340 - RNA, 19 nt, Artificial Sequence
  Description of Artificial Sequence: Synthetic oligonucleotide
acgugagucaggcggcgug

SEQ ID NO: 2214341 - RNA, 19 nt, Artificial Sequence
  Description of Artificial Sequence: Synthetic oligonucleotide
ggaggcgcacccauggugg

SEQ ID NO: 2214342 - RNA, 19 nt, Artificial Sequence
  Description of Artificial Sequence: Synthetic oligonucleotide
guaaaacguucgauuagga

SEQ ID NO: 2214343 - RNA, 19 nt, Artificial Sequence
  Description of Artificial Sequence: Synthetic oligonucleotide
guuggagguccgaaaugag

SEQ ID NO: 2214344 - RNA, 19 nt, Artificial Sequence
  Description of Artificial Sequence: Synthetic oligonucleotide
caugugcgccaacacgcgc

SEQ ID NO: 2214345 - RNA, 19 nt, Artificial Sequence
  Description of Artificial Sequence: Synthetic oligonucleotide
uccaaaggcuaugggcaug

SEQ ID NO: 2214346 - RNA, 19 nt, Artificial Sequence
  Description of Artificial Sequence: Synthetic oligonucleotide
gggcuuuuaggggacaacc

SEQ ID NO: 2214347 - RNA, 19 nt, Artificial Sequence
  Description of Artificial Sequence: Synthetic oligonucleotide
aguguuagagggaggcgca

SEQ ID NO: 2214348 - RNA, 19 nt, Artificial Sequence
  Description of Artificial Sequence: Synthetic oligonucleotide
cuucgguuccaagggcugg

SEQ ID NO: 2214349 - RNA, 19 nt, Artificial Sequence
  Description of Artificial Sequence: Synthetic oligonucleotide
uuuugcgaccggcguugug

SEQ ID NO: 2214350 - RNA, 19 nt, Artificial Sequence
  Description of Artificial Sequence: Synthetic oligonucleotide
gauugacagugaaucccac

SEQ ID NO: 2214351 - RNA, 19 nt, Artificial Sequence
  Description of Artificial Sequence: Synthetic oligonucleotide
uaaacgcggccccgaugcc

SEQ ID NO: 2214352 - RNA, 19 nt, Artificial Sequence
  Description of Artificial Sequence: Synthetic oligonucleotide
ggcggcgugaggcuugagg

SEQ ID NO: 2214353 - RNA, 19 nt, Artificial Sequence
  Description of Artificial Sequence: Synthetic oligonucleotide
gaguugcuucgguuccaag

SEQ ID NO: 2214354 - RNA, 19 nt, Artificial Sequence
  Description of Artificial Sequence: Synthetic oligonucleotide
ugcagcaugcgcgcgcaca

SEQ ID NO: 2214355 - RNA, 19 nt, Artificial Sequence
  Description of Artificial Sequence: Synthetic oligonucleotide
ucuucccgcaggaacucuu

SEQ ID NO: 2214356 - RNA, 19 nt, Artificial Sequence
  Description of Artificial Sequence: Synthetic oligonucleotide
ugguggagcucggagcaug

SEQ ID NO: 2214357 - RNA, 19 nt, Artificial Sequence
  Description of Artificial Sequence: Synthetic oligonucleotide
ucaaaccgaagggcggcca

SEQ ID NO: 2214358 - RNA, 19 nt, Artificial Sequence
  Description of Artificial Sequence: Synthetic oligonucleotide
agccagcgcaguguuagag

SEQ ID NO: 2214359 - RNA, 19 nt, Artificial Sequence
  Description of Artificial Sequence: Synthetic oligonucleotide
ucucagccagcgcaguguu

SEQ ID NO: 2214360 - RNA, 19 nt, Artificial Sequence
  Description of Artificial Sequence: Synthetic oligonucleotide
aggaucaggucuccagcaa

SEQ ID NO: 2214361 - RNA, 19 nt, Artificial Sequence
  Description of Artificial Sequence: Synthetic oligonucleotide
gguagacaccgaagaagcg

SEQ ID NO: 2214362 - RNA, 19 nt, Artificial Sequence
  Description of Artificial Sequence: Synthetic oligonucleotide
uccggacuuucuggguugg

SEQ ID NO: 2214363 - RNA, 19 nt, Artificial Sequence
  Description of Artificial Sequence: Synthetic oligonucleotide
gccagcgcaguguuagagg

SEQ ID NO: 2214364 - RNA, 19 nt, Artificial Sequence
  Description of Artificial Sequence: Synthetic oligonucleotide
guugccggacccgacgagc

SEQ ID NO: 2214365 - RNA, 19 nt, Artificial Sequence
  Description of Artificial Sequence: Synthetic oligonucleotide
caaaccgaagggcggccac

SEQ ID NO: 2214366 - RNA, 19 nt, Artificial Sequence
  Description of Artificial Sequence: Synthetic oligonucleotide
ucgguuccaagggcugggg

SEQ ID NO: 2214367 - RNA, 19 nt, Artificial Sequence
  Description of Artificial Sequence: Synthetic oligonucleotide
cccauucaaaccgaagggc

SEQ ID NO: 2214368 - RNA, 19 nt, Artificial Sequence
  Description of Artificial Sequence: Synthetic oligonucleotide
cgcuguaugucccauccgg

SEQ ID NO: 2214369 - RNA, 19 nt, Artificial Sequence
  Description of Artificial Sequence: Synthetic oligonucleotide
uccgaaaugaggggugguu

SEQ ID NO: 2214370 - RNA, 19 nt, Artificial Sequence
  Description of Artificial Sequence: Synthetic oligonucleotide
aaggggcccucuucauccu

SEQ ID NO: 2214371 - RNA, 19 nt, Artificial Sequence
  Description of Artificial Sequence: Synthetic oligonucleotide
aguguucauggggaugccu

SEQ ID NO: 2214372 - RNA, 19 nt, Artificial Sequence
  Description of Artificial Sequence: Synthetic oligonucleotide
cuucauccugcagcaugcg

SEQ ID NO: 2214373 - RNA, 19 nt, Artificial Sequence
  Description of Artificial Sequence: Synthetic oligonucleotide
ggcauguguaaugguggcg

SEQ ID NO: 2214374 - RNA, 19 nt, Artificial Sequence
  Description of Artificial Sequence: Synthetic oligonucleotide
ggauugacagugaauccca

SEQ ID NO: 2214375 - RNA, 19 nt, Artificial Sequence
  Description of Artificial Sequence: Synthetic oligonucleotide
gaagggcggccacagcaga

SEQ ID NO: 2214376 - RNA, 19 nt, Artificial Sequence
  Description of Artificial Sequence: Synthetic oligonucleotide
uccgccaggcgccaccuuu

SEQ ID NO: 2214377 - RNA, 19 nt, Artificial Sequence
  Description of Artificial Sequence: Synthetic oligonucleotide
cccauccggacuuucuggg

SEQ ID NO: 2214378 - RNA, 19 nt, Artificial Sequence
  Description of Artificial Sequence: Synthetic oligonucleotide
uuguguugccggacccgac

SEQ ID NO: 2214379 - RNA, 19 nt, Artificial Sequence
  Description of Artificial Sequence: Synthetic oligonucleotide
gaaaaccgugcaggaucag

SEQ ID NO: 2214380 - RNA, 19 nt, Artificial Sequence
  Description of Artificial Sequence: Synthetic oligonucleotide
aggcuaugggcauguguaa

SEQ ID NO: 2214381 - RNA, 19 nt, Artificial Sequence
  Description of Artificial Sequence: Synthetic oligonucleotide
ugguccgccaggcgccacc

SEQ ID NO: 2214382 - RNA, 19 nt, Artificial Sequence
  Description of Artificial Sequence: Synthetic oligonucleotide
ugcgcgcgcacaacacgca

SEQ ID NO: 2214383 - RNA, 19 nt, Artificial Sequence
  Description of Artificial Sequence: Synthetic oligonucleotide
uggccuucuagaggcagaa

SEQ ID NO: 2214384 - RNA, 19 nt, Artificial Sequence
  Description of Artificial Sequence: Synthetic oligonucleotide
caccgaagaagcgcuccgg

SEQ ID NO: 2214385 - RNA, 19 nt, Artificial Sequence
  Description of Artificial Sequence: Synthetic oligonucleotide
ugggcuuuuaggggacaac

SEQ ID NO: 2214386 - RNA, 19 nt, Artificial Sequence
  Description of Artificial Sequence: Synthetic oligonucleotide
gguccgaaaugaggggugg

SEQ ID NO: 2214387 - RNA, 19 nt, Artificial Sequence
  Description of Artificial Sequence: Synthetic oligonucleotide
agacuuccccaaagcagag

SEQ ID NO: 2214388 - RNA, 19 nt, Artificial Sequence
  Description of Artificial Sequence: Synthetic oligonucleotide
augugcgccaacacgcgca

SEQ ID NO: 2214389 - RNA, 19 nt, Artificial Sequence
  Description of Artificial Sequence: Synthetic oligonucleotide
ggcguuguguugccggacc

SEQ ID NO: 2214390 - RNA, 19 nt, Artificial Sequence
  Description of Artificial Sequence: Synthetic oligonucleotide
cggaaaaccgugcaggauc

SEQ ID NO: 2214391 - RNA, 19 nt, Artificial Sequence
  Description of Artificial Sequence: Synthetic oligonucleotide
caacacgcgcagguggaag

SEQ ID NO: 2214392 - RNA, 19 nt, Artificial Sequence
  Description of Artificial Sequence: Synthetic oligonucleotide
guuguguugccggacccga

SEQ ID NO: 2214393 - RNA, 19 nt, Artificial Sequence
  Description of Artificial Sequence: Synthetic oligonucleotide
agguccgaaaugaggggug

SEQ ID NO: 2214394 - RNA, 19 nt, Artificial Sequence
  Description of Artificial Sequence: Synthetic oligonucleotide
ugccggacccgacgagcag

SEQ ID NO: 2214395 - RNA, 19 nt, Artificial Sequence
  Description of Artificial Sequence: Synthetic oligonucleotide
guaaaagcugccaggcacu

SEQ ID NO: 2214396 - RNA, 19 nt, Artificial Sequence
  Description of Artificial Sequence: Synthetic oligonucleotide
acagugaaucccacguaaa

SEQ ID NO: 2214397 - RNA, 19 nt, Artificial Sequence
  Description of Artificial Sequence: Synthetic oligonucleotide
gggacuucggaccucgcaa

SEQ ID NO: 2214398 - RNA, 19 nt, Artificial Sequence
  Description of Artificial Sequence: Synthetic oligonucleotide
guccucgcccgcugguccg

SEQ ID NO: 2214399 - RNA, 19 nt, Artificial Sequence
  Description of Artificial Sequence: Synthetic oligonucleotide
gguauccaggacuguaaaa

SEQ ID NO: 2214400 - RNA, 19 nt, Artificial Sequence
  Description of Artificial Sequence: Synthetic oligonucleotide
ccaggacuguaaaacguuc

SEQ ID NO: 2214401 - RNA, 19 nt, Artificial Sequence
  Description of Artificial Sequence: Synthetic oligonucleotide
gcagacggaaaaccgugca

SEQ ID NO: 2214402 - RNA, 19 nt, Artificial Sequence
  Description of Artificial Sequence: Synthetic oligonucleotide
guguucauggggaugccua

SEQ ID NO: 2214403 - RNA, 19 nt, Artificial Sequence
  Description of Artificial Sequence: Synthetic oligonucleotide
guguugccggacccgacga

SEQ ID NO: 2214404 - RNA, 19 nt, Artificial Sequence
  Description of Artificial Sequence: Synthetic oligonucleotide
cucgcaaagggcuggguau

SEQ ID NO: 2214405 - RNA, 19 nt, Artificial Sequence
  Description of Artificial Sequence: Synthetic oligonucleotide
gagguccgaaaugaggggu

SEQ ID NO: 2214406 - RNA, 19 nt, Artificial Sequence
  Description of Artificial Sequence: Synthetic oligonucleotide
cacaacacgcagcuggccu

SEQ ID NO: 2214407 - RNA, 19 nt, Artificial Sequence
  Description of Artificial Sequence: Synthetic oligonucleotide
gcaguguuagagggaggcg

SEQ ID NO: 2214408 - RNA, 19 nt, Artificial Sequence
  Description of Artificial Sequence: Synthetic oligonucleotide
ccacagcagacggaaaacc

SEQ ID NO: 2214409 - RNA, 19 nt, Artificial Sequence
  Description of Artificial Sequence: Synthetic oligonucleotide
ccuagauccaacuggggcu

SEQ ID NO: 2214410 - RNA, 19 nt, Artificial Sequence
  Description of Artificial Sequence: Synthetic oligonucleotide
ugcgaccggcguuguguug

SEQ ID NO: 2214411 - RNA, 19 nt, Artificial Sequence
  Description of Artificial Sequence: Synthetic oligonucleotide
agacaccgaagaagcgcuc

SEQ ID NO: 2214412 - RNA, 19 nt, Artificial Sequence
  Description of Artificial Sequence: Synthetic oligonucleotide
gcccaaucagacuucccca

SEQ ID NO: 2214413 - RNA, 19 nt, Artificial Sequence
  Description of Artificial Sequence: Synthetic oligonucleotide
acggaaaaccgugcaggau

SEQ ID NO: 2214414 - RNA, 19 nt, Artificial Sequence
  Description of Artificial Sequence: Synthetic oligonucleotide
gcuccggucucgcuguaug

SEQ ID NO: 2214415 - RNA, 19 nt, Artificial Sequence
  Description of Artificial Sequence: Synthetic oligonucleotide
gguccucgcccgcuggucc

SEQ ID NO: 2214416 - RNA, 19 nt, Artificial Sequence
  Description of Artificial Sequence: Synthetic oligonucleotide
gcucaaguaaaagcugcca

SEQ ID NO: 2214417 - RNA, 19 nt, Artificial Sequence
  Description of Artificial Sequence: Synthetic oligonucleotide
uugcgaccggcguuguguu

SEQ ID NO: 2214418 - RNA, 19 nt, Artificial Sequence
  Description of Artificial Sequence: Synthetic oligonucleotide
cgcaguguuagagggaggc

SEQ ID NO: 2214419 - RNA, 19 nt, Artificial Sequence
  Description of Artificial Sequence: Synthetic oligonucleotide
gcacaaggggcccucuuca

SEQ ID NO: 2214420 - RNA, 19 nt, Artificial Sequence
  Description of Artificial Sequence: Synthetic oligonucleotide
cccacguaaacgcggcccc

SEQ ID NO: 2214421 - RNA, 19 nt, Artificial Sequence
  Description of Artificial Sequence: Synthetic oligonucleotide
ggaccucgcaaagggcugg

SEQ ID NO: 2214422 - RNA, 19 nt, Artificial Sequence
  Description of Artificial Sequence: Synthetic oligonucleotide
gcaugugcgccaacacgcg

SEQ ID NO: 2214423 - RNA, 19 nt, Artificial Sequence
  Description of Artificial Sequence: Synthetic oligonucleotide
gcguccacauggcacugcc

SEQ ID NO: 2214424 - RNA, 19 nt, Artificial Sequence
  Description of Artificial Sequence: Synthetic oligonucleotide
gcgguccaaaggcuauggg

SEQ ID NO: 2214425 - RNA, 19 nt, Artificial Sequence
  Description of Artificial Sequence: Synthetic oligonucleotide
ggcuuuuaggggacaacca

SEQ ID NO: 2214426 - RNA, 19 nt, Artificial Sequence
  Description of Artificial Sequence: Synthetic oligonucleotide
acguaaacgcggccccgau

SEQ ID NO: 2214427 - RNA, 19 nt, Artificial Sequence
  Description of Artificial Sequence: Synthetic oligonucleotide
ccaacuggggcuugcuguc

SEQ ID NO: 2214428 - RNA, 19 nt, Artificial Sequence
  Description of Artificial Sequence: Synthetic oligonucleotide
cacccaugguggagcucgg

SEQ ID NO: 2214429 - RNA, 19 nt, Artificial Sequence
  Description of Artificial Sequence: Synthetic oligonucleotide
gcgaccggcguuguguugc

SEQ ID NO: 2214430 - RNA, 19 nt, Artificial Sequence
  Description of Artificial Sequence: Synthetic oligonucleotide
uucuggguuggagguccga

SEQ ID NO: 2214431 - RNA, 19 nt, Artificial Sequence
  Description of Artificial Sequence: Synthetic oligonucleotide
agucucacuugcagcgagu

SEQ ID NO: 2214432 - RNA, 19 nt, Artificial Sequence
  Description of Artificial Sequence: Synthetic oligonucleotide
cccacgugagucaggcggc

SEQ ID NO: 2214433 - RNA, 19 nt, Artificial Sequence
  Description of Artificial Sequence: Synthetic oligonucleotide
ggguauccaggacuguaaa

SEQ ID NO: 2214434 - RNA, 19 nt, Artificial Sequence
  Description of Artificial Sequence: Synthetic oligonucleotide
gaggcgcacccauggugga

SEQ ID NO: 2214435 - RNA, 19 nt, Artificial Sequence
  Description of Artificial Sequence: Synthetic oligonucleotide
agagggaggcgcacccaug

SEQ ID NO: 2214436 - RNA, 19 nt, Artificial Sequence
  Description of Artificial Sequence: Synthetic oligonucleotide
ggcgcacccaugguggagc

SEQ ID NO: 2214437 - RNA, 19 nt, Artificial Sequence
  Description of Artificial Sequence: Synthetic oligonucleotide
ccuucuagaggcagaagcu

SEQ ID NO: 2214438 - RNA, 19 nt, Artificial Sequence
  Description of Artificial Sequence: Synthetic oligonucleotide
cuggguauccaggacugua

SEQ ID NO: 2214439 - RNA, 19 nt, Artificial Sequence
  Description of Artificial Sequence: Synthetic oligonucleotide
ggaugccuaggaucagguc

SEQ ID NO: 2214440 - RNA, 19 nt, Artificial Sequence
  Description of Artificial Sequence: Synthetic oligonucleotide
uuccaagggcugggguggc

SEQ ID NO: 2214441 - RNA, 19 nt, Artificial Sequence
  Description of Artificial Sequence: Synthetic oligonucleotide
gcguuguguugccggaccc

SEQ ID NO: 2214442 - RNA, 19 nt, Artificial Sequence
  Description of Artificial Sequence: Synthetic oligonucleotide
aggguccucgcccgcuggu

SEQ ID NO: 2214443 - RNA, 19 nt, Artificial Sequence
  Description of Artificial Sequence: Synthetic oligonucleotide
ggccccacgugagucaggc

SEQ ID NO: 2214444 - RNA, 19 nt, Artificial Sequence
  Description of Artificial Sequence: Synthetic oligonucleotide
caggaacucuucugccaga

SEQ ID NO: 2214445 - RNA, 19 nt, Artificial Sequence
  Description of Artificial Sequence: Synthetic oligonucleotide
guguuagagggaggcgcac

SEQ ID NO: 2214446 - RNA, 19 nt, Artificial Sequence
  Description of Artificial Sequence: Synthetic oligonucleotide
ggacuucggaccucgcaaa

SEQ ID NO: 2214447 - RNA, 19 nt, Artificial Sequence
  Description of Artificial Sequence: Synthetic oligonucleotide
gaccggcguuguguugccg

SEQ ID NO: 2214448 - RNA, 19 nt, Artificial Sequence
  Description of Artificial Sequence: Synthetic oligonucleotide
cugggacuucggaccucgc

SEQ ID NO: 2214449 - RNA, 19 nt, Artificial Sequence
  Description of Artificial Sequence: Synthetic oligonucleotide
cgccaacacgcgcaggugg

SEQ ID NO: 2214450 - RNA, 19 nt, Artificial Sequence
  Description of Artificial Sequence: Synthetic oligonucleotide
ccgaagaagcgcuccgguc

SEQ ID NO: 2214451 - RNA, 19 nt, Artificial Sequence
  Description of Artificial Sequence: Synthetic oligonucleotide
caauggccuucuagaggca

SEQ ID NO: 2214452 - RNA, 19 nt, Artificial Sequence
  Description of Artificial Sequence: Synthetic oligonucleotide
aggcgcacccaugguggag

SEQ ID NO: 2214453 - RNA, 19 nt, Artificial Sequence
  Description of Artificial Sequence: Synthetic oligonucleotide
guguaaugguggcgcugga

SEQ ID NO: 2214454 - RNA, 19 nt, Artificial Sequence
  Description of Artificial Sequence: Synthetic oligonucleotide
gcuguaugucccauccgga

SEQ ID NO: 2214455 - RNA, 19 nt, Artificial Sequence
  Description of Artificial Sequence: Synthetic oligonucleotide
ccgcugguccgccaggcgc

SEQ ID NO: 2214456 - RNA, 19 nt, Artificial Sequence
  Description of Artificial Sequence: Synthetic oligonucleotide
caaaggcuaugggcaugug

SEQ ID NO: 2214457 - RNA, 19 nt, Artificial Sequence
  Description of Artificial Sequence: Synthetic oligonucleotide
gucucagccagcgcagugu

SEQ ID NO: 2214458 - RNA, 19 nt, Artificial Sequence
  Description of Artificial Sequence: Synthetic oligonucleotide
cagcgcaguguuagaggga

SEQ ID NO: 2214459 - RNA, 19 nt, Artificial Sequence
  Description of Artificial Sequence: Synthetic oligonucleotide
ucggagcaugugcgccaac

SEQ ID NO: 2214460 - RNA, 19 nt, Artificial Sequence
  Description of Artificial Sequence: Synthetic oligonucleotide
gcaagucuguccaguguuc

SEQ ID NO: 2214461 - RNA, 19 nt, Artificial Sequence
  Description of Artificial Sequence: Synthetic oligonucleotide
gaggggcaggaacaguguu

SEQ ID NO: 2214462 - RNA, 19 nt, Artificial Sequence
  Description of Artificial Sequence: Synthetic oligonucleotide
gauccaacuggggcuugcu

SEQ ID NO: 2214463 - RNA, 19 nt, Artificial Sequence
  Description of Artificial Sequence: Synthetic oligonucleotide
ggggacaaccagggugggg

SEQ ID NO: 2214464 - RNA, 19 nt, Artificial Sequence
  Description of Artificial Sequence: Synthetic oligonucleotide
cacguaaacgcggccccga

SEQ ID NO: 2214465 - RNA, 19 nt, Artificial Sequence
  Description of Artificial Sequence: Synthetic oligonucleotide
cuuccccaaagcagagacu

SEQ ID NO: 2214466 - RNA, 19 nt, Artificial Sequence
  Description of Artificial Sequence: Synthetic oligonucleotide
cauccggacuuucuggguu

SEQ ID NO: 2214467 - RNA, 19 nt, Artificial Sequence
  Description of Artificial Sequence: Synthetic oligonucleotide
gcgugaggcuugaggaugc

SEQ ID NO: 2214468 - RNA, 19 nt, Artificial Sequence
  Description of Artificial Sequence: Synthetic oligonucleotide
gcucggagcaugugcgcca

SEQ ID NO: 2214469 - RNA, 19 nt, Artificial Sequence
  Description of Artificial Sequence: Synthetic oligonucleotide
cagagacuucuuacagcua

SEQ ID NO: 2214470 - RNA, 19 nt, Artificial Sequence
  Description of Artificial Sequence: Synthetic oligonucleotide
caggcccauucaaaccgaa

SEQ ID NO: 2214471 - RNA, 19 nt, Artificial Sequence
  Description of Artificial Sequence: Synthetic oligonucleotide
gcgcuggagaaaguucaug

SEQ ID NO: 2214472 - RNA, 19 nt, Artificial Sequence
  Description of Artificial Sequence: Synthetic oligonucleotide
gcagcaugcgcgcgcacaa

SEQ ID NO: 2214473 - RNA, 19 nt, Artificial Sequence
  Description of Artificial Sequence: Synthetic oligonucleotide
cuagauccaacuggggcuu

SEQ ID NO: 2214474 - RNA, 19 nt, Artificial Sequence
  Description of Artificial Sequence: Synthetic oligonucleotide
cccaaucagacuuccccaa

SEQ ID NO: 2214475 - RNA, 19 nt, Artificial Sequence
  Description of Artificial Sequence: Synthetic oligonucleotide
ggucucgcuguauguccca

SEQ ID NO: 2214476 - RNA, 19 nt, Artificial Sequence
  Description of Artificial Sequence: Synthetic oligonucleotide
gcgcgcgcacaacacgcag

SEQ ID NO: 2214477 - RNA, 19 nt, Artificial Sequence
  Description of Artificial Sequence: Synthetic oligonucleotide
gaagcgcuccggucucgcu

SEQ ID NO: 2214478 - RNA, 19 nt, Artificial Sequence
  Description of Artificial Sequence: Synthetic oligonucleotide
cguuguguugccggacccg

SEQ ID NO: 2214479 - RNA, 19 nt, Artificial Sequence
  Description of Artificial Sequence: Synthetic oligonucleotide
acgcgcagguggaaggcaa

SEQ ID NO: 2214480 - RNA, 19 nt, Artificial Sequence
  Description of Artificial Sequence: Synthetic oligonucleotide
gcaggcgcggccccacgug

SEQ ID NO: 2214481 - RNA, 19 nt, Artificial Sequence
  Description of Artificial Sequence: Synthetic oligonucleotide
ggacuguaaaacguucgau

SEQ ID NO: 2214482 - RNA, 19 nt, Artificial Sequence
  Description of Artificial Sequence: Synthetic oligonucleotide
gcuaggacaauggccuucu

SEQ ID NO: 2214483 - RNA, 19 nt, Artificial Sequence
  Description of Artificial Sequence: Synthetic oligonucleotide
ccgaugccgaggguucugg

SEQ ID NO: 2214484 - RNA, 19 nt, Artificial Sequence
  Description of Artificial Sequence: Synthetic oligonucleotide
caggcgcggccccacguga

SEQ ID NO: 2214485 - RNA, 19 nt, Artificial Sequence
  Description of Artificial Sequence: Synthetic oligonucleotide
cagcaugcgcgcgcacaac

SEQ ID NO: 2214486 - RNA, 19 nt, Artificial Sequence
  Description of Artificial Sequence: Synthetic oligonucleotide
gcaugcgcgcgcacaacac

SEQ ID NO: 2214487 - RNA, 19 nt, Artificial Sequence
  Description of Artificial Sequence: Synthetic oligonucleotide
caacuggggcuugcuguca

SEQ ID NO: 2214488 - RNA, 19 nt, Artificial Sequence
  Description of Artificial Sequence: Synthetic oligonucleotide
ccacguaaacgcggccccg

SEQ ID NO: 2214489 - RNA, 19 nt, Artificial Sequence
  Description of Artificial Sequence: Synthetic oligonucleotide
gguggcgguccaaaggcua

SEQ ID NO: 2214490 - RNA, 19 nt, Artificial Sequence
  Description of Artificial Sequence: Synthetic oligonucleotide
gccaacacgcgcaggugga

SEQ ID NO: 2214491 - RNA, 19 nt, Artificial Sequence
  Description of Artificial Sequence: Synthetic oligonucleotide
cgcgcgcacaacacgcagc

SEQ ID NO: 2214492 - RNA, 19 nt, Artificial Sequence
  Description of Artificial Sequence: Synthetic oligonucleotide
ggccuucuagaggcagaag

SEQ ID NO: 2214493 - RNA, 19 nt, Artificial Sequence
  Description of Artificial Sequence: Synthetic oligonucleotide
gugcgccaacacgcgcagg

SEQ ID NO: 2214494 - RNA, 19 nt, Artificial Sequence
  Description of Artificial Sequence: Synthetic oligonucleotide
aggcgcggccccacgugag

SEQ ID NO: 2214495 - RNA, 19 nt, Artificial Sequence
  Description of Artificial Sequence: Synthetic oligonucleotide
agcuggccuuggguccuag

SEQ ID NO: 2214496 - RNA, 19 nt, Artificial Sequence
  Description of Artificial Sequence: Synthetic oligonucleotide
cgaggguucuggcaguaga

SEQ ID NO: 2214497 - RNA, 19 nt, Artificial Sequence
  Description of Artificial Sequence: Synthetic oligonucleotide
cguaaacgcggccccgaug

SEQ ID NO: 2214498 - RNA, 19 nt, Artificial Sequence
  Description of Artificial Sequence: Synthetic oligonucleotide
ccaaucagacuuccccaaa

SEQ ID NO: 2214499 - RNA, 19 nt, Artificial Sequence
  Description of Artificial Sequence: Synthetic oligonucleotide
cacgcgcagguggaaggca

SEQ ID NO: 2214500 - RNA, 19 nt, Artificial Sequence
  Description of Artificial Sequence: Synthetic oligonucleotide
ccacgugagucaggcggcg

SEQ ID NO: 2214501 - RNA, 19 nt, Artificial Sequence
  Description of Artificial Sequence: Synthetic oligonucleotide
ggacccgacgagcaggauu

SEQ ID NO: 2214502 - RNA, 19 nt, Artificial Sequence
  Description of Artificial Sequence: Synthetic oligonucleotide
cggaccucgcaaagggcug

SEQ ID NO: 2214503 - RNA, 19 nt, Artificial Sequence
  Description of Artificial Sequence: Synthetic oligonucleotide
gccccacgugagucaggcg

SEQ ID NO: 2214504 - RNA, 19 nt, Artificial Sequence
  Description of Artificial Sequence: Synthetic oligonucleotide
cagccagcgcaguguuaga

SEQ ID NO: 2214505 - RNA, 19 nt, Artificial Sequence
  Description of Artificial Sequence: Synthetic oligonucleotide
cguccacauggcacugccc

SEQ ID NO: 2214506 - RNA, 19 nt, Artificial Sequence
  Description of Artificial Sequence: Synthetic oligonucleotide
ggcguccacauggcacugc

SEQ ID NO: 2214507 - RNA, 19 nt, Artificial Sequence
  Description of Artificial Sequence: Synthetic oligonucleotide
cucggagcaugugcgccaa

SEQ ID NO: 2214508 - RNA, 19 nt, Artificial Sequence
  Description of Artificial Sequence: Synthetic oligonucleotide
ccucgcaaagggcugggua

SEQ ID NO: 2214509 - RNA, 19 nt, Artificial Sequence
  Description of Artificial Sequence: Synthetic oligonucleotide
cugcagcaugcgcgcgcac

SEQ ID NO: 2214510 - RNA, 19 nt, Artificial Sequence
  Description of Artificial Sequence: Synthetic oligonucleotide
ccaggcccauucaaaccga

SEQ ID NO: 2214511 - RNA, 19 nt, Artificial Sequence
  Description of Artificial Sequence: Synthetic oligonucleotide
cacaaggggcccucuucau

SEQ ID NO: 2214512 - RNA, 19 nt, Artificial Sequence
  Description of Artificial Sequence: Synthetic oligonucleotide
gcgcaguguuagagggagg

SEQ ID NO: 2214513 - RNA, 19 nt, Artificial Sequence
  Description of Artificial Sequence: Synthetic oligonucleotide
gcggccccacgugagucag

SEQ ID NO: 2214514 - RNA, 19 nt, Artificial Sequence
  Description of Artificial Sequence: Synthetic oligonucleotide
ggcuaugggcauguguaau

SEQ ID NO: 2214515 - RNA, 19 nt, Artificial Sequence
  Description of Artificial Sequence: Synthetic oligonucleotide
cuaggacaauggccuucua

SEQ ID NO: 2214516 - RNA, 19 nt, Artificial Sequence
  Description of Artificial Sequence: Synthetic oligonucleotide
cccgcugguccgccaggcg

SEQ ID NO: 2214517 - RNA, 19 nt, Artificial Sequence
  Description of Artificial Sequence: Synthetic oligonucleotide
guggcgguccaaaggcuau

SEQ ID NO: 2214518 - RNA, 19 nt, Artificial Sequence
  Description of Artificial Sequence: Synthetic oligonucleotide
guccgaaaugagggguggu

SEQ ID NO: 2214519 - RNA, 19 nt, Artificial Sequence
  Description of Artificial Sequence: Synthetic oligonucleotide
cccgacgagcaggauugac

SEQ ID NO: 2214520 - RNA, 19 nt, Artificial Sequence
  Description of Artificial Sequence: Synthetic oligonucleotide
gcgccaacacgcgcaggug

SEQ ID NO: 2214521 - RNA, 19 nt, Artificial Sequence
  Description of Artificial Sequence: Synthetic oligonucleotide
acccgacgagcaggauuga

SEQ ID NO: 2214522 - RNA, 19 nt, Artificial Sequence
  Description of Artificial Sequence: Synthetic oligonucleotide
ccuuggguccuagauccaa

SEQ ID NO: 2214523 - RNA, 19 nt, Artificial Sequence
  Description of Artificial Sequence: Synthetic oligonucleotide
ccaaaggcuaugggcaugu

SEQ ID NO: 2214524 - RNA, 19 nt, Artificial Sequence
  Description of Artificial Sequence: Synthetic oligonucleotide
ccucgcugcgcaggcgcgg

SEQ ID NO: 2214525 - RNA, 19 nt, Artificial Sequence
  Description of Artificial Sequence: Synthetic oligonucleotide
gcgaguugcuucgguucca

SEQ ID NO: 2214526 - RNA, 19 nt, Artificial Sequence
  Description of Artificial Sequence: Synthetic oligonucleotide
caggcucuucccgcaggaa

SEQ ID NO: 2214527 - RNA, 19 nt, Artificial Sequence
  Description of Artificial Sequence: Synthetic oligonucleotide
ccggacccgacgagcagga

SEQ ID NO: 2214528 - RNA, 19 nt, Artificial Sequence
  Description of Artificial Sequence: Synthetic oligonucleotide
cucgcccgcugguccgcca

SEQ ID NO: 2214529 - RNA, 19 nt, Artificial Sequence
  Description of Artificial Sequence: Synthetic oligonucleotide
gucucgcuguaugucccau

SEQ ID NO: 2214530 - RNA, 19 nt, Artificial Sequence
  Description of Artificial Sequence: Synthetic oligonucleotide
ccugcagcaugcgcgcgca

SEQ ID NO: 2214531 - RNA, 19 nt, Artificial Sequence
  Description of Artificial Sequence: Synthetic oligonucleotide
cgaccggcguuguguugcc

SEQ ID NO: 2214532 - RNA, 19 nt, Artificial Sequence
  Description of Artificial Sequence: Synthetic oligonucleotide
ggguccucgcccgcugguc

SEQ ID NO: 2214533 - RNA, 19 nt, Artificial Sequence
  Description of Artificial Sequence: Synthetic oligonucleotide
cugguccgccaggcgccac

SEQ ID NO: 2214534 - RNA, 19 nt, Artificial Sequence
  Description of Artificial Sequence: Synthetic oligonucleotide
gcgcaggcgcggccccacg

SEQ ID NO: 2214535 - RNA, 19 nt, Artificial Sequence
  Description of Artificial Sequence: Synthetic oligonucleotide
caggcggcgugaggcuuga

SEQ ID NO: 2214536 - RNA, 19 nt, Artificial Sequence
  Description of Artificial Sequence: Synthetic oligonucleotide
ggcggccacagcagacgga

SEQ ID NO: 2214537 - RNA, 19 nt, Artificial Sequence
  Description of Artificial Sequence: Synthetic oligonucleotide
gucaggcggcgugaggcuu

SEQ ID NO: 2214538 - RNA, 19 nt, Artificial Sequence
  Description of Artificial Sequence: Synthetic oligonucleotide
cgugagucaggcggcguga

SEQ ID NO: 2214539 - RNA, 19 nt, Artificial Sequence
  Description of Artificial Sequence: Synthetic oligonucleotide
cacgugagucaggcggcgu

SEQ ID NO: 2214540 - RNA, 19 nt, Artificial Sequence
  Description of Artificial Sequence: Synthetic oligonucleotide
ccgaaaugaggggugguuu

SEQ ID NO: 2214541 - RNA, 19 nt, Artificial Sequence
  Description of Artificial Sequence: Synthetic oligonucleotide
aggcggcgugaggcuugag

SEQ ID NO: 2214542 - RNA, 19 nt, Artificial Sequence
  Description of Artificial Sequence: Synthetic oligonucleotide
ccucggcguccacauggca

SEQ ID NO: 2214543 - RNA, 19 nt, Artificial Sequence
  Description of Artificial Sequence: Synthetic oligonucleotide
ggguggcgguccaaaggcu

SEQ ID NO: 2214544 - RNA, 19 nt, Artificial Sequence
  Description of Artificial Sequence: Synthetic oligonucleotide
ggcgcuggagaaaguucau

SEQ ID NO: 2214545 - RNA, 19 nt, Artificial Sequence
  Description of Artificial Sequence: Synthetic oligonucleotide
gcugguccgccaggcgcca

SEQ ID NO: 2214546 - RNA, 19 nt, Artificial Sequence
  Description of Artificial Sequence: Synthetic oligonucleotide
ggccccgaugccgaggguu

SEQ ID NO: 2214547 - RNA, 19 nt, Artificial Sequence
  Description of Artificial Sequence: Synthetic oligonucleotide
ggcgcggccccacgugagu

SEQ ID NO: 2214548 - RNA, 19 nt, Artificial Sequence
  Description of Artificial Sequence: Synthetic oligonucleotide
ccaacacgcgcagguggaa

SEQ ID NO: 2214549 - RNA, 19 nt, Artificial Sequence
  Description of Artificial Sequence: Synthetic oligonucleotide
gccgaggguucuggcagua

SEQ ID NO: 2214550 - RNA, 19 nt, Artificial Sequence
  Description of Artificial Sequence: Synthetic oligonucleotide
gguccgccaggcgccaccu

SEQ ID NO: 2214551 - RNA, 19 nt, Artificial Sequence
  Description of Artificial Sequence: Synthetic oligonucleotide
cggcguuguguugccggac

SEQ ID NO: 2214552 - RNA, 19 nt, Artificial Sequence
  Description of Artificial Sequence: Synthetic oligonucleotide
cgcccgcugguccgccagg

SEQ ID NO: 2214553 - RNA, 19 nt, Artificial Sequence
  Description of Artificial Sequence: Synthetic oligonucleotide
cggccccacgugagucagg

SEQ ID NO: 2214554 - RNA, 19 nt, Artificial Sequence
  Description of Artificial Sequence: Synthetic oligonucleotide
cgcggccccacgugaguca

SEQ ID NO: 2214555 - RNA, 19 nt, Artificial Sequence
  Description of Artificial Sequence: Synthetic oligonucleotide
cacuugcagcgaguugcuu

SEQ ID NO: 2214556 - RNA, 19 nt, Artificial Sequence
  Description of Artificial Sequence: Synthetic oligonucleotide
gcagcacaaggggcccucu

SEQ ID NO: 2214557 - RNA, 19 nt, Artificial Sequence
  Description of Artificial Sequence: Synthetic oligonucleotide
cggcguccacauggcacug

SEQ ID NO: 2214558 - RNA, 19 nt, Artificial Sequence
  Description of Artificial Sequence: Synthetic oligonucleotide
cgcacccaugguggagcuc

SEQ ID NO: 2214559 - RNA, 19 nt, Artificial Sequence
  Description of Artificial Sequence: Synthetic oligonucleotide
cggcgugaggcuugaggau

SEQ ID NO: 2214560 - RNA, 19 nt, Artificial Sequence
  Description of Artificial Sequence: Synthetic oligonucleotide
ccgccaggcgccaccuuuu

SEQ ID NO: 2214561 - RNA, 19 nt, Artificial Sequence
  Description of Artificial Sequence: Synthetic oligonucleotide
cgugaggcuugaggaugcu

SEQ ID NO: 2214562 - RNA, 19 nt, Artificial Sequence
  Description of Artificial Sequence: Synthetic oligonucleotide
cgcaggcgcggccccacgu

SEQ ID NO: 2214563 - RNA, 19 nt, Artificial Sequence
  Description of Artificial Sequence: Synthetic oligonucleotide
cgcuccggucucgcuguau

SEQ ID NO: 2214564 - RNA, 19 nt, Artificial Sequence
  Description of Artificial Sequence: Synthetic oligonucleotide
cggacccgacgagcaggau

SEQ ID NO: 2214565 - RNA, 19 nt, Artificial Sequence
  Description of Artificial Sequence: Synthetic oligonucleotide
cggccccgaugccgagggu

SEQ ID NO: 2214566 - RNA, 19 nt, Artificial Sequence
  Description of Artificial Sequence: Synthetic oligonucleotide
auaaagagaacucuggucc

SEQ ID NO: 2214567 - RNA, 19 nt, Artificial Sequence
  Description of Artificial Sequence: Synthetic oligonucleotide
aguaucaucaaaaucaucc

SEQ ID NO: 2214568 - RNA, 19 nt, Artificial Sequence
  Description of Artificial Sequence: Synthetic oligonucleotide
ucuuuaauaaauaaagaga

SEQ ID NO: 2214569 - RNA, 19 nt, Artificial Sequence
  Description of Artificial Sequence: Synthetic oligonucleotide
aaagccuaaaaccaagaac

SEQ ID NO: 2214570 - RNA, 19 nt, Artificial Sequence
  Description of Artificial Sequence: Synthetic oligonucleotide
ucuuccaggaaccaaaggg

SEQ ID NO: 2214571 - RNA, 19 nt, Artificial Sequence
  Description of Artificial Sequence: Synthetic oligonucleotide
cuuaauuagagaaagacca

SEQ ID NO: 2214572 - RNA, 19 nt, Artificial Sequence
  Description of Artificial Sequence: Synthetic oligonucleotide
aauugauaaauccucugag

SEQ ID NO: 2214573 - RNA, 19 nt, Artificial Sequence
  Description of Artificial Sequence: Synthetic oligonucleotide
gauuugagaaaguuucugg

SEQ ID NO: 2214574 - RNA, 19 nt, Artificial Sequence
  Description of Artificial Sequence: Synthetic oligonucleotide
aaucccaucauuuccuauc

SEQ ID NO: 2214575 - RNA, 19 nt, Artificial Sequence
  Description of Artificial Sequence: Synthetic oligonucleotide
uguagucaaaauaugcugc

SEQ ID NO: 2214576 - RNA, 19 nt, Artificial Sequence
  Description of Artificial Sequence: Synthetic oligonucleotide
aagccuaaaaccaagaaca

SEQ ID NO: 2214577 - RNA, 19 nt, Artificial Sequence
  Description of Artificial Sequence: Synthetic oligonucleotide
uuuguagucaaaauaugcu

SEQ ID NO: 2214578 - RNA, 19 nt, Artificial Sequence
  Description of Artificial Sequence: Synthetic oligonucleotide
gauaaauccucugagaaac

SEQ ID NO: 2214579 - RNA, 19 nt, Artificial Sequence
  Description of Artificial Sequence: Synthetic oligonucleotide
cuuuguagucaaaauaugc

SEQ ID NO: 2214580 - RNA, 19 nt, Artificial Sequence
  Description of Artificial Sequence: Synthetic oligonucleotide
auuagagaaagaccaaauc

SEQ ID NO: 2214581 - RNA, 19 nt, Artificial Sequence
  Description of Artificial Sequence: Synthetic oligonucleotide
uugcauaauugauaaaucc

SEQ ID NO: 2214582 - RNA, 19 nt, Artificial Sequence
  Description of Artificial Sequence: Synthetic oligonucleotide
uaauugauaaauccucuga

SEQ ID NO: 2214583 - RNA, 19 nt, Artificial Sequence
  Description of Artificial Sequence: Synthetic oligonucleotide
uugauaaauccucugagaa

SEQ ID NO: 2214584 - RNA, 19 nt, Artificial Sequence
  Description of Artificial Sequence: Synthetic oligonucleotide
uuuugcauaauugauaaau

SEQ ID NO: 2214585 - RNA, 19 nt, Artificial Sequence
  Description of Artificial Sequence: Synthetic oligonucleotide
aauaugcugcacucucugc

SEQ ID NO: 2214586 - RNA, 19 nt, Artificial Sequence
  Description of Artificial Sequence: Synthetic oligonucleotide
aacgccauggcgcagcggg

SEQ ID NO: 2214587 - RNA, 19 nt, Artificial Sequence
  Description of Artificial Sequence: Synthetic oligonucleotide
ugcauaauugauaaauccu

SEQ ID NO: 2214588 - RNA, 19 nt, Artificial Sequence
  Description of Artificial Sequence: Synthetic oligonucleotide
aaagaccaaauccugagau

SEQ ID NO: 2214589 - RNA, 19 nt, Artificial Sequence
  Description of Artificial Sequence: Synthetic oligonucleotide
aaaccaagaacacccacca

SEQ ID NO: 2214590 - RNA, 19 nt, Artificial Sequence
  Description of Artificial Sequence: Synthetic oligonucleotide
aacccaauccaguugaaga

SEQ ID NO: 2214591 - RNA, 19 nt, Artificial Sequence
  Description of Artificial Sequence: Synthetic oligonucleotide
aacgccaacgccauggcgc

SEQ ID NO: 2214592 - RNA, 19 nt, Artificial Sequence
  Description of Artificial Sequence: Synthetic oligonucleotide
uuguagucaaaauaugcug

SEQ ID NO: 2214593 - RNA, 19 nt, Artificial Sequence
  Description of Artificial Sequence: Synthetic oligonucleotide
agaaagaccaaauccugag

SEQ ID NO: 2214594 - RNA, 19 nt, Artificial Sequence
  Description of Artificial Sequence: Synthetic oligonucleotide
aacugggcaguguuguagc

SEQ ID NO: 2214595 - RNA, 19 nt, Artificial Sequence
  Description of Artificial Sequence: Synthetic oligonucleotide
uguuguagccacauuauaa

SEQ ID NO: 2214596 - RNA, 19 nt, Artificial Sequence
  Description of Artificial Sequence: Synthetic oligonucleotide
guuguagccacauuauaag

SEQ ID NO: 2214597 - RNA, 19 nt, Artificial Sequence
  Description of Artificial Sequence: Synthetic oligonucleotide
ucagccucaucauaacugg

SEQ ID NO: 2214598 - RNA, 19 nt, Artificial Sequence
  Description of Artificial Sequence: Synthetic oligonucleotide
uccaguugaagagaaaugc

SEQ ID NO: 2214599 - RNA, 19 nt, Artificial Sequence
  Description of Artificial Sequence: Synthetic oligonucleotide
auaaggauccacuuaauua

SEQ ID NO: 2214600 - RNA, 19 nt, Artificial Sequence
  Description of Artificial Sequence: Synthetic oligonucleotide
uagccacauuauaagaugg

SEQ ID NO: 2214601 - RNA, 19 nt, Artificial Sequence
  Description of Artificial Sequence: Synthetic oligonucleotide
uuugcauaauugauaaauc

SEQ ID NO: 2214602 - RNA, 19 nt, Artificial Sequence
  Description of Artificial Sequence: Synthetic oligonucleotide
auaauugauaaauccucug

SEQ ID NO: 2214603 - RNA, 19 nt, Artificial Sequence
  Description of Artificial Sequence: Synthetic oligonucleotide
ucuuuguagucaaaauaug

SEQ ID NO: 2214604 - RNA, 19 nt, Artificial Sequence
  Description of Artificial Sequence: Synthetic oligonucleotide
ucugcagaaaugcugcugu

SEQ ID NO: 2214605 - RNA, 19 nt, Artificial Sequence
  Description of Artificial Sequence: Synthetic oligonucleotide
aauccucugagaaacagga

SEQ ID NO: 2214606 - RNA, 19 nt, Artificial Sequence
  Description of Artificial Sequence: Synthetic oligonucleotide
aggaaaauagguggaaaac

SEQ ID NO: 2214607 - RNA, 19 nt, Artificial Sequence
  Description of Artificial Sequence: Synthetic oligonucleotide
cacuuaauuagagaaagac

SEQ ID NO: 2214608 - RNA, 19 nt, Artificial Sequence
  Description of Artificial Sequence: Synthetic oligonucleotide
uguagccacauuauaagau

SEQ ID NO: 2214609 - RNA, 19 nt, Artificial Sequence
  Description of Artificial Sequence: Synthetic oligonucleotide
aaauagguggaaaaccuga

SEQ ID NO: 2214610 - RNA, 19 nt, Artificial Sequence
  Description of Artificial Sequence: Synthetic oligonucleotide
ugcucucgauucuugaggg

SEQ ID NO: 2214611 - RNA, 19 nt, Artificial Sequence
  Description of Artificial Sequence: Synthetic oligonucleotide
agucaaaauaugcugcacu

SEQ ID NO: 2214612 - RNA, 19 nt, Artificial Sequence
  Description of Artificial Sequence: Synthetic oligonucleotide
uugagaaaguuucuggcau

SEQ ID NO: 2214613 - RNA, 19 nt, Artificial Sequence
  Description of Artificial Sequence: Synthetic oligonucleotide
guaucaucaaaaucauccc

SEQ ID NO: 2214614 - RNA, 19 nt, Artificial Sequence
  Description of Artificial Sequence: Synthetic oligonucleotide
aagaccaaauccugagaug

SEQ ID NO: 2214615 - RNA, 19 nt, Artificial Sequence
  Description of Artificial Sequence: Synthetic oligonucleotide
uuaauuagagaaagaccaa

SEQ ID NO: 2214616 - RNA, 19 nt, Artificial Sequence
  Description of Artificial Sequence: Synthetic oligonucleotide
gaaaguuucuggcaucuuc

SEQ ID NO: 2214617 - RNA, 19 nt, Artificial Sequence
  Description of Artificial Sequence: Synthetic oligonucleotide
cugguggugauucacuucc

SEQ ID NO: 2214618 - RNA, 19 nt, Artificial Sequence
  Description of Artificial Sequence: Synthetic oligonucleotide
ucuugguucucucagccuc

SEQ ID NO: 2214619 - RNA, 19 nt, Artificial Sequence
  Description of Artificial Sequence: Synthetic oligonucleotide
aaaauagguggaaaaccug

SEQ ID NO: 2214620 - RNA, 19 nt, Artificial Sequence
  Description of Artificial Sequence: Synthetic oligonucleotide
aacaggagaaagccuaaaa

SEQ ID NO: 2214621 - RNA, 19 nt, Artificial Sequence
  Description of Artificial Sequence: Synthetic oligonucleotide
aauuagagaaagaccaaau

SEQ ID NO: 2214622 - RNA, 19 nt, Artificial Sequence
  Description of Artificial Sequence: Synthetic oligonucleotide
ucaguaucaucaaaaucau

SEQ ID NO: 2214623 - RNA, 19 nt, Artificial Sequence
  Description of Artificial Sequence: Synthetic oligonucleotide
cucagccucaucauaacug

SEQ ID NO: 2214624 - RNA, 19 nt, Artificial Sequence
  Description of Artificial Sequence: Synthetic oligonucleotide
uggugauucacuuccugca

SEQ ID NO: 2214625 - RNA, 19 nt, Artificial Sequence
  Description of Artificial Sequence: Synthetic oligonucleotide
ggagauuugagaaaguuuc

SEQ ID NO: 2214626 - RNA, 19 nt, Artificial Sequence
  Description of Artificial Sequence: Synthetic oligonucleotide
uaauuagagaaagaccaaa

SEQ ID NO: 2214627 - RNA, 19 nt, Artificial Sequence
  Description of Artificial Sequence: Synthetic oligonucleotide
gaacgggcgagcugaaggg

SEQ ID NO: 2214628 - RNA, 19 nt, Artificial Sequence
  Description of Artificial Sequence: Synthetic oligonucleotide
uaugcugcacucucugcag

SEQ ID NO: 2214629 - RNA, 19 nt, Artificial Sequence
  Description of Artificial Sequence: Synthetic oligonucleotide
aaaucaucccgacccacaa

SEQ ID NO: 2214630 - RNA, 19 nt, Artificial Sequence
  Description of Artificial Sequence: Synthetic oligonucleotide
ucaaaaucaucccgaccca

SEQ ID NO: 2214631 - RNA, 19 nt, Artificial Sequence
  Description of Artificial Sequence: Synthetic oligonucleotide
gaaaugcugcuguauggug

SEQ ID NO: 2214632 - RNA, 19 nt, Artificial Sequence
  Description of Artificial Sequence: Synthetic oligonucleotide
gagaaagccuaaaaccaag

SEQ ID NO: 2214633 - RNA, 19 nt, Artificial Sequence
  Description of Artificial Sequence: Synthetic oligonucleotide
guauccaggaaaauaggug

SEQ ID NO: 2214634 - RNA, 19 nt, Artificial Sequence
  Description of Artificial Sequence: Synthetic oligonucleotide
gaagagaaaugccaugaaa

SEQ ID NO: 2214635 - RNA, 19 nt, Artificial Sequence
  Description of Artificial Sequence: Synthetic oligonucleotide
agauuugagaaaguuucug

SEQ ID NO: 2214636 - RNA, 19 nt, Artificial Sequence
  Description of Artificial Sequence: Synthetic oligonucleotide
cccagauucaucuuuguag

SEQ ID NO: 2214637 - RNA, 19 nt, Artificial Sequence
  Description of Artificial Sequence: Synthetic oligonucleotide
agauucaucuuuguaguca

SEQ ID NO: 2214638 - RNA, 19 nt, Artificial Sequence
  Description of Artificial Sequence: Synthetic oligonucleotide
gagaacucugguccugggg

SEQ ID NO: 2214639 - RNA, 19 nt, Artificial Sequence
  Description of Artificial Sequence: Synthetic oligonucleotide
uuuccuauccucagcuggu

SEQ ID NO: 2214640 - RNA, 19 nt, Artificial Sequence
  Description of Artificial Sequence: Synthetic oligonucleotide
gaaaauagguggaaaaccu

SEQ ID NO: 2214641 - RNA, 19 nt, Artificial Sequence
  Description of Artificial Sequence: Synthetic oligonucleotide
caaauccugagauggcccc

SEQ ID NO: 2214642 - RNA, 19 nt, Artificial Sequence
  Description of Artificial Sequence: Synthetic oligonucleotide
aaacccaauccaguugaag

SEQ ID NO: 2214643 - RNA, 19 nt, Artificial Sequence
  Description of Artificial Sequence: Synthetic oligonucleotide
ucauaacugggcaguguug

SEQ ID NO: 2214644 - RNA, 19 nt, Artificial Sequence
  Description of Artificial Sequence: Synthetic oligonucleotide
ugcaacugcugguacccgg

SEQ ID NO: 2214645 - RNA, 19 nt, Artificial Sequence
  Description of Artificial Sequence: Synthetic oligonucleotide
agccucaucauaacugggc

SEQ ID NO: 2214646 - RNA, 19 nt, Artificial Sequence
  Description of Artificial Sequence: Synthetic oligonucleotide
aacuuuugcauaauugaua

SEQ ID NO: 2214647 - RNA, 19 nt, Artificial Sequence
  Description of Artificial Sequence: Synthetic oligonucleotide
aucaucccgacccacaaaa

SEQ ID NO: 2214648 - RNA, 19 nt, Artificial Sequence
  Description of Artificial Sequence: Synthetic oligonucleotide
aucaucaaaaucaucccga

SEQ ID NO: 2214649 - RNA, 19 nt, Artificial Sequence
  Description of Artificial Sequence: Synthetic oligonucleotide
auagguggaaaaccugaca

SEQ ID NO: 2214650 - RNA, 19 nt, Artificial Sequence
  Description of Artificial Sequence: Synthetic oligonucleotide
uaacugggcaguguuguag

SEQ ID NO: 2214651 - RNA, 19 nt, Artificial Sequence
  Description of Artificial Sequence: Synthetic oligonucleotide
ugaagggacgcggacgccg

SEQ ID NO: 2214652 - RNA, 19 nt, Artificial Sequence
  Description of Artificial Sequence: Synthetic oligonucleotide
caucauuuccuauccucag

SEQ ID NO: 2214653 - RNA, 19 nt, Artificial Sequence
  Description of Artificial Sequence: Synthetic oligonucleotide
uugccagaaaacaucuuua

SEQ ID NO: 2214654 - RNA, 19 nt, Artificial Sequence
  Description of Artificial Sequence: Synthetic oligonucleotide
guagucaaaauaugcugca

SEQ ID NO: 2214655 - RNA, 19 nt, Artificial Sequence
  Description of Artificial Sequence: Synthetic oligonucleotide
gaaagccuaaaaccaagaa

SEQ ID NO: 2214656 - RNA, 19 nt, Artificial Sequence
  Description of Artificial Sequence: Synthetic oligonucleotide
uacccggugccgcaggccg

SEQ ID NO: 2214657 - RNA, 19 nt, Artificial Sequence
  Description of Artificial Sequence: Synthetic oligonucleotide
aaacccagauucaucuuug

SEQ ID NO: 2214658 - RNA, 19 nt, Artificial Sequence
  Description of Artificial Sequence: Synthetic oligonucleotide
agagguacgugccgcggcg

SEQ ID NO: 2214659 - RNA, 19 nt, Artificial Sequence
  Description of Artificial Sequence: Synthetic oligonucleotide
agggaucguggcuucaguc

SEQ ID NO: 2214660 - RNA, 19 nt, Artificial Sequence
  Description of Artificial Sequence: Synthetic oligonucleotide
caucaaaaucaucccgacc

SEQ ID NO: 2214661 - RNA, 19 nt, Artificial Sequence
  Description of Artificial Sequence: Synthetic oligonucleotide
aucauaacugggcaguguu

SEQ ID NO: 2214662 - RNA, 19 nt, Artificial Sequence
  Description of Artificial Sequence: Synthetic oligonucleotide
agagaaagaccaaauccug

SEQ ID NO: 2214663 - RNA, 19 nt, Artificial Sequence
  Description of Artificial Sequence: Synthetic oligonucleotide
cuggggagauuugagaaag

SEQ ID NO: 2214664 - RNA, 19 nt, Artificial Sequence
  Description of Artificial Sequence: Synthetic oligonucleotide
aaaaucccaucauuuccua

SEQ ID NO: 2214665 - RNA, 19 nt, Artificial Sequence
  Description of Artificial Sequence: Synthetic oligonucleotide
aaagggaucguggcuucag

SEQ ID NO: 2214666 - RNA, 19 nt, Artificial Sequence
  Description of Artificial Sequence: Synthetic oligonucleotide
aucgucggaaggccgagag

SEQ ID NO: 2214667 - RNA, 19 nt, Artificial Sequence
  Description of Artificial Sequence: Synthetic oligonucleotide
ugccagaaaacaucuuuaa

SEQ ID NO: 2214668 - RNA, 19 nt, Artificial Sequence
  Description of Artificial Sequence: Synthetic oligonucleotide
uguaugguggaggagcauc

SEQ ID NO: 2214669 - RNA, 19 nt, Artificial Sequence
  Description of Artificial Sequence: Synthetic oligonucleotide
agaaaugcugcuguauggu

SEQ ID NO: 2214670 - RNA, 19 nt, Artificial Sequence
  Description of Artificial Sequence: Synthetic oligonucleotide
ucuuccgaacuuuugcaua

SEQ ID NO: 2214671 - RNA, 19 nt, Artificial Sequence
  Description of Artificial Sequence: Synthetic oligonucleotide
aaaucccaucauuuccuau

SEQ ID NO: 2214672 - RNA, 19 nt, Artificial Sequence
  Description of Artificial Sequence: Synthetic oligonucleotide
cauaccuucccgcagcuga

SEQ ID NO: 2214673 - RNA, 19 nt, Artificial Sequence
  Description of Artificial Sequence: Synthetic oligonucleotide
ugagaaaguuucuggcauc

SEQ ID NO: 2214674 - RNA, 19 nt, Artificial Sequence
  Description of Artificial Sequence: Synthetic oligonucleotide
cagggaaggacggcgaacg

SEQ ID NO: 2214675 - RNA, 19 nt, Artificial Sequence
  Description of Artificial Sequence: Synthetic oligonucleotide
ucuggcaucuuccgaacuu

SEQ ID NO: 2214676 - RNA, 19 nt, Artificial Sequence
  Description of Artificial Sequence: Synthetic oligonucleotide
aucaaaguauccaggaaaa

SEQ ID NO: 2214677 - RNA, 19 nt, Artificial Sequence
  Description of Artificial Sequence: Synthetic oligonucleotide
ucucgauucuugagggacu

SEQ ID NO: 2214678 - RNA, 19 nt, Artificial Sequence
  Description of Artificial Sequence: Synthetic oligonucleotide
ccaggaaccaaagggaucg

SEQ ID NO: 2214679 - RNA, 19 nt, Artificial Sequence
  Description of Artificial Sequence: Synthetic oligonucleotide
cuggucaguaucaucaaaa

SEQ ID NO: 2214680 - RNA, 19 nt, Artificial Sequence
  Description of Artificial Sequence: Synthetic oligonucleotide
cucucgauucuugagggac

SEQ ID NO: 2214681 - RNA, 19 nt, Artificial Sequence
  Description of Artificial Sequence: Synthetic oligonucleotide
cauaauugauaaauccucu

SEQ ID NO: 2214682 - RNA, 19 nt, Artificial Sequence
  Description of Artificial Sequence: Synthetic oligonucleotide
gcauaauugauaaauccuc

SEQ ID NO: 2214683 - RNA, 19 nt, Artificial Sequence
  Description of Artificial Sequence: Synthetic oligonucleotide
uccugagauggccccauac

SEQ ID NO: 2214684 - RNA, 19 nt, Artificial Sequence
  Description of Artificial Sequence: Synthetic oligonucleotide
agccuaaaaccaagaacac

SEQ ID NO: 2214685 - RNA, 19 nt, Artificial Sequence
  Description of Artificial Sequence: Synthetic oligonucleotide
gcagaaaugcugcuguaug

SEQ ID NO: 2214686 - RNA, 19 nt, Artificial Sequence
  Description of Artificial Sequence: Synthetic oligonucleotide
aacccagauucaucuuugu

SEQ ID NO: 2214687 - RNA, 19 nt, Artificial Sequence
  Description of Artificial Sequence: Synthetic oligonucleotide
gagaaagaccaaauccuga

SEQ ID NO: 2214688 - RNA, 19 nt, Artificial Sequence
  Description of Artificial Sequence: Synthetic oligonucleotide
caucccgacccacaaaauc

SEQ ID NO: 2214689 - RNA, 19 nt, Artificial Sequence
  Description of Artificial Sequence: Synthetic oligonucleotide
uccuauccucagcugguca

SEQ ID NO: 2214690 - RNA, 19 nt, Artificial Sequence
  Description of Artificial Sequence: Synthetic oligonucleotide
uccaggaaccaaagggauc

SEQ ID NO: 2214691 - RNA, 19 nt, Artificial Sequence
  Description of Artificial Sequence: Synthetic oligonucleotide
gccacauuauaagaugggg

SEQ ID NO: 2214692 - RNA, 19 nt, Artificial Sequence
  Description of Artificial Sequence: Synthetic oligonucleotide
aagggaucguggcuucagu

SEQ ID NO: 2214693 - RNA, 19 nt, Artificial Sequence
  Description of Artificial Sequence: Synthetic oligonucleotide
ccaguugaagagaaaugcc

SEQ ID NO: 2214694 - RNA, 19 nt, Artificial Sequence
  Description of Artificial Sequence: Synthetic oligonucleotide
ggugauucacuuccugcag

SEQ ID NO: 2214695 - RNA, 19 nt, Artificial Sequence
  Description of Artificial Sequence: Synthetic oligonucleotide
cuaaaaccaagaacaccca

SEQ ID NO: 2214696 - RNA, 19 nt, Artificial Sequence
  Description of Artificial Sequence: Synthetic oligonucleotide
agccacauuauaagauggg

SEQ ID NO: 2214697 - RNA, 19 nt, Artificial Sequence
  Description of Artificial Sequence: Synthetic oligonucleotide
aaucaucccgacccacaaa

SEQ ID NO: 2214698 - RNA, 19 nt, Artificial Sequence
  Description of Artificial Sequence: Synthetic oligonucleotide
agcugaagggacgcggacg

SEQ ID NO: 2214699 - RNA, 19 nt, Artificial Sequence
  Description of Artificial Sequence: Synthetic oligonucleotide
ucgucggaaggccgagagg

SEQ ID NO: 2214700 - RNA, 19 nt, Artificial Sequence
  Description of Artificial Sequence: Synthetic oligonucleotide
aaggacggcgaacgggcga

SEQ ID NO: 2214701 - RNA, 19 nt, Artificial Sequence
  Description of Artificial Sequence: Synthetic oligonucleotide
aucuuccgaacuuuugcau

SEQ ID NO: 2214702 - RNA, 19 nt, Artificial Sequence
  Description of Artificial Sequence: Synthetic oligonucleotide
ugacuguuccucuguucug

SEQ ID NO: 2214703 - RNA, 19 nt, Artificial Sequence
  Description of Artificial Sequence: Synthetic oligonucleotide
cugcaggugcucucgauuc

SEQ ID NO: 2214704 - RNA, 19 nt, Artificial Sequence
  Description of Artificial Sequence: Synthetic oligonucleotide
ccgaacuuuugcauaauug

SEQ ID NO: 2214705 - RNA, 19 nt, Artificial Sequence
  Description of Artificial Sequence: Synthetic oligonucleotide
gagagguacgugccgcggc

SEQ ID NO: 2214706 - RNA, 19 nt, Artificial Sequence
  Description of Artificial Sequence: Synthetic oligonucleotide
uccgaacuuuugcauaauu

SEQ ID NO: 2214707 - RNA, 19 nt, Artificial Sequence
  Description of Artificial Sequence: Synthetic oligonucleotide
aggauccacuuaauuagag

SEQ ID NO: 2214708 - RNA, 19 nt, Artificial Sequence
  Description of Artificial Sequence: Synthetic oligonucleotide
gggacuucaucagugcagg

SEQ ID NO: 2214709 - RNA, 19 nt, Artificial Sequence
  Description of Artificial Sequence: Synthetic oligonucleotide
agaaagccuaaaaccaaga

SEQ ID NO: 2214710 - RNA, 19 nt, Artificial Sequence
  Description of Artificial Sequence: Synthetic oligonucleotide
aguguuguagccacauuau

SEQ ID NO: 2214711 - RNA, 19 nt, Artificial Sequence
  Description of Artificial Sequence: Synthetic oligonucleotide
uccucuguucuggugguga

SEQ ID NO: 2214712 - RNA, 19 nt, Artificial Sequence
  Description of Artificial Sequence: Synthetic oligonucleotide
uacuggccaucaaaguauc

SEQ ID NO: 2214713 - RNA, 19 nt, Artificial Sequence
  Description of Artificial Sequence: Synthetic oligonucleotide
cuuccgaacuuuugcauaa

SEQ ID NO: 2214714 - RNA, 19 nt, Artificial Sequence
  Description of Artificial Sequence: Synthetic oligonucleotide
ggugcucucgauucuugag

SEQ ID NO: 2214715 - RNA, 19 nt, Artificial Sequence
  Description of Artificial Sequence: Synthetic oligonucleotide
ggcgcagcgggccucaggg

SEQ ID NO: 2214716 - RNA, 19 nt, Artificial Sequence
  Description of Artificial Sequence: Synthetic oligonucleotide
ucaaaguauccaggaaaau

SEQ ID NO: 2214717 - RNA, 19 nt, Artificial Sequence
  Description of Artificial Sequence: Synthetic oligonucleotide
caccagagccaguacuggc

SEQ ID NO: 2214718 - RNA, 19 nt, Artificial Sequence
  Description of Artificial Sequence: Synthetic oligonucleotide
gaggaucgucggaaggccg

SEQ ID NO: 2214719 - RNA, 19 nt, Artificial Sequence
  Description of Artificial Sequence: Synthetic oligonucleotide
uucuggcaucuuccgaacu

SEQ ID NO: 2214720 - RNA, 19 nt, Artificial Sequence
  Description of Artificial Sequence: Synthetic oligonucleotide
uccaggaaaauagguggaa

SEQ ID NO: 2214721 - RNA, 19 nt, Artificial Sequence
  Description of Artificial Sequence: Synthetic oligonucleotide
ccaaauccugagauggccc

SEQ ID NO: 2214722 - RNA, 19 nt, Artificial Sequence
  Description of Artificial Sequence: Synthetic oligonucleotide
ucggaaggccgagagguac

SEQ ID NO: 2214723 - RNA, 19 nt, Artificial Sequence
  Description of Artificial Sequence: Synthetic oligonucleotide
acuggccaucaaaguaucc

SEQ ID NO: 2214724 - RNA, 19 nt, Artificial Sequence
  Description of Artificial Sequence: Synthetic oligonucleotide
gcugaagggacgcggacgc

SEQ ID NO: 2214725 - RNA, 19 nt, Artificial Sequence
  Description of Artificial Sequence: Synthetic oligonucleotide
ggaaggacggcgaacgggc

SEQ ID NO: 2214726 - RNA, 19 nt, Artificial Sequence
  Description of Artificial Sequence: Synthetic oligonucleotide
agggaaggacggcgaacgg

SEQ ID NO: 2214727 - RNA, 19 nt, Artificial Sequence
  Description of Artificial Sequence: Synthetic oligonucleotide
ugcaggugcucucgauucu

SEQ ID NO: 2214728 - RNA, 19 nt, Artificial Sequence
  Description of Artificial Sequence: Synthetic oligonucleotide
cucucagccucaucauaac

SEQ ID NO: 2214729 - RNA, 19 nt, Artificial Sequence
  Description of Artificial Sequence: Synthetic oligonucleotide
aggccgagagguacgugcc

SEQ ID NO: 2214730 - RNA, 19 nt, Artificial Sequence
  Description of Artificial Sequence: Synthetic oligonucleotide
ggauccacuuaauuagaga

SEQ ID NO: 2214731 - RNA, 19 nt, Artificial Sequence
  Description of Artificial Sequence: Synthetic oligonucleotide
aucguggcuucagucuugg

SEQ ID NO: 2214732 - RNA, 19 nt, Artificial Sequence
  Description of Artificial Sequence: Synthetic oligonucleotide
gccaacgccaacgccaugg

SEQ ID NO: 2214733 - RNA, 19 nt, Artificial Sequence
  Description of Artificial Sequence: Synthetic oligonucleotide
gaacacccaccagagccag

SEQ ID NO: 2214734 - RNA, 19 nt, Artificial Sequence
  Description of Artificial Sequence: Synthetic oligonucleotide
gaccaaauccugagauggc

SEQ ID NO: 2214735 - RNA, 19 nt, Artificial Sequence
  Description of Artificial Sequence: Synthetic oligonucleotide
gacgcggacgccgcggccg

SEQ ID NO: 2214736 - RNA, 19 nt, Artificial Sequence
  Description of Artificial Sequence: Synthetic oligonucleotide
aagggacgcggacgccgcg

SEQ ID NO: 2214737 - RNA, 19 nt, Artificial Sequence
  Description of Artificial Sequence: Synthetic oligonucleotide
gauucacuuccugcaggug

SEQ ID NO: 2214738 - RNA, 19 nt, Artificial Sequence
  Description of Artificial Sequence: Synthetic oligonucleotide
caacgccaacgccauggcg

SEQ ID NO: 2214739 - RNA, 19 nt, Artificial Sequence
  Description of Artificial Sequence: Synthetic oligonucleotide
uggggagauuugagaaagu

SEQ ID NO: 2214740 - RNA, 19 nt, Artificial Sequence
  Description of Artificial Sequence: Synthetic oligonucleotide
gagaaaguuucuggcaucu

SEQ ID NO: 2214741 - RNA, 19 nt, Artificial Sequence
  Description of Artificial Sequence: Synthetic oligonucleotide
uggccccauaccuucccgc

SEQ ID NO: 2214742 - RNA, 19 nt, Artificial Sequence
  Description of Artificial Sequence: Synthetic oligonucleotide
ccuauccucagcuggucag

SEQ ID NO: 2214743 - RNA, 19 nt, Artificial Sequence
  Description of Artificial Sequence: Synthetic oligonucleotide
aggugcucucgauucuuga

SEQ ID NO: 2214744 - RNA, 19 nt, Artificial Sequence
  Description of Artificial Sequence: Synthetic oligonucleotide
gguggaaaaccugacaaua

SEQ ID NO: 2214745 - RNA, 19 nt, Artificial Sequence
  Description of Artificial Sequence: Synthetic oligonucleotide
auaaauccucugagaaaca

SEQ ID NO: 2214746 - RNA, 19 nt, Artificial Sequence
  Description of Artificial Sequence: Synthetic oligonucleotide
ucaucccgacccacaaaau

SEQ ID NO: 2214747 - RNA, 19 nt, Artificial Sequence
  Description of Artificial Sequence: Synthetic oligonucleotide
ucccgacccacaaaaucuu

SEQ ID NO: 2214748 - RNA, 19 nt, Artificial Sequence
  Description of Artificial Sequence: Synthetic oligonucleotide
agauggccccauaccuucc

SEQ ID NO: 2214749 - RNA, 19 nt, Artificial Sequence
  Description of Artificial Sequence: Synthetic oligonucleotide
gccuaaaaccaagaacacc

SEQ ID NO: 2214750 - RNA, 19 nt, Artificial Sequence
  Description of Artificial Sequence: Synthetic oligonucleotide
guaugguggaggagcauca

SEQ ID NO: 2214751 - RNA, 19 nt, Artificial Sequence
  Description of Artificial Sequence: Synthetic oligonucleotide
cgaacgggcgagcugaagg

SEQ ID NO: 2214752 - RNA, 19 nt, Artificial Sequence
  Description of Artificial Sequence: Synthetic oligonucleotide
acgggcgagcugaagggac

SEQ ID NO: 2214753 - RNA, 19 nt, Artificial Sequence
  Description of Artificial Sequence: Synthetic oligonucleotide
aacgggcgagcugaaggga

SEQ ID NO: 2214754 - RNA, 19 nt, Artificial Sequence
  Description of Artificial Sequence: Synthetic oligonucleotide
auccaggaaaauaggugga

SEQ ID NO: 2214755 - RNA, 19 nt, Artificial Sequence
  Description of Artificial Sequence: Synthetic oligonucleotide
acccagauucaucuuugua

SEQ ID NO: 2214756 - RNA, 19 nt, Artificial Sequence
  Description of Artificial Sequence: Synthetic oligonucleotide
cugagauggccccauaccu

SEQ ID NO: 2214757 - RNA, 19 nt, Artificial Sequence
  Description of Artificial Sequence: Synthetic oligonucleotide
guggaaaaccugacaauaa

SEQ ID NO: 2214758 - RNA, 19 nt, Artificial Sequence
  Description of Artificial Sequence: Synthetic oligonucleotide
aggacggcgaacgggcgag

SEQ ID NO: 2214759 - RNA, 19 nt, Artificial Sequence
  Description of Artificial Sequence: Synthetic oligonucleotide
gaucguggcuucagucuug

SEQ ID NO: 2214760 - RNA, 19 nt, Artificial Sequence
  Description of Artificial Sequence: Synthetic oligonucleotide
gagcugaagggacgcggac

SEQ ID NO: 2214761 - RNA, 19 nt, Artificial Sequence
  Description of Artificial Sequence: Synthetic oligonucleotide
accuucccgcagcugaggu

SEQ ID NO: 2214762 - RNA, 19 nt, Artificial Sequence
  Description of Artificial Sequence: Synthetic oligonucleotide
gaagggacgcggacgccgc

SEQ ID NO: 2214763 - RNA, 19 nt, Artificial Sequence
  Description of Artificial Sequence: Synthetic oligonucleotide
acgccaacgccauggcgca

SEQ ID NO: 2214764 - RNA, 19 nt, Artificial Sequence
  Description of Artificial Sequence: Synthetic oligonucleotide
cagucugugcagguucccc

SEQ ID NO: 2214765 - RNA, 19 nt, Artificial Sequence
  Description of Artificial Sequence: Synthetic oligonucleotide
cucaucauaacugggcagu

SEQ ID NO: 2214766 - RNA, 19 nt, Artificial Sequence
  Description of Artificial Sequence: Synthetic oligonucleotide
caggugcucucgauucuug

SEQ ID NO: 2214767 - RNA, 19 nt, Artificial Sequence
  Description of Artificial Sequence: Synthetic oligonucleotide
auaccuucccgcagcugag

SEQ ID NO: 2214768 - RNA, 19 nt, Artificial Sequence
  Description of Artificial Sequence: Synthetic oligonucleotide
agcuggucaguaucaucaa

SEQ ID NO: 2214769 - RNA, 19 nt, Artificial Sequence
  Description of Artificial Sequence: Synthetic oligonucleotide
guacuggccaucaaaguau

SEQ ID NO: 2214770 - RNA, 19 nt, Artificial Sequence
  Description of Artificial Sequence: Synthetic oligonucleotide
guguuguagccacauuaua

SEQ ID NO: 2214771 - RNA, 19 nt, Artificial Sequence
  Description of Artificial Sequence: Synthetic oligonucleotide
acacccaccagagccagua

SEQ ID NO: 2214772 - RNA, 19 nt, Artificial Sequence
  Description of Artificial Sequence: Synthetic oligonucleotide
agguacgugccgcggcgug

SEQ ID NO: 2214773 - RNA, 19 nt, Artificial Sequence
  Description of Artificial Sequence: Synthetic oligonucleotide
gccuuugccagaaaacauc

SEQ ID NO: 2214774 - RNA, 19 nt, Artificial Sequence
  Description of Artificial Sequence: Synthetic oligonucleotide
aggaaggccuuugccagaa

SEQ ID NO: 2214775 - RNA, 19 nt, Artificial Sequence
  Description of Artificial Sequence: Synthetic oligonucleotide
uuccuauccucagcugguc

SEQ ID NO: 2214776 - RNA, 19 nt, Artificial Sequence
  Description of Artificial Sequence: Synthetic oligonucleotide
acggcgaacgggcgagcug

SEQ ID NO: 2214777 - RNA, 19 nt, Artificial Sequence
  Description of Artificial Sequence: Synthetic oligonucleotide
gccaguacuggccaucaaa

SEQ ID NO: 2214778 - RNA, 19 nt, Artificial Sequence
  Description of Artificial Sequence: Synthetic oligonucleotide
auccucagcuggucaguau

SEQ ID NO: 2214779 - RNA, 19 nt, Artificial Sequence
  Description of Artificial Sequence: Synthetic oligonucleotide
agggacgcggacgccgcgg

SEQ ID NO: 2214780 - RNA, 19 nt, Artificial Sequence
  Description of Artificial Sequence: Synthetic oligonucleotide
gcgagcugaagggacgcgg

SEQ ID NO: 2214781 - RNA, 19 nt, Artificial Sequence
  Description of Artificial Sequence: Synthetic oligonucleotide
ccaauccaguugaagagaa

SEQ ID NO: 2214782 - RNA, 19 nt, Artificial Sequence
  Description of Artificial Sequence: Synthetic oligonucleotide
gaaggccgagagguacgug

SEQ ID NO: 2214783 - RNA, 19 nt, Artificial Sequence
  Description of Artificial Sequence: Synthetic oligonucleotide
cugcaacugcugguacccg

SEQ ID NO: 2214784 - RNA, 19 nt, Artificial Sequence
  Description of Artificial Sequence: Synthetic oligonucleotide
ugguucucucagccucauc

SEQ ID NO: 2214785 - RNA, 19 nt, Artificial Sequence
  Description of Artificial Sequence: Synthetic oligonucleotide
uuccgaacuuuugcauaau

SEQ ID NO: 2214786 - RNA, 19 nt, Artificial Sequence
  Description of Artificial Sequence: Synthetic oligonucleotide
gcaggccggcuccacagcc

SEQ ID NO: 2214787 - RNA, 19 nt, Artificial Sequence
  Description of Artificial Sequence: Synthetic oligonucleotide
ccccauaccuucccgcagc

SEQ ID NO: 2214788 - RNA, 19 nt, Artificial Sequence
  Description of Artificial Sequence: Synthetic oligonucleotide
ggccgagagguacgugccg

SEQ ID NO: 2214789 - RNA, 19 nt, Artificial Sequence
  Description of Artificial Sequence: Synthetic oligonucleotide
ucgauucuugagggacuuc

SEQ ID NO: 2214790 - RNA, 19 nt, Artificial Sequence
  Description of Artificial Sequence: Synthetic oligonucleotide
ccuuugccagaaaacaucu

SEQ ID NO: 2214791 - RNA, 19 nt, Artificial Sequence
  Description of Artificial Sequence: Synthetic oligonucleotide
cugcuguaugguggaggag

SEQ ID NO: 2214792 - RNA, 19 nt, Artificial Sequence
  Description of Artificial Sequence: Synthetic oligonucleotide
gcggccaacgccaacgcca

SEQ ID NO: 2214793 - RNA, 19 nt, Artificial Sequence
  Description of Artificial Sequence: Synthetic oligonucleotide
gguacccggugccgcaggc

SEQ ID NO: 2214794 - RNA, 19 nt, Artificial Sequence
  Description of Artificial Sequence: Synthetic oligonucleotide
ccgagagguacgugccgcg

SEQ ID NO: 2214795 - RNA, 19 nt, Artificial Sequence
  Description of Artificial Sequence: Synthetic oligonucleotide
ccaccagagccaguacugg

SEQ ID NO: 2214796 - RNA, 19 nt, Artificial Sequence
  Description of Artificial Sequence: Synthetic oligonucleotide
cacucucugcagaaaugcu

SEQ ID NO: 2214797 - RNA, 19 nt, Artificial Sequence
  Description of Artificial Sequence: Synthetic oligonucleotide
gucuugguucucucagccu

SEQ ID NO: 2214798 - RNA, 19 nt, Artificial Sequence
  Description of Artificial Sequence: Synthetic oligonucleotide
cugaagggacgcggacgcc

SEQ ID NO: 2214799 - RNA, 19 nt, Artificial Sequence
  Description of Artificial Sequence: Synthetic oligonucleotide
ccgacccacaaaaucuuca

SEQ ID NO: 2214800 - RNA, 19 nt, Artificial Sequence
  Description of Artificial Sequence: Synthetic oligonucleotide
gcuguaugguggaggagca

SEQ ID NO: 2214801 - RNA, 19 nt, Artificial Sequence
  Description of Artificial Sequence: Synthetic oligonucleotide
gccgagagguacgugccgc

SEQ ID NO: 2214802 - RNA, 19 nt, Artificial Sequence
  Description of Artificial Sequence: Synthetic oligonucleotide
ggaucgucggaaggccgag

SEQ ID NO: 2214803 - RNA, 19 nt, Artificial Sequence
  Description of Artificial Sequence: Synthetic oligonucleotide
gaucgucggaaggccgaga

SEQ ID NO: 2214804 - RNA, 19 nt, Artificial Sequence
  Description of Artificial Sequence: Synthetic oligonucleotide
guacccggugccgcaggcc

SEQ ID NO: 2214805 - RNA, 19 nt, Artificial Sequence
  Description of Artificial Sequence: Synthetic oligonucleotide
ggccccauaccuucccgca

SEQ ID NO: 2214806 - RNA, 19 nt, Artificial Sequence
  Description of Artificial Sequence: Synthetic oligonucleotide
ggccgaggaucgucggaag

SEQ ID NO: 2214807 - RNA, 19 nt, Artificial Sequence
  Description of Artificial Sequence: Synthetic oligonucleotide
cacccaccagagccaguac

SEQ ID NO: 2214808 - RNA, 19 nt, Artificial Sequence
  Description of Artificial Sequence: Synthetic oligonucleotide
gccccauaccuucccgcag

SEQ ID NO: 2214809 - RNA, 19 nt, Artificial Sequence
  Description of Artificial Sequence: Synthetic oligonucleotide
ccaacgccaacgccauggc

SEQ ID NO: 2214810 - RNA, 19 nt, Artificial Sequence
  Description of Artificial Sequence: Synthetic oligonucleotide
cugcacucucugcagaaau

SEQ ID NO: 2214811 - RNA, 19 nt, Artificial Sequence
  Description of Artificial Sequence: Synthetic oligonucleotide
cggaaggccgagagguacg

SEQ ID NO: 2214812 - RNA, 19 nt, Artificial Sequence
  Description of Artificial Sequence: Synthetic oligonucleotide
gccaacgccauggcgcagc

SEQ ID NO: 2214813 - RNA, 19 nt, Artificial Sequence
  Description of Artificial Sequence: Synthetic oligonucleotide
uucccgcagcugagguggu

SEQ ID NO: 2214814 - RNA, 19 nt, Artificial Sequence
  Description of Artificial Sequence: Synthetic oligonucleotide
ucguggcuucagucuuggu

SEQ ID NO: 2214815 - RNA, 19 nt, Artificial Sequence
  Description of Artificial Sequence: Synthetic oligonucleotide
caucauaacugggcagugu

SEQ ID NO: 2214816 - RNA, 19 nt, Artificial Sequence
  Description of Artificial Sequence: Synthetic oligonucleotide
cgauucuugagggacuuca

SEQ ID NO: 2214817 - RNA, 19 nt, Artificial Sequence
  Description of Artificial Sequence: Synthetic oligonucleotide
cugcagaaaugcugcugua

SEQ ID NO: 2214818 - RNA, 19 nt, Artificial Sequence
  Description of Artificial Sequence: Synthetic oligonucleotide
ccaacgccauggcgcagcg

SEQ ID NO: 2214819 - RNA, 19 nt, Artificial Sequence
  Description of Artificial Sequence: Synthetic oligonucleotide
gcaucaccugcagucugug

SEQ ID NO: 2214820 - RNA, 19 nt, Artificial Sequence
  Description of Artificial Sequence: Synthetic oligonucleotide
caacgccauggcgcagcgg

SEQ ID NO: 2214821 - RNA, 19 nt, Artificial Sequence
  Description of Artificial Sequence: Synthetic oligonucleotide
gcugagguggucaggcaaa

SEQ ID NO: 2214822 - RNA, 19 nt, Artificial Sequence
  Description of Artificial Sequence: Synthetic oligonucleotide
gcucucgauucuugaggga

SEQ ID NO: 2214823 - RNA, 19 nt, Artificial Sequence
  Description of Artificial Sequence: Synthetic oligonucleotide
cccgacccacaaaaucuuc

SEQ ID NO: 2214824 - RNA, 19 nt, Artificial Sequence
  Description of Artificial Sequence: Synthetic oligonucleotide
cgggcgagcugaagggacg

SEQ ID NO: 2214825 - RNA, 19 nt, Artificial Sequence
  Description of Artificial Sequence: Synthetic oligonucleotide
gggcgagcugaagggacgc

SEQ ID NO: 2214826 - RNA, 19 nt, Artificial Sequence
  Description of Artificial Sequence: Synthetic oligonucleotide
ggggagauuugagaaaguu

SEQ ID NO: 2214827 - RNA, 19 nt, Artificial Sequence
  Description of Artificial Sequence: Synthetic oligonucleotide
gggacgcggacgccgcggc

SEQ ID NO: 2214828 - RNA, 19 nt, Artificial Sequence
  Description of Artificial Sequence: Synthetic oligonucleotide
cugagguggucaggcaaaa

SEQ ID NO: 2214829 - RNA, 19 nt, Artificial Sequence
  Description of Artificial Sequence: Synthetic oligonucleotide
cuauccucagcuggucagu

SEQ ID NO: 2214830 - RNA, 19 nt, Artificial Sequence
  Description of Artificial Sequence: Synthetic oligonucleotide
ccgcggccgaggaucgucg

SEQ ID NO: 2214831 - RNA, 19 nt, Artificial Sequence
  Description of Artificial Sequence: Synthetic oligonucleotide
ggcuuuggaaacccagauu

SEQ ID NO: 2214832 - RNA, 19 nt, Artificial Sequence
  Description of Artificial Sequence: Synthetic oligonucleotide
acgcggacgccgcggccga

SEQ ID NO: 2214833 - RNA, 19 nt, Artificial Sequence
  Description of Artificial Sequence: Synthetic oligonucleotide
acccggugccgcaggccgg

SEQ ID NO: 2214834 - RNA, 19 nt, Artificial Sequence
  Description of Artificial Sequence: Synthetic oligonucleotide
gacggcgaacgggcgagcu

SEQ ID NO: 2214835 - RNA, 19 nt, Artificial Sequence
  Description of Artificial Sequence: Synthetic oligonucleotide
cgagagguacgugccgcgg

SEQ ID NO: 2214836 - RNA, 19 nt, Artificial Sequence
  Description of Artificial Sequence: Synthetic oligonucleotide
cucgauucuugagggacuu

SEQ ID NO: 2214837 - RNA, 19 nt, Artificial Sequence
  Description of Artificial Sequence: Synthetic oligonucleotide
cauggcgcagcgggccuca

SEQ ID NO: 2214838 - RNA, 19 nt, Artificial Sequence
  Description of Artificial Sequence: Synthetic oligonucleotide
ucccgcagcugaggugguc

SEQ ID NO: 2214839 - RNA, 19 nt, Artificial Sequence
  Description of Artificial Sequence: Synthetic oligonucleotide
ccgcagcugagguggucag

SEQ ID NO: 2214840 - RNA, 19 nt, Artificial Sequence
  Description of Artificial Sequence: Synthetic oligonucleotide
ggccuuugccagaaaacau

SEQ ID NO: 2214841 - RNA, 19 nt, Artificial Sequence
  Description of Artificial Sequence: Synthetic oligonucleotide
gcgcggccaacgccaacgc

SEQ ID NO: 2214842 - RNA, 19 nt, Artificial Sequence
  Description of Artificial Sequence: Synthetic oligonucleotide
gcgggccucagggaaggac

SEQ ID NO: 2214843 - RNA, 19 nt, Artificial Sequence
  Description of Artificial Sequence: Synthetic oligonucleotide
cgucggaaggccgagaggu

SEQ ID NO: 2214844 - RNA, 19 nt, Artificial Sequence
  Description of Artificial Sequence: Synthetic oligonucleotide
gcgaacgggcgagcugaag

SEQ ID NO: 2214845 - RNA, 19 nt, Artificial Sequence
  Description of Artificial Sequence: Synthetic oligonucleotide
gagguacgugccgcggcgu

SEQ ID NO: 2214846 - RNA, 19 nt, Artificial Sequence
  Description of Artificial Sequence: Synthetic oligonucleotide
gcggacgccgcggccgagg

SEQ ID NO: 2214847 - RNA, 19 nt, Artificial Sequence
  Description of Artificial Sequence: Synthetic oligonucleotide
ugccgcaggccggcuccac

SEQ ID NO: 2214848 - RNA, 19 nt, Artificial Sequence
  Description of Artificial Sequence: Synthetic oligonucleotide
ggaaggccgagagguacgu

SEQ ID NO: 2214849 - RNA, 19 nt, Artificial Sequence
  Description of Artificial Sequence: Synthetic oligonucleotide
gcggccgaggaucgucgga

SEQ ID NO: 2214850 - RNA, 19 nt, Artificial Sequence
  Description of Artificial Sequence: Synthetic oligonucleotide
ggcuucagucuugguucuc

SEQ ID NO: 2214851 - RNA, 19 nt, Artificial Sequence
  Description of Artificial Sequence: Synthetic oligonucleotide
ccauaccuucccgcagcug

SEQ ID NO: 2214852 - RNA, 19 nt, Artificial Sequence
  Description of Artificial Sequence: Synthetic oligonucleotide
cagguuccccaggcuccuc

SEQ ID NO: 2214853 - RNA, 19 nt, Artificial Sequence
  Description of Artificial Sequence: Synthetic oligonucleotide
gccgcaggccggcuccaca

SEQ ID NO: 2214854 - RNA, 19 nt, Artificial Sequence
  Description of Artificial Sequence: Synthetic oligonucleotide
ggccaacgccaacgccaug

SEQ ID NO: 2214855 - RNA, 19 nt, Artificial Sequence
  Description of Artificial Sequence: Synthetic oligonucleotide
gccgcggccgaggaucguc

SEQ ID NO: 2214856 - RNA, 19 nt, Artificial Sequence
  Description of Artificial Sequence: Synthetic oligonucleotide
cggcgaacgggcgagcuga

SEQ ID NO: 2214857 - RNA, 19 nt, Artificial Sequence
  Description of Artificial Sequence: Synthetic oligonucleotide
cgcggccgaggaucgucgg

SEQ ID NO: 2214858 - RNA, 19 nt, Artificial Sequence
  Description of Artificial Sequence: Synthetic oligonucleotide
cucuguucugguggugauu

SEQ ID NO: 2214859 - RNA, 19 nt, Artificial Sequence
  Description of Artificial Sequence: Synthetic oligonucleotide
cccggugccgcaggccggc

SEQ ID NO: 2214860 - RNA, 19 nt, Artificial Sequence
  Description of Artificial Sequence: Synthetic oligonucleotide
ccugcaggugcucucgauu

SEQ ID NO: 2214861 - RNA, 19 nt, Artificial Sequence
  Description of Artificial Sequence: Synthetic oligonucleotide
ggacggcgaacgggcgagc

SEQ ID NO: 2214862 - RNA, 19 nt, Artificial Sequence
  Description of Artificial Sequence: Synthetic oligonucleotide
cgacccacaaaaucuucau

SEQ ID NO: 2214863 - RNA, 19 nt, Artificial Sequence
  Description of Artificial Sequence: Synthetic oligonucleotide
cuguaugguggaggagcau

SEQ ID NO: 2214864 - RNA, 19 nt, Artificial Sequence
  Description of Artificial Sequence: Synthetic oligonucleotide
caggaaccaaagggaucgu

SEQ ID NO: 2214865 - RNA, 19 nt, Artificial Sequence
  Description of Artificial Sequence: Synthetic oligonucleotide
gcgcagcgggccucaggga

SEQ ID NO: 2214866 - RNA, 19 nt, Artificial Sequence
  Description of Artificial Sequence: Synthetic oligonucleotide
gugccgcaggccggcucca

SEQ ID NO: 2214867 - RNA, 19 nt, Artificial Sequence
  Description of Artificial Sequence: Synthetic oligonucleotide
ggccggcuccacagccgcc

SEQ ID NO: 2214868 - RNA, 19 nt, Artificial Sequence
  Description of Artificial Sequence: Synthetic oligonucleotide
cggccgaggaucgucggaa

SEQ ID NO: 2214869 - RNA, 19 nt, Artificial Sequence
  Description of Artificial Sequence: Synthetic oligonucleotide
ggcgaacgggcgagcugaa

SEQ ID NO: 2214870 - RNA, 19 nt, Artificial Sequence
  Description of Artificial Sequence: Synthetic oligonucleotide
cucugguccuggggagauu

SEQ ID NO: 2214871 - RNA, 19 nt, Artificial Sequence
  Description of Artificial Sequence: Synthetic oligonucleotide
cggccaacgccaacgccau

SEQ ID NO: 2214872 - RNA, 19 nt, Artificial Sequence
  Description of Artificial Sequence: Synthetic oligonucleotide
cgccaacgccauggcgcag

SEQ ID NO: 2214873 - RNA, 19 nt, Artificial Sequence
  Description of Artificial Sequence: Synthetic oligonucleotide
cgcggacgccgcggccgag

SEQ ID NO: 2214874 - RNA, 19 nt, Artificial Sequence
  Description of Artificial Sequence: Synthetic oligonucleotide
ccggugccgcaggccggcu

SEQ ID NO: 2214875 - RNA, 19 nt, Artificial Sequence
  Description of Artificial Sequence: Synthetic oligonucleotide
uuuacauuuacacagaugg

SEQ ID NO: 2214876 - RNA, 19 nt, Artificial Sequence
  Description of Artificial Sequence: Synthetic oligonucleotide
aauuagaauaaauaccaac

SEQ ID NO: 2214877 - RNA, 19 nt, Artificial Sequence
  Description of Artificial Sequence: Synthetic oligonucleotide
aauaucagaacaucauggc

SEQ ID NO: 2214878 - RNA, 19 nt, Artificial Sequence
  Description of Artificial Sequence: Synthetic oligonucleotide
auuagaauaaauaccaacc

SEQ ID NO: 2214879 - RNA, 19 nt, Artificial Sequence
  Description of Artificial Sequence: Synthetic oligonucleotide
uuagaauaaauaccaaccg

SEQ ID NO: 2214880 - RNA, 19 nt, Artificial Sequence
  Description of Artificial Sequence: Synthetic oligonucleotide
acaaggaccaacucaaucc

SEQ ID NO: 2214881 - RNA, 19 nt, Artificial Sequence
  Description of Artificial Sequence: Synthetic oligonucleotide
acuuugaagguuuacagac

SEQ ID NO: 2214882 - RNA, 19 nt, Artificial Sequence
  Description of Artificial Sequence: Synthetic oligonucleotide
aaacuuugaagguuuacag

SEQ ID NO: 2214883 - RNA, 19 nt, Artificial Sequence
  Description of Artificial Sequence: Synthetic oligonucleotide
uagaauaaauaccaaccgg

SEQ ID NO: 2214884 - RNA, 19 nt, Artificial Sequence
  Description of Artificial Sequence: Synthetic oligonucleotide
caauaucagaacaucaugg

SEQ ID NO: 2214885 - RNA, 19 nt, Artificial Sequence
  Description of Artificial Sequence: Synthetic oligonucleotide
gauaaggaagaaugcaugg

SEQ ID NO: 2214886 - RNA, 19 nt, Artificial Sequence
  Description of Artificial Sequence: Synthetic oligonucleotide
auaucagaacaucauggcc

SEQ ID NO: 2214887 - RNA, 19 nt, Artificial Sequence
  Description of Artificial Sequence: Synthetic oligonucleotide
auaaauaccaaccggguca

SEQ ID NO: 2214888 - RNA, 19 nt, Artificial Sequence
  Description of Artificial Sequence: Synthetic oligonucleotide
uaucagaacaucauggcca

SEQ ID NO: 2214889 - RNA, 19 nt, Artificial Sequence
  Description of Artificial Sequence: Synthetic oligonucleotide
aaagggucaauaucagaac

SEQ ID NO: 2214890 - RNA, 19 nt, Artificial Sequence
  Description of Artificial Sequence: Synthetic oligonucleotide
gauguggcuauccagaggc

SEQ ID NO: 2214891 - RNA, 19 nt, Artificial Sequence
  Description of Artificial Sequence: Synthetic oligonucleotide
ucuagaguggccccuaagg

SEQ ID NO: 2214892 - RNA, 19 nt, Artificial Sequence
  Description of Artificial Sequence: Synthetic oligonucleotide
agaauaaauaccaaccggg

SEQ ID NO: 2214893 - RNA, 19 nt, Artificial Sequence
  Description of Artificial Sequence: Synthetic oligonucleotide
agauagaacaucacaagcc

SEQ ID NO: 2214894 - RNA, 19 nt, Artificial Sequence
  Description of Artificial Sequence: Synthetic oligonucleotide
aacaaggaccaacucaauc

SEQ ID NO: 2214895 - RNA, 19 nt, Artificial Sequence
  Description of Artificial Sequence: Synthetic oligonucleotide
aacagugguauacuuccac

SEQ ID NO: 2214896 - RNA, 19 nt, Artificial Sequence
  Description of Artificial Sequence: Synthetic oligonucleotide
aauacggccaguucaugag

SEQ ID NO: 2214897 - RNA, 19 nt, Artificial Sequence
  Description of Artificial Sequence: Synthetic oligonucleotide
uacagacuggauaaggaag

SEQ ID NO: 2214898 - RNA, 19 nt, Artificial Sequence
  Description of Artificial Sequence: Synthetic oligonucleotide
ugggaagcaggacauacgg

SEQ ID NO: 2214899 - RNA, 19 nt, Artificial Sequence
  Description of Artificial Sequence: Synthetic oligonucleotide
gacaguaacaagcaggaca

SEQ ID NO: 2214900 - RNA, 19 nt, Artificial Sequence
  Description of Artificial Sequence: Synthetic oligonucleotide
aaaagggucaauaucagaa

SEQ ID NO: 2214901 - RNA, 19 nt, Artificial Sequence
  Description of Artificial Sequence: Synthetic oligonucleotide
uuuacagacuggauaagga

SEQ ID NO: 2214902 - RNA, 19 nt, Artificial Sequence
  Description of Artificial Sequence: Synthetic oligonucleotide
gaacaucauggccagauag

SEQ ID NO: 2214903 - RNA, 19 nt, Artificial Sequence
  Description of Artificial Sequence: Synthetic oligonucleotide
caaauaacagccuagaugu

SEQ ID NO: 2214904 - RNA, 19 nt, Artificial Sequence
  Description of Artificial Sequence: Synthetic oligonucleotide
cacacauacacacacacac

SEQ ID NO: 2214905 - RNA, 19 nt, Artificial Sequence
  Description of Artificial Sequence: Synthetic oligonucleotide
cagagcuucggcaauacgg

SEQ ID NO: 2214906 - RNA, 19 nt, Artificial Sequence
  Description of Artificial Sequence: Synthetic oligonucleotide
uacacacacacacacacac

SEQ ID NO: 2214907 - RNA, 19 nt, Artificial Sequence
  Description of Artificial Sequence: Synthetic oligonucleotide
cugaugccaaauaacagcc

SEQ ID NO: 2214908 - RNA, 19 nt, Artificial Sequence
  Description of Artificial Sequence: Synthetic oligonucleotide
acagugguauacuuccacc

SEQ ID NO: 2214909 - RNA, 19 nt, Artificial Sequence
  Description of Artificial Sequence: Synthetic oligonucleotide
cauacacacacacacacac

SEQ ID NO: 2214910 - RNA, 19 nt, Artificial Sequence
  Description of Artificial Sequence: Synthetic oligonucleotide
aagggucaauaucagaaca

SEQ ID NO: 2214911 - RNA, 19 nt, Artificial Sequence
  Description of Artificial Sequence: Synthetic oligonucleotide
aagguuuacagacuggaua

SEQ ID NO: 2214912 - RNA, 19 nt, Artificial Sequence
  Description of Artificial Sequence: Synthetic oligonucleotide
agauggacaagaugauccc

SEQ ID NO: 2214913 - RNA, 19 nt, Artificial Sequence
  Description of Artificial Sequence: Synthetic oligonucleotide
aguucuacgcucucccacc

SEQ ID NO: 2214914 - RNA, 19 nt, Artificial Sequence
  Description of Artificial Sequence: Synthetic oligonucleotide
ugaaaagggucaauaucag

SEQ ID NO: 2214915 - RNA, 19 nt, Artificial Sequence
  Description of Artificial Sequence: Synthetic oligonucleotide
aacuuugaagguuuacaga

SEQ ID NO: 2214916 - RNA, 19 nt, Artificial Sequence
  Description of Artificial Sequence: Synthetic oligonucleotide
agaggccacacacacacac

SEQ ID NO: 2214917 - RNA, 19 nt, Artificial Sequence
  Description of Artificial Sequence: Synthetic oligonucleotide
aaagacacagucagguuuc

SEQ ID NO: 2214918 - RNA, 19 nt, Artificial Sequence
  Description of Artificial Sequence: Synthetic oligonucleotide
uucugaugccaaauaacag

SEQ ID NO: 2214919 - RNA, 19 nt, Artificial Sequence
  Description of Artificial Sequence: Synthetic oligonucleotide
acuugagaggaaaacaagg

SEQ ID NO: 2214920 - RNA, 19 nt, Artificial Sequence
  Description of Artificial Sequence: Synthetic oligonucleotide
cacacacacacauacacac

SEQ ID NO: 2214921 - RNA, 19 nt, Artificial Sequence
  Description of Artificial Sequence: Synthetic oligonucleotide
acacagauggacaagauga

SEQ ID NO: 2214922 - RNA, 19 nt, Artificial Sequence
  Description of Artificial Sequence: Synthetic oligonucleotide
uuucccaacacagugccag

SEQ ID NO: 2214923 - RNA, 19 nt, Artificial Sequence
  Description of Artificial Sequence: Synthetic oligonucleotide
gaagaaugcauggaugaag

SEQ ID NO: 2214924 - RNA, 19 nt, Artificial Sequence
  Description of Artificial Sequence: Synthetic oligonucleotide
gaaugcauggaugaagaug

SEQ ID NO: 2214925 - RNA, 19 nt, Artificial Sequence
  Description of Artificial Sequence: Synthetic oligonucleotide
cacacacacacacacauac

SEQ ID NO: 2214926 - RNA, 19 nt, Artificial Sequence
  Description of Artificial Sequence: Synthetic oligonucleotide
auaacagccuagauguggc

SEQ ID NO: 2214927 - RNA, 19 nt, Artificial Sequence
  Description of Artificial Sequence: Synthetic oligonucleotide
agguugggagcccugaagg

SEQ ID NO: 2214928 - RNA, 19 nt, Artificial Sequence
  Description of Artificial Sequence: Synthetic oligonucleotide
aauaccaaccgggucaaca

SEQ ID NO: 2214929 - RNA, 19 nt, Artificial Sequence
  Description of Artificial Sequence: Synthetic oligonucleotide
cacauacacacacacacac

SEQ ID NO: 2214930 - RNA, 19 nt, Artificial Sequence
  Description of Artificial Sequence: Synthetic oligonucleotide
agagcuucggcaauacggc

SEQ ID NO: 2214931 - RNA, 19 nt, Artificial Sequence
  Description of Artificial Sequence: Synthetic oligonucleotide
agguuuacagacuggauaa

SEQ ID NO: 2214932 - RNA, 19 nt, Artificial Sequence
  Description of Artificial Sequence: Synthetic oligonucleotide
aaccuauuuguaguuuggg

SEQ ID NO: 2214933 - RNA, 19 nt, Artificial Sequence
  Description of Artificial Sequence: Synthetic oligonucleotide
guuuacagacuggauaagg

SEQ ID NO: 2214934 - RNA, 19 nt, Artificial Sequence
  Description of Artificial Sequence: Synthetic oligonucleotide
cacacacacacacauacac

SEQ ID NO: 2214935 - RNA, 19 nt, Artificial Sequence
  Description of Artificial Sequence: Synthetic oligonucleotide
aggccacacacacacacac

SEQ ID NO: 2214936 - RNA, 19 nt, Artificial Sequence
  Description of Artificial Sequence: Synthetic oligonucleotide
uggaugaagaugguuuggg

SEQ ID NO: 2214937 - RNA, 19 nt, Artificial Sequence
  Description of Artificial Sequence: Synthetic oligonucleotide
uacggccaguucaugaggg

SEQ ID NO: 2214938 - RNA, 19 nt, Artificial Sequence
  Description of Artificial Sequence: Synthetic oligonucleotide
agaguggccccuaaggagc

SEQ ID NO: 2214939 - RNA, 19 nt, Artificial Sequence
  Description of Artificial Sequence: Synthetic oligonucleotide
uuacagacuggauaaggaa

SEQ ID NO: 2214940 - RNA, 19 nt, Artificial Sequence
  Description of Artificial Sequence: Synthetic oligonucleotide
cacacacacacacacacac

SEQ ID NO: 2214941 - RNA, 19 nt, Artificial Sequence
  Description of Artificial Sequence: Synthetic oligonucleotide
cacacacacauacacacac

SEQ ID NO: 2214942 - RNA, 19 nt, Artificial Sequence
  Description of Artificial Sequence: Synthetic oligonucleotide
gagaguucuacgcucuccc

SEQ ID NO: 2214943 - RNA, 19 nt, Artificial Sequence
  Description of Artificial Sequence: Synthetic oligonucleotide
uuacauuuacacagaugga

SEQ ID NO: 2214944 - RNA, 19 nt, Artificial Sequence
  Description of Artificial Sequence: Synthetic oligonucleotide
ugaaggagcuguguggucc

SEQ ID NO: 2214945 - RNA, 19 nt, Artificial Sequence
  Description of Artificial Sequence: Synthetic oligonucleotide
cuugagaggaaaacaagga

SEQ ID NO: 2214946 - RNA, 19 nt, Artificial Sequence
  Description of Artificial Sequence: Synthetic oligonucleotide
aucagaacaucauggccag

SEQ ID NO: 2214947 - RNA, 19 nt, Artificial Sequence
  Description of Artificial Sequence: Synthetic oligonucleotide
aacucaauccugacaggcg

SEQ ID NO: 2214948 - RNA, 19 nt, Artificial Sequence
  Description of Artificial Sequence: Synthetic oligonucleotide
agcaggauuggcccauagc

SEQ ID NO: 2214949 - RNA, 19 nt, Artificial Sequence
  Description of Artificial Sequence: Synthetic oligonucleotide
cacacacauacacacacac

SEQ ID NO: 2214950 - RNA, 19 nt, Artificial Sequence
  Description of Artificial Sequence: Synthetic oligonucleotide
gacacagucagguuuccca

SEQ ID NO: 2214951 - RNA, 19 nt, Artificial Sequence
  Description of Artificial Sequence: Synthetic oligonucleotide
cagugguauacuuccaccc

SEQ ID NO: 2214952 - RNA, 19 nt, Artificial Sequence
  Description of Artificial Sequence: Synthetic oligonucleotide
uuggcccauagcuuuggcg

SEQ ID NO: 2214953 - RNA, 19 nt, Artificial Sequence
  Description of Artificial Sequence: Synthetic oligonucleotide
gacaugacgccaugggcag

SEQ ID NO: 2214954 - RNA, 19 nt, Artificial Sequence
  Description of Artificial Sequence: Synthetic oligonucleotide
cuagauguggcuauccaga

SEQ ID NO: 2214955 - RNA, 19 nt, Artificial Sequence
  Description of Artificial Sequence: Synthetic oligonucleotide
uagauguggcuauccagag

SEQ ID NO: 2214956 - RNA, 19 nt, Artificial Sequence
  Description of Artificial Sequence: Synthetic oligonucleotide
ucacaagcccgagagaggc

SEQ ID NO: 2214957 - RNA, 19 nt, Artificial Sequence
  Description of Artificial Sequence: Synthetic oligonucleotide
cacacacacacacacacuc

SEQ ID NO: 2214958 - RNA, 19 nt, Artificial Sequence
  Description of Artificial Sequence: Synthetic oligonucleotide
acaagaugauccccaaacu

SEQ ID NO: 2214959 - RNA, 19 nt, Artificial Sequence
  Description of Artificial Sequence: Synthetic oligonucleotide
gauggcgcgagcaggauug

SEQ ID NO: 2214960 - RNA, 19 nt, Artificial Sequence
  Description of Artificial Sequence: Synthetic oligonucleotide
ugguugauggugaggcucc

SEQ ID NO: 2214961 - RNA, 19 nt, Artificial Sequence
  Description of Artificial Sequence: Synthetic oligonucleotide
accuauuuguaguuugggu

SEQ ID NO: 2214962 - RNA, 19 nt, Artificial Sequence
  Description of Artificial Sequence: Synthetic oligonucleotide
aagaugauccccaaacuuu

SEQ ID NO: 2214963 - RNA, 19 nt, Artificial Sequence
  Description of Artificial Sequence: Synthetic oligonucleotide
ugcaaguguccugagcagg

SEQ ID NO: 2214964 - RNA, 19 nt, Artificial Sequence
  Description of Artificial Sequence: Synthetic oligonucleotide
uugggagcccugaaggagc

SEQ ID NO: 2214965 - RNA, 19 nt, Artificial Sequence
  Description of Artificial Sequence: Synthetic oligonucleotide
accgggucaacauuuacau

SEQ ID NO: 2214966 - RNA, 19 nt, Artificial Sequence
  Description of Artificial Sequence: Synthetic oligonucleotide
gacacuugagaggaaaaca

SEQ ID NO: 2214967 - RNA, 19 nt, Artificial Sequence
  Description of Artificial Sequence: Synthetic oligonucleotide
uuggguucagcugggaagc

SEQ ID NO: 2214968 - RNA, 19 nt, Artificial Sequence
  Description of Artificial Sequence: Synthetic oligonucleotide
agauguggcuauccagagg

SEQ ID NO: 2214969 - RNA, 19 nt, Artificial Sequence
  Description of Artificial Sequence: Synthetic oligonucleotide
caacucaauccugacaggc

SEQ ID NO: 2214970 - RNA, 19 nt, Artificial Sequence
  Description of Artificial Sequence: Synthetic oligonucleotide
auacggccaguucaugagg

SEQ ID NO: 2214971 - RNA, 19 nt, Artificial Sequence
  Description of Artificial Sequence: Synthetic oligonucleotide
aaauuagaauaaauaccaa

SEQ ID NO: 2214972 - RNA, 19 nt, Artificial Sequence
  Description of Artificial Sequence: Synthetic oligonucleotide
cacacacacacacucacuc

SEQ ID NO: 2214973 - RNA, 19 nt, Artificial Sequence
  Description of Artificial Sequence: Synthetic oligonucleotide
cauagcuuuggcgggaagc

SEQ ID NO: 2214974 - RNA, 19 nt, Artificial Sequence
  Description of Artificial Sequence: Synthetic oligonucleotide
acagauggacaagaugauc

SEQ ID NO: 2214975 - RNA, 19 nt, Artificial Sequence
  Description of Artificial Sequence: Synthetic oligonucleotide
ggugcaaguguccugagca

SEQ ID NO: 2214976 - RNA, 19 nt, Artificial Sequence
  Description of Artificial Sequence: Synthetic oligonucleotide
ucuacgcucucccacccac

SEQ ID NO: 2214977 - RNA, 19 nt, Artificial Sequence
  Description of Artificial Sequence: Synthetic oligonucleotide
aagacacagucagguuucc

SEQ ID NO: 2214978 - RNA, 19 nt, Artificial Sequence
  Description of Artificial Sequence: Synthetic oligonucleotide
caaacuuugaagguuuaca

SEQ ID NO: 2214979 - RNA, 19 nt, Artificial Sequence
  Description of Artificial Sequence: Synthetic oligonucleotide
uuuggcgggaagcuccaga

SEQ ID NO: 2214980 - RNA, 19 nt, Artificial Sequence
  Description of Artificial Sequence: Synthetic oligonucleotide
gaagggauggcgcgagcag

SEQ ID NO: 2214981 - RNA, 19 nt, Artificial Sequence
  Description of Artificial Sequence: Synthetic oligonucleotide
gguuucccaacacagugcc

SEQ ID NO: 2214982 - RNA, 19 nt, Artificial Sequence
  Description of Artificial Sequence: Synthetic oligonucleotide
cacacacacacacacucac

SEQ ID NO: 2214983 - RNA, 19 nt, Artificial Sequence
  Description of Artificial Sequence: Synthetic oligonucleotide
auuggcccauagcuuuggc

SEQ ID NO: 2214984 - RNA, 19 nt, Artificial Sequence
  Description of Artificial Sequence: Synthetic oligonucleotide
cacccuucagacaaaauaa

SEQ ID NO: 2214985 - RNA, 19 nt, Artificial Sequence
  Description of Artificial Sequence: Synthetic oligonucleotide
agaugauccccaaacuuug

SEQ ID NO: 2214986 - RNA, 19 nt, Artificial Sequence
  Description of Artificial Sequence: Synthetic oligonucleotide
ugcuucucuuggcuccugg

SEQ ID NO: 2214987 - RNA, 19 nt, Artificial Sequence
  Description of Artificial Sequence: Synthetic oligonucleotide
uguggcuauccagaggcug

SEQ ID NO: 2214988 - RNA, 19 nt, Artificial Sequence
  Description of Artificial Sequence: Synthetic oligonucleotide
ugccaaauaacagccuaga

SEQ ID NO: 2214989 - RNA, 19 nt, Artificial Sequence
  Description of Artificial Sequence: Synthetic oligonucleotide
aaccgggucaacauuuaca

SEQ ID NO: 2214990 - RNA, 19 nt, Artificial Sequence
  Description of Artificial Sequence: Synthetic oligonucleotide
auaccaaccgggucaacau

SEQ ID NO: 2214991 - RNA, 19 nt, Artificial Sequence
  Description of Artificial Sequence: Synthetic oligonucleotide
ugaugccaaauaacagccu

SEQ ID NO: 2214992 - RNA, 19 nt, Artificial Sequence
  Description of Artificial Sequence: Synthetic oligonucleotide
aaccugaaaagggucaaua

SEQ ID NO: 2214993 - RNA, 19 nt, Artificial Sequence
  Description of Artificial Sequence: Synthetic oligonucleotide
ggauaaggaagaaugcaug

SEQ ID NO: 2214994 - RNA, 19 nt, Artificial Sequence
  Description of Artificial Sequence: Synthetic oligonucleotide
ggugcaaacagugguauac

SEQ ID NO: 2214995 - RNA, 19 nt, Artificial Sequence
  Description of Artificial Sequence: Synthetic oligonucleotide
gaaggagcugugugguccc

SEQ ID NO: 2214996 - RNA, 19 nt, Artificial Sequence
  Description of Artificial Sequence: Synthetic oligonucleotide
acacuugagaggaaaacaa

SEQ ID NO: 2214997 - RNA, 19 nt, Artificial Sequence
  Description of Artificial Sequence: Synthetic oligonucleotide
uccccaugguugaugguga

SEQ ID NO: 2214998 - RNA, 19 nt, Artificial Sequence
  Description of Artificial Sequence: Synthetic oligonucleotide
gauuggcccauagcuuugg

SEQ ID NO: 2214999 - RNA, 19 nt, Artificial Sequence
  Description of Artificial Sequence: Synthetic oligonucleotide
gacauacggguggaggaag

SEQ ID NO: 2215000 - RNA, 19 nt, Artificial Sequence
  Description of Artificial Sequence: Synthetic oligonucleotide
uaaauaccaaccgggucaa

SEQ ID NO: 2215001 - RNA, 19 nt, Artificial Sequence
  Description of Artificial Sequence: Synthetic oligonucleotide
uggugcaaguguccugagc

SEQ ID NO: 2215002 - RNA, 19 nt, Artificial Sequence
  Description of Artificial Sequence: Synthetic oligonucleotide
acacacacacacucacuca

SEQ ID NO: 2215003 - RNA, 19 nt, Artificial Sequence
  Description of Artificial Sequence: Synthetic oligonucleotide
uggccuuguccaugggagg

SEQ ID NO: 2215004 - RNA, 19 nt, Artificial Sequence
  Description of Artificial Sequence: Synthetic oligonucleotide
acaucauggccagauagaa

SEQ ID NO: 2215005 - RNA, 19 nt, Artificial Sequence
  Description of Artificial Sequence: Synthetic oligonucleotide
agccuagauguggcuaucc

SEQ ID NO: 2215006 - RNA, 19 nt, Artificial Sequence
  Description of Artificial Sequence: Synthetic oligonucleotide
caauacggccaguucauga

SEQ ID NO: 2215007 - RNA, 19 nt, Artificial Sequence
  Description of Artificial Sequence: Synthetic oligonucleotide
gugccagaucuucuggugc

SEQ ID NO: 2215008 - RNA, 19 nt, Artificial Sequence
  Description of Artificial Sequence: Synthetic oligonucleotide
gccacacacacacacacac

SEQ ID NO: 2215009 - RNA, 19 nt, Artificial Sequence
  Description of Artificial Sequence: Synthetic oligonucleotide
uguggucccagagcuucgg

SEQ ID NO: 2215010 - RNA, 19 nt, Artificial Sequence
  Description of Artificial Sequence: Synthetic oligonucleotide
auggacaagaugaucccca

SEQ ID NO: 2215011 - RNA, 19 nt, Artificial Sequence
  Description of Artificial Sequence: Synthetic oligonucleotide
augauccccaaacuuugaa

SEQ ID NO: 2215012 - RNA, 19 nt, Artificial Sequence
  Description of Artificial Sequence: Synthetic oligonucleotide
gagcuucggcaauacggcc

SEQ ID NO: 2215013 - RNA, 19 nt, Artificial Sequence
  Description of Artificial Sequence: Synthetic oligonucleotide
agaacaucacaagcccgag

SEQ ID NO: 2215014 - RNA, 19 nt, Artificial Sequence
  Description of Artificial Sequence: Synthetic oligonucleotide
ugagggacaugacgccaug

SEQ ID NO: 2215015 - RNA, 19 nt, Artificial Sequence
  Description of Artificial Sequence: Synthetic oligonucleotide
caugacgccaugggcaggc

SEQ ID NO: 2215016 - RNA, 19 nt, Artificial Sequence
  Description of Artificial Sequence: Synthetic oligonucleotide
aacagccuagauguggcua

SEQ ID NO: 2215017 - RNA, 19 nt, Artificial Sequence
  Description of Artificial Sequence: Synthetic oligonucleotide
ccuagauguggcuauccag

SEQ ID NO: 2215018 - RNA, 19 nt, Artificial Sequence
  Description of Artificial Sequence: Synthetic oligonucleotide
ggaagcaggacauacgggu

SEQ ID NO: 2215019 - RNA, 19 nt, Artificial Sequence
  Description of Artificial Sequence: Synthetic oligonucleotide
uauccagaggcugccgucu

SEQ ID NO: 2215020 - RNA, 19 nt, Artificial Sequence
  Description of Artificial Sequence: Synthetic oligonucleotide
gggcacaugcuccccaugg

SEQ ID NO: 2215021 - RNA, 19 nt, Artificial Sequence
  Description of Artificial Sequence: Synthetic oligonucleotide
aguguccugagcaggggag

SEQ ID NO: 2215022 - RNA, 19 nt, Artificial Sequence
  Description of Artificial Sequence: Synthetic oligonucleotide
cuuguccaugggagguugg

SEQ ID NO: 2215023 - RNA, 19 nt, Artificial Sequence
  Description of Artificial Sequence: Synthetic oligonucleotide
uucuggugcaaguguccug

SEQ ID NO: 2215024 - RNA, 19 nt, Artificial Sequence
  Description of Artificial Sequence: Synthetic oligonucleotide
acaagcccgagagaggcca

SEQ ID NO: 2215025 - RNA, 19 nt, Artificial Sequence
  Description of Artificial Sequence: Synthetic oligonucleotide
ucggcaauacggccaguuc

SEQ ID NO: 2215026 - RNA, 19 nt, Artificial Sequence
  Description of Artificial Sequence: Synthetic oligonucleotide
gguagcuccuguugucagg

SEQ ID NO: 2215027 - RNA, 19 nt, Artificial Sequence
  Description of Artificial Sequence: Synthetic oligonucleotide
aggaccaacucaauccuga

SEQ ID NO: 2215028 - RNA, 19 nt, Artificial Sequence
  Description of Artificial Sequence: Synthetic oligonucleotide
ggacaagggacacccacug

SEQ ID NO: 2215029 - RNA, 19 nt, Artificial Sequence
  Description of Artificial Sequence: Synthetic oligonucleotide
cauacggguggaggaaggg

SEQ ID NO: 2215030 - RNA, 19 nt, Artificial Sequence
  Description of Artificial Sequence: Synthetic oligonucleotide
aucacaagcccgagagagg

SEQ ID NO: 2215031 - RNA, 19 nt, Artificial Sequence
  Description of Artificial Sequence: Synthetic oligonucleotide
aaauaccaaccgggucaac

SEQ ID NO: 2215032 - RNA, 19 nt, Artificial Sequence
  Description of Artificial Sequence: Synthetic oligonucleotide
acggccaguucaugagggg

SEQ ID NO: 2215033 - RNA, 19 nt, Artificial Sequence
  Description of Artificial Sequence: Synthetic oligonucleotide
agaguucuacgcucuccca

SEQ ID NO: 2215034 - RNA, 19 nt, Artificial Sequence
  Description of Artificial Sequence: Synthetic oligonucleotide
gacgccaugggcaggccug

SEQ ID NO: 2215035 - RNA, 19 nt, Artificial Sequence
  Description of Artificial Sequence: Synthetic oligonucleotide
cuauccagaggcugccguc

SEQ ID NO: 2215036 - RNA, 19 nt, Artificial Sequence
  Description of Artificial Sequence: Synthetic oligonucleotide
acauacggguggaggaagg

SEQ ID NO: 2215037 - RNA, 19 nt, Artificial Sequence
  Description of Artificial Sequence: Synthetic oligonucleotide
guucuacgcucucccaccc

SEQ ID NO: 2215038 - RNA, 19 nt, Artificial Sequence
  Description of Artificial Sequence: Synthetic oligonucleotide
ugcccugggugcaaacagu

SEQ ID NO: 2215039 - RNA, 19 nt, Artificial Sequence
  Description of Artificial Sequence: Synthetic oligonucleotide
uaacagccuagauguggcu

SEQ ID NO: 2215040 - RNA, 19 nt, Artificial Sequence
  Description of Artificial Sequence: Synthetic oligonucleotide
gggacaugacgccaugggc

SEQ ID NO: 2215041 - RNA, 19 nt, Artificial Sequence
  Description of Artificial Sequence: Synthetic oligonucleotide
ggucaauaucagaacauca

SEQ ID NO: 2215042 - RNA, 19 nt, Artificial Sequence
  Description of Artificial Sequence: Synthetic oligonucleotide
ggugccagaucuucuggug

SEQ ID NO: 2215043 - RNA, 19 nt, Artificial Sequence
  Description of Artificial Sequence: Synthetic oligonucleotide
ugggugcaaacagugguau

SEQ ID NO: 2215044 - RNA, 19 nt, Artificial Sequence
  Description of Artificial Sequence: Synthetic oligonucleotide
gucaauaucagaacaucau

SEQ ID NO: 2215045 - RNA, 19 nt, Artificial Sequence
  Description of Artificial Sequence: Synthetic oligonucleotide
acacacacacacauacaca

SEQ ID NO: 2215046 - RNA, 19 nt, Artificial Sequence
  Description of Artificial Sequence: Synthetic oligonucleotide
gagcaggauuggcccauag

SEQ ID NO: 2215047 - RNA, 19 nt, Artificial Sequence
  Description of Artificial Sequence: Synthetic oligonucleotide
ggacaugacgccaugggca

SEQ ID NO: 2215048 - RNA, 19 nt, Artificial Sequence
  Description of Artificial Sequence: Synthetic oligonucleotide
uccugagcaggggagaguu

SEQ ID NO: 2215049 - RNA, 19 nt, Artificial Sequence
  Description of Artificial Sequence: Synthetic oligonucleotide
cugguucaggugaggugcc

SEQ ID NO: 2215050 - RNA, 19 nt, Artificial Sequence
  Description of Artificial Sequence: Synthetic oligonucleotide
gcaaguguccugagcaggg

SEQ ID NO: 2215051 - RNA, 19 nt, Artificial Sequence
  Description of Artificial Sequence: Synthetic oligonucleotide
agggucaauaucagaacau

SEQ ID NO: 2215052 - RNA, 19 nt, Artificial Sequence
  Description of Artificial Sequence: Synthetic oligonucleotide
gggacaguaacaagcagga

SEQ ID NO: 2215053 - RNA, 19 nt, Artificial Sequence
  Description of Artificial Sequence: Synthetic oligonucleotide
agaacaucauggccagaua

SEQ ID NO: 2215054 - RNA, 19 nt, Artificial Sequence
  Description of Artificial Sequence: Synthetic oligonucleotide
uucuacgcucucccaccca

SEQ ID NO: 2215055 - RNA, 19 nt, Artificial Sequence
  Description of Artificial Sequence: Synthetic oligonucleotide
ugggagcccugaaggagcu

SEQ ID NO: 2215056 - RNA, 19 nt, Artificial Sequence
  Description of Artificial Sequence: Synthetic oligonucleotide
acacauacacacacacaca

SEQ ID NO: 2215057 - RNA, 19 nt, Artificial Sequence
  Description of Artificial Sequence: Synthetic oligonucleotide
acauacacacacacacaca

SEQ ID NO: 2215058 - RNA, 19 nt, Artificial Sequence
  Description of Artificial Sequence: Synthetic oligonucleotide
caaguguccugagcagggg

SEQ ID NO: 2215059 - RNA, 19 nt, Artificial Sequence
  Description of Artificial Sequence: Synthetic oligonucleotide
uucaggugaggugccagau

SEQ ID NO: 2215060 - RNA, 19 nt, Artificial Sequence
  Description of Artificial Sequence: Synthetic oligonucleotide
gagguagcuccuguuguca

SEQ ID NO: 2215061 - RNA, 19 nt, Artificial Sequence
  Description of Artificial Sequence: Synthetic oligonucleotide
gaugauccccaaacuuuga

SEQ ID NO: 2215062 - RNA, 19 nt, Artificial Sequence
  Description of Artificial Sequence: Synthetic oligonucleotide
ugacgccaugggcaggccu

SEQ ID NO: 2215063 - RNA, 19 nt, Artificial Sequence
  Description of Artificial Sequence: Synthetic oligonucleotide
cacacacacacacacacau

SEQ ID NO: 2215064 - RNA, 19 nt, Artificial Sequence
  Description of Artificial Sequence: Synthetic oligonucleotide
caaccgggucaacauuuac

SEQ ID NO: 2215065 - RNA, 19 nt, Artificial Sequence
  Description of Artificial Sequence: Synthetic oligonucleotide
gcuucucuuggcuccuggg

SEQ ID NO: 2215066 - RNA, 19 nt, Artificial Sequence
  Description of Artificial Sequence: Synthetic oligonucleotide
gcuucggcaauacggccag

SEQ ID NO: 2215067 - RNA, 19 nt, Artificial Sequence
  Description of Artificial Sequence: Synthetic oligonucleotide
agcuucggcaauacggcca

SEQ ID NO: 2215068 - RNA, 19 nt, Artificial Sequence
  Description of Artificial Sequence: Synthetic oligonucleotide
acacacauacacacacaca

SEQ ID NO: 2215069 - RNA, 19 nt, Artificial Sequence
  Description of Artificial Sequence: Synthetic oligonucleotide
uaccaaccgggucaacauu

SEQ ID NO: 2215070 - RNA, 19 nt, Artificial Sequence
  Description of Artificial Sequence: Synthetic oligonucleotide
uucggcaauacggccaguu

SEQ ID NO: 2215071 - RNA, 19 nt, Artificial Sequence
  Description of Artificial Sequence: Synthetic oligonucleotide
uggcuauccagaggcugcc

SEQ ID NO: 2215072 - RNA, 19 nt, Artificial Sequence
  Description of Artificial Sequence: Synthetic oligonucleotide
auacacacacacacacaca

SEQ ID NO: 2215073 - RNA, 19 nt, Artificial Sequence
  Description of Artificial Sequence: Synthetic oligonucleotide
cagucagguuucccaacac

SEQ ID NO: 2215074 - RNA, 19 nt, Artificial Sequence
  Description of Artificial Sequence: Synthetic oligonucleotide
caagaugauccccaaacuu

SEQ ID NO: 2215075 - RNA, 19 nt, Artificial Sequence
  Description of Artificial Sequence: Synthetic oligonucleotide
cuacgcucucccacccacc

SEQ ID NO: 2215076 - RNA, 19 nt, Artificial Sequence
  Description of Artificial Sequence: Synthetic oligonucleotide
guucaggugaggugccaga

SEQ ID NO: 2215077 - RNA, 19 nt, Artificial Sequence
  Description of Artificial Sequence: Synthetic oligonucleotide
gcaaacagugguauacuuc

SEQ ID NO: 2215078 - RNA, 19 nt, Artificial Sequence
  Description of Artificial Sequence: Synthetic oligonucleotide
agacuggauaaggaagaau

SEQ ID NO: 2215079 - RNA, 19 nt, Artificial Sequence
  Description of Artificial Sequence: Synthetic oligonucleotide
ugccgucuagaguggcccc

SEQ ID NO: 2215080 - RNA, 19 nt, Artificial Sequence
  Description of Artificial Sequence: Synthetic oligonucleotide
cacaagcccgagagaggcc

SEQ ID NO: 2215081 - RNA, 19 nt, Artificial Sequence
  Description of Artificial Sequence: Synthetic oligonucleotide
agcugcccugggugcaaac

SEQ ID NO: 2215082 - RNA, 19 nt, Artificial Sequence
  Description of Artificial Sequence: Synthetic oligonucleotide
ugucugggacaagggacac

SEQ ID NO: 2215083 - RNA, 19 nt, Artificial Sequence
  Description of Artificial Sequence: Synthetic oligonucleotide
gggucaauaucagaacauc

SEQ ID NO: 2215084 - RNA, 19 nt, Artificial Sequence
  Description of Artificial Sequence: Synthetic oligonucleotide
agcccgagagaggccacac

SEQ ID NO: 2215085 - RNA, 19 nt, Artificial Sequence
  Description of Artificial Sequence: Synthetic oligonucleotide
gguuuacagacuggauaag

SEQ ID NO: 2215086 - RNA, 19 nt, Artificial Sequence
  Description of Artificial Sequence: Synthetic oligonucleotide
acacacacacacacacuca

SEQ ID NO: 2215087 - RNA, 19 nt, Artificial Sequence
  Description of Artificial Sequence: Synthetic oligonucleotide
accaaccgggucaacauuu

SEQ ID NO: 2215088 - RNA, 19 nt, Artificial Sequence
  Description of Artificial Sequence: Synthetic oligonucleotide
ccaacucaauccugacagg

SEQ ID NO: 2215089 - RNA, 19 nt, Artificial Sequence
  Description of Artificial Sequence: Synthetic oligonucleotide
gcugggaagcaggacauac

SEQ ID NO: 2215090 - RNA, 19 nt, Artificial Sequence
  Description of Artificial Sequence: Synthetic oligonucleotide
ugggagguugggagcccug

SEQ ID NO: 2215091 - RNA, 19 nt, Artificial Sequence
  Description of Artificial Sequence: Synthetic oligonucleotide
acacacacacauacacaca

SEQ ID NO: 2215092 - RNA, 19 nt, Artificial Sequence
  Description of Artificial Sequence: Synthetic oligonucleotide
acacacacauacacacaca

SEQ ID NO: 2215093 - RNA, 19 nt, Artificial Sequence
  Description of Artificial Sequence: Synthetic oligonucleotide
acccuucagacaaaauaaa

SEQ ID NO: 2215094 - RNA, 19 nt, Artificial Sequence
  Description of Artificial Sequence: Synthetic oligonucleotide
acacacacacacacauaca

SEQ ID NO: 2215095 - RNA, 19 nt, Artificial Sequence
  Description of Artificial Sequence: Synthetic oligonucleotide
ccuauuuguaguuuggguu

SEQ ID NO: 2215096 - RNA, 19 nt, Artificial Sequence
  Description of Artificial Sequence: Synthetic oligonucleotide
ugaggcuccuggccuuguc

SEQ ID NO: 2215097 - RNA, 19 nt, Artificial Sequence
  Description of Artificial Sequence: Synthetic oligonucleotide
acacacacacacacacaca

SEQ ID NO: 2215098 - RNA, 19 nt, Artificial Sequence
  Description of Artificial Sequence: Synthetic oligonucleotide
acacacacacacacucacu

SEQ ID NO: 2215099 - RNA, 19 nt, Artificial Sequence
  Description of Artificial Sequence: Synthetic oligonucleotide
acacacacacacacacacu

SEQ ID NO: 2215100 - RNA, 19 nt, Artificial Sequence
  Description of Artificial Sequence: Synthetic oligonucleotide
cugggugcaaacaguggua

SEQ ID NO: 2215101 - RNA, 19 nt, Artificial Sequence
  Description of Artificial Sequence: Synthetic oligonucleotide
gcuguccgggcucuguccc

SEQ ID NO: 2215102 - RNA, 19 nt, Artificial Sequence
  Description of Artificial Sequence: Synthetic oligonucleotide
gcgcgagcaggauuggccc

SEQ ID NO: 2215103 - RNA, 19 nt, Artificial Sequence
  Description of Artificial Sequence: Synthetic oligonucleotide
ccacccuucagacaaaaua

SEQ ID NO: 2215104 - RNA, 19 nt, Artificial Sequence
  Description of Artificial Sequence: Synthetic oligonucleotide
ggaccaacucaauccugac

SEQ ID NO: 2215105 - RNA, 19 nt, Artificial Sequence
  Description of Artificial Sequence: Synthetic oligonucleotide
acgcucucccacccaccuc

SEQ ID NO: 2215106 - RNA, 19 nt, Artificial Sequence
  Description of Artificial Sequence: Synthetic oligonucleotide
gaggccacacacacacaca

SEQ ID NO: 2215107 - RNA, 19 nt, Artificial Sequence
  Description of Artificial Sequence: Synthetic oligonucleotide
acaugacgccaugggcagg

SEQ ID NO: 2215108 - RNA, 19 nt, Artificial Sequence
  Description of Artificial Sequence: Synthetic oligonucleotide
gccccuaaggagcugcuuc

SEQ ID NO: 2215109 - RNA, 19 nt, Artificial Sequence
  Description of Artificial Sequence: Synthetic oligonucleotide
aggacacuugagaggaaaa

SEQ ID NO: 2215110 - RNA, 19 nt, Artificial Sequence
  Description of Artificial Sequence: Synthetic oligonucleotide
aagcccgagagaggccaca

SEQ ID NO: 2215111 - RNA, 19 nt, Artificial Sequence
  Description of Artificial Sequence: Synthetic oligonucleotide
augacgccaugggcaggcc

SEQ ID NO: 2215112 - RNA, 19 nt, Artificial Sequence
  Description of Artificial Sequence: Synthetic oligonucleotide
cagaacaucauggccagau

SEQ ID NO: 2215113 - RNA, 19 nt, Artificial Sequence
  Description of Artificial Sequence: Synthetic oligonucleotide
gaagguuuacagacuggau

SEQ ID NO: 2215114 - RNA, 19 nt, Artificial Sequence
  Description of Artificial Sequence: Synthetic oligonucleotide
caggacacuugagaggaaa

SEQ ID NO: 2215115 - RNA, 19 nt, Artificial Sequence
  Description of Artificial Sequence: Synthetic oligonucleotide
ucagaacaucauggccaga

SEQ ID NO: 2215116 - RNA, 19 nt, Artificial Sequence
  Description of Artificial Sequence: Synthetic oligonucleotide
ggaagggauggcgcgagca

SEQ ID NO: 2215117 - RNA, 19 nt, Artificial Sequence
  Description of Artificial Sequence: Synthetic oligonucleotide
cuaaggagcugcuucucuu

SEQ ID NO: 2215118 - RNA, 19 nt, Artificial Sequence
  Description of Artificial Sequence: Synthetic oligonucleotide
ggcuguccgggcucugucc

SEQ ID NO: 2215119 - RNA, 19 nt, Artificial Sequence
  Description of Artificial Sequence: Synthetic oligonucleotide
acagugccagacagcugag

SEQ ID NO: 2215120 - RNA, 19 nt, Artificial Sequence
  Description of Artificial Sequence: Synthetic oligonucleotide
uggugaggcuccuggccuu

SEQ ID NO: 2215121 - RNA, 19 nt, Artificial Sequence
  Description of Artificial Sequence: Synthetic oligonucleotide
caagcccgagagaggccac

SEQ ID NO: 2215122 - RNA, 19 nt, Artificial Sequence
  Description of Artificial Sequence: Synthetic oligonucleotide
uggccccuaaggagcugcu

SEQ ID NO: 2215123 - RNA, 19 nt, Artificial Sequence
  Description of Artificial Sequence: Synthetic oligonucleotide
gcauggaugaagaugguuu

SEQ ID NO: 2215124 - RNA, 19 nt, Artificial Sequence
  Description of Artificial Sequence: Synthetic oligonucleotide
gccuagauguggcuaucca

SEQ ID NO: 2215125 - RNA, 19 nt, Artificial Sequence
  Description of Artificial Sequence: Synthetic oligonucleotide
gucugggacaagggacacc

SEQ ID NO: 2215126 - RNA, 19 nt, Artificial Sequence
  Description of Artificial Sequence: Synthetic oligonucleotide
cacagauggacaagaugau

SEQ ID NO: 2215127 - RNA, 19 nt, Artificial Sequence
  Description of Artificial Sequence: Synthetic oligonucleotide
auggcgcgagcaggauugg

SEQ ID NO: 2215128 - RNA, 19 nt, Artificial Sequence
  Description of Artificial Sequence: Synthetic oligonucleotide
uggcgcgagcaggauuggc

SEQ ID NO: 2215129 - RNA, 19 nt, Artificial Sequence
  Description of Artificial Sequence: Synthetic oligonucleotide
cagacuggauaaggaagaa

SEQ ID NO: 2215130 - RNA, 19 nt, Artificial Sequence
  Description of Artificial Sequence: Synthetic oligonucleotide
caggggagaguucuacgcu

SEQ ID NO: 2215131 - RNA, 19 nt, Artificial Sequence
  Description of Artificial Sequence: Synthetic oligonucleotide
gggagguagcuccuguugu

SEQ ID NO: 2215132 - RNA, 19 nt, Artificial Sequence
  Description of Artificial Sequence: Synthetic oligonucleotide
gugcaaacagugguauacu

SEQ ID NO: 2215133 - RNA, 19 nt, Artificial Sequence
  Description of Artificial Sequence: Synthetic oligonucleotide
acacacacacacacacaua

SEQ ID NO: 2215134 - RNA, 19 nt, Artificial Sequence
  Description of Artificial Sequence: Synthetic oligonucleotide
ggacaagaugauccccaaa

SEQ ID NO: 2215135 - RNA, 19 nt, Artificial Sequence
  Description of Artificial Sequence: Synthetic oligonucleotide
ggccugagugucugggaca

SEQ ID NO: 2215136 - RNA, 19 nt, Artificial Sequence
  Description of Artificial Sequence: Synthetic oligonucleotide
guuucccaacacagugcca

SEQ ID NO: 2215137 - RNA, 19 nt, Artificial Sequence
  Description of Artificial Sequence: Synthetic oligonucleotide
cuucuggugcaaguguccu

SEQ ID NO: 2215138 - RNA, 19 nt, Artificial Sequence
  Description of Artificial Sequence: Synthetic oligonucleotide
gcugagggacaugacgcca

SEQ ID NO: 2215139 - RNA, 19 nt, Artificial Sequence
  Description of Artificial Sequence: Synthetic oligonucleotide
gcaauacggccaguucaug

SEQ ID NO: 2215140 - RNA, 19 nt, Artificial Sequence
  Description of Artificial Sequence: Synthetic oligonucleotide
auguggcuauccagaggcu

SEQ ID NO: 2215141 - RNA, 19 nt, Artificial Sequence
  Description of Artificial Sequence: Synthetic oligonucleotide
cugagggacaugacgccau

SEQ ID NO: 2215142 - RNA, 19 nt, Artificial Sequence
  Description of Artificial Sequence: Synthetic oligonucleotide
cggcaauacggccaguuca

SEQ ID NO: 2215143 - RNA, 19 nt, Artificial Sequence
  Description of Artificial Sequence: Synthetic oligonucleotide
ggacauacggguggaggaa

SEQ ID NO: 2215144 - RNA, 19 nt, Artificial Sequence
  Description of Artificial Sequence: Synthetic oligonucleotide
gggacacccacuggcuggc

SEQ ID NO: 2215145 - RNA, 19 nt, Artificial Sequence
  Description of Artificial Sequence: Synthetic oligonucleotide
gcuauccagaggcugccgu

SEQ ID NO: 2215146 - RNA, 19 nt, Artificial Sequence
  Description of Artificial Sequence: Synthetic oligonucleotide
gagaggccacacacacaca

SEQ ID NO: 2215147 - RNA, 19 nt, Artificial Sequence
  Description of Artificial Sequence: Synthetic oligonucleotide
ggagcccugaaggagcugu

SEQ ID NO: 2215148 - RNA, 19 nt, Artificial Sequence
  Description of Artificial Sequence: Synthetic oligonucleotide
gccaaauaacagccuagau

SEQ ID NO: 2215149 - RNA, 19 nt, Artificial Sequence
  Description of Artificial Sequence: Synthetic oligonucleotide
ccacacacacacacacaca

SEQ ID NO: 2215150 - RNA, 19 nt, Artificial Sequence
  Description of Artificial Sequence: Synthetic oligonucleotide
ggggcacaugcuccccaug

SEQ ID NO: 2215151 - RNA, 19 nt, Artificial Sequence
  Description of Artificial Sequence: Synthetic oligonucleotide
ggugaggcuccuggccuug

SEQ ID NO: 2215152 - RNA, 19 nt, Artificial Sequence
  Description of Artificial Sequence: Synthetic oligonucleotide
cucucccacccaccuccuc

SEQ ID NO: 2215153 - RNA, 19 nt, Artificial Sequence
  Description of Artificial Sequence: Synthetic oligonucleotide
ggcaauacggccaguucau

SEQ ID NO: 2215154 - RNA, 19 nt, Artificial Sequence
  Description of Artificial Sequence: Synthetic oligonucleotide
ccccaugguugauggugag

SEQ ID NO: 2215155 - RNA, 19 nt, Artificial Sequence
  Description of Artificial Sequence: Synthetic oligonucleotide
acgccaugggcaggccuga

SEQ ID NO: 2215156 - RNA, 19 nt, Artificial Sequence
  Description of Artificial Sequence: Synthetic oligonucleotide
ccgagagaggccacacaca

SEQ ID NO: 2215157 - RNA, 19 nt, Artificial Sequence
  Description of Artificial Sequence: Synthetic oligonucleotide
gaguggccccuaaggagcu

SEQ ID NO: 2215158 - RNA, 19 nt, Artificial Sequence
  Description of Artificial Sequence: Synthetic oligonucleotide
ccauagcuuuggcgggaag

SEQ ID NO: 2215159 - RNA, 19 nt, Artificial Sequence
  Description of Artificial Sequence: Synthetic oligonucleotide
gcaggacauacggguggag

SEQ ID NO: 2215160 - RNA, 19 nt, Artificial Sequence
  Description of Artificial Sequence: Synthetic oligonucleotide
gggaagcuccagacccugc

SEQ ID NO: 2215161 - RNA, 19 nt, Artificial Sequence
  Description of Artificial Sequence: Synthetic oligonucleotide
gggacaagggacacccacu

SEQ ID NO: 2215162 - RNA, 19 nt, Artificial Sequence
  Description of Artificial Sequence: Synthetic oligonucleotide
gggugcaaacagugguaua

SEQ ID NO: 2215163 - RNA, 19 nt, Artificial Sequence
  Description of Artificial Sequence: Synthetic oligonucleotide
ggccacacacacacacaca

SEQ ID NO: 2215164 - RNA, 19 nt, Artificial Sequence
  Description of Artificial Sequence: Synthetic oligonucleotide
agcugggaagcaggacaua

SEQ ID NO: 2215165 - RNA, 19 nt, Artificial Sequence
  Description of Artificial Sequence: Synthetic oligonucleotide
gcacaugcuccccaugguu

SEQ ID NO: 2215166 - RNA, 19 nt, Artificial Sequence
  Description of Artificial Sequence: Synthetic oligonucleotide
ccuaaggagcugcuucucu

SEQ ID NO: 2215167 - RNA, 19 nt, Artificial Sequence
  Description of Artificial Sequence: Synthetic oligonucleotide
ggcugccgucuagaguggc

SEQ ID NO: 2215168 - RNA, 19 nt, Artificial Sequence
  Description of Artificial Sequence: Synthetic oligonucleotide
gcuuuggcgggaagcucca

SEQ ID NO: 2215169 - RNA, 19 nt, Artificial Sequence
  Description of Artificial Sequence: Synthetic oligonucleotide
cccuaaggagcugcuucuc

SEQ ID NO: 2215170 - RNA, 19 nt, Artificial Sequence
  Description of Artificial Sequence: Synthetic oligonucleotide
ccaaccgggucaacauuua

SEQ ID NO: 2215171 - RNA, 19 nt, Artificial Sequence
  Description of Artificial Sequence: Synthetic oligonucleotide
cccaaacuuugaagguuua

SEQ ID NO: 2215172 - RNA, 19 nt, Artificial Sequence
  Description of Artificial Sequence: Synthetic oligonucleotide
gcccauagcuuuggcggga

SEQ ID NO: 2215173 - RNA, 19 nt, Artificial Sequence
  Description of Artificial Sequence: Synthetic oligonucleotide
gcccgagagaggccacaca

SEQ ID NO: 2215174 - RNA, 19 nt, Artificial Sequence
  Description of Artificial Sequence: Synthetic oligonucleotide
ggauggcgcgagcaggauu

SEQ ID NO: 2215175 - RNA, 19 nt, Artificial Sequence
  Description of Artificial Sequence: Synthetic oligonucleotide
cuguccgggcucugucccu

SEQ ID NO: 2215176 - RNA, 19 nt, Artificial Sequence
  Description of Artificial Sequence: Synthetic oligonucleotide
cgggaagcuccagacccug

SEQ ID NO: 2215177 - RNA, 19 nt, Artificial Sequence
  Description of Artificial Sequence: Synthetic oligonucleotide
cacccacuggcuggcuucu

SEQ ID NO: 2215178 - RNA, 19 nt, Artificial Sequence
  Description of Artificial Sequence: Synthetic oligonucleotide
cgcgagcaggauuggccca

SEQ ID NO: 2215179 - RNA, 19 nt, Artificial Sequence
  Description of Artificial Sequence: Synthetic oligonucleotide
gccgucuagaguggccccu

SEQ ID NO: 2215180 - RNA, 19 nt, Artificial Sequence
  Description of Artificial Sequence: Synthetic oligonucleotide
cccauagcuuuggcgggaa

SEQ ID NO: 2215181 - RNA, 19 nt, Artificial Sequence
  Description of Artificial Sequence: Synthetic oligonucleotide
gcgagcaggauuggcccau

SEQ ID NO: 2215182 - RNA, 19 nt, Artificial Sequence
  Description of Artificial Sequence: Synthetic oligonucleotide
cagcugcccugggugcaaa

SEQ ID NO: 2215183 - RNA, 19 nt, Artificial Sequence
  Description of Artificial Sequence: Synthetic oligonucleotide
cuucggcaauacggccagu

SEQ ID NO: 2215184 - RNA, 19 nt, Artificial Sequence
  Description of Artificial Sequence: Synthetic oligonucleotide
ccgggucaacauuuacauu

SEQ ID NO: 2215185 - RNA, 19 nt, Artificial Sequence
  Description of Artificial Sequence: Synthetic oligonucleotide
cgucuagaguggccccuaa

SEQ ID NO: 2215186 - RNA, 19 nt, Artificial Sequence
  Description of Artificial Sequence: Synthetic oligonucleotide
gggauggcgcgagcaggau

SEQ ID NO: 2215187 - RNA, 19 nt, Artificial Sequence
  Description of Artificial Sequence: Synthetic oligonucleotide
ggccccuaaggagcugcuu

SEQ ID NO: 2215188 - RNA, 19 nt, Artificial Sequence
  Description of Artificial Sequence: Synthetic oligonucleotide
ggacacccacuggcuggcu

SEQ ID NO: 2215189 - RNA, 19 nt, Artificial Sequence
  Description of Artificial Sequence: Synthetic oligonucleotide
cgagcaggauuggcccaua

SEQ ID NO: 2215190 - RNA, 19 nt, Artificial Sequence
  Description of Artificial Sequence: Synthetic oligonucleotide
aauguuuuaugcaugagac

SEQ ID NO: 2215191 - RNA, 19 nt, Artificial Sequence
  Description of Artificial Sequence: Synthetic oligonucleotide
aauacacaaaggcagagag

SEQ ID NO: 2215192 - RNA, 19 nt, Artificial Sequence
  Description of Artificial Sequence: Synthetic oligonucleotide
uuaguuuggaaucauacug

SEQ ID NO: 2215193 - RNA, 19 nt, Artificial Sequence
  Description of Artificial Sequence: Synthetic oligonucleotide
aauugggaauuccagcucc

SEQ ID NO: 2215194 - RNA, 19 nt, Artificial Sequence
  Description of Artificial Sequence: Synthetic oligonucleotide
aauaguucguagcucaggg

SEQ ID NO: 2215195 - RNA, 19 nt, Artificial Sequence
  Description of Artificial Sequence: Synthetic oligonucleotide
aagucauugagaugaaccg

SEQ ID NO: 2215196 - RNA, 19 nt, Artificial Sequence
  Description of Artificial Sequence: Synthetic oligonucleotide
aacccaauaaccaauuccc

SEQ ID NO: 2215197 - RNA, 19 nt, Artificial Sequence
  Description of Artificial Sequence: Synthetic oligonucleotide
acucguaggguccagagcc

SEQ ID NO: 2215198 - RNA, 19 nt, Artificial Sequence
  Description of Artificial Sequence: Synthetic oligonucleotide
aaaccauugccauagguug

SEQ ID NO: 2215199 - RNA, 19 nt, Artificial Sequence
  Description of Artificial Sequence: Synthetic oligonucleotide
ucgaguacaacaucaaagg

SEQ ID NO: 2215200 - RNA, 19 nt, Artificial Sequence
  Description of Artificial Sequence: Synthetic oligonucleotide
uuguacaugggcuuuaucc

SEQ ID NO: 2215201 - RNA, 19 nt, Artificial Sequence
  Description of Artificial Sequence: Synthetic oligonucleotide
ugagcauagugucugaucc

SEQ ID NO: 2215202 - RNA, 19 nt, Artificial Sequence
  Description of Artificial Sequence: Synthetic oligonucleotide
uggagaguaauccacacug

SEQ ID NO: 2215203 - RNA, 19 nt, Artificial Sequence
  Description of Artificial Sequence: Synthetic oligonucleotide
uuugagaacccaauaacca

SEQ ID NO: 2215204 - RNA, 19 nt, Artificial Sequence
  Description of Artificial Sequence: Synthetic oligonucleotide
uguuuuaugcaugagaccu

SEQ ID NO: 2215205 - RNA, 19 nt, Artificial Sequence
  Description of Artificial Sequence: Synthetic oligonucleotide
uguggauaccuucagaaga

SEQ ID NO: 2215206 - RNA, 19 nt, Artificial Sequence
  Description of Artificial Sequence: Synthetic oligonucleotide
uuaugcaugagaccucugg

SEQ ID NO: 2215207 - RNA, 19 nt, Artificial Sequence
  Description of Artificial Sequence: Synthetic oligonucleotide
gagccuaauacacaaaggc

SEQ ID NO: 2215208 - RNA, 19 nt, Artificial Sequence
  Description of Artificial Sequence: Synthetic oligonucleotide
auuugagaacccaauaacc

SEQ ID NO: 2215209 - RNA, 19 nt, Artificial Sequence
  Description of Artificial Sequence: Synthetic oligonucleotide
uuuggaaucauacuguauu

SEQ ID NO: 2215210 - RNA, 19 nt, Artificial Sequence
  Description of Artificial Sequence: Synthetic oligonucleotide
ucuaggagggcacggaagg

SEQ ID NO: 2215211 - RNA, 19 nt, Artificial Sequence
  Description of Artificial Sequence: Synthetic oligonucleotide
auugagaugaaccggccuc

SEQ ID NO: 2215212 - RNA, 19 nt, Artificial Sequence
  Description of Artificial Sequence: Synthetic oligonucleotide
gaagucauugagaugaacc

SEQ ID NO: 2215213 - RNA, 19 nt, Artificial Sequence
  Description of Artificial Sequence: Synthetic oligonucleotide
gauuugagaacccaauaac

SEQ ID NO: 2215214 - RNA, 19 nt, Artificial Sequence
  Description of Artificial Sequence: Synthetic oligonucleotide
aacgagacugagcauagug

SEQ ID NO: 2215215 - RNA, 19 nt, Artificial Sequence
  Description of Artificial Sequence: Synthetic oligonucleotide
agcgaacuugcauagcugc

SEQ ID NO: 2215216 - RNA, 19 nt, Artificial Sequence
  Description of Artificial Sequence: Synthetic oligonucleotide
aaauugggaauuccagcuc

SEQ ID NO: 2215217 - RNA, 19 nt, Artificial Sequence
  Description of Artificial Sequence: Synthetic oligonucleotide
cucgaguacaacaucaaag

SEQ ID NO: 2215218 - RNA, 19 nt, Artificial Sequence
  Description of Artificial Sequence: Synthetic oligonucleotide
caucaaaggaaccacuagg

SEQ ID NO: 2215219 - RNA, 19 nt, Artificial Sequence
  Description of Artificial Sequence: Synthetic oligonucleotide
cuguauugguuguacaugg

SEQ ID NO: 2215220 - RNA, 19 nt, Artificial Sequence
  Description of Artificial Sequence: Synthetic oligonucleotide
cagaagauacauuccaggg

SEQ ID NO: 2215221 - RNA, 19 nt, Artificial Sequence
  Description of Artificial Sequence: Synthetic oligonucleotide
agauacauuccagggaucc

SEQ ID NO: 2215222 - RNA, 19 nt, Artificial Sequence
  Description of Artificial Sequence: Synthetic oligonucleotide
uuuaguuuggaaucauacu

SEQ ID NO: 2215223 - RNA, 19 nt, Artificial Sequence
  Description of Artificial Sequence: Synthetic oligonucleotide
uauugguuguacaugggcu

SEQ ID NO: 2215224 - RNA, 19 nt, Artificial Sequence
  Description of Artificial Sequence: Synthetic oligonucleotide
guucccgcaaccuagcacg

SEQ ID NO: 2215225 - RNA, 19 nt, Artificial Sequence
  Description of Artificial Sequence: Synthetic oligonucleotide
uaguucguagcucagggca

SEQ ID NO: 2215226 - RNA, 19 nt, Artificial Sequence
  Description of Artificial Sequence: Synthetic oligonucleotide
auguuuuaugcaugagacc

SEQ ID NO: 2215227 - RNA, 19 nt, Artificial Sequence
  Description of Artificial Sequence: Synthetic oligonucleotide
agugucugauccuaaagug

SEQ ID NO: 2215228 - RNA, 19 nt, Artificial Sequence
  Description of Artificial Sequence: Synthetic oligonucleotide
uucagaagauacauuccag

SEQ ID NO: 2215229 - RNA, 19 nt, Artificial Sequence
  Description of Artificial Sequence: Synthetic oligonucleotide
uagguuguaugccucagug

SEQ ID NO: 2215230 - RNA, 19 nt, Artificial Sequence
  Description of Artificial Sequence: Synthetic oligonucleotide
ugauuucagucucacagac

SEQ ID NO: 2215231 - RNA, 19 nt, Artificial Sequence
  Description of Artificial Sequence: Synthetic oligonucleotide
gaagcgaaguccccgaacc

SEQ ID NO: 2215232 - RNA, 19 nt, Artificial Sequence
  Description of Artificial Sequence: Synthetic oligonucleotide
auuaucggagucuuggaga

SEQ ID NO: 2215233 - RNA, 19 nt, Artificial Sequence
  Description of Artificial Sequence: Synthetic oligonucleotide
acaacaucaaaggaaccac

SEQ ID NO: 2215234 - RNA, 19 nt, Artificial Sequence
  Description of Artificial Sequence: Synthetic oligonucleotide
agaugaaccggccuccagg

SEQ ID NO: 2215235 - RNA, 19 nt, Artificial Sequence
  Description of Artificial Sequence: Synthetic oligonucleotide
ucugcccuuaugcaugagg

SEQ ID NO: 2215236 - RNA, 19 nt, Artificial Sequence
  Description of Artificial Sequence: Synthetic oligonucleotide
uagugucugauccuaaagu

SEQ ID NO: 2215237 - RNA, 19 nt, Artificial Sequence
  Description of Artificial Sequence: Synthetic oligonucleotide
auagcgaacuugcauagcu

SEQ ID NO: 2215238 - RNA, 19 nt, Artificial Sequence
  Description of Artificial Sequence: Synthetic oligonucleotide
aucaaaggaaccacuaggg

SEQ ID NO: 2215239 - RNA, 19 nt, Artificial Sequence
  Description of Artificial Sequence: Synthetic oligonucleotide
ugagguaaaaguggaaaug

SEQ ID NO: 2215240 - RNA, 19 nt, Artificial Sequence
  Description of Artificial Sequence: Synthetic oligonucleotide
aauaaccaauuccccagcu

SEQ ID NO: 2215241 - RNA, 19 nt, Artificial Sequence
  Description of Artificial Sequence: Synthetic oligonucleotide
auaguucguagcucagggc

SEQ ID NO: 2215242 - RNA, 19 nt, Artificial Sequence
  Description of Artificial Sequence: Synthetic oligonucleotide
uuccccagcuccaaauugg

SEQ ID NO: 2215243 - RNA, 19 nt, Artificial Sequence
  Description of Artificial Sequence: Synthetic oligonucleotide
uuggaaucauacuguauug

SEQ ID NO: 2215244 - RNA, 19 nt, Artificial Sequence
  Description of Artificial Sequence: Synthetic oligonucleotide
aguguggauaccuucagaa

SEQ ID NO: 2215245 - RNA, 19 nt, Artificial Sequence
  Description of Artificial Sequence: Synthetic oligonucleotide
caaccuagcacgaggauac

SEQ ID NO: 2215246 - RNA, 19 nt, Artificial Sequence
  Description of Artificial Sequence: Synthetic oligonucleotide
aggaauaguucguagcuca

SEQ ID NO: 2215247 - RNA, 19 nt, Artificial Sequence
  Description of Artificial Sequence: Synthetic oligonucleotide
uggaaucauacuguauugg

SEQ ID NO: 2215248 - RNA, 19 nt, Artificial Sequence
  Description of Artificial Sequence: Synthetic oligonucleotide
agaccaugauuucagucuc

SEQ ID NO: 2215249 - RNA, 19 nt, Artificial Sequence
  Description of Artificial Sequence: Synthetic oligonucleotide
ugggcuuuaucccaccagc

SEQ ID NO: 2215250 - RNA, 19 nt, Artificial Sequence
  Description of Artificial Sequence: Synthetic oligonucleotide
uaugccucagugaccagcc

SEQ ID NO: 2215251 - RNA, 19 nt, Artificial Sequence
  Description of Artificial Sequence: Synthetic oligonucleotide
aaaguggggaccugcagaa

SEQ ID NO: 2215252 - RNA, 19 nt, Artificial Sequence
  Description of Artificial Sequence: Synthetic oligonucleotide
acaucaaaggaaccacuag

SEQ ID NO: 2215253 - RNA, 19 nt, Artificial Sequence
  Description of Artificial Sequence: Synthetic oligonucleotide
aaaaccauugccauagguu

SEQ ID NO: 2215254 - RNA, 19 nt, Artificial Sequence
  Description of Artificial Sequence: Synthetic oligonucleotide
cuuuaucccaccagcaaug

SEQ ID NO: 2215255 - RNA, 19 nt, Artificial Sequence
  Description of Artificial Sequence: Synthetic oligonucleotide
auaaccaauuccccagcuc

SEQ ID NO: 2215256 - RNA, 19 nt, Artificial Sequence
  Description of Artificial Sequence: Synthetic oligonucleotide
aaggaauaguucguagcuc

SEQ ID NO: 2215257 - RNA, 19 nt, Artificial Sequence
  Description of Artificial Sequence: Synthetic oligonucleotide
aguaauccacacuggucac

SEQ ID NO: 2215258 - RNA, 19 nt, Artificial Sequence
  Description of Artificial Sequence: Synthetic oligonucleotide
aacuugcauagcugccacc

SEQ ID NO: 2215259 - RNA, 19 nt, Artificial Sequence
  Description of Artificial Sequence: Synthetic oligonucleotide
acuagggaaguccagugcu

SEQ ID NO: 2215260 - RNA, 19 nt, Artificial Sequence
  Description of Artificial Sequence: Synthetic oligonucleotide
aaugaaaaccauugccaua

SEQ ID NO: 2215261 - RNA, 19 nt, Artificial Sequence
  Description of Artificial Sequence: Synthetic oligonucleotide
auacauuccagggaucccg

SEQ ID NO: 2215262 - RNA, 19 nt, Artificial Sequence
  Description of Artificial Sequence: Synthetic oligonucleotide
ugagaacccaauaaccaau

SEQ ID NO: 2215263 - RNA, 19 nt, Artificial Sequence
  Description of Artificial Sequence: Synthetic oligonucleotide
gacuuggcaguacuggaag

SEQ ID NO: 2215264 - RNA, 19 nt, Artificial Sequence
  Description of Artificial Sequence: Synthetic oligonucleotide
uuguaugccucagugacca

SEQ ID NO: 2215265 - RNA, 19 nt, Artificial Sequence
  Description of Artificial Sequence: Synthetic oligonucleotide
acuacuggagaguaaucca

SEQ ID NO: 2215266 - RNA, 19 nt, Artificial Sequence
  Description of Artificial Sequence: Synthetic oligonucleotide
uugagaacccaauaaccaa

SEQ ID NO: 2215267 - RNA, 19 nt, Artificial Sequence
  Description of Artificial Sequence: Synthetic oligonucleotide
agucauugagaugaaccgg

SEQ ID NO: 2215268 - RNA, 19 nt, Artificial Sequence
  Description of Artificial Sequence: Synthetic oligonucleotide
cauuaucggagucuuggag

SEQ ID NO: 2215269 - RNA, 19 nt, Artificial Sequence
  Description of Artificial Sequence: Synthetic oligonucleotide
gaagauacauuccagggau

SEQ ID NO: 2215270 - RNA, 19 nt, Artificial Sequence
  Description of Artificial Sequence: Synthetic oligonucleotide
gguuguaugccucagugac

SEQ ID NO: 2215271 - RNA, 19 nt, Artificial Sequence
  Description of Artificial Sequence: Synthetic oligonucleotide
guagacugggcacaugagc

SEQ ID NO: 2215272 - RNA, 19 nt, Artificial Sequence
  Description of Artificial Sequence: Synthetic oligonucleotide
uuuuaugcaugagaccucu

SEQ ID NO: 2215273 - RNA, 19 nt, Artificial Sequence
  Description of Artificial Sequence: Synthetic oligonucleotide
gccuccaaggaauaguucg

SEQ ID NO: 2215274 - RNA, 19 nt, Artificial Sequence
  Description of Artificial Sequence: Synthetic oligonucleotide
uuccgcucggguaacuccg

SEQ ID NO: 2215275 - RNA, 19 nt, Artificial Sequence
  Description of Artificial Sequence: Synthetic oligonucleotide
gaauaguucguagcucagg

SEQ ID NO: 2215276 - RNA, 19 nt, Artificial Sequence
  Description of Artificial Sequence: Synthetic oligonucleotide
uacuguauugguuguacau

SEQ ID NO: 2215277 - RNA, 19 nt, Artificial Sequence
  Description of Artificial Sequence: Synthetic oligonucleotide
uuaucggagucuuggagaa

SEQ ID NO: 2215278 - RNA, 19 nt, Artificial Sequence
  Description of Artificial Sequence: Synthetic oligonucleotide
ucacauuagggaagccucc

SEQ ID NO: 2215279 - RNA, 19 nt, Artificial Sequence
  Description of Artificial Sequence: Synthetic oligonucleotide
cuacuggagaguaauccac

SEQ ID NO: 2215280 - RNA, 19 nt, Artificial Sequence
  Description of Artificial Sequence: Synthetic oligonucleotide
cacuacuggagaguaaucc

SEQ ID NO: 2215281 - RNA, 19 nt, Artificial Sequence
  Description of Artificial Sequence: Synthetic oligonucleotide
gagaccaugauuucagucu

SEQ ID NO: 2215282 - RNA, 19 nt, Artificial Sequence
  Description of Artificial Sequence: Synthetic oligonucleotide
caauguuuuaugcaugaga

SEQ ID NO: 2215283 - RNA, 19 nt, Artificial Sequence
  Description of Artificial Sequence: Synthetic oligonucleotide
cuucagaagauacauucca

SEQ ID NO: 2215284 - RNA, 19 nt, Artificial Sequence
  Description of Artificial Sequence: Synthetic oligonucleotide
gccauaacgagacugagca

SEQ ID NO: 2215285 - RNA, 19 nt, Artificial Sequence
  Description of Artificial Sequence: Synthetic oligonucleotide
ucugauccuaaagugggga

SEQ ID NO: 2215286 - RNA, 19 nt, Artificial Sequence
  Description of Artificial Sequence: Synthetic oligonucleotide
ugcaugagaccucugggau

SEQ ID NO: 2215287 - RNA, 19 nt, Artificial Sequence
  Description of Artificial Sequence: Synthetic oligonucleotide
ucauugagaugaaccggcc

SEQ ID NO: 2215288 - RNA, 19 nt, Artificial Sequence
  Description of Artificial Sequence: Synthetic oligonucleotide
gucauugagaugaaccggc

SEQ ID NO: 2215289 - RNA, 19 nt, Artificial Sequence
  Description of Artificial Sequence: Synthetic oligonucleotide
caaaggaaccacuagggaa

SEQ ID NO: 2215290 - RNA, 19 nt, Artificial Sequence
  Description of Artificial Sequence: Synthetic oligonucleotide
uacuggagaguaauccaca

SEQ ID NO: 2215291 - RNA, 19 nt, Artificial Sequence
  Description of Artificial Sequence: Synthetic oligonucleotide
gccuaauacacaaaggcag

SEQ ID NO: 2215292 - RNA, 19 nt, Artificial Sequence
  Description of Artificial Sequence: Synthetic oligonucleotide
uagcacgaggauacggucc

SEQ ID NO: 2215293 - RNA, 19 nt, Artificial Sequence
  Description of Artificial Sequence: Synthetic oligonucleotide
gauuucagucucacagacg

SEQ ID NO: 2215294 - RNA, 19 nt, Artificial Sequence
  Description of Artificial Sequence: Synthetic oligonucleotide
cuaauacacaaaggcagag

SEQ ID NO: 2215295 - RNA, 19 nt, Artificial Sequence
  Description of Artificial Sequence: Synthetic oligonucleotide
ugguccacaguguggauac

SEQ ID NO: 2215296 - RNA, 19 nt, Artificial Sequence
  Description of Artificial Sequence: Synthetic oligonucleotide
uagggaaguccagugcucg

SEQ ID NO: 2215297 - RNA, 19 nt, Artificial Sequence
  Description of Artificial Sequence: Synthetic oligonucleotide
acugcggggugacaggauc

SEQ ID NO: 2215298 - RNA, 19 nt, Artificial Sequence
  Description of Artificial Sequence: Synthetic oligonucleotide
ucacagacgaauggcacug

SEQ ID NO: 2215299 - RNA, 19 nt, Artificial Sequence
  Description of Artificial Sequence: Synthetic oligonucleotide
gauaccuucagaagauaca

SEQ ID NO: 2215300 - RNA, 19 nt, Artificial Sequence
  Description of Artificial Sequence: Synthetic oligonucleotide
ucucccagcguagacuggg

SEQ ID NO: 2215301 - RNA, 19 nt, Artificial Sequence
  Description of Artificial Sequence: Synthetic oligonucleotide
cauccauggucucccagcg

SEQ ID NO: 2215302 - RNA, 19 nt, Artificial Sequence
  Description of Artificial Sequence: Synthetic oligonucleotide
agugaccagccauaacgag

SEQ ID NO: 2215303 - RNA, 19 nt, Artificial Sequence
  Description of Artificial Sequence: Synthetic oligonucleotide
ccaauaaccaauuccccag

SEQ ID NO: 2215304 - RNA, 19 nt, Artificial Sequence
  Description of Artificial Sequence: Synthetic oligonucleotide
auaccuucagaagauacau

SEQ ID NO: 2215305 - RNA, 19 nt, Artificial Sequence
  Description of Artificial Sequence: Synthetic oligonucleotide
uccauggucucccagcgua

SEQ ID NO: 2215306 - RNA, 19 nt, Artificial Sequence
  Description of Artificial Sequence: Synthetic oligonucleotide
cagacgaauggcacugagg

SEQ ID NO: 2215307 - RNA, 19 nt, Artificial Sequence
  Description of Artificial Sequence: Synthetic oligonucleotide
ucauuaucggagucuugga

SEQ ID NO: 2215308 - RNA, 19 nt, Artificial Sequence
  Description of Artificial Sequence: Synthetic oligonucleotide
accaugauuucagucucac

SEQ ID NO: 2215309 - RNA, 19 nt, Artificial Sequence
  Description of Artificial Sequence: Synthetic oligonucleotide
cacuguucccgcaaccuag

SEQ ID NO: 2215310 - RNA, 19 nt, Artificial Sequence
  Description of Artificial Sequence: Synthetic oligonucleotide
ucucgaguacaacaucaaa

SEQ ID NO: 2215311 - RNA, 19 nt, Artificial Sequence
  Description of Artificial Sequence: Synthetic oligonucleotide
caaauugggaauuccagcu

SEQ ID NO: 2215312 - RNA, 19 nt, Artificial Sequence
  Description of Artificial Sequence: Synthetic oligonucleotide
gaugaaccggccuccagga

SEQ ID NO: 2215313 - RNA, 19 nt, Artificial Sequence
  Description of Artificial Sequence: Synthetic oligonucleotide
gggaauuccagcucccuag

SEQ ID NO: 2215314 - RNA, 19 nt, Artificial Sequence
  Description of Artificial Sequence: Synthetic oligonucleotide
acaguguggauaccuucag

SEQ ID NO: 2215315 - RNA, 19 nt, Artificial Sequence
  Description of Artificial Sequence: Synthetic oligonucleotide
caauaaccaauuccccagc

SEQ ID NO: 2215316 - RNA, 19 nt, Artificial Sequence
  Description of Artificial Sequence: Synthetic oligonucleotide
uguucccgcaaccuagcac

SEQ ID NO: 2215317 - RNA, 19 nt, Artificial Sequence
  Description of Artificial Sequence: Synthetic oligonucleotide
augcaugagaccucuggga

SEQ ID NO: 2215318 - RNA, 19 nt, Artificial Sequence
  Description of Artificial Sequence: Synthetic oligonucleotide
aauuccccagcuccaaauu

SEQ ID NO: 2215319 - RNA, 19 nt, Artificial Sequence
  Description of Artificial Sequence: Synthetic oligonucleotide
ugccauagguuguaugccu

SEQ ID NO: 2215320 - RNA, 19 nt, Artificial Sequence
  Description of Artificial Sequence: Synthetic oligonucleotide
guaacuccggagccgacgc

SEQ ID NO: 2215321 - RNA, 19 nt, Artificial Sequence
  Description of Artificial Sequence: Synthetic oligonucleotide
ccaaauugggaauuccagc

SEQ ID NO: 2215322 - RNA, 19 nt, Artificial Sequence
  Description of Artificial Sequence: Synthetic oligonucleotide
guguggauaccuucagaag

SEQ ID NO: 2215323 - RNA, 19 nt, Artificial Sequence
  Description of Artificial Sequence: Synthetic oligonucleotide
aucauacuguauugguugu

SEQ ID NO: 2215324 - RNA, 19 nt, Artificial Sequence
  Description of Artificial Sequence: Synthetic oligonucleotide
uacauuccagggaucccgc

SEQ ID NO: 2215325 - RNA, 19 nt, Artificial Sequence
  Description of Artificial Sequence: Synthetic oligonucleotide
uagcgaacuugcauagcug

SEQ ID NO: 2215326 - RNA, 19 nt, Artificial Sequence
  Description of Artificial Sequence: Synthetic oligonucleotide
uuggagaaagcagggugag

SEQ ID NO: 2215327 - RNA, 19 nt, Artificial Sequence
  Description of Artificial Sequence: Synthetic oligonucleotide
gaacuugcauagcugccac

SEQ ID NO: 2215328 - RNA, 19 nt, Artificial Sequence
  Description of Artificial Sequence: Synthetic oligonucleotide
acagacgaauggcacugag

SEQ ID NO: 2215329 - RNA, 19 nt, Artificial Sequence
  Description of Artificial Sequence: Synthetic oligonucleotide
acccaauaaccaauucccc

SEQ ID NO: 2215330 - RNA, 19 nt, Artificial Sequence
  Description of Artificial Sequence: Synthetic oligonucleotide
agcgaaguccccgaaccac

SEQ ID NO: 2215331 - RNA, 19 nt, Artificial Sequence
  Description of Artificial Sequence: Synthetic oligonucleotide
uccccgaaccacucguagg

SEQ ID NO: 2215332 - RNA, 19 nt, Artificial Sequence
  Description of Artificial Sequence: Synthetic oligonucleotide
agacugagcauagugucug

SEQ ID NO: 2215333 - RNA, 19 nt, Artificial Sequence
  Description of Artificial Sequence: Synthetic oligonucleotide
gaaguccccgaaccacucg

SEQ ID NO: 2215334 - RNA, 19 nt, Artificial Sequence
  Description of Artificial Sequence: Synthetic oligonucleotide
cuaaaguggggaccugcag

SEQ ID NO: 2215335 - RNA, 19 nt, Artificial Sequence
  Description of Artificial Sequence: Synthetic oligonucleotide
auaacgagacugagcauag

SEQ ID NO: 2215336 - RNA, 19 nt, Artificial Sequence
  Description of Artificial Sequence: Synthetic oligonucleotide
aguuuggaaucauacugua

SEQ ID NO: 2215337 - RNA, 19 nt, Artificial Sequence
  Description of Artificial Sequence: Synthetic oligonucleotide
agucuuggagaaagcaggg

SEQ ID NO: 2215338 - RNA, 19 nt, Artificial Sequence
  Description of Artificial Sequence: Synthetic oligonucleotide
caccagcaauguuuuaugc

SEQ ID NO: 2215339 - RNA, 19 nt, Artificial Sequence
  Description of Artificial Sequence: Synthetic oligonucleotide
auugggaauuccagcuccc

SEQ ID NO: 2215340 - RNA, 19 nt, Artificial Sequence
  Description of Artificial Sequence: Synthetic oligonucleotide
agccgcaucuuuguagcgc

SEQ ID NO: 2215341 - RNA, 19 nt, Artificial Sequence
  Description of Artificial Sequence: Synthetic oligonucleotide
auacuguauugguuguaca

SEQ ID NO: 2215342 - RNA, 19 nt, Artificial Sequence
  Description of Artificial Sequence: Synthetic oligonucleotide
uugccauagguuguaugcc

SEQ ID NO: 2215343 - RNA, 19 nt, Artificial Sequence
  Description of Artificial Sequence: Synthetic oligonucleotide
agcacgaggauacgguccu

SEQ ID NO: 2215344 - RNA, 19 nt, Artificial Sequence
  Description of Artificial Sequence: Synthetic oligonucleotide
ggauuugagaacccaauaa

SEQ ID NO: 2215345 - RNA, 19 nt, Artificial Sequence
  Description of Artificial Sequence: Synthetic oligonucleotide
agaccucugggauuugaga

SEQ ID NO: 2215346 - RNA, 19 nt, Artificial Sequence
  Description of Artificial Sequence: Synthetic oligonucleotide
accagccauaacgagacug

SEQ ID NO: 2215347 - RNA, 19 nt, Artificial Sequence
  Description of Artificial Sequence: Synthetic oligonucleotide
gucacauuagggaagccuc

SEQ ID NO: 2215348 - RNA, 19 nt, Artificial Sequence
  Description of Artificial Sequence: Synthetic oligonucleotide
gauacauuccagggauccc

SEQ ID NO: 2215349 - RNA, 19 nt, Artificial Sequence
  Description of Artificial Sequence: Synthetic oligonucleotide
ggaaccacuagggaagucc

SEQ ID NO: 2215350 - RNA, 19 nt, Artificial Sequence
  Description of Artificial Sequence: Synthetic oligonucleotide
cucuaggagggcacggaag

SEQ ID NO: 2215351 - RNA, 19 nt, Artificial Sequence
  Description of Artificial Sequence: Synthetic oligonucleotide
ugcucgcacauccaugguc

SEQ ID NO: 2215352 - RNA, 19 nt, Artificial Sequence
  Description of Artificial Sequence: Synthetic oligonucleotide
agccuaauacacaaaggca

SEQ ID NO: 2215353 - RNA, 19 nt, Artificial Sequence
  Description of Artificial Sequence: Synthetic oligonucleotide
cacagugagcucucugccc

SEQ ID NO: 2215354 - RNA, 19 nt, Artificial Sequence
  Description of Artificial Sequence: Synthetic oligonucleotide
cugauccuaaaguggggac

SEQ ID NO: 2215355 - RNA, 19 nt, Artificial Sequence
  Description of Artificial Sequence: Synthetic oligonucleotide
cauaacgagacugagcaua

SEQ ID NO: 2215356 - RNA, 19 nt, Artificial Sequence
  Description of Artificial Sequence: Synthetic oligonucleotide
acuggucacauuagggaag

SEQ ID NO: 2215357 - RNA, 19 nt, Artificial Sequence
  Description of Artificial Sequence: Synthetic oligonucleotide
cacuagggaaguccagugc

SEQ ID NO: 2215358 - RNA, 19 nt, Artificial Sequence
  Description of Artificial Sequence: Synthetic oligonucleotide
acgaggauacgguccuccg

SEQ ID NO: 2215359 - RNA, 19 nt, Artificial Sequence
  Description of Artificial Sequence: Synthetic oligonucleotide
gaaaaccauugccauaggu

SEQ ID NO: 2215360 - RNA, 19 nt, Artificial Sequence
  Description of Artificial Sequence: Synthetic oligonucleotide
uccuaaaguggggaccugc

SEQ ID NO: 2215361 - RNA, 19 nt, Artificial Sequence
  Description of Artificial Sequence: Synthetic oligonucleotide
aagcgaaguccccgaacca

SEQ ID NO: 2215362 - RNA, 19 nt, Artificial Sequence
  Description of Artificial Sequence: Synthetic oligonucleotide
gacgcaggaguccggggag

SEQ ID NO: 2215363 - RNA, 19 nt, Artificial Sequence
  Description of Artificial Sequence: Synthetic oligonucleotide
uaauccacacuggucacau

SEQ ID NO: 2215364 - RNA, 19 nt, Artificial Sequence
  Description of Artificial Sequence: Synthetic oligonucleotide
aguucguagcucagggcac

SEQ ID NO: 2215365 - RNA, 19 nt, Artificial Sequence
  Description of Artificial Sequence: Synthetic oligonucleotide
cuagcacgaggauacgguc

SEQ ID NO: 2215366 - RNA, 19 nt, Artificial Sequence
  Description of Artificial Sequence: Synthetic oligonucleotide
cucggguaacuccggagcc

SEQ ID NO: 2215367 - RNA, 19 nt, Artificial Sequence
  Description of Artificial Sequence: Synthetic oligonucleotide
ugagcucucugcccuuaug

SEQ ID NO: 2215368 - RNA, 19 nt, Artificial Sequence
  Description of Artificial Sequence: Synthetic oligonucleotide
guaggguccagagccagcc

SEQ ID NO: 2215369 - RNA, 19 nt, Artificial Sequence
  Description of Artificial Sequence: Synthetic oligonucleotide
uuuguagcgcuggucccag

SEQ ID NO: 2215370 - RNA, 19 nt, Artificial Sequence
  Description of Artificial Sequence: Synthetic oligonucleotide
uuuaucccaccagcaaugu

SEQ ID NO: 2215371 - RNA, 19 nt, Artificial Sequence
  Description of Artificial Sequence: Synthetic oligonucleotide
agguuguaugccucaguga

SEQ ID NO: 2215372 - RNA, 19 nt, Artificial Sequence
  Description of Artificial Sequence: Synthetic oligonucleotide
ggagccuaauacacaaagg

SEQ ID NO: 2215373 - RNA, 19 nt, Artificial Sequence
  Description of Artificial Sequence: Synthetic oligonucleotide
ucggguaacuccggagccg

SEQ ID NO: 2215374 - RNA, 19 nt, Artificial Sequence
  Description of Artificial Sequence: Synthetic oligonucleotide
aggauacgguccuccggac

SEQ ID NO: 2215375 - RNA, 19 nt, Artificial Sequence
  Description of Artificial Sequence: Synthetic oligonucleotide
caaggaauaguucguagcu

SEQ ID NO: 2215376 - RNA, 19 nt, Artificial Sequence
  Description of Artificial Sequence: Synthetic oligonucleotide
guaugccucagugaccagc

SEQ ID NO: 2215377 - RNA, 19 nt, Artificial Sequence
  Description of Artificial Sequence: Synthetic oligonucleotide
aggacugcggggugacagg

SEQ ID NO: 2215378 - RNA, 19 nt, Artificial Sequence
  Description of Artificial Sequence: Synthetic oligonucleotide
accuagcacgaggauacgg

SEQ ID NO: 2215379 - RNA, 19 nt, Artificial Sequence
  Description of Artificial Sequence: Synthetic oligonucleotide
aaccauugccauagguugu

SEQ ID NO: 2215380 - RNA, 19 nt, Artificial Sequence
  Description of Artificial Sequence: Synthetic oligonucleotide
cucggcucaccucacucag

SEQ ID NO: 2215381 - RNA, 19 nt, Artificial Sequence
  Description of Artificial Sequence: Synthetic oligonucleotide
agggcacuguucccgcaac

SEQ ID NO: 2215382 - RNA, 19 nt, Artificial Sequence
  Description of Artificial Sequence: Synthetic oligonucleotide
guccuccggacacagcucc

SEQ ID NO: 2215383 - RNA, 19 nt, Artificial Sequence
  Description of Artificial Sequence: Synthetic oligonucleotide
cauagguuguaugccucag

SEQ ID NO: 2215384 - RNA, 19 nt, Artificial Sequence
  Description of Artificial Sequence: Synthetic oligonucleotide
agcuccaaauugggaauuc

SEQ ID NO: 2215385 - RNA, 19 nt, Artificial Sequence
  Description of Artificial Sequence: Synthetic oligonucleotide
ugggaauuccagcucccua

SEQ ID NO: 2215386 - RNA, 19 nt, Artificial Sequence
  Description of Artificial Sequence: Synthetic oligonucleotide
cacggaaggaagcgaaguc

SEQ ID NO: 2215387 - RNA, 19 nt, Artificial Sequence
  Description of Artificial Sequence: Synthetic oligonucleotide
ggcacaugagcauagcgaa

SEQ ID NO: 2215388 - RNA, 19 nt, Artificial Sequence
  Description of Artificial Sequence: Synthetic oligonucleotide
guuguaugccucagugacc

SEQ ID NO: 2215389 - RNA, 19 nt, Artificial Sequence
  Description of Artificial Sequence: Synthetic oligonucleotide
ggucucccagcguagacug

SEQ ID NO: 2215390 - RNA, 19 nt, Artificial Sequence
  Description of Artificial Sequence: Synthetic oligonucleotide
ugugcccuucucgaguaca

SEQ ID NO: 2215391 - RNA, 19 nt, Artificial Sequence
  Description of Artificial Sequence: Synthetic oligonucleotide
aagccuccaaggaauaguu

SEQ ID NO: 2215392 - RNA, 19 nt, Artificial Sequence
  Description of Artificial Sequence: Synthetic oligonucleotide
gagccgacgcaggaguccg

SEQ ID NO: 2215393 - RNA, 19 nt, Artificial Sequence
  Description of Artificial Sequence: Synthetic oligonucleotide
gaaccacuagggaagucca

SEQ ID NO: 2215394 - RNA, 19 nt, Artificial Sequence
  Description of Artificial Sequence: Synthetic oligonucleotide
uccgcucggguaacuccgg

SEQ ID NO: 2215395 - RNA, 19 nt, Artificial Sequence
  Description of Artificial Sequence: Synthetic oligonucleotide
cacucguaggguccagagc

SEQ ID NO: 2215396 - RNA, 19 nt, Artificial Sequence
  Description of Artificial Sequence: Synthetic oligonucleotide
guacaacaucaaaggaacc

SEQ ID NO: 2215397 - RNA, 19 nt, Artificial Sequence
  Description of Artificial Sequence: Synthetic oligonucleotide
cauagugucugauccuaaa

SEQ ID NO: 2215398 - RNA, 19 nt, Artificial Sequence
  Description of Artificial Sequence: Synthetic oligonucleotide
aguuccgcucggguaacuc

SEQ ID NO: 2215399 - RNA, 19 nt, Artificial Sequence
  Description of Artificial Sequence: Synthetic oligonucleotide
gguaacuccggagccgacg

SEQ ID NO: 2215400 - RNA, 19 nt, Artificial Sequence
  Description of Artificial Sequence: Synthetic oligonucleotide
gugaccagccauaacgaga

SEQ ID NO: 2215401 - RNA, 19 nt, Artificial Sequence
  Description of Artificial Sequence: Synthetic oligonucleotide
cucagggcacuguucccgc

SEQ ID NO: 2215402 - RNA, 19 nt, Artificial Sequence
  Description of Artificial Sequence: Synthetic oligonucleotide
cacgaggauacgguccucc

SEQ ID NO: 2215403 - RNA, 19 nt, Artificial Sequence
  Description of Artificial Sequence: Synthetic oligonucleotide
uccuccggacacagcuccg

SEQ ID NO: 2215404 - RNA, 19 nt, Artificial Sequence
  Description of Artificial Sequence: Synthetic oligonucleotide
aaccuagcacgaggauacg

SEQ ID NO: 2215405 - RNA, 19 nt, Artificial Sequence
  Description of Artificial Sequence: Synthetic oligonucleotide
agggaagccuccaaggaau

SEQ ID NO: 2215406 - RNA, 19 nt, Artificial Sequence
  Description of Artificial Sequence: Synthetic oligonucleotide
gucccaguacuggacuugg

SEQ ID NO: 2215407 - RNA, 19 nt, Artificial Sequence
  Description of Artificial Sequence: Synthetic oligonucleotide
uaccuucagaagauacauu

SEQ ID NO: 2215408 - RNA, 19 nt, Artificial Sequence
  Description of Artificial Sequence: Synthetic oligonucleotide
cacagcuccggcucuagga

SEQ ID NO: 2215409 - RNA, 19 nt, Artificial Sequence
  Description of Artificial Sequence: Synthetic oligonucleotide
aaccacuagggaaguccag

SEQ ID NO: 2215410 - RNA, 19 nt, Artificial Sequence
  Description of Artificial Sequence: Synthetic oligonucleotide
agugugcccuucucgagua

SEQ ID NO: 2215411 - RNA, 19 nt, Artificial Sequence
  Description of Artificial Sequence: Synthetic oligonucleotide
ucguaggguccagagccag

SEQ ID NO: 2215412 - RNA, 19 nt, Artificial Sequence
  Description of Artificial Sequence: Synthetic oligonucleotide
cagugaccagccauaacga

SEQ ID NO: 2215413 - RNA, 19 nt, Artificial Sequence
  Description of Artificial Sequence: Synthetic oligonucleotide
gcucggguaacuccggagc

SEQ ID NO: 2215414 - RNA, 19 nt, Artificial Sequence
  Description of Artificial Sequence: Synthetic oligonucleotide
uaggagccuaauacacaaa

SEQ ID NO: 2215415 - RNA, 19 nt, Artificial Sequence
  Description of Artificial Sequence: Synthetic oligonucleotide
cauagcgaacuugcauagc

SEQ ID NO: 2215416 - RNA, 19 nt, Artificial Sequence
  Description of Artificial Sequence: Synthetic oligonucleotide
agcauagugucugauccua

SEQ ID NO: 2215417 - RNA, 19 nt, Artificial Sequence
  Description of Artificial Sequence: Synthetic oligonucleotide
cccuaggagccuaauacac

SEQ ID NO: 2215418 - RNA, 19 nt, Artificial Sequence
  Description of Artificial Sequence: Synthetic oligonucleotide
uccggacacagcuccggcu

SEQ ID NO: 2215419 - RNA, 19 nt, Artificial Sequence
  Description of Artificial Sequence: Synthetic oligonucleotide
cuugcauagcugccaccac

SEQ ID NO: 2215420 - RNA, 19 nt, Artificial Sequence
  Description of Artificial Sequence: Synthetic oligonucleotide
ccccgaaccacucguaggg

SEQ ID NO: 2215421 - RNA, 19 nt, Artificial Sequence
  Description of Artificial Sequence: Synthetic oligonucleotide
agguaaaaguggaaaugaa

SEQ ID NO: 2215422 - RNA, 19 nt, Artificial Sequence
  Description of Artificial Sequence: Synthetic oligonucleotide
uuaucccaccagcaauguu

SEQ ID NO: 2215423 - RNA, 19 nt, Artificial Sequence
  Description of Artificial Sequence: Synthetic oligonucleotide
cagugcucgcacauccaug

SEQ ID NO: 2215424 - RNA, 19 nt, Artificial Sequence
  Description of Artificial Sequence: Synthetic oligonucleotide
ucgcacauccauggucucc

SEQ ID NO: 2215425 - RNA, 19 nt, Artificial Sequence
  Description of Artificial Sequence: Synthetic oligonucleotide
gagcauagcgaacuugcau

SEQ ID NO: 2215426 - RNA, 19 nt, Artificial Sequence
  Description of Artificial Sequence: Synthetic oligonucleotide
uguaugccucagugaccag

SEQ ID NO: 2215427 - RNA, 19 nt, Artificial Sequence
  Description of Artificial Sequence: Synthetic oligonucleotide
ugagaugaaccggccucca

SEQ ID NO: 2215428 - RNA, 19 nt, Artificial Sequence
  Description of Artificial Sequence: Synthetic oligonucleotide
ccuaauacacaaaggcaga

SEQ ID NO: 2215429 - RNA, 19 nt, Artificial Sequence
  Description of Artificial Sequence: Synthetic oligonucleotide
gccagccgcaucuuuguag

SEQ ID NO: 2215430 - RNA, 19 nt, Artificial Sequence
  Description of Artificial Sequence: Synthetic oligonucleotide
aaguggggaccugcagaag

SEQ ID NO: 2215431 - RNA, 19 nt, Artificial Sequence
  Description of Artificial Sequence: Synthetic oligonucleotide
uugggaauuccagcucccu

SEQ ID NO: 2215432 - RNA, 19 nt, Artificial Sequence
  Description of Artificial Sequence: Synthetic oligonucleotide
ucggcucaccucacucagc

SEQ ID NO: 2215433 - RNA, 19 nt, Artificial Sequence
  Description of Artificial Sequence: Synthetic oligonucleotide
cugggauuugagaacccaa

SEQ ID NO: 2215434 - RNA, 19 nt, Artificial Sequence
  Description of Artificial Sequence: Synthetic oligonucleotide
ggcaguacuggaaguuccg

SEQ ID NO: 2215435 - RNA, 19 nt, Artificial Sequence
  Description of Artificial Sequence: Synthetic oligonucleotide
cugcccuuaugcaugaggu

SEQ ID NO: 2215436 - RNA, 19 nt, Artificial Sequence
  Description of Artificial Sequence: Synthetic oligonucleotide
uggggaccugcagaaguca

SEQ ID NO: 2215437 - RNA, 19 nt, Artificial Sequence
  Description of Artificial Sequence: Synthetic oligonucleotide
ucccaguacuggacuuggc

SEQ ID NO: 2215438 - RNA, 19 nt, Artificial Sequence
  Description of Artificial Sequence: Synthetic oligonucleotide
ugcccuuaugcaugaggua

SEQ ID NO: 2215439 - RNA, 19 nt, Artificial Sequence
  Description of Artificial Sequence: Synthetic oligonucleotide
uugguuguacaugggcuuu

SEQ ID NO: 2215440 - RNA, 19 nt, Artificial Sequence
  Description of Artificial Sequence: Synthetic oligonucleotide
cacaugagcauagcgaacu

SEQ ID NO: 2215441 - RNA, 19 nt, Artificial Sequence
  Description of Artificial Sequence: Synthetic oligonucleotide
guuguacaugggcuuuauc

SEQ ID NO: 2215442 - RNA, 19 nt, Artificial Sequence
  Description of Artificial Sequence: Synthetic oligonucleotide
ggaaguccucauuaucgga

SEQ ID NO: 2215443 - RNA, 19 nt, Artificial Sequence
  Description of Artificial Sequence: Synthetic oligonucleotide
cccaauaaccaauucccca

SEQ ID NO: 2215444 - RNA, 19 nt, Artificial Sequence
  Description of Artificial Sequence: Synthetic oligonucleotide
cacucggcucaccucacuc

SEQ ID NO: 2215445 - RNA, 19 nt, Artificial Sequence
  Description of Artificial Sequence: Synthetic oligonucleotide
ggggugacaggaucugggc

SEQ ID NO: 2215446 - RNA, 19 nt, Artificial Sequence
  Description of Artificial Sequence: Synthetic oligonucleotide
ggaauaguucguagcucag

SEQ ID NO: 2215447 - RNA, 19 nt, Artificial Sequence
  Description of Artificial Sequence: Synthetic oligonucleotide
acauuccagggaucccgcu

SEQ ID NO: 2215448 - RNA, 19 nt, Artificial Sequence
  Description of Artificial Sequence: Synthetic oligonucleotide
cagccauaacgagacugag

SEQ ID NO: 2215449 - RNA, 19 nt, Artificial Sequence
  Description of Artificial Sequence: Synthetic oligonucleotide
ccaccagcaauguuuuaug

SEQ ID NO: 2215450 - RNA, 19 nt, Artificial Sequence
  Description of Artificial Sequence: Synthetic oligonucleotide
gacugagcauagugucuga

SEQ ID NO: 2215451 - RNA, 19 nt, Artificial Sequence
  Description of Artificial Sequence: Synthetic oligonucleotide
cuuuguagcgcugguccca

SEQ ID NO: 2215452 - RNA, 19 nt, Artificial Sequence
  Description of Artificial Sequence: Synthetic oligonucleotide
cagccgcaucuuuguagcg

SEQ ID NO: 2215453 - RNA, 19 nt, Artificial Sequence
  Description of Artificial Sequence: Synthetic oligonucleotide
ccugcagaagucauugaga

SEQ ID NO: 2215454 - RNA, 19 nt, Artificial Sequence
  Description of Artificial Sequence: Synthetic oligonucleotide
guaauccacacuggucaca

SEQ ID NO: 2215455 - RNA, 19 nt, Artificial Sequence
  Description of Artificial Sequence: Synthetic oligonucleotide
ucagggcacuguucccgca

SEQ ID NO: 2215456 - RNA, 19 nt, Artificial Sequence
  Description of Artificial Sequence: Synthetic oligonucleotide
cgaaccacucguagggucc

SEQ ID NO: 2215457 - RNA, 19 nt, Artificial Sequence
  Description of Artificial Sequence: Synthetic oligonucleotide
uucguagcucagggcacug

SEQ ID NO: 2215458 - RNA, 19 nt, Artificial Sequence
  Description of Artificial Sequence: Synthetic oligonucleotide
cucacagacgaauggcacu

SEQ ID NO: 2215459 - RNA, 19 nt, Artificial Sequence
  Description of Artificial Sequence: Synthetic oligonucleotide
cucccagcguagacugggc

SEQ ID NO: 2215460 - RNA, 19 nt, Artificial Sequence
  Description of Artificial Sequence: Synthetic oligonucleotide
uggauaccuucagaagaua

SEQ ID NO: 2215461 - RNA, 19 nt, Artificial Sequence
  Description of Artificial Sequence: Synthetic oligonucleotide
gggauuugagaacccaaua

SEQ ID NO: 2215462 - RNA, 19 nt, Artificial Sequence
  Description of Artificial Sequence: Synthetic oligonucleotide
gaaguuccgcucggguaac

SEQ ID NO: 2215463 - RNA, 19 nt, Artificial Sequence
  Description of Artificial Sequence: Synthetic oligonucleotide
gugacaggaucugggcccc

SEQ ID NO: 2215464 - RNA, 19 nt, Artificial Sequence
  Description of Artificial Sequence: Synthetic oligonucleotide
gagcauagugucugauccu

SEQ ID NO: 2215465 - RNA, 19 nt, Artificial Sequence
  Description of Artificial Sequence: Synthetic oligonucleotide
gcccuucucgaguacaaca

SEQ ID NO: 2215466 - RNA, 19 nt, Artificial Sequence
  Description of Artificial Sequence: Synthetic oligonucleotide
cauagcugccaccacuacu

SEQ ID NO: 2215467 - RNA, 19 nt, Artificial Sequence
  Description of Artificial Sequence: Synthetic oligonucleotide
cacauuagggaagccucca

SEQ ID NO: 2215468 - RNA, 19 nt, Artificial Sequence
  Description of Artificial Sequence: Synthetic oligonucleotide
uaacgagacugagcauagu

SEQ ID NO: 2215469 - RNA, 19 nt, Artificial Sequence
  Description of Artificial Sequence: Synthetic oligonucleotide
auccauggucucccagcgu

SEQ ID NO: 2215470 - RNA, 19 nt, Artificial Sequence
  Description of Artificial Sequence: Synthetic oligonucleotide
ggcuuuaucccaccagcaa

SEQ ID NO: 2215471 - RNA, 19 nt, Artificial Sequence
  Description of Artificial Sequence: Synthetic oligonucleotide
accauugccauagguugua

SEQ ID NO: 2215472 - RNA, 19 nt, Artificial Sequence
  Description of Artificial Sequence: Synthetic oligonucleotide
gaccaugauuucagucuca

SEQ ID NO: 2215473 - RNA, 19 nt, Artificial Sequence
  Description of Artificial Sequence: Synthetic oligonucleotide
cauugagaugaaccggccu

SEQ ID NO: 2215474 - RNA, 19 nt, Artificial Sequence
  Description of Artificial Sequence: Synthetic oligonucleotide
aaccacucguaggguccag

SEQ ID NO: 2215475 - RNA, 19 nt, Artificial Sequence
  Description of Artificial Sequence: Synthetic oligonucleotide
aggaagcgaaguccccgaa

SEQ ID NO: 2215476 - RNA, 19 nt, Artificial Sequence
  Description of Artificial Sequence: Synthetic oligonucleotide
ccacucguaggguccagag

SEQ ID NO: 2215477 - RNA, 19 nt, Artificial Sequence
  Description of Artificial Sequence: Synthetic oligonucleotide
caguacuggacuuggcagu

SEQ ID NO: 2215478 - RNA, 19 nt, Artificial Sequence
  Description of Artificial Sequence: Synthetic oligonucleotide
caguguggauaccuucaga

SEQ ID NO: 2215479 - RNA, 19 nt, Artificial Sequence
  Description of Artificial Sequence: Synthetic oligonucleotide
caguacuggaaguuccgcu

SEQ ID NO: 2215480 - RNA, 19 nt, Artificial Sequence
  Description of Artificial Sequence: Synthetic oligonucleotide
gaaccacucguagggucca

SEQ ID NO: 2215481 - RNA, 19 nt, Artificial Sequence
  Description of Artificial Sequence: Synthetic oligonucleotide
ugcccuucucgaguacaac

SEQ ID NO: 2215482 - RNA, 19 nt, Artificial Sequence
  Description of Artificial Sequence: Synthetic oligonucleotide
ccagccauaacgagacuga

SEQ ID NO: 2215483 - RNA, 19 nt, Artificial Sequence
  Description of Artificial Sequence: Synthetic oligonucleotide
ugguuguacaugggcuuua

SEQ ID NO: 2215484 - RNA, 19 nt, Artificial Sequence
  Description of Artificial Sequence: Synthetic oligonucleotide
ggaaggaagcgaagucccc

SEQ ID NO: 2215485 - RNA, 19 nt, Artificial Sequence
  Description of Artificial Sequence: Synthetic oligonucleotide
uggucacauuagggaagcc

SEQ ID NO: 2215486 - RNA, 19 nt, Artificial Sequence
  Description of Artificial Sequence: Synthetic oligonucleotide
agcacucggcucaccucac

SEQ ID NO: 2215487 - RNA, 19 nt, Artificial Sequence
  Description of Artificial Sequence: Synthetic oligonucleotide
gcuuuaucccaccagcaau

SEQ ID NO: 2215488 - RNA, 19 nt, Artificial Sequence
  Description of Artificial Sequence: Synthetic oligonucleotide
guggauaccuucagaagau

SEQ ID NO: 2215489 - RNA, 19 nt, Artificial Sequence
  Description of Artificial Sequence: Synthetic oligonucleotide
ccuaggagccuaauacaca

SEQ ID NO: 2215490 - RNA, 19 nt, Artificial Sequence
  Description of Artificial Sequence: Synthetic oligonucleotide
cccagcguagacugggcac

SEQ ID NO: 2215491 - RNA, 19 nt, Artificial Sequence
  Description of Artificial Sequence: Synthetic oligonucleotide
gacugggcacaugagcaua

SEQ ID NO: 2215492 - RNA, 19 nt, Artificial Sequence
  Description of Artificial Sequence: Synthetic oligonucleotide
caauuccccagcuccaaau

SEQ ID NO: 2215493 - RNA, 19 nt, Artificial Sequence
  Description of Artificial Sequence: Synthetic oligonucleotide
gcaguacuggaaguuccgc

SEQ ID NO: 2215494 - RNA, 19 nt, Artificial Sequence
  Description of Artificial Sequence: Synthetic oligonucleotide
agggcacggaaggaagcga

SEQ ID NO: 2215495 - RNA, 19 nt, Artificial Sequence
  Description of Artificial Sequence: Synthetic oligonucleotide
cucgcacauccauggucuc

SEQ ID NO: 2215496 - RNA, 19 nt, Artificial Sequence
  Description of Artificial Sequence: Synthetic oligonucleotide
uaucggagucuuggagaaa

SEQ ID NO: 2215497 - RNA, 19 nt, Artificial Sequence
  Description of Artificial Sequence: Synthetic oligonucleotide
ucguagcucagggcacugu

SEQ ID NO: 2215498 - RNA, 19 nt, Artificial Sequence
  Description of Artificial Sequence: Synthetic oligonucleotide
aaguuccgcucggguaacu

SEQ ID NO: 2215499 - RNA, 19 nt, Artificial Sequence
  Description of Artificial Sequence: Synthetic oligonucleotide
ccuaaaguggggaccugca

SEQ ID NO: 2215500 - RNA, 19 nt, Artificial Sequence
  Description of Artificial Sequence: Synthetic oligonucleotide
ggucacauuagggaagccu

SEQ ID NO: 2215501 - RNA, 19 nt, Artificial Sequence
  Description of Artificial Sequence: Synthetic oligonucleotide
cccaguacuggacuuggca

SEQ ID NO: 2215502 - RNA, 19 nt, Artificial Sequence
  Description of Artificial Sequence: Synthetic oligonucleotide
cuggagaguaauccacacu

SEQ ID NO: 2215503 - RNA, 19 nt, Artificial Sequence
  Description of Artificial Sequence: Synthetic oligonucleotide
ggauacgguccuccggaca

SEQ ID NO: 2215504 - RNA, 19 nt, Artificial Sequence
  Description of Artificial Sequence: Synthetic oligonucleotide
ggagggcacggaaggaagc

SEQ ID NO: 2215505 - RNA, 19 nt, Artificial Sequence
  Description of Artificial Sequence: Synthetic oligonucleotide
gcgaacuugcauagcugcc

SEQ ID NO: 2215506 - RNA, 19 nt, Artificial Sequence
  Description of Artificial Sequence: Synthetic oligonucleotide
guuuggaaucauacuguau

SEQ ID NO: 2215507 - RNA, 19 nt, Artificial Sequence
  Description of Artificial Sequence: Synthetic oligonucleotide
ggagccgacgcaggagucc

SEQ ID NO: 2215508 - RNA, 19 nt, Artificial Sequence
  Description of Artificial Sequence: Synthetic oligonucleotide
cgaggauacgguccuccgg

SEQ ID NO: 2215509 - RNA, 19 nt, Artificial Sequence
  Description of Artificial Sequence: Synthetic oligonucleotide
gcaaccuagcacgaggaua

SEQ ID NO: 2215510 - RNA, 19 nt, Artificial Sequence
  Description of Artificial Sequence: Synthetic oligonucleotide
ggcacggaaggaagcgaag

SEQ ID NO: 2215511 - RNA, 19 nt, Artificial Sequence
  Description of Artificial Sequence: Synthetic oligonucleotide
ccgaaccacucguaggguc

SEQ ID NO: 2215512 - RNA, 19 nt, Artificial Sequence
  Description of Artificial Sequence: Synthetic oligonucleotide
accacucguaggguccaga

SEQ ID NO: 2215513 - RNA, 19 nt, Artificial Sequence
  Description of Artificial Sequence: Synthetic oligonucleotide
cuaggagggcacggaagga

SEQ ID NO: 2215514 - RNA, 19 nt, Artificial Sequence
  Description of Artificial Sequence: Synthetic oligonucleotide
gggaucccgcuccccagcc

SEQ ID NO: 2215515 - RNA, 19 nt, Artificial Sequence
  Description of Artificial Sequence: Synthetic oligonucleotide
cauggucucccagcguaga

SEQ ID NO: 2215516 - RNA, 19 nt, Artificial Sequence
  Description of Artificial Sequence: Synthetic oligonucleotide
cgcacauccauggucuccc

SEQ ID NO: 2215517 - RNA, 19 nt, Artificial Sequence
  Description of Artificial Sequence: Synthetic oligonucleotide
gggcacuguucccgcaacc

SEQ ID NO: 2215518 - RNA, 19 nt, Artificial Sequence
  Description of Artificial Sequence: Synthetic oligonucleotide
ccauagguuguaugccuca

SEQ ID NO: 2215519 - RNA, 19 nt, Artificial Sequence
  Description of Artificial Sequence: Synthetic oligonucleotide
ggggagaggccaugcucug

SEQ ID NO: 2215520 - RNA, 19 nt, Artificial Sequence
  Description of Artificial Sequence: Synthetic oligonucleotide
cuguucccgcaaccuagca

SEQ ID NO: 2215521 - RNA, 19 nt, Artificial Sequence
  Description of Artificial Sequence: Synthetic oligonucleotide
uuguagcgcuggucccagu

SEQ ID NO: 2215522 - RNA, 19 nt, Artificial Sequence
  Description of Artificial Sequence: Synthetic oligonucleotide
cagugugcccuucucgagu

SEQ ID NO: 2215523 - RNA, 19 nt, Artificial Sequence
  Description of Artificial Sequence: Synthetic oligonucleotide
agcguagacugggcacaug

SEQ ID NO: 2215524 - RNA, 19 nt, Artificial Sequence
  Description of Artificial Sequence: Synthetic oligonucleotide
gccauagguuguaugccuc

SEQ ID NO: 2215525 - RNA, 19 nt, Artificial Sequence
  Description of Artificial Sequence: Synthetic oligonucleotide
ccacuacuggagaguaauc

SEQ ID NO: 2215526 - RNA, 19 nt, Artificial Sequence
  Description of Artificial Sequence: Synthetic oligonucleotide
gggcuuuaucccaccagca

SEQ ID NO: 2215527 - RNA, 19 nt, Artificial Sequence
  Description of Artificial Sequence: Synthetic oligonucleotide
gcucgcacauccauggucu

SEQ ID NO: 2215528 - RNA, 19 nt, Artificial Sequence
  Description of Artificial Sequence: Synthetic oligonucleotide
gcacaugagcauagcgaac

SEQ ID NO: 2215529 - RNA, 19 nt, Artificial Sequence
  Description of Artificial Sequence: Synthetic oligonucleotide
gcucuaggagggcacggaa

SEQ ID NO: 2215530 - RNA, 19 nt, Artificial Sequence
  Description of Artificial Sequence: Synthetic oligonucleotide
guucguagcucagggcacu

SEQ ID NO: 2215531 - RNA, 19 nt, Artificial Sequence
  Description of Artificial Sequence: Synthetic oligonucleotide
agccagccgcaucuuugua

SEQ ID NO: 2215532 - RNA, 19 nt, Artificial Sequence
  Description of Artificial Sequence: Synthetic oligonucleotide
aaccggccuccaggaacca

SEQ ID NO: 2215533 - RNA, 19 nt, Artificial Sequence
  Description of Artificial Sequence: Synthetic oligonucleotide
gccgcaucuuuguagcgcu

SEQ ID NO: 2215534 - RNA, 19 nt, Artificial Sequence
  Description of Artificial Sequence: Synthetic oligonucleotide
caccacuacuggagaguaa

SEQ ID NO: 2215535 - RNA, 19 nt, Artificial Sequence
  Description of Artificial Sequence: Synthetic oligonucleotide
gugcccuucucgaguacaa

SEQ ID NO: 2215536 - RNA, 19 nt, Artificial Sequence
  Description of Artificial Sequence: Synthetic oligonucleotide
ggaguccggggagaggcca

SEQ ID NO: 2215537 - RNA, 19 nt, Artificial Sequence
  Description of Artificial Sequence: Synthetic oligonucleotide
gcggggugacaggaucugg

SEQ ID NO: 2215538 - RNA, 19 nt, Artificial Sequence
  Description of Artificial Sequence: Synthetic oligonucleotide
acgcaggaguccggggaga

SEQ ID NO: 2215539 - RNA, 19 nt, Artificial Sequence
  Description of Artificial Sequence: Synthetic oligonucleotide
gcucucugcccuuaugcau

SEQ ID NO: 2215540 - RNA, 19 nt, Artificial Sequence
  Description of Artificial Sequence: Synthetic oligonucleotide
augagaccucugggauuug

SEQ ID NO: 2215541 - RNA, 19 nt, Artificial Sequence
  Description of Artificial Sequence: Synthetic oligonucleotide
gcaugagguaaaaguggaa

SEQ ID NO: 2215542 - RNA, 19 nt, Artificial Sequence
  Description of Artificial Sequence: Synthetic oligonucleotide
cacagacgaauggcacuga

SEQ ID NO: 2215543 - RNA, 19 nt, Artificial Sequence
  Description of Artificial Sequence: Synthetic oligonucleotide
cccuuaugcaugagguaaa

SEQ ID NO: 2215544 - RNA, 19 nt, Artificial Sequence
  Description of Artificial Sequence: Synthetic oligonucleotide
ccagcguagacugggcaca

SEQ ID NO: 2215545 - RNA, 19 nt, Artificial Sequence
  Description of Artificial Sequence: Synthetic oligonucleotide
ccgcaaccuagcacgagga

SEQ ID NO: 2215546 - RNA, 19 nt, Artificial Sequence
  Description of Artificial Sequence: Synthetic oligonucleotide
gcacuguucccgcaaccua

SEQ ID NO: 2215547 - RNA, 19 nt, Artificial Sequence
  Description of Artificial Sequence: Synthetic oligonucleotide
ggcucaccucacucagcac

SEQ ID NO: 2215548 - RNA, 19 nt, Artificial Sequence
  Description of Artificial Sequence: Synthetic oligonucleotide
cgcucggguaacuccggag

SEQ ID NO: 2215549 - RNA, 19 nt, Artificial Sequence
  Description of Artificial Sequence: Synthetic oligonucleotide
ggcacuguucccgcaaccu

SEQ ID NO: 2215550 - RNA, 19 nt, Artificial Sequence
  Description of Artificial Sequence: Synthetic oligonucleotide
ggcucuaggagggcacgga

SEQ ID NO: 2215551 - RNA, 19 nt, Artificial Sequence
  Description of Artificial Sequence: Synthetic oligonucleotide
gggcacggaaggaagcgaa

SEQ ID NO: 2215552 - RNA, 19 nt, Artificial Sequence
  Description of Artificial Sequence: Synthetic oligonucleotide
ccuccaaggaauaguucgu

SEQ ID NO: 2215553 - RNA, 19 nt, Artificial Sequence
  Description of Artificial Sequence: Synthetic oligonucleotide
gcaucuuuguagcgcuggu

SEQ ID NO: 2215554 - RNA, 19 nt, Artificial Sequence
  Description of Artificial Sequence: Synthetic oligonucleotide
gcacggaaggaagcgaagu

SEQ ID NO: 2215555 - RNA, 19 nt, Artificial Sequence
  Description of Artificial Sequence: Synthetic oligonucleotide
cccuucucgaguacaacau

SEQ ID NO: 2215556 - RNA, 19 nt, Artificial Sequence
  Description of Artificial Sequence: Synthetic oligonucleotide
gcauagugucugauccuaa

SEQ ID NO: 2215557 - RNA, 19 nt, Artificial Sequence
  Description of Artificial Sequence: Synthetic oligonucleotide
gguccuccggacacagcuc

SEQ ID NO: 2215558 - RNA, 19 nt, Artificial Sequence
  Description of Artificial Sequence: Synthetic oligonucleotide
cggcucaccucacucagca

SEQ ID NO: 2215559 - RNA, 19 nt, Artificial Sequence
  Description of Artificial Sequence: Synthetic oligonucleotide
ccggcucuaggagggcacg

SEQ ID NO: 2215560 - RNA, 19 nt, Artificial Sequence
  Description of Artificial Sequence: Synthetic oligonucleotide
gaccagccauaacgagacu

SEQ ID NO: 2215561 - RNA, 19 nt, Artificial Sequence
  Description of Artificial Sequence: Synthetic oligonucleotide
gccucagugaccagccaua

SEQ ID NO: 2215562 - RNA, 19 nt, Artificial Sequence
  Description of Artificial Sequence: Synthetic oligonucleotide
ggaucccgcuccccagcca

SEQ ID NO: 2215563 - RNA, 19 nt, Artificial Sequence
  Description of Artificial Sequence: Synthetic oligonucleotide
ccaauuccccagcuccaaa

SEQ ID NO: 2215564 - RNA, 19 nt, Artificial Sequence
  Description of Artificial Sequence: Synthetic oligonucleotide
ccgcaucuuuguagcgcug

SEQ ID NO: 2215565 - RNA, 19 nt, Artificial Sequence
  Description of Artificial Sequence: Synthetic oligonucleotide
ccaccacuacuggagagua

SEQ ID NO: 2215566 - RNA, 19 nt, Artificial Sequence
  Description of Artificial Sequence: Synthetic oligonucleotide
cagcuccaaauugggaauu

SEQ ID NO: 2215567 - RNA, 19 nt, Artificial Sequence
  Description of Artificial Sequence: Synthetic oligonucleotide
gaguccggggagaggccau

SEQ ID NO: 2215568 - RNA, 19 nt, Artificial Sequence
  Description of Artificial Sequence: Synthetic oligonucleotide
ggguaacuccggagccgac

SEQ ID NO: 2215569 - RNA, 19 nt, Artificial Sequence
  Description of Artificial Sequence: Synthetic oligonucleotide
ccagugcucgcacauccau

SEQ ID NO: 2215570 - RNA, 19 nt, Artificial Sequence
  Description of Artificial Sequence: Synthetic oligonucleotide
cggguaacuccggagccga

SEQ ID NO: 2215571 - RNA, 19 nt, Artificial Sequence
  Description of Artificial Sequence: Synthetic oligonucleotide
ggacacagcuccggcucua

SEQ ID NO: 2215572 - RNA, 19 nt, Artificial Sequence
  Description of Artificial Sequence: Synthetic oligonucleotide
cggagccgacgcaggaguc

SEQ ID NO: 2215573 - RNA, 19 nt, Artificial Sequence
  Description of Artificial Sequence: Synthetic oligonucleotide
ccauaacgagacugagcau

SEQ ID NO: 2215574 - RNA, 19 nt, Artificial Sequence
  Description of Artificial Sequence: Synthetic oligonucleotide
gcacucggcucaccucacu

SEQ ID NO: 2215575 - RNA, 19 nt, Artificial Sequence
  Description of Artificial Sequence: Synthetic oligonucleotide
gcacgaggauacgguccuc

SEQ ID NO: 2215576 - RNA, 19 nt, Artificial Sequence
  Description of Artificial Sequence: Synthetic oligonucleotide
cagcguagacugggcacau

SEQ ID NO: 2215577 - RNA, 19 nt, Artificial Sequence
  Description of Artificial Sequence: Synthetic oligonucleotide
gguccagagccagccgcau

SEQ ID NO: 2215578 - RNA, 19 nt, Artificial Sequence
  Description of Artificial Sequence: Synthetic oligonucleotide
cccgaaccacucguagggu

SEQ ID NO: 2215579 - RNA, 19 nt, Artificial Sequence
  Description of Artificial Sequence: Synthetic oligonucleotide
ccauugccauagguuguau

SEQ ID NO: 2215580 - RNA, 19 nt, Artificial Sequence
  Description of Artificial Sequence: Synthetic oligonucleotide
cgcaaccuagcacgaggau

SEQ ID NO: 2215581 - RNA, 19 nt, Artificial Sequence
  Description of Artificial Sequence: Synthetic oligonucleotide
auuuugaaaauacauaugc

SEQ ID NO: 2215582 - RNA, 19 nt, Artificial Sequence
  Description of Artificial Sequence: Synthetic oligonucleotide
aauaauauuacauaagaaa

SEQ ID NO: 2215583 - RNA, 19 nt, Artificial Sequence
  Description of Artificial Sequence: Synthetic oligonucleotide
aauguguucuuugagaugc

SEQ ID NO: 2215584 - RNA, 19 nt, Artificial Sequence
  Description of Artificial Sequence: Synthetic oligonucleotide
aagagauucacagagcucc

SEQ ID NO: 2215585 - RNA, 19 nt, Artificial Sequence
  Description of Artificial Sequence: Synthetic oligonucleotide
uuugacaauauguuaaacg

SEQ ID NO: 2215586 - RNA, 19 nt, Artificial Sequence
  Description of Artificial Sequence: Synthetic oligonucleotide
uauuacauaagaaauuuca

SEQ ID NO: 2215587 - RNA, 19 nt, Artificial Sequence
  Description of Artificial Sequence: Synthetic oligonucleotide
ucagauuaggacauaacgg

SEQ ID NO: 2215588 - RNA, 19 nt, Artificial Sequence
  Description of Artificial Sequence: Synthetic oligonucleotide
aauaacaucauuaauuuga

SEQ ID NO: 2215589 - RNA, 19 nt, Artificial Sequence
  Description of Artificial Sequence: Synthetic oligonucleotide
uucaagaucacauauaauc

SEQ ID NO: 2215590 - RNA, 19 nt, Artificial Sequence
  Description of Artificial Sequence: Synthetic oligonucleotide
uaacauaagagcauaacug

SEQ ID NO: 2215591 - RNA, 19 nt, Artificial Sequence
  Description of Artificial Sequence: Synthetic oligonucleotide
aaaauacauaugcuugacc

SEQ ID NO: 2215592 - RNA, 19 nt, Artificial Sequence
  Description of Artificial Sequence: Synthetic oligonucleotide
acuguucuagaucugaggc

SEQ ID NO: 2215593 - RNA, 19 nt, Artificial Sequence
  Description of Artificial Sequence: Synthetic oligonucleotide
uucuauuuuacuuaaggug

SEQ ID NO: 2215594 - RNA, 19 nt, Artificial Sequence
  Description of Artificial Sequence: Synthetic oligonucleotide
aacaccauugaauucauca

SEQ ID NO: 2215595 - RNA, 19 nt, Artificial Sequence
  Description of Artificial Sequence: Synthetic oligonucleotide
gaaauaacgaccuuucgug

SEQ ID NO: 2215596 - RNA, 19 nt, Artificial Sequence
  Description of Artificial Sequence: Synthetic oligonucleotide
uuacauaagaaauuucaag

SEQ ID NO: 2215597 - RNA, 19 nt, Artificial Sequence
  Description of Artificial Sequence: Synthetic oligonucleotide
aaagucucagauuaggaca

SEQ ID NO: 2215598 - RNA, 19 nt, Artificial Sequence
  Description of Artificial Sequence: Synthetic oligonucleotide
cuuaagguggucuucaagg

SEQ ID NO: 2215599 - RNA, 19 nt, Artificial Sequence
  Description of Artificial Sequence: Synthetic oligonucleotide
ucauuaauaaaucuuuggu

SEQ ID NO: 2215600 - RNA, 19 nt, Artificial Sequence
  Description of Artificial Sequence: Synthetic oligonucleotide
cucuuuagaauccagauug

SEQ ID NO: 2215601 - RNA, 19 nt, Artificial Sequence
  Description of Artificial Sequence: Synthetic oligonucleotide
uaauuugacaauauguuaa

SEQ ID NO: 2215602 - RNA, 19 nt, Artificial Sequence
  Description of Artificial Sequence: Synthetic oligonucleotide
aaucuuguauuuacuaacc

SEQ ID NO: 2215603 - RNA, 19 nt, Artificial Sequence
  Description of Artificial Sequence: Synthetic oligonucleotide
ucauccacauuccuaaggg

SEQ ID NO: 2215604 - RNA, 19 nt, Artificial Sequence
  Description of Artificial Sequence: Synthetic oligonucleotide
ucauagaugcuuuugguug

SEQ ID NO: 2215605 - RNA, 19 nt, Artificial Sequence
  Description of Artificial Sequence: Synthetic oligonucleotide
cagauuaggacauaacggg

SEQ ID NO: 2215606 - RNA, 19 nt, Artificial Sequence
  Description of Artificial Sequence: Synthetic oligonucleotide
uuaauaacaucauuaauuu

SEQ ID NO: 2215607 - RNA, 19 nt, Artificial Sequence
  Description of Artificial Sequence: Synthetic oligonucleotide
cucagauuaggacauaacg

SEQ ID NO: 2215608 - RNA, 19 nt, Artificial Sequence
  Description of Artificial Sequence: Synthetic oligonucleotide
aauaacgaccuuucguguc

SEQ ID NO: 2215609 - RNA, 19 nt, Artificial Sequence
  Description of Artificial Sequence: Synthetic oligonucleotide
uguauaaucuuguauuuac

SEQ ID NO: 2215610 - RNA, 19 nt, Artificial Sequence
  Description of Artificial Sequence: Synthetic oligonucleotide
ucaagaucacauauaaucu

SEQ ID NO: 2215611 - RNA, 19 nt, Artificial Sequence
  Description of Artificial Sequence: Synthetic oligonucleotide
aucuucaagagauucacag

SEQ ID NO: 2215612 - RNA, 19 nt, Artificial Sequence
  Description of Artificial Sequence: Synthetic oligonucleotide
ugaaauaacgaccuuucgu

SEQ ID NO: 2215613 - RNA, 19 nt, Artificial Sequence
  Description of Artificial Sequence: Synthetic oligonucleotide
ugacaauauguuaaacggg

SEQ ID NO: 2215614 - RNA, 19 nt, Artificial Sequence
  Description of Artificial Sequence: Synthetic oligonucleotide
aacgggauuucauguacgc

SEQ ID NO: 2215615 - RNA, 19 nt, Artificial Sequence
  Description of Artificial Sequence: Synthetic oligonucleotide
uucaaguucguaaaguccu

SEQ ID NO: 2215616 - RNA, 19 nt, Artificial Sequence
  Description of Artificial Sequence: Synthetic oligonucleotide
ugauguauaaucuuguauu

SEQ ID NO: 2215617 - RNA, 19 nt, Artificial Sequence
  Description of Artificial Sequence: Synthetic oligonucleotide
uugucagccuucaaguucg

SEQ ID NO: 2215618 - RNA, 19 nt, Artificial Sequence
  Description of Artificial Sequence: Synthetic oligonucleotide
caagauuucuuaucgacag

SEQ ID NO: 2215619 - RNA, 19 nt, Artificial Sequence
  Description of Artificial Sequence: Synthetic oligonucleotide
cuugcggcaaauaggaugg

SEQ ID NO: 2215620 - RNA, 19 nt, Artificial Sequence
  Description of Artificial Sequence: Synthetic oligonucleotide
auauaaucucuugucagcc

SEQ ID NO: 2215621 - RNA, 19 nt, Artificial Sequence
  Description of Artificial Sequence: Synthetic oligonucleotide
uaaucuuguauuuacuaac

SEQ ID NO: 2215622 - RNA, 19 nt, Artificial Sequence
  Description of Artificial Sequence: Synthetic oligonucleotide
aacuguucuagaucugagg

SEQ ID NO: 2215623 - RNA, 19 nt, Artificial Sequence
  Description of Artificial Sequence: Synthetic oligonucleotide
auaacgaccuuucgugucc

SEQ ID NO: 2215624 - RNA, 19 nt, Artificial Sequence
  Description of Artificial Sequence: Synthetic oligonucleotide
aauauguuaaacgggauuu

SEQ ID NO: 2215625 - RNA, 19 nt, Artificial Sequence
  Description of Artificial Sequence: Synthetic oligonucleotide
aaugaucucauuuucuauu

SEQ ID NO: 2215626 - RNA, 19 nt, Artificial Sequence
  Description of Artificial Sequence: Synthetic oligonucleotide
uuuugaaaauacauaugcu

SEQ ID NO: 2215627 - RNA, 19 nt, Artificial Sequence
  Description of Artificial Sequence: Synthetic oligonucleotide
ugaaaauacauaugcuuga

SEQ ID NO: 2215628 - RNA, 19 nt, Artificial Sequence
  Description of Artificial Sequence: Synthetic oligonucleotide
auaugcuugacccaaacaa

SEQ ID NO: 2215629 - RNA, 19 nt, Artificial Sequence
  Description of Artificial Sequence: Synthetic oligonucleotide
uuucuauuuuacuuaaggu

SEQ ID NO: 2215630 - RNA, 19 nt, Artificial Sequence
  Description of Artificial Sequence: Synthetic oligonucleotide
ugcauuuccuuuauaauuc

SEQ ID NO: 2215631 - RNA, 19 nt, Artificial Sequence
  Description of Artificial Sequence: Synthetic oligonucleotide
auuaacauaagagcauaac

SEQ ID NO: 2215632 - RNA, 19 nt, Artificial Sequence
  Description of Artificial Sequence: Synthetic oligonucleotide
uggucuucaaggcaggugc

SEQ ID NO: 2215633 - RNA, 19 nt, Artificial Sequence
  Description of Artificial Sequence: Synthetic oligonucleotide
uuagaauccagauuggauu

SEQ ID NO: 2215634 - RNA, 19 nt, Artificial Sequence
  Description of Artificial Sequence: Synthetic oligonucleotide
uucguaaaguccuuuaagu

SEQ ID NO: 2215635 - RNA, 19 nt, Artificial Sequence
  Description of Artificial Sequence: Synthetic oligonucleotide
aguucauuuacuguaauga

SEQ ID NO: 2215636 - RNA, 19 nt, Artificial Sequence
  Description of Artificial Sequence: Synthetic oligonucleotide
gaugugcccagcuucaucc

SEQ ID NO: 2215637 - RNA, 19 nt, Artificial Sequence
  Description of Artificial Sequence: Synthetic oligonucleotide
aauacauaugcuugaccca

SEQ ID NO: 2215638 - RNA, 19 nt, Artificial Sequence
  Description of Artificial Sequence: Synthetic oligonucleotide
gaaagucucagauuaggac

SEQ ID NO: 2215639 - RNA, 19 nt, Artificial Sequence
  Description of Artificial Sequence: Synthetic oligonucleotide
ucacuugcggcaaauagga

SEQ ID NO: 2215640 - RNA, 19 nt, Artificial Sequence
  Description of Artificial Sequence: Synthetic oligonucleotide
cauauaaucucuugucagc

SEQ ID NO: 2215641 - RNA, 19 nt, Artificial Sequence
  Description of Artificial Sequence: Synthetic oligonucleotide
uuaauuugacaauauguua

SEQ ID NO: 2215642 - RNA, 19 nt, Artificial Sequence
  Description of Artificial Sequence: Synthetic oligonucleotide
uuuaagucagcuuccacaa

SEQ ID NO: 2215643 - RNA, 19 nt, Artificial Sequence
  Description of Artificial Sequence: Synthetic oligonucleotide
uuggauuuguuaaccaagc

SEQ ID NO: 2215644 - RNA, 19 nt, Artificial Sequence
  Description of Artificial Sequence: Synthetic oligonucleotide
ucagugguuauaaacugca

SEQ ID NO: 2215645 - RNA, 19 nt, Artificial Sequence
  Description of Artificial Sequence: Synthetic oligonucleotide
uagaaguucauuuacugua

SEQ ID NO: 2215646 - RNA, 19 nt, Artificial Sequence
  Description of Artificial Sequence: Synthetic oligonucleotide
uucauuuacuguaaugauc

SEQ ID NO: 2215647 - RNA, 19 nt, Artificial Sequence
  Description of Artificial Sequence: Synthetic oligonucleotide
uuguauuuacuaaccacug

SEQ ID NO: 2215648 - RNA, 19 nt, Artificial Sequence
  Description of Artificial Sequence: Synthetic oligonucleotide
uguauuuacuaaccacugc

SEQ ID NO: 2215649 - RNA, 19 nt, Artificial Sequence
  Description of Artificial Sequence: Synthetic oligonucleotide
uuuagaauccagauuggau

SEQ ID NO: 2215650 - RNA, 19 nt, Artificial Sequence
  Description of Artificial Sequence: Synthetic oligonucleotide
uuucuuaucgacagaauuu

SEQ ID NO: 2215651 - RNA, 19 nt, Artificial Sequence
  Description of Artificial Sequence: Synthetic oligonucleotide
ugguugauguauaaucuug

SEQ ID NO: 2215652 - RNA, 19 nt, Artificial Sequence
  Description of Artificial Sequence: Synthetic oligonucleotide
aaacccuacugccagucag

SEQ ID NO: 2215653 - RNA, 19 nt, Artificial Sequence
  Description of Artificial Sequence: Synthetic oligonucleotide
ucugaggccauccuucaag

SEQ ID NO: 2215654 - RNA, 19 nt, Artificial Sequence
  Description of Artificial Sequence: Synthetic oligonucleotide
uccuuuauaauucucuguu

SEQ ID NO: 2215655 - RNA, 19 nt, Artificial Sequence
  Description of Artificial Sequence: Synthetic oligonucleotide
auaauucucuguucucugg

SEQ ID NO: 2215656 - RNA, 19 nt, Artificial Sequence
  Description of Artificial Sequence: Synthetic oligonucleotide
aagaccaggaaguguagca

SEQ ID NO: 2215657 - RNA, 19 nt, Artificial Sequence
  Description of Artificial Sequence: Synthetic oligonucleotide
gaugaugccagaugugccc

SEQ ID NO: 2215658 - RNA, 19 nt, Artificial Sequence
  Description of Artificial Sequence: Synthetic oligonucleotide
uauaauucucuguucucug

SEQ ID NO: 2215659 - RNA, 19 nt, Artificial Sequence
  Description of Artificial Sequence: Synthetic oligonucleotide
acuugcggcaaauaggaug

SEQ ID NO: 2215660 - RNA, 19 nt, Artificial Sequence
  Description of Artificial Sequence: Synthetic oligonucleotide
uuccacaaugaaauaacga

SEQ ID NO: 2215661 - RNA, 19 nt, Artificial Sequence
  Description of Artificial Sequence: Synthetic oligonucleotide
uguucuagaucugaggcca

SEQ ID NO: 2215662 - RNA, 19 nt, Artificial Sequence
  Description of Artificial Sequence: Synthetic oligonucleotide
ugacuuguugguuuguucu

SEQ ID NO: 2215663 - RNA, 19 nt, Artificial Sequence
  Description of Artificial Sequence: Synthetic oligonucleotide
uuccaacucaaaaugauuu

SEQ ID NO: 2215664 - RNA, 19 nt, Artificial Sequence
  Description of Artificial Sequence: Synthetic oligonucleotide
uaaacgggauuucauguac

SEQ ID NO: 2215665 - RNA, 19 nt, Artificial Sequence
  Description of Artificial Sequence: Synthetic oligonucleotide
uuauaauucucuguucucu

SEQ ID NO: 2215666 - RNA, 19 nt, Artificial Sequence
  Description of Artificial Sequence: Synthetic oligonucleotide
auaaucuuguauuuacuaa

SEQ ID NO: 2215667 - RNA, 19 nt, Artificial Sequence
  Description of Artificial Sequence: Synthetic oligonucleotide
uuaagguggucuucaaggc

SEQ ID NO: 2215668 - RNA, 19 nt, Artificial Sequence
  Description of Artificial Sequence: Synthetic oligonucleotide
uugauacugaauuuccaac

SEQ ID NO: 2215669 - RNA, 19 nt, Artificial Sequence
  Description of Artificial Sequence: Synthetic oligonucleotide
ucacagagcuccuuaagug

SEQ ID NO: 2215670 - RNA, 19 nt, Artificial Sequence
  Description of Artificial Sequence: Synthetic oligonucleotide
auaagagcauaacuguucu

SEQ ID NO: 2215671 - RNA, 19 nt, Artificial Sequence
  Description of Artificial Sequence: Synthetic oligonucleotide
uggaauguguucuuugaga

SEQ ID NO: 2215672 - RNA, 19 nt, Artificial Sequence
  Description of Artificial Sequence: Synthetic oligonucleotide
gacaauauguuaaacggga

SEQ ID NO: 2215673 - RNA, 19 nt, Artificial Sequence
  Description of Artificial Sequence: Synthetic oligonucleotide
ugccguaagauguucaaga

SEQ ID NO: 2215674 - RNA, 19 nt, Artificial Sequence
  Description of Artificial Sequence: Synthetic oligonucleotide
cauaagagcauaacuguuc

SEQ ID NO: 2215675 - RNA, 19 nt, Artificial Sequence
  Description of Artificial Sequence: Synthetic oligonucleotide
guaaaguccuuuaagucag

SEQ ID NO: 2215676 - RNA, 19 nt, Artificial Sequence
  Description of Artificial Sequence: Synthetic oligonucleotide
gauuuguuaaccaagcucu

SEQ ID NO: 2215677 - RNA, 19 nt, Artificial Sequence
  Description of Artificial Sequence: Synthetic oligonucleotide
uaauaacaucauuaauuug

SEQ ID NO: 2215678 - RNA, 19 nt, Artificial Sequence
  Description of Artificial Sequence: Synthetic oligonucleotide
uucacagagcuccuuaagu

SEQ ID NO: 2215679 - RNA, 19 nt, Artificial Sequence
  Description of Artificial Sequence: Synthetic oligonucleotide
aaaacaagaccaggaagug

SEQ ID NO: 2215680 - RNA, 19 nt, Artificial Sequence
  Description of Artificial Sequence: Synthetic oligonucleotide
uaagaaauuucaagacugu

SEQ ID NO: 2215681 - RNA, 19 nt, Artificial Sequence
  Description of Artificial Sequence: Synthetic oligonucleotide
aagaucacauauaaucucu

SEQ ID NO: 2215682 - RNA, 19 nt, Artificial Sequence
  Description of Artificial Sequence: Synthetic oligonucleotide
ucgaaagucucagauuagg

SEQ ID NO: 2215683 - RNA, 19 nt, Artificial Sequence
  Description of Artificial Sequence: Synthetic oligonucleotide
acaccauugaauucaucag

SEQ ID NO: 2215684 - RNA, 19 nt, Artificial Sequence
  Description of Artificial Sequence: Synthetic oligonucleotide
ucagccuucaaguucguaa

SEQ ID NO: 2215685 - RNA, 19 nt, Artificial Sequence
  Description of Artificial Sequence: Synthetic oligonucleotide
uggcaaugccguaagaugu

SEQ ID NO: 2215686 - RNA, 19 nt, Artificial Sequence
  Description of Artificial Sequence: Synthetic oligonucleotide
uguccucuaaacccuacug

SEQ ID NO: 2215687 - RNA, 19 nt, Artificial Sequence
  Description of Artificial Sequence: Synthetic oligonucleotide
auaacggguaaguccuccc

SEQ ID NO: 2215688 - RNA, 19 nt, Artificial Sequence
  Description of Artificial Sequence: Synthetic oligonucleotide
aguuccgagccuucgaaag

SEQ ID NO: 2215689 - RNA, 19 nt, Artificial Sequence
  Description of Artificial Sequence: Synthetic oligonucleotide
uuuauaauucucuguucuc

SEQ ID NO: 2215690 - RNA, 19 nt, Artificial Sequence
  Description of Artificial Sequence: Synthetic oligonucleotide
aauuuccaacucaaaauga

SEQ ID NO: 2215691 - RNA, 19 nt, Artificial Sequence
  Description of Artificial Sequence: Synthetic oligonucleotide
uuaagugacuuguugguuu

SEQ ID NO: 2215692 - RNA, 19 nt, Artificial Sequence
  Description of Artificial Sequence: Synthetic oligonucleotide
caagaucacauauaaucuc

SEQ ID NO: 2215693 - RNA, 19 nt, Artificial Sequence
  Description of Artificial Sequence: Synthetic oligonucleotide
aucgacagaauuuucuuaa

SEQ ID NO: 2215694 - RNA, 19 nt, Artificial Sequence
  Description of Artificial Sequence: Synthetic oligonucleotide
aagguggucuucaaggcag

SEQ ID NO: 2215695 - RNA, 19 nt, Artificial Sequence
  Description of Artificial Sequence: Synthetic oligonucleotide
uauguuaaacgggauuuca

SEQ ID NO: 2215696 - RNA, 19 nt, Artificial Sequence
  Description of Artificial Sequence: Synthetic oligonucleotide
uucaagagauucacagagc

SEQ ID NO: 2215697 - RNA, 19 nt, Artificial Sequence
  Description of Artificial Sequence: Synthetic oligonucleotide
ucuucaagagauucacaga

SEQ ID NO: 2215698 - RNA, 19 nt, Artificial Sequence
  Description of Artificial Sequence: Synthetic oligonucleotide
uuugguagagauuucucuu

SEQ ID NO: 2215699 - RNA, 19 nt, Artificial Sequence
  Description of Artificial Sequence: Synthetic oligonucleotide
ucguaaaguccuuuaaguc

SEQ ID NO: 2215700 - RNA, 19 nt, Artificial Sequence
  Description of Artificial Sequence: Synthetic oligonucleotide
cauuaauaaaucuuuggua

SEQ ID NO: 2215701 - RNA, 19 nt, Artificial Sequence
  Description of Artificial Sequence: Synthetic oligonucleotide
uuuacuaaccacugcuuua

SEQ ID NO: 2215702 - RNA, 19 nt, Artificial Sequence
  Description of Artificial Sequence: Synthetic oligonucleotide
gguuauaaacugcauuucc

SEQ ID NO: 2215703 - RNA, 19 nt, Artificial Sequence
  Description of Artificial Sequence: Synthetic oligonucleotide
ugaugaugccagaugugcc

SEQ ID NO: 2215704 - RNA, 19 nt, Artificial Sequence
  Description of Artificial Sequence: Synthetic oligonucleotide
agagauuucucuucacaga

SEQ ID NO: 2215705 - RNA, 19 nt, Artificial Sequence
  Description of Artificial Sequence: Synthetic oligonucleotide
caagacuguccucuaaacc

SEQ ID NO: 2215706 - RNA, 19 nt, Artificial Sequence
  Description of Artificial Sequence: Synthetic oligonucleotide
aucagugguuauaaacugc

SEQ ID NO: 2215707 - RNA, 19 nt, Artificial Sequence
  Description of Artificial Sequence: Synthetic oligonucleotide
aaugccguaagauguucaa

SEQ ID NO: 2215708 - RNA, 19 nt, Artificial Sequence
  Description of Artificial Sequence: Synthetic oligonucleotide
ucaaaaugauuuagaaguu

SEQ ID NO: 2215709 - RNA, 19 nt, Artificial Sequence
  Description of Artificial Sequence: Synthetic oligonucleotide
gauggaauguguucuuuga

SEQ ID NO: 2215710 - RNA, 19 nt, Artificial Sequence
  Description of Artificial Sequence: Synthetic oligonucleotide
auaggauggaauguguucu

SEQ ID NO: 2215711 - RNA, 19 nt, Artificial Sequence
  Description of Artificial Sequence: Synthetic oligonucleotide
caucagugguuauaaacug

SEQ ID NO: 2215712 - RNA, 19 nt, Artificial Sequence
  Description of Artificial Sequence: Synthetic oligonucleotide
uucaagacuguccucuaaa

SEQ ID NO: 2215713 - RNA, 19 nt, Artificial Sequence
  Description of Artificial Sequence: Synthetic oligonucleotide
agugguuauaaacugcauu

SEQ ID NO: 2215714 - RNA, 19 nt, Artificial Sequence
  Description of Artificial Sequence: Synthetic oligonucleotide
uaagugacuuguugguuug

SEQ ID NO: 2215715 - RNA, 19 nt, Artificial Sequence
  Description of Artificial Sequence: Synthetic oligonucleotide
uugacccaaacaaaguuuu

SEQ ID NO: 2215716 - RNA, 19 nt, Artificial Sequence
  Description of Artificial Sequence: Synthetic oligonucleotide
acaucauuaauuugacaau

SEQ ID NO: 2215717 - RNA, 19 nt, Artificial Sequence
  Description of Artificial Sequence: Synthetic oligonucleotide
cucuaaacccuacugccag

SEQ ID NO: 2215718 - RNA, 19 nt, Artificial Sequence
  Description of Artificial Sequence: Synthetic oligonucleotide
auaaacugcauuuccuuua

SEQ ID NO: 2215719 - RNA, 19 nt, Artificial Sequence
  Description of Artificial Sequence: Synthetic oligonucleotide
uaagauguucaagaucaca

SEQ ID NO: 2215720 - RNA, 19 nt, Artificial Sequence
  Description of Artificial Sequence: Synthetic oligonucleotide
auauuacauaagaaauuuc

SEQ ID NO: 2215721 - RNA, 19 nt, Artificial Sequence
  Description of Artificial Sequence: Synthetic oligonucleotide
guauuuacuaaccacugcu

SEQ ID NO: 2215722 - RNA, 19 nt, Artificial Sequence
  Description of Artificial Sequence: Synthetic oligonucleotide
uuccuuuauaauucucugu

SEQ ID NO: 2215723 - RNA, 19 nt, Artificial Sequence
  Description of Artificial Sequence: Synthetic oligonucleotide
gucacuugcggcaaauagg

SEQ ID NO: 2215724 - RNA, 19 nt, Artificial Sequence
  Description of Artificial Sequence: Synthetic oligonucleotide
uuaucgacagaauuuucuu

SEQ ID NO: 2215725 - RNA, 19 nt, Artificial Sequence
  Description of Artificial Sequence: Synthetic oligonucleotide
cuaagggcaguacauuuug

SEQ ID NO: 2215726 - RNA, 19 nt, Artificial Sequence
  Description of Artificial Sequence: Synthetic oligonucleotide
ugguagagauuucucuuca

SEQ ID NO: 2215727 - RNA, 19 nt, Artificial Sequence
  Description of Artificial Sequence: Synthetic oligonucleotide
uuuccaacucaaaaugauu

SEQ ID NO: 2215728 - RNA, 19 nt, Artificial Sequence
  Description of Artificial Sequence: Synthetic oligonucleotide
aaacgggauuucauguacg

SEQ ID NO: 2215729 - RNA, 19 nt, Artificial Sequence
  Description of Artificial Sequence: Synthetic oligonucleotide
cuucgaaagucucagauua

SEQ ID NO: 2215730 - RNA, 19 nt, Artificial Sequence
  Description of Artificial Sequence: Synthetic oligonucleotide
uguugguuuguucuugaua

SEQ ID NO: 2215731 - RNA, 19 nt, Artificial Sequence
  Description of Artificial Sequence: Synthetic oligonucleotide
uauuuacuaaccacugcuu

SEQ ID NO: 2215732 - RNA, 19 nt, Artificial Sequence
  Description of Artificial Sequence: Synthetic oligonucleotide
gaauguguucuuugagaug

SEQ ID NO: 2215733 - RNA, 19 nt, Artificial Sequence
  Description of Artificial Sequence: Synthetic oligonucleotide
gaguugaugaugccagaug

SEQ ID NO: 2215734 - RNA, 19 nt, Artificial Sequence
  Description of Artificial Sequence: Synthetic oligonucleotide
cuggcaaugccguaagaug

SEQ ID NO: 2215735 - RNA, 19 nt, Artificial Sequence
  Description of Artificial Sequence: Synthetic oligonucleotide
cuugucagccuucaaguuc

SEQ ID NO: 2215736 - RNA, 19 nt, Artificial Sequence
  Description of Artificial Sequence: Synthetic oligonucleotide
uuacuuaagguggucuuca

SEQ ID NO: 2215737 - RNA, 19 nt, Artificial Sequence
  Description of Artificial Sequence: Synthetic oligonucleotide
agaucugaggccauccuuc

SEQ ID NO: 2215738 - RNA, 19 nt, Artificial Sequence
  Description of Artificial Sequence: Synthetic oligonucleotide
uucgaaagucucagauuag

SEQ ID NO: 2215739 - RNA, 19 nt, Artificial Sequence
  Description of Artificial Sequence: Synthetic oligonucleotide
uuaaacgggauuucaugua

SEQ ID NO: 2215740 - RNA, 19 nt, Artificial Sequence
  Description of Artificial Sequence: Synthetic oligonucleotide
gcuaauaauauuacauaag

SEQ ID NO: 2215741 - RNA, 19 nt, Artificial Sequence
  Description of Artificial Sequence: Synthetic oligonucleotide
acucauagaugcuuuuggu

SEQ ID NO: 2215742 - RNA, 19 nt, Artificial Sequence
  Description of Artificial Sequence: Synthetic oligonucleotide
uauaaucucuugucagccu

SEQ ID NO: 2215743 - RNA, 19 nt, Artificial Sequence
  Description of Artificial Sequence: Synthetic oligonucleotide
uggauuuguuaaccaagcu

SEQ ID NO: 2215744 - RNA, 19 nt, Artificial Sequence
  Description of Artificial Sequence: Synthetic oligonucleotide
aagauuucuuaucgacaga

SEQ ID NO: 2215745 - RNA, 19 nt, Artificial Sequence
  Description of Artificial Sequence: Synthetic oligonucleotide
ugggucacugucacuugcg

SEQ ID NO: 2215746 - RNA, 19 nt, Artificial Sequence
  Description of Artificial Sequence: Synthetic oligonucleotide
ggauuuguuaaccaagcuc

SEQ ID NO: 2215747 - RNA, 19 nt, Artificial Sequence
  Description of Artificial Sequence: Synthetic oligonucleotide
ucuuugguagagauuucuc

SEQ ID NO: 2215748 - RNA, 19 nt, Artificial Sequence
  Description of Artificial Sequence: Synthetic oligonucleotide
auauguuaaacgggauuuc

SEQ ID NO: 2215749 - RNA, 19 nt, Artificial Sequence
  Description of Artificial Sequence: Synthetic oligonucleotide
guuaaccaagcucuggguc

SEQ ID NO: 2215750 - RNA, 19 nt, Artificial Sequence
  Description of Artificial Sequence: Synthetic oligonucleotide
uguagcagcuaauaauauu

SEQ ID NO: 2215751 - RNA, 19 nt, Artificial Sequence
  Description of Artificial Sequence: Synthetic oligonucleotide
ucucagauuaggacauaac

SEQ ID NO: 2215752 - RNA, 19 nt, Artificial Sequence
  Description of Artificial Sequence: Synthetic oligonucleotide
uguuaaccaagcucugggu

SEQ ID NO: 2215753 - RNA, 19 nt, Artificial Sequence
  Description of Artificial Sequence: Synthetic oligonucleotide
auaacuguucuagaucuga

SEQ ID NO: 2215754 - RNA, 19 nt, Artificial Sequence
  Description of Artificial Sequence: Synthetic oligonucleotide
cuuuauaauucucuguucu

SEQ ID NO: 2215755 - RNA, 19 nt, Artificial Sequence
  Description of Artificial Sequence: Synthetic oligonucleotide
acugcauuuccuuuauaau

SEQ ID NO: 2215756 - RNA, 19 nt, Artificial Sequence
  Description of Artificial Sequence: Synthetic oligonucleotide
uaacggguaaguccucccc

SEQ ID NO: 2215757 - RNA, 19 nt, Artificial Sequence
  Description of Artificial Sequence: Synthetic oligonucleotide
cuaaccacugcuuuauuaa

SEQ ID NO: 2215758 - RNA, 19 nt, Artificial Sequence
  Description of Artificial Sequence: Synthetic oligonucleotide
guagagauuucucuucaca

SEQ ID NO: 2215759 - RNA, 19 nt, Artificial Sequence
  Description of Artificial Sequence: Synthetic oligonucleotide
caaaaugauuuagaaguuc

SEQ ID NO: 2215760 - RNA, 19 nt, Artificial Sequence
  Description of Artificial Sequence: Synthetic oligonucleotide
uagcagcuaauaauauuac

SEQ ID NO: 2215761 - RNA, 19 nt, Artificial Sequence
  Description of Artificial Sequence: Synthetic oligonucleotide
uucgacuggcucuuuagaa

SEQ ID NO: 2215762 - RNA, 19 nt, Artificial Sequence
  Description of Artificial Sequence: Synthetic oligonucleotide
cuuucguguccuuuguuuc

SEQ ID NO: 2215763 - RNA, 19 nt, Artificial Sequence
  Description of Artificial Sequence: Synthetic oligonucleotide
guaaugaucucauuuucua

SEQ ID NO: 2215764 - RNA, 19 nt, Artificial Sequence
  Description of Artificial Sequence: Synthetic oligonucleotide
uuggccaagauuucuuauc

SEQ ID NO: 2215765 - RNA, 19 nt, Artificial Sequence
  Description of Artificial Sequence: Synthetic oligonucleotide
guccucuaaacccuacugc

SEQ ID NO: 2215766 - RNA, 19 nt, Artificial Sequence
  Description of Artificial Sequence: Synthetic oligonucleotide
aaacaagaccaggaagugu

SEQ ID NO: 2215767 - RNA, 19 nt, Artificial Sequence
  Description of Artificial Sequence: Synthetic oligonucleotide
aguguagcagcuaauaaua

SEQ ID NO: 2215768 - RNA, 19 nt, Artificial Sequence
  Description of Artificial Sequence: Synthetic oligonucleotide
ugcuugacccaaacaaagu

SEQ ID NO: 2215769 - RNA, 19 nt, Artificial Sequence
  Description of Artificial Sequence: Synthetic oligonucleotide
acagagcuccuuaagugac

SEQ ID NO: 2215770 - RNA, 19 nt, Artificial Sequence
  Description of Artificial Sequence: Synthetic oligonucleotide
uucuuaucgacagaauuuu

SEQ ID NO: 2215771 - RNA, 19 nt, Artificial Sequence
  Description of Artificial Sequence: Synthetic oligonucleotide
guuaaacgggauuucaugu

SEQ ID NO: 2215772 - RNA, 19 nt, Artificial Sequence
  Description of Artificial Sequence: Synthetic oligonucleotide
uuuacuuaagguggucuuc

SEQ ID NO: 2215773 - RNA, 19 nt, Artificial Sequence
  Description of Artificial Sequence: Synthetic oligonucleotide
uacgcaggaacaccauuga

SEQ ID NO: 2215774 - RNA, 19 nt, Artificial Sequence
  Description of Artificial Sequence: Synthetic oligonucleotide
gaaguguagcagcuaauaa

SEQ ID NO: 2215775 - RNA, 19 nt, Artificial Sequence
  Description of Artificial Sequence: Synthetic oligonucleotide
ucucuguucucugggaggc

SEQ ID NO: 2215776 - RNA, 19 nt, Artificial Sequence
  Description of Artificial Sequence: Synthetic oligonucleotide
uaggacauaacggguaagu

SEQ ID NO: 2215777 - RNA, 19 nt, Artificial Sequence
  Description of Artificial Sequence: Synthetic oligonucleotide
uggcucuuuagaauccaga

SEQ ID NO: 2215778 - RNA, 19 nt, Artificial Sequence
  Description of Artificial Sequence: Synthetic oligonucleotide
ucauguacgcaggaacacc

SEQ ID NO: 2215779 - RNA, 19 nt, Artificial Sequence
  Description of Artificial Sequence: Synthetic oligonucleotide
uuucguguccuuuguuucu

SEQ ID NO: 2215780 - RNA, 19 nt, Artificial Sequence
  Description of Artificial Sequence: Synthetic oligonucleotide
uuacuaaccacugcuuuau

SEQ ID NO: 2215781 - RNA, 19 nt, Artificial Sequence
  Description of Artificial Sequence: Synthetic oligonucleotide
acuaaccacugcuuuauua

SEQ ID NO: 2215782 - RNA, 19 nt, Artificial Sequence
  Description of Artificial Sequence: Synthetic oligonucleotide
aaguucguaaaguccuuua

SEQ ID NO: 2215783 - RNA, 19 nt, Artificial Sequence
  Description of Artificial Sequence: Synthetic oligonucleotide
uaucgacagaauuuucuua

SEQ ID NO: 2215784 - RNA, 19 nt, Artificial Sequence
  Description of Artificial Sequence: Synthetic oligonucleotide
aguucguaaaguccuuuaa

SEQ ID NO: 2215785 - RNA, 19 nt, Artificial Sequence
  Description of Artificial Sequence: Synthetic oligonucleotide
gacauaacggguaaguccu

SEQ ID NO: 2215786 - RNA, 19 nt, Artificial Sequence
  Description of Artificial Sequence: Synthetic oligonucleotide
gaacucauagaugcuuuug

SEQ ID NO: 2215787 - RNA, 19 nt, Artificial Sequence
  Description of Artificial Sequence: Synthetic oligonucleotide
ucaguuccgagccuucgaa

SEQ ID NO: 2215788 - RNA, 19 nt, Artificial Sequence
  Description of Artificial Sequence: Synthetic oligonucleotide
augcuugacccaaacaaag

SEQ ID NO: 2215789 - RNA, 19 nt, Artificial Sequence
  Description of Artificial Sequence: Synthetic oligonucleotide
augaucucauuuucuauuu

SEQ ID NO: 2215790 - RNA, 19 nt, Artificial Sequence
  Description of Artificial Sequence: Synthetic oligonucleotide
aaaugauuuagaaguucau

SEQ ID NO: 2215791 - RNA, 19 nt, Artificial Sequence
  Description of Artificial Sequence: Synthetic oligonucleotide
agaugugcccagcuucauc

SEQ ID NO: 2215792 - RNA, 19 nt, Artificial Sequence
  Description of Artificial Sequence: Synthetic oligonucleotide
ucuggcaaugccguaagau

SEQ ID NO: 2215793 - RNA, 19 nt, Artificial Sequence
  Description of Artificial Sequence: Synthetic oligonucleotide
ucuuaucgacagaauuuuc

SEQ ID NO: 2215794 - RNA, 19 nt, Artificial Sequence
  Description of Artificial Sequence: Synthetic oligonucleotide
cuuaucgacagaauuuucu

SEQ ID NO: 2215795 - RNA, 19 nt, Artificial Sequence
  Description of Artificial Sequence: Synthetic oligonucleotide
aggacauaacggguaaguc

SEQ ID NO: 2215796 - RNA, 19 nt, Artificial Sequence
  Description of Artificial Sequence: Synthetic oligonucleotide
cauuuucuauuuuacuuaa

SEQ ID NO: 2215797 - RNA, 19 nt, Artificial Sequence
  Description of Artificial Sequence: Synthetic oligonucleotide
cauccacauuccuaagggc

SEQ ID NO: 2215798 - RNA, 19 nt, Artificial Sequence
  Description of Artificial Sequence: Synthetic oligonucleotide
aaguccuuuaagucagcuu

SEQ ID NO: 2215799 - RNA, 19 nt, Artificial Sequence
  Description of Artificial Sequence: Synthetic oligonucleotide
cugaggccauccuucaagc

SEQ ID NO: 2215800 - RNA, 19 nt, Artificial Sequence
  Description of Artificial Sequence: Synthetic oligonucleotide
aaauaggauggaauguguu

SEQ ID NO: 2215801 - RNA, 19 nt, Artificial Sequence
  Description of Artificial Sequence: Synthetic oligonucleotide
uuucaagacuguccucuaa

SEQ ID NO: 2215802 - RNA, 19 nt, Artificial Sequence
  Description of Artificial Sequence: Synthetic oligonucleotide
ucgacuggcucuuuagaau

SEQ ID NO: 2215803 - RNA, 19 nt, Artificial Sequence
  Description of Artificial Sequence: Synthetic oligonucleotide
uaagggcaguacauuuuga

SEQ ID NO: 2215804 - RNA, 19 nt, Artificial Sequence
  Description of Artificial Sequence: Synthetic oligonucleotide
aaucuuugguagagauuuc

SEQ ID NO: 2215805 - RNA, 19 nt, Artificial Sequence
  Description of Artificial Sequence: Synthetic oligonucleotide
gacagguuccucagcuucg

SEQ ID NO: 2215806 - RNA, 19 nt, Artificial Sequence
  Description of Artificial Sequence: Synthetic oligonucleotide
auuuccaacucaaaaugau

SEQ ID NO: 2215807 - RNA, 19 nt, Artificial Sequence
  Description of Artificial Sequence: Synthetic oligonucleotide
gagccuucgaaagucucag

SEQ ID NO: 2215808 - RNA, 19 nt, Artificial Sequence
  Description of Artificial Sequence: Synthetic oligonucleotide
guacgcaggaacaccauug

SEQ ID NO: 2215809 - RNA, 19 nt, Artificial Sequence
  Description of Artificial Sequence: Synthetic oligonucleotide
gugguuauaaacugcauuu

SEQ ID NO: 2215810 - RNA, 19 nt, Artificial Sequence
  Description of Artificial Sequence: Synthetic oligonucleotide
uucauguacgcaggaacac

SEQ ID NO: 2215811 - RNA, 19 nt, Artificial Sequence
  Description of Artificial Sequence: Synthetic oligonucleotide
gcaaauaggauggaaugug

SEQ ID NO: 2215812 - RNA, 19 nt, Artificial Sequence
  Description of Artificial Sequence: Synthetic oligonucleotide
uaaaguccuuuaagucagc

SEQ ID NO: 2215813 - RNA, 19 nt, Artificial Sequence
  Description of Artificial Sequence: Synthetic oligonucleotide
uccuaagggcaguacauuu

SEQ ID NO: 2215814 - RNA, 19 nt, Artificial Sequence
  Description of Artificial Sequence: Synthetic oligonucleotide
ugguuauaaacugcauuuc

SEQ ID NO: 2215815 - RNA, 19 nt, Artificial Sequence
  Description of Artificial Sequence: Synthetic oligonucleotide
uaaacccuacugccaguca

SEQ ID NO: 2215816 - RNA, 19 nt, Artificial Sequence
  Description of Artificial Sequence: Synthetic oligonucleotide
gccaagauuucuuaucgac

SEQ ID NO: 2215817 - RNA, 19 nt, Artificial Sequence
  Description of Artificial Sequence: Synthetic oligonucleotide
uuaggacauaacggguaag

SEQ ID NO: 2215818 - RNA, 19 nt, Artificial Sequence
  Description of Artificial Sequence: Synthetic oligonucleotide
gaugcuuuugguugaugua

SEQ ID NO: 2215819 - RNA, 19 nt, Artificial Sequence
  Description of Artificial Sequence: Synthetic oligonucleotide
ucgaaccucugacagucuc

SEQ ID NO: 2215820 - RNA, 19 nt, Artificial Sequence
  Description of Artificial Sequence: Synthetic oligonucleotide
gauuaggacauaacgggua

SEQ ID NO: 2215821 - RNA, 19 nt, Artificial Sequence
  Description of Artificial Sequence: Synthetic oligonucleotide
cauaacggguaaguccucc

SEQ ID NO: 2215822 - RNA, 19 nt, Artificial Sequence
  Description of Artificial Sequence: Synthetic oligonucleotide
cauaacuguucuagaucug

SEQ ID NO: 2215823 - RNA, 19 nt, Artificial Sequence
  Description of Artificial Sequence: Synthetic oligonucleotide
ugcuuuugguugauguaua

SEQ ID NO: 2215824 - RNA, 19 nt, Artificial Sequence
  Description of Artificial Sequence: Synthetic oligonucleotide
cagcuaauaauauuacaua

SEQ ID NO: 2215825 - RNA, 19 nt, Artificial Sequence
  Description of Artificial Sequence: Synthetic oligonucleotide
caagagauucacagagcuc

SEQ ID NO: 2215826 - RNA, 19 nt, Artificial Sequence
  Description of Artificial Sequence: Synthetic oligonucleotide
uauuuuacuuaaggugguc

SEQ ID NO: 2215827 - RNA, 19 nt, Artificial Sequence
  Description of Artificial Sequence: Synthetic oligonucleotide
agauuaggacauaacgggu

SEQ ID NO: 2215828 - RNA, 19 nt, Artificial Sequence
  Description of Artificial Sequence: Synthetic oligonucleotide
cuuugguagagauuucucu

SEQ ID NO: 2215829 - RNA, 19 nt, Artificial Sequence
  Description of Artificial Sequence: Synthetic oligonucleotide
cacagagcuccuuaaguga

SEQ ID NO: 2215830 - RNA, 19 nt, Artificial Sequence
  Description of Artificial Sequence: Synthetic oligonucleotide
agccuucaaguucguaaag

SEQ ID NO: 2215831 - RNA, 19 nt, Artificial Sequence
  Description of Artificial Sequence: Synthetic oligonucleotide
uucucugggaggcuucuuu

SEQ ID NO: 2215832 - RNA, 19 nt, Artificial Sequence
  Description of Artificial Sequence: Synthetic oligonucleotide
uuugccaggacagguuccu

SEQ ID NO: 2215833 - RNA, 19 nt, Artificial Sequence
  Description of Artificial Sequence: Synthetic oligonucleotide
uguacgcaggaacaccauu

SEQ ID NO: 2215834 - RNA, 19 nt, Artificial Sequence
  Description of Artificial Sequence: Synthetic oligonucleotide
ucuaaacccuacugccagu

SEQ ID NO: 2215835 - RNA, 19 nt, Artificial Sequence
  Description of Artificial Sequence: Synthetic oligonucleotide
ggauggaauguguucuuug

SEQ ID NO: 2215836 - RNA, 19 nt, Artificial Sequence
  Description of Artificial Sequence: Synthetic oligonucleotide
gcauaacuguucuagaucu

SEQ ID NO: 2215837 - RNA, 19 nt, Artificial Sequence
  Description of Artificial Sequence: Synthetic oligonucleotide
ucaaguucguaaaguccuu

SEQ ID NO: 2215838 - RNA, 19 nt, Artificial Sequence
  Description of Artificial Sequence: Synthetic oligonucleotide
acauuccuaagggcaguac

SEQ ID NO: 2215839 - RNA, 19 nt, Artificial Sequence
  Description of Artificial Sequence: Synthetic oligonucleotide
guugauguauaaucuugua

SEQ ID NO: 2215840 - RNA, 19 nt, Artificial Sequence
  Description of Artificial Sequence: Synthetic oligonucleotide
guugaugaugccagaugug

SEQ ID NO: 2215841 - RNA, 19 nt, Artificial Sequence
  Description of Artificial Sequence: Synthetic oligonucleotide
ccuucaaguucguaaaguc

SEQ ID NO: 2215842 - RNA, 19 nt, Artificial Sequence
  Description of Artificial Sequence: Synthetic oligonucleotide
uuaagucagcuuccacaau

SEQ ID NO: 2215843 - RNA, 19 nt, Artificial Sequence
  Description of Artificial Sequence: Synthetic oligonucleotide
auuccuaagggcaguacau

SEQ ID NO: 2215844 - RNA, 19 nt, Artificial Sequence
  Description of Artificial Sequence: Synthetic oligonucleotide
gaucugaggccauccuuca

SEQ ID NO: 2215845 - RNA, 19 nt, Artificial Sequence
  Description of Artificial Sequence: Synthetic oligonucleotide
ucgacagaauuuucuuaau

SEQ ID NO: 2215846 - RNA, 19 nt, Artificial Sequence
  Description of Artificial Sequence: Synthetic oligonucleotide
cuaaacccuacugccaguc

SEQ ID NO: 2215847 - RNA, 19 nt, Artificial Sequence
  Description of Artificial Sequence: Synthetic oligonucleotide
cugggucacugucacuugc

SEQ ID NO: 2215848 - RNA, 19 nt, Artificial Sequence
  Description of Artificial Sequence: Synthetic oligonucleotide
cguaaaguccuuuaaguca

SEQ ID NO: 2215849 - RNA, 19 nt, Artificial Sequence
  Description of Artificial Sequence: Synthetic oligonucleotide
gugacuuguugguuuguuc

SEQ ID NO: 2215850 - RNA, 19 nt, Artificial Sequence
  Description of Artificial Sequence: Synthetic oligonucleotide
gaauucaucagugguuaua

SEQ ID NO: 2215851 - RNA, 19 nt, Artificial Sequence
  Description of Artificial Sequence: Synthetic oligonucleotide
agaacucauagaugcuuuu

SEQ ID NO: 2215852 - RNA, 19 nt, Artificial Sequence
  Description of Artificial Sequence: Synthetic oligonucleotide
cuuuagaauccagauugga

SEQ ID NO: 2215853 - RNA, 19 nt, Artificial Sequence
  Description of Artificial Sequence: Synthetic oligonucleotide
cauuaacauaagagcauaa

SEQ ID NO: 2215854 - RNA, 19 nt, Artificial Sequence
  Description of Artificial Sequence: Synthetic oligonucleotide
cuggcucuuuagaauccag

SEQ ID NO: 2215855 - RNA, 19 nt, Artificial Sequence
  Description of Artificial Sequence: Synthetic oligonucleotide
agucaguuccgagccuucg

SEQ ID NO: 2215856 - RNA, 19 nt, Artificial Sequence
  Description of Artificial Sequence: Synthetic oligonucleotide
auuuguuaaccaagcucug

SEQ ID NO: 2215857 - RNA, 19 nt, Artificial Sequence
  Description of Artificial Sequence: Synthetic oligonucleotide
uguguucuuugagaugcuc

SEQ ID NO: 2215858 - RNA, 19 nt, Artificial Sequence
  Description of Artificial Sequence: Synthetic oligonucleotide
gggauuucauguacgcagg

SEQ ID NO: 2215859 - RNA, 19 nt, Artificial Sequence
  Description of Artificial Sequence: Synthetic oligonucleotide
gauuucauguacgcaggaa

SEQ ID NO: 2215860 - RNA, 19 nt, Artificial Sequence
  Description of Artificial Sequence: Synthetic oligonucleotide
gagcauaacuguucuagau

SEQ ID NO: 2215861 - RNA, 19 nt, Artificial Sequence
  Description of Artificial Sequence: Synthetic oligonucleotide
auguauaaucuuguauuua

SEQ ID NO: 2215862 - RNA, 19 nt, Artificial Sequence
  Description of Artificial Sequence: Synthetic oligonucleotide
acaaugaaauaacgaccuu

SEQ ID NO: 2215863 - RNA, 19 nt, Artificial Sequence
  Description of Artificial Sequence: Synthetic oligonucleotide
uuccgagccuucgaaaguc

SEQ ID NO: 2215864 - RNA, 19 nt, Artificial Sequence
  Description of Artificial Sequence: Synthetic oligonucleotide
ugaugccagaugugcccag

SEQ ID NO: 2215865 - RNA, 19 nt, Artificial Sequence
  Description of Artificial Sequence: Synthetic oligonucleotide
uaaccaagcucugggucac

SEQ ID NO: 2215866 - RNA, 19 nt, Artificial Sequence
  Description of Artificial Sequence: Synthetic oligonucleotide
augccguaagauguucaag

SEQ ID NO: 2215867 - RNA, 19 nt, Artificial Sequence
  Description of Artificial Sequence: Synthetic oligonucleotide
acauaagagcauaacuguu

SEQ ID NO: 2215868 - RNA, 19 nt, Artificial Sequence
  Description of Artificial Sequence: Synthetic oligonucleotide
gcuucgacuggcucuuuag

SEQ ID NO: 2215869 - RNA, 19 nt, Artificial Sequence
  Description of Artificial Sequence: Synthetic oligonucleotide
uccgagccuucgaaagucu

SEQ ID NO: 2215870 - RNA, 19 nt, Artificial Sequence
  Description of Artificial Sequence: Synthetic oligonucleotide
uugagaugcuccacaucuu

SEQ ID NO: 2215871 - RNA, 19 nt, Artificial Sequence
  Description of Artificial Sequence: Synthetic oligonucleotide
caaauaggauggaaugugu

SEQ ID NO: 2215872 - RNA, 19 nt, Artificial Sequence
  Description of Artificial Sequence: Synthetic oligonucleotide
gaugccagaugugcccagc

SEQ ID NO: 2215873 - RNA, 19 nt, Artificial Sequence
  Description of Artificial Sequence: Synthetic oligonucleotide
uacuuaagguggucuucaa

SEQ ID NO: 2215874 - RNA, 19 nt, Artificial Sequence
  Description of Artificial Sequence: Synthetic oligonucleotide
acaauauguuaaacgggau

SEQ ID NO: 2215875 - RNA, 19 nt, Artificial Sequence
  Description of Artificial Sequence: Synthetic oligonucleotide
caggaaguguagcagcuaa

SEQ ID NO: 2215876 - RNA, 19 nt, Artificial Sequence
  Description of Artificial Sequence: Synthetic oligonucleotide
caaugccguaagauguuca

SEQ ID NO: 2215877 - RNA, 19 nt, Artificial Sequence
  Description of Artificial Sequence: Synthetic oligonucleotide
ggacagguuccucagcuuc

SEQ ID NO: 2215878 - RNA, 19 nt, Artificial Sequence
  Description of Artificial Sequence: Synthetic oligonucleotide
ucagcuucgacuggcucuu

SEQ ID NO: 2215879 - RNA, 19 nt, Artificial Sequence
  Description of Artificial Sequence: Synthetic oligonucleotide
augcuccacaucuuucaaa

SEQ ID NO: 2215880 - RNA, 19 nt, Artificial Sequence
  Description of Artificial Sequence: Synthetic oligonucleotide
uuacuguaaugaucucauu

SEQ ID NO: 2215881 - RNA, 19 nt, Artificial Sequence
  Description of Artificial Sequence: Synthetic oligonucleotide
gggucacugucacuugcgg

SEQ ID NO: 2215882 - RNA, 19 nt, Artificial Sequence
  Description of Artificial Sequence: Synthetic oligonucleotide
cagccuucaaguucguaaa

SEQ ID NO: 2215883 - RNA, 19 nt, Artificial Sequence
  Description of Artificial Sequence: Synthetic oligonucleotide
cuugacccaaacaaaguuu

SEQ ID NO: 2215884 - RNA, 19 nt, Artificial Sequence
  Description of Artificial Sequence: Synthetic oligonucleotide
gguagagauuucucuucac

SEQ ID NO: 2215885 - RNA, 19 nt, Artificial Sequence
  Description of Artificial Sequence: Synthetic oligonucleotide
ugcggcaaauaggauggaa

SEQ ID NO: 2215886 - RNA, 19 nt, Artificial Sequence
  Description of Artificial Sequence: Synthetic oligonucleotide
cuucgacuggcucuuuaga

SEQ ID NO: 2215887 - RNA, 19 nt, Artificial Sequence
  Description of Artificial Sequence: Synthetic oligonucleotide
acuggcucuuuagaaucca

SEQ ID NO: 2215888 - RNA, 19 nt, Artificial Sequence
  Description of Artificial Sequence: Synthetic oligonucleotide
caauauguuaaacgggauu

SEQ ID NO: 2215889 - RNA, 19 nt, Artificial Sequence
  Description of Artificial Sequence: Synthetic oligonucleotide
aagugacuuguugguuugu

SEQ ID NO: 2215890 - RNA, 19 nt, Artificial Sequence
  Description of Artificial Sequence: Synthetic oligonucleotide
auguucaagaucacauaua

SEQ ID NO: 2215891 - RNA, 19 nt, Artificial Sequence
  Description of Artificial Sequence: Synthetic oligonucleotide
gagcuccuuaagugacuug

SEQ ID NO: 2215892 - RNA, 19 nt, Artificial Sequence
  Description of Artificial Sequence: Synthetic oligonucleotide
uuccuaagggcaguacauu

SEQ ID NO: 2215893 - RNA, 19 nt, Artificial Sequence
  Description of Artificial Sequence: Synthetic oligonucleotide
agagcuccuuaagugacuu

SEQ ID NO: 2215894 - RNA, 19 nt, Artificial Sequence
  Description of Artificial Sequence: Synthetic oligonucleotide
cggcaaauaggauggaaug

SEQ ID NO: 2215895 - RNA, 19 nt, Artificial Sequence
  Description of Artificial Sequence: Synthetic oligonucleotide
aauccagauuggauuuguu

SEQ ID NO: 2215896 - RNA, 19 nt, Artificial Sequence
  Description of Artificial Sequence: Synthetic oligonucleotide
gucaguuccgagccuucga

SEQ ID NO: 2215897 - RNA, 19 nt, Artificial Sequence
  Description of Artificial Sequence: Synthetic oligonucleotide
acgggauuucauguacgca

SEQ ID NO: 2215898 - RNA, 19 nt, Artificial Sequence
  Description of Artificial Sequence: Synthetic oligonucleotide
caaugaaauaacgaccuuu

SEQ ID NO: 2215899 - RNA, 19 nt, Artificial Sequence
  Description of Artificial Sequence: Synthetic oligonucleotide
agaucacauauaaucucuu

SEQ ID NO: 2215900 - RNA, 19 nt, Artificial Sequence
  Description of Artificial Sequence: Synthetic oligonucleotide
uacuaaccacugcuuuauu

SEQ ID NO: 2215901 - RNA, 19 nt, Artificial Sequence
  Description of Artificial Sequence: Synthetic oligonucleotide
gucucagauuaggacauaa

SEQ ID NO: 2215902 - RNA, 19 nt, Artificial Sequence
  Description of Artificial Sequence: Synthetic oligonucleotide
acgcaggaacaccauugaa

SEQ ID NO: 2215903 - RNA, 19 nt, Artificial Sequence
  Description of Artificial Sequence: Synthetic oligonucleotide
uaacgaccuuucguguccu

SEQ ID NO: 2215904 - RNA, 19 nt, Artificial Sequence
  Description of Artificial Sequence: Synthetic oligonucleotide
acauaacggguaaguccuc

SEQ ID NO: 2215905 - RNA, 19 nt, Artificial Sequence
  Description of Artificial Sequence: Synthetic oligonucleotide
uucguguccuuuguuucuu

SEQ ID NO: 2215906 - RNA, 19 nt, Artificial Sequence
  Description of Artificial Sequence: Synthetic oligonucleotide
agagauucacagagcuccu

SEQ ID NO: 2215907 - RNA, 19 nt, Artificial Sequence
  Description of Artificial Sequence: Synthetic oligonucleotide
cuguucucugggaggcuuc

SEQ ID NO: 2215908 - RNA, 19 nt, Artificial Sequence
  Description of Artificial Sequence: Synthetic oligonucleotide
ggaaguguagcagcuaaua

SEQ ID NO: 2215909 - RNA, 19 nt, Artificial Sequence
  Description of Artificial Sequence: Synthetic oligonucleotide
ggcucuuuagaauccagau

SEQ ID NO: 2215910 - RNA, 19 nt, Artificial Sequence
  Description of Artificial Sequence: Synthetic oligonucleotide
ccguaagauguucaagauc

SEQ ID NO: 2215911 - RNA, 19 nt, Artificial Sequence
  Description of Artificial Sequence: Synthetic oligonucleotide
ccucgaaccucugacaguc

SEQ ID NO: 2215912 - RNA, 19 nt, Artificial Sequence
  Description of Artificial Sequence: Synthetic oligonucleotide
auagaugcuuuugguugau

SEQ ID NO: 2215913 - RNA, 19 nt, Artificial Sequence
  Description of Artificial Sequence: Synthetic oligonucleotide
ucguguccuuuguuucuuc

SEQ ID NO: 2215914 - RNA, 19 nt, Artificial Sequence
  Description of Artificial Sequence: Synthetic oligonucleotide
ggauuucauguacgcagga

SEQ ID NO: 2215915 - RNA, 19 nt, Artificial Sequence
  Description of Artificial Sequence: Synthetic oligonucleotide
acugucacuugcggcaaau

SEQ ID NO: 2215916 - RNA, 19 nt, Artificial Sequence
  Description of Artificial Sequence: Synthetic oligonucleotide
agguggucuucaaggcagg

SEQ ID NO: 2215917 - RNA, 19 nt, Artificial Sequence
  Description of Artificial Sequence: Synthetic oligonucleotide
ccccucgaaccucugacag

SEQ ID NO: 2215918 - RNA, 19 nt, Artificial Sequence
  Description of Artificial Sequence: Synthetic oligonucleotide
gauuucuuaucgacagaau

SEQ ID NO: 2215919 - RNA, 19 nt, Artificial Sequence
  Description of Artificial Sequence: Synthetic oligonucleotide
gguugauguauaaucuugu

SEQ ID NO: 2215920 - RNA, 19 nt, Artificial Sequence
  Description of Artificial Sequence: Synthetic oligonucleotide
aucugaggccauccuucaa

SEQ ID NO: 2215921 - RNA, 19 nt, Artificial Sequence
  Description of Artificial Sequence: Synthetic oligonucleotide
cagucucuggcaaugccgu

SEQ ID NO: 2215922 - RNA, 19 nt, Artificial Sequence
  Description of Artificial Sequence: Synthetic oligonucleotide
gcuuuugguugauguauaa

SEQ ID NO: 2215923 - RNA, 19 nt, Artificial Sequence
  Description of Artificial Sequence: Synthetic oligonucleotide
aggauggaauguguucuuu

SEQ ID NO: 2215924 - RNA, 19 nt, Artificial Sequence
  Description of Artificial Sequence: Synthetic oligonucleotide
gaacaccauugaauucauc

SEQ ID NO: 2215925 - RNA, 19 nt, Artificial Sequence
  Description of Artificial Sequence: Synthetic oligonucleotide
accuuucguguccuuuguu

SEQ ID NO: 2215926 - RNA, 19 nt, Artificial Sequence
  Description of Artificial Sequence: Synthetic oligonucleotide
gaccuuucguguccuuugu

SEQ ID NO: 2215927 - RNA, 19 nt, Artificial Sequence
  Description of Artificial Sequence: Synthetic oligonucleotide
cagucaguuccgagccuuc

SEQ ID NO: 2215928 - RNA, 19 nt, Artificial Sequence
  Description of Artificial Sequence: Synthetic oligonucleotide
guuccgagccuucgaaagu

SEQ ID NO: 2215929 - RNA, 19 nt, Artificial Sequence
  Description of Artificial Sequence: Synthetic oligonucleotide
ggcaaauaggauggaaugu

SEQ ID NO: 2215930 - RNA, 19 nt, Artificial Sequence
  Description of Artificial Sequence: Synthetic oligonucleotide
aacgaccuuucguguccuu

SEQ ID NO: 2215931 - RNA, 19 nt, Artificial Sequence
  Description of Artificial Sequence: Synthetic oligonucleotide
cuuggccaagauuucuuau

SEQ ID NO: 2215932 - RNA, 19 nt, Artificial Sequence
  Description of Artificial Sequence: Synthetic oligonucleotide
ccuuaagugacuuguuggu

SEQ ID NO: 2215933 - RNA, 19 nt, Artificial Sequence
  Description of Artificial Sequence: Synthetic oligonucleotide
ggccaagauuucuuaucga

SEQ ID NO: 2215934 - RNA, 19 nt, Artificial Sequence
  Description of Artificial Sequence: Synthetic oligonucleotide
cagaacucauagaugcuuu

SEQ ID NO: 2215935 - RNA, 19 nt, Artificial Sequence
  Description of Artificial Sequence: Synthetic oligonucleotide
uacugccagucaguuccga

SEQ ID NO: 2215936 - RNA, 19 nt, Artificial Sequence
  Description of Artificial Sequence: Synthetic oligonucleotide
aggaaguguagcagcuaau

SEQ ID NO: 2215937 - RNA, 19 nt, Artificial Sequence
  Description of Artificial Sequence: Synthetic oligonucleotide
cuagaucugaggccauccu

SEQ ID NO: 2215938 - RNA, 19 nt, Artificial Sequence
  Description of Artificial Sequence: Synthetic oligonucleotide
ccucuaaacccuacugcca

SEQ ID NO: 2215939 - RNA, 19 nt, Artificial Sequence
  Description of Artificial Sequence: Synthetic oligonucleotide
ccacugcuuuauuaauuuc

SEQ ID NO: 2215940 - RNA, 19 nt, Artificial Sequence
  Description of Artificial Sequence: Synthetic oligonucleotide
caguuccgagccuucgaaa

SEQ ID NO: 2215941 - RNA, 19 nt, Artificial Sequence
  Description of Artificial Sequence: Synthetic oligonucleotide
agucucuggcaaugccgua

SEQ ID NO: 2215942 - RNA, 19 nt, Artificial Sequence
  Description of Artificial Sequence: Synthetic oligonucleotide
gggaggcuucuuugccagg

SEQ ID NO: 2215943 - RNA, 19 nt, Artificial Sequence
  Description of Artificial Sequence: Synthetic oligonucleotide
aaccaagcucugggucacu

SEQ ID NO: 2215944 - RNA, 19 nt, Artificial Sequence
  Description of Artificial Sequence: Synthetic oligonucleotide
ggugcuuggccaagauuuc

SEQ ID NO: 2215945 - RNA, 19 nt, Artificial Sequence
  Description of Artificial Sequence: Synthetic oligonucleotide
uugcggcaaauaggaugga

SEQ ID NO: 2215946 - RNA, 19 nt, Artificial Sequence
  Description of Artificial Sequence: Synthetic oligonucleotide
auguacgcaggaacaccau

SEQ ID NO: 2215947 - RNA, 19 nt, Artificial Sequence
  Description of Artificial Sequence: Synthetic oligonucleotide
gcaaugccguaagauguuc

SEQ ID NO: 2215948 - RNA, 19 nt, Artificial Sequence
  Description of Artificial Sequence: Synthetic oligonucleotide
acccuacugccagucaguu

SEQ ID NO: 2215949 - RNA, 19 nt, Artificial Sequence
  Description of Artificial Sequence: Synthetic oligonucleotide
aggcaggugcuuggccaag

SEQ ID NO: 2215950 - RNA, 19 nt, Artificial Sequence
  Description of Artificial Sequence: Synthetic oligonucleotide
gacuguccucuaaacccua

SEQ ID NO: 2215951 - RNA, 19 nt, Artificial Sequence
  Description of Artificial Sequence: Synthetic oligonucleotide
gccguaagauguucaagau

SEQ ID NO: 2215952 - RNA, 19 nt, Artificial Sequence
  Description of Artificial Sequence: Synthetic oligonucleotide
gccuucaaguucguaaagu

SEQ ID NO: 2215953 - RNA, 19 nt, Artificial Sequence
  Description of Artificial Sequence: Synthetic oligonucleotide
cagugguuauaaacugcau

SEQ ID NO: 2215954 - RNA, 19 nt, Artificial Sequence
  Description of Artificial Sequence: Synthetic oligonucleotide
cacauuccuaagggcagua

SEQ ID NO: 2215955 - RNA, 19 nt, Artificial Sequence
  Description of Artificial Sequence: Synthetic oligonucleotide
cgagccuucgaaagucuca

SEQ ID NO: 2215956 - RNA, 19 nt, Artificial Sequence
  Description of Artificial Sequence: Synthetic oligonucleotide
gcggcaaauaggauggaau

SEQ ID NO: 2215957 - RNA, 19 nt, Artificial Sequence
  Description of Artificial Sequence: Synthetic oligonucleotide
gagauucacagagcuccuu

SEQ ID NO: 2215958 - RNA, 19 nt, Artificial Sequence
  Description of Artificial Sequence: Synthetic oligonucleotide
ccuuucguguccuuuguuu

SEQ ID NO: 2215959 - RNA, 19 nt, Artificial Sequence
  Description of Artificial Sequence: Synthetic oligonucleotide
cgcaggaacaccauugaau

SEQ ID NO: 2215960 - RNA, 19 nt, Artificial Sequence
  Description of Artificial Sequence: Synthetic oligonucleotide
caaguucguaaaguccuuu

SEQ ID NO: 2215961 - RNA, 19 nt, Artificial Sequence
  Description of Artificial Sequence: Synthetic oligonucleotide
cguguccuuuguuucuuca

SEQ ID NO: 2215962 - RNA, 19 nt, Artificial Sequence
  Description of Artificial Sequence: Synthetic oligonucleotide
cccuacugccagucaguuc

SEQ ID NO: 2215963 - RNA, 19 nt, Artificial Sequence
  Description of Artificial Sequence: Synthetic oligonucleotide
ccuaagggcaguacauuuu

SEQ ID NO: 2215964 - RNA, 19 nt, Artificial Sequence
  Description of Artificial Sequence: Synthetic oligonucleotide
ccuucgaaagucucagauu

SEQ ID NO: 2215965 - RNA, 19 nt, Artificial Sequence
  Description of Artificial Sequence: Synthetic oligonucleotide
cucgaaccucugacagucu

SEQ ID NO: 2215966 - RNA, 19 nt, Artificial Sequence
  Description of Artificial Sequence: Synthetic oligonucleotide
cacugucacuugcggcaaa

SEQ ID NO: 2215967 - RNA, 19 nt, Artificial Sequence
  Description of Artificial Sequence: Synthetic oligonucleotide
cacuugcggcaaauaggau

SEQ ID NO: 2215968 - RNA, 19 nt, Artificial Sequence
  Description of Artificial Sequence: Synthetic oligonucleotide
ggucuucaaggcaggugcu

SEQ ID NO: 2215969 - RNA, 19 nt, Artificial Sequence
  Description of Artificial Sequence: Synthetic oligonucleotide
guucuagaucugaggccau

SEQ ID NO: 2215970 - RNA, 19 nt, Artificial Sequence
  Description of Artificial Sequence: Synthetic oligonucleotide
gguggucuucaaggcaggu

SEQ ID NO: 2215971 - RNA, 19 nt, Artificial Sequence
  Description of Artificial Sequence: Synthetic oligonucleotide
cucuguucucugggaggcu

SEQ ID NO: 2215972 - RNA, 19 nt, Artificial Sequence
  Description of Artificial Sequence: Synthetic oligonucleotide
gccagucaguuccgagccu

SEQ ID NO: 2215973 - RNA, 19 nt, Artificial Sequence
  Description of Artificial Sequence: Synthetic oligonucleotide
gcuccuuaagugacuuguu

SEQ ID NO: 2215974 - RNA, 19 nt, Artificial Sequence
  Description of Artificial Sequence: Synthetic oligonucleotide
cagaugugcccagcuucau

SEQ ID NO: 2215975 - RNA, 19 nt, Artificial Sequence
  Description of Artificial Sequence: Synthetic oligonucleotide
cccucgaaccucugacagu

SEQ ID NO: 2215976 - RNA, 19 nt, Artificial Sequence
  Description of Artificial Sequence: Synthetic oligonucleotide
ccagucaguuccgagccuu

SEQ ID NO: 2215977 - RNA, 19 nt, Artificial Sequence
  Description of Artificial Sequence: Synthetic oligonucleotide
aucggaagaaucuucaucc

SEQ ID NO: 2215978 - RNA, 19 nt, Artificial Sequence
  Description of Artificial Sequence: Synthetic oligonucleotide
agaaucuucauccacguuc

SEQ ID NO: 2215979 - RNA, 19 nt, Artificial Sequence
  Description of Artificial Sequence: Synthetic oligonucleotide
cagaagucgaucuagaagg

SEQ ID NO: 2215980 - RNA, 19 nt, Artificial Sequence
  Description of Artificial Sequence: Synthetic oligonucleotide
uuuagaaagagccaacccu

SEQ ID NO: 2215981 - RNA, 19 nt, Artificial Sequence
  Description of Artificial Sequence: Synthetic oligonucleotide
agagccaacccuuuaauac

SEQ ID NO: 2215982 - RNA, 19 nt, Artificial Sequence
  Description of Artificial Sequence: Synthetic oligonucleotide
aaucggaagaaucuucauc

SEQ ID NO: 2215983 - RNA, 19 nt, Artificial Sequence
  Description of Artificial Sequence: Synthetic oligonucleotide
uaauacagagccuucauga

SEQ ID NO: 2215984 - RNA, 19 nt, Artificial Sequence
  Description of Artificial Sequence: Synthetic oligonucleotide
ucauuuaaaucacuguccc

SEQ ID NO: 2215985 - RNA, 19 nt, Artificial Sequence
  Description of Artificial Sequence: Synthetic oligonucleotide
aaagggacggccuccacgg

SEQ ID NO: 2215986 - RNA, 19 nt, Artificial Sequence
  Description of Artificial Sequence: Synthetic oligonucleotide
ugagaaaugggcucaagug

SEQ ID NO: 2215987 - RNA, 19 nt, Artificial Sequence
  Description of Artificial Sequence: Synthetic oligonucleotide
uaucugaagaugcaguggc

SEQ ID NO: 2215988 - RNA, 19 nt, Artificial Sequence
  Description of Artificial Sequence: Synthetic oligonucleotide
gaugucgauuaccaggucg

SEQ ID NO: 2215989 - RNA, 19 nt, Artificial Sequence
  Description of Artificial Sequence: Synthetic oligonucleotide
ugggaugucgauuaccagg

SEQ ID NO: 2215990 - RNA, 19 nt, Artificial Sequence
  Description of Artificial Sequence: Synthetic oligonucleotide
cucauuuaaaucacugucc

SEQ ID NO: 2215991 - RNA, 19 nt, Artificial Sequence
  Description of Artificial Sequence: Synthetic oligonucleotide
uuuuagaaagagccaaccc

SEQ ID NO: 2215992 - RNA, 19 nt, Artificial Sequence
  Description of Artificial Sequence: Synthetic oligonucleotide
auuuaaaucacuguccccu

SEQ ID NO: 2215993 - RNA, 19 nt, Artificial Sequence
  Description of Artificial Sequence: Synthetic oligonucleotide
uuuacgccuuuucugauug

SEQ ID NO: 2215994 - RNA, 19 nt, Artificial Sequence
  Description of Artificial Sequence: Synthetic oligonucleotide
uuaauacagagccuucaug

SEQ ID NO: 2215995 - RNA, 19 nt, Artificial Sequence
  Description of Artificial Sequence: Synthetic oligonucleotide
uguuaucugaagaugcagu

SEQ ID NO: 2215996 - RNA, 19 nt, Artificial Sequence
  Description of Artificial Sequence: Synthetic oligonucleotide
ugaaucggaagaaucuuca

SEQ ID NO: 2215997 - RNA, 19 nt, Artificial Sequence
  Description of Artificial Sequence: Synthetic oligonucleotide
uggugugucagacaacuug

SEQ ID NO: 2215998 - RNA, 19 nt, Artificial Sequence
  Description of Artificial Sequence: Synthetic oligonucleotide
uggccacucauuuaaauca

SEQ ID NO: 2215999 - RNA, 19 nt, Artificial Sequence
  Description of Artificial Sequence: Synthetic oligonucleotide
agcaucaauaaacaucucu

SEQ ID NO: 2216000 - RNA, 19 nt, Artificial Sequence
  Description of Artificial Sequence: Synthetic oligonucleotide
ucugggaugucgauuacca

SEQ ID NO: 2216001 - RNA, 19 nt, Artificial Sequence
  Description of Artificial Sequence: Synthetic oligonucleotide
ucucguacugcagaagucg

SEQ ID NO: 2216002 - RNA, 19 nt, Artificial Sequence
  Description of Artificial Sequence: Synthetic oligonucleotide
uuaaaucacuguccccugg

SEQ ID NO: 2216003 - RNA, 19 nt, Artificial Sequence
  Description of Artificial Sequence: Synthetic oligonucleotide
ugucagacaacuugggugu

SEQ ID NO: 2216004 - RNA, 19 nt, Artificial Sequence
  Description of Artificial Sequence: Synthetic oligonucleotide
uuaucugaagaugcagugg

SEQ ID NO: 2216005 - RNA, 19 nt, Artificial Sequence
  Description of Artificial Sequence: Synthetic oligonucleotide
uacagagccuucaugaaaa

SEQ ID NO: 2216006 - RNA, 19 nt, Artificial Sequence
  Description of Artificial Sequence: Synthetic oligonucleotide
ggggaaauccuguugaagg

SEQ ID NO: 2216007 - RNA, 19 nt, Artificial Sequence
  Description of Artificial Sequence: Synthetic oligonucleotide
guuaucugaagaugcagug

SEQ ID NO: 2216008 - RNA, 19 nt, Artificial Sequence
  Description of Artificial Sequence: Synthetic oligonucleotide
uugagaaaugggcucaagu

SEQ ID NO: 2216009 - RNA, 19 nt, Artificial Sequence
  Description of Artificial Sequence: Synthetic oligonucleotide
uuuaauacagagccuucau

SEQ ID NO: 2216010 - RNA, 19 nt, Artificial Sequence
  Description of Artificial Sequence: Synthetic oligonucleotide
aacacuggccccagaaccc

SEQ ID NO: 2216011 - RNA, 19 nt, Artificial Sequence
  Description of Artificial Sequence: Synthetic oligonucleotide
ugcucuucuaaagggacgg

SEQ ID NO: 2216012 - RNA, 19 nt, Artificial Sequence
  Description of Artificial Sequence: Synthetic oligonucleotide
uggcaaguagcacuggaug

SEQ ID NO: 2216013 - RNA, 19 nt, Artificial Sequence
  Description of Artificial Sequence: Synthetic oligonucleotide
auguuuacgccuuuucuga

SEQ ID NO: 2216014 - RNA, 19 nt, Artificial Sequence
  Description of Artificial Sequence: Synthetic oligonucleotide
gauggauggcuacucuggg

SEQ ID NO: 2216015 - RNA, 19 nt, Artificial Sequence
  Description of Artificial Sequence: Synthetic oligonucleotide
aucggaggacuucucuucc

SEQ ID NO: 2216016 - RNA, 19 nt, Artificial Sequence
  Description of Artificial Sequence: Synthetic oligonucleotide
agcauggcaacugagcauc

SEQ ID NO: 2216017 - RNA, 19 nt, Artificial Sequence
  Description of Artificial Sequence: Synthetic oligonucleotide
auuaccaggucgucgucuc

SEQ ID NO: 2216018 - RNA, 19 nt, Artificial Sequence
  Description of Artificial Sequence: Synthetic oligonucleotide
uuuaaaucacuguccccug

SEQ ID NO: 2216019 - RNA, 19 nt, Artificial Sequence
  Description of Artificial Sequence: Synthetic oligonucleotide
aaagagccaacccuuuaau

SEQ ID NO: 2216020 - RNA, 19 nt, Artificial Sequence
  Description of Artificial Sequence: Synthetic oligonucleotide
uaaaucacuguccccugga

SEQ ID NO: 2216021 - RNA, 19 nt, Artificial Sequence
  Description of Artificial Sequence: Synthetic oligonucleotide
cugauugugucaguggccg

SEQ ID NO: 2216022 - RNA, 19 nt, Artificial Sequence
  Description of Artificial Sequence: Synthetic oligonucleotide
caugggagaagcacugugc

SEQ ID NO: 2216023 - RNA, 19 nt, Artificial Sequence
  Description of Artificial Sequence: Synthetic oligonucleotide
ugcaucgcugaacaucugc

SEQ ID NO: 2216024 - RNA, 19 nt, Artificial Sequence
  Description of Artificial Sequence: Synthetic oligonucleotide
ucgauuaccaggucgucgu

SEQ ID NO: 2216025 - RNA, 19 nt, Artificial Sequence
  Description of Artificial Sequence: Synthetic oligonucleotide
acauuugugcauguuuacg

SEQ ID NO: 2216026 - RNA, 19 nt, Artificial Sequence
  Description of Artificial Sequence: Synthetic oligonucleotide
ugaguuuccgggguaggcg

SEQ ID NO: 2216027 - RNA, 19 nt, Artificial Sequence
  Description of Artificial Sequence: Synthetic oligonucleotide
gaguuuccgggguaggcgg

SEQ ID NO: 2216028 - RNA, 19 nt, Artificial Sequence
  Description of Artificial Sequence: Synthetic oligonucleotide
ggaagaaucuucauccacg

SEQ ID NO: 2216029 - RNA, 19 nt, Artificial Sequence
  Description of Artificial Sequence: Synthetic oligonucleotide
agcgagcucagguaugggg

SEQ ID NO: 2216030 - RNA, 19 nt, Artificial Sequence
  Description of Artificial Sequence: Synthetic oligonucleotide
uccucggggacauuugugc

SEQ ID NO: 2216031 - RNA, 19 nt, Artificial Sequence
  Description of Artificial Sequence: Synthetic oligonucleotide
agucgaucuagaaggaaac

SEQ ID NO: 2216032 - RNA, 19 nt, Artificial Sequence
  Description of Artificial Sequence: Synthetic oligonucleotide
aacaucugcugagggacgg

SEQ ID NO: 2216033 - RNA, 19 nt, Artificial Sequence
  Description of Artificial Sequence: Synthetic oligonucleotide
uggauggcuacucugggau

SEQ ID NO: 2216034 - RNA, 19 nt, Artificial Sequence
  Description of Artificial Sequence: Synthetic oligonucleotide
agggcaucauccccgcugc

SEQ ID NO: 2216035 - RNA, 19 nt, Artificial Sequence
  Description of Artificial Sequence: Synthetic oligonucleotide
cauuuaaaucacugucccc

SEQ ID NO: 2216036 - RNA, 19 nt, Artificial Sequence
  Description of Artificial Sequence: Synthetic oligonucleotide
uuggccacucauuuaaauc

SEQ ID NO: 2216037 - RNA, 19 nt, Artificial Sequence
  Description of Artificial Sequence: Synthetic oligonucleotide
guagucagaagggaauggg

SEQ ID NO: 2216038 - RNA, 19 nt, Artificial Sequence
  Description of Artificial Sequence: Synthetic oligonucleotide
ucucuugagaaaugggcuc

SEQ ID NO: 2216039 - RNA, 19 nt, Artificial Sequence
  Description of Artificial Sequence: Synthetic oligonucleotide
agaaaugggcucaagugug

SEQ ID NO: 2216040 - RNA, 19 nt, Artificial Sequence
  Description of Artificial Sequence: Synthetic oligonucleotide
uccacguucucguacugca

SEQ ID NO: 2216041 - RNA, 19 nt, Artificial Sequence
  Description of Artificial Sequence: Synthetic oligonucleotide
ggcaaguagcacuggaugg

SEQ ID NO: 2216042 - RNA, 19 nt, Artificial Sequence
  Description of Artificial Sequence: Synthetic oligonucleotide
uacucugggaugucgauua

SEQ ID NO: 2216043 - RNA, 19 nt, Artificial Sequence
  Description of Artificial Sequence: Synthetic oligonucleotide
agggacggugcucaggauc

SEQ ID NO: 2216044 - RNA, 19 nt, Artificial Sequence
  Description of Artificial Sequence: Synthetic oligonucleotide
augggcucaagugugcugg

SEQ ID NO: 2216045 - RNA, 19 nt, Artificial Sequence
  Description of Artificial Sequence: Synthetic oligonucleotide
aucgcugaacaucugcuga

SEQ ID NO: 2216046 - RNA, 19 nt, Artificial Sequence
  Description of Artificial Sequence: Synthetic oligonucleotide
ucacuguuaucugaagaug

SEQ ID NO: 2216047 - RNA, 19 nt, Artificial Sequence
  Description of Artificial Sequence: Synthetic oligonucleotide
gacauuugugcauguuuac

SEQ ID NO: 2216048 - RNA, 19 nt, Artificial Sequence
  Description of Artificial Sequence: Synthetic oligonucleotide
gagaaaugggcucaagugu

SEQ ID NO: 2216049 - RNA, 19 nt, Artificial Sequence
  Description of Artificial Sequence: Synthetic oligonucleotide
ugcaggggaaauccuguug

SEQ ID NO: 2216050 - RNA, 19 nt, Artificial Sequence
  Description of Artificial Sequence: Synthetic oligonucleotide
aagucgaucuagaaggaaa

SEQ ID NO: 2216051 - RNA, 19 nt, Artificial Sequence
  Description of Artificial Sequence: Synthetic oligonucleotide
gcagaagucgaucuagaag

SEQ ID NO: 2216052 - RNA, 19 nt, Artificial Sequence
  Description of Artificial Sequence: Synthetic oligonucleotide
acaacuuggguguccccuc

SEQ ID NO: 2216053 - RNA, 19 nt, Artificial Sequence
  Description of Artificial Sequence: Synthetic oligonucleotide
ucauccacguucucguacu

SEQ ID NO: 2216054 - RNA, 19 nt, Artificial Sequence
  Description of Artificial Sequence: Synthetic oligonucleotide
uggauggauggcuacucug

SEQ ID NO: 2216055 - RNA, 19 nt, Artificial Sequence
  Description of Artificial Sequence: Synthetic oligonucleotide
ugucaguggccgaagcaug

SEQ ID NO: 2216056 - RNA, 19 nt, Artificial Sequence
  Description of Artificial Sequence: Synthetic oligonucleotide
uccuguugaaggaggcaag

SEQ ID NO: 2216057 - RNA, 19 nt, Artificial Sequence
  Description of Artificial Sequence: Synthetic oligonucleotide
aggccaguggcccacccac

SEQ ID NO: 2216058 - RNA, 19 nt, Artificial Sequence
  Description of Artificial Sequence: Synthetic oligonucleotide
uccuacagccaucuugagu

SEQ ID NO: 2216059 - RNA, 19 nt, Artificial Sequence
  Description of Artificial Sequence: Synthetic oligonucleotide
ucugucucacuguuaucug

SEQ ID NO: 2216060 - RNA, 19 nt, Artificial Sequence
  Description of Artificial Sequence: Synthetic oligonucleotide
ggugugucagacaacuugg

SEQ ID NO: 2216061 - RNA, 19 nt, Artificial Sequence
  Description of Artificial Sequence: Synthetic oligonucleotide
gagccaacccuuuaauaca

SEQ ID NO: 2216062 - RNA, 19 nt, Artificial Sequence
  Description of Artificial Sequence: Synthetic oligonucleotide
ucgucgucuccauccaggg

SEQ ID NO: 2216063 - RNA, 19 nt, Artificial Sequence
  Description of Artificial Sequence: Synthetic oligonucleotide
cugaaucggaagaaucuuc

SEQ ID NO: 2216064 - RNA, 19 nt, Artificial Sequence
  Description of Artificial Sequence: Synthetic oligonucleotide
uggcaacugagcaucaaua

SEQ ID NO: 2216065 - RNA, 19 nt, Artificial Sequence
  Description of Artificial Sequence: Synthetic oligonucleotide
aagagccaacccuuuaaua

SEQ ID NO: 2216066 - RNA, 19 nt, Artificial Sequence
  Description of Artificial Sequence: Synthetic oligonucleotide
ugcauguuuacgccuuuuc

SEQ ID NO: 2216067 - RNA, 19 nt, Artificial Sequence
  Description of Artificial Sequence: Synthetic oligonucleotide
uguccccucugucucacug

SEQ ID NO: 2216068 - RNA, 19 nt, Artificial Sequence
  Description of Artificial Sequence: Synthetic oligonucleotide
aucugaaucggaagaaucu

SEQ ID NO: 2216069 - RNA, 19 nt, Artificial Sequence
  Description of Artificial Sequence: Synthetic oligonucleotide
gggagaagcacugugcggg

SEQ ID NO: 2216070 - RNA, 19 nt, Artificial Sequence
  Description of Artificial Sequence: Synthetic oligonucleotide
ucuugaguuuccgggguag

SEQ ID NO: 2216071 - RNA, 19 nt, Artificial Sequence
  Description of Artificial Sequence: Synthetic oligonucleotide
aucucuugagaaaugggcu

SEQ ID NO: 2216072 - RNA, 19 nt, Artificial Sequence
  Description of Artificial Sequence: Synthetic oligonucleotide
uggcaugggagaagcacug

SEQ ID NO: 2216073 - RNA, 19 nt, Artificial Sequence
  Description of Artificial Sequence: Synthetic oligonucleotide
uccucuuggccacucauuu

SEQ ID NO: 2216074 - RNA, 19 nt, Artificial Sequence
  Description of Artificial Sequence: Synthetic oligonucleotide
gucgauuaccaggucgucg

SEQ ID NO: 2216075 - RNA, 19 nt, Artificial Sequence
  Description of Artificial Sequence: Synthetic oligonucleotide
gaagaaucuucauccacgu

SEQ ID NO: 2216076 - RNA, 19 nt, Artificial Sequence
  Description of Artificial Sequence: Synthetic oligonucleotide
uacgccuuuucugauugug

SEQ ID NO: 2216077 - RNA, 19 nt, Artificial Sequence
  Description of Artificial Sequence: Synthetic oligonucleotide
ucugaaucggaagaaucuu

SEQ ID NO: 2216078 - RNA, 19 nt, Artificial Sequence
  Description of Artificial Sequence: Synthetic oligonucleotide
ucggaagaaucuucaucca

SEQ ID NO: 2216079 - RNA, 19 nt, Artificial Sequence
  Description of Artificial Sequence: Synthetic oligonucleotide
aagaugcaguggcaucuga

SEQ ID NO: 2216080 - RNA, 19 nt, Artificial Sequence
  Description of Artificial Sequence: Synthetic oligonucleotide
uucuaaagggacggccucc

SEQ ID NO: 2216081 - RNA, 19 nt, Artificial Sequence
  Description of Artificial Sequence: Synthetic oligonucleotide
agccaucuugaguuuccgg

SEQ ID NO: 2216082 - RNA, 19 nt, Artificial Sequence
  Description of Artificial Sequence: Synthetic oligonucleotide
uucucguacugcagaaguc

SEQ ID NO: 2216083 - RNA, 19 nt, Artificial Sequence
  Description of Artificial Sequence: Synthetic oligonucleotide
caucggaggacuucucuuc

SEQ ID NO: 2216084 - RNA, 19 nt, Artificial Sequence
  Description of Artificial Sequence: Synthetic oligonucleotide
gaaaugggcucaagugugc

SEQ ID NO: 2216085 - RNA, 19 nt, Artificial Sequence
  Description of Artificial Sequence: Synthetic oligonucleotide
uugaguuuccgggguaggc

SEQ ID NO: 2216086 - RNA, 19 nt, Artificial Sequence
  Description of Artificial Sequence: Synthetic oligonucleotide
agacaacuugggugucccc

SEQ ID NO: 2216087 - RNA, 19 nt, Artificial Sequence
  Description of Artificial Sequence: Synthetic oligonucleotide
ggauggauggcuacucugg

SEQ ID NO: 2216088 - RNA, 19 nt, Artificial Sequence
  Description of Artificial Sequence: Synthetic oligonucleotide
cuuuaauacagagccuuca

SEQ ID NO: 2216089 - RNA, 19 nt, Artificial Sequence
  Description of Artificial Sequence: Synthetic oligonucleotide
agggacggccuccacgggg

SEQ ID NO: 2216090 - RNA, 19 nt, Artificial Sequence
  Description of Artificial Sequence: Synthetic oligonucleotide
uugugucaguggccgaagc

SEQ ID NO: 2216091 - RNA, 19 nt, Artificial Sequence
  Description of Artificial Sequence: Synthetic oligonucleotide
gaacaucugcugagggacg

SEQ ID NO: 2216092 - RNA, 19 nt, Artificial Sequence
  Description of Artificial Sequence: Synthetic oligonucleotide
auggcaacugagcaucaau

SEQ ID NO: 2216093 - RNA, 19 nt, Artificial Sequence
  Description of Artificial Sequence: Synthetic oligonucleotide
aagauccucuuggccacuc

SEQ ID NO: 2216094 - RNA, 19 nt, Artificial Sequence
  Description of Artificial Sequence: Synthetic oligonucleotide
gauggggcugggaugugag

SEQ ID NO: 2216095 - RNA, 19 nt, Artificial Sequence
  Description of Artificial Sequence: Synthetic oligonucleotide
ugugcuggcaugggagaag

SEQ ID NO: 2216096 - RNA, 19 nt, Artificial Sequence
  Description of Artificial Sequence: Synthetic oligonucleotide
ucagacaacuugggugucc

SEQ ID NO: 2216097 - RNA, 19 nt, Artificial Sequence
  Description of Artificial Sequence: Synthetic oligonucleotide
agugugcuggcaugggaga

SEQ ID NO: 2216098 - RNA, 19 nt, Artificial Sequence
  Description of Artificial Sequence: Synthetic oligonucleotide
cagggcugccccaacacug

SEQ ID NO: 2216099 - RNA, 19 nt, Artificial Sequence
  Description of Artificial Sequence: Synthetic oligonucleotide
ugcggggccuggcaaguag

SEQ ID NO: 2216100 - RNA, 19 nt, Artificial Sequence
  Description of Artificial Sequence: Synthetic oligonucleotide
gucgucgucuccauccagg

SEQ ID NO: 2216101 - RNA, 19 nt, Artificial Sequence
  Description of Artificial Sequence: Synthetic oligonucleotide
gguagucagaagggaaugg

SEQ ID NO: 2216102 - RNA, 19 nt, Artificial Sequence
  Description of Artificial Sequence: Synthetic oligonucleotide
aagaaucuucauccacguu

SEQ ID NO: 2216103 - RNA, 19 nt, Artificial Sequence
  Description of Artificial Sequence: Synthetic oligonucleotide
uagaaagagccaacccuuu

SEQ ID NO: 2216104 - RNA, 19 nt, Artificial Sequence
  Description of Artificial Sequence: Synthetic oligonucleotide
uguuuacgccuuuucugau

SEQ ID NO: 2216105 - RNA, 19 nt, Artificial Sequence
  Description of Artificial Sequence: Synthetic oligonucleotide
ugcucaggaucgugugggg

SEQ ID NO: 2216106 - RNA, 19 nt, Artificial Sequence
  Description of Artificial Sequence: Synthetic oligonucleotide
aagccagcgagcucaggua

SEQ ID NO: 2216107 - RNA, 19 nt, Artificial Sequence
  Description of Artificial Sequence: Synthetic oligonucleotide
gucaguggccgaagcaugg

SEQ ID NO: 2216108 - RNA, 19 nt, Artificial Sequence
  Description of Artificial Sequence: Synthetic oligonucleotide
aacuuggguguccccucug

SEQ ID NO: 2216109 - RNA, 19 nt, Artificial Sequence
  Description of Artificial Sequence: Synthetic oligonucleotide
ccaucuugaguuuccgggg

SEQ ID NO: 2216110 - RNA, 19 nt, Artificial Sequence
  Description of Artificial Sequence: Synthetic oligonucleotide
agguagucagaagggaaug

SEQ ID NO: 2216111 - RNA, 19 nt, Artificial Sequence
  Description of Artificial Sequence: Synthetic oligonucleotide
augucgauuaccaggucgu

SEQ ID NO: 2216112 - RNA, 19 nt, Artificial Sequence
  Description of Artificial Sequence: Synthetic oligonucleotide
aucugcugagggacggugc

SEQ ID NO: 2216113 - RNA, 19 nt, Artificial Sequence
  Description of Artificial Sequence: Synthetic oligonucleotide
agccaacccuuuaauacag

SEQ ID NO: 2216114 - RNA, 19 nt, Artificial Sequence
  Description of Artificial Sequence: Synthetic oligonucleotide
gaugcaguggcaucugaau

SEQ ID NO: 2216115 - RNA, 19 nt, Artificial Sequence
  Description of Artificial Sequence: Synthetic oligonucleotide
acucugggaugucgauuac

SEQ ID NO: 2216116 - RNA, 19 nt, Artificial Sequence
  Description of Artificial Sequence: Synthetic oligonucleotide
gaagaugcaguggcaucug

SEQ ID NO: 2216117 - RNA, 19 nt, Artificial Sequence
  Description of Artificial Sequence: Synthetic oligonucleotide
ggaagauccucuuggccac

SEQ ID NO: 2216118 - RNA, 19 nt, Artificial Sequence
  Description of Artificial Sequence: Synthetic oligonucleotide
cuugaguuuccgggguagg

SEQ ID NO: 2216119 - RNA, 19 nt, Artificial Sequence
  Description of Artificial Sequence: Synthetic oligonucleotide
aagggacggccuccacggg

SEQ ID NO: 2216120 - RNA, 19 nt, Artificial Sequence
  Description of Artificial Sequence: Synthetic oligonucleotide
uacugcagaagucgaucua

SEQ ID NO: 2216121 - RNA, 19 nt, Artificial Sequence
  Description of Artificial Sequence: Synthetic oligonucleotide
gggacggugcucaggaucg

SEQ ID NO: 2216122 - RNA, 19 nt, Artificial Sequence
  Description of Artificial Sequence: Synthetic oligonucleotide
gugugucagacaacuuggg

SEQ ID NO: 2216123 - RNA, 19 nt, Artificial Sequence
  Description of Artificial Sequence: Synthetic oligonucleotide
uggcuacucugggaugucg

SEQ ID NO: 2216124 - RNA, 19 nt, Artificial Sequence
  Description of Artificial Sequence: Synthetic oligonucleotide
aaguagcacuggauggaug

SEQ ID NO: 2216125 - RNA, 19 nt, Artificial Sequence
  Description of Artificial Sequence: Synthetic oligonucleotide
aguggcaucugaaucggaa

SEQ ID NO: 2216126 - RNA, 19 nt, Artificial Sequence
  Description of Artificial Sequence: Synthetic oligonucleotide
auugugucaguggccgaag

SEQ ID NO: 2216127 - RNA, 19 nt, Artificial Sequence
  Description of Artificial Sequence: Synthetic oligonucleotide
cugggaugucgauuaccag

SEQ ID NO: 2216128 - RNA, 19 nt, Artificial Sequence
  Description of Artificial Sequence: Synthetic oligonucleotide
gauugugucaguggccgaa

SEQ ID NO: 2216129 - RNA, 19 nt, Artificial Sequence
  Description of Artificial Sequence: Synthetic oligonucleotide
ucguacugcagaagucgau

SEQ ID NO: 2216130 - RNA, 19 nt, Artificial Sequence
  Description of Artificial Sequence: Synthetic oligonucleotide
cucagggcugccccaacac

SEQ ID NO: 2216131 - RNA, 19 nt, Artificial Sequence
  Description of Artificial Sequence: Synthetic oligonucleotide
gcaggggaaauccuguuga

SEQ ID NO: 2216132 - RNA, 19 nt, Artificial Sequence
  Description of Artificial Sequence: Synthetic oligonucleotide
ugauugugucaguggccga

SEQ ID NO: 2216133 - RNA, 19 nt, Artificial Sequence
  Description of Artificial Sequence: Synthetic oligonucleotide
gguccuacagccaucuuga

SEQ ID NO: 2216134 - RNA, 19 nt, Artificial Sequence
  Description of Artificial Sequence: Synthetic oligonucleotide
ggggaagauccucuuggcc

SEQ ID NO: 2216135 - RNA, 19 nt, Artificial Sequence
  Description of Artificial Sequence: Synthetic oligonucleotide
ggcaacugagcaucaauaa

SEQ ID NO: 2216136 - RNA, 19 nt, Artificial Sequence
  Description of Artificial Sequence: Synthetic oligonucleotide
cacguucucguacugcaga

SEQ ID NO: 2216137 - RNA, 19 nt, Artificial Sequence
  Description of Artificial Sequence: Synthetic oligonucleotide
uccuaagauggggaagauc

SEQ ID NO: 2216138 - RNA, 19 nt, Artificial Sequence
  Description of Artificial Sequence: Synthetic oligonucleotide
acguucucguacugcagaa

SEQ ID NO: 2216139 - RNA, 19 nt, Artificial Sequence
  Description of Artificial Sequence: Synthetic oligonucleotide
uccgggguaggcggggccg

SEQ ID NO: 2216140 - RNA, 19 nt, Artificial Sequence
  Description of Artificial Sequence: Synthetic oligonucleotide
ucggaggacuucucuuccu

SEQ ID NO: 2216141 - RNA, 19 nt, Artificial Sequence
  Description of Artificial Sequence: Synthetic oligonucleotide
agaagucgaucuagaagga

SEQ ID NO: 2216142 - RNA, 19 nt, Artificial Sequence
  Description of Artificial Sequence: Synthetic oligonucleotide
agccagcgagcucagguau

SEQ ID NO: 2216143 - RNA, 19 nt, Artificial Sequence
  Description of Artificial Sequence: Synthetic oligonucleotide
gcaacugagcaucaauaaa

SEQ ID NO: 2216144 - RNA, 19 nt, Artificial Sequence
  Description of Artificial Sequence: Synthetic oligonucleotide
gacaacuuggguguccccu

SEQ ID NO: 2216145 - RNA, 19 nt, Artificial Sequence
  Description of Artificial Sequence: Synthetic oligonucleotide
cucguacugcagaagucga

SEQ ID NO: 2216146 - RNA, 19 nt, Artificial Sequence
  Description of Artificial Sequence: Synthetic oligonucleotide
caucauccccgcugccugc

SEQ ID NO: 2216147 - RNA, 19 nt, Artificial Sequence
  Description of Artificial Sequence: Synthetic oligonucleotide
guggccgaagcauggcaac

SEQ ID NO: 2216148 - RNA, 19 nt, Artificial Sequence
  Description of Artificial Sequence: Synthetic oligonucleotide
uccccucugucucacuguu

SEQ ID NO: 2216149 - RNA, 19 nt, Artificial Sequence
  Description of Artificial Sequence: Synthetic oligonucleotide
gagaagcacugugcggggc

SEQ ID NO: 2216150 - RNA, 19 nt, Artificial Sequence
  Description of Artificial Sequence: Synthetic oligonucleotide
cugugcggggccuggcaag

SEQ ID NO: 2216151 - RNA, 19 nt, Artificial Sequence
  Description of Artificial Sequence: Synthetic oligonucleotide
caucugcugagggacggug

SEQ ID NO: 2216152 - RNA, 19 nt, Artificial Sequence
  Description of Artificial Sequence: Synthetic oligonucleotide
caagugugcuggcauggga

SEQ ID NO: 2216153 - RNA, 19 nt, Artificial Sequence
  Description of Artificial Sequence: Synthetic oligonucleotide
uuacgccuuuucugauugu

SEQ ID NO: 2216154 - RNA, 19 nt, Artificial Sequence
  Description of Artificial Sequence: Synthetic oligonucleotide
gaaucggaagaaucuucau

SEQ ID NO: 2216155 - RNA, 19 nt, Artificial Sequence
  Description of Artificial Sequence: Synthetic oligonucleotide
guagcacuggauggauggc

SEQ ID NO: 2216156 - RNA, 19 nt, Artificial Sequence
  Description of Artificial Sequence: Synthetic oligonucleotide
gauuaccaggucgucgucu

SEQ ID NO: 2216157 - RNA, 19 nt, Artificial Sequence
  Description of Artificial Sequence: Synthetic oligonucleotide
aguuuccgggguaggcggg

SEQ ID NO: 2216158 - RNA, 19 nt, Artificial Sequence
  Description of Artificial Sequence: Synthetic oligonucleotide
ucgucuccauccagggcau

SEQ ID NO: 2216159 - RNA, 19 nt, Artificial Sequence
  Description of Artificial Sequence: Synthetic oligonucleotide
ggacauuugugcauguuua

SEQ ID NO: 2216160 - RNA, 19 nt, Artificial Sequence
  Description of Artificial Sequence: Synthetic oligonucleotide
ccuuuaauacagagccuuc

SEQ ID NO: 2216161 - RNA, 19 nt, Artificial Sequence
  Description of Artificial Sequence: Synthetic oligonucleotide
agaaccccuggcagggaag

SEQ ID NO: 2216162 - RNA, 19 nt, Artificial Sequence
  Description of Artificial Sequence: Synthetic oligonucleotide
cuggcagggaaggccagug

SEQ ID NO: 2216163 - RNA, 19 nt, Artificial Sequence
  Description of Artificial Sequence: Synthetic oligonucleotide
cuaaagggacggccuccac

SEQ ID NO: 2216164 - RNA, 19 nt, Artificial Sequence
  Description of Artificial Sequence: Synthetic oligonucleotide
cuggcaugggagaagcacu

SEQ ID NO: 2216165 - RNA, 19 nt, Artificial Sequence
  Description of Artificial Sequence: Synthetic oligonucleotide
ugucgauuaccaggucguc

SEQ ID NO: 2216166 - RNA, 19 nt, Artificial Sequence
  Description of Artificial Sequence: Synthetic oligonucleotide
gaggucugcaggggaaauc

SEQ ID NO: 2216167 - RNA, 19 nt, Artificial Sequence
  Description of Artificial Sequence: Synthetic oligonucleotide
ugugcggggccuggcaagu

SEQ ID NO: 2216168 - RNA, 19 nt, Artificial Sequence
  Description of Artificial Sequence: Synthetic oligonucleotide
auggcuacucugggauguc

SEQ ID NO: 2216169 - RNA, 19 nt, Artificial Sequence
  Description of Artificial Sequence: Synthetic oligonucleotide
uggccgaagcauggcaacu

SEQ ID NO: 2216170 - RNA, 19 nt, Artificial Sequence
  Description of Artificial Sequence: Synthetic oligonucleotide
cuggaaggggauggggcac

SEQ ID NO: 2216171 - RNA, 19 nt, Artificial Sequence
  Description of Artificial Sequence: Synthetic oligonucleotide
gcaaguagcacuggaugga

SEQ ID NO: 2216172 - RNA, 19 nt, Artificial Sequence
  Description of Artificial Sequence: Synthetic oligonucleotide
gggcuggugugucagacaa

SEQ ID NO: 2216173 - RNA, 19 nt, Artificial Sequence
  Description of Artificial Sequence: Synthetic oligonucleotide
gccccagaaccccuggcag

SEQ ID NO: 2216174 - RNA, 19 nt, Artificial Sequence
  Description of Artificial Sequence: Synthetic oligonucleotide
cuaagauggggaagauccu

SEQ ID NO: 2216175 - RNA, 19 nt, Artificial Sequence
  Description of Artificial Sequence: Synthetic oligonucleotide
uuuccgggguaggcggggc

SEQ ID NO: 2216176 - RNA, 19 nt, Artificial Sequence
  Description of Artificial Sequence: Synthetic oligonucleotide
ccuggauggggcugggaug

SEQ ID NO: 2216177 - RNA, 19 nt, Artificial Sequence
  Description of Artificial Sequence: Synthetic oligonucleotide
cccagaaccccuggcaggg

SEQ ID NO: 2216178 - RNA, 19 nt, Artificial Sequence
  Description of Artificial Sequence: Synthetic oligonucleotide
caucuugaguuuccggggu

SEQ ID NO: 2216179 - RNA, 19 nt, Artificial Sequence
  Description of Artificial Sequence: Synthetic oligonucleotide
agcacuggauggauggcua

SEQ ID NO: 2216180 - RNA, 19 nt, Artificial Sequence
  Description of Artificial Sequence: Synthetic oligonucleotide
gcuggugugucagacaacu

SEQ ID NO: 2216181 - RNA, 19 nt, Artificial Sequence
  Description of Artificial Sequence: Synthetic oligonucleotide
ccaacacuggccccagaac

SEQ ID NO: 2216182 - RNA, 19 nt, Artificial Sequence
  Description of Artificial Sequence: Synthetic oligonucleotide
agcugcagggccagguagu

SEQ ID NO: 2216183 - RNA, 19 nt, Artificial Sequence
  Description of Artificial Sequence: Synthetic oligonucleotide
accuuccucggggacauuu

SEQ ID NO: 2216184 - RNA, 19 nt, Artificial Sequence
  Description of Artificial Sequence: Synthetic oligonucleotide
ccgaagcauggcaacugag

SEQ ID NO: 2216185 - RNA, 19 nt, Artificial Sequence
  Description of Artificial Sequence: Synthetic oligonucleotide
ggccacucauuuaaaucac

SEQ ID NO: 2216186 - RNA, 19 nt, Artificial Sequence
  Description of Artificial Sequence: Synthetic oligonucleotide
agaggucugcaggggaaau

SEQ ID NO: 2216187 - RNA, 19 nt, Artificial Sequence
  Description of Artificial Sequence: Synthetic oligonucleotide
guuuacgccuuuucugauu

SEQ ID NO: 2216188 - RNA, 19 nt, Artificial Sequence
  Description of Artificial Sequence: Synthetic oligonucleotide
gccugcaucgcugaacauc

SEQ ID NO: 2216189 - RNA, 19 nt, Artificial Sequence
  Description of Artificial Sequence: Synthetic oligonucleotide
gaaggggauggggcacccc

SEQ ID NO: 2216190 - RNA, 19 nt, Artificial Sequence
  Description of Artificial Sequence: Synthetic oligonucleotide
ccugcaucgcugaacaucu

SEQ ID NO: 2216191 - RNA, 19 nt, Artificial Sequence
  Description of Artificial Sequence: Synthetic oligonucleotide
gcgagcucagguaugggga

SEQ ID NO: 2216192 - RNA, 19 nt, Artificial Sequence
  Description of Artificial Sequence: Synthetic oligonucleotide
gggacauuugugcauguuu

SEQ ID NO: 2216193 - RNA, 19 nt, Artificial Sequence
  Description of Artificial Sequence: Synthetic oligonucleotide
ggucgucgucuccauccag

SEQ ID NO: 2216194 - RNA, 19 nt, Artificial Sequence
  Description of Artificial Sequence: Synthetic oligonucleotide
ccagguagucagaagggaa

SEQ ID NO: 2216195 - RNA, 19 nt, Artificial Sequence
  Description of Artificial Sequence: Synthetic oligonucleotide
cuggcaaguagcacuggau

SEQ ID NO: 2216196 - RNA, 19 nt, Artificial Sequence
  Description of Artificial Sequence: Synthetic oligonucleotide
cugccccaacacuggcccc

SEQ ID NO: 2216197 - RNA, 19 nt, Artificial Sequence
  Description of Artificial Sequence: Synthetic oligonucleotide
caggggaaauccuguugaa

SEQ ID NO: 2216198 - RNA, 19 nt, Artificial Sequence
  Description of Artificial Sequence: Synthetic oligonucleotide
aggcggggccguuucucca

SEQ ID NO: 2216199 - RNA, 19 nt, Artificial Sequence
  Description of Artificial Sequence: Synthetic oligonucleotide
gucgaucuagaaggaaacu

SEQ ID NO: 2216200 - RNA, 19 nt, Artificial Sequence
  Description of Artificial Sequence: Synthetic oligonucleotide
ggcggggccguuucuccag

SEQ ID NO: 2216201 - RNA, 19 nt, Artificial Sequence
  Description of Artificial Sequence: Synthetic oligonucleotide
cguacugcagaagucgauc

SEQ ID NO: 2216202 - RNA, 19 nt, Artificial Sequence
  Description of Artificial Sequence: Synthetic oligonucleotide
cauccccgcugccugcauc

SEQ ID NO: 2216203 - RNA, 19 nt, Artificial Sequence
  Description of Artificial Sequence: Synthetic oligonucleotide
gggccuggcaaguagcacu

SEQ ID NO: 2216204 - RNA, 19 nt, Artificial Sequence
  Description of Artificial Sequence: Synthetic oligonucleotide
cagaaccccuggcagggaa

SEQ ID NO: 2216205 - RNA, 19 nt, Artificial Sequence
  Description of Artificial Sequence: Synthetic oligonucleotide
ccuuccucggggacauuug

SEQ ID NO: 2216206 - RNA, 19 nt, Artificial Sequence
  Description of Artificial Sequence: Synthetic oligonucleotide
ggccccagaaccccuggca

SEQ ID NO: 2216207 - RNA, 19 nt, Artificial Sequence
  Description of Artificial Sequence: Synthetic oligonucleotide
gcacuggauggauggcuac

SEQ ID NO: 2216208 - RNA, 19 nt, Artificial Sequence
  Description of Artificial Sequence: Synthetic oligonucleotide
ccacguucucguacugcag

SEQ ID NO: 2216209 - RNA, 19 nt, Artificial Sequence
  Description of Artificial Sequence: Synthetic oligonucleotide
gcugccugcaucgcugaac

SEQ ID NO: 2216210 - RNA, 19 nt, Artificial Sequence
  Description of Artificial Sequence: Synthetic oligonucleotide
cagcgagcucagguauggg

SEQ ID NO: 2216211 - RNA, 19 nt, Artificial Sequence
  Description of Artificial Sequence: Synthetic oligonucleotide
cuggauggauggcuacucu

SEQ ID NO: 2216212 - RNA, 19 nt, Artificial Sequence
  Description of Artificial Sequence: Synthetic oligonucleotide
gucagacaacuuggguguc

SEQ ID NO: 2216213 - RNA, 19 nt, Artificial Sequence
  Description of Artificial Sequence: Synthetic oligonucleotide
ggcuacucugggaugucga

SEQ ID NO: 2216214 - RNA, 19 nt, Artificial Sequence
  Description of Artificial Sequence: Synthetic oligonucleotide
ggaugucgauuaccagguc

SEQ ID NO: 2216215 - RNA, 19 nt, Artificial Sequence
  Description of Artificial Sequence: Synthetic oligonucleotide
ggcaucuugggaggaggca

SEQ ID NO: 2216216 - RNA, 19 nt, Artificial Sequence
  Description of Artificial Sequence: Synthetic oligonucleotide
gcucuucuaaagggacggc

SEQ ID NO: 2216217 - RNA, 19 nt, Artificial Sequence
  Description of Artificial Sequence: Synthetic oligonucleotide
ggcucaagugugcuggcau

SEQ ID NO: 2216218 - RNA, 19 nt, Artificial Sequence
  Description of Artificial Sequence: Synthetic oligonucleotide
cgcugaacaucugcugagg

SEQ ID NO: 2216219 - RNA, 19 nt, Artificial Sequence
  Description of Artificial Sequence: Synthetic oligonucleotide
caaguagcacuggauggau

SEQ ID NO: 2216220 - RNA, 19 nt, Artificial Sequence
  Description of Artificial Sequence: Synthetic oligonucleotide
caguggcaucugaaucgga

SEQ ID NO: 2216221 - RNA, 19 nt, Artificial Sequence
  Description of Artificial Sequence: Synthetic oligonucleotide
ccucggggacauuugugca

SEQ ID NO: 2216222 - RNA, 19 nt, Artificial Sequence
  Description of Artificial Sequence: Synthetic oligonucleotide
caacuuggguguccccucu

SEQ ID NO: 2216223 - RNA, 19 nt, Artificial Sequence
  Description of Artificial Sequence: Synthetic oligonucleotide
ggguaggcggggccguuuc

SEQ ID NO: 2216224 - RNA, 19 nt, Artificial Sequence
  Description of Artificial Sequence: Synthetic oligonucleotide
gaagauccucuuggccacu

SEQ ID NO: 2216225 - RNA, 19 nt, Artificial Sequence
  Description of Artificial Sequence: Synthetic oligonucleotide
cguucucguacugcagaag

SEQ ID NO: 2216226 - RNA, 19 nt, Artificial Sequence
  Description of Artificial Sequence: Synthetic oligonucleotide
cggaggacuucucuuccuc

SEQ ID NO: 2216227 - RNA, 19 nt, Artificial Sequence
  Description of Artificial Sequence: Synthetic oligonucleotide
gccagcgagcucagguaug

SEQ ID NO: 2216228 - RNA, 19 nt, Artificial Sequence
  Description of Artificial Sequence: Synthetic oligonucleotide
gcuacucugggaugucgau

SEQ ID NO: 2216229 - RNA, 19 nt, Artificial Sequence
  Description of Artificial Sequence: Synthetic oligonucleotide
cuccacggggucucugccu

SEQ ID NO: 2216230 - RNA, 19 nt, Artificial Sequence
  Description of Artificial Sequence: Synthetic oligonucleotide
cgucgucuccauccagggc

SEQ ID NO: 2216231 - RNA, 19 nt, Artificial Sequence
  Description of Artificial Sequence: Synthetic oligonucleotide
gccuggcaaguagcacugg

SEQ ID NO: 2216232 - RNA, 19 nt, Artificial Sequence
  Description of Artificial Sequence: Synthetic oligonucleotide
gggcaucauccccgcugcc

SEQ ID NO: 2216233 - RNA, 19 nt, Artificial Sequence
  Description of Artificial Sequence: Synthetic oligonucleotide
gcggggccguuucuccagc

SEQ ID NO: 2216234 - RNA, 19 nt, Artificial Sequence
  Description of Artificial Sequence: Synthetic oligonucleotide
cuacagccaucuugaguuu

SEQ ID NO: 2216235 - RNA, 19 nt, Artificial Sequence
  Description of Artificial Sequence: Synthetic oligonucleotide
gccacucauuuaaaucacu

SEQ ID NO: 2216236 - RNA, 19 nt, Artificial Sequence
  Description of Artificial Sequence: Synthetic oligonucleotide
gccaacccuuuaauacaga

SEQ ID NO: 2216237 - RNA, 19 nt, Artificial Sequence
  Description of Artificial Sequence: Synthetic oligonucleotide
gacggccuccacggggucu

SEQ ID NO: 2216238 - RNA, 19 nt, Artificial Sequence
  Description of Artificial Sequence: Synthetic oligonucleotide
augugagggcagggccccu

SEQ ID NO: 2216239 - RNA, 19 nt, Artificial Sequence
  Description of Artificial Sequence: Synthetic oligonucleotide
gagggacggugcucaggau

SEQ ID NO: 2216240 - RNA, 19 nt, Artificial Sequence
  Description of Artificial Sequence: Synthetic oligonucleotide
ggcuggugugucagacaac

SEQ ID NO: 2216241 - RNA, 19 nt, Artificial Sequence
  Description of Artificial Sequence: Synthetic oligonucleotide
acggggucucugccuccua

SEQ ID NO: 2216242 - RNA, 19 nt, Artificial Sequence
  Description of Artificial Sequence: Synthetic oligonucleotide
cuggugugucagacaacuu

SEQ ID NO: 2216243 - RNA, 19 nt, Artificial Sequence
  Description of Artificial Sequence: Synthetic oligonucleotide
ccccugccaccuuccucgg

SEQ ID NO: 2216244 - RNA, 19 nt, Artificial Sequence
  Description of Artificial Sequence: Synthetic oligonucleotide
cgauuaccaggucgucguc

SEQ ID NO: 2216245 - RNA, 19 nt, Artificial Sequence
  Description of Artificial Sequence: Synthetic oligonucleotide
ccaucggaggacuucucuu

SEQ ID NO: 2216246 - RNA, 19 nt, Artificial Sequence
  Description of Artificial Sequence: Synthetic oligonucleotide
gggacggccuccacggggu

SEQ ID NO: 2216247 - RNA, 19 nt, Artificial Sequence
  Description of Artificial Sequence: Synthetic oligonucleotide
ggacggccuccacgggguc

SEQ ID NO: 2216248 - RNA, 19 nt, Artificial Sequence
  Description of Artificial Sequence: Synthetic oligonucleotide
cacggggucucugccuccu

SEQ ID NO: 2216249 - RNA, 19 nt, Artificial Sequence
  Description of Artificial Sequence: Synthetic oligonucleotide
ggccaguggcccacccaca

SEQ ID NO: 2216250 - RNA, 19 nt, Artificial Sequence
  Description of Artificial Sequence: Synthetic oligonucleotide
gugcggggccuggcaagua

SEQ ID NO: 2216251 - RNA, 19 nt, Artificial Sequence
  Description of Artificial Sequence: Synthetic oligonucleotide
cggggucucugccuccuaa

SEQ ID NO: 2216252 - RNA, 19 nt, Artificial Sequence
  Description of Artificial Sequence: Synthetic oligonucleotide
ccaccuuccucggggacau

SEQ ID NO: 2216253 - RNA, 19 nt, Artificial Sequence
  Description of Artificial Sequence: Synthetic oligonucleotide
ggacggugcucaggaucgu

SEQ ID NO: 2216254 - RNA, 19 nt, Artificial Sequence
  Description of Artificial Sequence: Synthetic oligonucleotide
gggguaggcggggccguuu

SEQ ID NO: 2216255 - RNA, 19 nt, Artificial Sequence
  Description of Artificial Sequence: Synthetic oligonucleotide
ccgggguaggcggggccgu

SEQ ID NO: 2216256 - RNA, 19 nt, Artificial Sequence
  Description of Artificial Sequence: Synthetic oligonucleotide
caccuuccucggggacauu

SEQ ID NO: 2216257 - RNA, 19 nt, Artificial Sequence
  Description of Artificial Sequence: Synthetic oligonucleotide
aaucuuauaggccucaucg

SEQ ID NO: 2216258 - RNA, 19 nt, Artificial Sequence
  Description of Artificial Sequence: Synthetic oligonucleotide
aagauaauggcuuccaggc

SEQ ID NO: 2216259 - RNA, 19 nt, Artificial Sequence
  Description of Artificial Sequence: Synthetic oligonucleotide
gaugauauuaggcacauug

SEQ ID NO: 2216260 - RNA, 19 nt, Artificial Sequence
  Description of Artificial Sequence: Synthetic oligonucleotide
aacugcauccuucagggcc

SEQ ID NO: 2216261 - RNA, 19 nt, Artificial Sequence
  Description of Artificial Sequence: Synthetic oligonucleotide
uguugauauagccaaaucc

SEQ ID NO: 2216262 - RNA, 19 nt, Artificial Sequence
  Description of Artificial Sequence: Synthetic oligonucleotide
uauccaaucuccuugauga

SEQ ID NO: 2216263 - RNA, 19 nt, Artificial Sequence
  Description of Artificial Sequence: Synthetic oligonucleotide
auugccgacuauuucaucc

SEQ ID NO: 2216264 - RNA, 19 nt, Artificial Sequence
  Description of Artificial Sequence: Synthetic oligonucleotide
ugagcaaacauuuugauuu

SEQ ID NO: 2216265 - RNA, 19 nt, Artificial Sequence
  Description of Artificial Sequence: Synthetic oligonucleotide
gaagguuuuacacacucgg

SEQ ID NO: 2216266 - RNA, 19 nt, Artificial Sequence
  Description of Artificial Sequence: Synthetic oligonucleotide
gauguuggcauccacacag

SEQ ID NO: 2216267 - RNA, 19 nt, Artificial Sequence
  Description of Artificial Sequence: Synthetic oligonucleotide
gaaugaugaucuuaugucg

SEQ ID NO: 2216268 - RNA, 19 nt, Artificial Sequence
  Description of Artificial Sequence: Synthetic oligonucleotide
uucucgaugacauucauga

SEQ ID NO: 2216269 - RNA, 19 nt, Artificial Sequence
  Description of Artificial Sequence: Synthetic oligonucleotide
ugggcugugaagauaaugg

SEQ ID NO: 2216270 - RNA, 19 nt, Artificial Sequence
  Description of Artificial Sequence: Synthetic oligonucleotide
gaagauaauggcuuccagg

SEQ ID NO: 2216271 - RNA, 19 nt, Artificial Sequence
  Description of Artificial Sequence: Synthetic oligonucleotide
uuugauuuuauuccucacc

SEQ ID NO: 2216272 - RNA, 19 nt, Artificial Sequence
  Description of Artificial Sequence: Synthetic oligonucleotide
caaguauucggccauaggg

SEQ ID NO: 2216273 - RNA, 19 nt, Artificial Sequence
  Description of Artificial Sequence: Synthetic oligonucleotide
ugauauuaggcacauugcc

SEQ ID NO: 2216274 - RNA, 19 nt, Artificial Sequence
  Description of Artificial Sequence: Synthetic oligonucleotide
uuggaguagauuuccaugg

SEQ ID NO: 2216275 - RNA, 19 nt, Artificial Sequence
  Description of Artificial Sequence: Synthetic oligonucleotide
uugauuuuauuccucacca

SEQ ID NO: 2216276 - RNA, 19 nt, Artificial Sequence
  Description of Artificial Sequence: Synthetic oligonucleotide
gaugauaucuucuggugag

SEQ ID NO: 2216277 - RNA, 19 nt, Artificial Sequence
  Description of Artificial Sequence: Synthetic oligonucleotide
aagcauuacaagccagagc

SEQ ID NO: 2216278 - RNA, 19 nt, Artificial Sequence
  Description of Artificial Sequence: Synthetic oligonucleotide
aaugaugaucuuaugucgg

SEQ ID NO: 2216279 - RNA, 19 nt, Artificial Sequence
  Description of Artificial Sequence: Synthetic oligonucleotide
gauauagccaaauccugag

SEQ ID NO: 2216280 - RNA, 19 nt, Artificial Sequence
  Description of Artificial Sequence: Synthetic oligonucleotide
uccaugguucuccugaggg

SEQ ID NO: 2216281 - RNA, 19 nt, Artificial Sequence
  Description of Artificial Sequence: Synthetic oligonucleotide
ugucugaagcauuacaagc

SEQ ID NO: 2216282 - RNA, 19 nt, Artificial Sequence
  Description of Artificial Sequence: Synthetic oligonucleotide
uuugucugaagcauuacaa

SEQ ID NO: 2216283 - RNA, 19 nt, Artificial Sequence
  Description of Artificial Sequence: Synthetic oligonucleotide
ugcauugagcuccagaacu

SEQ ID NO: 2216284 - RNA, 19 nt, Artificial Sequence
  Description of Artificial Sequence: Synthetic oligonucleotide
accuugaacacauucucac

SEQ ID NO: 2216285 - RNA, 19 nt, Artificial Sequence
  Description of Artificial Sequence: Synthetic oligonucleotide
aguguauccaaucuccuug

SEQ ID NO: 2216286 - RNA, 19 nt, Artificial Sequence
  Description of Artificial Sequence: Synthetic oligonucleotide
gauuuuauuccucaccaca

SEQ ID NO: 2216287 - RNA, 19 nt, Artificial Sequence
  Description of Artificial Sequence: Synthetic oligonucleotide
ucuuaugucggcccuuggg

SEQ ID NO: 2216288 - RNA, 19 nt, Artificial Sequence
  Description of Artificial Sequence: Synthetic oligonucleotide
cucgaugacauucaugagc

SEQ ID NO: 2216289 - RNA, 19 nt, Artificial Sequence
  Description of Artificial Sequence: Synthetic oligonucleotide
ugauauagccaaauccuga

SEQ ID NO: 2216290 - RNA, 19 nt, Artificial Sequence
  Description of Artificial Sequence: Synthetic oligonucleotide
aaaauguugcugaugauau

SEQ ID NO: 2216291 - RNA, 19 nt, Artificial Sequence
  Description of Artificial Sequence: Synthetic oligonucleotide
cuugcuaagcagaggaugc

SEQ ID NO: 2216292 - RNA, 19 nt, Artificial Sequence
  Description of Artificial Sequence: Synthetic oligonucleotide
uugauauagccaaauccug

SEQ ID NO: 2216293 - RNA, 19 nt, Artificial Sequence
  Description of Artificial Sequence: Synthetic oligonucleotide
agcgaugaugauauuaggc

SEQ ID NO: 2216294 - RNA, 19 nt, Artificial Sequence
  Description of Artificial Sequence: Synthetic oligonucleotide
ugaugauaucuucugguga

SEQ ID NO: 2216295 - RNA, 19 nt, Artificial Sequence
  Description of Artificial Sequence: Synthetic oligonucleotide
acagaccuugaacacauuc

SEQ ID NO: 2216296 - RNA, 19 nt, Artificial Sequence
  Description of Artificial Sequence: Synthetic oligonucleotide
cauagggaagguuuuacac

SEQ ID NO: 2216297 - RNA, 19 nt, Artificial Sequence
  Description of Artificial Sequence: Synthetic oligonucleotide
gaugcauugagcuccagaa

SEQ ID NO: 2216298 - RNA, 19 nt, Artificial Sequence
  Description of Artificial Sequence: Synthetic oligonucleotide
uugucugaagcauuacaag

SEQ ID NO: 2216299 - RNA, 19 nt, Artificial Sequence
  Description of Artificial Sequence: Synthetic oligonucleotide
agauaauggcuuccaggcc

SEQ ID NO: 2216300 - RNA, 19 nt, Artificial Sequence
  Description of Artificial Sequence: Synthetic oligonucleotide
ugcaaagaccucuagccug

SEQ ID NO: 2216301 - RNA, 19 nt, Artificial Sequence
  Description of Artificial Sequence: Synthetic oligonucleotide
ggcucuaugauuuugucug

SEQ ID NO: 2216302 - RNA, 19 nt, Artificial Sequence
  Description of Artificial Sequence: Synthetic oligonucleotide
aaauguugcugaugauauc

SEQ ID NO: 2216303 - RNA, 19 nt, Artificial Sequence
  Description of Artificial Sequence: Synthetic oligonucleotide
uagggaagguuuuacacac

SEQ ID NO: 2216304 - RNA, 19 nt, Artificial Sequence
  Description of Artificial Sequence: Synthetic oligonucleotide
ugaagcauuacaagccaga

SEQ ID NO: 2216305 - RNA, 19 nt, Artificial Sequence
  Description of Artificial Sequence: Synthetic oligonucleotide
uugagcaucggugagcuug

SEQ ID NO: 2216306 - RNA, 19 nt, Artificial Sequence
  Description of Artificial Sequence: Synthetic oligonucleotide
ucuaugauuuugucugaag

SEQ ID NO: 2216307 - RNA, 19 nt, Artificial Sequence
  Description of Artificial Sequence: Synthetic oligonucleotide
ucuuauaggccucaucgau

SEQ ID NO: 2216308 - RNA, 19 nt, Artificial Sequence
  Description of Artificial Sequence: Synthetic oligonucleotide
ucaaguauucggccauagg

SEQ ID NO: 2216309 - RNA, 19 nt, Artificial Sequence
  Description of Artificial Sequence: Synthetic oligonucleotide
augauauuaggcacauugc

SEQ ID NO: 2216310 - RNA, 19 nt, Artificial Sequence
  Description of Artificial Sequence: Synthetic oligonucleotide
ucucacuguugauauagcc

SEQ ID NO: 2216311 - RNA, 19 nt, Artificial Sequence
  Description of Artificial Sequence: Synthetic oligonucleotide
ugcugaugauaucuucugg

SEQ ID NO: 2216312 - RNA, 19 nt, Artificial Sequence
  Description of Artificial Sequence: Synthetic oligonucleotide
gauaucuucuggugaguag

SEQ ID NO: 2216313 - RNA, 19 nt, Artificial Sequence
  Description of Artificial Sequence: Synthetic oligonucleotide
uuucaugugaguguaucca

SEQ ID NO: 2216314 - RNA, 19 nt, Artificial Sequence
  Description of Artificial Sequence: Synthetic oligonucleotide
gaugacauucaugagccug

SEQ ID NO: 2216315 - RNA, 19 nt, Artificial Sequence
  Description of Artificial Sequence: Synthetic oligonucleotide
ugaagauaauggcuuccag

SEQ ID NO: 2216316 - RNA, 19 nt, Artificial Sequence
  Description of Artificial Sequence: Synthetic oligonucleotide
uagauuuccaugguucucc

SEQ ID NO: 2216317 - RNA, 19 nt, Artificial Sequence
  Description of Artificial Sequence: Synthetic oligonucleotide
auagggaagguuuuacaca

SEQ ID NO: 2216318 - RNA, 19 nt, Artificial Sequence
  Description of Artificial Sequence: Synthetic oligonucleotide
cuuucaugugaguguaucc

SEQ ID NO: 2216319 - RNA, 19 nt, Artificial Sequence
  Description of Artificial Sequence: Synthetic oligonucleotide
agcaccaucugucaugcug

SEQ ID NO: 2216320 - RNA, 19 nt, Artificial Sequence
  Description of Artificial Sequence: Synthetic oligonucleotide
auauuaggcacauugccuu

SEQ ID NO: 2216321 - RNA, 19 nt, Artificial Sequence
  Description of Artificial Sequence: Synthetic oligonucleotide
aguuucaaguauucggcca

SEQ ID NO: 2216322 - RNA, 19 nt, Artificial Sequence
  Description of Artificial Sequence: Synthetic oligonucleotide
agccauggucuucugacac

SEQ ID NO: 2216323 - RNA, 19 nt, Artificial Sequence
  Description of Artificial Sequence: Synthetic oligonucleotide
acucggaaaauguugcuga

SEQ ID NO: 2216324 - RNA, 19 nt, Artificial Sequence
  Description of Artificial Sequence: Synthetic oligonucleotide
uguagcggagcacugcaca

SEQ ID NO: 2216325 - RNA, 19 nt, Artificial Sequence
  Description of Artificial Sequence: Synthetic oligonucleotide
aaguauucggccauaggga

SEQ ID NO: 2216326 - RNA, 19 nt, Artificial Sequence
  Description of Artificial Sequence: Synthetic oligonucleotide
ucuucuggugaguagccca

SEQ ID NO: 2216327 - RNA, 19 nt, Artificial Sequence
  Description of Artificial Sequence: Synthetic oligonucleotide
aguuguucagugccuggcg

SEQ ID NO: 2216328 - RNA, 19 nt, Artificial Sequence
  Description of Artificial Sequence: Synthetic oligonucleotide
gaagcauuacaagccagag

SEQ ID NO: 2216329 - RNA, 19 nt, Artificial Sequence
  Description of Artificial Sequence: Synthetic oligonucleotide
uuuugauuuuauuccucac

SEQ ID NO: 2216330 - RNA, 19 nt, Artificial Sequence
  Description of Artificial Sequence: Synthetic oligonucleotide
gaugcugguagucuugcca

SEQ ID NO: 2216331 - RNA, 19 nt, Artificial Sequence
  Description of Artificial Sequence: Synthetic oligonucleotide
aauccugagaagguagacu

SEQ ID NO: 2216332 - RNA, 19 nt, Artificial Sequence
  Description of Artificial Sequence: Synthetic oligonucleotide
agguuuuacacacucggaa

SEQ ID NO: 2216333 - RNA, 19 nt, Artificial Sequence
  Description of Artificial Sequence: Synthetic oligonucleotide
uuacaagccagagcaaagc

SEQ ID NO: 2216334 - RNA, 19 nt, Artificial Sequence
  Description of Artificial Sequence: Synthetic oligonucleotide
aagcgggucgucuuggagu

SEQ ID NO: 2216335 - RNA, 19 nt, Artificial Sequence
  Description of Artificial Sequence: Synthetic oligonucleotide
aaagcgggucgucuuggag

SEQ ID NO: 2216336 - RNA, 19 nt, Artificial Sequence
  Description of Artificial Sequence: Synthetic oligonucleotide
cucaucacagaccuugaac

SEQ ID NO: 2216337 - RNA, 19 nt, Artificial Sequence
  Description of Artificial Sequence: Synthetic oligonucleotide
uuauuccucaccacaucga

SEQ ID NO: 2216338 - RNA, 19 nt, Artificial Sequence
  Description of Artificial Sequence: Synthetic oligonucleotide
uugcugaugauaucuucug

SEQ ID NO: 2216339 - RNA, 19 nt, Artificial Sequence
  Description of Artificial Sequence: Synthetic oligonucleotide
gucugaagcauuacaagcc

SEQ ID NO: 2216340 - RNA, 19 nt, Artificial Sequence
  Description of Artificial Sequence: Synthetic oligonucleotide
cauucaugagccuggugag

SEQ ID NO: 2216341 - RNA, 19 nt, Artificial Sequence
  Description of Artificial Sequence: Synthetic oligonucleotide
ugcacagcgugacuggaug

SEQ ID NO: 2216342 - RNA, 19 nt, Artificial Sequence
  Description of Artificial Sequence: Synthetic oligonucleotide
gaggacuugagcaucggug

SEQ ID NO: 2216343 - RNA, 19 nt, Artificial Sequence
  Description of Artificial Sequence: Synthetic oligonucleotide
gaaaauguugcugaugaua

SEQ ID NO: 2216344 - RNA, 19 nt, Artificial Sequence
  Description of Artificial Sequence: Synthetic oligonucleotide
ucacagaccuugaacacau

SEQ ID NO: 2216345 - RNA, 19 nt, Artificial Sequence
  Description of Artificial Sequence: Synthetic oligonucleotide
augcauugagcuccagaac

SEQ ID NO: 2216346 - RNA, 19 nt, Artificial Sequence
  Description of Artificial Sequence: Synthetic oligonucleotide
gacuggaugggcucuauga

SEQ ID NO: 2216347 - RNA, 19 nt, Artificial Sequence
  Description of Artificial Sequence: Synthetic oligonucleotide
gugaguguauccaaucucc

SEQ ID NO: 2216348 - RNA, 19 nt, Artificial Sequence
  Description of Artificial Sequence: Synthetic oligonucleotide
cuucacaagcagugggugg

SEQ ID NO: 2216349 - RNA, 19 nt, Artificial Sequence
  Description of Artificial Sequence: Synthetic oligonucleotide
gaguagauuuccaugguuc

SEQ ID NO: 2216350 - RNA, 19 nt, Artificial Sequence
  Description of Artificial Sequence: Synthetic oligonucleotide
aagguagacugcaaguugu

SEQ ID NO: 2216351 - RNA, 19 nt, Artificial Sequence
  Description of Artificial Sequence: Synthetic oligonucleotide
uugcaaagaccucuagccu

SEQ ID NO: 2216352 - RNA, 19 nt, Artificial Sequence
  Description of Artificial Sequence: Synthetic oligonucleotide
agcggagcacugcacagcg

SEQ ID NO: 2216353 - RNA, 19 nt, Artificial Sequence
  Description of Artificial Sequence: Synthetic oligonucleotide
aguauucggccauagggaa

SEQ ID NO: 2216354 - RNA, 19 nt, Artificial Sequence
  Description of Artificial Sequence: Synthetic oligonucleotide
uaggugagcaagaaucuua

SEQ ID NO: 2216355 - RNA, 19 nt, Artificial Sequence
  Description of Artificial Sequence: Synthetic oligonucleotide
uaugucggcccuugggaag

SEQ ID NO: 2216356 - RNA, 19 nt, Artificial Sequence
  Description of Artificial Sequence: Synthetic oligonucleotide
cauuuugauuuuauuccuc

SEQ ID NO: 2216357 - RNA, 19 nt, Artificial Sequence
  Description of Artificial Sequence: Synthetic oligonucleotide
augugaguguauccaaucu

SEQ ID NO: 2216358 - RNA, 19 nt, Artificial Sequence
  Description of Artificial Sequence: Synthetic oligonucleotide
uauuucauccagcuuuauu

SEQ ID NO: 2216359 - RNA, 19 nt, Artificial Sequence
  Description of Artificial Sequence: Synthetic oligonucleotide
ugauuuuauuccucaccac

SEQ ID NO: 2216360 - RNA, 19 nt, Artificial Sequence
  Description of Artificial Sequence: Synthetic oligonucleotide
caguuucaaguauucggcc

SEQ ID NO: 2216361 - RNA, 19 nt, Artificial Sequence
  Description of Artificial Sequence: Synthetic oligonucleotide
ugugucuucauugccgacu

SEQ ID NO: 2216362 - RNA, 19 nt, Artificial Sequence
  Description of Artificial Sequence: Synthetic oligonucleotide
ucggccauagggaagguuu

SEQ ID NO: 2216363 - RNA, 19 nt, Artificial Sequence
  Description of Artificial Sequence: Synthetic oligonucleotide
guauccaaucuccuugaug

SEQ ID NO: 2216364 - RNA, 19 nt, Artificial Sequence
  Description of Artificial Sequence: Synthetic oligonucleotide
uuuucaacccacggcagcu

SEQ ID NO: 2216365 - RNA, 19 nt, Artificial Sequence
  Description of Artificial Sequence: Synthetic oligonucleotide
ugaguguauccaaucuccu

SEQ ID NO: 2216366 - RNA, 19 nt, Artificial Sequence
  Description of Artificial Sequence: Synthetic oligonucleotide
auuacaagccagagcaaag

SEQ ID NO: 2216367 - RNA, 19 nt, Artificial Sequence
  Description of Artificial Sequence: Synthetic oligonucleotide
ugagcaccaucugucaugc

SEQ ID NO: 2216368 - RNA, 19 nt, Artificial Sequence
  Description of Artificial Sequence: Synthetic oligonucleotide
caugugaguguauccaauc

SEQ ID NO: 2216369 - RNA, 19 nt, Artificial Sequence
  Description of Artificial Sequence: Synthetic oligonucleotide
ugaugaucuuaugucggcc

SEQ ID NO: 2216370 - RNA, 19 nt, Artificial Sequence
  Description of Artificial Sequence: Synthetic oligonucleotide
acaagccagagcaaagcgg

SEQ ID NO: 2216371 - RNA, 19 nt, Artificial Sequence
  Description of Artificial Sequence: Synthetic oligonucleotide
uuuccaugguucuccugag

SEQ ID NO: 2216372 - RNA, 19 nt, Artificial Sequence
  Description of Artificial Sequence: Synthetic oligonucleotide
acugugucuucauugccga

SEQ ID NO: 2216373 - RNA, 19 nt, Artificial Sequence
  Description of Artificial Sequence: Synthetic oligonucleotide
uuccaugguucuccugagg

SEQ ID NO: 2216374 - RNA, 19 nt, Artificial Sequence
  Description of Artificial Sequence: Synthetic oligonucleotide
cauuugaugcauugagcuc

SEQ ID NO: 2216375 - RNA, 19 nt, Artificial Sequence
  Description of Artificial Sequence: Synthetic oligonucleotide
ugauuuugucugaagcauu

SEQ ID NO: 2216376 - RNA, 19 nt, Artificial Sequence
  Description of Artificial Sequence: Synthetic oligonucleotide
aauggcuuccaggccauca

SEQ ID NO: 2216377 - RNA, 19 nt, Artificial Sequence
  Description of Artificial Sequence: Synthetic oligonucleotide
ucauugccgacuauuucau

SEQ ID NO: 2216378 - RNA, 19 nt, Artificial Sequence
  Description of Artificial Sequence: Synthetic oligonucleotide
ggugccauaggugagcaag

SEQ ID NO: 2216379 - RNA, 19 nt, Artificial Sequence
  Description of Artificial Sequence: Synthetic oligonucleotide
cuuaugucggcccuuggga

SEQ ID NO: 2216380 - RNA, 19 nt, Artificial Sequence
  Description of Artificial Sequence: Synthetic oligonucleotide
gauauuaggcacauugccu

SEQ ID NO: 2216381 - RNA, 19 nt, Artificial Sequence
  Description of Artificial Sequence: Synthetic oligonucleotide
aucuuauaggccucaucga

SEQ ID NO: 2216382 - RNA, 19 nt, Artificial Sequence
  Description of Artificial Sequence: Synthetic oligonucleotide
auauagccaaauccugaga

SEQ ID NO: 2216383 - RNA, 19 nt, Artificial Sequence
  Description of Artificial Sequence: Synthetic oligonucleotide
gaaucuuauaggccucauc

SEQ ID NO: 2216384 - RNA, 19 nt, Artificial Sequence
  Description of Artificial Sequence: Synthetic oligonucleotide
aagaaucuuauaggccuca

SEQ ID NO: 2216385 - RNA, 19 nt, Artificial Sequence
  Description of Artificial Sequence: Synthetic oligonucleotide
cugaagcauuacaagccag

SEQ ID NO: 2216386 - RNA, 19 nt, Artificial Sequence
  Description of Artificial Sequence: Synthetic oligonucleotide
uucucacuguugauauagc

SEQ ID NO: 2216387 - RNA, 19 nt, Artificial Sequence
  Description of Artificial Sequence: Synthetic oligonucleotide
uuaugucggcccuugggaa

SEQ ID NO: 2216388 - RNA, 19 nt, Artificial Sequence
  Description of Artificial Sequence: Synthetic oligonucleotide
uggaguagauuuccauggu

SEQ ID NO: 2216389 - RNA, 19 nt, Artificial Sequence
  Description of Artificial Sequence: Synthetic oligonucleotide
cugagcaccaucugucaug

SEQ ID NO: 2216390 - RNA, 19 nt, Artificial Sequence
  Description of Artificial Sequence: Synthetic oligonucleotide
ccagcgaugaugauauuag

SEQ ID NO: 2216391 - RNA, 19 nt, Artificial Sequence
  Description of Artificial Sequence: Synthetic oligonucleotide
ugucaugcugucugcuuca

SEQ ID NO: 2216392 - RNA, 19 nt, Artificial Sequence
  Description of Artificial Sequence: Synthetic oligonucleotide
ucucgaugacauucaugag

SEQ ID NO: 2216393 - RNA, 19 nt, Artificial Sequence
  Description of Artificial Sequence: Synthetic oligonucleotide
agaccucuagccugcucac

SEQ ID NO: 2216394 - RNA, 19 nt, Artificial Sequence
  Description of Artificial Sequence: Synthetic oligonucleotide
uugccgacuauuucaucca

SEQ ID NO: 2216395 - RNA, 19 nt, Artificial Sequence
  Description of Artificial Sequence: Synthetic oligonucleotide
agcgugacuggaugggcuc

SEQ ID NO: 2216396 - RNA, 19 nt, Artificial Sequence
  Description of Artificial Sequence: Synthetic oligonucleotide
gugagcuugguguagcgga

SEQ ID NO: 2216397 - RNA, 19 nt, Artificial Sequence
  Description of Artificial Sequence: Synthetic oligonucleotide
uugagcuccagaacugcau

SEQ ID NO: 2216398 - RNA, 19 nt, Artificial Sequence
  Description of Artificial Sequence: Synthetic oligonucleotide
uuuuacacacucggaaaau

SEQ ID NO: 2216399 - RNA, 19 nt, Artificial Sequence
  Description of Artificial Sequence: Synthetic oligonucleotide
uuguucagugccuggcgca

SEQ ID NO: 2216400 - RNA, 19 nt, Artificial Sequence
  Description of Artificial Sequence: Synthetic oligonucleotide
ucgucuuggaguagauuuc

SEQ ID NO: 2216401 - RNA, 19 nt, Artificial Sequence
  Description of Artificial Sequence: Synthetic oligonucleotide
acacacucggaaaauguug

SEQ ID NO: 2216402 - RNA, 19 nt, Artificial Sequence
  Description of Artificial Sequence: Synthetic oligonucleotide
cuucucgaugacauucaug

SEQ ID NO: 2216403 - RNA, 19 nt, Artificial Sequence
  Description of Artificial Sequence: Synthetic oligonucleotide
cagcgaugaugauauuagg

SEQ ID NO: 2216404 - RNA, 19 nt, Artificial Sequence
  Description of Artificial Sequence: Synthetic oligonucleotide
acugcauccuucagggccg

SEQ ID NO: 2216405 - RNA, 19 nt, Artificial Sequence
  Description of Artificial Sequence: Synthetic oligonucleotide
cacggcagcucguaguggc

SEQ ID NO: 2216406 - RNA, 19 nt, Artificial Sequence
  Description of Artificial Sequence: Synthetic oligonucleotide
augaucuuaugucggcccu

SEQ ID NO: 2216407 - RNA, 19 nt, Artificial Sequence
  Description of Artificial Sequence: Synthetic oligonucleotide
cacaccuucugccacuuuc

SEQ ID NO: 2216408 - RNA, 19 nt, Artificial Sequence
  Description of Artificial Sequence: Synthetic oligonucleotide
ugaacacauucucacuguu

SEQ ID NO: 2216409 - RNA, 19 nt, Artificial Sequence
  Description of Artificial Sequence: Synthetic oligonucleotide
ugccgacuauuucauccag

SEQ ID NO: 2216410 - RNA, 19 nt, Artificial Sequence
  Description of Artificial Sequence: Synthetic oligonucleotide
aagguuuuacacacucgga

SEQ ID NO: 2216411 - RNA, 19 nt, Artificial Sequence
  Description of Artificial Sequence: Synthetic oligonucleotide
gaagggugacuuucugcug

SEQ ID NO: 2216412 - RNA, 19 nt, Artificial Sequence
  Description of Artificial Sequence: Synthetic oligonucleotide
cuugggaagggugacuuuc

SEQ ID NO: 2216413 - RNA, 19 nt, Artificial Sequence
  Description of Artificial Sequence: Synthetic oligonucleotide
ugaggacuugagcaucggu

SEQ ID NO: 2216414 - RNA, 19 nt, Artificial Sequence
  Description of Artificial Sequence: Synthetic oligonucleotide
acuugagcaucggugagcu

SEQ ID NO: 2216415 - RNA, 19 nt, Artificial Sequence
  Description of Artificial Sequence: Synthetic oligonucleotide
guagcggagcacugcacag

SEQ ID NO: 2216416 - RNA, 19 nt, Artificial Sequence
  Description of Artificial Sequence: Synthetic oligonucleotide
uauuaggcacauugccuuc

SEQ ID NO: 2216417 - RNA, 19 nt, Artificial Sequence
  Description of Artificial Sequence: Synthetic oligonucleotide
cagaaugaugaucuuaugu

SEQ ID NO: 2216418 - RNA, 19 nt, Artificial Sequence
  Description of Artificial Sequence: Synthetic oligonucleotide
ucggaaaauguugcugaug

SEQ ID NO: 2216419 - RNA, 19 nt, Artificial Sequence
  Description of Artificial Sequence: Synthetic oligonucleotide
acagcgugacuggaugggc

SEQ ID NO: 2216420 - RNA, 19 nt, Artificial Sequence
  Description of Artificial Sequence: Synthetic oligonucleotide
gaugggcucuaugauuuug

SEQ ID NO: 2216421 - RNA, 19 nt, Artificial Sequence
  Description of Artificial Sequence: Synthetic oligonucleotide
uggcgcauguccccuuggg

SEQ ID NO: 2216422 - RNA, 19 nt, Artificial Sequence
  Description of Artificial Sequence: Synthetic oligonucleotide
uugggaagggugacuuucu

SEQ ID NO: 2216423 - RNA, 19 nt, Artificial Sequence
  Description of Artificial Sequence: Synthetic oligonucleotide
agaagguagacugcaaguu

SEQ ID NO: 2216424 - RNA, 19 nt, Artificial Sequence
  Description of Artificial Sequence: Synthetic oligonucleotide
gaucuuaugucggcccuug

SEQ ID NO: 2216425 - RNA, 19 nt, Artificial Sequence
  Description of Artificial Sequence: Synthetic oligonucleotide
acuguugauauagccaaau

SEQ ID NO: 2216426 - RNA, 19 nt, Artificial Sequence
  Description of Artificial Sequence: Synthetic oligonucleotide
ggugacuuucugcugagca

SEQ ID NO: 2216427 - RNA, 19 nt, Artificial Sequence
  Description of Artificial Sequence: Synthetic oligonucleotide
ucuagccugcucacugugu

SEQ ID NO: 2216428 - RNA, 19 nt, Artificial Sequence
  Description of Artificial Sequence: Synthetic oligonucleotide
cucaucgauguuggcaucc

SEQ ID NO: 2216429 - RNA, 19 nt, Artificial Sequence
  Description of Artificial Sequence: Synthetic oligonucleotide
cuguugauauagccaaauc

SEQ ID NO: 2216430 - RNA, 19 nt, Artificial Sequence
  Description of Artificial Sequence: Synthetic oligonucleotide
aucuguguaugguacuuuu

SEQ ID NO: 2216431 - RNA, 19 nt, Artificial Sequence
  Description of Artificial Sequence: Synthetic oligonucleotide
ugauaucuucuggugagua

SEQ ID NO: 2216432 - RNA, 19 nt, Artificial Sequence
  Description of Artificial Sequence: Synthetic oligonucleotide
cuagccugcucacuguguc

SEQ ID NO: 2216433 - RNA, 19 nt, Artificial Sequence
  Description of Artificial Sequence: Synthetic oligonucleotide
gcagcaaggaguucacacc

SEQ ID NO: 2216434 - RNA, 19 nt, Artificial Sequence
  Description of Artificial Sequence: Synthetic oligonucleotide
gucgucuuggaguagauuu

SEQ ID NO: 2216435 - RNA, 19 nt, Artificial Sequence
  Description of Artificial Sequence: Synthetic oligonucleotide
aacuccaguuucaaguauu

SEQ ID NO: 2216436 - RNA, 19 nt, Artificial Sequence
  Description of Artificial Sequence: Synthetic oligonucleotide
ccuggugaggacuugagca

SEQ ID NO: 2216437 - RNA, 19 nt, Artificial Sequence
  Description of Artificial Sequence: Synthetic oligonucleotide
uugguguagcggagcacug

SEQ ID NO: 2216438 - RNA, 19 nt, Artificial Sequence
  Description of Artificial Sequence: Synthetic oligonucleotide
acaagcaguggguggggcu

SEQ ID NO: 2216439 - RNA, 19 nt, Artificial Sequence
  Description of Artificial Sequence: Synthetic oligonucleotide
agcagcgcucuugcuaagc

SEQ ID NO: 2216440 - RNA, 19 nt, Artificial Sequence
  Description of Artificial Sequence: Synthetic oligonucleotide
agccagagcaaagcggguc

SEQ ID NO: 2216441 - RNA, 19 nt, Artificial Sequence
  Description of Artificial Sequence: Synthetic oligonucleotide
ucggcccuugggaagggug

SEQ ID NO: 2216442 - RNA, 19 nt, Artificial Sequence
  Description of Artificial Sequence: Synthetic oligonucleotide
cacucggaaaauguugcug

SEQ ID NO: 2216443 - RNA, 19 nt, Artificial Sequence
  Description of Artificial Sequence: Synthetic oligonucleotide
ugaugaacuccaguuucaa

SEQ ID NO: 2216444 - RNA, 19 nt, Artificial Sequence
  Description of Artificial Sequence: Synthetic oligonucleotide
ugacuggaugggcucuaug

SEQ ID NO: 2216445 - RNA, 19 nt, Artificial Sequence
  Description of Artificial Sequence: Synthetic oligonucleotide
aucuuaugucggcccuugg

SEQ ID NO: 2216446 - RNA, 19 nt, Artificial Sequence
  Description of Artificial Sequence: Synthetic oligonucleotide
uccagcuuuauuggucugu

SEQ ID NO: 2216447 - RNA, 19 nt, Artificial Sequence
  Description of Artificial Sequence: Synthetic oligonucleotide
cacagcgugacuggauggg

SEQ ID NO: 2216448 - RNA, 19 nt, Artificial Sequence
  Description of Artificial Sequence: Synthetic oligonucleotide
aguagcccaggugccauag

SEQ ID NO: 2216449 - RNA, 19 nt, Artificial Sequence
  Description of Artificial Sequence: Synthetic oligonucleotide
gacauucaugagccuggug

SEQ ID NO: 2216450 - RNA, 19 nt, Artificial Sequence
  Description of Artificial Sequence: Synthetic oligonucleotide
uguauccaaucuccuugau

SEQ ID NO: 2216451 - RNA, 19 nt, Artificial Sequence
  Description of Artificial Sequence: Synthetic oligonucleotide
gggaagguuuuacacacuc

SEQ ID NO: 2216452 - RNA, 19 nt, Artificial Sequence
  Description of Artificial Sequence: Synthetic oligonucleotide
cuucugacacagccuggcc

SEQ ID NO: 2216453 - RNA, 19 nt, Artificial Sequence
  Description of Artificial Sequence: Synthetic oligonucleotide
gccagagcaaagcgggucg

SEQ ID NO: 2216454 - RNA, 19 nt, Artificial Sequence
  Description of Artificial Sequence: Synthetic oligonucleotide
guguauccaaucuccuuga

SEQ ID NO: 2216455 - RNA, 19 nt, Artificial Sequence
  Description of Artificial Sequence: Synthetic oligonucleotide
agagcaaagcgggucgucu

SEQ ID NO: 2216456 - RNA, 19 nt, Artificial Sequence
  Description of Artificial Sequence: Synthetic oligonucleotide
aacccacggcagcucguag

SEQ ID NO: 2216457 - RNA, 19 nt, Artificial Sequence
  Description of Artificial Sequence: Synthetic oligonucleotide
acacucggaaaauguugcu

SEQ ID NO: 2216458 - RNA, 19 nt, Artificial Sequence
  Description of Artificial Sequence: Synthetic oligonucleotide
cauuacaagccagagcaaa

SEQ ID NO: 2216459 - RNA, 19 nt, Artificial Sequence
  Description of Artificial Sequence: Synthetic oligonucleotide
auuaggcacauugccuucu

SEQ ID NO: 2216460 - RNA, 19 nt, Artificial Sequence
  Description of Artificial Sequence: Synthetic oligonucleotide
gggcugugaagauaauggc

SEQ ID NO: 2216461 - RNA, 19 nt, Artificial Sequence
  Description of Artificial Sequence: Synthetic oligonucleotide
cauaggugagcaagaaucu

SEQ ID NO: 2216462 - RNA, 19 nt, Artificial Sequence
  Description of Artificial Sequence: Synthetic oligonucleotide
ccugucauuugaugcauug

SEQ ID NO: 2216463 - RNA, 19 nt, Artificial Sequence
  Description of Artificial Sequence: Synthetic oligonucleotide
gugaagauaauggcuucca

SEQ ID NO: 2216464 - RNA, 19 nt, Artificial Sequence
  Description of Artificial Sequence: Synthetic oligonucleotide
agcgcucuugcuaagcaga

SEQ ID NO: 2216465 - RNA, 19 nt, Artificial Sequence
  Description of Artificial Sequence: Synthetic oligonucleotide
guauucggccauagggaag

SEQ ID NO: 2216466 - RNA, 19 nt, Artificial Sequence
  Description of Artificial Sequence: Synthetic oligonucleotide
accagcgaugaugauauua

SEQ ID NO: 2216467 - RNA, 19 nt, Artificial Sequence
  Description of Artificial Sequence: Synthetic oligonucleotide
gggaagggugacuuucugc

SEQ ID NO: 2216468 - RNA, 19 nt, Artificial Sequence
  Description of Artificial Sequence: Synthetic oligonucleotide
ggugaggacuugagcaucg

SEQ ID NO: 2216469 - RNA, 19 nt, Artificial Sequence
  Description of Artificial Sequence: Synthetic oligonucleotide
gggcucaucacagaccuug

SEQ ID NO: 2216470 - RNA, 19 nt, Artificial Sequence
  Description of Artificial Sequence: Synthetic oligonucleotide
gguggggcucaucacagac

SEQ ID NO: 2216471 - RNA, 19 nt, Artificial Sequence
  Description of Artificial Sequence: Synthetic oligonucleotide
ugguguagcggagcacugc

SEQ ID NO: 2216472 - RNA, 19 nt, Artificial Sequence
  Description of Artificial Sequence: Synthetic oligonucleotide
guggguggggcucaucaca

SEQ ID NO: 2216473 - RNA, 19 nt, Artificial Sequence
  Description of Artificial Sequence: Synthetic oligonucleotide
ucggugagcuugguguagc

SEQ ID NO: 2216474 - RNA, 19 nt, Artificial Sequence
  Description of Artificial Sequence: Synthetic oligonucleotide
guagauuuccaugguucuc

SEQ ID NO: 2216475 - RNA, 19 nt, Artificial Sequence
  Description of Artificial Sequence: Synthetic oligonucleotide
cucuagccugcucacugug

SEQ ID NO: 2216476 - RNA, 19 nt, Artificial Sequence
  Description of Artificial Sequence: Synthetic oligonucleotide
guuucaaguauucggccau

SEQ ID NO: 2216477 - RNA, 19 nt, Artificial Sequence
  Description of Artificial Sequence: Synthetic oligonucleotide
agcagaggaugcugguagu

SEQ ID NO: 2216478 - RNA, 19 nt, Artificial Sequence
  Description of Artificial Sequence: Synthetic oligonucleotide
uugcuaagcagaggaugcu

SEQ ID NO: 2216479 - RNA, 19 nt, Artificial Sequence
  Description of Artificial Sequence: Synthetic oligonucleotide
ucaacccacggcagcucgu

SEQ ID NO: 2216480 - RNA, 19 nt, Artificial Sequence
  Description of Artificial Sequence: Synthetic oligonucleotide
gagccauggucuucugaca

SEQ ID NO: 2216481 - RNA, 19 nt, Artificial Sequence
  Description of Artificial Sequence: Synthetic oligonucleotide
acacagugcuggaucaucu

SEQ ID NO: 2216482 - RNA, 19 nt, Artificial Sequence
  Description of Artificial Sequence: Synthetic oligonucleotide
uuaggcacauugccuucuu

SEQ ID NO: 2216483 - RNA, 19 nt, Artificial Sequence
  Description of Artificial Sequence: Synthetic oligonucleotide
auugagcuccagaacugca

SEQ ID NO: 2216484 - RNA, 19 nt, Artificial Sequence
  Description of Artificial Sequence: Synthetic oligonucleotide
agcgggucgucuuggagua

SEQ ID NO: 2216485 - RNA, 19 nt, Artificial Sequence
  Description of Artificial Sequence: Synthetic oligonucleotide
cauggucuucugacacagc

SEQ ID NO: 2216486 - RNA, 19 nt, Artificial Sequence
  Description of Artificial Sequence: Synthetic oligonucleotide
cggaaaauguugcugauga

SEQ ID NO: 2216487 - RNA, 19 nt, Artificial Sequence
  Description of Artificial Sequence: Synthetic oligonucleotide
cacagugcuggaucaucuc

SEQ ID NO: 2216488 - RNA, 19 nt, Artificial Sequence
  Description of Artificial Sequence: Synthetic oligonucleotide
uagccugcucacugugucu

SEQ ID NO: 2216489 - RNA, 19 nt, Artificial Sequence
  Description of Artificial Sequence: Synthetic oligonucleotide
uguccccuugggcugugaa

SEQ ID NO: 2216490 - RNA, 19 nt, Artificial Sequence
  Description of Artificial Sequence: Synthetic oligonucleotide
ggacuugagcaucggugag

SEQ ID NO: 2216491 - RNA, 19 nt, Artificial Sequence
  Description of Artificial Sequence: Synthetic oligonucleotide
ugacauucaugagccuggu

SEQ ID NO: 2216492 - RNA, 19 nt, Artificial Sequence
  Description of Artificial Sequence: Synthetic oligonucleotide
auaggugagcaagaaucuu

SEQ ID NO: 2216493 - RNA, 19 nt, Artificial Sequence
  Description of Artificial Sequence: Synthetic oligonucleotide
augauaucuucuggugagu

SEQ ID NO: 2216494 - RNA, 19 nt, Artificial Sequence
  Description of Artificial Sequence: Synthetic oligonucleotide
uggugaggacuugagcauc

SEQ ID NO: 2216495 - RNA, 19 nt, Artificial Sequence
  Description of Artificial Sequence: Synthetic oligonucleotide
gguguagcggagcacugca

SEQ ID NO: 2216496 - RNA, 19 nt, Artificial Sequence
  Description of Artificial Sequence: Synthetic oligonucleotide
ugcucacugugucuucauu

SEQ ID NO: 2216497 - RNA, 19 nt, Artificial Sequence
  Description of Artificial Sequence: Synthetic oligonucleotide
aucggugagcuugguguag

SEQ ID NO: 2216498 - RNA, 19 nt, Artificial Sequence
  Description of Artificial Sequence: Synthetic oligonucleotide
uccucaccacaucgauccc

SEQ ID NO: 2216499 - RNA, 19 nt, Artificial Sequence
  Description of Artificial Sequence: Synthetic oligonucleotide
agcacugcacagcgugacu

SEQ ID NO: 2216500 - RNA, 19 nt, Artificial Sequence
  Description of Artificial Sequence: Synthetic oligonucleotide
caucgauguuggcauccac

SEQ ID NO: 2216501 - RNA, 19 nt, Artificial Sequence
  Description of Artificial Sequence: Synthetic oligonucleotide
gcacagcgugacuggaugg

SEQ ID NO: 2216502 - RNA, 19 nt, Artificial Sequence
  Description of Artificial Sequence: Synthetic oligonucleotide
gucuucugacacagccugg

SEQ ID NO: 2216503 - RNA, 19 nt, Artificial Sequence
  Description of Artificial Sequence: Synthetic oligonucleotide
cauugccuucuuuugcaaa

SEQ ID NO: 2216504 - RNA, 19 nt, Artificial Sequence
  Description of Artificial Sequence: Synthetic oligonucleotide
gugucuucauugccgacua

SEQ ID NO: 2216505 - RNA, 19 nt, Artificial Sequence
  Description of Artificial Sequence: Synthetic oligonucleotide
cuugguguagcggagcacu

SEQ ID NO: 2216506 - RNA, 19 nt, Artificial Sequence
  Description of Artificial Sequence: Synthetic oligonucleotide
cauugccgacuauuucauc

SEQ ID NO: 2216507 - RNA, 19 nt, Artificial Sequence
  Description of Artificial Sequence: Synthetic oligonucleotide
uggcauccacacagugcug

SEQ ID NO: 2216508 - RNA, 19 nt, Artificial Sequence
  Description of Artificial Sequence: Synthetic oligonucleotide
cagcaaggaguucacaccu

SEQ ID NO: 2216509 - RNA, 19 nt, Artificial Sequence
  Description of Artificial Sequence: Synthetic oligonucleotide
gcaaguuguucagugccug

SEQ ID NO: 2216510 - RNA, 19 nt, Artificial Sequence
  Description of Artificial Sequence: Synthetic oligonucleotide
ccaugguucuccugagggc

SEQ ID NO: 2216511 - RNA, 19 nt, Artificial Sequence
  Description of Artificial Sequence: Synthetic oligonucleotide
gugaggacuugagcaucgg

SEQ ID NO: 2216512 - RNA, 19 nt, Artificial Sequence
  Description of Artificial Sequence: Synthetic oligonucleotide
ccauggucuucugacacag

SEQ ID NO: 2216513 - RNA, 19 nt, Artificial Sequence
  Description of Artificial Sequence: Synthetic oligonucleotide
uaggcacauugccuucuuu

SEQ ID NO: 2216514 - RNA, 19 nt, Artificial Sequence
  Description of Artificial Sequence: Synthetic oligonucleotide
cugucauuugaugcauuga

SEQ ID NO: 2216515 - RNA, 19 nt, Artificial Sequence
  Description of Artificial Sequence: Synthetic oligonucleotide
agaaucuuauaggccucau

SEQ ID NO: 2216516 - RNA, 19 nt, Artificial Sequence
  Description of Artificial Sequence: Synthetic oligonucleotide
ugaucuuaugucggcccuu

SEQ ID NO: 2216517 - RNA, 19 nt, Artificial Sequence
  Description of Artificial Sequence: Synthetic oligonucleotide
gaguguauccaaucuccuu

SEQ ID NO: 2216518 - RNA, 19 nt, Artificial Sequence
  Description of Artificial Sequence: Synthetic oligonucleotide
gcauugagcuccagaacug

SEQ ID NO: 2216519 - RNA, 19 nt, Artificial Sequence
  Description of Artificial Sequence: Synthetic oligonucleotide
cugugucuucauugccgac

SEQ ID NO: 2216520 - RNA, 19 nt, Artificial Sequence
  Description of Artificial Sequence: Synthetic oligonucleotide
ggcgcauguccccuugggc

SEQ ID NO: 2216521 - RNA, 19 nt, Artificial Sequence
  Description of Artificial Sequence: Synthetic oligonucleotide
ugucuucauugccgacuau

SEQ ID NO: 2216522 - RNA, 19 nt, Artificial Sequence
  Description of Artificial Sequence: Synthetic oligonucleotide
gcaaagcgggucgucuugg

SEQ ID NO: 2216523 - RNA, 19 nt, Artificial Sequence
  Description of Artificial Sequence: Synthetic oligonucleotide
gccacuuucaugugagugu

SEQ ID NO: 2216524 - RNA, 19 nt, Artificial Sequence
  Description of Artificial Sequence: Synthetic oligonucleotide
aagccagagcaaagcgggu

SEQ ID NO: 2216525 - RNA, 19 nt, Artificial Sequence
  Description of Artificial Sequence: Synthetic oligonucleotide
guucacaccuucugccacu

SEQ ID NO: 2216526 - RNA, 19 nt, Artificial Sequence
  Description of Artificial Sequence: Synthetic oligonucleotide
ggaccagcgaugaugauau

SEQ ID NO: 2216527 - RNA, 19 nt, Artificial Sequence
  Description of Artificial Sequence: Synthetic oligonucleotide
uucacaccuucugccacuu

SEQ ID NO: 2216528 - RNA, 19 nt, Artificial Sequence
  Description of Artificial Sequence: Synthetic oligonucleotide
cuggaucaucuccuucaca

SEQ ID NO: 2216529 - RNA, 19 nt, Artificial Sequence
  Description of Artificial Sequence: Synthetic oligonucleotide
uugaugcauugagcuccag

SEQ ID NO: 2216530 - RNA, 19 nt, Artificial Sequence
  Description of Artificial Sequence: Synthetic oligonucleotide
ggaugcugguagucuugcc

SEQ ID NO: 2216531 - RNA, 19 nt, Artificial Sequence
  Description of Artificial Sequence: Synthetic oligonucleotide
ugucggcccuugggaaggg

SEQ ID NO: 2216532 - RNA, 19 nt, Artificial Sequence
  Description of Artificial Sequence: Synthetic oligonucleotide
ccuucacaagcagugggug

SEQ ID NO: 2216533 - RNA, 19 nt, Artificial Sequence
  Description of Artificial Sequence: Synthetic oligonucleotide
ccauagggaagguuuuaca

SEQ ID NO: 2216534 - RNA, 19 nt, Artificial Sequence
  Description of Artificial Sequence: Synthetic oligonucleotide
ccugagaagguagacugca

SEQ ID NO: 2216535 - RNA, 19 nt, Artificial Sequence
  Description of Artificial Sequence: Synthetic oligonucleotide
agccugcucacugugucuu

SEQ ID NO: 2216536 - RNA, 19 nt, Artificial Sequence
  Description of Artificial Sequence: Synthetic oligonucleotide
caaagcgggucgucuugga

SEQ ID NO: 2216537 - RNA, 19 nt, Artificial Sequence
  Description of Artificial Sequence: Synthetic oligonucleotide
cagcucguaguggccggcg

SEQ ID NO: 2216538 - RNA, 19 nt, Artificial Sequence
  Description of Artificial Sequence: Synthetic oligonucleotide
caucggugagcuuggugua

SEQ ID NO: 2216539 - RNA, 19 nt, Artificial Sequence
  Description of Artificial Sequence: Synthetic oligonucleotide
ccgacuauuucauccagcu

SEQ ID NO: 2216540 - RNA, 19 nt, Artificial Sequence
  Description of Artificial Sequence: Synthetic oligonucleotide
cuggugaggacuugagcau

SEQ ID NO: 2216541 - RNA, 19 nt, Artificial Sequence
  Description of Artificial Sequence: Synthetic oligonucleotide
ugaugauauuaggcacauu

SEQ ID NO: 2216542 - RNA, 19 nt, Artificial Sequence
  Description of Artificial Sequence: Synthetic oligonucleotide
auguuggcauccacacagu

SEQ ID NO: 2216543 - RNA, 19 nt, Artificial Sequence
  Description of Artificial Sequence: Synthetic oligonucleotide
cauucucacuguugauaua

SEQ ID NO: 2216544 - RNA, 19 nt, Artificial Sequence
  Description of Artificial Sequence: Synthetic oligonucleotide
gggcucuaugauuuugucu

SEQ ID NO: 2216545 - RNA, 19 nt, Artificial Sequence
  Description of Artificial Sequence: Synthetic oligonucleotide
cuggaugggcucuaugauu

SEQ ID NO: 2216546 - RNA, 19 nt, Artificial Sequence
  Description of Artificial Sequence: Synthetic oligonucleotide
ugcauccuucagggccggg

SEQ ID NO: 2216547 - RNA, 19 nt, Artificial Sequence
  Description of Artificial Sequence: Synthetic oligonucleotide
gccucaucgauguuggcau

SEQ ID NO: 2216548 - RNA, 19 nt, Artificial Sequence
  Description of Artificial Sequence: Synthetic oligonucleotide
gccgacuauuucauccagc

SEQ ID NO: 2216549 - RNA, 19 nt, Artificial Sequence
  Description of Artificial Sequence: Synthetic oligonucleotide
agggaagguuuuacacacu

SEQ ID NO: 2216550 - RNA, 19 nt, Artificial Sequence
  Description of Artificial Sequence: Synthetic oligonucleotide
augguucuccugagggccu

SEQ ID NO: 2216551 - RNA, 19 nt, Artificial Sequence
  Description of Artificial Sequence: Synthetic oligonucleotide
caacuggccacuggagcca

SEQ ID NO: 2216552 - RNA, 19 nt, Artificial Sequence
  Description of Artificial Sequence: Synthetic oligonucleotide
uucggccauagggaagguu

SEQ ID NO: 2216553 - RNA, 19 nt, Artificial Sequence
  Description of Artificial Sequence: Synthetic oligonucleotide
gcugagcaaacauuuugau

SEQ ID NO: 2216554 - RNA, 19 nt, Artificial Sequence
  Description of Artificial Sequence: Synthetic oligonucleotide
gcgcauguccccuugggcu

SEQ ID NO: 2216555 - RNA, 19 nt, Artificial Sequence
  Description of Artificial Sequence: Synthetic oligonucleotide
ccagcagcgcucuugcuaa

SEQ ID NO: 2216556 - RNA, 19 nt, Artificial Sequence
  Description of Artificial Sequence: Synthetic oligonucleotide
cagagcaaagcgggucguc

SEQ ID NO: 2216557 - RNA, 19 nt, Artificial Sequence
  Description of Artificial Sequence: Synthetic oligonucleotide
guguagcggagcacugcac

SEQ ID NO: 2216558 - RNA, 19 nt, Artificial Sequence
  Description of Artificial Sequence: Synthetic oligonucleotide
agguagacugcaaguuguu

SEQ ID NO: 2216559 - RNA, 19 nt, Artificial Sequence
  Description of Artificial Sequence: Synthetic oligonucleotide
caugagccuggugaggacu

SEQ ID NO: 2216560 - RNA, 19 nt, Artificial Sequence
  Description of Artificial Sequence: Synthetic oligonucleotide
gagcaaagcgggucgucuu

SEQ ID NO: 2216561 - RNA, 19 nt, Artificial Sequence
  Description of Artificial Sequence: Synthetic oligonucleotide
cugcauccuucagggccgg

SEQ ID NO: 2216562 - RNA, 19 nt, Artificial Sequence
  Description of Artificial Sequence: Synthetic oligonucleotide
cagcagcgcucuugcuaag

SEQ ID NO: 2216563 - RNA, 19 nt, Artificial Sequence
  Description of Artificial Sequence: Synthetic oligonucleotide
gcagaggaugcugguaguc

SEQ ID NO: 2216564 - RNA, 19 nt, Artificial Sequence
  Description of Artificial Sequence: Synthetic oligonucleotide
cuggagccauggucuucug

SEQ ID NO: 2216565 - RNA, 19 nt, Artificial Sequence
  Description of Artificial Sequence: Synthetic oligonucleotide
cucggaaaauguugcugau

SEQ ID NO: 2216566 - RNA, 19 nt, Artificial Sequence
  Description of Artificial Sequence: Synthetic oligonucleotide
gcgcucuugcuaagcagag

SEQ ID NO: 2216567 - RNA, 19 nt, Artificial Sequence
  Description of Artificial Sequence: Synthetic oligonucleotide
cagcgugacuggaugggcu

SEQ ID NO: 2216568 - RNA, 19 nt, Artificial Sequence
  Description of Artificial Sequence: Synthetic oligonucleotide
cucuugcuaagcagaggau

SEQ ID NO: 2216569 - RNA, 19 nt, Artificial Sequence
  Description of Artificial Sequence: Synthetic oligonucleotide
ccuugaacacauucucacu

SEQ ID NO: 2216570 - RNA, 19 nt, Artificial Sequence
  Description of Artificial Sequence: Synthetic oligonucleotide
gggcccagcagcgcucuug

SEQ ID NO: 2216571 - RNA, 19 nt, Artificial Sequence
  Description of Artificial Sequence: Synthetic oligonucleotide
ccucaucgauguuggcauc

SEQ ID NO: 2216572 - RNA, 19 nt, Artificial Sequence
  Description of Artificial Sequence: Synthetic oligonucleotide
gcuugguguagcggagcac

SEQ ID NO: 2216573 - RNA, 19 nt, Artificial Sequence
  Description of Artificial Sequence: Synthetic oligonucleotide
gggugacuuucugcugagc

SEQ ID NO: 2216574 - RNA, 19 nt, Artificial Sequence
  Description of Artificial Sequence: Synthetic oligonucleotide
ggcucaucacagaccuuga

SEQ ID NO: 2216575 - RNA, 19 nt, Artificial Sequence
  Description of Artificial Sequence: Synthetic oligonucleotide
cccagcagcgcucuugcua

SEQ ID NO: 2216576 - RNA, 19 nt, Artificial Sequence
  Description of Artificial Sequence: Synthetic oligonucleotide
ccacggcagcucguagugg

SEQ ID NO: 2216577 - RNA, 19 nt, Artificial Sequence
  Description of Artificial Sequence: Synthetic oligonucleotide
cggcagcucguaguggccg

SEQ ID NO: 2216578 - RNA, 19 nt, Artificial Sequence
  Description of Artificial Sequence: Synthetic oligonucleotide
ggguggggcucaucacaga

SEQ ID NO: 2216579 - RNA, 19 nt, Artificial Sequence
  Description of Artificial Sequence: Synthetic oligonucleotide
caccuucugccacuuucau

SEQ ID NO: 2216580 - RNA, 19 nt, Artificial Sequence
  Description of Artificial Sequence: Synthetic oligonucleotide
ccagcuuuauuggucugua

SEQ ID NO: 2216581 - RNA, 19 nt, Artificial Sequence
  Description of Artificial Sequence: Synthetic oligonucleotide
cuugggcugugaagauaau

SEQ ID NO: 2216582 - RNA, 19 nt, Artificial Sequence
  Description of Artificial Sequence: Synthetic oligonucleotide
cuauuucauccagcuuuau

SEQ ID NO: 2216583 - RNA, 19 nt, Artificial Sequence
  Description of Artificial Sequence: Synthetic oligonucleotide
cgauguuggcauccacaca

SEQ ID NO: 2216584 - RNA, 19 nt, Artificial Sequence
  Description of Artificial Sequence: Synthetic oligonucleotide
gagcaccaucugucaugcu

SEQ ID NO: 2216585 - RNA, 19 nt, Artificial Sequence
  Description of Artificial Sequence: Synthetic oligonucleotide
gucaugcugucugcuucau

SEQ ID NO: 2216586 - RNA, 19 nt, Artificial Sequence
  Description of Artificial Sequence: Synthetic oligonucleotide
caaagaccucuagccugcu

SEQ ID NO: 2216587 - RNA, 19 nt, Artificial Sequence
  Description of Artificial Sequence: Synthetic oligonucleotide
cggcccuugggaaggguga

SEQ ID NO: 2216588 - RNA, 19 nt, Artificial Sequence
  Description of Artificial Sequence: Synthetic oligonucleotide
ccucuagccugcucacugu

SEQ ID NO: 2216589 - RNA, 19 nt, Artificial Sequence
  Description of Artificial Sequence: Synthetic oligonucleotide
ggaugggcucuaugauuuu

SEQ ID NO: 2216590 - RNA, 19 nt, Artificial Sequence
  Description of Artificial Sequence: Synthetic oligonucleotide
gcgggucgucuuggaguag

SEQ ID NO: 2216591 - RNA, 19 nt, Artificial Sequence
  Description of Artificial Sequence: Synthetic oligonucleotide
ccaggccaucaucugugua

SEQ ID NO: 2216592 - RNA, 19 nt, Artificial Sequence
  Description of Artificial Sequence: Synthetic oligonucleotide
cuugagcaucggugagcuu

SEQ ID NO: 2216593 - RNA, 19 nt, Artificial Sequence
  Description of Artificial Sequence: Synthetic oligonucleotide
gaccagcgaugaugauauu

SEQ ID NO: 2216594 - RNA, 19 nt, Artificial Sequence
  Description of Artificial Sequence: Synthetic oligonucleotide
ggucgucuuggaguagauu

SEQ ID NO: 2216595 - RNA, 19 nt, Artificial Sequence
  Description of Artificial Sequence: Synthetic oligonucleotide
cgggucgucuuggaguaga

SEQ ID NO: 2216596 - RNA, 19 nt, Artificial Sequence
  Description of Artificial Sequence: Synthetic oligonucleotide
gcgugacuggaugggcucu

SEQ ID NO: 2216597 - RNA, 19 nt, Artificial Sequence
  Description of Artificial Sequence: Synthetic oligonucleotide
gcauguccccuugggcugu

SEQ ID NO: 2216598 - RNA, 19 nt, Artificial Sequence
  Description of Artificial Sequence: Synthetic oligonucleotide
cccuugggcugugaagaua

SEQ ID NO: 2216599 - RNA, 19 nt, Artificial Sequence
  Description of Artificial Sequence: Synthetic oligonucleotide
gggucgucuuggaguagau

SEQ ID NO: 2216600 - RNA, 19 nt, Artificial Sequence
  Description of Artificial Sequence: Synthetic oligonucleotide
ccagagcaaagcgggucgu

SEQ ID NO: 2216601 - RNA, 19 nt, Artificial Sequence
  Description of Artificial Sequence: Synthetic oligonucleotide
cgaugacauucaugagccu

SEQ ID NO: 2216602 - RNA, 19 nt, Artificial Sequence
  Description of Artificial Sequence: Synthetic oligonucleotide
cgacuauuucauccagcuu

SEQ ID NO: 2216603 - RNA, 19 nt, Artificial Sequence
  Description of Artificial Sequence: Synthetic oligonucleotide
ccccugucauuugaugcau

SEQ ID NO: 2216604 - RNA, 19 nt, Artificial Sequence
  Description of Artificial Sequence: Synthetic oligonucleotide
gcggagcacugcacagcgu

SEQ ID NO: 2216605 - RNA, 19 nt, Artificial Sequence
  Description of Artificial Sequence: Synthetic oligonucleotide
ccgggcccagcagcgcucu

SEQ ID NO: 2216606 - RNA, 19 nt, Artificial Sequence
  Description of Artificial Sequence: Synthetic oligonucleotide
aaugauguccucuaaaucc

SEQ ID NO: 2216607 - RNA, 19 nt, Artificial Sequence
  Description of Artificial Sequence: Synthetic oligonucleotide
uaauguucgaaucaugugg

SEQ ID NO: 2216608 - RNA, 19 nt, Artificial Sequence
  Description of Artificial Sequence: Synthetic oligonucleotide
agaguuuccuaauacaugc

SEQ ID NO: 2216609 - RNA, 19 nt, Artificial Sequence
  Description of Artificial Sequence: Synthetic oligonucleotide
uuuaguuaaauccacuuca

SEQ ID NO: 2216610 - RNA, 19 nt, Artificial Sequence
  Description of Artificial Sequence: Synthetic oligonucleotide
aauuuugugaccaaacuuc

SEQ ID NO: 2216611 - RNA, 19 nt, Artificial Sequence
  Description of Artificial Sequence: Synthetic oligonucleotide
ucggcuuucacuuuuacgg

SEQ ID NO: 2216612 - RNA, 19 nt, Artificial Sequence
  Description of Artificial Sequence: Synthetic oligonucleotide
cuuugcuuuaguuaaaucc

SEQ ID NO: 2216613 - RNA, 19 nt, Artificial Sequence
  Description of Artificial Sequence: Synthetic oligonucleotide
auuauaucuugccuguucc

SEQ ID NO: 2216614 - RNA, 19 nt, Artificial Sequence
  Description of Artificial Sequence: Synthetic oligonucleotide
guuaaauccacuucaagag

SEQ ID NO: 2216615 - RNA, 19 nt, Artificial Sequence
  Description of Artificial Sequence: Synthetic oligonucleotide
uuaaauccacuucaagagg

SEQ ID NO: 2216616 - RNA, 19 nt, Artificial Sequence
  Description of Artificial Sequence: Synthetic oligonucleotide
aguuaaauccacuucaaga

SEQ ID NO: 2216617 - RNA, 19 nt, Artificial Sequence
  Description of Artificial Sequence: Synthetic oligonucleotide
aacgucuugagcuucagga

SEQ ID NO: 2216618 - RNA, 19 nt, Artificial Sequence
  Description of Artificial Sequence: Synthetic oligonucleotide
aauacaugcuggugagugc

SEQ ID NO: 2216619 - RNA, 19 nt, Artificial Sequence
  Description of Artificial Sequence: Synthetic oligonucleotide
ugugacagaauccaguaac

SEQ ID NO: 2216620 - RNA, 19 nt, Artificial Sequence
  Description of Artificial Sequence: Synthetic oligonucleotide
aucaccuggacucuggugg

SEQ ID NO: 2216621 - RNA, 19 nt, Artificial Sequence
  Description of Artificial Sequence: Synthetic oligonucleotide
uaaauccggagucaggucc

SEQ ID NO: 2216622 - RNA, 19 nt, Artificial Sequence
  Description of Artificial Sequence: Synthetic oligonucleotide
aacaauuuugugaccaaac

SEQ ID NO: 2216623 - RNA, 19 nt, Artificial Sequence
  Description of Artificial Sequence: Synthetic oligonucleotide
aauguucgaaucauguggg

SEQ ID NO: 2216624 - RNA, 19 nt, Artificial Sequence
  Description of Artificial Sequence: Synthetic oligonucleotide
uuauuuagugaccucagau

SEQ ID NO: 2216625 - RNA, 19 nt, Artificial Sequence
  Description of Artificial Sequence: Synthetic oligonucleotide
uuugugaccaaacuucagu

SEQ ID NO: 2216626 - RNA, 19 nt, Artificial Sequence
  Description of Artificial Sequence: Synthetic oligonucleotide
aauccaguaacgucuugag

SEQ ID NO: 2216627 - RNA, 19 nt, Artificial Sequence
  Description of Artificial Sequence: Synthetic oligonucleotide
uccuaauacaugcugguga

SEQ ID NO: 2216628 - RNA, 19 nt, Artificial Sequence
  Description of Artificial Sequence: Synthetic oligonucleotide
uccuaugagagucagaguu

SEQ ID NO: 2216629 - RNA, 19 nt, Artificial Sequence
  Description of Artificial Sequence: Synthetic oligonucleotide
guucgaaucaugugggugg

SEQ ID NO: 2216630 - RNA, 19 nt, Artificial Sequence
  Description of Artificial Sequence: Synthetic oligonucleotide
aagugcauuuccaaaacuc

SEQ ID NO: 2216631 - RNA, 19 nt, Artificial Sequence
  Description of Artificial Sequence: Synthetic oligonucleotide
agcuauuauaucuugccug

SEQ ID NO: 2216632 - RNA, 19 nt, Artificial Sequence
  Description of Artificial Sequence: Synthetic oligonucleotide
agucagaguuuccuaauac

SEQ ID NO: 2216633 - RNA, 19 nt, Artificial Sequence
  Description of Artificial Sequence: Synthetic oligonucleotide
cuuccuaugagagucagag

SEQ ID NO: 2216634 - RNA, 19 nt, Artificial Sequence
  Description of Artificial Sequence: Synthetic oligonucleotide
agugcugugggccugcagg

SEQ ID NO: 2216635 - RNA, 19 nt, Artificial Sequence
  Description of Artificial Sequence: Synthetic oligonucleotide
aacuucaguuuucuaaacu

SEQ ID NO: 2216636 - RNA, 19 nt, Artificial Sequence
  Description of Artificial Sequence: Synthetic oligonucleotide
caucugguggcaaaggccg

SEQ ID NO: 2216637 - RNA, 19 nt, Artificial Sequence
  Description of Artificial Sequence: Synthetic oligonucleotide
uguguggcccuguaggugg

SEQ ID NO: 2216638 - RNA, 19 nt, Artificial Sequence
  Description of Artificial Sequence: Synthetic oligonucleotide
uauuauaucuugccuguuc

SEQ ID NO: 2216639 - RNA, 19 nt, Artificial Sequence
  Description of Artificial Sequence: Synthetic oligonucleotide
aguuuccaagugcauuucc

SEQ ID NO: 2216640 - RNA, 19 nt, Artificial Sequence
  Description of Artificial Sequence: Synthetic oligonucleotide
cuagacaagggcuuaauga

SEQ ID NO: 2216641 - RNA, 19 nt, Artificial Sequence
  Description of Artificial Sequence: Synthetic oligonucleotide
ucuaaauccggagucaggu

SEQ ID NO: 2216642 - RNA, 19 nt, Artificial Sequence
  Description of Artificial Sequence: Synthetic oligonucleotide
uggaagcuuauuuagugac

SEQ ID NO: 2216643 - RNA, 19 nt, Artificial Sequence
  Description of Artificial Sequence: Synthetic oligonucleotide
uaguuaaauccacuucaag

SEQ ID NO: 2216644 - RNA, 19 nt, Artificial Sequence
  Description of Artificial Sequence: Synthetic oligonucleotide
uuuuacggcaggugugugg

SEQ ID NO: 2216645 - RNA, 19 nt, Artificial Sequence
  Description of Artificial Sequence: Synthetic oligonucleotide
ucacuuuuacggcaggugu

SEQ ID NO: 2216646 - RNA, 19 nt, Artificial Sequence
  Description of Artificial Sequence: Synthetic oligonucleotide
uauuuagugaccucagaua

SEQ ID NO: 2216647 - RNA, 19 nt, Artificial Sequence
  Description of Artificial Sequence: Synthetic oligonucleotide
gaaugcaguuuccaagugc

SEQ ID NO: 2216648 - RNA, 19 nt, Artificial Sequence
  Description of Artificial Sequence: Synthetic oligonucleotide
auggcaucacucuccaugg

SEQ ID NO: 2216649 - RNA, 19 nt, Artificial Sequence
  Description of Artificial Sequence: Synthetic oligonucleotide
guuuccuaauacaugcugg

SEQ ID NO: 2216650 - RNA, 19 nt, Artificial Sequence
  Description of Artificial Sequence: Synthetic oligonucleotide
uucuggucuagacaagggc

SEQ ID NO: 2216651 - RNA, 19 nt, Artificial Sequence
  Description of Artificial Sequence: Synthetic oligonucleotide
uuguccagaaugcaguuuc

SEQ ID NO: 2216652 - RNA, 19 nt, Artificial Sequence
  Description of Artificial Sequence: Synthetic oligonucleotide
ucuagacaagggcuuaaug

SEQ ID NO: 2216653 - RNA, 19 nt, Artificial Sequence
  Description of Artificial Sequence: Synthetic oligonucleotide
acguccucaugauaggaac

SEQ ID NO: 2216654 - RNA, 19 nt, Artificial Sequence
  Description of Artificial Sequence: Synthetic oligonucleotide
uaucuugccuguuccacag

SEQ ID NO: 2216655 - RNA, 19 nt, Artificial Sequence
  Description of Artificial Sequence: Synthetic oligonucleotide
uuaguuaaauccacuucaa

SEQ ID NO: 2216656 - RNA, 19 nt, Artificial Sequence
  Description of Artificial Sequence: Synthetic oligonucleotide
uccuggaucaccuggacuc

SEQ ID NO: 2216657 - RNA, 19 nt, Artificial Sequence
  Description of Artificial Sequence: Synthetic oligonucleotide
uuuccuaauacaugcuggu

SEQ ID NO: 2216658 - RNA, 19 nt, Artificial Sequence
  Description of Artificial Sequence: Synthetic oligonucleotide
aaucauguggguggcuugg

SEQ ID NO: 2216659 - RNA, 19 nt, Artificial Sequence
  Description of Artificial Sequence: Synthetic oligonucleotide
ucagucacagccuccuucc

SEQ ID NO: 2216660 - RNA, 19 nt, Artificial Sequence
  Description of Artificial Sequence: Synthetic oligonucleotide
auaacccacguccucauga

SEQ ID NO: 2216661 - RNA, 19 nt, Artificial Sequence
  Description of Artificial Sequence: Synthetic oligonucleotide
gucguggaagcuuauuuag

SEQ ID NO: 2216662 - RNA, 19 nt, Artificial Sequence
  Description of Artificial Sequence: Synthetic oligonucleotide
aaauccggagucagguccc

SEQ ID NO: 2216663 - RNA, 19 nt, Artificial Sequence
  Description of Artificial Sequence: Synthetic oligonucleotide
gacagaauccaguaacguc

SEQ ID NO: 2216664 - RNA, 19 nt, Artificial Sequence
  Description of Artificial Sequence: Synthetic oligonucleotide
cugagugcccgcuucagcc

SEQ ID NO: 2216665 - RNA, 19 nt, Artificial Sequence
  Description of Artificial Sequence: Synthetic oligonucleotide
uuuacggcagguguguggc

SEQ ID NO: 2216666 - RNA, 19 nt, Artificial Sequence
  Description of Artificial Sequence: Synthetic oligonucleotide
ucuguaggcagcuauuaua

SEQ ID NO: 2216667 - RNA, 19 nt, Artificial Sequence
  Description of Artificial Sequence: Synthetic oligonucleotide
uucaagagggagcugucgu

SEQ ID NO: 2216668 - RNA, 19 nt, Artificial Sequence
  Description of Artificial Sequence: Synthetic oligonucleotide
uguccucuaaauccggagu

SEQ ID NO: 2216669 - RNA, 19 nt, Artificial Sequence
  Description of Artificial Sequence: Synthetic oligonucleotide
ugauguccucuaaauccgg

SEQ ID NO: 2216670 - RNA, 19 nt, Artificial Sequence
  Description of Artificial Sequence: Synthetic oligonucleotide
cagcccgucagucacagcc

SEQ ID NO: 2216671 - RNA, 19 nt, Artificial Sequence
  Description of Artificial Sequence: Synthetic oligonucleotide
ucagauagucuuuguccag

SEQ ID NO: 2216672 - RNA, 19 nt, Artificial Sequence
  Description of Artificial Sequence: Synthetic oligonucleotide
augauguccucuaaauccg

SEQ ID NO: 2216673 - RNA, 19 nt, Artificial Sequence
  Description of Artificial Sequence: Synthetic oligonucleotide
augguucaaaaucuucucu

SEQ ID NO: 2216674 - RNA, 19 nt, Artificial Sequence
  Description of Artificial Sequence: Synthetic oligonucleotide
uguucgaaucaugugggug

SEQ ID NO: 2216675 - RNA, 19 nt, Artificial Sequence
  Description of Artificial Sequence: Synthetic oligonucleotide
uauaucuugccuguuccac

SEQ ID NO: 2216676 - RNA, 19 nt, Artificial Sequence
  Description of Artificial Sequence: Synthetic oligonucleotide
uguguuuuggaggaagguc

SEQ ID NO: 2216677 - RNA, 19 nt, Artificial Sequence
  Description of Artificial Sequence: Synthetic oligonucleotide
ucccugaggaguucugagg

SEQ ID NO: 2216678 - RNA, 19 nt, Artificial Sequence
  Description of Artificial Sequence: Synthetic oligonucleotide
uggugaauggcaucacucu

SEQ ID NO: 2216679 - RNA, 19 nt, Artificial Sequence
  Description of Artificial Sequence: Synthetic oligonucleotide
uuauaucuugccuguucca

SEQ ID NO: 2216680 - RNA, 19 nt, Artificial Sequence
  Description of Artificial Sequence: Synthetic oligonucleotide
accuuaggcccucacuaac

SEQ ID NO: 2216681 - RNA, 19 nt, Artificial Sequence
  Description of Artificial Sequence: Synthetic oligonucleotide
uaacgucuugagcuucagg

SEQ ID NO: 2216682 - RNA, 19 nt, Artificial Sequence
  Description of Artificial Sequence: Synthetic oligonucleotide
agugaccucagauagucuu

SEQ ID NO: 2216683 - RNA, 19 nt, Artificial Sequence
  Description of Artificial Sequence: Synthetic oligonucleotide
uucacuuuuacggcaggug

SEQ ID NO: 2216684 - RNA, 19 nt, Artificial Sequence
  Description of Artificial Sequence: Synthetic oligonucleotide
ugcugcaguccuuagcccc

SEQ ID NO: 2216685 - RNA, 19 nt, Artificial Sequence
  Description of Artificial Sequence: Synthetic oligonucleotide
auguccucuaaauccggag

SEQ ID NO: 2216686 - RNA, 19 nt, Artificial Sequence
  Description of Artificial Sequence: Synthetic oligonucleotide
cucggcuuucacuuuuacg

SEQ ID NO: 2216687 - RNA, 19 nt, Artificial Sequence
  Description of Artificial Sequence: Synthetic oligonucleotide
guaggcagcuauuauaucu

SEQ ID NO: 2216688 - RNA, 19 nt, Artificial Sequence
  Description of Artificial Sequence: Synthetic oligonucleotide
ucaagagggagcugucgug

SEQ ID NO: 2216689 - RNA, 19 nt, Artificial Sequence
  Description of Artificial Sequence: Synthetic oligonucleotide
uguaggacaccauccugga

SEQ ID NO: 2216690 - RNA, 19 nt, Artificial Sequence
  Description of Artificial Sequence: Synthetic oligonucleotide
cuggugaauggcaucacuc

SEQ ID NO: 2216691 - RNA, 19 nt, Artificial Sequence
  Description of Artificial Sequence: Synthetic oligonucleotide
gugacagaauccaguaacg

SEQ ID NO: 2216692 - RNA, 19 nt, Artificial Sequence
  Description of Artificial Sequence: Synthetic oligonucleotide
aggugguucuggucuagac

SEQ ID NO: 2216693 - RNA, 19 nt, Artificial Sequence
  Description of Artificial Sequence: Synthetic oligonucleotide
gguggcuuggucugcaagg

SEQ ID NO: 2216694 - RNA, 19 nt, Artificial Sequence
  Description of Artificial Sequence: Synthetic oligonucleotide
auaucuugccuguuccaca

SEQ ID NO: 2216695 - RNA, 19 nt, Artificial Sequence
  Description of Artificial Sequence: Synthetic oligonucleotide
ucuugccuguuccacagau

SEQ ID NO: 2216696 - RNA, 19 nt, Artificial Sequence
  Description of Artificial Sequence: Synthetic oligonucleotide
uggaagcacugccucacgc

SEQ ID NO: 2216697 - RNA, 19 nt, Artificial Sequence
  Description of Artificial Sequence: Synthetic oligonucleotide
ugucguggaagcuuauuua

SEQ ID NO: 2216698 - RNA, 19 nt, Artificial Sequence
  Description of Artificial Sequence: Synthetic oligonucleotide
gugacaaggccuuugaccu

SEQ ID NO: 2216699 - RNA, 19 nt, Artificial Sequence
  Description of Artificial Sequence: Synthetic oligonucleotide
aaauggcuuucucccugag

SEQ ID NO: 2216700 - RNA, 19 nt, Artificial Sequence
  Description of Artificial Sequence: Synthetic oligonucleotide
uccauaacccacguccuca

SEQ ID NO: 2216701 - RNA, 19 nt, Artificial Sequence
  Description of Artificial Sequence: Synthetic oligonucleotide
gaaucauguggguggcuug

SEQ ID NO: 2216702 - RNA, 19 nt, Artificial Sequence
  Description of Artificial Sequence: Synthetic oligonucleotide
ggguacuguguuuuggagg

SEQ ID NO: 2216703 - RNA, 19 nt, Artificial Sequence
  Description of Artificial Sequence: Synthetic oligonucleotide
cucuaaauccggagucagg

SEQ ID NO: 2216704 - RNA, 19 nt, Artificial Sequence
  Description of Artificial Sequence: Synthetic oligonucleotide
gaauccaguaacgucuuga

SEQ ID NO: 2216705 - RNA, 19 nt, Artificial Sequence
  Description of Artificial Sequence: Synthetic oligonucleotide
uccacagaugguucaaaau

SEQ ID NO: 2216706 - RNA, 19 nt, Artificial Sequence
  Description of Artificial Sequence: Synthetic oligonucleotide
gacaccauccuggaucacc

SEQ ID NO: 2216707 - RNA, 19 nt, Artificial Sequence
  Description of Artificial Sequence: Synthetic oligonucleotide
uuaggcccucacuaacucc

SEQ ID NO: 2216708 - RNA, 19 nt, Artificial Sequence
  Description of Artificial Sequence: Synthetic oligonucleotide
gugaauggcaucacucucc

SEQ ID NO: 2216709 - RNA, 19 nt, Artificial Sequence
  Description of Artificial Sequence: Synthetic oligonucleotide
uguccagaaugcaguuucc

SEQ ID NO: 2216710 - RNA, 19 nt, Artificial Sequence
  Description of Artificial Sequence: Synthetic oligonucleotide
ucguggaagcuuauuuagu

SEQ ID NO: 2216711 - RNA, 19 nt, Artificial Sequence
  Description of Artificial Sequence: Synthetic oligonucleotide
gagagucagaguuuccuaa

SEQ ID NO: 2216712 - RNA, 19 nt, Artificial Sequence
  Description of Artificial Sequence: Synthetic oligonucleotide
uaggcagcuauuauaucuu

SEQ ID NO: 2216713 - RNA, 19 nt, Artificial Sequence
  Description of Artificial Sequence: Synthetic oligonucleotide
ugacagaauccaguaacgu

SEQ ID NO: 2216714 - RNA, 19 nt, Artificial Sequence
  Description of Artificial Sequence: Synthetic oligonucleotide
gaagcacugccucacgcuc

SEQ ID NO: 2216715 - RNA, 19 nt, Artificial Sequence
  Description of Artificial Sequence: Synthetic oligonucleotide
ugaccaaacuucaguuuuc

SEQ ID NO: 2216716 - RNA, 19 nt, Artificial Sequence
  Description of Artificial Sequence: Synthetic oligonucleotide
gaagcuuauuuagugaccu

SEQ ID NO: 2216717 - RNA, 19 nt, Artificial Sequence
  Description of Artificial Sequence: Synthetic oligonucleotide
cacuuuuacggcaggugug

SEQ ID NO: 2216718 - RNA, 19 nt, Artificial Sequence
  Description of Artificial Sequence: Synthetic oligonucleotide
ugugaccaaacuucaguuu

SEQ ID NO: 2216719 - RNA, 19 nt, Artificial Sequence
  Description of Artificial Sequence: Synthetic oligonucleotide
acccacguccucaugauag

SEQ ID NO: 2216720 - RNA, 19 nt, Artificial Sequence
  Description of Artificial Sequence: Synthetic oligonucleotide
ccagaaugcaguuuccaag

SEQ ID NO: 2216721 - RNA, 19 nt, Artificial Sequence
  Description of Artificial Sequence: Synthetic oligonucleotide
ccuaauacaugcuggugag

SEQ ID NO: 2216722 - RNA, 19 nt, Artificial Sequence
  Description of Artificial Sequence: Synthetic oligonucleotide
aggacaccauccuggauca

SEQ ID NO: 2216723 - RNA, 19 nt, Artificial Sequence
  Description of Artificial Sequence: Synthetic oligonucleotide
cuaugagagucagaguuuc

SEQ ID NO: 2216724 - RNA, 19 nt, Artificial Sequence
  Description of Artificial Sequence: Synthetic oligonucleotide
ucacgcucggcuuucacuu

SEQ ID NO: 2216725 - RNA, 19 nt, Artificial Sequence
  Description of Artificial Sequence: Synthetic oligonucleotide
aaggccguguaggacacca

SEQ ID NO: 2216726 - RNA, 19 nt, Artificial Sequence
  Description of Artificial Sequence: Synthetic oligonucleotide
uugugacagaauccaguaa

SEQ ID NO: 2216727 - RNA, 19 nt, Artificial Sequence
  Description of Artificial Sequence: Synthetic oligonucleotide
ugagagucagaguuuccua

SEQ ID NO: 2216728 - RNA, 19 nt, Artificial Sequence
  Description of Artificial Sequence: Synthetic oligonucleotide
uucuguaggcagcuauuau

SEQ ID NO: 2216729 - RNA, 19 nt, Artificial Sequence
  Description of Artificial Sequence: Synthetic oligonucleotide
ucccacauuucaagguugu

SEQ ID NO: 2216730 - RNA, 19 nt, Artificial Sequence
  Description of Artificial Sequence: Synthetic oligonucleotide
acuuuuacggcaggugugu

SEQ ID NO: 2216731 - RNA, 19 nt, Artificial Sequence
  Description of Artificial Sequence: Synthetic oligonucleotide
gguucuggucuagacaagg

SEQ ID NO: 2216732 - RNA, 19 nt, Artificial Sequence
  Description of Artificial Sequence: Synthetic oligonucleotide
aaauccacuucaagaggga

SEQ ID NO: 2216733 - RNA, 19 nt, Artificial Sequence
  Description of Artificial Sequence: Synthetic oligonucleotide
aggucccacauuucaaggu

SEQ ID NO: 2216734 - RNA, 19 nt, Artificial Sequence
  Description of Artificial Sequence: Synthetic oligonucleotide
guucuggucuagacaaggg

SEQ ID NO: 2216735 - RNA, 19 nt, Artificial Sequence
  Description of Artificial Sequence: Synthetic oligonucleotide
agggcuuaaugauguccuc

SEQ ID NO: 2216736 - RNA, 19 nt, Artificial Sequence
  Description of Artificial Sequence: Synthetic oligonucleotide
cuuaggcccucacuaacuc

SEQ ID NO: 2216737 - RNA, 19 nt, Artificial Sequence
  Description of Artificial Sequence: Synthetic oligonucleotide
acaagggcuuaaugauguc

SEQ ID NO: 2216738 - RNA, 19 nt, Artificial Sequence
  Description of Artificial Sequence: Synthetic oligonucleotide
ccucacuaacuccauaacc

SEQ ID NO: 2216739 - RNA, 19 nt, Artificial Sequence
  Description of Artificial Sequence: Synthetic oligonucleotide
aagagggagcugucgugga

SEQ ID NO: 2216740 - RNA, 19 nt, Artificial Sequence
  Description of Artificial Sequence: Synthetic oligonucleotide
cuaaauccggagucagguc

SEQ ID NO: 2216741 - RNA, 19 nt, Artificial Sequence
  Description of Artificial Sequence: Synthetic oligonucleotide
ugcagccuaauguucgaau

SEQ ID NO: 2216742 - RNA, 19 nt, Artificial Sequence
  Description of Artificial Sequence: Synthetic oligonucleotide
ugcaaggggaagccgcuuc

SEQ ID NO: 2216743 - RNA, 19 nt, Artificial Sequence
  Description of Artificial Sequence: Synthetic oligonucleotide
uuugaccuuaggcccucac

SEQ ID NO: 2216744 - RNA, 19 nt, Artificial Sequence
  Description of Artificial Sequence: Synthetic oligonucleotide
uucgaaucauguggguggc

SEQ ID NO: 2216745 - RNA, 19 nt, Artificial Sequence
  Description of Artificial Sequence: Synthetic oligonucleotide
cuuauuuagugaccucaga

SEQ ID NO: 2216746 - RNA, 19 nt, Artificial Sequence
  Description of Artificial Sequence: Synthetic oligonucleotide
ucucuuugcuuuaguuaaa

SEQ ID NO: 2216747 - RNA, 19 nt, Artificial Sequence
  Description of Artificial Sequence: Synthetic oligonucleotide
uggcaucacucuccauggg

SEQ ID NO: 2216748 - RNA, 19 nt, Artificial Sequence
  Description of Artificial Sequence: Synthetic oligonucleotide
aggcagcuauuauaucuug

SEQ ID NO: 2216749 - RNA, 19 nt, Artificial Sequence
  Description of Artificial Sequence: Synthetic oligonucleotide
ugguucuggucuagacaag

SEQ ID NO: 2216750 - RNA, 19 nt, Artificial Sequence
  Description of Artificial Sequence: Synthetic oligonucleotide
uccagugacaaggccuuug

SEQ ID NO: 2216751 - RNA, 19 nt, Artificial Sequence
  Description of Artificial Sequence: Synthetic oligonucleotide
uacggcagguguguggccc

SEQ ID NO: 2216752 - RNA, 19 nt, Artificial Sequence
  Description of Artificial Sequence: Synthetic oligonucleotide
aguuacagggguacugugu

SEQ ID NO: 2216753 - RNA, 19 nt, Artificial Sequence
  Description of Artificial Sequence: Synthetic oligonucleotide
uguaggcagcuauuauauc

SEQ ID NO: 2216754 - RNA, 19 nt, Artificial Sequence
  Description of Artificial Sequence: Synthetic oligonucleotide
aagguugucuucaggguua

SEQ ID NO: 2216755 - RNA, 19 nt, Artificial Sequence
  Description of Artificial Sequence: Synthetic oligonucleotide
ugcaguuuccaagugcauu

SEQ ID NO: 2216756 - RNA, 19 nt, Artificial Sequence
  Description of Artificial Sequence: Synthetic oligonucleotide
guuuuggaggaaggucugg

SEQ ID NO: 2216757 - RNA, 19 nt, Artificial Sequence
  Description of Artificial Sequence: Synthetic oligonucleotide
agacaagggcuuaaugaug

SEQ ID NO: 2216758 - RNA, 19 nt, Artificial Sequence
  Description of Artificial Sequence: Synthetic oligonucleotide
gcaaaggccguguaggaca

SEQ ID NO: 2216759 - RNA, 19 nt, Artificial Sequence
  Description of Artificial Sequence: Synthetic oligonucleotide
uucagcccgucagucacag

SEQ ID NO: 2216760 - RNA, 19 nt, Artificial Sequence
  Description of Artificial Sequence: Synthetic oligonucleotide
caaaggccguguaggacac

SEQ ID NO: 2216761 - RNA, 19 nt, Artificial Sequence
  Description of Artificial Sequence: Synthetic oligonucleotide
uggcaaaggccguguagga

SEQ ID NO: 2216762 - RNA, 19 nt, Artificial Sequence
  Description of Artificial Sequence: Synthetic oligonucleotide
gagcuugcgcuggugaaug

SEQ ID NO: 2216763 - RNA, 19 nt, Artificial Sequence
  Description of Artificial Sequence: Synthetic oligonucleotide
uuccuaugagagucagagu

SEQ ID NO: 2216764 - RNA, 19 nt, Artificial Sequence
  Description of Artificial Sequence: Synthetic oligonucleotide
uacagggguacuguguuuu

SEQ ID NO: 2216765 - RNA, 19 nt, Artificial Sequence
  Description of Artificial Sequence: Synthetic oligonucleotide
ggcucuuccuaugagaguc

SEQ ID NO: 2216766 - RNA, 19 nt, Artificial Sequence
  Description of Artificial Sequence: Synthetic oligonucleotide
uaacccacguccucaugau

SEQ ID NO: 2216767 - RNA, 19 nt, Artificial Sequence
  Description of Artificial Sequence: Synthetic oligonucleotide
cagccuaauguucgaauca

SEQ ID NO: 2216768 - RNA, 19 nt, Artificial Sequence
  Description of Artificial Sequence: Synthetic oligonucleotide
aaaggccguguaggacacc

SEQ ID NO: 2216769 - RNA, 19 nt, Artificial Sequence
  Description of Artificial Sequence: Synthetic oligonucleotide
ucugguggcaaaggccgug

SEQ ID NO: 2216770 - RNA, 19 nt, Artificial Sequence
  Description of Artificial Sequence: Synthetic oligonucleotide
uggacucugguggcagagg

SEQ ID NO: 2216771 - RNA, 19 nt, Artificial Sequence
  Description of Artificial Sequence: Synthetic oligonucleotide
auguucgaaucaugugggu

SEQ ID NO: 2216772 - RNA, 19 nt, Artificial Sequence
  Description of Artificial Sequence: Synthetic oligonucleotide
ggugaauggcaucacucuc

SEQ ID NO: 2216773 - RNA, 19 nt, Artificial Sequence
  Description of Artificial Sequence: Synthetic oligonucleotide
cccugaggaguucugaggc

SEQ ID NO: 2216774 - RNA, 19 nt, Artificial Sequence
  Description of Artificial Sequence: Synthetic oligonucleotide
uucucccugaggaguucug

SEQ ID NO: 2216775 - RNA, 19 nt, Artificial Sequence
  Description of Artificial Sequence: Synthetic oligonucleotide
ggaagcuuauuuagugacc

SEQ ID NO: 2216776 - RNA, 19 nt, Artificial Sequence
  Description of Artificial Sequence: Synthetic oligonucleotide
cuguaggugggccuccauc

SEQ ID NO: 2216777 - RNA, 19 nt, Artificial Sequence
  Description of Artificial Sequence: Synthetic oligonucleotide
cuguaggcagcuauuauau

SEQ ID NO: 2216778 - RNA, 19 nt, Artificial Sequence
  Description of Artificial Sequence: Synthetic oligonucleotide
cagggguacuguguuuugg

SEQ ID NO: 2216779 - RNA, 19 nt, Artificial Sequence
  Description of Artificial Sequence: Synthetic oligonucleotide
gauguccucuaaauccgga

SEQ ID NO: 2216780 - RNA, 19 nt, Artificial Sequence
  Description of Artificial Sequence: Synthetic oligonucleotide
acagggguacuguguuuug

SEQ ID NO: 2216781 - RNA, 19 nt, Artificial Sequence
  Description of Artificial Sequence: Synthetic oligonucleotide
guccucaugauaggaacca

SEQ ID NO: 2216782 - RNA, 19 nt, Artificial Sequence
  Description of Artificial Sequence: Synthetic oligonucleotide
gugaccaaacuucaguuuu

SEQ ID NO: 2216783 - RNA, 19 nt, Artificial Sequence
  Description of Artificial Sequence: Synthetic oligonucleotide
gcagccuaauguucgaauc

SEQ ID NO: 2216784 - RNA, 19 nt, Artificial Sequence
  Description of Artificial Sequence: Synthetic oligonucleotide
auucuguaggcagcuauua

SEQ ID NO: 2216785 - RNA, 19 nt, Artificial Sequence
  Description of Artificial Sequence: Synthetic oligonucleotide
ccaagugcauuuccaaaac

SEQ ID NO: 2216786 - RNA, 19 nt, Artificial Sequence
  Description of Artificial Sequence: Synthetic oligonucleotide
agccuaauguucgaaucau

SEQ ID NO: 2216787 - RNA, 19 nt, Artificial Sequence
  Description of Artificial Sequence: Synthetic oligonucleotide
aguaacgucuugagcuuca

SEQ ID NO: 2216788 - RNA, 19 nt, Artificial Sequence
  Description of Artificial Sequence: Synthetic oligonucleotide
cuggaagcacugccucacg

SEQ ID NO: 2216789 - RNA, 19 nt, Artificial Sequence
  Description of Artificial Sequence: Synthetic oligonucleotide
caugcuggugagugcugug

SEQ ID NO: 2216790 - RNA, 19 nt, Artificial Sequence
  Description of Artificial Sequence: Synthetic oligonucleotide
guaggugggccuccaucug

SEQ ID NO: 2216791 - RNA, 19 nt, Artificial Sequence
  Description of Artificial Sequence: Synthetic oligonucleotide
gaccuuaggcccucacuaa

SEQ ID NO: 2216792 - RNA, 19 nt, Artificial Sequence
  Description of Artificial Sequence: Synthetic oligonucleotide
guuacagggguacuguguu

SEQ ID NO: 2216793 - RNA, 19 nt, Artificial Sequence
  Description of Artificial Sequence: Synthetic oligonucleotide
ugcgcuggugaauggcauc

SEQ ID NO: 2216794 - RNA, 19 nt, Artificial Sequence
  Description of Artificial Sequence: Synthetic oligonucleotide
ggcuuucacuuuuacggca

SEQ ID NO: 2216795 - RNA, 19 nt, Artificial Sequence
  Description of Artificial Sequence: Synthetic oligonucleotide
aguucugaggcagcaguua

SEQ ID NO: 2216796 - RNA, 19 nt, Artificial Sequence
  Description of Artificial Sequence: Synthetic oligonucleotide
aacccacguccucaugaua

SEQ ID NO: 2216797 - RNA, 19 nt, Artificial Sequence
  Description of Artificial Sequence: Synthetic oligonucleotide
agguccuggcucuuccuau

SEQ ID NO: 2216798 - RNA, 19 nt, Artificial Sequence
  Description of Artificial Sequence: Synthetic oligonucleotide
guaacgucuugagcuucag

SEQ ID NO: 2216799 - RNA, 19 nt, Artificial Sequence
  Description of Artificial Sequence: Synthetic oligonucleotide
gacaaggccuuugaccuua

SEQ ID NO: 2216800 - RNA, 19 nt, Artificial Sequence
  Description of Artificial Sequence: Synthetic oligonucleotide
cagauagucuuuguccaga

SEQ ID NO: 2216801 - RNA, 19 nt, Artificial Sequence
  Description of Artificial Sequence: Synthetic oligonucleotide
ggcagcuauuauaucuugc

SEQ ID NO: 2216802 - RNA, 19 nt, Artificial Sequence
  Description of Artificial Sequence: Synthetic oligonucleotide
uccugagugcccgcuucag

SEQ ID NO: 2216803 - RNA, 19 nt, Artificial Sequence
  Description of Artificial Sequence: Synthetic oligonucleotide
uuacagggguacuguguuu

SEQ ID NO: 2216804 - RNA, 19 nt, Artificial Sequence
  Description of Artificial Sequence: Synthetic oligonucleotide
uuacggcagguguguggcc

SEQ ID NO: 2216805 - RNA, 19 nt, Artificial Sequence
  Description of Artificial Sequence: Synthetic oligonucleotide
ggggaagccgcuucuugug

SEQ ID NO: 2216806 - RNA, 19 nt, Artificial Sequence
  Description of Artificial Sequence: Synthetic oligonucleotide
agagggagcugucguggaa

SEQ ID NO: 2216807 - RNA, 19 nt, Artificial Sequence
  Description of Artificial Sequence: Synthetic oligonucleotide
cuuuuacggcaggugugug

SEQ ID NO: 2216808 - RNA, 19 nt, Artificial Sequence
  Description of Artificial Sequence: Synthetic oligonucleotide
aauccggagucagguccca

SEQ ID NO: 2216809 - RNA, 19 nt, Artificial Sequence
  Description of Artificial Sequence: Synthetic oligonucleotide
cacguccucaugauaggaa

SEQ ID NO: 2216810 - RNA, 19 nt, Artificial Sequence
  Description of Artificial Sequence: Synthetic oligonucleotide
gccguguaggacaccaucc

SEQ ID NO: 2216811 - RNA, 19 nt, Artificial Sequence
  Description of Artificial Sequence: Synthetic oligonucleotide
ggaacaauuuugugaccaa

SEQ ID NO: 2216812 - RNA, 19 nt, Artificial Sequence
  Description of Artificial Sequence: Synthetic oligonucleotide
ggcuuaaugauguccucua

SEQ ID NO: 2216813 - RNA, 19 nt, Artificial Sequence
  Description of Artificial Sequence: Synthetic oligonucleotide
guucaaaaucuucucucuu

SEQ ID NO: 2216814 - RNA, 19 nt, Artificial Sequence
  Description of Artificial Sequence: Synthetic oligonucleotide
cagcuauuauaucuugccu

SEQ ID NO: 2216815 - RNA, 19 nt, Artificial Sequence
  Description of Artificial Sequence: Synthetic oligonucleotide
uggcccuguaggugggccu

SEQ ID NO: 2216816 - RNA, 19 nt, Artificial Sequence
  Description of Artificial Sequence: Synthetic oligonucleotide
ugacaaggccuuugaccuu

SEQ ID NO: 2216817 - RNA, 19 nt, Artificial Sequence
  Description of Artificial Sequence: Synthetic oligonucleotide
gcuggugagugcugugggc

SEQ ID NO: 2216818 - RNA, 19 nt, Artificial Sequence
  Description of Artificial Sequence: Synthetic oligonucleotide
cuaacuccauaacccacgu

SEQ ID NO: 2216819 - RNA, 19 nt, Artificial Sequence
  Description of Artificial Sequence: Synthetic oligonucleotide
caguuuccaagugcauuuc

SEQ ID NO: 2216820 - RNA, 19 nt, Artificial Sequence
  Description of Artificial Sequence: Synthetic oligonucleotide
caguaacgucuugagcuuc

SEQ ID NO: 2216821 - RNA, 19 nt, Artificial Sequence
  Description of Artificial Sequence: Synthetic oligonucleotide
gcccucacuaacuccauaa

SEQ ID NO: 2216822 - RNA, 19 nt, Artificial Sequence
  Description of Artificial Sequence: Synthetic oligonucleotide
ggcuuggucugcaagggga

SEQ ID NO: 2216823 - RNA, 19 nt, Artificial Sequence
  Description of Artificial Sequence: Synthetic oligonucleotide
cguccucaugauaggaacc

SEQ ID NO: 2216824 - RNA, 19 nt, Artificial Sequence
  Description of Artificial Sequence: Synthetic oligonucleotide
ccaaaacuccugagugccc

SEQ ID NO: 2216825 - RNA, 19 nt, Artificial Sequence
  Description of Artificial Sequence: Synthetic oligonucleotide
ggguggcuuggucugcaag

SEQ ID NO: 2216826 - RNA, 19 nt, Artificial Sequence
  Description of Artificial Sequence: Synthetic oligonucleotide
uucauucuguaggcagcua

SEQ ID NO: 2216827 - RNA, 19 nt, Artificial Sequence
  Description of Artificial Sequence: Synthetic oligonucleotide
gcccgcuucagcccgucag

SEQ ID NO: 2216828 - RNA, 19 nt, Artificial Sequence
  Description of Artificial Sequence: Synthetic oligonucleotide
ucgaaucauguggguggcu

SEQ ID NO: 2216829 - RNA, 19 nt, Artificial Sequence
  Description of Artificial Sequence: Synthetic oligonucleotide
gaguuuccuaauacaugcu

SEQ ID NO: 2216830 - RNA, 19 nt, Artificial Sequence
  Description of Artificial Sequence: Synthetic oligonucleotide
acgcucggcuuucacuuuu

SEQ ID NO: 2216831 - RNA, 19 nt, Artificial Sequence
  Description of Artificial Sequence: Synthetic oligonucleotide
acggcagguguguggcccu

SEQ ID NO: 2216832 - RNA, 19 nt, Artificial Sequence
  Description of Artificial Sequence: Synthetic oligonucleotide
auccggagucaggucccac

SEQ ID NO: 2216833 - RNA, 19 nt, Artificial Sequence
  Description of Artificial Sequence: Synthetic oligonucleotide
aucauguggguggcuuggu

SEQ ID NO: 2216834 - RNA, 19 nt, Artificial Sequence
  Description of Artificial Sequence: Synthetic oligonucleotide
gcuuaaugauguccucuaa

SEQ ID NO: 2216835 - RNA, 19 nt, Artificial Sequence
  Description of Artificial Sequence: Synthetic oligonucleotide
ggucugcaaggggaagccg

SEQ ID NO: 2216836 - RNA, 19 nt, Artificial Sequence
  Description of Artificial Sequence: Synthetic oligonucleotide
guggcccuguaggugggcc

SEQ ID NO: 2216837 - RNA, 19 nt, Artificial Sequence
  Description of Artificial Sequence: Synthetic oligonucleotide
ucagcccgucagucacagc

SEQ ID NO: 2216838 - RNA, 19 nt, Artificial Sequence
  Description of Artificial Sequence: Synthetic oligonucleotide
agccgcuucuugugguuuu

SEQ ID NO: 2216839 - RNA, 19 nt, Artificial Sequence
  Description of Artificial Sequence: Synthetic oligonucleotide
gccuaauguucgaaucaug

SEQ ID NO: 2216840 - RNA, 19 nt, Artificial Sequence
  Description of Artificial Sequence: Synthetic oligonucleotide
cccucacuaacuccauaac

SEQ ID NO: 2216841 - RNA, 19 nt, Artificial Sequence
  Description of Artificial Sequence: Synthetic oligonucleotide
ccugagugcccgcuucagc

SEQ ID NO: 2216842 - RNA, 19 nt, Artificial Sequence
  Description of Artificial Sequence: Synthetic oligonucleotide
gagcugucguggaagcuua

SEQ ID NO: 2216843 - RNA, 19 nt, Artificial Sequence
  Description of Artificial Sequence: Synthetic oligonucleotide
cuggucuagacaagggcuu

SEQ ID NO: 2216844 - RNA, 19 nt, Artificial Sequence
  Description of Artificial Sequence: Synthetic oligonucleotide
gaggugguucuggucuaga

SEQ ID NO: 2216845 - RNA, 19 nt, Artificial Sequence
  Description of Artificial Sequence: Synthetic oligonucleotide
cuucagcccgucagucaca

SEQ ID NO: 2216846 - RNA, 19 nt, Artificial Sequence
  Description of Artificial Sequence: Synthetic oligonucleotide
cguguaggacaccauccug

SEQ ID NO: 2216847 - RNA, 19 nt, Artificial Sequence
  Description of Artificial Sequence: Synthetic oligonucleotide
uggguggcuuggucugcaa

SEQ ID NO: 2216848 - RNA, 19 nt, Artificial Sequence
  Description of Artificial Sequence: Synthetic oligonucleotide
cuucaggauggauccaguu

SEQ ID NO: 2216849 - RNA, 19 nt, Artificial Sequence
  Description of Artificial Sequence: Synthetic oligonucleotide
agcccgucagucacagccu

SEQ ID NO: 2216850 - RNA, 19 nt, Artificial Sequence
  Description of Artificial Sequence: Synthetic oligonucleotide
gaagccgcuucuugugguu

SEQ ID NO: 2216851 - RNA, 19 nt, Artificial Sequence
  Description of Artificial Sequence: Synthetic oligonucleotide
ggucccacauuucaagguu

SEQ ID NO: 2216852 - RNA, 19 nt, Artificial Sequence
  Description of Artificial Sequence: Synthetic oligonucleotide
ccacauuucaagguugucu

SEQ ID NO: 2216853 - RNA, 19 nt, Artificial Sequence
  Description of Artificial Sequence: Synthetic oligonucleotide
ggugagugcugugggccug

SEQ ID NO: 2216854 - RNA, 19 nt, Artificial Sequence
  Description of Artificial Sequence: Synthetic oligonucleotide
gcucggcuuucacuuuuac

SEQ ID NO: 2216855 - RNA, 19 nt, Artificial Sequence
  Description of Artificial Sequence: Synthetic oligonucleotide
gagcuucaggauggaucca

SEQ ID NO: 2216856 - RNA, 19 nt, Artificial Sequence
  Description of Artificial Sequence: Synthetic oligonucleotide
gcgcuggugaauggcauca

SEQ ID NO: 2216857 - RNA, 19 nt, Artificial Sequence
  Description of Artificial Sequence: Synthetic oligonucleotide
gcuggugaauggcaucacu

SEQ ID NO: 2216858 - RNA, 19 nt, Artificial Sequence
  Description of Artificial Sequence: Synthetic oligonucleotide
cuaauacaugcuggugagu

SEQ ID NO: 2216859 - RNA, 19 nt, Artificial Sequence
  Description of Artificial Sequence: Synthetic oligonucleotide
gggcuuaaugauguccucu

SEQ ID NO: 2216860 - RNA, 19 nt, Artificial Sequence
  Description of Artificial Sequence: Synthetic oligonucleotide
gaguucugaggcagcaguu

SEQ ID NO: 2216861 - RNA, 19 nt, Artificial Sequence
  Description of Artificial Sequence: Synthetic oligonucleotide
cccgucagucacagccucc

SEQ ID NO: 2216862 - RNA, 19 nt, Artificial Sequence
  Description of Artificial Sequence: Synthetic oligonucleotide
ccugaggaguucugaggca

SEQ ID NO: 2216863 - RNA, 19 nt, Artificial Sequence
  Description of Artificial Sequence: Synthetic oligonucleotide
ccggugcuucauucuguag

SEQ ID NO: 2216864 - RNA, 19 nt, Artificial Sequence
  Description of Artificial Sequence: Synthetic oligonucleotide
guaggacaccauccuggau

SEQ ID NO: 2216865 - RNA, 19 nt, Artificial Sequence
  Description of Artificial Sequence: Synthetic oligonucleotide
ggucuagacaagggcuuaa

SEQ ID NO: 2216866 - RNA, 19 nt, Artificial Sequence
  Description of Artificial Sequence: Synthetic oligonucleotide
ccccugcagccuaauguuc

SEQ ID NO: 2216867 - RNA, 19 nt, Artificial Sequence
  Description of Artificial Sequence: Synthetic oligonucleotide
ccuuaggcccucacuaacu

SEQ ID NO: 2216868 - RNA, 19 nt, Artificial Sequence
  Description of Artificial Sequence: Synthetic oligonucleotide
ggaucaccuggacucuggu

SEQ ID NO: 2216869 - RNA, 19 nt, Artificial Sequence
  Description of Artificial Sequence: Synthetic oligonucleotide
gcaaggggaagccgcuucu

SEQ ID NO: 2216870 - RNA, 19 nt, Artificial Sequence
  Description of Artificial Sequence: Synthetic oligonucleotide
gcccgucagucacagccuc

SEQ ID NO: 2216871 - RNA, 19 nt, Artificial Sequence
  Description of Artificial Sequence: Synthetic oligonucleotide
guacuguguuuuggaggaa

SEQ ID NO: 2216872 - RNA, 19 nt, Artificial Sequence
  Description of Artificial Sequence: Synthetic oligonucleotide
cugcagccuaauguucgaa

SEQ ID NO: 2216873 - RNA, 19 nt, Artificial Sequence
  Description of Artificial Sequence: Synthetic oligonucleotide
ggccagacugcaggagcug

SEQ ID NO: 2216874 - RNA, 19 nt, Artificial Sequence
  Description of Artificial Sequence: Synthetic oligonucleotide
gcucuuccuaugagaguca

SEQ ID NO: 2216875 - RNA, 19 nt, Artificial Sequence
  Description of Artificial Sequence: Synthetic oligonucleotide
ccuaugagagucagaguuu

SEQ ID NO: 2216876 - RNA, 19 nt, Artificial Sequence
  Description of Artificial Sequence: Synthetic oligonucleotide
ggucccggugcuucauucu

SEQ ID NO: 2216877 - RNA, 19 nt, Artificial Sequence
  Description of Artificial Sequence: Synthetic oligonucleotide
cuauuauaucuugccuguu

SEQ ID NO: 2216878 - RNA, 19 nt, Artificial Sequence
  Description of Artificial Sequence: Synthetic oligonucleotide
ggcccuguaggugggccuc

SEQ ID NO: 2216879 - RNA, 19 nt, Artificial Sequence
  Description of Artificial Sequence: Synthetic oligonucleotide
cggagcuuccggagcuugc

SEQ ID NO: 2216880 - RNA, 19 nt, Artificial Sequence
  Description of Artificial Sequence: Synthetic oligonucleotide
gacucugguggcagagguu

SEQ ID NO: 2216881 - RNA, 19 nt, Artificial Sequence
  Description of Artificial Sequence: Synthetic oligonucleotide
aggcccucacuaacuccau

SEQ ID NO: 2216882 - RNA, 19 nt, Artificial Sequence
  Description of Artificial Sequence: Synthetic oligonucleotide
ggagcuugcgcuggugaau

SEQ ID NO: 2216883 - RNA, 19 nt, Artificial Sequence
  Description of Artificial Sequence: Synthetic oligonucleotide
ccaguaacgucuugagcuu

SEQ ID NO: 2216884 - RNA, 19 nt, Artificial Sequence
  Description of Artificial Sequence: Synthetic oligonucleotide
ccguguaggacaccauccu

SEQ ID NO: 2216885 - RNA, 19 nt, Artificial Sequence
  Description of Artificial Sequence: Synthetic oligonucleotide
aggccguguaggacaccau

SEQ ID NO: 2216886 - RNA, 19 nt, Artificial Sequence
  Description of Artificial Sequence: Synthetic oligonucleotide
ccggagcuuccggagcuug

SEQ ID NO: 2216887 - RNA, 19 nt, Artificial Sequence
  Description of Artificial Sequence: Synthetic oligonucleotide
ccgcuucagcccgucaguc

SEQ ID NO: 2216888 - RNA, 19 nt, Artificial Sequence
  Description of Artificial Sequence: Synthetic oligonucleotide
gcuucaggauggauccagu

SEQ ID NO: 2216889 - RNA, 19 nt, Artificial Sequence
  Description of Artificial Sequence: Synthetic oligonucleotide
cgcuucagcccgucaguca

SEQ ID NO: 2216890 - RNA, 19 nt, Artificial Sequence
  Description of Artificial Sequence: Synthetic oligonucleotide
cugccucacgcucggcuuu

SEQ ID NO: 2216891 - RNA, 19 nt, Artificial Sequence
  Description of Artificial Sequence: Synthetic oligonucleotide
gcccuguaggugggccucc

SEQ ID NO: 2216892 - RNA, 19 nt, Artificial Sequence
  Description of Artificial Sequence: Synthetic oligonucleotide
cagcaguuacagggguacu

SEQ ID NO: 2216893 - RNA, 19 nt, Artificial Sequence
  Description of Artificial Sequence: Synthetic oligonucleotide
cacgcucggcuuucacuuu

SEQ ID NO: 2216894 - RNA, 19 nt, Artificial Sequence
  Description of Artificial Sequence: Synthetic oligonucleotide
ggacaccauccuggaucac

SEQ ID NO: 2216895 - RNA, 19 nt, Artificial Sequence
  Description of Artificial Sequence: Synthetic oligonucleotide
caaggggaagccgcuucuu

SEQ ID NO: 2216896 - RNA, 19 nt, Artificial Sequence
  Description of Artificial Sequence: Synthetic oligonucleotide
gggagcugucguggaagcu

SEQ ID NO: 2216897 - RNA, 19 nt, Artificial Sequence
  Description of Artificial Sequence: Synthetic oligonucleotide
ccggagucaggucccacau

SEQ ID NO: 2216898 - RNA, 19 nt, Artificial Sequence
  Description of Artificial Sequence: Synthetic oligonucleotide
gcugucguggaagcuuauu

SEQ ID NO: 2216899 - RNA, 19 nt, Artificial Sequence
  Description of Artificial Sequence: Synthetic oligonucleotide
cugcaaggggaagccgcuu

SEQ ID NO: 2216900 - RNA, 19 nt, Artificial Sequence
  Description of Artificial Sequence: Synthetic oligonucleotide
cccuguaggugggccucca

SEQ ID NO: 2216901 - RNA, 19 nt, Artificial Sequence
  Description of Artificial Sequence: Synthetic oligonucleotide
gccugcaggugaccagcuu

SEQ ID NO: 2216902 - RNA, 19 nt, Artificial Sequence
  Description of Artificial Sequence: Synthetic oligonucleotide
ccuguaggugggccuccau

SEQ ID NO: 2216903 - RNA, 19 nt, Artificial Sequence
  Description of Artificial Sequence: Synthetic oligonucleotide
auuuauaaaagccaagggc

SEQ ID NO: 2216904 - RNA, 19 nt, Artificial Sequence
  Description of Artificial Sequence: Synthetic oligonucleotide
uuuauaaaagccaagggcc

SEQ ID NO: 2216905 - RNA, 19 nt, Artificial Sequence
  Description of Artificial Sequence: Synthetic oligonucleotide
uauuuauaaaagccaaggg

SEQ ID NO: 2216906 - RNA, 19 nt, Artificial Sequence
  Description of Artificial Sequence: Synthetic oligonucleotide
ugaauggaaacucugguug

SEQ ID NO: 2216907 - RNA, 19 nt, Artificial Sequence
  Description of Artificial Sequence: Synthetic oligonucleotide
gacaggguaagcuucaggg

SEQ ID NO: 2216908 - RNA, 19 nt, Artificial Sequence
  Description of Artificial Sequence: Synthetic oligonucleotide
aaaagggucuuauuuauaa

SEQ ID NO: 2216909 - RNA, 19 nt, Artificial Sequence
  Description of Artificial Sequence: Synthetic oligonucleotide
uucugaauggaaacucugg

SEQ ID NO: 2216910 - RNA, 19 nt, Artificial Sequence
  Description of Artificial Sequence: Synthetic oligonucleotide
aagggucuuauuuauaaaa

SEQ ID NO: 2216911 - RNA, 19 nt, Artificial Sequence
  Description of Artificial Sequence: Synthetic oligonucleotide
ucauugagguccaacagga

SEQ ID NO: 2216912 - RNA, 19 nt, Artificial Sequence
  Description of Artificial Sequence: Synthetic oligonucleotide
ugaguauccucuguaauag

SEQ ID NO: 2216913 - RNA, 19 nt, Artificial Sequence
  Description of Artificial Sequence: Synthetic oligonucleotide
ucaucauugagguccaaca

SEQ ID NO: 2216914 - RNA, 19 nt, Artificial Sequence
  Description of Artificial Sequence: Synthetic oligonucleotide
acaggaacccacuugaaga

SEQ ID NO: 2216915 - RNA, 19 nt, Artificial Sequence
  Description of Artificial Sequence: Synthetic oligonucleotide
uuauaaaagccaagggccu

SEQ ID NO: 2216916 - RNA, 19 nt, Artificial Sequence
  Description of Artificial Sequence: Synthetic oligonucleotide
auugagguccaacaggaug

SEQ ID NO: 2216917 - RNA, 19 nt, Artificial Sequence
  Description of Artificial Sequence: Synthetic oligonucleotide
ugaaccuucugaauggaaa

SEQ ID NO: 2216918 - RNA, 19 nt, Artificial Sequence
  Description of Artificial Sequence: Synthetic oligonucleotide
aacaggacaggaggcaggc

SEQ ID NO: 2216919 - RNA, 19 nt, Artificial Sequence
  Description of Artificial Sequence: Synthetic oligonucleotide
cacuugaagauucgaaggg

SEQ ID NO: 2216920 - RNA, 19 nt, Artificial Sequence
  Description of Artificial Sequence: Synthetic oligonucleotide
uugaagauucgaagggaag

SEQ ID NO: 2216921 - RNA, 19 nt, Artificial Sequence
  Description of Artificial Sequence: Synthetic oligonucleotide
agguccaacaggaugaggg

SEQ ID NO: 2216922 - RNA, 19 nt, Artificial Sequence
  Description of Artificial Sequence: Synthetic oligonucleotide
ugaagauucgaagggaagu

SEQ ID NO: 2216923 - RNA, 19 nt, Artificial Sequence
  Description of Artificial Sequence: Synthetic oligonucleotide
cagugaaccuucugaaugg

SEQ ID NO: 2216924 - RNA, 19 nt, Artificial Sequence
  Description of Artificial Sequence: Synthetic oligonucleotide
cagcaauucuggaacaggc

SEQ ID NO: 2216925 - RNA, 19 nt, Artificial Sequence
  Description of Artificial Sequence: Synthetic oligonucleotide
gaagauucgaagggaagug

SEQ ID NO: 2216926 - RNA, 19 nt, Artificial Sequence
  Description of Artificial Sequence: Synthetic oligonucleotide
ucaaagacaggguaagcuu

SEQ ID NO: 2216927 - RNA, 19 nt, Artificial Sequence
  Description of Artificial Sequence: Synthetic oligonucleotide
auucgaagggaagugucac

SEQ ID NO: 2216928 - RNA, 19 nt, Artificial Sequence
  Description of Artificial Sequence: Synthetic oligonucleotide
ugaggauccaccacaggaa

SEQ ID NO: 2216929 - RNA, 19 nt, Artificial Sequence
  Description of Artificial Sequence: Synthetic oligonucleotide
caaagacaggguaagcuuc

SEQ ID NO: 2216930 - RNA, 19 nt, Artificial Sequence
  Description of Artificial Sequence: Synthetic oligonucleotide
ucgaagggaagugucaccc

SEQ ID NO: 2216931 - RNA, 19 nt, Artificial Sequence
  Description of Artificial Sequence: Synthetic oligonucleotide
ucaucaguaccgccugcgg

SEQ ID NO: 2216932 - RNA, 19 nt, Artificial Sequence
  Description of Artificial Sequence: Synthetic oligonucleotide
aaacucugguugcuguucu

SEQ ID NO: 2216933 - RNA, 19 nt, Artificial Sequence
  Description of Artificial Sequence: Synthetic oligonucleotide
cagucggggacccaggacg

SEQ ID NO: 2216934 - RNA, 19 nt, Artificial Sequence
  Description of Artificial Sequence: Synthetic oligonucleotide
caucauugagguccaacag

SEQ ID NO: 2216935 - RNA, 19 nt, Artificial Sequence
  Description of Artificial Sequence: Synthetic oligonucleotide
gggucuuauuuauaaaagc

SEQ ID NO: 2216936 - RNA, 19 nt, Artificial Sequence
  Description of Artificial Sequence: Synthetic oligonucleotide
agggucuuauuuauaaaag

SEQ ID NO: 2216937 - RNA, 19 nt, Artificial Sequence
  Description of Artificial Sequence: Synthetic oligonucleotide
cacgggaucucucuguccc

SEQ ID NO: 2216938 - RNA, 19 nt, Artificial Sequence
  Description of Artificial Sequence: Synthetic oligonucleotide
aggggccucagcuuccagc

SEQ ID NO: 2216939 - RNA, 19 nt, Artificial Sequence
  Description of Artificial Sequence: Synthetic oligonucleotide
aucaguaccgccugcgggu

SEQ ID NO: 2216940 - RNA, 19 nt, Artificial Sequence
  Description of Artificial Sequence: Synthetic oligonucleotide
ucuuggcccaacugugggg

SEQ ID NO: 2216941 - RNA, 19 nt, Artificial Sequence
  Description of Artificial Sequence: Synthetic oligonucleotide
aagauucgaagggaagugu

SEQ ID NO: 2216942 - RNA, 19 nt, Artificial Sequence
  Description of Artificial Sequence: Synthetic oligonucleotide
aauggaaacucugguugcu

SEQ ID NO: 2216943 - RNA, 19 nt, Artificial Sequence
  Description of Artificial Sequence: Synthetic oligonucleotide
agucacccagcgcuucucc

SEQ ID NO: 2216944 - RNA, 19 nt, Artificial Sequence
  Description of Artificial Sequence: Synthetic oligonucleotide
ccacuugaagauucgaagg

SEQ ID NO: 2216945 - RNA, 19 nt, Artificial Sequence
  Description of Artificial Sequence: Synthetic oligonucleotide
caucaguaccgccugcggg

SEQ ID NO: 2216946 - RNA, 19 nt, Artificial Sequence
  Description of Artificial Sequence: Synthetic oligonucleotide
cugaggauccaccacagga

SEQ ID NO: 2216947 - RNA, 19 nt, Artificial Sequence
  Description of Artificial Sequence: Synthetic oligonucleotide
agauucgaagggaaguguc

SEQ ID NO: 2216948 - RNA, 19 nt, Artificial Sequence
  Description of Artificial Sequence: Synthetic oligonucleotide
agacaggguaagcuucagg

SEQ ID NO: 2216949 - RNA, 19 nt, Artificial Sequence
  Description of Artificial Sequence: Synthetic oligonucleotide
cacaggaacccacuugaag

SEQ ID NO: 2216950 - RNA, 19 nt, Artificial Sequence
  Description of Artificial Sequence: Synthetic oligonucleotide
uaaaagggucuuauuuaua

SEQ ID NO: 2216951 - RNA, 19 nt, Artificial Sequence
  Description of Artificial Sequence: Synthetic oligonucleotide
cuggggccgggauagagcc

SEQ ID NO: 2216952 - RNA, 19 nt, Artificial Sequence
  Description of Artificial Sequence: Synthetic oligonucleotide
ucuccggaccuucucgaug

SEQ ID NO: 2216953 - RNA, 19 nt, Artificial Sequence
  Description of Artificial Sequence: Synthetic oligonucleotide
accgccugcggguguaccc

SEQ ID NO: 2216954 - RNA, 19 nt, Artificial Sequence
  Description of Artificial Sequence: Synthetic oligonucleotide
gggcagaugcgcuugagug

SEQ ID NO: 2216955 - RNA, 19 nt, Artificial Sequence
  Description of Artificial Sequence: Synthetic oligonucleotide
uccagcaauucuggaacag

SEQ ID NO: 2216956 - RNA, 19 nt, Artificial Sequence
  Description of Artificial Sequence: Synthetic oligonucleotide
cccacuugaagauucgaag

SEQ ID NO: 2216957 - RNA, 19 nt, Artificial Sequence
  Description of Artificial Sequence: Synthetic oligonucleotide
gauucgaagggaaguguca

SEQ ID NO: 2216958 - RNA, 19 nt, Artificial Sequence
  Description of Artificial Sequence: Synthetic oligonucleotide
ugcccgacgccucuccucc

SEQ ID NO: 2216959 - RNA, 19 nt, Artificial Sequence
  Description of Artificial Sequence: Synthetic oligonucleotide
gucaucaguaccgccugcg

SEQ ID NO: 2216960 - RNA, 19 nt, Artificial Sequence
  Description of Artificial Sequence: Synthetic oligonucleotide
gguccaacaggaugagggg

SEQ ID NO: 2216961 - RNA, 19 nt, Artificial Sequence
  Description of Artificial Sequence: Synthetic oligonucleotide
ggcagaugcgcuugagugg

SEQ ID NO: 2216962 - RNA, 19 nt, Artificial Sequence
  Description of Artificial Sequence: Synthetic oligonucleotide
auagagcccguggugggac

SEQ ID NO: 2216963 - RNA, 19 nt, Artificial Sequence
  Description of Artificial Sequence: Synthetic oligonucleotide
ggcgaucucaggcugcgcg

SEQ ID NO: 2216964 - RNA, 19 nt, Artificial Sequence
  Description of Artificial Sequence: Synthetic oligonucleotide
aggauccaccacaggaacc

SEQ ID NO: 2216965 - RNA, 19 nt, Artificial Sequence
  Description of Artificial Sequence: Synthetic oligonucleotide
aggacggcugggcugagga

SEQ ID NO: 2216966 - RNA, 19 nt, Artificial Sequence
  Description of Artificial Sequence: Synthetic oligonucleotide
gaacccacuugaagauucg

SEQ ID NO: 2216967 - RNA, 19 nt, Artificial Sequence
  Description of Artificial Sequence: Synthetic oligonucleotide
cagcgcuucucccaucucc

SEQ ID NO: 2216968 - RNA, 19 nt, Artificial Sequence
  Description of Artificial Sequence: Synthetic oligonucleotide
ugcagugaaccuucugaau

SEQ ID NO: 2216969 - RNA, 19 nt, Artificial Sequence
  Description of Artificial Sequence: Synthetic oligonucleotide
caggcugcgcgccaggccc

SEQ ID NO: 2216970 - RNA, 19 nt, Artificial Sequence
  Description of Artificial Sequence: Synthetic oligonucleotide
ugggcagaugcgcuugagu

SEQ ID NO: 2216971 - RNA, 19 nt, Artificial Sequence
  Description of Artificial Sequence: Synthetic oligonucleotide
uuggccgcgcccucccucg

SEQ ID NO: 2216972 - RNA, 19 nt, Artificial Sequence
  Description of Artificial Sequence: Synthetic oligonucleotide
gcagaugcgcuugaguggg

SEQ ID NO: 2216973 - RNA, 19 nt, Artificial Sequence
  Description of Artificial Sequence: Synthetic oligonucleotide
cuuccugcgaccgcgcccc

SEQ ID NO: 2216974 - RNA, 19 nt, Artificial Sequence
  Description of Artificial Sequence: Synthetic oligonucleotide
ucagugcccuucugcagug

SEQ ID NO: 2216975 - RNA, 19 nt, Artificial Sequence
  Description of Artificial Sequence: Synthetic oligonucleotide
agcgcuucucccaucuccg

SEQ ID NO: 2216976 - RNA, 19 nt, Artificial Sequence
  Description of Artificial Sequence: Synthetic oligonucleotide
ucuuucggccugccguccc

SEQ ID NO: 2216977 - RNA, 19 nt, Artificial Sequence
  Description of Artificial Sequence: Synthetic oligonucleotide
cuccccaacgccuccgcgc

SEQ ID NO: 2216978 - RNA, 19 nt, Artificial Sequence
  Description of Artificial Sequence: Synthetic oligonucleotide
acccacagucacccagcgc

SEQ ID NO: 2216979 - RNA, 19 nt, Artificial Sequence
  Description of Artificial Sequence: Synthetic oligonucleotide
ugcgguccggcgaucucag

SEQ ID NO: 2216980 - RNA, 19 nt, Artificial Sequence
  Description of Artificial Sequence: Synthetic oligonucleotide
uccagucggggacccagga

SEQ ID NO: 2216981 - RNA, 19 nt, Artificial Sequence
  Description of Artificial Sequence: Synthetic oligonucleotide
ggcauuugggcagaugcgc

SEQ ID NO: 2216982 - RNA, 19 nt, Artificial Sequence
  Description of Artificial Sequence: Synthetic oligonucleotide
ucccuccgggaguuggccg

SEQ ID NO: 2216983 - RNA, 19 nt, Artificial Sequence
  Description of Artificial Sequence: Synthetic oligonucleotide
gaucucucugucccgccuc

SEQ ID NO: 2216984 - RNA, 19 nt, Artificial Sequence
  Description of Artificial Sequence: Synthetic oligonucleotide
cucucucuuggcccaacug

SEQ ID NO: 2216985 - RNA, 19 nt, Artificial Sequence
  Description of Artificial Sequence: Synthetic oligonucleotide
aacccacuugaagauucga

SEQ ID NO: 2216986 - RNA, 19 nt, Artificial Sequence
  Description of Artificial Sequence: Synthetic oligonucleotide
ucccucgcuccccaacgcc

SEQ ID NO: 2216987 - RNA, 19 nt, Artificial Sequence
  Description of Artificial Sequence: Synthetic oligonucleotide
acgggaucucucugucccg

SEQ ID NO: 2216988 - RNA, 19 nt, Artificial Sequence
  Description of Artificial Sequence: Synthetic oligonucleotide
agugaaccuucugaaugga

SEQ ID NO: 2216989 - RNA, 19 nt, Artificial Sequence
  Description of Artificial Sequence: Synthetic oligonucleotide
uagagcccguggugggacg

SEQ ID NO: 2216990 - RNA, 19 nt, Artificial Sequence
  Description of Artificial Sequence: Synthetic oligonucleotide
cucaaagacaggguaagcu

SEQ ID NO: 2216991 - RNA, 19 nt, Artificial Sequence
  Description of Artificial Sequence: Synthetic oligonucleotide
ucggccugccgucccuccg

SEQ ID NO: 2216992 - RNA, 19 nt, Artificial Sequence
  Description of Artificial Sequence: Synthetic oligonucleotide
ggaacccacuugaagauuc

SEQ ID NO: 2216993 - RNA, 19 nt, Artificial Sequence
  Description of Artificial Sequence: Synthetic oligonucleotide
cuggcucaaagacagggua

SEQ ID NO: 2216994 - RNA, 19 nt, Artificial Sequence
  Description of Artificial Sequence: Synthetic oligonucleotide
uccggcgaucucaggcugc

SEQ ID NO: 2216995 - RNA, 19 nt, Artificial Sequence
  Description of Artificial Sequence: Synthetic oligonucleotide
cugcagugaaccuucugaa

SEQ ID NO: 2216996 - RNA, 19 nt, Artificial Sequence
  Description of Artificial Sequence: Synthetic oligonucleotide
ugggacuggugccccugcc

SEQ ID NO: 2216997 - RNA, 19 nt, Artificial Sequence
  Description of Artificial Sequence: Synthetic oligonucleotide
ugggacggccugcgguccg

SEQ ID NO: 2216998 - RNA, 19 nt, Artificial Sequence
  Description of Artificial Sequence: Synthetic oligonucleotide
agugcccuucugcagugaa

SEQ ID NO: 2216999 - RNA, 19 nt, Artificial Sequence
  Description of Artificial Sequence: Synthetic oligonucleotide
ccaucuccggaccuucucg

SEQ ID NO: 2217000 - RNA, 19 nt, Artificial Sequence
  Description of Artificial Sequence: Synthetic oligonucleotide
ucaguaccgccugcgggug

SEQ ID NO: 2217001 - RNA, 19 nt, Artificial Sequence
  Description of Artificial Sequence: Synthetic oligonucleotide
gcuuccagcaauucuggaa

SEQ ID NO: 2217002 - RNA, 19 nt, Artificial Sequence
  Description of Artificial Sequence: Synthetic oligonucleotide
ugugucacccugggcugcc

SEQ ID NO: 2217003 - RNA, 19 nt, Artificial Sequence
  Description of Artificial Sequence: Synthetic oligonucleotide
ggacuggugccccugccgc

SEQ ID NO: 2217004 - RNA, 19 nt, Artificial Sequence
  Description of Artificial Sequence: Synthetic oligonucleotide
ucucucccggccacgggau

SEQ ID NO: 2217005 - RNA, 19 nt, Artificial Sequence
  Description of Artificial Sequence: Synthetic oligonucleotide
uccugcccgacgccucucc

SEQ ID NO: 2217006 - RNA, 19 nt, Artificial Sequence
  Description of Artificial Sequence: Synthetic oligonucleotide
gaguuggccgcgcccuccc

SEQ ID NO: 2217007 - RNA, 19 nt, Artificial Sequence
  Description of Artificial Sequence: Synthetic oligonucleotide
gauagagcccgugguggga

SEQ ID NO: 2217008 - RNA, 19 nt, Artificial Sequence
  Description of Artificial Sequence: Synthetic oligonucleotide
gucucucccggccacggga

SEQ ID NO: 2217009 - RNA, 19 nt, Artificial Sequence
  Description of Artificial Sequence: Synthetic oligonucleotide
ggggccgggauagagcccg

SEQ ID NO: 2217010 - RNA, 19 nt, Artificial Sequence
  Description of Artificial Sequence: Synthetic oligonucleotide
agagcccguggugggacgg

SEQ ID NO: 2217011 - RNA, 19 nt, Artificial Sequence
  Description of Artificial Sequence: Synthetic oligonucleotide
uugggcagaugcgcuugag

SEQ ID NO: 2217012 - RNA, 19 nt, Artificial Sequence
  Description of Artificial Sequence: Synthetic oligonucleotide
caucuccggaccuucucga

SEQ ID NO: 2217013 - RNA, 19 nt, Artificial Sequence
  Description of Artificial Sequence: Synthetic oligonucleotide
gccgggauagagcccgugg

SEQ ID NO: 2217014 - RNA, 19 nt, Artificial Sequence
  Description of Artificial Sequence: Synthetic oligonucleotide
gggcauuugggcagaugcg

SEQ ID NO: 2217015 - RNA, 19 nt, Artificial Sequence
  Description of Artificial Sequence: Synthetic oligonucleotide
ugcgaccgcgccccgcccc

SEQ ID NO: 2217016 - RNA, 19 nt, Artificial Sequence
  Description of Artificial Sequence: Synthetic oligonucleotide
acccacuugaagauucgaa

SEQ ID NO: 2217017 - RNA, 19 nt, Artificial Sequence
  Description of Artificial Sequence: Synthetic oligonucleotide
uccgggaguuggccgcgcc

SEQ ID NO: 2217018 - RNA, 19 nt, Artificial Sequence
  Description of Artificial Sequence: Synthetic oligonucleotide
cugaauggaaacucugguu

SEQ ID NO: 2217019 - RNA, 19 nt, Artificial Sequence
  Description of Artificial Sequence: Synthetic oligonucleotide
cucucugucccgccuccug

SEQ ID NO: 2217020 - RNA, 19 nt, Artificial Sequence
  Description of Artificial Sequence: Synthetic oligonucleotide
gguccggccggccaugcug

SEQ ID NO: 2217021 - RNA, 19 nt, Artificial Sequence
  Description of Artificial Sequence: Synthetic oligonucleotide
ugucccgccuccugcccga

SEQ ID NO: 2217022 - RNA, 19 nt, Artificial Sequence
  Description of Artificial Sequence: Synthetic oligonucleotide
acggccugcgguccggcga

SEQ ID NO: 2217023 - RNA, 19 nt, Artificial Sequence
  Description of Artificial Sequence: Synthetic oligonucleotide
acggcugggcugaggaguc

SEQ ID NO: 2217024 - RNA, 19 nt, Artificial Sequence
  Description of Artificial Sequence: Synthetic oligonucleotide
ggaccuucucgauggucgc

SEQ ID NO: 2217025 - RNA, 19 nt, Artificial Sequence
  Description of Artificial Sequence: Synthetic oligonucleotide
ucggggacccaggacggcu

SEQ ID NO: 2217026 - RNA, 19 nt, Artificial Sequence
  Description of Artificial Sequence: Synthetic oligonucleotide
guccggccggccaugcugg

SEQ ID NO: 2217027 - RNA, 19 nt, Artificial Sequence
  Description of Artificial Sequence: Synthetic oligonucleotide
cucccucgcuccccaacgc

SEQ ID NO: 2217028 - RNA, 19 nt, Artificial Sequence
  Description of Artificial Sequence: Synthetic oligonucleotide
gggcucagugcccuucugc

SEQ ID NO: 2217029 - RNA, 19 nt, Artificial Sequence
  Description of Artificial Sequence: Synthetic oligonucleotide
uccccgccuggcuuccugc

SEQ ID NO: 2217030 - RNA, 19 nt, Artificial Sequence
  Description of Artificial Sequence: Synthetic oligonucleotide
guccggcgaucucaggcug

SEQ ID NO: 2217031 - RNA, 19 nt, Artificial Sequence
  Description of Artificial Sequence: Synthetic oligonucleotide
gacggcugggcugaggagu

SEQ ID NO: 2217032 - RNA, 19 nt, Artificial Sequence
  Description of Artificial Sequence: Synthetic oligonucleotide
gaucucaggcugcgcgcca

SEQ ID NO: 2217033 - RNA, 19 nt, Artificial Sequence
  Description of Artificial Sequence: Synthetic oligonucleotide
cagaugcgcuugagugggg

SEQ ID NO: 2217034 - RNA, 19 nt, Artificial Sequence
  Description of Artificial Sequence: Synthetic oligonucleotide
gguccagucggggacccag

SEQ ID NO: 2217035 - RNA, 19 nt, Artificial Sequence
  Description of Artificial Sequence: Synthetic oligonucleotide
uggggccgggauagagccc

SEQ ID NO: 2217036 - RNA, 19 nt, Artificial Sequence
  Description of Artificial Sequence: Synthetic oligonucleotide
ggugggacggccugcgguc

SEQ ID NO: 2217037 - RNA, 19 nt, Artificial Sequence
  Description of Artificial Sequence: Synthetic oligonucleotide
gccuuggagcaacaggaca

SEQ ID NO: 2217038 - RNA, 19 nt, Artificial Sequence
  Description of Artificial Sequence: Synthetic oligonucleotide
cucgcuccccaacgccucc

SEQ ID NO: 2217039 - RNA, 19 nt, Artificial Sequence
  Description of Artificial Sequence: Synthetic oligonucleotide
ccugccgucccuccgggag

SEQ ID NO: 2217040 - RNA, 19 nt, Artificial Sequence
  Description of Artificial Sequence: Synthetic oligonucleotide
cucuuucggccugccgucc

SEQ ID NO: 2217041 - RNA, 19 nt, Artificial Sequence
  Description of Artificial Sequence: Synthetic oligonucleotide
gcgaucucaggcugcgcgc

SEQ ID NO: 2217042 - RNA, 19 nt, Artificial Sequence
  Description of Artificial Sequence: Synthetic oligonucleotide
ccugccgcgucucucccgg

SEQ ID NO: 2217043 - RNA, 19 nt, Artificial Sequence
  Description of Artificial Sequence: Synthetic oligonucleotide
caggaacccacuugaagau

SEQ ID NO: 2217044 - RNA, 19 nt, Artificial Sequence
  Description of Artificial Sequence: Synthetic oligonucleotide
ccucccucgcuccccaacg

SEQ ID NO: 2217045 - RNA, 19 nt, Artificial Sequence
  Description of Artificial Sequence: Synthetic oligonucleotide
ucccgccuccugcccgacg

SEQ ID NO: 2217046 - RNA, 19 nt, Artificial Sequence
  Description of Artificial Sequence: Synthetic oligonucleotide
ggucaucaguaccgccugc

SEQ ID NO: 2217047 - RNA, 19 nt, Artificial Sequence
  Description of Artificial Sequence: Synthetic oligonucleotide
guuggccgcgcccucccuc

SEQ ID NO: 2217048 - RNA, 19 nt, Artificial Sequence
  Description of Artificial Sequence: Synthetic oligonucleotide
guggugggacggccugcgg

SEQ ID NO: 2217049 - RNA, 19 nt, Artificial Sequence
  Description of Artificial Sequence: Synthetic oligonucleotide
cugcccgacgccucuccuc

SEQ ID NO: 2217050 - RNA, 19 nt, Artificial Sequence
  Description of Artificial Sequence: Synthetic oligonucleotide
aggaacccacuugaagauu

SEQ ID NO: 2217051 - RNA, 19 nt, Artificial Sequence
  Description of Artificial Sequence: Synthetic oligonucleotide
gucccuccgggaguuggcc

SEQ ID NO: 2217052 - RNA, 19 nt, Artificial Sequence
  Description of Artificial Sequence: Synthetic oligonucleotide
uccgcgcguccccgccugg

SEQ ID NO: 2217053 - RNA, 19 nt, Artificial Sequence
  Description of Artificial Sequence: Synthetic oligonucleotide
gugaaccuucugaauggaa

SEQ ID NO: 2217054 - RNA, 19 nt, Artificial Sequence
  Description of Artificial Sequence: Synthetic oligonucleotide
aggaggcaggcagcuucuc

SEQ ID NO: 2217055 - RNA, 19 nt, Artificial Sequence
  Description of Artificial Sequence: Synthetic oligonucleotide
cugggcugccucagggaca

SEQ ID NO: 2217056 - RNA, 19 nt, Artificial Sequence
  Description of Artificial Sequence: Synthetic oligonucleotide
acgguccggccggccaugc

SEQ ID NO: 2217057 - RNA, 19 nt, Artificial Sequence
  Description of Artificial Sequence: Synthetic oligonucleotide
gggaucucucugucccgcc

SEQ ID NO: 2217058 - RNA, 19 nt, Artificial Sequence
  Description of Artificial Sequence: Synthetic oligonucleotide
cucccaucuccggaccuuc

SEQ ID NO: 2217059 - RNA, 19 nt, Artificial Sequence
  Description of Artificial Sequence: Synthetic oligonucleotide
gggucucucucuuggccca

SEQ ID NO: 2217060 - RNA, 19 nt, Artificial Sequence
  Description of Artificial Sequence: Synthetic oligonucleotide
cacccugggcugccucagg

SEQ ID NO: 2217061 - RNA, 19 nt, Artificial Sequence
  Description of Artificial Sequence: Synthetic oligonucleotide
cgguccggcgaucucaggc

SEQ ID NO: 2217062 - RNA, 19 nt, Artificial Sequence
  Description of Artificial Sequence: Synthetic oligonucleotide
aggggcauuugggcagaug

SEQ ID NO: 2217063 - RNA, 19 nt, Artificial Sequence
  Description of Artificial Sequence: Synthetic oligonucleotide
cccggcgccgcucuuucgg

SEQ ID NO: 2217064 - RNA, 19 nt, Artificial Sequence
  Description of Artificial Sequence: Synthetic oligonucleotide
uuccugcgaccgcgccccg

SEQ ID NO: 2217065 - RNA, 19 nt, Artificial Sequence
  Description of Artificial Sequence: Synthetic oligonucleotide
ucggcccgcacgguccggc

SEQ ID NO: 2217066 - RNA, 19 nt, Artificial Sequence
  Description of Artificial Sequence: Synthetic oligonucleotide
gaguccucugugucacccu

SEQ ID NO: 2217067 - RNA, 19 nt, Artificial Sequence
  Description of Artificial Sequence: Synthetic oligonucleotide
aguaccgccugcgggugua

SEQ ID NO: 2217068 - RNA, 19 nt, Artificial Sequence
  Description of Artificial Sequence: Synthetic oligonucleotide
ccuccgaguccucuguguc

SEQ ID NO: 2217069 - RNA, 19 nt, Artificial Sequence
  Description of Artificial Sequence: Synthetic oligonucleotide
ggacggcugggcugaggag

SEQ ID NO: 2217070 - RNA, 19 nt, Artificial Sequence
  Description of Artificial Sequence: Synthetic oligonucleotide
gcgcuucucccaucuccgg

SEQ ID NO: 2217071 - RNA, 19 nt, Artificial Sequence
  Description of Artificial Sequence: Synthetic oligonucleotide
aguuggccgcgcccucccu

SEQ ID NO: 2217072 - RNA, 19 nt, Artificial Sequence
  Description of Artificial Sequence: Synthetic oligonucleotide
uccgggucucggcccgcac

SEQ ID NO: 2217073 - RNA, 19 nt, Artificial Sequence
  Description of Artificial Sequence: Synthetic oligonucleotide
guccccgccuggcuuccug

SEQ ID NO: 2217074 - RNA, 19 nt, Artificial Sequence
  Description of Artificial Sequence: Synthetic oligonucleotide
ccugcgaccgcgccccgcc

SEQ ID NO: 2217075 - RNA, 19 nt, Artificial Sequence
  Description of Artificial Sequence: Synthetic oligonucleotide
cugcgguccggcgaucuca

SEQ ID NO: 2217076 - RNA, 19 nt, Artificial Sequence
  Description of Artificial Sequence: Synthetic oligonucleotide
ccuucugaauggaaacucu

SEQ ID NO: 2217077 - RNA, 19 nt, Artificial Sequence
  Description of Artificial Sequence: Synthetic oligonucleotide
gugggacggccugcggucc

SEQ ID NO: 2217078 - RNA, 19 nt, Artificial Sequence
  Description of Artificial Sequence: Synthetic oligonucleotide
cugcgcgccaggccccggc

SEQ ID NO: 2217079 - RNA, 19 nt, Artificial Sequence
  Description of Artificial Sequence: Synthetic oligonucleotide
ggaguuggccgcgcccucc

SEQ ID NO: 2217080 - RNA, 19 nt, Artificial Sequence
  Description of Artificial Sequence: Synthetic oligonucleotide
ccaagggccuuggagcaac

SEQ ID NO: 2217081 - RNA, 19 nt, Artificial Sequence
  Description of Artificial Sequence: Synthetic oligonucleotide
cgaguccucugugucaccc

SEQ ID NO: 2217082 - RNA, 19 nt, Artificial Sequence
  Description of Artificial Sequence: Synthetic oligonucleotide
gcccgcacgguccggccgg

SEQ ID NO: 2217083 - RNA, 19 nt, Artificial Sequence
  Description of Artificial Sequence: Synthetic oligonucleotide
gagcggcccgggcggcgcg

SEQ ID NO: 2217084 - RNA, 19 nt, Artificial Sequence
  Description of Artificial Sequence: Synthetic oligonucleotide
aggcuccuccuuggucaac

SEQ ID NO: 2217085 - RNA, 19 nt, Artificial Sequence
  Description of Artificial Sequence: Synthetic oligonucleotide
gguccggcgaucucaggcu

SEQ ID NO: 2217086 - RNA, 19 nt, Artificial Sequence
  Description of Artificial Sequence: Synthetic oligonucleotide
cauuugggcagaugcgcuu

SEQ ID NO: 2217087 - RNA, 19 nt, Artificial Sequence
  Description of Artificial Sequence: Synthetic oligonucleotide
gggcugaguauccucugua

SEQ ID NO: 2217088 - RNA, 19 nt, Artificial Sequence
  Description of Artificial Sequence: Synthetic oligonucleotide
ggcccgcacgguccggccg

SEQ ID NO: 2217089 - RNA, 19 nt, Artificial Sequence
  Description of Artificial Sequence: Synthetic oligonucleotide
cuccgcgcguccccgccug

SEQ ID NO: 2217090 - RNA, 19 nt, Artificial Sequence
  Description of Artificial Sequence: Synthetic oligonucleotide
ccccucugggacuggugcc

SEQ ID NO: 2217091 - RNA, 19 nt, Artificial Sequence
  Description of Artificial Sequence: Synthetic oligonucleotide
caacgccuccgcgcguccc

SEQ ID NO: 2217092 - RNA, 19 nt, Artificial Sequence
  Description of Artificial Sequence: Synthetic oligonucleotide
acgccuccgcgcguccccg

SEQ ID NO: 2217093 - RNA, 19 nt, Artificial Sequence
  Description of Artificial Sequence: Synthetic oligonucleotide
ggccugccgucccuccggg

SEQ ID NO: 2217094 - RNA, 19 nt, Artificial Sequence
  Description of Artificial Sequence: Synthetic oligonucleotide
cauugagguccaacaggau

SEQ ID NO: 2217095 - RNA, 19 nt, Artificial Sequence
  Description of Artificial Sequence: Synthetic oligonucleotide
ccagucggggacccaggac

SEQ ID NO: 2217096 - RNA, 19 nt, Artificial Sequence
  Description of Artificial Sequence: Synthetic oligonucleotide
gaccgcgccccgccccggc

SEQ ID NO: 2217097 - RNA, 19 nt, Artificial Sequence
  Description of Artificial Sequence: Synthetic oligonucleotide
cucucccggccacgggauc

SEQ ID NO: 2217098 - RNA, 19 nt, Artificial Sequence
  Description of Artificial Sequence: Synthetic oligonucleotide
cggccggccaugcuggcgg

SEQ ID NO: 2217099 - RNA, 19 nt, Artificial Sequence
  Description of Artificial Sequence: Synthetic oligonucleotide
gccaugcuggcggggcugg

SEQ ID NO: 2217100 - RNA, 19 nt, Artificial Sequence
  Description of Artificial Sequence: Synthetic oligonucleotide
ugccgucccuccgggaguu

SEQ ID NO: 2217101 - RNA, 19 nt, Artificial Sequence
  Description of Artificial Sequence: Synthetic oligonucleotide
gcgucucucccggccacgg

SEQ ID NO: 2217102 - RNA, 19 nt, Artificial Sequence
  Description of Artificial Sequence: Synthetic oligonucleotide
caggcuccuccuuggucaa

SEQ ID NO: 2217103 - RNA, 19 nt, Artificial Sequence
  Description of Artificial Sequence: Synthetic oligonucleotide
ccggcgaucucaggcugcg

SEQ ID NO: 2217104 - RNA, 19 nt, Artificial Sequence
  Description of Artificial Sequence: Synthetic oligonucleotide
ccccggagcggcccgggcg

SEQ ID NO: 2217105 - RNA, 19 nt, Artificial Sequence
  Description of Artificial Sequence: Synthetic oligonucleotide
ccgccuggcuuccugcgac

SEQ ID NO: 2217106 - RNA, 19 nt, Artificial Sequence
  Description of Artificial Sequence: Synthetic oligonucleotide
gucggggacccaggacggc

SEQ ID NO: 2217107 - RNA, 19 nt, Artificial Sequence
  Description of Artificial Sequence: Synthetic oligonucleotide
cugcgaccgcgccccgccc

SEQ ID NO: 2217108 - RNA, 19 nt, Artificial Sequence
  Description of Artificial Sequence: Synthetic oligonucleotide
ggccucagcuuccagcaau

SEQ ID NO: 2217109 - RNA, 19 nt, Artificial Sequence
  Description of Artificial Sequence: Synthetic oligonucleotide
gcauuugggcagaugcgcu

SEQ ID NO: 2217110 - RNA, 19 nt, Artificial Sequence
  Description of Artificial Sequence: Synthetic oligonucleotide
ccgggaguuggccgcgccc

SEQ ID NO: 2217111 - RNA, 19 nt, Artificial Sequence
  Description of Artificial Sequence: Synthetic oligonucleotide
cguggugggacggccugcg

SEQ ID NO: 2217112 - RNA, 19 nt, Artificial Sequence
  Description of Artificial Sequence: Synthetic oligonucleotide
ccucgcuccccaacgccuc

SEQ ID NO: 2217113 - RNA, 19 nt, Artificial Sequence
  Description of Artificial Sequence: Synthetic oligonucleotide
cugccgcgucucucccggc

SEQ ID NO: 2217114 - RNA, 19 nt, Artificial Sequence
  Description of Artificial Sequence: Synthetic oligonucleotide
ccccgccuggcuuccugcg

SEQ ID NO: 2217115 - RNA, 19 nt, Artificial Sequence
  Description of Artificial Sequence: Synthetic oligonucleotide
ggggcugaguauccucugu

SEQ ID NO: 2217116 - RNA, 19 nt, Artificial Sequence
  Description of Artificial Sequence: Synthetic oligonucleotide
ccgucccuccgggaguugg

SEQ ID NO: 2217117 - RNA, 19 nt, Artificial Sequence
  Description of Artificial Sequence: Synthetic oligonucleotide
guccccggagcggcccggg

SEQ ID NO: 2217118 - RNA, 19 nt, Artificial Sequence
  Description of Artificial Sequence: Synthetic oligonucleotide
cuuucggccugccgucccu

SEQ ID NO: 2217119 - RNA, 19 nt, Artificial Sequence
  Description of Artificial Sequence: Synthetic oligonucleotide
gggacggccugcgguccgg

SEQ ID NO: 2217120 - RNA, 19 nt, Artificial Sequence
  Description of Artificial Sequence: Synthetic oligonucleotide
cacgguccggccggccaug

SEQ ID NO: 2217121 - RNA, 19 nt, Artificial Sequence
  Description of Artificial Sequence: Synthetic oligonucleotide
ccgccugcggguguacccc

SEQ ID NO: 2217122 - RNA, 19 nt, Artificial Sequence
  Description of Artificial Sequence: Synthetic oligonucleotide
cuccgggaguuggccgcgc

SEQ ID NO: 2217123 - RNA, 19 nt, Artificial Sequence
  Description of Artificial Sequence: Synthetic oligonucleotide
cgggaucucucugucccgc

SEQ ID NO: 2217124 - RNA, 19 nt, Artificial Sequence
  Description of Artificial Sequence: Synthetic oligonucleotide
ccggccaugcuggcggggc

SEQ ID NO: 2217125 - RNA, 19 nt, Artificial Sequence
  Description of Artificial Sequence: Synthetic oligonucleotide
gcccuccgaguccucugug

SEQ ID NO: 2217126 - RNA, 19 nt, Artificial Sequence
  Description of Artificial Sequence: Synthetic oligonucleotide
gggguccagucggggaccc

SEQ ID NO: 2217127 - RNA, 19 nt, Artificial Sequence
  Description of Artificial Sequence: Synthetic oligonucleotide
gcgguccggcgaucucagg

SEQ ID NO: 2217128 - RNA, 19 nt, Artificial Sequence
  Description of Artificial Sequence: Synthetic oligonucleotide
ccgcucuuucggccugccg

SEQ ID NO: 2217129 - RNA, 19 nt, Artificial Sequence
  Description of Artificial Sequence: Synthetic oligonucleotide
guaccgccugcggguguac

SEQ ID NO: 2217130 - RNA, 19 nt, Artificial Sequence
  Description of Artificial Sequence: Synthetic oligonucleotide
gggaguuggccgcgcccuc

SEQ ID NO: 2217131 - RNA, 19 nt, Artificial Sequence
  Description of Artificial Sequence: Synthetic oligonucleotide
cgaagggaagugucaccca

SEQ ID NO: 2217132 - RNA, 19 nt, Artificial Sequence
  Description of Artificial Sequence: Synthetic oligonucleotide
gccuccgcgcguccccgcc

SEQ ID NO: 2217133 - RNA, 19 nt, Artificial Sequence
  Description of Artificial Sequence: Synthetic oligonucleotide
cucggcccgcacgguccgg

SEQ ID NO: 2217134 - RNA, 19 nt, Artificial Sequence
  Description of Artificial Sequence: Synthetic oligonucleotide
ggagcggcccgggcggcgc

SEQ ID NO: 2217135 - RNA, 19 nt, Artificial Sequence
  Description of Artificial Sequence: Synthetic oligonucleotide
ccgaguccucugugucacc

SEQ ID NO: 2217136 - RNA, 19 nt, Artificial Sequence
  Description of Artificial Sequence: Synthetic oligonucleotide
cccucccucgcuccccaac

SEQ ID NO: 2217137 - RNA, 19 nt, Artificial Sequence
  Description of Artificial Sequence: Synthetic oligonucleotide
ggcgccgcucuuucggccu

SEQ ID NO: 2217138 - RNA, 19 nt, Artificial Sequence
  Description of Artificial Sequence: Synthetic oligonucleotide
cacccagcgcuucucccau

SEQ ID NO: 2217139 - RNA, 19 nt, Artificial Sequence
  Description of Artificial Sequence: Synthetic oligonucleotide
cggccugccgucccuccgg

SEQ ID NO: 2217140 - RNA, 19 nt, Artificial Sequence
  Description of Artificial Sequence: Synthetic oligonucleotide
cugccgucccuccgggagu

SEQ ID NO: 2217141 - RNA, 19 nt, Artificial Sequence
  Description of Artificial Sequence: Synthetic oligonucleotide
cccaacgccuccgcgcguc

SEQ ID NO: 2217142 - RNA, 19 nt, Artificial Sequence
  Description of Artificial Sequence: Synthetic oligonucleotide
ccgggauagagcccguggu

SEQ ID NO: 2217143 - RNA, 19 nt, Artificial Sequence
  Description of Artificial Sequence: Synthetic oligonucleotide
cgucucucccggccacggg

SEQ ID NO: 2217144 - RNA, 19 nt, Artificial Sequence
  Description of Artificial Sequence: Synthetic oligonucleotide
ggccgggauagagcccgug

SEQ ID NO: 2217145 - RNA, 19 nt, Artificial Sequence
  Description of Artificial Sequence: Synthetic oligonucleotide
ccggaccuucucgaugguc

SEQ ID NO: 2217146 - RNA, 19 nt, Artificial Sequence
  Description of Artificial Sequence: Synthetic oligonucleotide
cagugcccuucugcaguga

SEQ ID NO: 2217147 - RNA, 19 nt, Artificial Sequence
  Description of Artificial Sequence: Synthetic oligonucleotide
ccugcgguccggcgaucuc

SEQ ID NO: 2217148 - RNA, 19 nt, Artificial Sequence
  Description of Artificial Sequence: Synthetic oligonucleotide
gggcggcuagagccccggc

SEQ ID NO: 2217149 - RNA, 19 nt, Artificial Sequence
  Description of Artificial Sequence: Synthetic oligonucleotide
ccggccggccaugcuggcg

SEQ ID NO: 2217150 - RNA, 19 nt, Artificial Sequence
  Description of Artificial Sequence: Synthetic oligonucleotide
cccggcccguccccggagc

SEQ ID NO: 2217151 - RNA, 19 nt, Artificial Sequence
  Description of Artificial Sequence: Synthetic oligonucleotide
gccggccaugcuggcgggg

SEQ ID NO: 2217152 - RNA, 19 nt, Artificial Sequence
  Description of Artificial Sequence: Synthetic oligonucleotide
ccccugccgcgucucuccc

SEQ ID NO: 2217153 - RNA, 19 nt, Artificial Sequence
  Description of Artificial Sequence: Synthetic oligonucleotide
ggacggccugcgguccggc

SEQ ID NO: 2217154 - RNA, 19 nt, Artificial Sequence
  Description of Artificial Sequence: Synthetic oligonucleotide
gccccggcgccgcucuuuc

SEQ ID NO: 2217155 - RNA, 19 nt, Artificial Sequence
  Description of Artificial Sequence: Synthetic oligonucleotide
cggcgccgcucuuucggcc

SEQ ID NO: 2217156 - RNA, 19 nt, Artificial Sequence
  Description of Artificial Sequence: Synthetic oligonucleotide
ccgcgucucucccggccac

SEQ ID NO: 2217157 - RNA, 19 nt, Artificial Sequence
  Description of Artificial Sequence: Synthetic oligonucleotide
cgcguccccgccuggcuuc

SEQ ID NO: 2217158 - RNA, 19 nt, Artificial Sequence
  Description of Artificial Sequence: Synthetic oligonucleotide
cuccgggucucggcccgca

SEQ ID NO: 2217159 - RNA, 19 nt, Artificial Sequence
  Description of Artificial Sequence: Synthetic oligonucleotide
ccccggcgccgcucuuucg

SEQ ID NO: 2217160 - RNA, 19 nt, Artificial Sequence
  Description of Artificial Sequence: Synthetic oligonucleotide
cccuccgaguccucugugu

SEQ ID NO: 2217161 - RNA, 19 nt, Artificial Sequence
  Description of Artificial Sequence: Synthetic oligonucleotide
gcggcgcgggcggcuagag

SEQ ID NO: 2217162 - RNA, 19 nt, Artificial Sequence
  Description of Artificial Sequence: Synthetic oligonucleotide
caguaccgccugcgggugu

SEQ ID NO: 2217163 - RNA, 19 nt, Artificial Sequence
  Description of Artificial Sequence: Synthetic oligonucleotide
gcgggcggcuagagccccg

SEQ ID NO: 2217164 - RNA, 19 nt, Artificial Sequence
  Description of Artificial Sequence: Synthetic oligonucleotide
cggccacgggaucucucug

SEQ ID NO: 2217165 - RNA, 19 nt, Artificial Sequence
  Description of Artificial Sequence: Synthetic oligonucleotide
gccuccugcccgacgccuc

SEQ ID NO: 2217166 - RNA, 19 nt, Artificial Sequence
  Description of Artificial Sequence: Synthetic oligonucleotide
cccgccuggcuuccugcga

SEQ ID NO: 2217167 - RNA, 19 nt, Artificial Sequence
  Description of Artificial Sequence: Synthetic oligonucleotide
gucccgccuccugcccgac

SEQ ID NO: 2217168 - RNA, 19 nt, Artificial Sequence
  Description of Artificial Sequence: Synthetic oligonucleotide
gcgcccucccucgcucccc

SEQ ID NO: 2217169 - RNA, 19 nt, Artificial Sequence
  Description of Artificial Sequence: Synthetic oligonucleotide
cgggcggcuagagccccgg

SEQ ID NO: 2217170 - RNA, 19 nt, Artificial Sequence
  Description of Artificial Sequence: Synthetic oligonucleotide
cgcgcccucccucgcuccc

SEQ ID NO: 2217171 - RNA, 19 nt, Artificial Sequence
  Description of Artificial Sequence: Synthetic oligonucleotide
cgcacgguccggccggcca

SEQ ID NO: 2217172 - RNA, 19 nt, Artificial Sequence
  Description of Artificial Sequence: Synthetic oligonucleotide
gugucacccugggcugccu

SEQ ID NO: 2217173 - RNA, 19 nt, Artificial Sequence
  Description of Artificial Sequence: Synthetic oligonucleotide
gcacgguccggccggccau

SEQ ID NO: 2217174 - RNA, 19 nt, Artificial Sequence
  Description of Artificial Sequence: Synthetic oligonucleotide
ccccggcccguccccggag

SEQ ID NO: 2217175 - RNA, 19 nt, Artificial Sequence
  Description of Artificial Sequence: Synthetic oligonucleotide
gccugccgucccuccggga

SEQ ID NO: 2217176 - RNA, 19 nt, Artificial Sequence
  Description of Artificial Sequence: Synthetic oligonucleotide
ccgcgcguccccgccuggc

SEQ ID NO: 2217177 - RNA, 19 nt, Artificial Sequence
  Description of Artificial Sequence: Synthetic oligonucleotide
cggcccgcacgguccggcc

SEQ ID NO: 2217178 - RNA, 19 nt, Artificial Sequence
  Description of Artificial Sequence: Synthetic oligonucleotide
ggcggcgcgggcggcuaga

SEQ ID NO: 2217179 - RNA, 19 nt, Artificial Sequence
  Description of Artificial Sequence: Synthetic oligonucleotide
ggguccagucggggaccca

SEQ ID NO: 2217180 - RNA, 19 nt, Artificial Sequence
  Description of Artificial Sequence: Synthetic oligonucleotide
ccuucucgauggucgccau

SEQ ID NO: 2217181 - RNA, 19 nt, Artificial Sequence
  Description of Artificial Sequence: Synthetic oligonucleotide
gccugcgguccggcgaucu

SEQ ID NO: 2217182 - RNA, 19 nt, Artificial Sequence
  Description of Artificial Sequence: Synthetic oligonucleotide
ccacagucacccagcgcuu

SEQ ID NO: 2217183 - RNA, 19 nt, Artificial Sequence
  Description of Artificial Sequence: Synthetic oligonucleotide
cgccccggcccguccccgg

SEQ ID NO: 2217184 - RNA, 19 nt, Artificial Sequence
  Description of Artificial Sequence: Synthetic oligonucleotide
gccgucccuccgggaguug

SEQ ID NO: 2217185 - RNA, 19 nt, Artificial Sequence
  Description of Artificial Sequence: Synthetic oligonucleotide
ggccgcgcccucccucgcu

SEQ ID NO: 2217186 - RNA, 19 nt, Artificial Sequence
  Description of Artificial Sequence: Synthetic oligonucleotide
cggcgaucucaggcugcgc

SEQ ID NO: 2217187 - RNA, 19 nt, Artificial Sequence
  Description of Artificial Sequence: Synthetic oligonucleotide
cggagcggcccgggcggcg

SEQ ID NO: 2217188 - RNA, 19 nt, Artificial Sequence
  Description of Artificial Sequence: Synthetic oligonucleotide
cgggaguuggccgcgcccu

SEQ ID NO: 2217189 - RNA, 19 nt, Artificial Sequence
  Description of Artificial Sequence: Synthetic oligonucleotide
gcgcguccccgccuggcuu

SEQ ID NO: 2217190 - RNA, 19 nt, Artificial Sequence
  Description of Artificial Sequence: Synthetic oligonucleotide
ccgcacgguccggccggcc

SEQ ID NO: 2217191 - RNA, 19 nt, Artificial Sequence
  Description of Artificial Sequence: Synthetic oligonucleotide
cucaggggucaggggcauu

SEQ ID NO: 2217192 - RNA, 19 nt, Artificial Sequence
  Description of Artificial Sequence: Synthetic oligonucleotide
ggccugcgguccggcgauc

SEQ ID NO: 2217193 - RNA, 19 nt, Artificial Sequence
  Description of Artificial Sequence: Synthetic oligonucleotide
ccuccgcgcguccccgccu

SEQ ID NO: 2217194 - RNA, 19 nt, Artificial Sequence
  Description of Artificial Sequence: Synthetic oligonucleotide
ggccccggcgccgcucuuu

SEQ ID NO: 2217195 - RNA, 19 nt, Artificial Sequence
  Description of Artificial Sequence: Synthetic oligonucleotide
cgcgcguccccgccuggcu

SEQ ID NO: 2217196 - RNA, 19 nt, Artificial Sequence
  Description of Artificial Sequence: Synthetic oligonucleotide
gggccgggauagagcccgu

SEQ ID NO: 2217197 - RNA, 19 nt, Artificial Sequence
  Description of Artificial Sequence: Synthetic oligonucleotide
gggcgcccuccgaguccuc

SEQ ID NO: 2217198 - RNA, 19 nt, Artificial Sequence
  Description of Artificial Sequence: Synthetic oligonucleotide
cgccuccugcccgacgccu

SEQ ID NO: 2217199 - RNA, 19 nt, Artificial Sequence
  Description of Artificial Sequence: Synthetic oligonucleotide
ccccaacgccuccgcgcgu

SEQ ID NO: 2217200 - RNA, 19 nt, Artificial Sequence
  Description of Artificial Sequence: Synthetic oligonucleotide
uuuauaaagagcuagaagg

SEQ ID NO: 2217201 - RNA, 19 nt, Artificial Sequence
  Description of Artificial Sequence: Synthetic oligonucleotide
gaucauaagaaucauaggg

SEQ ID NO: 2217202 - RNA, 19 nt, Artificial Sequence
  Description of Artificial Sequence: Synthetic oligonucleotide
aauuauccaacacagacag

SEQ ID NO: 2217203 - RNA, 19 nt, Artificial Sequence
  Description of Artificial Sequence: Synthetic oligonucleotide
uuuuaauuauccaacacag

SEQ ID NO: 2217204 - RNA, 19 nt, Artificial Sequence
  Description of Artificial Sequence: Synthetic oligonucleotide
aaugcuacaucauggaugg

SEQ ID NO: 2217205 - RNA, 19 nt, Artificial Sequence
  Description of Artificial Sequence: Synthetic oligonucleotide
auuaaacacacucagugcc

SEQ ID NO: 2217206 - RNA, 19 nt, Artificial Sequence
  Description of Artificial Sequence: Synthetic oligonucleotide
aauuucagaacaaaagugc

SEQ ID NO: 2217207 - RNA, 19 nt, Artificial Sequence
  Description of Artificial Sequence: Synthetic oligonucleotide
aaugagaacaauuucagaa

SEQ ID NO: 2217208 - RNA, 19 nt, Artificial Sequence
  Description of Artificial Sequence: Synthetic oligonucleotide
uuaucauagaacuugaugu

SEQ ID NO: 2217209 - RNA, 19 nt, Artificial Sequence
  Description of Artificial Sequence: Synthetic oligonucleotide
cuauauagcauuuggaagg

SEQ ID NO: 2217210 - RNA, 19 nt, Artificial Sequence
  Description of Artificial Sequence: Synthetic oligonucleotide
uuucuaaauuccauaagcg

SEQ ID NO: 2217211 - RNA, 19 nt, Artificial Sequence
  Description of Artificial Sequence: Synthetic oligonucleotide
ucaaguacaggccauuugg

SEQ ID NO: 2217212 - RNA, 19 nt, Artificial Sequence
  Description of Artificial Sequence: Synthetic oligonucleotide
auaagaaucauagggaucg

SEQ ID NO: 2217213 - RNA, 19 nt, Artificial Sequence
  Description of Artificial Sequence: Synthetic oligonucleotide
uugguuaucauuaaacaca

SEQ ID NO: 2217214 - RNA, 19 nt, Artificial Sequence
  Description of Artificial Sequence: Synthetic oligonucleotide
uuuuauaaagagcuagaag

SEQ ID NO: 2217215 - RNA, 19 nt, Artificial Sequence
  Description of Artificial Sequence: Synthetic oligonucleotide
uaucauuaaacacacucag

SEQ ID NO: 2217216 - RNA, 19 nt, Artificial Sequence
  Description of Artificial Sequence: Synthetic oligonucleotide
aaaacagugcacgaauugc

SEQ ID NO: 2217217 - RNA, 19 nt, Artificial Sequence
  Description of Artificial Sequence: Synthetic oligonucleotide
ucauacaaagaccuuagcc

SEQ ID NO: 2217218 - RNA, 19 nt, Artificial Sequence
  Description of Artificial Sequence: Synthetic oligonucleotide
ucacuuuuagaaaacagug

SEQ ID NO: 2217219 - RNA, 19 nt, Artificial Sequence
  Description of Artificial Sequence: Synthetic oligonucleotide
aaaguuuucaggcucccag

SEQ ID NO: 2217220 - RNA, 19 nt, Artificial Sequence
  Description of Artificial Sequence: Synthetic oligonucleotide
aaagaccuuagccagcgcg

SEQ ID NO: 2217221 - RNA, 19 nt, Artificial Sequence
  Description of Artificial Sequence: Synthetic oligonucleotide
cuuucuaaauuccauaagc

SEQ ID NO: 2217222 - RNA, 19 nt, Artificial Sequence
  Description of Artificial Sequence: Synthetic oligonucleotide
ucaaauuuuccgaugagcu

SEQ ID NO: 2217223 - RNA, 19 nt, Artificial Sequence
  Description of Artificial Sequence: Synthetic oligonucleotide
uaucgaacagucaugacug

SEQ ID NO: 2217224 - RNA, 19 nt, Artificial Sequence
  Description of Artificial Sequence: Synthetic oligonucleotide
uguuuacucagaaggaagg

SEQ ID NO: 2217225 - RNA, 19 nt, Artificial Sequence
  Description of Artificial Sequence: Synthetic oligonucleotide
ucgguuguauuccauaacg

SEQ ID NO: 2217226 - RNA, 19 nt, Artificial Sequence
  Description of Artificial Sequence: Synthetic oligonucleotide
aacucuugaauacaugucu

SEQ ID NO: 2217227 - RNA, 19 nt, Artificial Sequence
  Description of Artificial Sequence: Synthetic oligonucleotide
acuuuuagaaaacagugca

SEQ ID NO: 2217228 - RNA, 19 nt, Artificial Sequence
  Description of Artificial Sequence: Synthetic oligonucleotide
aaguugaugcgucacauca

SEQ ID NO: 2217229 - RNA, 19 nt, Artificial Sequence
  Description of Artificial Sequence: Synthetic oligonucleotide
uuaucauuaaacacacuca

SEQ ID NO: 2217230 - RNA, 19 nt, Artificial Sequence
  Description of Artificial Sequence: Synthetic oligonucleotide
auuguuaucauagaacuug

SEQ ID NO: 2217231 - RNA, 19 nt, Artificial Sequence
  Description of Artificial Sequence: Synthetic oligonucleotide
uuauccaacacagacagca

SEQ ID NO: 2217232 - RNA, 19 nt, Artificial Sequence
  Description of Artificial Sequence: Synthetic oligonucleotide
ucgauguugggauuggugg

SEQ ID NO: 2217233 - RNA, 19 nt, Artificial Sequence
  Description of Artificial Sequence: Synthetic oligonucleotide
uccauaacguaaaagugcc

SEQ ID NO: 2217234 - RNA, 19 nt, Artificial Sequence
  Description of Artificial Sequence: Synthetic oligonucleotide
uucacuuuuagaaaacagu

SEQ ID NO: 2217235 - RNA, 19 nt, Artificial Sequence
  Description of Artificial Sequence: Synthetic oligonucleotide
ucuaaauuccauaagcgua

SEQ ID NO: 2217236 - RNA, 19 nt, Artificial Sequence
  Description of Artificial Sequence: Synthetic oligonucleotide
ucuaggugggcuaccaucg

SEQ ID NO: 2217237 - RNA, 19 nt, Artificial Sequence
  Description of Artificial Sequence: Synthetic oligonucleotide
ugugucaugguuuuagucu

SEQ ID NO: 2217238 - RNA, 19 nt, Artificial Sequence
  Description of Artificial Sequence: Synthetic oligonucleotide
uuaaacacacucagugccg

SEQ ID NO: 2217239 - RNA, 19 nt, Artificial Sequence
  Description of Artificial Sequence: Synthetic oligonucleotide
auacaaagaccuuagccag

SEQ ID NO: 2217240 - RNA, 19 nt, Artificial Sequence
  Description of Artificial Sequence: Synthetic oligonucleotide
guuaucauagaacuugaug

SEQ ID NO: 2217241 - RNA, 19 nt, Artificial Sequence
  Description of Artificial Sequence: Synthetic oligonucleotide
aggaucauaagaaucauag

SEQ ID NO: 2217242 - RNA, 19 nt, Artificial Sequence
  Description of Artificial Sequence: Synthetic oligonucleotide
acguaaaagugccaucugc

SEQ ID NO: 2217243 - RNA, 19 nt, Artificial Sequence
  Description of Artificial Sequence: Synthetic oligonucleotide
auuucagaacaaaagugcc

SEQ ID NO: 2217244 - RNA, 19 nt, Artificial Sequence
  Description of Artificial Sequence: Synthetic oligonucleotide
uguaccaccacuguaacac

SEQ ID NO: 2217245 - RNA, 19 nt, Artificial Sequence
  Description of Artificial Sequence: Synthetic oligonucleotide
uacacucuaacaaauguuc

SEQ ID NO: 2217246 - RNA, 19 nt, Artificial Sequence
  Description of Artificial Sequence: Synthetic oligonucleotide
cauacaaagaccuuagcca

SEQ ID NO: 2217247 - RNA, 19 nt, Artificial Sequence
  Description of Artificial Sequence: Synthetic oligonucleotide
cuugguuaucauuaaacac

SEQ ID NO: 2217248 - RNA, 19 nt, Artificial Sequence
  Description of Artificial Sequence: Synthetic oligonucleotide
aguacaggccauuuggauc

SEQ ID NO: 2217249 - RNA, 19 nt, Artificial Sequence
  Description of Artificial Sequence: Synthetic oligonucleotide
ugcgucacaucauacaaag

SEQ ID NO: 2217250 - RNA, 19 nt, Artificial Sequence
  Description of Artificial Sequence: Synthetic oligonucleotide
ugcaaaacuacacucuaac

SEQ ID NO: 2217251 - RNA, 19 nt, Artificial Sequence
  Description of Artificial Sequence: Synthetic oligonucleotide
aacaaauguucucugugcu

SEQ ID NO: 2217252 - RNA, 19 nt, Artificial Sequence
  Description of Artificial Sequence: Synthetic oligonucleotide
ucuuccuugguuaucauua

SEQ ID NO: 2217253 - RNA, 19 nt, Artificial Sequence
  Description of Artificial Sequence: Synthetic oligonucleotide
ucauagaacuugaugugcc

SEQ ID NO: 2217254 - RNA, 19 nt, Artificial Sequence
  Description of Artificial Sequence: Synthetic oligonucleotide
uucuaaauuccauaagcgu

SEQ ID NO: 2217255 - RNA, 19 nt, Artificial Sequence
  Description of Artificial Sequence: Synthetic oligonucleotide
acugccagacaucaaguac

SEQ ID NO: 2217256 - RNA, 19 nt, Artificial Sequence
  Description of Artificial Sequence: Synthetic oligonucleotide
ugcucaucacuacacacag

SEQ ID NO: 2217257 - RNA, 19 nt, Artificial Sequence
  Description of Artificial Sequence: Synthetic oligonucleotide
uccuugguuaucauuaaac

SEQ ID NO: 2217258 - RNA, 19 nt, Artificial Sequence
  Description of Artificial Sequence: Synthetic oligonucleotide
gaaaacagugcacgaauug

SEQ ID NO: 2217259 - RNA, 19 nt, Artificial Sequence
  Description of Artificial Sequence: Synthetic oligonucleotide
agaugcuaaaccuguuucg

SEQ ID NO: 2217260 - RNA, 19 nt, Artificial Sequence
  Description of Artificial Sequence: Synthetic oligonucleotide
gaaugcuacaucauggaug

SEQ ID NO: 2217261 - RNA, 19 nt, Artificial Sequence
  Description of Artificial Sequence: Synthetic oligonucleotide
acuacacucuaacaaaugu

SEQ ID NO: 2217262 - RNA, 19 nt, Artificial Sequence
  Description of Artificial Sequence: Synthetic oligonucleotide
ucauaagaaucauagggau

SEQ ID NO: 2217263 - RNA, 19 nt, Artificial Sequence
  Description of Artificial Sequence: Synthetic oligonucleotide
uauauagcauuuggaaggg

SEQ ID NO: 2217264 - RNA, 19 nt, Artificial Sequence
  Description of Artificial Sequence: Synthetic oligonucleotide
aagcguaucgaacagucau

SEQ ID NO: 2217265 - RNA, 19 nt, Artificial Sequence
  Description of Artificial Sequence: Synthetic oligonucleotide
ugguuaucauuaaacacac

SEQ ID NO: 2217266 - RNA, 19 nt, Artificial Sequence
  Description of Artificial Sequence: Synthetic oligonucleotide
ucuuacuuucuaaauucca

SEQ ID NO: 2217267 - RNA, 19 nt, Artificial Sequence
  Description of Artificial Sequence: Synthetic oligonucleotide
cacuuuuagaaaacagugc

SEQ ID NO: 2217268 - RNA, 19 nt, Artificial Sequence
  Description of Artificial Sequence: Synthetic oligonucleotide
ccagacaucaaguacaggc

SEQ ID NO: 2217269 - RNA, 19 nt, Artificial Sequence
  Description of Artificial Sequence: Synthetic oligonucleotide
agcgaaugagaacaauuuc

SEQ ID NO: 2217270 - RNA, 19 nt, Artificial Sequence
  Description of Artificial Sequence: Synthetic oligonucleotide
uacuuucuaaauuccauaa

SEQ ID NO: 2217271 - RNA, 19 nt, Artificial Sequence
  Description of Artificial Sequence: Synthetic oligonucleotide
cuggcuauauagcauuugg

SEQ ID NO: 2217272 - RNA, 19 nt, Artificial Sequence
  Description of Artificial Sequence: Synthetic oligonucleotide
gaaucagcccaucuguacc

SEQ ID NO: 2217273 - RNA, 19 nt, Artificial Sequence
  Description of Artificial Sequence: Synthetic oligonucleotide
aagagcuagaaggugaagu

SEQ ID NO: 2217274 - RNA, 19 nt, Artificial Sequence
  Description of Artificial Sequence: Synthetic oligonucleotide
uuguauuccauaacguaaa

SEQ ID NO: 2217275 - RNA, 19 nt, Artificial Sequence
  Description of Artificial Sequence: Synthetic oligonucleotide
acgaauugcaaaacuacac

SEQ ID NO: 2217276 - RNA, 19 nt, Artificial Sequence
  Description of Artificial Sequence: Synthetic oligonucleotide
auaacguaaaagugccauc

SEQ ID NO: 2217277 - RNA, 19 nt, Artificial Sequence
  Description of Artificial Sequence: Synthetic oligonucleotide
uuuggaucaacugcuaaac

SEQ ID NO: 2217278 - RNA, 19 nt, Artificial Sequence
  Description of Artificial Sequence: Synthetic oligonucleotide
aucauacaaagaccuuagc

SEQ ID NO: 2217279 - RNA, 19 nt, Artificial Sequence
  Description of Artificial Sequence: Synthetic oligonucleotide
uaacguaaaagugccaucu

SEQ ID NO: 2217280 - RNA, 19 nt, Artificial Sequence
  Description of Artificial Sequence: Synthetic oligonucleotide
agaaggaucauaagaauca

SEQ ID NO: 2217281 - RNA, 19 nt, Artificial Sequence
  Description of Artificial Sequence: Synthetic oligonucleotide
aaccuguuucgcucaggcc

SEQ ID NO: 2217282 - RNA, 19 nt, Artificial Sequence
  Description of Artificial Sequence: Synthetic oligonucleotide
auaagcguaucgaacaguc

SEQ ID NO: 2217283 - RNA, 19 nt, Artificial Sequence
  Description of Artificial Sequence: Synthetic oligonucleotide
ucuaacaaauguucucugu

SEQ ID NO: 2217284 - RNA, 19 nt, Artificial Sequence
  Description of Artificial Sequence: Synthetic oligonucleotide
cuguuuacucagaaggaag

SEQ ID NO: 2217285 - RNA, 19 nt, Artificial Sequence
  Description of Artificial Sequence: Synthetic oligonucleotide
gaugcuaaaccuguuucgc

SEQ ID NO: 2217286 - RNA, 19 nt, Artificial Sequence
  Description of Artificial Sequence: Synthetic oligonucleotide
ugccuagcgaaugagaaca

SEQ ID NO: 2217287 - RNA, 19 nt, Artificial Sequence
  Description of Artificial Sequence: Synthetic oligonucleotide
uuguuaucauagaacuuga

SEQ ID NO: 2217288 - RNA, 19 nt, Artificial Sequence
  Description of Artificial Sequence: Synthetic oligonucleotide
agucaugacugccagacau

SEQ ID NO: 2217289 - RNA, 19 nt, Artificial Sequence
  Description of Artificial Sequence: Synthetic oligonucleotide
aaucagcccaucuguacca

SEQ ID NO: 2217290 - RNA, 19 nt, Artificial Sequence
  Description of Artificial Sequence: Synthetic oligonucleotide
ugggcuaccaucgagugga

SEQ ID NO: 2217291 - RNA, 19 nt, Artificial Sequence
  Description of Artificial Sequence: Synthetic oligonucleotide
uucagaacaaaagugccuc

SEQ ID NO: 2217292 - RNA, 19 nt, Artificial Sequence
  Description of Artificial Sequence: Synthetic oligonucleotide
aguuuucaggcucccagag

SEQ ID NO: 2217293 - RNA, 19 nt, Artificial Sequence
  Description of Artificial Sequence: Synthetic oligonucleotide
uuuccgaugagcugugaac

SEQ ID NO: 2217294 - RNA, 19 nt, Artificial Sequence
  Description of Artificial Sequence: Synthetic oligonucleotide
ucuugaauacaugucuuac

SEQ ID NO: 2217295 - RNA, 19 nt, Artificial Sequence
  Description of Artificial Sequence: Synthetic oligonucleotide
aacguaaaagugccaucug

SEQ ID NO: 2217296 - RNA, 19 nt, Artificial Sequence
  Description of Artificial Sequence: Synthetic oligonucleotide
uccaacuuuuaauuaucca

SEQ ID NO: 2217297 - RNA, 19 nt, Artificial Sequence
  Description of Artificial Sequence: Synthetic oligonucleotide
gagaugcuaaaccuguuuc

SEQ ID NO: 2217298 - RNA, 19 nt, Artificial Sequence
  Description of Artificial Sequence: Synthetic oligonucleotide
auagcauuuggaagggugg

SEQ ID NO: 2217299 - RNA, 19 nt, Artificial Sequence
  Description of Artificial Sequence: Synthetic oligonucleotide
uaaacacacucagugccgg

SEQ ID NO: 2217300 - RNA, 19 nt, Artificial Sequence
  Description of Artificial Sequence: Synthetic oligonucleotide
ugagcaggacaacaagcgc

SEQ ID NO: 2217301 - RNA, 19 nt, Artificial Sequence
  Description of Artificial Sequence: Synthetic oligonucleotide
agcaaccucgguuguauuc

SEQ ID NO: 2217302 - RNA, 19 nt, Artificial Sequence
  Description of Artificial Sequence: Synthetic oligonucleotide
auuuggaucaacugcuaaa

SEQ ID NO: 2217303 - RNA, 19 nt, Artificial Sequence
  Description of Artificial Sequence: Synthetic oligonucleotide
uagcgaaugagaacaauuu

SEQ ID NO: 2217304 - RNA, 19 nt, Artificial Sequence
  Description of Artificial Sequence: Synthetic oligonucleotide
aaguuuucaggcucccaga

SEQ ID NO: 2217305 - RNA, 19 nt, Artificial Sequence
  Description of Artificial Sequence: Synthetic oligonucleotide
caucgaguggauuugccug

SEQ ID NO: 2217306 - RNA, 19 nt, Artificial Sequence
  Description of Artificial Sequence: Synthetic oligonucleotide
gaugcgucacaucauacaa

SEQ ID NO: 2217307 - RNA, 19 nt, Artificial Sequence
  Description of Artificial Sequence: Synthetic oligonucleotide
caaauuuuccgaugagcug

SEQ ID NO: 2217308 - RNA, 19 nt, Artificial Sequence
  Description of Artificial Sequence: Synthetic oligonucleotide
uucugcaucucuguugugc

SEQ ID NO: 2217309 - RNA, 19 nt, Artificial Sequence
  Description of Artificial Sequence: Synthetic oligonucleotide
ugaaucagcccaucuguac

SEQ ID NO: 2217310 - RNA, 19 nt, Artificial Sequence
  Description of Artificial Sequence: Synthetic oligonucleotide
acucuaacaaauguucucu

SEQ ID NO: 2217311 - RNA, 19 nt, Artificial Sequence
  Description of Artificial Sequence: Synthetic oligonucleotide
cauaagaaucauagggauc

SEQ ID NO: 2217312 - RNA, 19 nt, Artificial Sequence
  Description of Artificial Sequence: Synthetic oligonucleotide
aaacagugcacgaauugca

SEQ ID NO: 2217313 - RNA, 19 nt, Artificial Sequence
  Description of Artificial Sequence: Synthetic oligonucleotide
aaggugaaguugaugcguc

SEQ ID NO: 2217314 - RNA, 19 nt, Artificial Sequence
  Description of Artificial Sequence: Synthetic oligonucleotide
uggcuauauagcauuugga

SEQ ID NO: 2217315 - RNA, 19 nt, Artificial Sequence
  Description of Artificial Sequence: Synthetic oligonucleotide
guuuacucagaaggaaggg

SEQ ID NO: 2217316 - RNA, 19 nt, Artificial Sequence
  Description of Artificial Sequence: Synthetic oligonucleotide
ucugcaucucuguugugca

SEQ ID NO: 2217317 - RNA, 19 nt, Artificial Sequence
  Description of Artificial Sequence: Synthetic oligonucleotide
agcagaacaaaagggcagg

SEQ ID NO: 2217318 - RNA, 19 nt, Artificial Sequence
  Description of Artificial Sequence: Synthetic oligonucleotide
ugcuaaaccuguuucgcuc

SEQ ID NO: 2217319 - RNA, 19 nt, Artificial Sequence
  Description of Artificial Sequence: Synthetic oligonucleotide
ucuguguggcccagcagag

SEQ ID NO: 2217320 - RNA, 19 nt, Artificial Sequence
  Description of Artificial Sequence: Synthetic oligonucleotide
acacacagcugugucaugg

SEQ ID NO: 2217321 - RNA, 19 nt, Artificial Sequence
  Description of Artificial Sequence: Synthetic oligonucleotide
uagggaucgauguugggau

SEQ ID NO: 2217322 - RNA, 19 nt, Artificial Sequence
  Description of Artificial Sequence: Synthetic oligonucleotide
uuagccagcgcgucggcgc

SEQ ID NO: 2217323 - RNA, 19 nt, Artificial Sequence
  Description of Artificial Sequence: Synthetic oligonucleotide
ucuacucauucccagccau

SEQ ID NO: 2217324 - RNA, 19 nt, Artificial Sequence
  Description of Artificial Sequence: Synthetic oligonucleotide
guaucgaacagucaugacu

SEQ ID NO: 2217325 - RNA, 19 nt, Artificial Sequence
  Description of Artificial Sequence: Synthetic oligonucleotide
auuccauaagcguaucgaa

SEQ ID NO: 2217326 - RNA, 19 nt, Artificial Sequence
  Description of Artificial Sequence: Synthetic oligonucleotide
uauuguuaucauagaacuu

SEQ ID NO: 2217327 - RNA, 19 nt, Artificial Sequence
  Description of Artificial Sequence: Synthetic oligonucleotide
ggaucauaagaaucauagg

SEQ ID NO: 2217328 - RNA, 19 nt, Artificial Sequence
  Description of Artificial Sequence: Synthetic oligonucleotide
uguuccagcccugaaucag

SEQ ID NO: 2217329 - RNA, 19 nt, Artificial Sequence
  Description of Artificial Sequence: Synthetic oligonucleotide
uugggauuggugguguucc

SEQ ID NO: 2217330 - RNA, 19 nt, Artificial Sequence
  Description of Artificial Sequence: Synthetic oligonucleotide
aucaaguacaggccauuug

SEQ ID NO: 2217331 - RNA, 19 nt, Artificial Sequence
  Description of Artificial Sequence: Synthetic oligonucleotide
ggugaguugaugcuugccc

SEQ ID NO: 2217332 - RNA, 19 nt, Artificial Sequence
  Description of Artificial Sequence: Synthetic oligonucleotide
ucaugacugccagacauca

SEQ ID NO: 2217333 - RNA, 19 nt, Artificial Sequence
  Description of Artificial Sequence: Synthetic oligonucleotide
uuuuccgaugagcugugaa

SEQ ID NO: 2217334 - RNA, 19 nt, Artificial Sequence
  Description of Artificial Sequence: Synthetic oligonucleotide
agugcacgaauugcaaaac

SEQ ID NO: 2217335 - RNA, 19 nt, Artificial Sequence
  Description of Artificial Sequence: Synthetic oligonucleotide
uucuaggugggcuaccauc

SEQ ID NO: 2217336 - RNA, 19 nt, Artificial Sequence
  Description of Artificial Sequence: Synthetic oligonucleotide
guauuccauaacguaaaag

SEQ ID NO: 2217337 - RNA, 19 nt, Artificial Sequence
  Description of Artificial Sequence: Synthetic oligonucleotide
auaaaccuucacuuuuaga

SEQ ID NO: 2217338 - RNA, 19 nt, Artificial Sequence
  Description of Artificial Sequence: Synthetic oligonucleotide
aacuacacucuaacaaaug

SEQ ID NO: 2217339 - RNA, 19 nt, Artificial Sequence
  Description of Artificial Sequence: Synthetic oligonucleotide
aaacuacacucuaacaaau

SEQ ID NO: 2217340 - RNA, 19 nt, Artificial Sequence
  Description of Artificial Sequence: Synthetic oligonucleotide
guuguauuccauaacguaa

SEQ ID NO: 2217341 - RNA, 19 nt, Artificial Sequence
  Description of Artificial Sequence: Synthetic oligonucleotide
cagaacagaaggaucauaa

SEQ ID NO: 2217342 - RNA, 19 nt, Artificial Sequence
  Description of Artificial Sequence: Synthetic oligonucleotide
cacucuaacaaauguucuc

SEQ ID NO: 2217343 - RNA, 19 nt, Artificial Sequence
  Description of Artificial Sequence: Synthetic oligonucleotide
cauuuggaaggguggaaug

SEQ ID NO: 2217344 - RNA, 19 nt, Artificial Sequence
  Description of Artificial Sequence: Synthetic oligonucleotide
aucgaacagucaugacugc

SEQ ID NO: 2217345 - RNA, 19 nt, Artificial Sequence
  Description of Artificial Sequence: Synthetic oligonucleotide
agagcuagaaggugaaguu

SEQ ID NO: 2217346 - RNA, 19 nt, Artificial Sequence
  Description of Artificial Sequence: Synthetic oligonucleotide
gaagggagaugcuaaaccu

SEQ ID NO: 2217347 - RNA, 19 nt, Artificial Sequence
  Description of Artificial Sequence: Synthetic oligonucleotide
ugcuacaucauggauggau

SEQ ID NO: 2217348 - RNA, 19 nt, Artificial Sequence
  Description of Artificial Sequence: Synthetic oligonucleotide
uuccgaugagcugugaacu

SEQ ID NO: 2217349 - RNA, 19 nt, Artificial Sequence
  Description of Artificial Sequence: Synthetic oligonucleotide
uggaaggguggaaugcuac

SEQ ID NO: 2217350 - RNA, 19 nt, Artificial Sequence
  Description of Artificial Sequence: Synthetic oligonucleotide
ucuguaccaccacuguaac

SEQ ID NO: 2217351 - RNA, 19 nt, Artificial Sequence
  Description of Artificial Sequence: Synthetic oligonucleotide
ugaguugaugcuugcccug

SEQ ID NO: 2217352 - RNA, 19 nt, Artificial Sequence
  Description of Artificial Sequence: Synthetic oligonucleotide
aagggagaugcuaaaccug

SEQ ID NO: 2217353 - RNA, 19 nt, Artificial Sequence
  Description of Artificial Sequence: Synthetic oligonucleotide
cucaucacuacacacagcu

SEQ ID NO: 2217354 - RNA, 19 nt, Artificial Sequence
  Description of Artificial Sequence: Synthetic oligonucleotide
uuuggaaggguggaaugcu

SEQ ID NO: 2217355 - RNA, 19 nt, Artificial Sequence
  Description of Artificial Sequence: Synthetic oligonucleotide
acaagcgcuggugugccgc

SEQ ID NO: 2217356 - RNA, 19 nt, Artificial Sequence
  Description of Artificial Sequence: Synthetic oligonucleotide
uaagcguaucgaacaguca

SEQ ID NO: 2217357 - RNA, 19 nt, Artificial Sequence
  Description of Artificial Sequence: Synthetic oligonucleotide
ugugccgcgcuguaggcca

SEQ ID NO: 2217358 - RNA, 19 nt, Artificial Sequence
  Description of Artificial Sequence: Synthetic oligonucleotide
ggccauuuggaucaacugc

SEQ ID NO: 2217359 - RNA, 19 nt, Artificial Sequence
  Description of Artificial Sequence: Synthetic oligonucleotide
gguggaaugcuacaucaug

SEQ ID NO: 2217360 - RNA, 19 nt, Artificial Sequence
  Description of Artificial Sequence: Synthetic oligonucleotide
ugacugccagacaucaagu

SEQ ID NO: 2217361 - RNA, 19 nt, Artificial Sequence
  Description of Artificial Sequence: Synthetic oligonucleotide
cgucacaucauacaaagac

SEQ ID NO: 2217362 - RNA, 19 nt, Artificial Sequence
  Description of Artificial Sequence: Synthetic oligonucleotide
ugaauacaugucuuacuuu

SEQ ID NO: 2217363 - RNA, 19 nt, Artificial Sequence
  Description of Artificial Sequence: Synthetic oligonucleotide
ugaaguugaugcgucacau

SEQ ID NO: 2217364 - RNA, 19 nt, Artificial Sequence
  Description of Artificial Sequence: Synthetic oligonucleotide
agcugugucaugguuuuag

SEQ ID NO: 2217365 - RNA, 19 nt, Artificial Sequence
  Description of Artificial Sequence: Synthetic oligonucleotide
ggcuauauagcauuuggaa

SEQ ID NO: 2217366 - RNA, 19 nt, Artificial Sequence
  Description of Artificial Sequence: Synthetic oligonucleotide
uguuaucauagaacuugau

SEQ ID NO: 2217367 - RNA, 19 nt, Artificial Sequence
  Description of Artificial Sequence: Synthetic oligonucleotide
cugccagacaucaaguaca

SEQ ID NO: 2217368 - RNA, 19 nt, Artificial Sequence
  Description of Artificial Sequence: Synthetic oligonucleotide
auguucucugugcuccuuc

SEQ ID NO: 2217369 - RNA, 19 nt, Artificial Sequence
  Description of Artificial Sequence: Synthetic oligonucleotide
uugcugcucaucacuacac

SEQ ID NO: 2217370 - RNA, 19 nt, Artificial Sequence
  Description of Artificial Sequence: Synthetic oligonucleotide
cucucagaacagaaggauc

SEQ ID NO: 2217371 - RNA, 19 nt, Artificial Sequence
  Description of Artificial Sequence: Synthetic oligonucleotide
aaagggcagggugaguuga

SEQ ID NO: 2217372 - RNA, 19 nt, Artificial Sequence
  Description of Artificial Sequence: Synthetic oligonucleotide
cacgaauugcaaaacuaca

SEQ ID NO: 2217373 - RNA, 19 nt, Artificial Sequence
  Description of Artificial Sequence: Synthetic oligonucleotide
cuacaucauggauggauuc

SEQ ID NO: 2217374 - RNA, 19 nt, Artificial Sequence
  Description of Artificial Sequence: Synthetic oligonucleotide
gaguugaugcuugcccugg

SEQ ID NO: 2217375 - RNA, 19 nt, Artificial Sequence
  Description of Artificial Sequence: Synthetic oligonucleotide
gagcuagaaggugaaguug

SEQ ID NO: 2217376 - RNA, 19 nt, Artificial Sequence
  Description of Artificial Sequence: Synthetic oligonucleotide
cugugucaugguuuuaguc

SEQ ID NO: 2217377 - RNA, 19 nt, Artificial Sequence
  Description of Artificial Sequence: Synthetic oligonucleotide
aucgaguggauuugccugu

SEQ ID NO: 2217378 - RNA, 19 nt, Artificial Sequence
  Description of Artificial Sequence: Synthetic oligonucleotide
aauuuuccgaugagcugug

SEQ ID NO: 2217379 - RNA, 19 nt, Artificial Sequence
  Description of Artificial Sequence: Synthetic oligonucleotide
uguugugcaguugacuuuu

SEQ ID NO: 2217380 - RNA, 19 nt, Artificial Sequence
  Description of Artificial Sequence: Synthetic oligonucleotide
gucuuacuuucuaaauucc

SEQ ID NO: 2217381 - RNA, 19 nt, Artificial Sequence
  Description of Artificial Sequence: Synthetic oligonucleotide
aggacaacaagcgcuggug

SEQ ID NO: 2217382 - RNA, 19 nt, Artificial Sequence
  Description of Artificial Sequence: Synthetic oligonucleotide
cgaaugagaacaauuucag

SEQ ID NO: 2217383 - RNA, 19 nt, Artificial Sequence
  Description of Artificial Sequence: Synthetic oligonucleotide
cagagggccucucagaaca

SEQ ID NO: 2217384 - RNA, 19 nt, Artificial Sequence
  Description of Artificial Sequence: Synthetic oligonucleotide
uuucgcucaggccugccua

SEQ ID NO: 2217385 - RNA, 19 nt, Artificial Sequence
  Description of Artificial Sequence: Synthetic oligonucleotide
aagaccuuagccagcgcgu

SEQ ID NO: 2217386 - RNA, 19 nt, Artificial Sequence
  Description of Artificial Sequence: Synthetic oligonucleotide
ucaaaguuuucaggcuccc

SEQ ID NO: 2217387 - RNA, 19 nt, Artificial Sequence
  Description of Artificial Sequence: Synthetic oligonucleotide
aagaaucauagggaucgau

SEQ ID NO: 2217388 - RNA, 19 nt, Artificial Sequence
  Description of Artificial Sequence: Synthetic oligonucleotide
gaaguugaugcgucacauc

SEQ ID NO: 2217389 - RNA, 19 nt, Artificial Sequence
  Description of Artificial Sequence: Synthetic oligonucleotide
caucacuacacacagcugu

SEQ ID NO: 2217390 - RNA, 19 nt, Artificial Sequence
  Description of Artificial Sequence: Synthetic oligonucleotide
aacaagcgcuggugugccg

SEQ ID NO: 2217391 - RNA, 19 nt, Artificial Sequence
  Description of Artificial Sequence: Synthetic oligonucleotide
uucaggcucccagagucag

SEQ ID NO: 2217392 - RNA, 19 nt, Artificial Sequence
  Description of Artificial Sequence: Synthetic oligonucleotide
ugguguuccagcccugaau

SEQ ID NO: 2217393 - RNA, 19 nt, Artificial Sequence
  Description of Artificial Sequence: Synthetic oligonucleotide
uuucaggcucccagaguca

SEQ ID NO: 2217394 - RNA, 19 nt, Artificial Sequence
  Description of Artificial Sequence: Synthetic oligonucleotide
augagcugugaacucuuga

SEQ ID NO: 2217395 - RNA, 19 nt, Artificial Sequence
  Description of Artificial Sequence: Synthetic oligonucleotide
aucuguaccaccacuguaa

SEQ ID NO: 2217396 - RNA, 19 nt, Artificial Sequence
  Description of Artificial Sequence: Synthetic oligonucleotide
cuuacuuucuaaauuccau

SEQ ID NO: 2217397 - RNA, 19 nt, Artificial Sequence
  Description of Artificial Sequence: Synthetic oligonucleotide
auuauccaacacagacagc

SEQ ID NO: 2217398 - RNA, 19 nt, Artificial Sequence
  Description of Artificial Sequence: Synthetic oligonucleotide
aaacacacucagugccgga

SEQ ID NO: 2217399 - RNA, 19 nt, Artificial Sequence
  Description of Artificial Sequence: Synthetic oligonucleotide
cagugccggagcaaccucg

SEQ ID NO: 2217400 - RNA, 19 nt, Artificial Sequence
  Description of Artificial Sequence: Synthetic oligonucleotide
uggauuugccuguauuguu

SEQ ID NO: 2217401 - RNA, 19 nt, Artificial Sequence
  Description of Artificial Sequence: Synthetic oligonucleotide
aacagugcacgaauugcaa

SEQ ID NO: 2217402 - RNA, 19 nt, Artificial Sequence
  Description of Artificial Sequence: Synthetic oligonucleotide
ugaugugccugucuuccuu

SEQ ID NO: 2217403 - RNA, 19 nt, Artificial Sequence
  Description of Artificial Sequence: Synthetic oligonucleotide
gaauaaaccuucacuuuua

SEQ ID NO: 2217404 - RNA, 19 nt, Artificial Sequence
  Description of Artificial Sequence: Synthetic oligonucleotide
accaucgaguggauuugcc

SEQ ID NO: 2217405 - RNA, 19 nt, Artificial Sequence
  Description of Artificial Sequence: Synthetic oligonucleotide
acagugcacgaauugcaaa

SEQ ID NO: 2217406 - RNA, 19 nt, Artificial Sequence
  Description of Artificial Sequence: Synthetic oligonucleotide
ucucuguugugcaguugac

SEQ ID NO: 2217407 - RNA, 19 nt, Artificial Sequence
  Description of Artificial Sequence: Synthetic oligonucleotide
ugcucaccauugcugcuca

SEQ ID NO: 2217408 - RNA, 19 nt, Artificial Sequence
  Description of Artificial Sequence: Synthetic oligonucleotide
cucgguuguauuccauaac

SEQ ID NO: 2217409 - RNA, 19 nt, Artificial Sequence
  Description of Artificial Sequence: Synthetic oligonucleotide
agggagaugcuaaaccugu

SEQ ID NO: 2217410 - RNA, 19 nt, Artificial Sequence
  Description of Artificial Sequence: Synthetic oligonucleotide
cuugaauacaugucuuacu

SEQ ID NO: 2217411 - RNA, 19 nt, Artificial Sequence
  Description of Artificial Sequence: Synthetic oligonucleotide
gguuguauuccauaacgua

SEQ ID NO: 2217412 - RNA, 19 nt, Artificial Sequence
  Description of Artificial Sequence: Synthetic oligonucleotide
uggauggauucuucaaauu

SEQ ID NO: 2217413 - RNA, 19 nt, Artificial Sequence
  Description of Artificial Sequence: Synthetic oligonucleotide
ggauuggugguguuccagc

SEQ ID NO: 2217414 - RNA, 19 nt, Artificial Sequence
  Description of Artificial Sequence: Synthetic oligonucleotide
cuaaaccuguuucgcucag

SEQ ID NO: 2217415 - RNA, 19 nt, Artificial Sequence
  Description of Artificial Sequence: Synthetic oligonucleotide
gaaggugaaguugaugcgu

SEQ ID NO: 2217416 - RNA, 19 nt, Artificial Sequence
  Description of Artificial Sequence: Synthetic oligonucleotide
ugucaugguuuuagucuuc

SEQ ID NO: 2217417 - RNA, 19 nt, Artificial Sequence
  Description of Artificial Sequence: Synthetic oligonucleotide
cugccuagcgaaugagaac

SEQ ID NO: 2217418 - RNA, 19 nt, Artificial Sequence
  Description of Artificial Sequence: Synthetic oligonucleotide
ugccugucuuccuugguua

SEQ ID NO: 2217419 - RNA, 19 nt, Artificial Sequence
  Description of Artificial Sequence: Synthetic oligonucleotide
uuggaaggguggaaugcua

SEQ ID NO: 2217420 - RNA, 19 nt, Artificial Sequence
  Description of Artificial Sequence: Synthetic oligonucleotide
cagcaugcccuguuuacuc

SEQ ID NO: 2217421 - RNA, 19 nt, Artificial Sequence
  Description of Artificial Sequence: Synthetic oligonucleotide
cagugcacgaauugcaaaa

SEQ ID NO: 2217422 - RNA, 19 nt, Artificial Sequence
  Description of Artificial Sequence: Synthetic oligonucleotide
uugccuguauuguuaucau

SEQ ID NO: 2217423 - RNA, 19 nt, Artificial Sequence
  Description of Artificial Sequence: Synthetic oligonucleotide
caaguacaggccauuugga

SEQ ID NO: 2217424 - RNA, 19 nt, Artificial Sequence
  Description of Artificial Sequence: Synthetic oligonucleotide
agcaugcccuguuuacuca

SEQ ID NO: 2217425 - RNA, 19 nt, Artificial Sequence
  Description of Artificial Sequence: Synthetic oligonucleotide
aucacuacacacagcugug

SEQ ID NO: 2217426 - RNA, 19 nt, Artificial Sequence
  Description of Artificial Sequence: Synthetic oligonucleotide
gcagccaccugaauaaacc

SEQ ID NO: 2217427 - RNA, 19 nt, Artificial Sequence
  Description of Artificial Sequence: Synthetic oligonucleotide
acuggcuauauagcauuug

SEQ ID NO: 2217428 - RNA, 19 nt, Artificial Sequence
  Description of Artificial Sequence: Synthetic oligonucleotide
gugaaguugaugcgucaca

SEQ ID NO: 2217429 - RNA, 19 nt, Artificial Sequence
  Description of Artificial Sequence: Synthetic oligonucleotide
agcaggacaacaagcgcug

SEQ ID NO: 2217430 - RNA, 19 nt, Artificial Sequence
  Description of Artificial Sequence: Synthetic oligonucleotide
uccgaugagcugugaacuc

SEQ ID NO: 2217431 - RNA, 19 nt, Artificial Sequence
  Description of Artificial Sequence: Synthetic oligonucleotide
agaccuuagccagcgcguc

SEQ ID NO: 2217432 - RNA, 19 nt, Artificial Sequence
  Description of Artificial Sequence: Synthetic oligonucleotide
ugccggagcaaccucgguu

SEQ ID NO: 2217433 - RNA, 19 nt, Artificial Sequence
  Description of Artificial Sequence: Synthetic oligonucleotide
ugaugcuugcccuggucuu

SEQ ID NO: 2217434 - RNA, 19 nt, Artificial Sequence
  Description of Artificial Sequence: Synthetic oligonucleotide
cuaccaucgaguggauuug

SEQ ID NO: 2217435 - RNA, 19 nt, Artificial Sequence
  Description of Artificial Sequence: Synthetic oligonucleotide
uaagaaucauagggaucga

SEQ ID NO: 2217436 - RNA, 19 nt, Artificial Sequence
  Description of Artificial Sequence: Synthetic oligonucleotide
ugugccugucuuccuuggu

SEQ ID NO: 2217437 - RNA, 19 nt, Artificial Sequence
  Description of Artificial Sequence: Synthetic oligonucleotide
gcacgaauugcaaaacuac

SEQ ID NO: 2217438 - RNA, 19 nt, Artificial Sequence
  Description of Artificial Sequence: Synthetic oligonucleotide
cauaacguaaaagugccau

SEQ ID NO: 2217439 - RNA, 19 nt, Artificial Sequence
  Description of Artificial Sequence: Synthetic oligonucleotide
acagcaugcccuguuuacu

SEQ ID NO: 2217440 - RNA, 19 nt, Artificial Sequence
  Description of Artificial Sequence: Synthetic oligonucleotide
acucagugccggagcaacc

SEQ ID NO: 2217441 - RNA, 19 nt, Artificial Sequence
  Description of Artificial Sequence: Synthetic oligonucleotide
agcguaucgaacagucaug

SEQ ID NO: 2217442 - RNA, 19 nt, Artificial Sequence
  Description of Artificial Sequence: Synthetic oligonucleotide
gauuugccuguauuguuau

SEQ ID NO: 2217443 - RNA, 19 nt, Artificial Sequence
  Description of Artificial Sequence: Synthetic oligonucleotide
agcgcgucggcgccagcac

SEQ ID NO: 2217444 - RNA, 19 nt, Artificial Sequence
  Description of Artificial Sequence: Synthetic oligonucleotide
gcaaccucgguuguauucc

SEQ ID NO: 2217445 - RNA, 19 nt, Artificial Sequence
  Description of Artificial Sequence: Synthetic oligonucleotide
caacaagcgcuggugugcc

SEQ ID NO: 2217446 - RNA, 19 nt, Artificial Sequence
  Description of Artificial Sequence: Synthetic oligonucleotide
cuacucauucccagccauc

SEQ ID NO: 2217447 - RNA, 19 nt, Artificial Sequence
  Description of Artificial Sequence: Synthetic oligonucleotide
cuagcgaaugagaacaauu

SEQ ID NO: 2217448 - RNA, 19 nt, Artificial Sequence
  Description of Artificial Sequence: Synthetic oligonucleotide
gccggagcaaccucgguug

SEQ ID NO: 2217449 - RNA, 19 nt, Artificial Sequence
  Description of Artificial Sequence: Synthetic oligonucleotide
ggugggcuaccaucgagug

SEQ ID NO: 2217450 - RNA, 19 nt, Artificial Sequence
  Description of Artificial Sequence: Synthetic oligonucleotide
cuuagccagcgcgucggcg

SEQ ID NO: 2217451 - RNA, 19 nt, Artificial Sequence
  Description of Artificial Sequence: Synthetic oligonucleotide
uaccaucgaguggauuugc

SEQ ID NO: 2217452 - RNA, 19 nt, Artificial Sequence
  Description of Artificial Sequence: Synthetic oligonucleotide
gacugccagacaucaagua

SEQ ID NO: 2217453 - RNA, 19 nt, Artificial Sequence
  Description of Artificial Sequence: Synthetic oligonucleotide
agcuucuaggugggcuacc

SEQ ID NO: 2217454 - RNA, 19 nt, Artificial Sequence
  Description of Artificial Sequence: Synthetic oligonucleotide
ucagugccggagcaaccuc

SEQ ID NO: 2217455 - RNA, 19 nt, Artificial Sequence
  Description of Artificial Sequence: Synthetic oligonucleotide
cucuugaauacaugucuua

SEQ ID NO: 2217456 - RNA, 19 nt, Artificial Sequence
  Description of Artificial Sequence: Synthetic oligonucleotide
cugcaucucuguugugcag

SEQ ID NO: 2217457 - RNA, 19 nt, Artificial Sequence
  Description of Artificial Sequence: Synthetic oligonucleotide
cucaccauugcugcucauc

SEQ ID NO: 2217458 - RNA, 19 nt, Artificial Sequence
  Description of Artificial Sequence: Synthetic oligonucleotide
aagcgcuggugugccgcgc

SEQ ID NO: 2217459 - RNA, 19 nt, Artificial Sequence
  Description of Artificial Sequence: Synthetic oligonucleotide
uccagcccugaaucagccc

SEQ ID NO: 2217460 - RNA, 19 nt, Artificial Sequence
  Description of Artificial Sequence: Synthetic oligonucleotide
acucuugaauacaugucuu

SEQ ID NO: 2217461 - RNA, 19 nt, Artificial Sequence
  Description of Artificial Sequence: Synthetic oligonucleotide
agugccggagcaaccucgg

SEQ ID NO: 2217462 - RNA, 19 nt, Artificial Sequence
  Description of Artificial Sequence: Synthetic oligonucleotide
agacagcaugcccuguuua

SEQ ID NO: 2217463 - RNA, 19 nt, Artificial Sequence
  Description of Artificial Sequence: Synthetic oligonucleotide
gcuaaaccuguuucgcuca

SEQ ID NO: 2217464 - RNA, 19 nt, Artificial Sequence
  Description of Artificial Sequence: Synthetic oligonucleotide
accucgguuguauuccaua

SEQ ID NO: 2217465 - RNA, 19 nt, Artificial Sequence
  Description of Artificial Sequence: Synthetic oligonucleotide
ugggauuggugguguucca

SEQ ID NO: 2217466 - RNA, 19 nt, Artificial Sequence
  Description of Artificial Sequence: Synthetic oligonucleotide
agcacuggcuauauagcau

SEQ ID NO: 2217467 - RNA, 19 nt, Artificial Sequence
  Description of Artificial Sequence: Synthetic oligonucleotide
guugggauuggugguguuc

SEQ ID NO: 2217468 - RNA, 19 nt, Artificial Sequence
  Description of Artificial Sequence: Synthetic oligonucleotide
ccugaauaaaccuucacuu

SEQ ID NO: 2217469 - RNA, 19 nt, Artificial Sequence
  Description of Artificial Sequence: Synthetic oligonucleotide
caccauugcugcucaucac

SEQ ID NO: 2217470 - RNA, 19 nt, Artificial Sequence
  Description of Artificial Sequence: Synthetic oligonucleotide
gagcugugaacucuugaau

SEQ ID NO: 2217471 - RNA, 19 nt, Artificial Sequence
  Description of Artificial Sequence: Synthetic oligonucleotide
cugaauaaaccuucacuuu

SEQ ID NO: 2217472 - RNA, 19 nt, Artificial Sequence
  Description of Artificial Sequence: Synthetic oligonucleotide
cuacacucuaacaaauguu

SEQ ID NO: 2217473 - RNA, 19 nt, Artificial Sequence
  Description of Artificial Sequence: Synthetic oligonucleotide
cauagaacuugaugugccu

SEQ ID NO: 2217474 - RNA, 19 nt, Artificial Sequence
  Description of Artificial Sequence: Synthetic oligonucleotide
caaagaccuuagccagcgc

SEQ ID NO: 2217475 - RNA, 19 nt, Artificial Sequence
  Description of Artificial Sequence: Synthetic oligonucleotide
gggaucgauguugggauug

SEQ ID NO: 2217476 - RNA, 19 nt, Artificial Sequence
  Description of Artificial Sequence: Synthetic oligonucleotide
ggaucgauguugggauugg

SEQ ID NO: 2217477 - RNA, 19 nt, Artificial Sequence
  Description of Artificial Sequence: Synthetic oligonucleotide
ucggcgccagcacuggcua

SEQ ID NO: 2217478 - RNA, 19 nt, Artificial Sequence
  Description of Artificial Sequence: Synthetic oligonucleotide
gcaugcccuguuuacucag

SEQ ID NO: 2217479 - RNA, 19 nt, Artificial Sequence
  Description of Artificial Sequence: Synthetic oligonucleotide
aggccugccuagcgaauga

SEQ ID NO: 2217480 - RNA, 19 nt, Artificial Sequence
  Description of Artificial Sequence: Synthetic oligonucleotide
gaaggaucauaagaaucau

SEQ ID NO: 2217481 - RNA, 19 nt, Artificial Sequence
  Description of Artificial Sequence: Synthetic oligonucleotide
guggauuugccuguauugu

SEQ ID NO: 2217482 - RNA, 19 nt, Artificial Sequence
  Description of Artificial Sequence: Synthetic oligonucleotide
gcuugcagccaccugaaua

SEQ ID NO: 2217483 - RNA, 19 nt, Artificial Sequence
  Description of Artificial Sequence: Synthetic oligonucleotide
gccaccugaauaaaccuuc

SEQ ID NO: 2217484 - RNA, 19 nt, Artificial Sequence
  Description of Artificial Sequence: Synthetic oligonucleotide
cacacucagugccggagca

SEQ ID NO: 2217485 - RNA, 19 nt, Artificial Sequence
  Description of Artificial Sequence: Synthetic oligonucleotide
gcuaccaucgaguggauuu

SEQ ID NO: 2217486 - RNA, 19 nt, Artificial Sequence
  Description of Artificial Sequence: Synthetic oligonucleotide
cugcucaccauugcugcuc

SEQ ID NO: 2217487 - RNA, 19 nt, Artificial Sequence
  Description of Artificial Sequence: Synthetic oligonucleotide
gaaggguggaaugcuacau

SEQ ID NO: 2217488 - RNA, 19 nt, Artificial Sequence
  Description of Artificial Sequence: Synthetic oligonucleotide
aguugaugcgucacaucau

SEQ ID NO: 2217489 - RNA, 19 nt, Artificial Sequence
  Description of Artificial Sequence: Synthetic oligonucleotide
acaggccauuuggaucaac

SEQ ID NO: 2217490 - RNA, 19 nt, Artificial Sequence
  Description of Artificial Sequence: Synthetic oligonucleotide
caggccauuuggaucaacu

SEQ ID NO: 2217491 - RNA, 19 nt, Artificial Sequence
  Description of Artificial Sequence: Synthetic oligonucleotide
ucccagccauccaacuuuu

SEQ ID NO: 2217492 - RNA, 19 nt, Artificial Sequence
  Description of Artificial Sequence: Synthetic oligonucleotide
gucaugacugccagacauc

SEQ ID NO: 2217493 - RNA, 19 nt, Artificial Sequence
  Description of Artificial Sequence: Synthetic oligonucleotide
acaucaaguacaggccauu

SEQ ID NO: 2217494 - RNA, 19 nt, Artificial Sequence
  Description of Artificial Sequence: Synthetic oligonucleotide
cugaaucagcccaucugua

SEQ ID NO: 2217495 - RNA, 19 nt, Artificial Sequence
  Description of Artificial Sequence: Synthetic oligonucleotide
cucuacucauucccagcca

SEQ ID NO: 2217496 - RNA, 19 nt, Artificial Sequence
  Description of Artificial Sequence: Synthetic oligonucleotide
gaguggauuugccuguauu

SEQ ID NO: 2217497 - RNA, 19 nt, Artificial Sequence
  Description of Artificial Sequence: Synthetic oligonucleotide
cuguaccaccacuguaaca

SEQ ID NO: 2217498 - RNA, 19 nt, Artificial Sequence
  Description of Artificial Sequence: Synthetic oligonucleotide
gugcacgaauugcaaaacu

SEQ ID NO: 2217499 - RNA, 19 nt, Artificial Sequence
  Description of Artificial Sequence: Synthetic oligonucleotide
ugugcuccuucagcagaac

SEQ ID NO: 2217500 - RNA, 19 nt, Artificial Sequence
  Description of Artificial Sequence: Synthetic oligonucleotide
gggauuggugguguuccag

SEQ ID NO: 2217501 - RNA, 19 nt, Artificial Sequence
  Description of Artificial Sequence: Synthetic oligonucleotide
ccugccuagcgaaugagaa

SEQ ID NO: 2217502 - RNA, 19 nt, Artificial Sequence
  Description of Artificial Sequence: Synthetic oligonucleotide
ccuguuucgcucaggccug

SEQ ID NO: 2217503 - RNA, 19 nt, Artificial Sequence
  Description of Artificial Sequence: Synthetic oligonucleotide
ggauuugccuguauuguua

SEQ ID NO: 2217504 - RNA, 19 nt, Artificial Sequence
  Description of Artificial Sequence: Synthetic oligonucleotide
guuuucaggcucccagagu

SEQ ID NO: 2217505 - RNA, 19 nt, Artificial Sequence
  Description of Artificial Sequence: Synthetic oligonucleotide
uguuucgcucaggccugcc

SEQ ID NO: 2217506 - RNA, 19 nt, Artificial Sequence
  Description of Artificial Sequence: Synthetic oligonucleotide
cagccauccaacuuuuaau

SEQ ID NO: 2217507 - RNA, 19 nt, Artificial Sequence
  Description of Artificial Sequence: Synthetic oligonucleotide
gcguaucgaacagucauga

SEQ ID NO: 2217508 - RNA, 19 nt, Artificial Sequence
  Description of Artificial Sequence: Synthetic oligonucleotide
augcgucacaucauacaaa

SEQ ID NO: 2217509 - RNA, 19 nt, Artificial Sequence
  Description of Artificial Sequence: Synthetic oligonucleotide
caaccucgguuguauucca

SEQ ID NO: 2217510 - RNA, 19 nt, Artificial Sequence
  Description of Artificial Sequence: Synthetic oligonucleotide
caaaguuuucaggcuccca

SEQ ID NO: 2217511 - RNA, 19 nt, Artificial Sequence
  Description of Artificial Sequence: Synthetic oligonucleotide
agggaucgauguugggauu

SEQ ID NO: 2217512 - RNA, 19 nt, Artificial Sequence
  Description of Artificial Sequence: Synthetic oligonucleotide
ggugugccgcgcuguaggc

SEQ ID NO: 2217513 - RNA, 19 nt, Artificial Sequence
  Description of Artificial Sequence: Synthetic oligonucleotide
augcuugcccuggucuucu

SEQ ID NO: 2217514 - RNA, 19 nt, Artificial Sequence
  Description of Artificial Sequence: Synthetic oligonucleotide
caucucuguugugcaguug

SEQ ID NO: 2217515 - RNA, 19 nt, Artificial Sequence
  Description of Artificial Sequence: Synthetic oligonucleotide
gccauccaacuuuuaauua

SEQ ID NO: 2217516 - RNA, 19 nt, Artificial Sequence
  Description of Artificial Sequence: Synthetic oligonucleotide
ggggaaauuucaaaguuuu

SEQ ID NO: 2217517 - RNA, 19 nt, Artificial Sequence
  Description of Artificial Sequence: Synthetic oligonucleotide
aaccucgguuguauuccau

SEQ ID NO: 2217518 - RNA, 19 nt, Artificial Sequence
  Description of Artificial Sequence: Synthetic oligonucleotide
auuuuccgaugagcuguga

SEQ ID NO: 2217519 - RNA, 19 nt, Artificial Sequence
  Description of Artificial Sequence: Synthetic oligonucleotide
cagccaccugaauaaaccu

SEQ ID NO: 2217520 - RNA, 19 nt, Artificial Sequence
  Description of Artificial Sequence: Synthetic oligonucleotide
ggaaugcuacaucauggau

SEQ ID NO: 2217521 - RNA, 19 nt, Artificial Sequence
  Description of Artificial Sequence: Synthetic oligonucleotide
cuaggugggcuaccaucga

SEQ ID NO: 2217522 - RNA, 19 nt, Artificial Sequence
  Description of Artificial Sequence: Synthetic oligonucleotide
cagcuucuaggugggcuac

SEQ ID NO: 2217523 - RNA, 19 nt, Artificial Sequence
  Description of Artificial Sequence: Synthetic oligonucleotide
cccuguuuacucagaagga

SEQ ID NO: 2217524 - RNA, 19 nt, Artificial Sequence
  Description of Artificial Sequence: Synthetic oligonucleotide
aagggcagggugaguugau

SEQ ID NO: 2217525 - RNA, 19 nt, Artificial Sequence
  Description of Artificial Sequence: Synthetic oligonucleotide
cauaagcguaucgaacagu

SEQ ID NO: 2217526 - RNA, 19 nt, Artificial Sequence
  Description of Artificial Sequence: Synthetic oligonucleotide
gagggccucucagaacaga

SEQ ID NO: 2217527 - RNA, 19 nt, Artificial Sequence
  Description of Artificial Sequence: Synthetic oligonucleotide
ucgcucaggccugccuagc

SEQ ID NO: 2217528 - RNA, 19 nt, Artificial Sequence
  Description of Artificial Sequence: Synthetic oligonucleotide
gugugccgcgcuguaggcc

SEQ ID NO: 2217529 - RNA, 19 nt, Artificial Sequence
  Description of Artificial Sequence: Synthetic oligonucleotide
ucgaguggauuugccugua

SEQ ID NO: 2217530 - RNA, 19 nt, Artificial Sequence
  Description of Artificial Sequence: Synthetic oligonucleotide
ccagccauccaacuuuuaa

SEQ ID NO: 2217531 - RNA, 19 nt, Artificial Sequence
  Description of Artificial Sequence: Synthetic oligonucleotide
gggccucucagaacagaag

SEQ ID NO: 2217532 - RNA, 19 nt, Artificial Sequence
  Description of Artificial Sequence: Synthetic oligonucleotide
ccauccaacuuuuaauuau

SEQ ID NO: 2217533 - RNA, 19 nt, Artificial Sequence
  Description of Artificial Sequence: Synthetic oligonucleotide
guuucgcucaggccugccu

SEQ ID NO: 2217534 - RNA, 19 nt, Artificial Sequence
  Description of Artificial Sequence: Synthetic oligonucleotide
gggugaguugaugcuugcc

SEQ ID NO: 2217535 - RNA, 19 nt, Artificial Sequence
  Description of Artificial Sequence: Synthetic oligonucleotide
ccuguuuacucagaaggaa

SEQ ID NO: 2217536 - RNA, 19 nt, Artificial Sequence
  Description of Artificial Sequence: Synthetic oligonucleotide
ggacaacaagcgcuggugu

SEQ ID NO: 2217537 - RNA, 19 nt, Artificial Sequence
  Description of Artificial Sequence: Synthetic oligonucleotide
ccucgguuguauuccauaa

SEQ ID NO: 2217538 - RNA, 19 nt, Artificial Sequence
  Description of Artificial Sequence: Synthetic oligonucleotide
cagucaugacugccagaca

SEQ ID NO: 2217539 - RNA, 19 nt, Artificial Sequence
  Description of Artificial Sequence: Synthetic oligonucleotide
guguggcccagcagagggc

SEQ ID NO: 2217540 - RNA, 19 nt, Artificial Sequence
  Description of Artificial Sequence: Synthetic oligonucleotide
agcuugcagccaccugaau

SEQ ID NO: 2217541 - RNA, 19 nt, Artificial Sequence
  Description of Artificial Sequence: Synthetic oligonucleotide
gccucucagaacagaagga

SEQ ID NO: 2217542 - RNA, 19 nt, Artificial Sequence
  Description of Artificial Sequence: Synthetic oligonucleotide
gcucccagagucagcugag

SEQ ID NO: 2217543 - RNA, 19 nt, Artificial Sequence
  Description of Artificial Sequence: Synthetic oligonucleotide
cucagugccggagcaaccu

SEQ ID NO: 2217544 - RNA, 19 nt, Artificial Sequence
  Description of Artificial Sequence: Synthetic oligonucleotide
gugccugucuuccuugguu

SEQ ID NO: 2217545 - RNA, 19 nt, Artificial Sequence
  Description of Artificial Sequence: Synthetic oligonucleotide
caggacaacaagcgcuggu

SEQ ID NO: 2217546 - RNA, 19 nt, Artificial Sequence
  Description of Artificial Sequence: Synthetic oligonucleotide
gaucgauguugggauuggu

SEQ ID NO: 2217547 - RNA, 19 nt, Artificial Sequence
  Description of Artificial Sequence: Synthetic oligonucleotide
cacaucauacaaagaccuu

SEQ ID NO: 2217548 - RNA, 19 nt, Artificial Sequence
  Description of Artificial Sequence: Synthetic oligonucleotide
gugguguuccagcccugaa

SEQ ID NO: 2217549 - RNA, 19 nt, Artificial Sequence
  Description of Artificial Sequence: Synthetic oligonucleotide
gcacuggcuauauagcauu

SEQ ID NO: 2217550 - RNA, 19 nt, Artificial Sequence
  Description of Artificial Sequence: Synthetic oligonucleotide
cguaucgaacagucaugac

SEQ ID NO: 2217551 - RNA, 19 nt, Artificial Sequence
  Description of Artificial Sequence: Synthetic oligonucleotide
gcucaggccugccuagcga

SEQ ID NO: 2217552 - RNA, 19 nt, Artificial Sequence
  Description of Artificial Sequence: Synthetic oligonucleotide
ccauaacguaaaagugcca

SEQ ID NO: 2217553 - RNA, 19 nt, Artificial Sequence
  Description of Artificial Sequence: Synthetic oligonucleotide
cuguugugcaguugacuuu

SEQ ID NO: 2217554 - RNA, 19 nt, Artificial Sequence
  Description of Artificial Sequence: Synthetic oligonucleotide
ccaccugaauaaaccuuca

SEQ ID NO: 2217555 - RNA, 19 nt, Artificial Sequence
  Description of Artificial Sequence: Synthetic oligonucleotide
uacaggccauuuggaucaa

SEQ ID NO: 2217556 - RNA, 19 nt, Artificial Sequence
  Description of Artificial Sequence: Synthetic oligonucleotide
ggugguguuccagcccuga

SEQ ID NO: 2217557 - RNA, 19 nt, Artificial Sequence
  Description of Artificial Sequence: Synthetic oligonucleotide
ggccugccuagcgaaugag

SEQ ID NO: 2217558 - RNA, 19 nt, Artificial Sequence
  Description of Artificial Sequence: Synthetic oligonucleotide
ccauugcugcucaucacua

SEQ ID NO: 2217559 - RNA, 19 nt, Artificial Sequence
  Description of Artificial Sequence: Synthetic oligonucleotide
gcauuuggaaggguggaau

SEQ ID NO: 2217560 - RNA, 19 nt, Artificial Sequence
  Description of Artificial Sequence: Synthetic oligonucleotide
ggagcaaccucgguuguau

SEQ ID NO: 2217561 - RNA, 19 nt, Artificial Sequence
  Description of Artificial Sequence: Synthetic oligonucleotide
gcuacaucauggauggauu

SEQ ID NO: 2217562 - RNA, 19 nt, Artificial Sequence
  Description of Artificial Sequence: Synthetic oligonucleotide
ccaucgaguggauuugccu

SEQ ID NO: 2217563 - RNA, 19 nt, Artificial Sequence
  Description of Artificial Sequence: Synthetic oligonucleotide
cgcucaggccugccuagcg

SEQ ID NO: 2217564 - RNA, 19 nt, Artificial Sequence
  Description of Artificial Sequence: Synthetic oligonucleotide
ugccgcgcuguaggccagc

SEQ ID NO: 2217565 - RNA, 19 nt, Artificial Sequence
  Description of Artificial Sequence: Synthetic oligonucleotide
gucggcgccagcacuggcu

SEQ ID NO: 2217566 - RNA, 19 nt, Artificial Sequence
  Description of Artificial Sequence: Synthetic oligonucleotide
cagcgcgucggcgccagca

SEQ ID NO: 2217567 - RNA, 19 nt, Artificial Sequence
  Description of Artificial Sequence: Synthetic oligonucleotide
cacuggcuauauagcauuu

SEQ ID NO: 2217568 - RNA, 19 nt, Artificial Sequence
  Description of Artificial Sequence: Synthetic oligonucleotide
cuucuaggugggcuaccau

SEQ ID NO: 2217569 - RNA, 19 nt, Artificial Sequence
  Description of Artificial Sequence: Synthetic oligonucleotide
gccugccuagcgaaugaga

SEQ ID NO: 2217570 - RNA, 19 nt, Artificial Sequence
  Description of Artificial Sequence: Synthetic oligonucleotide
gagcaaccucgguuguauu

SEQ ID NO: 2217571 - RNA, 19 nt, Artificial Sequence
  Description of Artificial Sequence: Synthetic oligonucleotide
gguuaucauuaaacacacu

SEQ ID NO: 2217572 - RNA, 19 nt, Artificial Sequence
  Description of Artificial Sequence: Synthetic oligonucleotide
gcgucacaucauacaaaga

SEQ ID NO: 2217573 - RNA, 19 nt, Artificial Sequence
  Description of Artificial Sequence: Synthetic oligonucleotide
cgguuguauuccauaacgu

SEQ ID NO: 2217574 - RNA, 19 nt, Artificial Sequence
  Description of Artificial Sequence: Synthetic oligonucleotide
gugccgcgcuguaggccag

SEQ ID NO: 2217575 - RNA, 19 nt, Artificial Sequence
  Description of Artificial Sequence: Synthetic oligonucleotide
ggcgccagcacuggcuaua

SEQ ID NO: 2217576 - RNA, 19 nt, Artificial Sequence
  Description of Artificial Sequence: Synthetic oligonucleotide
gcccugaaucagcccaucu

SEQ ID NO: 2217577 - RNA, 19 nt, Artificial Sequence
  Description of Artificial Sequence: Synthetic oligonucleotide
gcgcuggugugccgcgcug

SEQ ID NO: 2217578 - RNA, 19 nt, Artificial Sequence
  Description of Artificial Sequence: Synthetic oligonucleotide
cccagcagagggccucuca

SEQ ID NO: 2217579 - RNA, 19 nt, Artificial Sequence
  Description of Artificial Sequence: Synthetic oligonucleotide
ccgaugagcugugaacucu

SEQ ID NO: 2217580 - RNA, 19 nt, Artificial Sequence
  Description of Artificial Sequence: Synthetic oligonucleotide
gccuagcgaaugagaacaa

SEQ ID NO: 2217581 - RNA, 19 nt, Artificial Sequence
  Description of Artificial Sequence: Synthetic oligonucleotide
gccagcgcgucggcgccag

SEQ ID NO: 2217582 - RNA, 19 nt, Artificial Sequence
  Description of Artificial Sequence: Synthetic oligonucleotide
gccgcgcuguaggccagcc

SEQ ID NO: 2217583 - RNA, 19 nt, Artificial Sequence
  Description of Artificial Sequence: Synthetic oligonucleotide
ccgcgcuguaggccagccc

SEQ ID NO: 2217584 - RNA, 19 nt, Artificial Sequence
  Description of Artificial Sequence: Synthetic oligonucleotide
agccagcgcgucggcgcca

SEQ ID NO: 2217585 - RNA, 19 nt, Artificial Sequence
  Description of Artificial Sequence: Synthetic oligonucleotide
gugccggagcaaccucggu

SEQ ID NO: 2217586 - RNA, 19 nt, Artificial Sequence
  Description of Artificial Sequence: Synthetic oligonucleotide
ggguggaaugcuacaucau

SEQ ID NO: 2217587 - RNA, 19 nt, Artificial Sequence
  Description of Artificial Sequence: Synthetic oligonucleotide
ccuagcgaaugagaacaau

SEQ ID NO: 2217588 - RNA, 19 nt, Artificial Sequence
  Description of Artificial Sequence: Synthetic oligonucleotide
cagcugugucaugguuuua

SEQ ID NO: 2217589 - RNA, 19 nt, Artificial Sequence
  Description of Artificial Sequence: Synthetic oligonucleotide
gcgcgucggcgccagcacu

SEQ ID NO: 2217590 - RNA, 19 nt, Artificial Sequence
  Description of Artificial Sequence: Synthetic oligonucleotide
cccagccauccaacuuuua

SEQ ID NO: 2217591 - RNA, 19 nt, Artificial Sequence
  Description of Artificial Sequence: Synthetic oligonucleotide
ccagcgcgucggcgccagc

SEQ ID NO: 2217592 - RNA, 19 nt, Artificial Sequence
  Description of Artificial Sequence: Synthetic oligonucleotide
ggcccagcagagggccucu

SEQ ID NO: 2217593 - RNA, 19 nt, Artificial Sequence
  Description of Artificial Sequence: Synthetic oligonucleotide
gcgccagcacuggcuauau

SEQ ID NO: 2217594 - RNA, 19 nt, Artificial Sequence
  Description of Artificial Sequence: Synthetic oligonucleotide
cgaguggauuugccuguau

SEQ ID NO: 2217595 - RNA, 19 nt, Artificial Sequence
  Description of Artificial Sequence: Synthetic oligonucleotide
cggagcaaccucgguugua

SEQ ID NO: 2217596 - RNA, 19 nt, Artificial Sequence
  Description of Artificial Sequence: Synthetic oligonucleotide
gggcuaccaucgaguggau

SEQ ID NO: 2217597 - RNA, 19 nt, Artificial Sequence
  Description of Artificial Sequence: Synthetic oligonucleotide
cgccagcacuggcuauaua

SEQ ID NO: 2217598 - RNA, 19 nt, Artificial Sequence
  Description of Artificial Sequence: Synthetic oligonucleotide
cggcgccagcacuggcuau

SEQ ID NO: 2217599 - RNA, 19 nt, Artificial Sequence
  Description of Artificial Sequence: Synthetic oligonucleotide
acugaaauaaguuacacgg

SEQ ID NO: 2217600 - RNA, 19 nt, Artificial Sequence
  Description of Artificial Sequence: Synthetic oligonucleotide
ucuaauagcuucuauaucg

SEQ ID NO: 2217601 - RNA, 19 nt, Artificial Sequence
  Description of Artificial Sequence: Synthetic oligonucleotide
uuugaaaacguucaaacag

SEQ ID NO: 2217602 - RNA, 19 nt, Artificial Sequence
  Description of Artificial Sequence: Synthetic oligonucleotide
aauucaguaacaaugaaag

SEQ ID NO: 2217603 - RNA, 19 nt, Artificial Sequence
  Description of Artificial Sequence: Synthetic oligonucleotide
uuaauuguaaguuauuggc

SEQ ID NO: 2217604 - RNA, 19 nt, Artificial Sequence
  Description of Artificial Sequence: Synthetic oligonucleotide
ucucacagcaaucaaaugg

SEQ ID NO: 2217605 - RNA, 19 nt, Artificial Sequence
  Description of Artificial Sequence: Synthetic oligonucleotide
cuaauauagacuaucacag

SEQ ID NO: 2217606 - RNA, 19 nt, Artificial Sequence
  Description of Artificial Sequence: Synthetic oligonucleotide
aucaauaucacaguaaaac

SEQ ID NO: 2217607 - RNA, 19 nt, Artificial Sequence
  Description of Artificial Sequence: Synthetic oligonucleotide
aguuugaaaacguucaaac

SEQ ID NO: 2217608 - RNA, 19 nt, Artificial Sequence
  Description of Artificial Sequence: Synthetic oligonucleotide
gacaguaacauuuacauuc

SEQ ID NO: 2217609 - RNA, 19 nt, Artificial Sequence
  Description of Artificial Sequence: Synthetic oligonucleotide
ugaauuguggaacagaccu

SEQ ID NO: 2217610 - RNA, 19 nt, Artificial Sequence
  Description of Artificial Sequence: Synthetic oligonucleotide
uuuucuaauaucuagggaa

SEQ ID NO: 2217611 - RNA, 19 nt, Artificial Sequence
  Description of Artificial Sequence: Synthetic oligonucleotide
aaauaaguuacacggaugu

SEQ ID NO: 2217612 - RNA, 19 nt, Artificial Sequence
  Description of Artificial Sequence: Synthetic oligonucleotide
uuugcuaaugcaauaaaug

SEQ ID NO: 2217613 - RNA, 19 nt, Artificial Sequence
  Description of Artificial Sequence: Synthetic oligonucleotide
gagauuuguauauauaaag

SEQ ID NO: 2217614 - RNA, 19 nt, Artificial Sequence
  Description of Artificial Sequence: Synthetic oligonucleotide
uuuguauauauaaagcucu

SEQ ID NO: 2217615 - RNA, 19 nt, Artificial Sequence
  Description of Artificial Sequence: Synthetic oligonucleotide
uuuucuacgucaaaacagg

SEQ ID NO: 2217616 - RNA, 19 nt, Artificial Sequence
  Description of Artificial Sequence: Synthetic oligonucleotide
uauuuucuaauaucuaggg

SEQ ID NO: 2217617 - RNA, 19 nt, Artificial Sequence
  Description of Artificial Sequence: Synthetic oligonucleotide
ucaaaacaggccuuaagcg

SEQ ID NO: 2217618 - RNA, 19 nt, Artificial Sequence
  Description of Artificial Sequence: Synthetic oligonucleotide
gaccuaaucuacuacaagg

SEQ ID NO: 2217619 - RNA, 19 nt, Artificial Sequence
  Description of Artificial Sequence: Synthetic oligonucleotide
aaucuaauagcuucuauau

SEQ ID NO: 2217620 - RNA, 19 nt, Artificial Sequence
  Description of Artificial Sequence: Synthetic oligonucleotide
cuuaauuguaaguuauugg

SEQ ID NO: 2217621 - RNA, 19 nt, Artificial Sequence
  Description of Artificial Sequence: Synthetic oligonucleotide
agugacacaaaauucccac

SEQ ID NO: 2217622 - RNA, 19 nt, Artificial Sequence
  Description of Artificial Sequence: Synthetic oligonucleotide
aguauguaaaguuguuacc

SEQ ID NO: 2217623 - RNA, 19 nt, Artificial Sequence
  Description of Artificial Sequence: Synthetic oligonucleotide
aauauagacuaucacaguu

SEQ ID NO: 2217624 - RNA, 19 nt, Artificial Sequence
  Description of Artificial Sequence: Synthetic oligonucleotide
aguuaauucaguaacaaug

SEQ ID NO: 2217625 - RNA, 19 nt, Artificial Sequence
  Description of Artificial Sequence: Synthetic oligonucleotide
aauguaaauugcucaagug

SEQ ID NO: 2217626 - RNA, 19 nt, Artificial Sequence
  Description of Artificial Sequence: Synthetic oligonucleotide
agauuuguauauauaaagc

SEQ ID NO: 2217627 - RNA, 19 nt, Artificial Sequence
  Description of Artificial Sequence: Synthetic oligonucleotide
ucuacgucaaaacaggccu

SEQ ID NO: 2217628 - RNA, 19 nt, Artificial Sequence
  Description of Artificial Sequence: Synthetic oligonucleotide
aaauguaaauugcucaagu

SEQ ID NO: 2217629 - RNA, 19 nt, Artificial Sequence
  Description of Artificial Sequence: Synthetic oligonucleotide
uguggaacagaccuaaucu

SEQ ID NO: 2217630 - RNA, 19 nt, Artificial Sequence
  Description of Artificial Sequence: Synthetic oligonucleotide
cuuuucuacgucaaaacag

SEQ ID NO: 2217631 - RNA, 19 nt, Artificial Sequence
  Description of Artificial Sequence: Synthetic oligonucleotide
uaauuagcagcuaucaaac

SEQ ID NO: 2217632 - RNA, 19 nt, Artificial Sequence
  Description of Artificial Sequence: Synthetic oligonucleotide
uaaugcaauaaaugaaucc

SEQ ID NO: 2217633 - RNA, 19 nt, Artificial Sequence
  Description of Artificial Sequence: Synthetic oligonucleotide
aauauuaacaggacuuguc

SEQ ID NO: 2217634 - RNA, 19 nt, Artificial Sequence
  Description of Artificial Sequence: Synthetic oligonucleotide
acuacucuuauuuaaauau

SEQ ID NO: 2217635 - RNA, 19 nt, Artificial Sequence
  Description of Artificial Sequence: Synthetic oligonucleotide
aaaguuguuacccaccaaa

SEQ ID NO: 2217636 - RNA, 19 nt, Artificial Sequence
  Description of Artificial Sequence: Synthetic oligonucleotide
auauauuuauuccacagaa

SEQ ID NO: 2217637 - RNA, 19 nt, Artificial Sequence
  Description of Artificial Sequence: Synthetic oligonucleotide
gauugaucaugcuuaauug

SEQ ID NO: 2217638 - RNA, 19 nt, Artificial Sequence
  Description of Artificial Sequence: Synthetic oligonucleotide
ucaauaucacaguaaaaca

SEQ ID NO: 2217639 - RNA, 19 nt, Artificial Sequence
  Description of Artificial Sequence: Synthetic oligonucleotide
ugugcauauauuuauucca

SEQ ID NO: 2217640 - RNA, 19 nt, Artificial Sequence
  Description of Artificial Sequence: Synthetic oligonucleotide
uacucuuauuuaaauauca

SEQ ID NO: 2217641 - RNA, 19 nt, Artificial Sequence
  Description of Artificial Sequence: Synthetic oligonucleotide
aaaucuaauagcuucuaua

SEQ ID NO: 2217642 - RNA, 19 nt, Artificial Sequence
  Description of Artificial Sequence: Synthetic oligonucleotide
uauagacuaucacaguuug

SEQ ID NO: 2217643 - RNA, 19 nt, Artificial Sequence
  Description of Artificial Sequence: Synthetic oligonucleotide
uacuuaguaauugacagug

SEQ ID NO: 2217644 - RNA, 19 nt, Artificial Sequence
  Description of Artificial Sequence: Synthetic oligonucleotide
auuuguauauauaaagcuc

SEQ ID NO: 2217645 - RNA, 19 nt, Artificial Sequence
  Description of Artificial Sequence: Synthetic oligonucleotide
ucaaaauacuggaauguca

SEQ ID NO: 2217646 - RNA, 19 nt, Artificial Sequence
  Description of Artificial Sequence: Synthetic oligonucleotide
uacugaaauaaguuacacg

SEQ ID NO: 2217647 - RNA, 19 nt, Artificial Sequence
  Description of Artificial Sequence: Synthetic oligonucleotide
ugaaauaaguuacacggau

SEQ ID NO: 2217648 - RNA, 19 nt, Artificial Sequence
  Description of Artificial Sequence: Synthetic oligonucleotide
aaguuauuggcacuaauua

SEQ ID NO: 2217649 - RNA, 19 nt, Artificial Sequence
  Description of Artificial Sequence: Synthetic oligonucleotide
uacuacaaggcauucagca

SEQ ID NO: 2217650 - RNA, 19 nt, Artificial Sequence
  Description of Artificial Sequence: Synthetic oligonucleotide
agccaaauucuccugaagg

SEQ ID NO: 2217651 - RNA, 19 nt, Artificial Sequence
  Description of Artificial Sequence: Synthetic oligonucleotide
uauaucaauaucacaguaa

SEQ ID NO: 2217652 - RNA, 19 nt, Artificial Sequence
  Description of Artificial Sequence: Synthetic oligonucleotide
aguuauuggcacuaauuag

SEQ ID NO: 2217653 - RNA, 19 nt, Artificial Sequence
  Description of Artificial Sequence: Synthetic oligonucleotide
gauacagugauugaucaug

SEQ ID NO: 2217654 - RNA, 19 nt, Artificial Sequence
  Description of Artificial Sequence: Synthetic oligonucleotide
auguaaauugcucaagugu

SEQ ID NO: 2217655 - RNA, 19 nt, Artificial Sequence
  Description of Artificial Sequence: Synthetic oligonucleotide
ucacuaaccuaauauagac

SEQ ID NO: 2217656 - RNA, 19 nt, Artificial Sequence
  Description of Artificial Sequence: Synthetic oligonucleotide
uguacauaaaggcaagguc

SEQ ID NO: 2217657 - RNA, 19 nt, Artificial Sequence
  Description of Artificial Sequence: Synthetic oligonucleotide
acuaaccuaauauagacua

SEQ ID NO: 2217658 - RNA, 19 nt, Artificial Sequence
  Description of Artificial Sequence: Synthetic oligonucleotide
uauaauuacacauguuaaa

SEQ ID NO: 2217659 - RNA, 19 nt, Artificial Sequence
  Description of Artificial Sequence: Synthetic oligonucleotide
uuagcagcuaucaaaccug

SEQ ID NO: 2217660 - RNA, 19 nt, Artificial Sequence
  Description of Artificial Sequence: Synthetic oligonucleotide
uccauuggcaguuaauuca

SEQ ID NO: 2217661 - RNA, 19 nt, Artificial Sequence
  Description of Artificial Sequence: Synthetic oligonucleotide
ugugacaguaacauuuaca

SEQ ID NO: 2217662 - RNA, 19 nt, Artificial Sequence
  Description of Artificial Sequence: Synthetic oligonucleotide
ugauugaucaugcuuaauu

SEQ ID NO: 2217663 - RNA, 19 nt, Artificial Sequence
  Description of Artificial Sequence: Synthetic oligonucleotide
ugcaauaaaugaauccuga

SEQ ID NO: 2217664 - RNA, 19 nt, Artificial Sequence
  Description of Artificial Sequence: Synthetic oligonucleotide
auaaagcucugauacagug

SEQ ID NO: 2217665 - RNA, 19 nt, Artificial Sequence
  Description of Artificial Sequence: Synthetic oligonucleotide
guuauuggcacuaauuagc

SEQ ID NO: 2217666 - RNA, 19 nt, Artificial Sequence
  Description of Artificial Sequence: Synthetic oligonucleotide
uguaaaguuguuacccacc

SEQ ID NO: 2217667 - RNA, 19 nt, Artificial Sequence
  Description of Artificial Sequence: Synthetic oligonucleotide
aguuacacggaugugacag

SEQ ID NO: 2217668 - RNA, 19 nt, Artificial Sequence
  Description of Artificial Sequence: Synthetic oligonucleotide
uuaguaauugacagugaca

SEQ ID NO: 2217669 - RNA, 19 nt, Artificial Sequence
  Description of Artificial Sequence: Synthetic oligonucleotide
agacuaucacaguuugucc

SEQ ID NO: 2217670 - RNA, 19 nt, Artificial Sequence
  Description of Artificial Sequence: Synthetic oligonucleotide
gacuaucacaguuuguccc

SEQ ID NO: 2217671 - RNA, 19 nt, Artificial Sequence
  Description of Artificial Sequence: Synthetic oligonucleotide
aacaguuugaaaacguuca

SEQ ID NO: 2217672 - RNA, 19 nt, Artificial Sequence
  Description of Artificial Sequence: Synthetic oligonucleotide
uuauuggcacuaauuagca

SEQ ID NO: 2217673 - RNA, 19 nt, Artificial Sequence
  Description of Artificial Sequence: Synthetic oligonucleotide
caguauguaaaguuguuac

SEQ ID NO: 2217674 - RNA, 19 nt, Artificial Sequence
  Description of Artificial Sequence: Synthetic oligonucleotide
guauguaaaguuguuaccc

SEQ ID NO: 2217675 - RNA, 19 nt, Artificial Sequence
  Description of Artificial Sequence: Synthetic oligonucleotide
cuuaguaauugacagugac

SEQ ID NO: 2217676 - RNA, 19 nt, Artificial Sequence
  Description of Artificial Sequence: Synthetic oligonucleotide
caaaccugcaaacaguuug

SEQ ID NO: 2217677 - RNA, 19 nt, Artificial Sequence
  Description of Artificial Sequence: Synthetic oligonucleotide
ucuacugaaauaaguuaca

SEQ ID NO: 2217678 - RNA, 19 nt, Artificial Sequence
  Description of Artificial Sequence: Synthetic oligonucleotide
accaaauguaaauugcuca

SEQ ID NO: 2217679 - RNA, 19 nt, Artificial Sequence
  Description of Artificial Sequence: Synthetic oligonucleotide
uucuauaucgggauuugcu

SEQ ID NO: 2217680 - RNA, 19 nt, Artificial Sequence
  Description of Artificial Sequence: Synthetic oligonucleotide
uaaauauuaacaggacuug

SEQ ID NO: 2217681 - RNA, 19 nt, Artificial Sequence
  Description of Artificial Sequence: Synthetic oligonucleotide
ugucucaaaauacuggaau

SEQ ID NO: 2217682 - RNA, 19 nt, Artificial Sequence
  Description of Artificial Sequence: Synthetic oligonucleotide
uccaaacauauaauuacac

SEQ ID NO: 2217683 - RNA, 19 nt, Artificial Sequence
  Description of Artificial Sequence: Synthetic oligonucleotide
cauauaauuacacauguua

SEQ ID NO: 2217684 - RNA, 19 nt, Artificial Sequence
  Description of Artificial Sequence: Synthetic oligonucleotide
agcaggaaauuuuacuuag

SEQ ID NO: 2217685 - RNA, 19 nt, Artificial Sequence
  Description of Artificial Sequence: Synthetic oligonucleotide
auguaaaguuguuacccac

SEQ ID NO: 2217686 - RNA, 19 nt, Artificial Sequence
  Description of Artificial Sequence: Synthetic oligonucleotide
uggcaguuaauucaguaac

SEQ ID NO: 2217687 - RNA, 19 nt, Artificial Sequence
  Description of Artificial Sequence: Synthetic oligonucleotide
ugaaaacguucaaacagca

SEQ ID NO: 2217688 - RNA, 19 nt, Artificial Sequence
  Description of Artificial Sequence: Synthetic oligonucleotide
ucugauacagugauugauc

SEQ ID NO: 2217689 - RNA, 19 nt, Artificial Sequence
  Description of Artificial Sequence: Synthetic oligonucleotide
uuuacauuccauuggcagu

SEQ ID NO: 2217690 - RNA, 19 nt, Artificial Sequence
  Description of Artificial Sequence: Synthetic oligonucleotide
gaucaugcuuaauuguaag

SEQ ID NO: 2217691 - RNA, 19 nt, Artificial Sequence
  Description of Artificial Sequence: Synthetic oligonucleotide
agcuaucaaaccugcaaac

SEQ ID NO: 2217692 - RNA, 19 nt, Artificial Sequence
  Description of Artificial Sequence: Synthetic oligonucleotide
ugcuaaugcaauaaaugaa

SEQ ID NO: 2217693 - RNA, 19 nt, Artificial Sequence
  Description of Artificial Sequence: Synthetic oligonucleotide
uucuacgucaaaacaggcc

SEQ ID NO: 2217694 - RNA, 19 nt, Artificial Sequence
  Description of Artificial Sequence: Synthetic oligonucleotide
uaaguuacacggaugugac

SEQ ID NO: 2217695 - RNA, 19 nt, Artificial Sequence
  Description of Artificial Sequence: Synthetic oligonucleotide
accuaaucuacuacaaggc

SEQ ID NO: 2217696 - RNA, 19 nt, Artificial Sequence
  Description of Artificial Sequence: Synthetic oligonucleotide
acacaaaauucccaccagg

SEQ ID NO: 2217697 - RNA, 19 nt, Artificial Sequence
  Description of Artificial Sequence: Synthetic oligonucleotide
aaagucuacugaaauaagu

SEQ ID NO: 2217698 - RNA, 19 nt, Artificial Sequence
  Description of Artificial Sequence: Synthetic oligonucleotide
uauauaaagcucugauaca

SEQ ID NO: 2217699 - RNA, 19 nt, Artificial Sequence
  Description of Artificial Sequence: Synthetic oligonucleotide
aauacuggaaugucaguuu

SEQ ID NO: 2217700 - RNA, 19 nt, Artificial Sequence
  Description of Artificial Sequence: Synthetic oligonucleotide
aguucuuauuuucuaauau

SEQ ID NO: 2217701 - RNA, 19 nt, Artificial Sequence
  Description of Artificial Sequence: Synthetic oligonucleotide
uauguaaaguuguuaccca

SEQ ID NO: 2217702 - RNA, 19 nt, Artificial Sequence
  Description of Artificial Sequence: Synthetic oligonucleotide
auaaguuacacggauguga

SEQ ID NO: 2217703 - RNA, 19 nt, Artificial Sequence
  Description of Artificial Sequence: Synthetic oligonucleotide
uaaaacagauccaaacaua

SEQ ID NO: 2217704 - RNA, 19 nt, Artificial Sequence
  Description of Artificial Sequence: Synthetic oligonucleotide
auugaucaugcuuaauugu

SEQ ID NO: 2217705 - RNA, 19 nt, Artificial Sequence
  Description of Artificial Sequence: Synthetic oligonucleotide
uggaaugucaguuucuuuu

SEQ ID NO: 2217706 - RNA, 19 nt, Artificial Sequence
  Description of Artificial Sequence: Synthetic oligonucleotide
accucaagcacgauggacc

SEQ ID NO: 2217707 - RNA, 19 nt, Artificial Sequence
  Description of Artificial Sequence: Synthetic oligonucleotide
uagacuaucacaguuuguc

SEQ ID NO: 2217708 - RNA, 19 nt, Artificial Sequence
  Description of Artificial Sequence: Synthetic oligonucleotide
ggccuagucauccagaucc

SEQ ID NO: 2217709 - RNA, 19 nt, Artificial Sequence
  Description of Artificial Sequence: Synthetic oligonucleotide
auaauuacacauguuaaaa

SEQ ID NO: 2217710 - RNA, 19 nt, Artificial Sequence
  Description of Artificial Sequence: Synthetic oligonucleotide
aaauacuggaaugucaguu

SEQ ID NO: 2217711 - RNA, 19 nt, Artificial Sequence
  Description of Artificial Sequence: Synthetic oligonucleotide
ugucucacagcaaucaaau

SEQ ID NO: 2217712 - RNA, 19 nt, Artificial Sequence
  Description of Artificial Sequence: Synthetic oligonucleotide
aaauauuaacaggacuugu

SEQ ID NO: 2217713 - RNA, 19 nt, Artificial Sequence
  Description of Artificial Sequence: Synthetic oligonucleotide
aucuaauagcuucuauauc

SEQ ID NO: 2217714 - RNA, 19 nt, Artificial Sequence
  Description of Artificial Sequence: Synthetic oligonucleotide
aaaacaggccuuaagcgca

SEQ ID NO: 2217715 - RNA, 19 nt, Artificial Sequence
  Description of Artificial Sequence: Synthetic oligonucleotide
uggaacagaccuaaucuac

SEQ ID NO: 2217716 - RNA, 19 nt, Artificial Sequence
  Description of Artificial Sequence: Synthetic oligonucleotide
guacauaaaggcaagguca

SEQ ID NO: 2217717 - RNA, 19 nt, Artificial Sequence
  Description of Artificial Sequence: Synthetic oligonucleotide
uugaucaugcuuaauugua

SEQ ID NO: 2217718 - RNA, 19 nt, Artificial Sequence
  Description of Artificial Sequence: Synthetic oligonucleotide
cacagcaaucaaauggagg

SEQ ID NO: 2217719 - RNA, 19 nt, Artificial Sequence
  Description of Artificial Sequence: Synthetic oligonucleotide
acaguaacauuuacauucc

SEQ ID NO: 2217720 - RNA, 19 nt, Artificial Sequence
  Description of Artificial Sequence: Synthetic oligonucleotide
aauuguggaacagaccuaa

SEQ ID NO: 2217721 - RNA, 19 nt, Artificial Sequence
  Description of Artificial Sequence: Synthetic oligonucleotide
agcucugauacagugauug

SEQ ID NO: 2217722 - RNA, 19 nt, Artificial Sequence
  Description of Artificial Sequence: Synthetic oligonucleotide
guuaauucaguaacaauga

SEQ ID NO: 2217723 - RNA, 19 nt, Artificial Sequence
  Description of Artificial Sequence: Synthetic oligonucleotide
gauguaagccaucugucuc

SEQ ID NO: 2217724 - RNA, 19 nt, Artificial Sequence
  Description of Artificial Sequence: Synthetic oligonucleotide
ugacagugacacaaaauuc

SEQ ID NO: 2217725 - RNA, 19 nt, Artificial Sequence
  Description of Artificial Sequence: Synthetic oligonucleotide
uaaaugaauccugaauugu

SEQ ID NO: 2217726 - RNA, 19 nt, Artificial Sequence
  Description of Artificial Sequence: Synthetic oligonucleotide
aaaagucuacugaaauaag

SEQ ID NO: 2217727 - RNA, 19 nt, Artificial Sequence
  Description of Artificial Sequence: Synthetic oligonucleotide
guaauugacagugacacaa

SEQ ID NO: 2217728 - RNA, 19 nt, Artificial Sequence
  Description of Artificial Sequence: Synthetic oligonucleotide
acagaccuaaucuacuaca

SEQ ID NO: 2217729 - RNA, 19 nt, Artificial Sequence
  Description of Artificial Sequence: Synthetic oligonucleotide
ugauguaagccaucugucu

SEQ ID NO: 2217730 - RNA, 19 nt, Artificial Sequence
  Description of Artificial Sequence: Synthetic oligonucleotide
aguuguuacccaccaaaug

SEQ ID NO: 2217731 - RNA, 19 nt, Artificial Sequence
  Description of Artificial Sequence: Synthetic oligonucleotide
aagguuauuuggacuacuc

SEQ ID NO: 2217732 - RNA, 19 nt, Artificial Sequence
  Description of Artificial Sequence: Synthetic oligonucleotide
ucacaaguauaucaauauc

SEQ ID NO: 2217733 - RNA, 19 nt, Artificial Sequence
  Description of Artificial Sequence: Synthetic oligonucleotide
gaaauaaguuacacggaug

SEQ ID NO: 2217734 - RNA, 19 nt, Artificial Sequence
  Description of Artificial Sequence: Synthetic oligonucleotide
aggaaauuuuacuuaguaa

SEQ ID NO: 2217735 - RNA, 19 nt, Artificial Sequence
  Description of Artificial Sequence: Synthetic oligonucleotide
uuucuacgucaaaacaggc

SEQ ID NO: 2217736 - RNA, 19 nt, Artificial Sequence
  Description of Artificial Sequence: Synthetic oligonucleotide
aaauggaggcauccaugag

SEQ ID NO: 2217737 - RNA, 19 nt, Artificial Sequence
  Description of Artificial Sequence: Synthetic oligonucleotide
aaguucuuauuuucuaaua

SEQ ID NO: 2217738 - RNA, 19 nt, Artificial Sequence
  Description of Artificial Sequence: Synthetic oligonucleotide
uguauauauaaagcucuga

SEQ ID NO: 2217739 - RNA, 19 nt, Artificial Sequence
  Description of Artificial Sequence: Synthetic oligonucleotide
ugaucaugcuuaauuguaa

SEQ ID NO: 2217740 - RNA, 19 nt, Artificial Sequence
  Description of Artificial Sequence: Synthetic oligonucleotide
uuacuuaguaauugacagu

SEQ ID NO: 2217741 - RNA, 19 nt, Artificial Sequence
  Description of Artificial Sequence: Synthetic oligonucleotide
guuguuacccaccaaaugu

SEQ ID NO: 2217742 - RNA, 19 nt, Artificial Sequence
  Description of Artificial Sequence: Synthetic oligonucleotide
uuacccaccaaauguaaau

SEQ ID NO: 2217743 - RNA, 19 nt, Artificial Sequence
  Description of Artificial Sequence: Synthetic oligonucleotide
uuggcacuaauuagcagcu

SEQ ID NO: 2217744 - RNA, 19 nt, Artificial Sequence
  Description of Artificial Sequence: Synthetic oligonucleotide
acaaaauucccaccaggca

SEQ ID NO: 2217745 - RNA, 19 nt, Artificial Sequence
  Description of Artificial Sequence: Synthetic oligonucleotide
aagggagucacuaaccuaa

SEQ ID NO: 2217746 - RNA, 19 nt, Artificial Sequence
  Description of Artificial Sequence: Synthetic oligonucleotide
gacuucugguaauucacug

SEQ ID NO: 2217747 - RNA, 19 nt, Artificial Sequence
  Description of Artificial Sequence: Synthetic oligonucleotide
ugcucaagugugcauauau

SEQ ID NO: 2217748 - RNA, 19 nt, Artificial Sequence
  Description of Artificial Sequence: Synthetic oligonucleotide
ucaugcuuaauuguaaguu

SEQ ID NO: 2217749 - RNA, 19 nt, Artificial Sequence
  Description of Artificial Sequence: Synthetic oligonucleotide
guuugaaaacguucaaaca

SEQ ID NO: 2217750 - RNA, 19 nt, Artificial Sequence
  Description of Artificial Sequence: Synthetic oligonucleotide
gucuacugaaauaaguuac

SEQ ID NO: 2217751 - RNA, 19 nt, Artificial Sequence
  Description of Artificial Sequence: Synthetic oligonucleotide
uuguggaacagaccuaauc

SEQ ID NO: 2217752 - RNA, 19 nt, Artificial Sequence
  Description of Artificial Sequence: Synthetic oligonucleotide
aaaauucccaccaggcacu

SEQ ID NO: 2217753 - RNA, 19 nt, Artificial Sequence
  Description of Artificial Sequence: Synthetic oligonucleotide
uaaccuaauauagacuauc

SEQ ID NO: 2217754 - RNA, 19 nt, Artificial Sequence
  Description of Artificial Sequence: Synthetic oligonucleotide
aauaaguuacacggaugug

SEQ ID NO: 2217755 - RNA, 19 nt, Artificial Sequence
  Description of Artificial Sequence: Synthetic oligonucleotide
uugucccuagcucugacaa

SEQ ID NO: 2217756 - RNA, 19 nt, Artificial Sequence
  Description of Artificial Sequence: Synthetic oligonucleotide
aauaucauccacacugaaa

SEQ ID NO: 2217757 - RNA, 19 nt, Artificial Sequence
  Description of Artificial Sequence: Synthetic oligonucleotide
ccuaauauagacuaucaca

SEQ ID NO: 2217758 - RNA, 19 nt, Artificial Sequence
  Description of Artificial Sequence: Synthetic oligonucleotide
ucacaguuugucccuagcu

SEQ ID NO: 2217759 - RNA, 19 nt, Artificial Sequence
  Description of Artificial Sequence: Synthetic oligonucleotide
auccaugagauuuguauau

SEQ ID NO: 2217760 - RNA, 19 nt, Artificial Sequence
  Description of Artificial Sequence: Synthetic oligonucleotide
auuguaaguuauuggcacu

SEQ ID NO: 2217761 - RNA, 19 nt, Artificial Sequence
  Description of Artificial Sequence: Synthetic oligonucleotide
acuaucacaguuugucccu

SEQ ID NO: 2217762 - RNA, 19 nt, Artificial Sequence
  Description of Artificial Sequence: Synthetic oligonucleotide
cuacucuuauuuaaauauc

SEQ ID NO: 2217763 - RNA, 19 nt, Artificial Sequence
  Description of Artificial Sequence: Synthetic oligonucleotide
uaucgggauuugcuaaugc

SEQ ID NO: 2217764 - RNA, 19 nt, Artificial Sequence
  Description of Artificial Sequence: Synthetic oligonucleotide
ucacagcaaucaaauggag

SEQ ID NO: 2217765 - RNA, 19 nt, Artificial Sequence
  Description of Artificial Sequence: Synthetic oligonucleotide
auaaaggcaaggucacuga

SEQ ID NO: 2217766 - RNA, 19 nt, Artificial Sequence
  Description of Artificial Sequence: Synthetic oligonucleotide
uucuaauaucuagggaaag

SEQ ID NO: 2217767 - RNA, 19 nt, Artificial Sequence
  Description of Artificial Sequence: Synthetic oligonucleotide
caaggcauucagcagacuc

SEQ ID NO: 2217768 - RNA, 19 nt, Artificial Sequence
  Description of Artificial Sequence: Synthetic oligonucleotide
aucaugcuuaauuguaagu

SEQ ID NO: 2217769 - RNA, 19 nt, Artificial Sequence
  Description of Artificial Sequence: Synthetic oligonucleotide
uauuggcacuaauuagcag

SEQ ID NO: 2217770 - RNA, 19 nt, Artificial Sequence
  Description of Artificial Sequence: Synthetic oligonucleotide
uugucucacagcaaucaaa

SEQ ID NO: 2217771 - RNA, 19 nt, Artificial Sequence
  Description of Artificial Sequence: Synthetic oligonucleotide
guaaaguuguuacccacca

SEQ ID NO: 2217772 - RNA, 19 nt, Artificial Sequence
  Description of Artificial Sequence: Synthetic oligonucleotide
augugacaguaacauuuac

SEQ ID NO: 2217773 - RNA, 19 nt, Artificial Sequence
  Description of Artificial Sequence: Synthetic oligonucleotide
augaauccugaauugugga

SEQ ID NO: 2217774 - RNA, 19 nt, Artificial Sequence
  Description of Artificial Sequence: Synthetic oligonucleotide
cugaauuguggaacagacc

SEQ ID NO: 2217775 - RNA, 19 nt, Artificial Sequence
  Description of Artificial Sequence: Synthetic oligonucleotide
acccaccaaauguaaauug

SEQ ID NO: 2217776 - RNA, 19 nt, Artificial Sequence
  Description of Artificial Sequence: Synthetic oligonucleotide
caaucaaauggaggcaucc

SEQ ID NO: 2217777 - RNA, 19 nt, Artificial Sequence
  Description of Artificial Sequence: Synthetic oligonucleotide
aaaggcaaggucacugaug

SEQ ID NO: 2217778 - RNA, 19 nt, Artificial Sequence
  Description of Artificial Sequence: Synthetic oligonucleotide
gugacaguaacauuuacau

SEQ ID NO: 2217779 - RNA, 19 nt, Artificial Sequence
  Description of Artificial Sequence: Synthetic oligonucleotide
agguuauuuggacuacucu

SEQ ID NO: 2217780 - RNA, 19 nt, Artificial Sequence
  Description of Artificial Sequence: Synthetic oligonucleotide
acaaagcaggaaauuuuac

SEQ ID NO: 2217781 - RNA, 19 nt, Artificial Sequence
  Description of Artificial Sequence: Synthetic oligonucleotide
uguuacccaccaaauguaa

SEQ ID NO: 2217782 - RNA, 19 nt, Artificial Sequence
  Description of Artificial Sequence: Synthetic oligonucleotide
aaagggagucacuaaccua

SEQ ID NO: 2217783 - RNA, 19 nt, Artificial Sequence
  Description of Artificial Sequence: Synthetic oligonucleotide
gaaaacguucaaacagcag

SEQ ID NO: 2217784 - RNA, 19 nt, Artificial Sequence
  Description of Artificial Sequence: Synthetic oligonucleotide
guaaauugcucaagugugc

SEQ ID NO: 2217785 - RNA, 19 nt, Artificial Sequence
  Description of Artificial Sequence: Synthetic oligonucleotide
cuacaaggcauucagcaga

SEQ ID NO: 2217786 - RNA, 19 nt, Artificial Sequence
  Description of Artificial Sequence: Synthetic oligonucleotide
acuaauuagcagcuaucaa

SEQ ID NO: 2217787 - RNA, 19 nt, Artificial Sequence
  Description of Artificial Sequence: Synthetic oligonucleotide
uccugaagguuauuuggac

SEQ ID NO: 2217788 - RNA, 19 nt, Artificial Sequence
  Description of Artificial Sequence: Synthetic oligonucleotide
cugauacagugauugauca

SEQ ID NO: 2217789 - RNA, 19 nt, Artificial Sequence
  Description of Artificial Sequence: Synthetic oligonucleotide
cagauccaccucaagcacg

SEQ ID NO: 2217790 - RNA, 19 nt, Artificial Sequence
  Description of Artificial Sequence: Synthetic oligonucleotide
cugauguaagccaucuguc

SEQ ID NO: 2217791 - RNA, 19 nt, Artificial Sequence
  Description of Artificial Sequence: Synthetic oligonucleotide
uauaucgggauuugcuaau

SEQ ID NO: 2217792 - RNA, 19 nt, Artificial Sequence
  Description of Artificial Sequence: Synthetic oligonucleotide
aaauugcucaagugugcau

SEQ ID NO: 2217793 - RNA, 19 nt, Artificial Sequence
  Description of Artificial Sequence: Synthetic oligonucleotide
uucaaacagcaguauguaa

SEQ ID NO: 2217794 - RNA, 19 nt, Artificial Sequence
  Description of Artificial Sequence: Synthetic oligonucleotide
aaaccugcaaacaguuuga

SEQ ID NO: 2217795 - RNA, 19 nt, Artificial Sequence
  Description of Artificial Sequence: Synthetic oligonucleotide
acguucaaacagcaguaug

SEQ ID NO: 2217796 - RNA, 19 nt, Artificial Sequence
  Description of Artificial Sequence: Synthetic oligonucleotide
gcuuaauuguaaguuauug

SEQ ID NO: 2217797 - RNA, 19 nt, Artificial Sequence
  Description of Artificial Sequence: Synthetic oligonucleotide
cuacugaaauaaguuacac

SEQ ID NO: 2217798 - RNA, 19 nt, Artificial Sequence
  Description of Artificial Sequence: Synthetic oligonucleotide
cuaauggcuucccagucuc

SEQ ID NO: 2217799 - RNA, 19 nt, Artificial Sequence
  Description of Artificial Sequence: Synthetic oligonucleotide
ucuagggaaagguguggga

SEQ ID NO: 2217800 - RNA, 19 nt, Artificial Sequence
  Description of Artificial Sequence: Synthetic oligonucleotide
uaauugacagugacacaaa

SEQ ID NO: 2217801 - RNA, 19 nt, Artificial Sequence
  Description of Artificial Sequence: Synthetic oligonucleotide
guauaucaauaucacagua

SEQ ID NO: 2217802 - RNA, 19 nt, Artificial Sequence
  Description of Artificial Sequence: Synthetic oligonucleotide
acggaugugacaguaacau

SEQ ID NO: 2217803 - RNA, 19 nt, Artificial Sequence
  Description of Artificial Sequence: Synthetic oligonucleotide
cuuaagcgcagggagggcc

SEQ ID NO: 2217804 - RNA, 19 nt, Artificial Sequence
  Description of Artificial Sequence: Synthetic oligonucleotide
cacaguuugucccuagcuc

SEQ ID NO: 2217805 - RNA, 19 nt, Artificial Sequence
  Description of Artificial Sequence: Synthetic oligonucleotide
uaaaggcaaggucacugau

SEQ ID NO: 2217806 - RNA, 19 nt, Artificial Sequence
  Description of Artificial Sequence: Synthetic oligonucleotide
gugacacaaaauucccacc

SEQ ID NO: 2217807 - RNA, 19 nt, Artificial Sequence
  Description of Artificial Sequence: Synthetic oligonucleotide
gagucacuaaccuaauaua

SEQ ID NO: 2217808 - RNA, 19 nt, Artificial Sequence
  Description of Artificial Sequence: Synthetic oligonucleotide
uagcagcuaucaaaccugc

SEQ ID NO: 2217809 - RNA, 19 nt, Artificial Sequence
  Description of Artificial Sequence: Synthetic oligonucleotide
agauccaaacauauaauua

SEQ ID NO: 2217810 - RNA, 19 nt, Artificial Sequence
  Description of Artificial Sequence: Synthetic oligonucleotide
aguaauugacagugacaca

SEQ ID NO: 2217811 - RNA, 19 nt, Artificial Sequence
  Description of Artificial Sequence: Synthetic oligonucleotide
ccugaauuguggaacagac

SEQ ID NO: 2217812 - RNA, 19 nt, Artificial Sequence
  Description of Artificial Sequence: Synthetic oligonucleotide
guaacauuuacauuccauu

SEQ ID NO: 2217813 - RNA, 19 nt, Artificial Sequence
  Description of Artificial Sequence: Synthetic oligonucleotide
uucugguaauucacuguac

SEQ ID NO: 2217814 - RNA, 19 nt, Artificial Sequence
  Description of Artificial Sequence: Synthetic oligonucleotide
cuacuacaaggcauucagc

SEQ ID NO: 2217815 - RNA, 19 nt, Artificial Sequence
  Description of Artificial Sequence: Synthetic oligonucleotide
cagugauugaucaugcuua

SEQ ID NO: 2217816 - RNA, 19 nt, Artificial Sequence
  Description of Artificial Sequence: Synthetic oligonucleotide
uuugucccuagcucugaca

SEQ ID NO: 2217817 - RNA, 19 nt, Artificial Sequence
  Description of Artificial Sequence: Synthetic oligonucleotide
gaaagggagucacuaaccu

SEQ ID NO: 2217818 - RNA, 19 nt, Artificial Sequence
  Description of Artificial Sequence: Synthetic oligonucleotide
cugaagguuauuuggacua

SEQ ID NO: 2217819 - RNA, 19 nt, Artificial Sequence
  Description of Artificial Sequence: Synthetic oligonucleotide
uaucacaguuugucccuag

SEQ ID NO: 2217820 - RNA, 19 nt, Artificial Sequence
  Description of Artificial Sequence: Synthetic oligonucleotide
uucagcagacuccaagcuu

SEQ ID NO: 2217821 - RNA, 19 nt, Artificial Sequence
  Description of Artificial Sequence: Synthetic oligonucleotide
aaguuacacggaugugaca

SEQ ID NO: 2217822 - RNA, 19 nt, Artificial Sequence
  Description of Artificial Sequence: Synthetic oligonucleotide
agcacgauggaccccggca

SEQ ID NO: 2217823 - RNA, 19 nt, Artificial Sequence
  Description of Artificial Sequence: Synthetic oligonucleotide
uuaagcgcagggagggccu

SEQ ID NO: 2217824 - RNA, 19 nt, Artificial Sequence
  Description of Artificial Sequence: Synthetic oligonucleotide
ugucuguauuguucacaag

SEQ ID NO: 2217825 - RNA, 19 nt, Artificial Sequence
  Description of Artificial Sequence: Synthetic oligonucleotide
cugaaauaaguuacacgga

SEQ ID NO: 2217826 - RNA, 19 nt, Artificial Sequence
  Description of Artificial Sequence: Synthetic oligonucleotide
agugauugaucaugcuuaa

SEQ ID NO: 2217827 - RNA, 19 nt, Artificial Sequence
  Description of Artificial Sequence: Synthetic oligonucleotide
acaggccuuaagcgcaggg

SEQ ID NO: 2217828 - RNA, 19 nt, Artificial Sequence
  Description of Artificial Sequence: Synthetic oligonucleotide
caugcuuaauuguaaguua

SEQ ID NO: 2217829 - RNA, 19 nt, Artificial Sequence
  Description of Artificial Sequence: Synthetic oligonucleotide
uuguaaguuauuggcacua

SEQ ID NO: 2217830 - RNA, 19 nt, Artificial Sequence
  Description of Artificial Sequence: Synthetic oligonucleotide
caaggucacugauguaagc

SEQ ID NO: 2217831 - RNA, 19 nt, Artificial Sequence
  Description of Artificial Sequence: Synthetic oligonucleotide
acaguuugaaaacguucaa

SEQ ID NO: 2217832 - RNA, 19 nt, Artificial Sequence
  Description of Artificial Sequence: Synthetic oligonucleotide
auugcucaagugugcauau

SEQ ID NO: 2217833 - RNA, 19 nt, Artificial Sequence
  Description of Artificial Sequence: Synthetic oligonucleotide
auccaccucaagcacgaug

SEQ ID NO: 2217834 - RNA, 19 nt, Artificial Sequence
  Description of Artificial Sequence: Synthetic oligonucleotide
aaguuguuacccaccaaau

SEQ ID NO: 2217835 - RNA, 19 nt, Artificial Sequence
  Description of Artificial Sequence: Synthetic oligonucleotide
gaacagaccuaaucuacua

SEQ ID NO: 2217836 - RNA, 19 nt, Artificial Sequence
  Description of Artificial Sequence: Synthetic oligonucleotide
cuaaucuacuacaaggcau

SEQ ID NO: 2217837 - RNA, 19 nt, Artificial Sequence
  Description of Artificial Sequence: Synthetic oligonucleotide
gcauucagcagacuccaag

SEQ ID NO: 2217838 - RNA, 19 nt, Artificial Sequence
  Description of Artificial Sequence: Synthetic oligonucleotide
ugcuuaauuguaaguuauu

SEQ ID NO: 2217839 - RNA, 19 nt, Artificial Sequence
  Description of Artificial Sequence: Synthetic oligonucleotide
cccaccaaauguaaauugc

SEQ ID NO: 2217840 - RNA, 19 nt, Artificial Sequence
  Description of Artificial Sequence: Synthetic oligonucleotide
cacuaauuagcagcuauca

SEQ ID NO: 2217841 - RNA, 19 nt, Artificial Sequence
  Description of Artificial Sequence: Synthetic oligonucleotide
auauagacuaucacaguuu

SEQ ID NO: 2217842 - RNA, 19 nt, Artificial Sequence
  Description of Artificial Sequence: Synthetic oligonucleotide
ugacaguaacauuuacauu

SEQ ID NO: 2217843 - RNA, 19 nt, Artificial Sequence
  Description of Artificial Sequence: Synthetic oligonucleotide
uacagugauugaucaugcu

SEQ ID NO: 2217844 - RNA, 19 nt, Artificial Sequence
  Description of Artificial Sequence: Synthetic oligonucleotide
agcaaucaaauggaggcau

SEQ ID NO: 2217845 - RNA, 19 nt, Artificial Sequence
  Description of Artificial Sequence: Synthetic oligonucleotide
agccaucugucucaaaaua

SEQ ID NO: 2217846 - RNA, 19 nt, Artificial Sequence
  Description of Artificial Sequence: Synthetic oligonucleotide
ugaagguuauuuggacuac

SEQ ID NO: 2217847 - RNA, 19 nt, Artificial Sequence
  Description of Artificial Sequence: Synthetic oligonucleotide
aacguucaaacagcaguau

SEQ ID NO: 2217848 - RNA, 19 nt, Artificial Sequence
  Description of Artificial Sequence: Synthetic oligonucleotide
caugagauuuguauauaua

SEQ ID NO: 2217849 - RNA, 19 nt, Artificial Sequence
  Description of Artificial Sequence: Synthetic oligonucleotide
cuucuauaucgggauuugc

SEQ ID NO: 2217850 - RNA, 19 nt, Artificial Sequence
  Description of Artificial Sequence: Synthetic oligonucleotide
uguaaguuauuggcacuaa

SEQ ID NO: 2217851 - RNA, 19 nt, Artificial Sequence
  Description of Artificial Sequence: Synthetic oligonucleotide
cauuuacauuccauuggca

SEQ ID NO: 2217852 - RNA, 19 nt, Artificial Sequence
  Description of Artificial Sequence: Synthetic oligonucleotide
gaggcauccaugagauuug

SEQ ID NO: 2217853 - RNA, 19 nt, Artificial Sequence
  Description of Artificial Sequence: Synthetic oligonucleotide
ucaaaccugcaaacaguuu

SEQ ID NO: 2217854 - RNA, 19 nt, Artificial Sequence
  Description of Artificial Sequence: Synthetic oligonucleotide
cauccaugagauuuguaua

SEQ ID NO: 2217855 - RNA, 19 nt, Artificial Sequence
  Description of Artificial Sequence: Synthetic oligonucleotide
uuacacggaugugacagua

SEQ ID NO: 2217856 - RNA, 19 nt, Artificial Sequence
  Description of Artificial Sequence: Synthetic oligonucleotide
uacacggaugugacaguaa

SEQ ID NO: 2217857 - RNA, 19 nt, Artificial Sequence
  Description of Artificial Sequence: Synthetic oligonucleotide
ggagucacuaaccuaauau

SEQ ID NO: 2217858 - RNA, 19 nt, Artificial Sequence
  Description of Artificial Sequence: Synthetic oligonucleotide
caagugugcauauauuuau

SEQ ID NO: 2217859 - RNA, 19 nt, Artificial Sequence
  Description of Artificial Sequence: Synthetic oligonucleotide
gcagggagggccuaauggc

SEQ ID NO: 2217860 - RNA, 19 nt, Artificial Sequence
  Description of Artificial Sequence: Synthetic oligonucleotide
aucaaaccugcaaacaguu

SEQ ID NO: 2217861 - RNA, 19 nt, Artificial Sequence
  Description of Artificial Sequence: Synthetic oligonucleotide
auaucgggauuugcuaaug

SEQ ID NO: 2217862 - RNA, 19 nt, Artificial Sequence
  Description of Artificial Sequence: Synthetic oligonucleotide
uagcucugacaaagcagga

SEQ ID NO: 2217863 - RNA, 19 nt, Artificial Sequence
  Description of Artificial Sequence: Synthetic oligonucleotide
ugggccuagucauccagau

SEQ ID NO: 2217864 - RNA, 19 nt, Artificial Sequence
  Description of Artificial Sequence: Synthetic oligonucleotide
gaugugacaguaacauuua

SEQ ID NO: 2217865 - RNA, 19 nt, Artificial Sequence
  Description of Artificial Sequence: Synthetic oligonucleotide
guggaacagaccuaaucua

SEQ ID NO: 2217866 - RNA, 19 nt, Artificial Sequence
  Description of Artificial Sequence: Synthetic oligonucleotide
agggaaaggugugggaaca

SEQ ID NO: 2217867 - RNA, 19 nt, Artificial Sequence
  Description of Artificial Sequence: Synthetic oligonucleotide
cacaaaagacuucugacuu

SEQ ID NO: 2217868 - RNA, 19 nt, Artificial Sequence
  Description of Artificial Sequence: Synthetic oligonucleotide
agaaaucuaauagcuucua

SEQ ID NO: 2217869 - RNA, 19 nt, Artificial Sequence
  Description of Artificial Sequence: Synthetic oligonucleotide
agauccaccucaagcacga

SEQ ID NO: 2217870 - RNA, 19 nt, Artificial Sequence
  Description of Artificial Sequence: Synthetic oligonucleotide
cagcuaucaaaccugcaaa

SEQ ID NO: 2217871 - RNA, 19 nt, Artificial Sequence
  Description of Artificial Sequence: Synthetic oligonucleotide
ggcaaggucacugauguaa

SEQ ID NO: 2217872 - RNA, 19 nt, Artificial Sequence
  Description of Artificial Sequence: Synthetic oligonucleotide
cagaccuaaucuacuacaa

SEQ ID NO: 2217873 - RNA, 19 nt, Artificial Sequence
  Description of Artificial Sequence: Synthetic oligonucleotide
gaucccugggccuagucau

SEQ ID NO: 2217874 - RNA, 19 nt, Artificial Sequence
  Description of Artificial Sequence: Synthetic oligonucleotide
agcuucuauaucgggauuu

SEQ ID NO: 2217875 - RNA, 19 nt, Artificial Sequence
  Description of Artificial Sequence: Synthetic oligonucleotide
uacgucaaaacaggccuua

SEQ ID NO: 2217876 - RNA, 19 nt, Artificial Sequence
  Description of Artificial Sequence: Synthetic oligonucleotide
gggccuaauggcuucccag

SEQ ID NO: 2217877 - RNA, 19 nt, Artificial Sequence
  Description of Artificial Sequence: Synthetic oligonucleotide
gccuuaagcgcagggaggg

SEQ ID NO: 2217878 - RNA, 19 nt, Artificial Sequence
  Description of Artificial Sequence: Synthetic oligonucleotide
uccaugagauuuguauaua

SEQ ID NO: 2217879 - RNA, 19 nt, Artificial Sequence
  Description of Artificial Sequence: Synthetic oligonucleotide
uguaagccaucugucucaa

SEQ ID NO: 2217880 - RNA, 19 nt, Artificial Sequence
  Description of Artificial Sequence: Synthetic oligonucleotide
aacaggccuuaagcgcagg

SEQ ID NO: 2217881 - RNA, 19 nt, Artificial Sequence
  Description of Artificial Sequence: Synthetic oligonucleotide
gcauccaugagauuuguau

SEQ ID NO: 2217882 - RNA, 19 nt, Artificial Sequence
  Description of Artificial Sequence: Synthetic oligonucleotide
cagugacacaaaauuccca

SEQ ID NO: 2217883 - RNA, 19 nt, Artificial Sequence
  Description of Artificial Sequence: Synthetic oligonucleotide
ucccagucuccccguuggg

SEQ ID NO: 2217884 - RNA, 19 nt, Artificial Sequence
  Description of Artificial Sequence: Synthetic oligonucleotide
caaguucuuauuuucuaau

SEQ ID NO: 2217885 - RNA, 19 nt, Artificial Sequence
  Description of Artificial Sequence: Synthetic oligonucleotide
acuuaguaauugacaguga

SEQ ID NO: 2217886 - RNA, 19 nt, Artificial Sequence
  Description of Artificial Sequence: Synthetic oligonucleotide
gcaauaaaugaauccugaa

SEQ ID NO: 2217887 - RNA, 19 nt, Artificial Sequence
  Description of Artificial Sequence: Synthetic oligonucleotide
gcuaaugcaauaaaugaau

SEQ ID NO: 2217888 - RNA, 19 nt, Artificial Sequence
  Description of Artificial Sequence: Synthetic oligonucleotide
ggaugugacaguaacauuu

SEQ ID NO: 2217889 - RNA, 19 nt, Artificial Sequence
  Description of Artificial Sequence: Synthetic oligonucleotide
auccugaauuguggaacag

SEQ ID NO: 2217890 - RNA, 19 nt, Artificial Sequence
  Description of Artificial Sequence: Synthetic oligonucleotide
ccucaagcacgauggaccc

SEQ ID NO: 2217891 - RNA, 19 nt, Artificial Sequence
  Description of Artificial Sequence: Synthetic oligonucleotide
gcacgauggaccccggcag

SEQ ID NO: 2217892 - RNA, 19 nt, Artificial Sequence
  Description of Artificial Sequence: Synthetic oligonucleotide
auagacuaucacaguuugu

SEQ ID NO: 2217893 - RNA, 19 nt, Artificial Sequence
  Description of Artificial Sequence: Synthetic oligonucleotide
caccucaagcacgauggac

SEQ ID NO: 2217894 - RNA, 19 nt, Artificial Sequence
  Description of Artificial Sequence: Synthetic oligonucleotide
cacuaaccuaauauagacu

SEQ ID NO: 2217895 - RNA, 19 nt, Artificial Sequence
  Description of Artificial Sequence: Synthetic oligonucleotide
ccuaaucuacuacaaggca

SEQ ID NO: 2217896 - RNA, 19 nt, Artificial Sequence
  Description of Artificial Sequence: Synthetic oligonucleotide
gccaucugucucaaaauac

SEQ ID NO: 2217897 - RNA, 19 nt, Artificial Sequence
  Description of Artificial Sequence: Synthetic oligonucleotide
gacuugucucacagcaauc

SEQ ID NO: 2217898 - RNA, 19 nt, Artificial Sequence
  Description of Artificial Sequence: Synthetic oligonucleotide
gcaaggucacugauguaag

SEQ ID NO: 2217899 - RNA, 19 nt, Artificial Sequence
  Description of Artificial Sequence: Synthetic oligonucleotide
gaauuguggaacagaccua

SEQ ID NO: 2217900 - RNA, 19 nt, Artificial Sequence
  Description of Artificial Sequence: Synthetic oligonucleotide
agggccuaauggcuuccca

SEQ ID NO: 2217901 - RNA, 19 nt, Artificial Sequence
  Description of Artificial Sequence: Synthetic oligonucleotide
gggaaaacugggaucccug

SEQ ID NO: 2217902 - RNA, 19 nt, Artificial Sequence
  Description of Artificial Sequence: Synthetic oligonucleotide
gaagguuauuuggacuacu

SEQ ID NO: 2217903 - RNA, 19 nt, Artificial Sequence
  Description of Artificial Sequence: Synthetic oligonucleotide
cuguacauaaaggcaaggu

SEQ ID NO: 2217904 - RNA, 19 nt, Artificial Sequence
  Description of Artificial Sequence: Synthetic oligonucleotide
ggcaguuaauucaguaaca

SEQ ID NO: 2217905 - RNA, 19 nt, Artificial Sequence
  Description of Artificial Sequence: Synthetic oligonucleotide
cgcagggagggccuaaugg

SEQ ID NO: 2217906 - RNA, 19 nt, Artificial Sequence
  Description of Artificial Sequence: Synthetic oligonucleotide
ggccuuaagcgcagggagg

SEQ ID NO: 2217907 - RNA, 19 nt, Artificial Sequence
  Description of Artificial Sequence: Synthetic oligonucleotide
gcuucuauaucgggauuug

SEQ ID NO: 2217908 - RNA, 19 nt, Artificial Sequence
  Description of Artificial Sequence: Synthetic oligonucleotide
ggaucccugggccuaguca

SEQ ID NO: 2217909 - RNA, 19 nt, Artificial Sequence
  Description of Artificial Sequence: Synthetic oligonucleotide
cuaaccuaauauagacuau

SEQ ID NO: 2217910 - RNA, 19 nt, Artificial Sequence
  Description of Artificial Sequence: Synthetic oligonucleotide
caagcacgauggaccccgg

SEQ ID NO: 2217911 - RNA, 19 nt, Artificial Sequence
  Description of Artificial Sequence: Synthetic oligonucleotide
ggcacuaauuagcagcuau

SEQ ID NO: 2217912 - RNA, 19 nt, Artificial Sequence
  Description of Artificial Sequence: Synthetic oligonucleotide
cucaagcacgauggacccc

SEQ ID NO: 2217913 - RNA, 19 nt, Artificial Sequence
  Description of Artificial Sequence: Synthetic oligonucleotide
gggauuugcuaaugcaaua

SEQ ID NO: 2217914 - RNA, 19 nt, Artificial Sequence
  Description of Artificial Sequence: Synthetic oligonucleotide
ggacuugucucacagcaau

SEQ ID NO: 2217915 - RNA, 19 nt, Artificial Sequence
  Description of Artificial Sequence: Synthetic oligonucleotide
cgucaaaacaggccuuaag

SEQ ID NO: 2217916 - RNA, 19 nt, Artificial Sequence
  Description of Artificial Sequence: Synthetic oligonucleotide
cugggccuagucauccaga

SEQ ID NO: 2217917 - RNA, 19 nt, Artificial Sequence
  Description of Artificial Sequence: Synthetic oligonucleotide
acgauggaccccggcagcu

SEQ ID NO: 2217918 - RNA, 19 nt, Artificial Sequence
  Description of Artificial Sequence: Synthetic oligonucleotide
gcacuaauuagcagcuauc

SEQ ID NO: 2217919 - RNA, 19 nt, Artificial Sequence
  Description of Artificial Sequence: Synthetic oligonucleotide
gagggccuaauggcuuccc

SEQ ID NO: 2217920 - RNA, 19 nt, Artificial Sequence
  Description of Artificial Sequence: Synthetic oligonucleotide
guuacacggaugugacagu

SEQ ID NO: 2217921 - RNA, 19 nt, Artificial Sequence
  Description of Artificial Sequence: Synthetic oligonucleotide
ucccaccaggcacuucauu

SEQ ID NO: 2217922 - RNA, 19 nt, Artificial Sequence
  Description of Artificial Sequence: Synthetic oligonucleotide
aggcauccaugagauuugu

SEQ ID NO: 2217923 - RNA, 19 nt, Artificial Sequence
  Description of Artificial Sequence: Synthetic oligonucleotide
gccuaauggcuucccaguc

SEQ ID NO: 2217924 - RNA, 19 nt, Artificial Sequence
  Description of Artificial Sequence: Synthetic oligonucleotide
caggccuuaagcgcaggga

SEQ ID NO: 2217925 - RNA, 19 nt, Artificial Sequence
  Description of Artificial Sequence: Synthetic oligonucleotide
ggaacagaccuaaucuacu

SEQ ID NO: 2217926 - RNA, 19 nt, Artificial Sequence
  Description of Artificial Sequence: Synthetic oligonucleotide
aggacuugucucacagcaa

SEQ ID NO: 2217927 - RNA, 19 nt, Artificial Sequence
  Description of Artificial Sequence: Synthetic oligonucleotide
uugcucaagugugcauaua

SEQ ID NO: 2217928 - RNA, 19 nt, Artificial Sequence
  Description of Artificial Sequence: Synthetic oligonucleotide
ccaccaaauguaaauugcu

SEQ ID NO: 2217929 - RNA, 19 nt, Artificial Sequence
  Description of Artificial Sequence: Synthetic oligonucleotide
ccugaagguuauuuggacu

SEQ ID NO: 2217930 - RNA, 19 nt, Artificial Sequence
  Description of Artificial Sequence: Synthetic oligonucleotide
acgucaaaacaggccuuaa

SEQ ID NO: 2217931 - RNA, 19 nt, Artificial Sequence
  Description of Artificial Sequence: Synthetic oligonucleotide
ggaaaggugugggaacaaa

SEQ ID NO: 2217932 - RNA, 19 nt, Artificial Sequence
  Description of Artificial Sequence: Synthetic oligonucleotide
aagcucugauacagugauu

SEQ ID NO: 2217933 - RNA, 19 nt, Artificial Sequence
  Description of Artificial Sequence: Synthetic oligonucleotide
ggccuaauggcuucccagu

SEQ ID NO: 2217934 - RNA, 19 nt, Artificial Sequence
  Description of Artificial Sequence: Synthetic oligonucleotide
gggagggccuaauggcuuc

SEQ ID NO: 2217935 - RNA, 19 nt, Artificial Sequence
  Description of Artificial Sequence: Synthetic oligonucleotide
agggagggccuaauggcuu

SEQ ID NO: 2217936 - RNA, 19 nt, Artificial Sequence
  Description of Artificial Sequence: Synthetic oligonucleotide
caccaggcacuucauuucu

SEQ ID NO: 2217937 - RNA, 19 nt, Artificial Sequence
  Description of Artificial Sequence: Synthetic oligonucleotide
uggcacuaauuagcagcua

SEQ ID NO: 2217938 - RNA, 19 nt, Artificial Sequence
  Description of Artificial Sequence: Synthetic oligonucleotide
cccuagcucugacaaagca

SEQ ID NO: 2217939 - RNA, 19 nt, Artificial Sequence
  Description of Artificial Sequence: Synthetic oligonucleotide
agggagucacuaaccuaau

SEQ ID NO: 2217940 - RNA, 19 nt, Artificial Sequence
  Description of Artificial Sequence: Synthetic oligonucleotide
uaagcgcagggagggccua

SEQ ID NO: 2217941 - RNA, 19 nt, Artificial Sequence
  Description of Artificial Sequence: Synthetic oligonucleotide
cuaucacaguuugucccua

SEQ ID NO: 2217942 - RNA, 19 nt, Artificial Sequence
  Description of Artificial Sequence: Synthetic oligonucleotide
aagcgcagggagggccuaa

SEQ ID NO: 2217943 - RNA, 19 nt, Artificial Sequence
  Description of Artificial Sequence: Synthetic oligonucleotide
cuacgucaaaacaggccuu

SEQ ID NO: 2217944 - RNA, 19 nt, Artificial Sequence
  Description of Artificial Sequence: Synthetic oligonucleotide
aggcaaggucacugaugua

SEQ ID NO: 2217945 - RNA, 19 nt, Artificial Sequence
  Description of Artificial Sequence: Synthetic oligonucleotide
gggccuagucauccagauc

SEQ ID NO: 2217946 - RNA, 19 nt, Artificial Sequence
  Description of Artificial Sequence: Synthetic oligonucleotide
ccuaauggcuucccagucu

SEQ ID NO: 2217947 - RNA, 19 nt, Artificial Sequence
  Description of Artificial Sequence: Synthetic oligonucleotide
agcgcagggagggccuaau

SEQ ID NO: 2217948 - RNA, 19 nt, Artificial Sequence
  Description of Artificial Sequence: Synthetic oligonucleotide
ccuuaagcgcagggagggc

SEQ ID NO: 2217949 - RNA, 19 nt, Artificial Sequence
  Description of Artificial Sequence: Synthetic oligonucleotide
gugauugaucaugcuuaau

SEQ ID NO: 2217950 - RNA, 19 nt, Artificial Sequence
  Description of Artificial Sequence: Synthetic oligonucleotide
gcaggaaauuuuacuuagu

SEQ ID NO: 2217951 - RNA, 19 nt, Artificial Sequence
  Description of Artificial Sequence: Synthetic oligonucleotide
gcgcagggagggccuaaug

SEQ ID NO: 2217952 - RNA, 19 nt, Artificial Sequence
  Description of Artificial Sequence: Synthetic oligonucleotide
gggaucccugggccuaguc

SEQ ID NO: 2217953 - RNA, 19 nt, Artificial Sequence
  Description of Artificial Sequence: Synthetic oligonucleotide
gggaaaggugugggaacaa

SEQ ID NO: 2217954 - RNA, 19 nt, Artificial Sequence
  Description of Artificial Sequence: Synthetic oligonucleotide
gccuagucauccagaucca

SEQ ID NO: 2217955 - RNA, 19 nt, Artificial Sequence
  Description of Artificial Sequence: Synthetic oligonucleotide
cgggauuugcuaaugcaau

SEQ ID NO: 2217956 - RNA, 19 nt, Artificial Sequence
  Description of Artificial Sequence: Synthetic oligonucleotide
gcucaagugugcauauauu

SEQ ID NO: 2217957 - RNA, 19 nt, Artificial Sequence
  Description of Artificial Sequence: Synthetic oligonucleotide
ccaccucaagcacgaugga

SEQ ID NO: 2217958 - RNA, 19 nt, Artificial Sequence
  Description of Artificial Sequence: Synthetic oligonucleotide
gauccaccucaagcacgau

SEQ ID NO: 2217959 - RNA, 19 nt, Artificial Sequence
  Description of Artificial Sequence: Synthetic oligonucleotide
agaacucucagauucaucc

SEQ ID NO: 2217960 - RNA, 19 nt, Artificial Sequence
  Description of Artificial Sequence: Synthetic oligonucleotide
auuucguugucucauaagc

SEQ ID NO: 2217961 - RNA, 19 nt, Artificial Sequence
  Description of Artificial Sequence: Synthetic oligonucleotide
aucaagaacucucagauuc

SEQ ID NO: 2217962 - RNA, 19 nt, Artificial Sequence
  Description of Artificial Sequence: Synthetic oligonucleotide
accaguaugagccaauagc

SEQ ID NO: 2217963 - RNA, 19 nt, Artificial Sequence
  Description of Artificial Sequence: Synthetic oligonucleotide
agaacucuaagccagcagc

SEQ ID NO: 2217964 - RNA, 19 nt, Artificial Sequence
  Description of Artificial Sequence: Synthetic oligonucleotide
accucaaucagagagaacc

SEQ ID NO: 2217965 - RNA, 19 nt, Artificial Sequence
  Description of Artificial Sequence: Synthetic oligonucleotide
aaaacgucgggacugcucg

SEQ ID NO: 2217966 - RNA, 19 nt, Artificial Sequence
  Description of Artificial Sequence: Synthetic oligonucleotide
gaacccauaaaacagauca

SEQ ID NO: 2217967 - RNA, 19 nt, Artificial Sequence
  Description of Artificial Sequence: Synthetic oligonucleotide
acauuaauggaccaacugg

SEQ ID NO: 2217968 - RNA, 19 nt, Artificial Sequence
  Description of Artificial Sequence: Synthetic oligonucleotide
cuuuaucuauucaauagcg

SEQ ID NO: 2217969 - RNA, 19 nt, Artificial Sequence
  Description of Artificial Sequence: Synthetic oligonucleotide
ugucucauaagcuuacagg

SEQ ID NO: 2217970 - RNA, 19 nt, Artificial Sequence
  Description of Artificial Sequence: Synthetic oligonucleotide
ugcuuuaucuauucaauag

SEQ ID NO: 2217971 - RNA, 19 nt, Artificial Sequence
  Description of Artificial Sequence: Synthetic oligonucleotide
ucagauucaucccaaagac

SEQ ID NO: 2217972 - RNA, 19 nt, Artificial Sequence
  Description of Artificial Sequence: Synthetic oligonucleotide
uaucuauucaauagcgucc

SEQ ID NO: 2217973 - RNA, 19 nt, Artificial Sequence
  Description of Artificial Sequence: Synthetic oligonucleotide
aaaucuccggaguaaguuc

SEQ ID NO: 2217974 - RNA, 19 nt, Artificial Sequence
  Description of Artificial Sequence: Synthetic oligonucleotide
uuaucuauucaauagcguc

SEQ ID NO: 2217975 - RNA, 19 nt, Artificial Sequence
  Description of Artificial Sequence: Synthetic oligonucleotide
ucauccaucacaucaaccu

SEQ ID NO: 2217976 - RNA, 19 nt, Artificial Sequence
  Description of Artificial Sequence: Synthetic oligonucleotide
cugacugccggauagaccc

SEQ ID NO: 2217977 - RNA, 19 nt, Artificial Sequence
  Description of Artificial Sequence: Synthetic oligonucleotide
uacaaaguacaguaguaag

SEQ ID NO: 2217978 - RNA, 19 nt, Artificial Sequence
  Description of Artificial Sequence: Synthetic oligonucleotide
uaauggaccaacuggacca

SEQ ID NO: 2217979 - RNA, 19 nt, Artificial Sequence
  Description of Artificial Sequence: Synthetic oligonucleotide
uuaauggaccaacuggacc

SEQ ID NO: 2217980 - RNA, 19 nt, Artificial Sequence
  Description of Artificial Sequence: Synthetic oligonucleotide
aagaucaagcccaggaucg

SEQ ID NO: 2217981 - RNA, 19 nt, Artificial Sequence
  Description of Artificial Sequence: Synthetic oligonucleotide
ugacuuacaaaguacagua

SEQ ID NO: 2217982 - RNA, 19 nt, Artificial Sequence
  Description of Artificial Sequence: Synthetic oligonucleotide
aacagaucaaggaucagag

SEQ ID NO: 2217983 - RNA, 19 nt, Artificial Sequence
  Description of Artificial Sequence: Synthetic oligonucleotide
aguaaggagacucuugugu

SEQ ID NO: 2217984 - RNA, 19 nt, Artificial Sequence
  Description of Artificial Sequence: Synthetic oligonucleotide
aaucuccggaguaaguucc

SEQ ID NO: 2217985 - RNA, 19 nt, Artificial Sequence
  Description of Artificial Sequence: Synthetic oligonucleotide
aguacaguaguaaggagac

SEQ ID NO: 2217986 - RNA, 19 nt, Artificial Sequence
  Description of Artificial Sequence: Synthetic oligonucleotide
cucagugacauuaauggac

SEQ ID NO: 2217987 - RNA, 19 nt, Artificial Sequence
  Description of Artificial Sequence: Synthetic oligonucleotide
gagagaacccauaaaacag

SEQ ID NO: 2217988 - RNA, 19 nt, Artificial Sequence
  Description of Artificial Sequence: Synthetic oligonucleotide
auaagcuuacaggugaugg

SEQ ID NO: 2217989 - RNA, 19 nt, Artificial Sequence
  Description of Artificial Sequence: Synthetic oligonucleotide
aguaugagccaauagcuca

SEQ ID NO: 2217990 - RNA, 19 nt, Artificial Sequence
  Description of Artificial Sequence: Synthetic oligonucleotide
aagcuuacaggugauggcg

SEQ ID NO: 2217991 - RNA, 19 nt, Artificial Sequence
  Description of Artificial Sequence: Synthetic oligonucleotide
aauggaggccucucuugcc

SEQ ID NO: 2217992 - RNA, 19 nt, Artificial Sequence
  Description of Artificial Sequence: Synthetic oligonucleotide
aacugaucugaguauucuc

SEQ ID NO: 2217993 - RNA, 19 nt, Artificial Sequence
  Description of Artificial Sequence: Synthetic oligonucleotide
aaaguacaguaguaaggag

SEQ ID NO: 2217994 - RNA, 19 nt, Artificial Sequence
  Description of Artificial Sequence: Synthetic oligonucleotide
ucacuuuggcuuuucaugc

SEQ ID NO: 2217995 - RNA, 19 nt, Artificial Sequence
  Description of Artificial Sequence: Synthetic oligonucleotide
uuaucuuauucauuuauuu

SEQ ID NO: 2217996 - RNA, 19 nt, Artificial Sequence
  Description of Artificial Sequence: Synthetic oligonucleotide
uuuaucuauucaauagcgu

SEQ ID NO: 2217997 - RNA, 19 nt, Artificial Sequence
  Description of Artificial Sequence: Synthetic oligonucleotide
cucauccugauguauaggc

SEQ ID NO: 2217998 - RNA, 19 nt, Artificial Sequence
  Description of Artificial Sequence: Synthetic oligonucleotide
gaucugaguauucucggag

SEQ ID NO: 2217999 - RNA, 19 nt, Artificial Sequence
  Description of Artificial Sequence: Synthetic oligonucleotide
ugguuugcugacuagguug

SEQ ID NO: 2218000 - RNA, 19 nt, Artificial Sequence
  Description of Artificial Sequence: Synthetic oligonucleotide
aguauucucggagaaacuc

SEQ ID NO: 2218001 - RNA, 19 nt, Artificial Sequence
  Description of Artificial Sequence: Synthetic oligonucleotide
ucugcuagccguucagugg

SEQ ID NO: 2218002 - RNA, 19 nt, Artificial Sequence
  Description of Artificial Sequence: Synthetic oligonucleotide
caucacauauucuugggug

SEQ ID NO: 2218003 - RNA, 19 nt, Artificial Sequence
  Description of Artificial Sequence: Synthetic oligonucleotide
ugaguauucucggagaaac

SEQ ID NO: 2218004 - RNA, 19 nt, Artificial Sequence
  Description of Artificial Sequence: Synthetic oligonucleotide
gauccucugaggcucaucc

SEQ ID NO: 2218005 - RNA, 19 nt, Artificial Sequence
  Description of Artificial Sequence: Synthetic oligonucleotide
aaguacaguaguaaggaga

SEQ ID NO: 2218006 - RNA, 19 nt, Artificial Sequence
  Description of Artificial Sequence: Synthetic oligonucleotide
aacucucagauucauccca

SEQ ID NO: 2218007 - RNA, 19 nt, Artificial Sequence
  Description of Artificial Sequence: Synthetic oligonucleotide
ucggcugaggauauuuggg

SEQ ID NO: 2218008 - RNA, 19 nt, Artificial Sequence
  Description of Artificial Sequence: Synthetic oligonucleotide
augcgcaugaaauucacca

SEQ ID NO: 2218009 - RNA, 19 nt, Artificial Sequence
  Description of Artificial Sequence: Synthetic oligonucleotide
aguaaguuccagauguugg

SEQ ID NO: 2218010 - RNA, 19 nt, Artificial Sequence
  Description of Artificial Sequence: Synthetic oligonucleotide
aauucaccaaagcaaccga

SEQ ID NO: 2218011 - RNA, 19 nt, Artificial Sequence
  Description of Artificial Sequence: Synthetic oligonucleotide
uucaccaaagcaaccgacc

SEQ ID NO: 2218012 - RNA, 19 nt, Artificial Sequence
  Description of Artificial Sequence: Synthetic oligonucleotide
acugaucugaguauucucg

SEQ ID NO: 2218013 - RNA, 19 nt, Artificial Sequence
  Description of Artificial Sequence: Synthetic oligonucleotide
aaagcaaccgaccuuucuu

SEQ ID NO: 2218014 - RNA, 19 nt, Artificial Sequence
  Description of Artificial Sequence: Synthetic oligonucleotide
cauccugauguauaggcag

SEQ ID NO: 2218015 - RNA, 19 nt, Artificial Sequence
  Description of Artificial Sequence: Synthetic oligonucleotide
caucccaaagacccgaucc

SEQ ID NO: 2218016 - RNA, 19 nt, Artificial Sequence
  Description of Artificial Sequence: Synthetic oligonucleotide
uauucucggagaaacucca

SEQ ID NO: 2218017 - RNA, 19 nt, Artificial Sequence
  Description of Artificial Sequence: Synthetic oligonucleotide
aauagcguccucugaccag

SEQ ID NO: 2218018 - RNA, 19 nt, Artificial Sequence
  Description of Artificial Sequence: Synthetic oligonucleotide
ucuagagggucauggaccc

SEQ ID NO: 2218019 - RNA, 19 nt, Artificial Sequence
  Description of Artificial Sequence: Synthetic oligonucleotide
uuugggaacacauccucga

SEQ ID NO: 2218020 - RNA, 19 nt, Artificial Sequence
  Description of Artificial Sequence: Synthetic oligonucleotide
ucucauaagcuuacaggug

SEQ ID NO: 2218021 - RNA, 19 nt, Artificial Sequence
  Description of Artificial Sequence: Synthetic oligonucleotide
uuucguugucucauaagcu

SEQ ID NO: 2218022 - RNA, 19 nt, Artificial Sequence
  Description of Artificial Sequence: Synthetic oligonucleotide
gagccaauagcucauccug

SEQ ID NO: 2218023 - RNA, 19 nt, Artificial Sequence
  Description of Artificial Sequence: Synthetic oligonucleotide
agaggaugugcccuaggac

SEQ ID NO: 2218024 - RNA, 19 nt, Artificial Sequence
  Description of Artificial Sequence: Synthetic oligonucleotide
acauuacuugcucuucuuc

SEQ ID NO: 2218025 - RNA, 19 nt, Artificial Sequence
  Description of Artificial Sequence: Synthetic oligonucleotide
uuuuauuucguugucucau

SEQ ID NO: 2218026 - RNA, 19 nt, Artificial Sequence
  Description of Artificial Sequence: Synthetic oligonucleotide
uauuucguugucucauaag

SEQ ID NO: 2218027 - RNA, 19 nt, Artificial Sequence
  Description of Artificial Sequence: Synthetic oligonucleotide
accugcuuugggcaugucc

SEQ ID NO: 2218028 - RNA, 19 nt, Artificial Sequence
  Description of Artificial Sequence: Synthetic oligonucleotide
uaagcuuacaggugauggc

SEQ ID NO: 2218029 - RNA, 19 nt, Artificial Sequence
  Description of Artificial Sequence: Synthetic oligonucleotide
gaauucuuuaccaguauga

SEQ ID NO: 2218030 - RNA, 19 nt, Artificial Sequence
  Description of Artificial Sequence: Synthetic oligonucleotide
uccacacuaaaucuccgga

SEQ ID NO: 2218031 - RNA, 19 nt, Artificial Sequence
  Description of Artificial Sequence: Synthetic oligonucleotide
uagguuguaagugucaguc

SEQ ID NO: 2218032 - RNA, 19 nt, Artificial Sequence
  Description of Artificial Sequence: Synthetic oligonucleotide
ucucggagaaacuccagca

SEQ ID NO: 2218033 - RNA, 19 nt, Artificial Sequence
  Description of Artificial Sequence: Synthetic oligonucleotide
agaaacuccagcaugucug

SEQ ID NO: 2218034 - RNA, 19 nt, Artificial Sequence
  Description of Artificial Sequence: Synthetic oligonucleotide
ucaauagcguccucugacc

SEQ ID NO: 2218035 - RNA, 19 nt, Artificial Sequence
  Description of Artificial Sequence: Synthetic oligonucleotide
uugcugacuagguuguaag

SEQ ID NO: 2218036 - RNA, 19 nt, Artificial Sequence
  Description of Artificial Sequence: Synthetic oligonucleotide
uuucaugcgcaugaaauuc

SEQ ID NO: 2218037 - RNA, 19 nt, Artificial Sequence
  Description of Artificial Sequence: Synthetic oligonucleotide
auagaccccucacuuuggc

SEQ ID NO: 2218038 - RNA, 19 nt, Artificial Sequence
  Description of Artificial Sequence: Synthetic oligonucleotide
aacuccagcaugucugacu

SEQ ID NO: 2218039 - RNA, 19 nt, Artificial Sequence
  Description of Artificial Sequence: Synthetic oligonucleotide
gauccaggugcgcugaggc

SEQ ID NO: 2218040 - RNA, 19 nt, Artificial Sequence
  Description of Artificial Sequence: Synthetic oligonucleotide
aucaggaagaucaagccca

SEQ ID NO: 2218041 - RNA, 19 nt, Artificial Sequence
  Description of Artificial Sequence: Synthetic oligonucleotide
ucugaguauucucggagaa

SEQ ID NO: 2218042 - RNA, 19 nt, Artificial Sequence
  Description of Artificial Sequence: Synthetic oligonucleotide
aucggcaucacauauucuu

SEQ ID NO: 2218043 - RNA, 19 nt, Artificial Sequence
  Description of Artificial Sequence: Synthetic oligonucleotide
augucugacugccggauag

SEQ ID NO: 2218044 - RNA, 19 nt, Artificial Sequence
  Description of Artificial Sequence: Synthetic oligonucleotide
ucacauauucuuggguggg

SEQ ID NO: 2218045 - RNA, 19 nt, Artificial Sequence
  Description of Artificial Sequence: Synthetic oligonucleotide
ucauccugauguauaggca

SEQ ID NO: 2218046 - RNA, 19 nt, Artificial Sequence
  Description of Artificial Sequence: Synthetic oligonucleotide
uuucuuccuacauccacac

SEQ ID NO: 2218047 - RNA, 19 nt, Artificial Sequence
  Description of Artificial Sequence: Synthetic oligonucleotide
uccucgaauucuuuaccag

SEQ ID NO: 2218048 - RNA, 19 nt, Artificial Sequence
  Description of Artificial Sequence: Synthetic oligonucleotide
auccacacuaaaucuccgg

SEQ ID NO: 2218049 - RNA, 19 nt, Artificial Sequence
  Description of Artificial Sequence: Synthetic oligonucleotide
uguaagugucagucugagg

SEQ ID NO: 2218050 - RNA, 19 nt, Artificial Sequence
  Description of Artificial Sequence: Synthetic oligonucleotide
uucaugcgcaugaaauuca

SEQ ID NO: 2218051 - RNA, 19 nt, Artificial Sequence
  Description of Artificial Sequence: Synthetic oligonucleotide
aggaccaaggccaggagac

SEQ ID NO: 2218052 - RNA, 19 nt, Artificial Sequence
  Description of Artificial Sequence: Synthetic oligonucleotide
ugaccagaacucuaagcca

SEQ ID NO: 2218053 - RNA, 19 nt, Artificial Sequence
  Description of Artificial Sequence: Synthetic oligonucleotide
caaggaucagaguggcucg

SEQ ID NO: 2218054 - RNA, 19 nt, Artificial Sequence
  Description of Artificial Sequence: Synthetic oligonucleotide
cucauaagcuuacagguga

SEQ ID NO: 2218055 - RNA, 19 nt, Artificial Sequence
  Description of Artificial Sequence: Synthetic oligonucleotide
ucggcaucacauauucuug

SEQ ID NO: 2218056 - RNA, 19 nt, Artificial Sequence
  Description of Artificial Sequence: Synthetic oligonucleotide
gguuguaagugucagucug

SEQ ID NO: 2218057 - RNA, 19 nt, Artificial Sequence
  Description of Artificial Sequence: Synthetic oligonucleotide
uuuucaugcgcaugaaauu

SEQ ID NO: 2218058 - RNA, 19 nt, Artificial Sequence
  Description of Artificial Sequence: Synthetic oligonucleotide
acuaaaucuccggaguaag

SEQ ID NO: 2218059 - RNA, 19 nt, Artificial Sequence
  Description of Artificial Sequence: Synthetic oligonucleotide
ugacauuaauggaccaacu

SEQ ID NO: 2218060 - RNA, 19 nt, Artificial Sequence
  Description of Artificial Sequence: Synthetic oligonucleotide
cgaccuuucuucuagaggg

SEQ ID NO: 2218061 - RNA, 19 nt, Artificial Sequence
  Description of Artificial Sequence: Synthetic oligonucleotide
uucguugucucauaagcuu

SEQ ID NO: 2218062 - RNA, 19 nt, Artificial Sequence
  Description of Artificial Sequence: Synthetic oligonucleotide
cucggcugaggauauuugg

SEQ ID NO: 2218063 - RNA, 19 nt, Artificial Sequence
  Description of Artificial Sequence: Synthetic oligonucleotide
cuucuagagggucauggac

SEQ ID NO: 2218064 - RNA, 19 nt, Artificial Sequence
  Description of Artificial Sequence: Synthetic oligonucleotide
uccuacauccacacuaaau

SEQ ID NO: 2218065 - RNA, 19 nt, Artificial Sequence
  Description of Artificial Sequence: Synthetic oligonucleotide
ugagccaauagcucauccu

SEQ ID NO: 2218066 - RNA, 19 nt, Artificial Sequence
  Description of Artificial Sequence: Synthetic oligonucleotide
uaaguuccagauguuggcc

SEQ ID NO: 2218067 - RNA, 19 nt, Artificial Sequence
  Description of Artificial Sequence: Synthetic oligonucleotide
uccggaguaaguuccagau

SEQ ID NO: 2218068 - RNA, 19 nt, Artificial Sequence
  Description of Artificial Sequence: Synthetic oligonucleotide
uaccaguaugagccaauag

SEQ ID NO: 2218069 - RNA, 19 nt, Artificial Sequence
  Description of Artificial Sequence: Synthetic oligonucleotide
ccuacauccacacuaaauc

SEQ ID NO: 2218070 - RNA, 19 nt, Artificial Sequence
  Description of Artificial Sequence: Synthetic oligonucleotide
uguugauccucugaggcuc

SEQ ID NO: 2218071 - RNA, 19 nt, Artificial Sequence
  Description of Artificial Sequence: Synthetic oligonucleotide
uuguaagugucagucugag

SEQ ID NO: 2218072 - RNA, 19 nt, Artificial Sequence
  Description of Artificial Sequence: Synthetic oligonucleotide
uaaaucuccggaguaaguu

SEQ ID NO: 2218073 - RNA, 19 nt, Artificial Sequence
  Description of Artificial Sequence: Synthetic oligonucleotide
ugugcccuaggaccaaggc

SEQ ID NO: 2218074 - RNA, 19 nt, Artificial Sequence
  Description of Artificial Sequence: Synthetic oligonucleotide
cccauaaaacagaucaagg

SEQ ID NO: 2218075 - RNA, 19 nt, Artificial Sequence
  Description of Artificial Sequence: Synthetic oligonucleotide
gaguaaguuccagauguug

SEQ ID NO: 2218076 - RNA, 19 nt, Artificial Sequence
  Description of Artificial Sequence: Synthetic oligonucleotide
auucaccaaagcaaccgac

SEQ ID NO: 2218077 - RNA, 19 nt, Artificial Sequence
  Description of Artificial Sequence: Synthetic oligonucleotide
gauucaucccaaagacccg

SEQ ID NO: 2218078 - RNA, 19 nt, Artificial Sequence
  Description of Artificial Sequence: Synthetic oligonucleotide
auuugggaacacauccucg

SEQ ID NO: 2218079 - RNA, 19 nt, Artificial Sequence
  Description of Artificial Sequence: Synthetic oligonucleotide
gauguauaggcagcaacuc

SEQ ID NO: 2218080 - RNA, 19 nt, Artificial Sequence
  Description of Artificial Sequence: Synthetic oligonucleotide
aauagcucauccugaugua

SEQ ID NO: 2218081 - RNA, 19 nt, Artificial Sequence
  Description of Artificial Sequence: Synthetic oligonucleotide
guauucucggagaaacucc

SEQ ID NO: 2218082 - RNA, 19 nt, Artificial Sequence
  Description of Artificial Sequence: Synthetic oligonucleotide
cauccucgaauucuuuacc

SEQ ID NO: 2218083 - RNA, 19 nt, Artificial Sequence
  Description of Artificial Sequence: Synthetic oligonucleotide
cuuucuuccuacauccaca

SEQ ID NO: 2218084 - RNA, 19 nt, Artificial Sequence
  Description of Artificial Sequence: Synthetic oligonucleotide
uucuucugauucugguugc

SEQ ID NO: 2218085 - RNA, 19 nt, Artificial Sequence
  Description of Artificial Sequence: Synthetic oligonucleotide
gacuuacaaaguacaguag

SEQ ID NO: 2218086 - RNA, 19 nt, Artificial Sequence
  Description of Artificial Sequence: Synthetic oligonucleotide
uugcuuuaucuauucaaua

SEQ ID NO: 2218087 - RNA, 19 nt, Artificial Sequence
  Description of Artificial Sequence: Synthetic oligonucleotide
uuuaccaguaugagccaau

SEQ ID NO: 2218088 - RNA, 19 nt, Artificial Sequence
  Description of Artificial Sequence: Synthetic oligonucleotide
auccucgaauucuuuacca

SEQ ID NO: 2218089 - RNA, 19 nt, Artificial Sequence
  Description of Artificial Sequence: Synthetic oligonucleotide
uuuauuucguugucucaua

SEQ ID NO: 2218090 - RNA, 19 nt, Artificial Sequence
  Description of Artificial Sequence: Synthetic oligonucleotide
ccauucaagaggaugugcc

SEQ ID NO: 2218091 - RNA, 19 nt, Artificial Sequence
  Description of Artificial Sequence: Synthetic oligonucleotide
ggauagaccccucacuuug

SEQ ID NO: 2218092 - RNA, 19 nt, Artificial Sequence
  Description of Artificial Sequence: Synthetic oligonucleotide
ucaugcgcaugaaauucac

SEQ ID NO: 2218093 - RNA, 19 nt, Artificial Sequence
  Description of Artificial Sequence: Synthetic oligonucleotide
ucugguugcuuggaccagg

SEQ ID NO: 2218094 - RNA, 19 nt, Artificial Sequence
  Description of Artificial Sequence: Synthetic oligonucleotide
gugacauuaauggaccaac

SEQ ID NO: 2218095 - RNA, 19 nt, Artificial Sequence
  Description of Artificial Sequence: Synthetic oligonucleotide
uaguaaggagacucuugug

SEQ ID NO: 2218096 - RNA, 19 nt, Artificial Sequence
  Description of Artificial Sequence: Synthetic oligonucleotide
caaccgaccuuucuucuag

SEQ ID NO: 2218097 - RNA, 19 nt, Artificial Sequence
  Description of Artificial Sequence: Synthetic oligonucleotide
aucuauucaauagcguccu

SEQ ID NO: 2218098 - RNA, 19 nt, Artificial Sequence
  Description of Artificial Sequence: Synthetic oligonucleotide
aguaguaaggagacucuug

SEQ ID NO: 2218099 - RNA, 19 nt, Artificial Sequence
  Description of Artificial Sequence: Synthetic oligonucleotide
cagcaugucugacugccgg

SEQ ID NO: 2218100 - RNA, 19 nt, Artificial Sequence
  Description of Artificial Sequence: Synthetic oligonucleotide
auucaagaggaugugcccu

SEQ ID NO: 2218101 - RNA, 19 nt, Artificial Sequence
  Description of Artificial Sequence: Synthetic oligonucleotide
cacuuuggcuuuucaugcg

SEQ ID NO: 2218102 - RNA, 19 nt, Artificial Sequence
  Description of Artificial Sequence: Synthetic oligonucleotide
ugauucugguugcuuggac

SEQ ID NO: 2218103 - RNA, 19 nt, Artificial Sequence
  Description of Artificial Sequence: Synthetic oligonucleotide
auccugauguauaggcagc

SEQ ID NO: 2218104 - RNA, 19 nt, Artificial Sequence
  Description of Artificial Sequence: Synthetic oligonucleotide
ucguugucucauaagcuua

SEQ ID NO: 2218105 - RNA, 19 nt, Artificial Sequence
  Description of Artificial Sequence: Synthetic oligonucleotide
cauccacacuaaaucuccg

SEQ ID NO: 2218106 - RNA, 19 nt, Artificial Sequence
  Description of Artificial Sequence: Synthetic oligonucleotide
gauagaccccucacuuugg

SEQ ID NO: 2218107 - RNA, 19 nt, Artificial Sequence
  Description of Artificial Sequence: Synthetic oligonucleotide
ucgaauucuuuaccaguau

SEQ ID NO: 2218108 - RNA, 19 nt, Artificial Sequence
  Description of Artificial Sequence: Synthetic oligonucleotide
aaggaucagaguggcucgg

SEQ ID NO: 2218109 - RNA, 19 nt, Artificial Sequence
  Description of Artificial Sequence: Synthetic oligonucleotide
agccugacuuacaaaguac

SEQ ID NO: 2218110 - RNA, 19 nt, Artificial Sequence
  Description of Artificial Sequence: Synthetic oligonucleotide
ugcccgguugccauucaag

SEQ ID NO: 2218111 - RNA, 19 nt, Artificial Sequence
  Description of Artificial Sequence: Synthetic oligonucleotide
guaguaaggagacucuugu

SEQ ID NO: 2218112 - RNA, 19 nt, Artificial Sequence
  Description of Artificial Sequence: Synthetic oligonucleotide
ggcucucuaacauuacuug

SEQ ID NO: 2218113 - RNA, 19 nt, Artificial Sequence
  Description of Artificial Sequence: Synthetic oligonucleotide
ugauggcgugcuuucuucc

SEQ ID NO: 2218114 - RNA, 19 nt, Artificial Sequence
  Description of Artificial Sequence: Synthetic oligonucleotide
ucuuuaccaguaugagcca

SEQ ID NO: 2218115 - RNA, 19 nt, Artificial Sequence
  Description of Artificial Sequence: Synthetic oligonucleotide
uuugcugacuagguuguaa

SEQ ID NO: 2218116 - RNA, 19 nt, Artificial Sequence
  Description of Artificial Sequence: Synthetic oligonucleotide
uguuccaagagguguugau

SEQ ID NO: 2218117 - RNA, 19 nt, Artificial Sequence
  Description of Artificial Sequence: Synthetic oligonucleotide
ccauaaaacagaucaagga

SEQ ID NO: 2218118 - RNA, 19 nt, Artificial Sequence
  Description of Artificial Sequence: Synthetic oligonucleotide
ggcaucacauauucuuggg

SEQ ID NO: 2218119 - RNA, 19 nt, Artificial Sequence
  Description of Artificial Sequence: Synthetic oligonucleotide
ugcgcaugaaauucaccaa

SEQ ID NO: 2218120 - RNA, 19 nt, Artificial Sequence
  Description of Artificial Sequence: Synthetic oligonucleotide
agagaacccauaaaacaga

SEQ ID NO: 2218121 - RNA, 19 nt, Artificial Sequence
  Description of Artificial Sequence: Synthetic oligonucleotide
caguaugagccaauagcuc

SEQ ID NO: 2218122 - RNA, 19 nt, Artificial Sequence
  Description of Artificial Sequence: Synthetic oligonucleotide
gaccaacuggaccaauuca

SEQ ID NO: 2218123 - RNA, 19 nt, Artificial Sequence
  Description of Artificial Sequence: Synthetic oligonucleotide
caugcgcaugaaauucacc

SEQ ID NO: 2218124 - RNA, 19 nt, Artificial Sequence
  Description of Artificial Sequence: Synthetic oligonucleotide
ucauaagcuuacaggugau

SEQ ID NO: 2218125 - RNA, 19 nt, Artificial Sequence
  Description of Artificial Sequence: Synthetic oligonucleotide
cucugcuagccguucagug

SEQ ID NO: 2218126 - RNA, 19 nt, Artificial Sequence
  Description of Artificial Sequence: Synthetic oligonucleotide
ugugcucacugguaucaac

SEQ ID NO: 2218127 - RNA, 19 nt, Artificial Sequence
  Description of Artificial Sequence: Synthetic oligonucleotide
aacgucgggacugcucguc

SEQ ID NO: 2218128 - RNA, 19 nt, Artificial Sequence
  Description of Artificial Sequence: Synthetic oligonucleotide
accgaccuuucuucuagag

SEQ ID NO: 2218129 - RNA, 19 nt, Artificial Sequence
  Description of Artificial Sequence: Synthetic oligonucleotide
gugcucacugguaucaacc

SEQ ID NO: 2218130 - RNA, 19 nt, Artificial Sequence
  Description of Artificial Sequence: Synthetic oligonucleotide
auauuugggaacacauccu

SEQ ID NO: 2218131 - RNA, 19 nt, Artificial Sequence
  Description of Artificial Sequence: Synthetic oligonucleotide
ugcugacuagguuguaagu

SEQ ID NO: 2218132 - RNA, 19 nt, Artificial Sequence
  Description of Artificial Sequence: Synthetic oligonucleotide
agcaacuccucagugacau

SEQ ID NO: 2218133 - RNA, 19 nt, Artificial Sequence
  Description of Artificial Sequence: Synthetic oligonucleotide
ugucagucugaggaucaag

SEQ ID NO: 2218134 - RNA, 19 nt, Artificial Sequence
  Description of Artificial Sequence: Synthetic oligonucleotide
caaaacgucgggacugcuc

SEQ ID NO: 2218135 - RNA, 19 nt, Artificial Sequence
  Description of Artificial Sequence: Synthetic oligonucleotide
uguguuccaagagguguug

SEQ ID NO: 2218136 - RNA, 19 nt, Artificial Sequence
  Description of Artificial Sequence: Synthetic oligonucleotide
uagcucauccugauguaua

SEQ ID NO: 2218137 - RNA, 19 nt, Artificial Sequence
  Description of Artificial Sequence: Synthetic oligonucleotide
ggaucggcaucacauauuc

SEQ ID NO: 2218138 - RNA, 19 nt, Artificial Sequence
  Description of Artificial Sequence: Synthetic oligonucleotide
gucauggacccugagcgcc

SEQ ID NO: 2218139 - RNA, 19 nt, Artificial Sequence
  Description of Artificial Sequence: Synthetic oligonucleotide
gcaugaaauucaccaaagc

SEQ ID NO: 2218140 - RNA, 19 nt, Artificial Sequence
  Description of Artificial Sequence: Synthetic oligonucleotide
cagaacucuaagccagcag

SEQ ID NO: 2218141 - RNA, 19 nt, Artificial Sequence
  Description of Artificial Sequence: Synthetic oligonucleotide
auucaucccaaagacccga

SEQ ID NO: 2218142 - RNA, 19 nt, Artificial Sequence
  Description of Artificial Sequence: Synthetic oligonucleotide
aacacauccucgaauucuu

SEQ ID NO: 2218143 - RNA, 19 nt, Artificial Sequence
  Description of Artificial Sequence: Synthetic oligonucleotide
acacuaaaucuccggagua

SEQ ID NO: 2218144 - RNA, 19 nt, Artificial Sequence
  Description of Artificial Sequence: Synthetic oligonucleotide
auauucuugggugggccug

SEQ ID NO: 2218145 - RNA, 19 nt, Artificial Sequence
  Description of Artificial Sequence: Synthetic oligonucleotide
agaacccauaaaacagauc

SEQ ID NO: 2218146 - RNA, 19 nt, Artificial Sequence
  Description of Artificial Sequence: Synthetic oligonucleotide
cucgccugaguaucucagg

SEQ ID NO: 2218147 - RNA, 19 nt, Artificial Sequence
  Description of Artificial Sequence: Synthetic oligonucleotide
ucauggacccugagcgccc

SEQ ID NO: 2218148 - RNA, 19 nt, Artificial Sequence
  Description of Artificial Sequence: Synthetic oligonucleotide
agguuguaagugucagucu

SEQ ID NO: 2218149 - RNA, 19 nt, Artificial Sequence
  Description of Artificial Sequence: Synthetic oligonucleotide
uucaagaggaugugcccua

SEQ ID NO: 2218150 - RNA, 19 nt, Artificial Sequence
  Description of Artificial Sequence: Synthetic oligonucleotide
ugcgcugaggcucgccuga

SEQ ID NO: 2218151 - RNA, 19 nt, Artificial Sequence
  Description of Artificial Sequence: Synthetic oligonucleotide
cucgaauucuuuaccagua

SEQ ID NO: 2218152 - RNA, 19 nt, Artificial Sequence
  Description of Artificial Sequence: Synthetic oligonucleotide
gcugacuagguuguaagug

SEQ ID NO: 2218153 - RNA, 19 nt, Artificial Sequence
  Description of Artificial Sequence: Synthetic oligonucleotide
guugcuuggaccaggaggu

SEQ ID NO: 2218154 - RNA, 19 nt, Artificial Sequence
  Description of Artificial Sequence: Synthetic oligonucleotide
agggaacugaucugaguau

SEQ ID NO: 2218155 - RNA, 19 nt, Artificial Sequence
  Description of Artificial Sequence: Synthetic oligonucleotide
gaucaagcccaggaucggc

SEQ ID NO: 2218156 - RNA, 19 nt, Artificial Sequence
  Description of Artificial Sequence: Synthetic oligonucleotide
ucaagaggaugugcccuag

SEQ ID NO: 2218157 - RNA, 19 nt, Artificial Sequence
  Description of Artificial Sequence: Synthetic oligonucleotide
cuacauccacacuaaaucu

SEQ ID NO: 2218158 - RNA, 19 nt, Artificial Sequence
  Description of Artificial Sequence: Synthetic oligonucleotide
agugacauuaauggaccaa

SEQ ID NO: 2218159 - RNA, 19 nt, Artificial Sequence
  Description of Artificial Sequence: Synthetic oligonucleotide
agcaaccgaccuuucuucu

SEQ ID NO: 2218160 - RNA, 19 nt, Artificial Sequence
  Description of Artificial Sequence: Synthetic oligonucleotide
ugaggcucgccugaguauc

SEQ ID NO: 2218161 - RNA, 19 nt, Artificial Sequence
  Description of Artificial Sequence: Synthetic oligonucleotide
auagcguccucugaccaga

SEQ ID NO: 2218162 - RNA, 19 nt, Artificial Sequence
  Description of Artificial Sequence: Synthetic oligonucleotide
ccugacuuacaaaguacag

SEQ ID NO: 2218163 - RNA, 19 nt, Artificial Sequence
  Description of Artificial Sequence: Synthetic oligonucleotide
agaucaagcccaggaucgg

SEQ ID NO: 2218164 - RNA, 19 nt, Artificial Sequence
  Description of Artificial Sequence: Synthetic oligonucleotide
gaacacauccucgaauucu

SEQ ID NO: 2218165 - RNA, 19 nt, Artificial Sequence
  Description of Artificial Sequence: Synthetic oligonucleotide
aggaucagaguggcucggc

SEQ ID NO: 2218166 - RNA, 19 nt, Artificial Sequence
  Description of Artificial Sequence: Synthetic oligonucleotide
aaccucaaucagagagaac

SEQ ID NO: 2218167 - RNA, 19 nt, Artificial Sequence
  Description of Artificial Sequence: Synthetic oligonucleotide
gguaucaaccucaaucaga

SEQ ID NO: 2218168 - RNA, 19 nt, Artificial Sequence
  Description of Artificial Sequence: Synthetic oligonucleotide
ucaucccaaagacccgauc

SEQ ID NO: 2218169 - RNA, 19 nt, Artificial Sequence
  Description of Artificial Sequence: Synthetic oligonucleotide
uggaccaacuggaccaauu

SEQ ID NO: 2218170 - RNA, 19 nt, Artificial Sequence
  Description of Artificial Sequence: Synthetic oligonucleotide
uccucugaccagaacucua

SEQ ID NO: 2218171 - RNA, 19 nt, Artificial Sequence
  Description of Artificial Sequence: Synthetic oligonucleotide
aacccauaaaacagaucaa

SEQ ID NO: 2218172 - RNA, 19 nt, Artificial Sequence
  Description of Artificial Sequence: Synthetic oligonucleotide
ucucuugcccgguugccau

SEQ ID NO: 2218173 - RNA, 19 nt, Artificial Sequence
  Description of Artificial Sequence: Synthetic oligonucleotide
gagaaacuccagcaugucu

SEQ ID NO: 2218174 - RNA, 19 nt, Artificial Sequence
  Description of Artificial Sequence: Synthetic oligonucleotide
cauaagcuuacaggugaug

SEQ ID NO: 2218175 - RNA, 19 nt, Artificial Sequence
  Description of Artificial Sequence: Synthetic oligonucleotide
caagaggaugugcccuagg

SEQ ID NO: 2218176 - RNA, 19 nt, Artificial Sequence
  Description of Artificial Sequence: Synthetic oligonucleotide
aagacccgauccaggugcg

SEQ ID NO: 2218177 - RNA, 19 nt, Artificial Sequence
  Description of Artificial Sequence: Synthetic oligonucleotide
aguggcucggcugaggaua

SEQ ID NO: 2218178 - RNA, 19 nt, Artificial Sequence
  Description of Artificial Sequence: Synthetic oligonucleotide
acgucgggacugcucgucg

SEQ ID NO: 2218179 - RNA, 19 nt, Artificial Sequence
  Description of Artificial Sequence: Synthetic oligonucleotide
aaccgaccuuucuucuaga

SEQ ID NO: 2218180 - RNA, 19 nt, Artificial Sequence
  Description of Artificial Sequence: Synthetic oligonucleotide
cucugaccagaacucuaag

SEQ ID NO: 2218181 - RNA, 19 nt, Artificial Sequence
  Description of Artificial Sequence: Synthetic oligonucleotide
cuuccuacauccacacuaa

SEQ ID NO: 2218182 - RNA, 19 nt, Artificial Sequence
  Description of Artificial Sequence: Synthetic oligonucleotide
agccguucaguggacuggg

SEQ ID NO: 2218183 - RNA, 19 nt, Artificial Sequence
  Description of Artificial Sequence: Synthetic oligonucleotide
aaacgucgggacugcucgu

SEQ ID NO: 2218184 - RNA, 19 nt, Artificial Sequence
  Description of Artificial Sequence: Synthetic oligonucleotide
cuugggugggccugcccag

SEQ ID NO: 2218185 - RNA, 19 nt, Artificial Sequence
  Description of Artificial Sequence: Synthetic oligonucleotide
agugucagucugaggauca

SEQ ID NO: 2218186 - RNA, 19 nt, Artificial Sequence
  Description of Artificial Sequence: Synthetic oligonucleotide
cuuuggcuuuucaugcgca

SEQ ID NO: 2218187 - RNA, 19 nt, Artificial Sequence
  Description of Artificial Sequence: Synthetic oligonucleotide
cugcuagccguucagugga

SEQ ID NO: 2218188 - RNA, 19 nt, Artificial Sequence
  Description of Artificial Sequence: Synthetic oligonucleotide
gaccugguuugcugacuag

SEQ ID NO: 2218189 - RNA, 19 nt, Artificial Sequence
  Description of Artificial Sequence: Synthetic oligonucleotide
aauggaccaacuggaccaa

SEQ ID NO: 2218190 - RNA, 19 nt, Artificial Sequence
  Description of Artificial Sequence: Synthetic oligonucleotide
caauagcguccucugacca

SEQ ID NO: 2218191 - RNA, 19 nt, Artificial Sequence
  Description of Artificial Sequence: Synthetic oligonucleotide
uggcgugcuuucuuccuac

SEQ ID NO: 2218192 - RNA, 19 nt, Artificial Sequence
  Description of Artificial Sequence: Synthetic oligonucleotide
uuaccaguaugagccaaua

SEQ ID NO: 2218193 - RNA, 19 nt, Artificial Sequence
  Description of Artificial Sequence: Synthetic oligonucleotide
cacauauucuugggugggc

SEQ ID NO: 2218194 - RNA, 19 nt, Artificial Sequence
  Description of Artificial Sequence: Synthetic oligonucleotide
agcaugucugacugccgga

SEQ ID NO: 2218195 - RNA, 19 nt, Artificial Sequence
  Description of Artificial Sequence: Synthetic oligonucleotide
auagcucauccugauguau

SEQ ID NO: 2218196 - RNA, 19 nt, Artificial Sequence
  Description of Artificial Sequence: Synthetic oligonucleotide
ccucaaucagagagaaccc

SEQ ID NO: 2218197 - RNA, 19 nt, Artificial Sequence
  Description of Artificial Sequence: Synthetic oligonucleotide
agcguccucugaccagaac

SEQ ID NO: 2218198 - RNA, 19 nt, Artificial Sequence
  Description of Artificial Sequence: Synthetic oligonucleotide
gacuagguuguaaguguca

SEQ ID NO: 2218199 - RNA, 19 nt, Artificial Sequence
  Description of Artificial Sequence: Synthetic oligonucleotide
ugaggauauuugggaacac

SEQ ID NO: 2218200 - RNA, 19 nt, Artificial Sequence
  Description of Artificial Sequence: Synthetic oligonucleotide
cuugacacgguugcccauc

SEQ ID NO: 2218201 - RNA, 19 nt, Artificial Sequence
  Description of Artificial Sequence: Synthetic oligonucleotide
cacacuaaaucuccggagu

SEQ ID NO: 2218202 - RNA, 19 nt, Artificial Sequence
  Description of Artificial Sequence: Synthetic oligonucleotide
uuccuacauccacacuaaa

SEQ ID NO: 2218203 - RNA, 19 nt, Artificial Sequence
  Description of Artificial Sequence: Synthetic oligonucleotide
ugacacgguugcccaucag

SEQ ID NO: 2218204 - RNA, 19 nt, Artificial Sequence
  Description of Artificial Sequence: Synthetic oligonucleotide
gaugugcccuaggaccaag

SEQ ID NO: 2218205 - RNA, 19 nt, Artificial Sequence
  Description of Artificial Sequence: Synthetic oligonucleotide
gaacugaucugaguauucu

SEQ ID NO: 2218206 - RNA, 19 nt, Artificial Sequence
  Description of Artificial Sequence: Synthetic oligonucleotide
ugacugccggauagacccc

SEQ ID NO: 2218207 - RNA, 19 nt, Artificial Sequence
  Description of Artificial Sequence: Synthetic oligonucleotide
ccgaccuuucuucuagagg

SEQ ID NO: 2218208 - RNA, 19 nt, Artificial Sequence
  Description of Artificial Sequence: Synthetic oligonucleotide
ggacuggggaccugguuug

SEQ ID NO: 2218209 - RNA, 19 nt, Artificial Sequence
  Description of Artificial Sequence: Synthetic oligonucleotide
ggauauuugggaacacauc

SEQ ID NO: 2218210 - RNA, 19 nt, Artificial Sequence
  Description of Artificial Sequence: Synthetic oligonucleotide
cgcaugaaauucaccaaag

SEQ ID NO: 2218211 - RNA, 19 nt, Artificial Sequence
  Description of Artificial Sequence: Synthetic oligonucleotide
agccaauagcucauccuga

SEQ ID NO: 2218212 - RNA, 19 nt, Artificial Sequence
  Description of Artificial Sequence: Synthetic oligonucleotide
aggcucucuaacauuacuu

SEQ ID NO: 2218213 - RNA, 19 nt, Artificial Sequence
  Description of Artificial Sequence: Synthetic oligonucleotide
ccaguaugagccaauagcu

SEQ ID NO: 2218214 - RNA, 19 nt, Artificial Sequence
  Description of Artificial Sequence: Synthetic oligonucleotide
ugggcauguccagagucuc

SEQ ID NO: 2218215 - RNA, 19 nt, Artificial Sequence
  Description of Artificial Sequence: Synthetic oligonucleotide
gauggcgugcuuucuuccu

SEQ ID NO: 2218216 - RNA, 19 nt, Artificial Sequence
  Description of Artificial Sequence: Synthetic oligonucleotide
auccucugaggcucaucca

SEQ ID NO: 2218217 - RNA, 19 nt, Artificial Sequence
  Description of Artificial Sequence: Synthetic oligonucleotide
gagaccugcuuugggcaug

SEQ ID NO: 2218218 - RNA, 19 nt, Artificial Sequence
  Description of Artificial Sequence: Synthetic oligonucleotide
gagggucauggacccugag

SEQ ID NO: 2218219 - RNA, 19 nt, Artificial Sequence
  Description of Artificial Sequence: Synthetic oligonucleotide
cacauccucgaauucuuua

SEQ ID NO: 2218220 - RNA, 19 nt, Artificial Sequence
  Description of Artificial Sequence: Synthetic oligonucleotide
acccgauccaggugcgcug

SEQ ID NO: 2218221 - RNA, 19 nt, Artificial Sequence
  Description of Artificial Sequence: Synthetic oligonucleotide
cuaaaucuccggaguaagu

SEQ ID NO: 2218222 - RNA, 19 nt, Artificial Sequence
  Description of Artificial Sequence: Synthetic oligonucleotide
ggaacacauccucgaauuc

SEQ ID NO: 2218223 - RNA, 19 nt, Artificial Sequence
  Description of Artificial Sequence: Synthetic oligonucleotide
cucuaacauuacuugcucu

SEQ ID NO: 2218224 - RNA, 19 nt, Artificial Sequence
  Description of Artificial Sequence: Synthetic oligonucleotide
cggcaucacauauucuugg

SEQ ID NO: 2218225 - RNA, 19 nt, Artificial Sequence
  Description of Artificial Sequence: Synthetic oligonucleotide
cguucaguggacuggggac

SEQ ID NO: 2218226 - RNA, 19 nt, Artificial Sequence
  Description of Artificial Sequence: Synthetic oligonucleotide
augugcccuaggaccaagg

SEQ ID NO: 2218227 - RNA, 19 nt, Artificial Sequence
  Description of Artificial Sequence: Synthetic oligonucleotide
cccgguugccauucaagag

SEQ ID NO: 2218228 - RNA, 19 nt, Artificial Sequence
  Description of Artificial Sequence: Synthetic oligonucleotide
auggcgugcuuucuuccua

SEQ ID NO: 2218229 - RNA, 19 nt, Artificial Sequence
  Description of Artificial Sequence: Synthetic oligonucleotide
gcgcaugaaauucaccaaa

SEQ ID NO: 2218230 - RNA, 19 nt, Artificial Sequence
  Description of Artificial Sequence: Synthetic oligonucleotide
cuccggaguaaguuccaga

SEQ ID NO: 2218231 - RNA, 19 nt, Artificial Sequence
  Description of Artificial Sequence: Synthetic oligonucleotide
cacuaaaucuccggaguaa

SEQ ID NO: 2218232 - RNA, 19 nt, Artificial Sequence
  Description of Artificial Sequence: Synthetic oligonucleotide
agacccgauccaggugcgc

SEQ ID NO: 2218233 - RNA, 19 nt, Artificial Sequence
  Description of Artificial Sequence: Synthetic oligonucleotide
ugcuagccguucaguggac

SEQ ID NO: 2218234 - RNA, 19 nt, Artificial Sequence
  Description of Artificial Sequence: Synthetic oligonucleotide
uugcccgguugccauucaa

SEQ ID NO: 2218235 - RNA, 19 nt, Artificial Sequence
  Description of Artificial Sequence: Synthetic oligonucleotide
guguugauccucugaggcu

SEQ ID NO: 2218236 - RNA, 19 nt, Artificial Sequence
  Description of Artificial Sequence: Synthetic oligonucleotide
gccauucaagaggaugugc

SEQ ID NO: 2218237 - RNA, 19 nt, Artificial Sequence
  Description of Artificial Sequence: Synthetic oligonucleotide
ggaacugaucugaguauuc

SEQ ID NO: 2218238 - RNA, 19 nt, Artificial Sequence
  Description of Artificial Sequence: Synthetic oligonucleotide
guugucucauaagcuuaca

SEQ ID NO: 2218239 - RNA, 19 nt, Artificial Sequence
  Description of Artificial Sequence: Synthetic oligonucleotide
acucucagauucaucccaa

SEQ ID NO: 2218240 - RNA, 19 nt, Artificial Sequence
  Description of Artificial Sequence: Synthetic oligonucleotide
gccugacuuacaaaguaca

SEQ ID NO: 2218241 - RNA, 19 nt, Artificial Sequence
  Description of Artificial Sequence: Synthetic oligonucleotide
gaggcucauccaucacauc

SEQ ID NO: 2218242 - RNA, 19 nt, Artificial Sequence
  Description of Artificial Sequence: Synthetic oligonucleotide
gaccaaggccaggagaccu

SEQ ID NO: 2218243 - RNA, 19 nt, Artificial Sequence
  Description of Artificial Sequence: Synthetic oligonucleotide
ggaagaucaagcccaggau

SEQ ID NO: 2218244 - RNA, 19 nt, Artificial Sequence
  Description of Artificial Sequence: Synthetic oligonucleotide
caaagcaaccgaccuuucu

SEQ ID NO: 2218245 - RNA, 19 nt, Artificial Sequence
  Description of Artificial Sequence: Synthetic oligonucleotide
ccaauagcucauccugaug

SEQ ID NO: 2218246 - RNA, 19 nt, Artificial Sequence
  Description of Artificial Sequence: Synthetic oligonucleotide
gcguccucugaccagaacu

SEQ ID NO: 2218247 - RNA, 19 nt, Artificial Sequence
  Description of Artificial Sequence: Synthetic oligonucleotide
cguugucucauaagcuuac

SEQ ID NO: 2218248 - RNA, 19 nt, Artificial Sequence
  Description of Artificial Sequence: Synthetic oligonucleotide
ugauccucugaggcucauc

SEQ ID NO: 2218249 - RNA, 19 nt, Artificial Sequence
  Description of Artificial Sequence: Synthetic oligonucleotide
gaguauucucggagaaacu

SEQ ID NO: 2218250 - RNA, 19 nt, Artificial Sequence
  Description of Artificial Sequence: Synthetic oligonucleotide
cugauucugguugcuugga

SEQ ID NO: 2218251 - RNA, 19 nt, Artificial Sequence
  Description of Artificial Sequence: Synthetic oligonucleotide
cauggacccugagcgcccc

SEQ ID NO: 2218252 - RNA, 19 nt, Artificial Sequence
  Description of Artificial Sequence: Synthetic oligonucleotide
gcucgccugaguaucucag

SEQ ID NO: 2218253 - RNA, 19 nt, Artificial Sequence
  Description of Artificial Sequence: Synthetic oligonucleotide
cugaguauucucggagaaa

SEQ ID NO: 2218254 - RNA, 19 nt, Artificial Sequence
  Description of Artificial Sequence: Synthetic oligonucleotide
aucaaggaucagaguggcu

SEQ ID NO: 2218255 - RNA, 19 nt, Artificial Sequence
  Description of Artificial Sequence: Synthetic oligonucleotide
gcugaggcucgccugagua

SEQ ID NO: 2218256 - RNA, 19 nt, Artificial Sequence
  Description of Artificial Sequence: Synthetic oligonucleotide
aggaucggcaucacauauu

SEQ ID NO: 2218257 - RNA, 19 nt, Artificial Sequence
  Description of Artificial Sequence: Synthetic oligonucleotide
guguuccaagagguguuga

SEQ ID NO: 2218258 - RNA, 19 nt, Artificial Sequence
  Description of Artificial Sequence: Synthetic oligonucleotide
cucucuugcccgguugcca

SEQ ID NO: 2218259 - RNA, 19 nt, Artificial Sequence
  Description of Artificial Sequence: Synthetic oligonucleotide
ggagaaacuccagcauguc

SEQ ID NO: 2218260 - RNA, 19 nt, Artificial Sequence
  Description of Artificial Sequence: Synthetic oligonucleotide
cucggagaaacuccagcau

SEQ ID NO: 2218261 - RNA, 19 nt, Artificial Sequence
  Description of Artificial Sequence: Synthetic oligonucleotide
ccggaguaaguuccagaug

SEQ ID NO: 2218262 - RNA, 19 nt, Artificial Sequence
  Description of Artificial Sequence: Synthetic oligonucleotide
cauccaucacaucaaccuu

SEQ ID NO: 2218263 - RNA, 19 nt, Artificial Sequence
  Description of Artificial Sequence: Synthetic oligonucleotide
agagucucugcuagccguu

SEQ ID NO: 2218264 - RNA, 19 nt, Artificial Sequence
  Description of Artificial Sequence: Synthetic oligonucleotide
gguuugcugacuagguugu

SEQ ID NO: 2218265 - RNA, 19 nt, Artificial Sequence
  Description of Artificial Sequence: Synthetic oligonucleotide
ccaagagguguugauccuc

SEQ ID NO: 2218266 - RNA, 19 nt, Artificial Sequence
  Description of Artificial Sequence: Synthetic oligonucleotide
ccaauucauuugcuuuauc

SEQ ID NO: 2218267 - RNA, 19 nt, Artificial Sequence
  Description of Artificial Sequence: Synthetic oligonucleotide
caugucugacugccggaua

SEQ ID NO: 2218268 - RNA, 19 nt, Artificial Sequence
  Description of Artificial Sequence: Synthetic oligonucleotide
cagcaacuccucagugaca

SEQ ID NO: 2218269 - RNA, 19 nt, Artificial Sequence
  Description of Artificial Sequence: Synthetic oligonucleotide
ggccucucuugcccgguug

SEQ ID NO: 2218270 - RNA, 19 nt, Artificial Sequence
  Description of Artificial Sequence: Synthetic oligonucleotide
ccucgaauucuuuaccagu

SEQ ID NO: 2218271 - RNA, 19 nt, Artificial Sequence
  Description of Artificial Sequence: Synthetic oligonucleotide
gcucggcugaggauauuug

SEQ ID NO: 2218272 - RNA, 19 nt, Artificial Sequence
  Description of Artificial Sequence: Synthetic oligonucleotide
ggcucgccugaguaucuca

SEQ ID NO: 2218273 - RNA, 19 nt, Artificial Sequence
  Description of Artificial Sequence: Synthetic oligonucleotide
gaucggcaucacauauucu

SEQ ID NO: 2218274 - RNA, 19 nt, Artificial Sequence
  Description of Artificial Sequence: Synthetic oligonucleotide
uugcuuggaccaggaggua

SEQ ID NO: 2218275 - RNA, 19 nt, Artificial Sequence
  Description of Artificial Sequence: Synthetic oligonucleotide
cugguuugcugacuagguu

SEQ ID NO: 2218276 - RNA, 19 nt, Artificial Sequence
  Description of Artificial Sequence: Synthetic oligonucleotide
gaccccucacuuuggcuuu

SEQ ID NO: 2218277 - RNA, 19 nt, Artificial Sequence
  Description of Artificial Sequence: Synthetic oligonucleotide
gccaauagcucauccugau

SEQ ID NO: 2218278 - RNA, 19 nt, Artificial Sequence
  Description of Artificial Sequence: Synthetic oligonucleotide
ccguucaguggacugggga

SEQ ID NO: 2218279 - RNA, 19 nt, Artificial Sequence
  Description of Artificial Sequence: Synthetic oligonucleotide
gcaaccgaccuuucuucua

SEQ ID NO: 2218280 - RNA, 19 nt, Artificial Sequence
  Description of Artificial Sequence: Synthetic oligonucleotide
gacugccggauagaccccu

SEQ ID NO: 2218281 - RNA, 19 nt, Artificial Sequence
  Description of Artificial Sequence: Synthetic oligonucleotide
ggugcgcugaggcucgccu

SEQ ID NO: 2218282 - RNA, 19 nt, Artificial Sequence
  Description of Artificial Sequence: Synthetic oligonucleotide
ggugauggcgugcuuucuu

SEQ ID NO: 2218283 - RNA, 19 nt, Artificial Sequence
  Description of Artificial Sequence: Synthetic oligonucleotide
cugaggcucgccugaguau

SEQ ID NO: 2218284 - RNA, 19 nt, Artificial Sequence
  Description of Artificial Sequence: Synthetic oligonucleotide
gccggauagaccccucacu

SEQ ID NO: 2218285 - RNA, 19 nt, Artificial Sequence
  Description of Artificial Sequence: Synthetic oligonucleotide
cuugcccgguugccauuca

SEQ ID NO: 2218286 - RNA, 19 nt, Artificial Sequence
  Description of Artificial Sequence: Synthetic oligonucleotide
ggcgugcuuucuuccuaca

SEQ ID NO: 2218287 - RNA, 19 nt, Artificial Sequence
  Description of Artificial Sequence: Synthetic oligonucleotide
gaguggcucggcugaggau

SEQ ID NO: 2218288 - RNA, 19 nt, Artificial Sequence
  Description of Artificial Sequence: Synthetic oligonucleotide
gaggcucgccugaguaucu

SEQ ID NO: 2218289 - RNA, 19 nt, Artificial Sequence
  Description of Artificial Sequence: Synthetic oligonucleotide
ccucucuugcccgguugcc

SEQ ID NO: 2218290 - RNA, 19 nt, Artificial Sequence
  Description of Artificial Sequence: Synthetic oligonucleotide
gggaacugaucugaguauu

SEQ ID NO: 2218291 - RNA, 19 nt, Artificial Sequence
  Description of Artificial Sequence: Synthetic oligonucleotide
cuuuagcagcaggucccaa

SEQ ID NO: 2218292 - RNA, 19 nt, Artificial Sequence
  Description of Artificial Sequence: Synthetic oligonucleotide
aggccucucuugcccgguu

SEQ ID NO: 2218293 - RNA, 19 nt, Artificial Sequence
  Description of Artificial Sequence: Synthetic oligonucleotide
caguaguaaggagacucuu

SEQ ID NO: 2218294 - RNA, 19 nt, Artificial Sequence
  Description of Artificial Sequence: Synthetic oligonucleotide
gccguucaguggacugggg

SEQ ID NO: 2218295 - RNA, 19 nt, Artificial Sequence
  Description of Artificial Sequence: Synthetic oligonucleotide
ggagaccugcuuugggcau

SEQ ID NO: 2218296 - RNA, 19 nt, Artificial Sequence
  Description of Artificial Sequence: Synthetic oligonucleotide
ggcuuuucaugcgcaugaa

SEQ ID NO: 2218297 - RNA, 19 nt, Artificial Sequence
  Description of Artificial Sequence: Synthetic oligonucleotide
ccucacuuuggcuuuucau

SEQ ID NO: 2218298 - RNA, 19 nt, Artificial Sequence
  Description of Artificial Sequence: Synthetic oligonucleotide
gucccaaauggaggccucu

SEQ ID NO: 2218299 - RNA, 19 nt, Artificial Sequence
  Description of Artificial Sequence: Synthetic oligonucleotide
ccaacuggaccaauucauu

SEQ ID NO: 2218300 - RNA, 19 nt, Artificial Sequence
  Description of Artificial Sequence: Synthetic oligonucleotide
ccggauagaccccucacuu

SEQ ID NO: 2218301 - RNA, 19 nt, Artificial Sequence
  Description of Artificial Sequence: Synthetic oligonucleotide
ccaaauggaggccucucuu

SEQ ID NO: 2218302 - RNA, 19 nt, Artificial Sequence
  Description of Artificial Sequence: Synthetic oligonucleotide
cgccugaguaucucaggga

SEQ ID NO: 2218303 - RNA, 19 nt, Artificial Sequence
  Description of Artificial Sequence: Synthetic oligonucleotide
cccuaggaccaaggccagg

SEQ ID NO: 2218304 - RNA, 19 nt, Artificial Sequence
  Description of Artificial Sequence: Synthetic oligonucleotide
gcgugcuuucuuccuacau

SEQ ID NO: 2218305 - RNA, 19 nt, Artificial Sequence
  Description of Artificial Sequence: Synthetic oligonucleotide
gcaugucugacugccggau

SEQ ID NO: 2218306 - RNA, 19 nt, Artificial Sequence
  Description of Artificial Sequence: Synthetic oligonucleotide
ggaugugcccuaggaccaa

SEQ ID NO: 2218307 - RNA, 19 nt, Artificial Sequence
  Description of Artificial Sequence: Synthetic oligonucleotide
cccucacuuuggcuuuuca

SEQ ID NO: 2218308 - RNA, 19 nt, Artificial Sequence
  Description of Artificial Sequence: Synthetic oligonucleotide
ggaguaaguuccagauguu

SEQ ID NO: 2218309 - RNA, 19 nt, Artificial Sequence
  Description of Artificial Sequence: Synthetic oligonucleotide
ggcucggcugaggauauuu

SEQ ID NO: 2218310 - RNA, 19 nt, Artificial Sequence
  Description of Artificial Sequence: Synthetic oligonucleotide
accccucacuuuggcuuuu

SEQ ID NO: 2218311 - RNA, 19 nt, Artificial Sequence
  Description of Artificial Sequence: Synthetic oligonucleotide
caggugcgcugaggcucgc

SEQ ID NO: 2218312 - RNA, 19 nt, Artificial Sequence
  Description of Artificial Sequence: Synthetic oligonucleotide
guggcucggcugaggauau

SEQ ID NO: 2218313 - RNA, 19 nt, Artificial Sequence
  Description of Artificial Sequence: Synthetic oligonucleotide
ccgauccaggugcgcugag

SEQ ID NO: 2218314 - RNA, 19 nt, Artificial Sequence
  Description of Artificial Sequence: Synthetic oligonucleotide
gaccugcuuugggcauguc

SEQ ID NO: 2218315 - RNA, 19 nt, Artificial Sequence
  Description of Artificial Sequence: Synthetic oligonucleotide
cuagagggucauggacccu

SEQ ID NO: 2218316 - RNA, 19 nt, Artificial Sequence
  Description of Artificial Sequence: Synthetic oligonucleotide
gcuagccguucaguggacu

SEQ ID NO: 2218317 - RNA, 19 nt, Artificial Sequence
  Description of Artificial Sequence: Synthetic oligonucleotide
gcgcugaggcucgccugag

SEQ ID NO: 2218318 - RNA, 19 nt, Artificial Sequence
  Description of Artificial Sequence: Synthetic oligonucleotide
uggcucggcugaggauauu

SEQ ID NO: 2218319 - RNA, 19 nt, Artificial Sequence
  Description of Artificial Sequence: Synthetic oligonucleotide
cccgauccaggugcgcuga

SEQ ID NO: 2218320 - RNA, 19 nt, Artificial Sequence
  Description of Artificial Sequence: Synthetic oligonucleotide
gggcauguccagagucucu

SEQ ID NO: 2218321 - RNA, 19 nt, Artificial Sequence
  Description of Artificial Sequence: Synthetic oligonucleotide
cucuugcccgguugccauu

SEQ ID NO: 2218322 - RNA, 19 nt, Artificial Sequence
  Description of Artificial Sequence: Synthetic oligonucleotide
cgucgggacugcucgucga

SEQ ID NO: 2218323 - RNA, 19 nt, Artificial Sequence
  Description of Artificial Sequence: Synthetic oligonucleotide
gcaacuccucagugacauu

SEQ ID NO: 2218324 - RNA, 19 nt, Artificial Sequence
  Description of Artificial Sequence: Synthetic oligonucleotide
ccaaaacgucgggacugcu

SEQ ID NO: 2218325 - RNA, 19 nt, Artificial Sequence
  Description of Artificial Sequence: Synthetic oligonucleotide
cgcugaggcucgccugagu

SEQ ID NO: 2218326 - RNA, 19 nt, Artificial Sequence
  Description of Artificial Sequence: Synthetic oligonucleotide
auauuuaugagcuuuaucc

SEQ ID NO: 2218327 - RNA, 19 nt, Artificial Sequence
  Description of Artificial Sequence: Synthetic oligonucleotide
uaagaaauaauucagagga

SEQ ID NO: 2218328 - RNA, 19 nt, Artificial Sequence
  Description of Artificial Sequence: Synthetic oligonucleotide
uuuaccaucaaauuguggg

SEQ ID NO: 2218329 - RNA, 19 nt, Artificial Sequence
  Description of Artificial Sequence: Synthetic oligonucleotide
ugugauauaggaaucauag

SEQ ID NO: 2218330 - RNA, 19 nt, Artificial Sequence
  Description of Artificial Sequence: Synthetic oligonucleotide
uguaaauuccaucaaaacc

SEQ ID NO: 2218331 - RNA, 19 nt, Artificial Sequence
  Description of Artificial Sequence: Synthetic oligonucleotide
acuguaauaaaauacaugu

SEQ ID NO: 2218332 - RNA, 19 nt, Artificial Sequence
  Description of Artificial Sequence: Synthetic oligonucleotide
ucauagauauaaaacauag

SEQ ID NO: 2218333 - RNA, 19 nt, Artificial Sequence
  Description of Artificial Sequence: Synthetic oligonucleotide
aucaaaaccacuuugaaga

SEQ ID NO: 2218334 - RNA, 19 nt, Artificial Sequence
  Description of Artificial Sequence: Synthetic oligonucleotide
aaaacauaggcagagaaug

SEQ ID NO: 2218335 - RNA, 19 nt, Artificial Sequence
  Description of Artificial Sequence: Synthetic oligonucleotide
aauauguguaaauuccauc

SEQ ID NO: 2218336 - RNA, 19 nt, Artificial Sequence
  Description of Artificial Sequence: Synthetic oligonucleotide
ucuuguaccuauaaaaggc

SEQ ID NO: 2218337 - RNA, 19 nt, Artificial Sequence
  Description of Artificial Sequence: Synthetic oligonucleotide
guuuugaucauuucgauug

SEQ ID NO: 2218338 - RNA, 19 nt, Artificial Sequence
  Description of Artificial Sequence: Synthetic oligonucleotide
ucagauuauauuuaugagc

SEQ ID NO: 2218339 - RNA, 19 nt, Artificial Sequence
  Description of Artificial Sequence: Synthetic oligonucleotide
aaauuguggguuuccauac

SEQ ID NO: 2218340 - RNA, 19 nt, Artificial Sequence
  Description of Artificial Sequence: Synthetic oligonucleotide
uauguaaagccauuugugg

SEQ ID NO: 2218341 - RNA, 19 nt, Artificial Sequence
  Description of Artificial Sequence: Synthetic oligonucleotide
cuuuauccaaaauaguugg

SEQ ID NO: 2218342 - RNA, 19 nt, Artificial Sequence
  Description of Artificial Sequence: Synthetic oligonucleotide
gaaucauagauauaaaaca

SEQ ID NO: 2218343 - RNA, 19 nt, Artificial Sequence
  Description of Artificial Sequence: Synthetic oligonucleotide
ucaacuuuguuuuccaagg

SEQ ID NO: 2218344 - RNA, 19 nt, Artificial Sequence
  Description of Artificial Sequence: Synthetic oligonucleotide
uugucuauaauauacuuga

SEQ ID NO: 2218345 - RNA, 19 nt, Artificial Sequence
  Description of Artificial Sequence: Synthetic oligonucleotide
aauaauucagaggaggcag

SEQ ID NO: 2218346 - RNA, 19 nt, Artificial Sequence
  Description of Artificial Sequence: Synthetic oligonucleotide
ugaaaagugaccuucagau

SEQ ID NO: 2218347 - RNA, 19 nt, Artificial Sequence
  Description of Artificial Sequence: Synthetic oligonucleotide
caucauuugagucaggcgg

SEQ ID NO: 2218348 - RNA, 19 nt, Artificial Sequence
  Description of Artificial Sequence: Synthetic oligonucleotide
aaaagugaccuucagauua

SEQ ID NO: 2218349 - RNA, 19 nt, Artificial Sequence
  Description of Artificial Sequence: Synthetic oligonucleotide
aacuauuugucucauguga

SEQ ID NO: 2218350 - RNA, 19 nt, Artificial Sequence
  Description of Artificial Sequence: Synthetic oligonucleotide
ucuagguucacuucagagg

SEQ ID NO: 2218351 - RNA, 19 nt, Artificial Sequence
  Description of Artificial Sequence: Synthetic oligonucleotide
aagguguuaacagauuggc

SEQ ID NO: 2218352 - RNA, 19 nt, Artificial Sequence
  Description of Artificial Sequence: Synthetic oligonucleotide
acauguuuugaucauuucg

SEQ ID NO: 2218353 - RNA, 19 nt, Artificial Sequence
  Description of Artificial Sequence: Synthetic oligonucleotide
guaagaaauaauucagagg

SEQ ID NO: 2218354 - RNA, 19 nt, Artificial Sequence
  Description of Artificial Sequence: Synthetic oligonucleotide
acauguaagaaauaauuca

SEQ ID NO: 2218355 - RNA, 19 nt, Artificial Sequence
  Description of Artificial Sequence: Synthetic oligonucleotide
aaauaguugguaccaagug

SEQ ID NO: 2218356 - RNA, 19 nt, Artificial Sequence
  Description of Artificial Sequence: Synthetic oligonucleotide
auugcgaacacucugagau

SEQ ID NO: 2218357 - RNA, 19 nt, Artificial Sequence
  Description of Artificial Sequence: Synthetic oligonucleotide
uuugucuauaauauacuug

SEQ ID NO: 2218358 - RNA, 19 nt, Artificial Sequence
  Description of Artificial Sequence: Synthetic oligonucleotide
uguaccuauaaaaggcugg

SEQ ID NO: 2218359 - RNA, 19 nt, Artificial Sequence
  Description of Artificial Sequence: Synthetic oligonucleotide
guaacuuccuaacucaggg

SEQ ID NO: 2218360 - RNA, 19 nt, Artificial Sequence
  Description of Artificial Sequence: Synthetic oligonucleotide
aacauaggcagagaaugcc

SEQ ID NO: 2218361 - RNA, 19 nt, Artificial Sequence
  Description of Artificial Sequence: Synthetic oligonucleotide
agaaauaauucagaggagg

SEQ ID NO: 2218362 - RNA, 19 nt, Artificial Sequence
  Description of Artificial Sequence: Synthetic oligonucleotide
aacagauuggcccacacau

SEQ ID NO: 2218363 - RNA, 19 nt, Artificial Sequence
  Description of Artificial Sequence: Synthetic oligonucleotide
ucuaucacucuuuuggaag

SEQ ID NO: 2218364 - RNA, 19 nt, Artificial Sequence
  Description of Artificial Sequence: Synthetic oligonucleotide
caucauauggagaauugcg

SEQ ID NO: 2218365 - RNA, 19 nt, Artificial Sequence
  Description of Artificial Sequence: Synthetic oligonucleotide
uauucuaggaucccagugc

SEQ ID NO: 2218366 - RNA, 19 nt, Artificial Sequence
  Description of Artificial Sequence: Synthetic oligonucleotide
guaaauuccaucaaaacca

SEQ ID NO: 2218367 - RNA, 19 nt, Artificial Sequence
  Description of Artificial Sequence: Synthetic oligonucleotide
aacaauccaucauauggag

SEQ ID NO: 2218368 - RNA, 19 nt, Artificial Sequence
  Description of Artificial Sequence: Synthetic oligonucleotide
agagcuguaacuuccuaac

SEQ ID NO: 2218369 - RNA, 19 nt, Artificial Sequence
  Description of Artificial Sequence: Synthetic oligonucleotide
auccaaaauaguugguacc

SEQ ID NO: 2218370 - RNA, 19 nt, Artificial Sequence
  Description of Artificial Sequence: Synthetic oligonucleotide
cuagguucacuucagaggc

SEQ ID NO: 2218371 - RNA, 19 nt, Artificial Sequence
  Description of Artificial Sequence: Synthetic oligonucleotide
cacucugagauccugaagg

SEQ ID NO: 2218372 - RNA, 19 nt, Artificial Sequence
  Description of Artificial Sequence: Synthetic oligonucleotide
uucagauuauauuuaugag

SEQ ID NO: 2218373 - RNA, 19 nt, Artificial Sequence
  Description of Artificial Sequence: Synthetic oligonucleotide
auauacuugacauuuguau

SEQ ID NO: 2218374 - RNA, 19 nt, Artificial Sequence
  Description of Artificial Sequence: Synthetic oligonucleotide
gaguauguaucccuugugg

SEQ ID NO: 2218375 - RNA, 19 nt, Artificial Sequence
  Description of Artificial Sequence: Synthetic oligonucleotide
auauaggaaucauagauau

SEQ ID NO: 2218376 - RNA, 19 nt, Artificial Sequence
  Description of Artificial Sequence: Synthetic oligonucleotide
aauuguggguuuccauacc

SEQ ID NO: 2218377 - RNA, 19 nt, Artificial Sequence
  Description of Artificial Sequence: Synthetic oligonucleotide
ugcuauauggcucuacgug

SEQ ID NO: 2218378 - RNA, 19 nt, Artificial Sequence
  Description of Artificial Sequence: Synthetic oligonucleotide
ugcaauaaacaauccauca

SEQ ID NO: 2218379 - RNA, 19 nt, Artificial Sequence
  Description of Artificial Sequence: Synthetic oligonucleotide
uuaagccaucaucagagag

SEQ ID NO: 2218380 - RNA, 19 nt, Artificial Sequence
  Description of Artificial Sequence: Synthetic oligonucleotide
cauuucgauugcuauaugg

SEQ ID NO: 2218381 - RNA, 19 nt, Artificial Sequence
  Description of Artificial Sequence: Synthetic oligonucleotide
gguguuaacagauuggccc

SEQ ID NO: 2218382 - RNA, 19 nt, Artificial Sequence
  Description of Artificial Sequence: Synthetic oligonucleotide
auuucgauugcuauauggc

SEQ ID NO: 2218383 - RNA, 19 nt, Artificial Sequence
  Description of Artificial Sequence: Synthetic oligonucleotide
uacauguaagaaauaauuc

SEQ ID NO: 2218384 - RNA, 19 nt, Artificial Sequence
  Description of Artificial Sequence: Synthetic oligonucleotide
uaauauacuugacauuugu

SEQ ID NO: 2218385 - RNA, 19 nt, Artificial Sequence
  Description of Artificial Sequence: Synthetic oligonucleotide
uguguaaauuccaucaaaa

SEQ ID NO: 2218386 - RNA, 19 nt, Artificial Sequence
  Description of Artificial Sequence: Synthetic oligonucleotide
ucuaugacaggaagggucc

SEQ ID NO: 2218387 - RNA, 19 nt, Artificial Sequence
  Description of Artificial Sequence: Synthetic oligonucleotide
uugucuuguaccuauaaaa

SEQ ID NO: 2218388 - RNA, 19 nt, Artificial Sequence
  Description of Artificial Sequence: Synthetic oligonucleotide
ucucaugugaguuucuaug

SEQ ID NO: 2218389 - RNA, 19 nt, Artificial Sequence
  Description of Artificial Sequence: Synthetic oligonucleotide
cuucagauuauauuuauga

SEQ ID NO: 2218390 - RNA, 19 nt, Artificial Sequence
  Description of Artificial Sequence: Synthetic oligonucleotide
uauuuaugagcuuuaucca

SEQ ID NO: 2218391 - RNA, 19 nt, Artificial Sequence
  Description of Artificial Sequence: Synthetic oligonucleotide
uacuagaagugcaauaaac

SEQ ID NO: 2218392 - RNA, 19 nt, Artificial Sequence
  Description of Artificial Sequence: Synthetic oligonucleotide
auauuuaccaucaaauugu

SEQ ID NO: 2218393 - RNA, 19 nt, Artificial Sequence
  Description of Artificial Sequence: Synthetic oligonucleotide
uguaacuuccuaacucagg

SEQ ID NO: 2218394 - RNA, 19 nt, Artificial Sequence
  Description of Artificial Sequence: Synthetic oligonucleotide
  modified_base (8)..(8): a, c, u, g, unknown or other
caaaaggnguuccaaaggc

SEQ ID NO: 2218395 - RNA, 19 nt, Artificial Sequence
  Description of Artificial Sequence: Synthetic oligonucleotide
uaggcuuugugauauagga

SEQ ID NO: 2218396 - RNA, 19 nt, Artificial Sequence
  Description of Artificial Sequence: Synthetic oligonucleotide
agcuguaacuuccuaacuc

SEQ ID NO: 2218397 - RNA, 19 nt, Artificial Sequence
  Description of Artificial Sequence: Synthetic oligonucleotide
uucuaugacaggaaggguc

SEQ ID NO: 2218398 - RNA, 19 nt, Artificial Sequence
  Description of Artificial Sequence: Synthetic oligonucleotide
agaaggucaaguccaaaag

SEQ ID NO: 2218399 - RNA, 19 nt, Artificial Sequence
  Description of Artificial Sequence: Synthetic oligonucleotide
gucuuguaccuauaaaagg

SEQ ID NO: 2218400 - RNA, 19 nt, Artificial Sequence
  Description of Artificial Sequence: Synthetic oligonucleotide
ucuacgugaaaagugaccu

SEQ ID NO: 2218401 - RNA, 19 nt, Artificial Sequence
  Description of Artificial Sequence: Synthetic oligonucleotide
uuaggcuuugugauauagg

SEQ ID NO: 2218402 - RNA, 19 nt, Artificial Sequence
  Description of Artificial Sequence: Synthetic oligonucleotide
uauccaaaauaguugguac

SEQ ID NO: 2218403 - RNA, 19 nt, Artificial Sequence
  Description of Artificial Sequence: Synthetic oligonucleotide
gaaauaauucagaggaggc

SEQ ID NO: 2218404 - RNA, 19 nt, Artificial Sequence
  Description of Artificial Sequence: Synthetic oligonucleotide
ucuuuaagccaucaucaga

SEQ ID NO: 2218405 - RNA, 19 nt, Artificial Sequence
  Description of Artificial Sequence: Synthetic oligonucleotide
uccaguguauauauuuacc

SEQ ID NO: 2218406 - RNA, 19 nt, Artificial Sequence
  Description of Artificial Sequence: Synthetic oligonucleotide
ugaccuucagauuauauuu

SEQ ID NO: 2218407 - RNA, 19 nt, Artificial Sequence
  Description of Artificial Sequence: Synthetic oligonucleotide
uggagaauugcgaacacuc

SEQ ID NO: 2218408 - RNA, 19 nt, Artificial Sequence
  Description of Artificial Sequence: Synthetic oligonucleotide
uucuagguucacuucagag

SEQ ID NO: 2218409 - RNA, 19 nt, Artificial Sequence
  Description of Artificial Sequence: Synthetic oligonucleotide
uccauguugauucuaucac

SEQ ID NO: 2218410 - RNA, 19 nt, Artificial Sequence
  Description of Artificial Sequence: Synthetic oligonucleotide
caggguagaaacuggagcc

SEQ ID NO: 2218411 - RNA, 19 nt, Artificial Sequence
  Description of Artificial Sequence: Synthetic oligonucleotide
aaggcugauguauuggccu

SEQ ID NO: 2218412 - RNA, 19 nt, Artificial Sequence
  Description of Artificial Sequence: Synthetic oligonucleotide
accacuuugaagaauauca

SEQ ID NO: 2218413 - RNA, 19 nt, Artificial Sequence
  Description of Artificial Sequence: Synthetic oligonucleotide
uuuguauacauguuuugau

SEQ ID NO: 2218414 - RNA, 19 nt, Artificial Sequence
  Description of Artificial Sequence: Synthetic oligonucleotide
aaaggcugauguauuggcc

SEQ ID NO: 2218415 - RNA, 19 nt, Artificial Sequence
  Description of Artificial Sequence: Synthetic oligonucleotide
ucaucauuugagucaggcg

SEQ ID NO: 2218416 - RNA, 19 nt, Artificial Sequence
  Description of Artificial Sequence: Synthetic oligonucleotide
ucuacuagaagugcaauaa

SEQ ID NO: 2218417 - RNA, 19 nt, Artificial Sequence
  Description of Artificial Sequence: Synthetic oligonucleotide
aagaaagggccaguacucc

SEQ ID NO: 2218418 - RNA, 19 nt, Artificial Sequence
  Description of Artificial Sequence: Synthetic oligonucleotide
aaaauaguugguaccaagu

SEQ ID NO: 2218419 - RNA, 19 nt, Artificial Sequence
  Description of Artificial Sequence: Synthetic oligonucleotide
auguauuggccucagcauc

SEQ ID NO: 2218420 - RNA, 19 nt, Artificial Sequence
  Description of Artificial Sequence: Synthetic oligonucleotide
caucaaaaccacuuugaag

SEQ ID NO: 2218421 - RNA, 19 nt, Artificial Sequence
  Description of Artificial Sequence: Synthetic oligonucleotide
aaauaauucagaggaggca

SEQ ID NO: 2218422 - RNA, 19 nt, Artificial Sequence
  Description of Artificial Sequence: Synthetic oligonucleotide
uggguuuccauaccaacug

SEQ ID NO: 2218423 - RNA, 19 nt, Artificial Sequence
  Description of Artificial Sequence: Synthetic oligonucleotide
  modified_base (6)..(6): a, c, u, g, unknown or other
aaaggnguuccaaaggcug

SEQ ID NO: 2218424 - RNA, 19 nt, Artificial Sequence
  Description of Artificial Sequence: Synthetic oligonucleotide
uuucgauugcuauauggcu

SEQ ID NO: 2218425 - RNA, 19 nt, Artificial Sequence
  Description of Artificial Sequence: Synthetic oligonucleotide
agaggcuuuagguggcugc

SEQ ID NO: 2218426 - RNA, 19 nt, Artificial Sequence
  Description of Artificial Sequence: Synthetic oligonucleotide
gauuggcccacacauuagg

SEQ ID NO: 2218427 - RNA, 19 nt, Artificial Sequence
  Description of Artificial Sequence: Synthetic oligonucleotide
ugagcaacuauuugucuca

SEQ ID NO: 2218428 - RNA, 19 nt, Artificial Sequence
  Description of Artificial Sequence: Synthetic oligonucleotide
auuugagucaggcggguag

SEQ ID NO: 2218429 - RNA, 19 nt, Artificial Sequence
  Description of Artificial Sequence: Synthetic oligonucleotide
gagaauugcgaacacucug

SEQ ID NO: 2218430 - RNA, 19 nt, Artificial Sequence
  Description of Artificial Sequence: Synthetic oligonucleotide
uuguggauaguucuuggcu

SEQ ID NO: 2218431 - RNA, 19 nt, Artificial Sequence
  Description of Artificial Sequence: Synthetic oligonucleotide
cauguuuugaucauuucga

SEQ ID NO: 2218432 - RNA, 19 nt, Artificial Sequence
  Description of Artificial Sequence: Synthetic oligonucleotide
aauuccaucaaaaccacuu

SEQ ID NO: 2218433 - RNA, 19 nt, Artificial Sequence
  Description of Artificial Sequence: Synthetic oligonucleotide
caaaauaguugguaccaag

SEQ ID NO: 2218434 - RNA, 19 nt, Artificial Sequence
  Description of Artificial Sequence: Synthetic oligonucleotide
ucuaggaucccagugcucc

SEQ ID NO: 2218435 - RNA, 19 nt, Artificial Sequence
  Description of Artificial Sequence: Synthetic oligonucleotide
  modified_base (19)..(19): a, c, u, g, unknown or other
aaggucaaguccaaaaggn

SEQ ID NO: 2218436 - RNA, 19 nt, Artificial Sequence
  Description of Artificial Sequence: Synthetic oligonucleotide
gaagguguuaacagauugg

SEQ ID NO: 2218437 - RNA, 19 nt, Artificial Sequence
  Description of Artificial Sequence: Synthetic oligonucleotide
uauuuaccaucaaauugug

SEQ ID NO: 2218438 - RNA, 19 nt, Artificial Sequence
  Description of Artificial Sequence: Synthetic oligonucleotide
uaaauuccaucaaaaccac

SEQ ID NO: 2218439 - RNA, 19 nt, Artificial Sequence
  Description of Artificial Sequence: Synthetic oligonucleotide
uauggcucuacgugaaaag

SEQ ID NO: 2218440 - RNA, 19 nt, Artificial Sequence
  Description of Artificial Sequence: Synthetic oligonucleotide
acaggaagggucccgagag

SEQ ID NO: 2218441 - RNA, 19 nt, Artificial Sequence
  Description of Artificial Sequence: Synthetic oligonucleotide
uccaaaauaguugguacca

SEQ ID NO: 2218442 - RNA, 19 nt, Artificial Sequence
  Description of Artificial Sequence: Synthetic oligonucleotide
ucauauggagaauugcgaa

SEQ ID NO: 2218443 - RNA, 19 nt, Artificial Sequence
  Description of Artificial Sequence: Synthetic oligonucleotide
cagauuauauuuaugagcu

SEQ ID NO: 2218444 - RNA, 19 nt, Artificial Sequence
  Description of Artificial Sequence: Synthetic oligonucleotide
gucuauaauauacuugaca

SEQ ID NO: 2218445 - RNA, 19 nt, Artificial Sequence
  Description of Artificial Sequence: Synthetic oligonucleotide
gaaacuggagccaauguca

SEQ ID NO: 2218446 - RNA, 19 nt, Artificial Sequence
  Description of Artificial Sequence: Synthetic oligonucleotide
aaaaccacuuugaagaaua

SEQ ID NO: 2218447 - RNA, 19 nt, Artificial Sequence
  Description of Artificial Sequence: Synthetic oligonucleotide
uucgauugcuauauggcuc

SEQ ID NO: 2218448 - RNA, 19 nt, Artificial Sequence
  Description of Artificial Sequence: Synthetic oligonucleotide
  modified_base (7)..(7): a, c, u, g, unknown or other
aaaaggnguuccaaaggcu

SEQ ID NO: 2218449 - RNA, 19 nt, Artificial Sequence
  Description of Artificial Sequence: Synthetic oligonucleotide
aguacuccaauugaggcug

SEQ ID NO: 2218450 - RNA, 19 nt, Artificial Sequence
  Description of Artificial Sequence: Synthetic oligonucleotide
cauguugauucuaucacuc

SEQ ID NO: 2218451 - RNA, 19 nt, Artificial Sequence
  Description of Artificial Sequence: Synthetic oligonucleotide
uuuugaucauuucgauugc

SEQ ID NO: 2218452 - RNA, 19 nt, Artificial Sequence
  Description of Artificial Sequence: Synthetic oligonucleotide
uccaucauauggagaauug

SEQ ID NO: 2218453 - RNA, 19 nt, Artificial Sequence
  Description of Artificial Sequence: Synthetic oligonucleotide
auauguaaagccauuugug

SEQ ID NO: 2218454 - RNA, 19 nt, Artificial Sequence
  Description of Artificial Sequence: Synthetic oligonucleotide
agugcaauaaacaauccau

SEQ ID NO: 2218455 - RNA, 19 nt, Artificial Sequence
  Description of Artificial Sequence: Synthetic oligonucleotide
uucuucuacuagaagugca

SEQ ID NO: 2218456 - RNA, 19 nt, Artificial Sequence
  Description of Artificial Sequence: Synthetic oligonucleotide
guaccaagugaucaguagc

SEQ ID NO: 2218457 - RNA, 19 nt, Artificial Sequence
  Description of Artificial Sequence: Synthetic oligonucleotide
uuccauaccaacuguaaua

SEQ ID NO: 2218458 - RNA, 19 nt, Artificial Sequence
  Description of Artificial Sequence: Synthetic oligonucleotide
acacauuaggcuuugugau

SEQ ID NO: 2218459 - RNA, 19 nt, Artificial Sequence
  Description of Artificial Sequence: Synthetic oligonucleotide
uuaccaucaaauugugggu

SEQ ID NO: 2218460 - RNA, 19 nt, Artificial Sequence
  Description of Artificial Sequence: Synthetic oligonucleotide
caaaggcugauguauuggc

SEQ ID NO: 2218461 - RNA, 19 nt, Artificial Sequence
  Description of Artificial Sequence: Synthetic oligonucleotide
ucuucuacuagaagugcaa

SEQ ID NO: 2218462 - RNA, 19 nt, Artificial Sequence
  Description of Artificial Sequence: Synthetic oligonucleotide
uguggcaaaauauguguaa

SEQ ID NO: 2218463 - RNA, 19 nt, Artificial Sequence
  Description of Artificial Sequence: Synthetic oligonucleotide
ugaucauuucgauugcuau

SEQ ID NO: 2218464 - RNA, 19 nt, Artificial Sequence
  Description of Artificial Sequence: Synthetic oligonucleotide
uauaaaaggcuggauggcu

SEQ ID NO: 2218465 - RNA, 19 nt, Artificial Sequence
  Description of Artificial Sequence: Synthetic oligonucleotide
acuagaagugcaauaaaca

SEQ ID NO: 2218466 - RNA, 19 nt, Artificial Sequence
  Description of Artificial Sequence: Synthetic oligonucleotide
cauauggagaauugcgaac

SEQ ID NO: 2218467 - RNA, 19 nt, Artificial Sequence
  Description of Artificial Sequence: Synthetic oligonucleotide
ugcgaacacucugagaucc

SEQ ID NO: 2218468 - RNA, 19 nt, Artificial Sequence
  Description of Artificial Sequence: Synthetic oligonucleotide
cuagaagugcaauaaacaa

SEQ ID NO: 2218469 - RNA, 19 nt, Artificial Sequence
  Description of Artificial Sequence: Synthetic oligonucleotide
uuuauccaaaauaguuggu

SEQ ID NO: 2218470 - RNA, 19 nt, Artificial Sequence
  Description of Artificial Sequence: Synthetic oligonucleotide
aagucaacuuuguuuucca

SEQ ID NO: 2218471 - RNA, 19 nt, Artificial Sequence
  Description of Artificial Sequence: Synthetic oligonucleotide
uuuagguggcugcacaguc

SEQ ID NO: 2218472 - RNA, 19 nt, Artificial Sequence
  Description of Artificial Sequence: Synthetic oligonucleotide
guugguaccaagugaucag

SEQ ID NO: 2218473 - RNA, 19 nt, Artificial Sequence
  Description of Artificial Sequence: Synthetic oligonucleotide
caggcggguagcaagaaag

SEQ ID NO: 2218474 - RNA, 19 nt, Artificial Sequence
  Description of Artificial Sequence: Synthetic oligonucleotide
auauggagaauugcgaaca

SEQ ID NO: 2218475 - RNA, 19 nt, Artificial Sequence
  Description of Artificial Sequence: Synthetic oligonucleotide
uuccaguguauauauuuac

SEQ ID NO: 2218476 - RNA, 19 nt, Artificial Sequence
  Description of Artificial Sequence: Synthetic oligonucleotide
acauaggcagagaaugccc

SEQ ID NO: 2218477 - RNA, 19 nt, Artificial Sequence
  Description of Artificial Sequence: Synthetic oligonucleotide
uuauccaaaauaguuggua

SEQ ID NO: 2218478 - RNA, 19 nt, Artificial Sequence
  Description of Artificial Sequence: Synthetic oligonucleotide
guguaaauuccaucaaaac

SEQ ID NO: 2218479 - RNA, 19 nt, Artificial Sequence
  Description of Artificial Sequence: Synthetic oligonucleotide
aauucagaggaggcaguuc

SEQ ID NO: 2218480 - RNA, 19 nt, Artificial Sequence
  Description of Artificial Sequence: Synthetic oligonucleotide
ucaugugaguuucuaugac

SEQ ID NO: 2218481 - RNA, 19 nt, Artificial Sequence
  Description of Artificial Sequence: Synthetic oligonucleotide
uggcucuacgugaaaagug

SEQ ID NO: 2218482 - RNA, 19 nt, Artificial Sequence
  Description of Artificial Sequence: Synthetic oligonucleotide
ucgauugcuauauggcucu

SEQ ID NO: 2218483 - RNA, 19 nt, Artificial Sequence
  Description of Artificial Sequence: Synthetic oligonucleotide
gauauaaaacauaggcaga

SEQ ID NO: 2218484 - RNA, 19 nt, Artificial Sequence
  Description of Artificial Sequence: Synthetic oligonucleotide
gaauugcgaacacucugag

SEQ ID NO: 2218485 - RNA, 19 nt, Artificial Sequence
  Description of Artificial Sequence: Synthetic oligonucleotide
auuaggcuuugugauauag

SEQ ID NO: 2218486 - RNA, 19 nt, Artificial Sequence
  Description of Artificial Sequence: Synthetic oligonucleotide
uguggauaguucuuggcua

SEQ ID NO: 2218487 - RNA, 19 nt, Artificial Sequence
  Description of Artificial Sequence: Synthetic oligonucleotide
cuauucuaggaucccagug

SEQ ID NO: 2218488 - RNA, 19 nt, Artificial Sequence
  Description of Artificial Sequence: Synthetic oligonucleotide
cucuacgugaaaagugacc

SEQ ID NO: 2218489 - RNA, 19 nt, Artificial Sequence
  Description of Artificial Sequence: Synthetic oligonucleotide
caagaaagggccaguacuc

SEQ ID NO: 2218490 - RNA, 19 nt, Artificial Sequence
  Description of Artificial Sequence: Synthetic oligonucleotide
cacacauuaggcuuuguga

SEQ ID NO: 2218491 - RNA, 19 nt, Artificial Sequence
  Description of Artificial Sequence: Synthetic oligonucleotide
cuuguggauaguucuuggc

SEQ ID NO: 2218492 - RNA, 19 nt, Artificial Sequence
  Description of Artificial Sequence: Synthetic oligonucleotide
aauugcgaacacucugaga

SEQ ID NO: 2218493 - RNA, 19 nt, Artificial Sequence
  Description of Artificial Sequence: Synthetic oligonucleotide
auucuaggaucccagugcu

SEQ ID NO: 2218494 - RNA, 19 nt, Artificial Sequence
  Description of Artificial Sequence: Synthetic oligonucleotide
aacacucugagauccugaa

SEQ ID NO: 2218495 - RNA, 19 nt, Artificial Sequence
  Description of Artificial Sequence: Synthetic oligonucleotide
cugagcaacuauuugucuc

SEQ ID NO: 2218496 - RNA, 19 nt, Artificial Sequence
  Description of Artificial Sequence: Synthetic oligonucleotide
ccuaacucaggguagaaac

SEQ ID NO: 2218497 - RNA, 19 nt, Artificial Sequence
  Description of Artificial Sequence: Synthetic oligonucleotide
uuucuucuacuagaagugc

SEQ ID NO: 2218498 - RNA, 19 nt, Artificial Sequence
  Description of Artificial Sequence: Synthetic oligonucleotide
gagccaaugucaucuggag

SEQ ID NO: 2218499 - RNA, 19 nt, Artificial Sequence
  Description of Artificial Sequence: Synthetic oligonucleotide
agggccaguacuccaauug

SEQ ID NO: 2218500 - RNA, 19 nt, Artificial Sequence
  Description of Artificial Sequence: Synthetic oligonucleotide
agccaaugucaucuggagg

SEQ ID NO: 2218501 - RNA, 19 nt, Artificial Sequence
  Description of Artificial Sequence: Synthetic oligonucleotide
cuccaauugaggcugagca

SEQ ID NO: 2218502 - RNA, 19 nt, Artificial Sequence
  Description of Artificial Sequence: Synthetic oligonucleotide
agcuuuuaaauccuuugua

SEQ ID NO: 2218503 - RNA, 19 nt, Artificial Sequence
  Description of Artificial Sequence: Synthetic oligonucleotide
agauccugaagguguuaac

SEQ ID NO: 2218504 - RNA, 19 nt, Artificial Sequence
  Description of Artificial Sequence: Synthetic oligonucleotide
aucccuuguggauaguucu

SEQ ID NO: 2218505 - RNA, 19 nt, Artificial Sequence
  Description of Artificial Sequence: Synthetic oligonucleotide
aguugguaccaagugauca

SEQ ID NO: 2218506 - RNA, 19 nt, Artificial Sequence
  Description of Artificial Sequence: Synthetic oligonucleotide
gauuccaguguauauauuu

SEQ ID NO: 2218507 - RNA, 19 nt, Artificial Sequence
  Description of Artificial Sequence: Synthetic oligonucleotide
uggaggaguauguaucccu

SEQ ID NO: 2218508 - RNA, 19 nt, Artificial Sequence
  Description of Artificial Sequence: Synthetic oligonucleotide
auuggcccacacauuaggc

SEQ ID NO: 2218509 - RNA, 19 nt, Artificial Sequence
  Description of Artificial Sequence: Synthetic oligonucleotide
uguuuugaucauuucgauu

SEQ ID NO: 2218510 - RNA, 19 nt, Artificial Sequence
  Description of Artificial Sequence: Synthetic oligonucleotide
uaugacaggaagggucccg

SEQ ID NO: 2218511 - RNA, 19 nt, Artificial Sequence
  Description of Artificial Sequence: Synthetic oligonucleotide
aggaguauguaucccuugu

SEQ ID NO: 2218512 - RNA, 19 nt, Artificial Sequence
  Description of Artificial Sequence: Synthetic oligonucleotide
uucuaucacucuuuuggaa

SEQ ID NO: 2218513 - RNA, 19 nt, Artificial Sequence
  Description of Artificial Sequence: Synthetic oligonucleotide
auguaucccuuguggauag

SEQ ID NO: 2218514 - RNA, 19 nt, Artificial Sequence
  Description of Artificial Sequence: Synthetic oligonucleotide
aucauuugagucaggcggg

SEQ ID NO: 2218515 - RNA, 19 nt, Artificial Sequence
  Description of Artificial Sequence: Synthetic oligonucleotide
agaaugcccaguccuuguc

SEQ ID NO: 2218516 - RNA, 19 nt, Artificial Sequence
  Description of Artificial Sequence: Synthetic oligonucleotide
  modified_base (14)..(14): a, c, u, g, unknown or other
caaguccaaaaggnguucc

SEQ ID NO: 2218517 - RNA, 19 nt, Artificial Sequence
  Description of Artificial Sequence: Synthetic oligonucleotide
uucuacuagaagugcaaua

SEQ ID NO: 2218518 - RNA, 19 nt, Artificial Sequence
  Description of Artificial Sequence: Synthetic oligonucleotide
agguguuaacagauuggcc

SEQ ID NO: 2218519 - RNA, 19 nt, Artificial Sequence
  Description of Artificial Sequence: Synthetic oligonucleotide
uauggagaauugcgaacac

SEQ ID NO: 2218520 - RNA, 19 nt, Artificial Sequence
  Description of Artificial Sequence: Synthetic oligonucleotide
uauguaucccuuguggaua

SEQ ID NO: 2218521 - RNA, 19 nt, Artificial Sequence
  Description of Artificial Sequence: Synthetic oligonucleotide
gaugauuccaguguauaua

SEQ ID NO: 2218522 - RNA, 19 nt, Artificial Sequence
  Description of Artificial Sequence: Synthetic oligonucleotide
aucauauggagaauugcga

SEQ ID NO: 2218523 - RNA, 19 nt, Artificial Sequence
  Description of Artificial Sequence: Synthetic oligonucleotide
gaggcugagcaacuauuug

SEQ ID NO: 2218524 - RNA, 19 nt, Artificial Sequence
  Description of Artificial Sequence: Synthetic oligonucleotide
uaucccuuguggauaguuc

SEQ ID NO: 2218525 - RNA, 19 nt, Artificial Sequence
  Description of Artificial Sequence: Synthetic oligonucleotide
agaauugcgaacacucuga

SEQ ID NO: 2218526 - RNA, 19 nt, Artificial Sequence
  Description of Artificial Sequence: Synthetic oligonucleotide
cauauguaaagccauuugu

SEQ ID NO: 2218527 - RNA, 19 nt, Artificial Sequence
  Description of Artificial Sequence: Synthetic oligonucleotide
acuccaauugaggcugagc

SEQ ID NO: 2218528 - RNA, 19 nt, Artificial Sequence
  Description of Artificial Sequence: Synthetic oligonucleotide
caacuauuugucucaugug

SEQ ID NO: 2218529 - RNA, 19 nt, Artificial Sequence
  Description of Artificial Sequence: Synthetic oligonucleotide
uuggcccacacauuaggcu

SEQ ID NO: 2218530 - RNA, 19 nt, Artificial Sequence
  Description of Artificial Sequence: Synthetic oligonucleotide
uucacuucagaggcuuuag

SEQ ID NO: 2218531 - RNA, 19 nt, Artificial Sequence
  Description of Artificial Sequence: Synthetic oligonucleotide
cucaugugaguuucuauga

SEQ ID NO: 2218532 - RNA, 19 nt, Artificial Sequence
  Description of Artificial Sequence: Synthetic oligonucleotide
uugcuauauggcucuacgu

SEQ ID NO: 2218533 - RNA, 19 nt, Artificial Sequence
  Description of Artificial Sequence: Synthetic oligonucleotide
  modified_base (9)..(9): a, c, u, g, unknown or other
ccaaaaggnguuccaaagg

SEQ ID NO: 2218534 - RNA, 19 nt, Artificial Sequence
  Description of Artificial Sequence: Synthetic oligonucleotide
caugugaguuucuaugaca

SEQ ID NO: 2218535 - RNA, 19 nt, Artificial Sequence
  Description of Artificial Sequence: Synthetic oligonucleotide
uggcaaaauauguguaaau

SEQ ID NO: 2218536 - RNA, 19 nt, Artificial Sequence
  Description of Artificial Sequence: Synthetic oligonucleotide
acauuaggcuuugugauau

SEQ ID NO: 2218537 - RNA, 19 nt, Artificial Sequence
  Description of Artificial Sequence: Synthetic oligonucleotide
auaccaacuguaauaaaau

SEQ ID NO: 2218538 - RNA, 19 nt, Artificial Sequence
  Description of Artificial Sequence: Synthetic oligonucleotide
auuuaccaucaaauugugg

SEQ ID NO: 2218539 - RNA, 19 nt, Artificial Sequence
  Description of Artificial Sequence: Synthetic oligonucleotide
aaugcccaguccuugucuu

SEQ ID NO: 2218540 - RNA, 19 nt, Artificial Sequence
  Description of Artificial Sequence: Synthetic oligonucleotide
guagaaacuggagccaaug

SEQ ID NO: 2218541 - RNA, 19 nt, Artificial Sequence
  Description of Artificial Sequence: Synthetic oligonucleotide
uuguggcaaaauaugugua

SEQ ID NO: 2218542 - RNA, 19 nt, Artificial Sequence
  Description of Artificial Sequence: Synthetic oligonucleotide
gugaucaguagcuucucca

SEQ ID NO: 2218543 - RNA, 19 nt, Artificial Sequence
  Description of Artificial Sequence: Synthetic oligonucleotide
ucacucuuuuggaagucaa

SEQ ID NO: 2218544 - RNA, 19 nt, Artificial Sequence
  Description of Artificial Sequence: Synthetic oligonucleotide
auguuuugaucauuucgau

SEQ ID NO: 2218545 - RNA, 19 nt, Artificial Sequence
  Description of Artificial Sequence: Synthetic oligonucleotide
agaaagggccaguacucca

SEQ ID NO: 2218546 - RNA, 19 nt, Artificial Sequence
  Description of Artificial Sequence: Synthetic oligonucleotide
ugaggcugagcaacuauuu

SEQ ID NO: 2218547 - RNA, 19 nt, Artificial Sequence
  Description of Artificial Sequence: Synthetic oligonucleotide
uuugaucauuucgauugcu

SEQ ID NO: 2218548 - RNA, 19 nt, Artificial Sequence
  Description of Artificial Sequence: Synthetic oligonucleotide
aggcugauguauuggccuc

SEQ ID NO: 2218549 - RNA, 19 nt, Artificial Sequence
  Description of Artificial Sequence: Synthetic oligonucleotide
gaggaguauguaucccuug

SEQ ID NO: 2218550 - RNA, 19 nt, Artificial Sequence
  Description of Artificial Sequence: Synthetic oligonucleotide
acuggaugauuccagugua

SEQ ID NO: 2218551 - RNA, 19 nt, Artificial Sequence
  Description of Artificial Sequence: Synthetic oligonucleotide
auuccaucaaaaccacuuu

SEQ ID NO: 2218552 - RNA, 19 nt, Artificial Sequence
  Description of Artificial Sequence: Synthetic oligonucleotide
uccaauugaggcugagcaa

SEQ ID NO: 2218553 - RNA, 19 nt, Artificial Sequence
  Description of Artificial Sequence: Synthetic oligonucleotide
uacauguuuugaucauuuc

SEQ ID NO: 2218554 - RNA, 19 nt, Artificial Sequence
  Description of Artificial Sequence: Synthetic oligonucleotide
ucauuucgauugcuauaug

SEQ ID NO: 2218555 - RNA, 19 nt, Artificial Sequence
  Description of Artificial Sequence: Synthetic oligonucleotide
uugaggcugagcaacuauu

SEQ ID NO: 2218556 - RNA, 19 nt, Artificial Sequence
  Description of Artificial Sequence: Synthetic oligonucleotide
auugaggcugagcaacuau

SEQ ID NO: 2218557 - RNA, 19 nt, Artificial Sequence
  Description of Artificial Sequence: Synthetic oligonucleotide
caggacuggaugauuccag

SEQ ID NO: 2218558 - RNA, 19 nt, Artificial Sequence
  Description of Artificial Sequence: Synthetic oligonucleotide
uauacauguuuugaucauu

SEQ ID NO: 2218559 - RNA, 19 nt, Artificial Sequence
  Description of Artificial Sequence: Synthetic oligonucleotide
  modified_base (5)..(5): a, c, u, g, unknown or other
aaggnguuccaaaggcuga

SEQ ID NO: 2218560 - RNA, 19 nt, Artificial Sequence
  Description of Artificial Sequence: Synthetic oligonucleotide
gauguauuggccucagcau

SEQ ID NO: 2218561 - RNA, 19 nt, Artificial Sequence
  Description of Artificial Sequence: Synthetic oligonucleotide
cauaggcagagaaugccca

SEQ ID NO: 2218562 - RNA, 19 nt, Artificial Sequence
  Description of Artificial Sequence: Synthetic oligonucleotide
gcaacuauuugucucaugu

SEQ ID NO: 2218563 - RNA, 19 nt, Artificial Sequence
  Description of Artificial Sequence: Synthetic oligonucleotide
aucauagauauaaaacaua

SEQ ID NO: 2218564 - RNA, 19 nt, Artificial Sequence
  Description of Artificial Sequence: Synthetic oligonucleotide
gacuggaugauuccagugu

SEQ ID NO: 2218565 - RNA, 19 nt, Artificial Sequence
  Description of Artificial Sequence: Synthetic oligonucleotide
ucccagugcuccaggacug

SEQ ID NO: 2218566 - RNA, 19 nt, Artificial Sequence
  Description of Artificial Sequence: Synthetic oligonucleotide
gcuauauggcucuacguga

SEQ ID NO: 2218567 - RNA, 19 nt, Artificial Sequence
  Description of Artificial Sequence: Synthetic oligonucleotide
auuauauuuaugagcuuua

SEQ ID NO: 2218568 - RNA, 19 nt, Artificial Sequence
  Description of Artificial Sequence: Synthetic oligonucleotide
aaagggccaguacuccaau

SEQ ID NO: 2218569 - RNA, 19 nt, Artificial Sequence
  Description of Artificial Sequence: Synthetic oligonucleotide
caucaaauuguggguuucc

SEQ ID NO: 2218570 - RNA, 19 nt, Artificial Sequence
  Description of Artificial Sequence: Synthetic oligonucleotide
aaagugaccuucagauuau

SEQ ID NO: 2218571 - RNA, 19 nt, Artificial Sequence
  Description of Artificial Sequence: Synthetic oligonucleotide
aaauuccaucaaaaccacu

SEQ ID NO: 2218572 - RNA, 19 nt, Artificial Sequence
  Description of Artificial Sequence: Synthetic oligonucleotide
agagaaugcccaguccuug

SEQ ID NO: 2218573 - RNA, 19 nt, Artificial Sequence
  Description of Artificial Sequence: Synthetic oligonucleotide
uauauggcucuacgugaaa

SEQ ID NO: 2218574 - RNA, 19 nt, Artificial Sequence
  Description of Artificial Sequence: Synthetic oligonucleotide
gauaguucuuggcuauucu

SEQ ID NO: 2218575 - RNA, 19 nt, Artificial Sequence
  Description of Artificial Sequence: Synthetic oligonucleotide
gaucccagugcuccaggac

SEQ ID NO: 2218576 - RNA, 19 nt, Artificial Sequence
  Description of Artificial Sequence: Synthetic oligonucleotide
  modified_base (2)..(2): a, c, u, g, unknown or other
gnguuccaaaggcugaugu

SEQ ID NO: 2218577 - RNA, 19 nt, Artificial Sequence
  Description of Artificial Sequence: Synthetic oligonucleotide
cacucuuuuggaagucaac

SEQ ID NO: 2218578 - RNA, 19 nt, Artificial Sequence
  Description of Artificial Sequence: Synthetic oligonucleotide
uuguggguuuccauaccaa

SEQ ID NO: 2218579 - RNA, 19 nt, Artificial Sequence
  Description of Artificial Sequence: Synthetic oligonucleotide
gugcaauaaacaauccauc

SEQ ID NO: 2218580 - RNA, 19 nt, Artificial Sequence
  Description of Artificial Sequence: Synthetic oligonucleotide
uggcccacacauuaggcuu

SEQ ID NO: 2218581 - RNA, 19 nt, Artificial Sequence
  Description of Artificial Sequence: Synthetic oligonucleotide
cuguaauaaaauacaugua

SEQ ID NO: 2218582 - RNA, 19 nt, Artificial Sequence
  Description of Artificial Sequence: Synthetic oligonucleotide
uggaugauuccaguguaua

SEQ ID NO: 2218583 - RNA, 19 nt, Artificial Sequence
  Description of Artificial Sequence: Synthetic oligonucleotide
  modified_base (15)..(15): a, c, u, g, unknown or other
ucaaguccaaaaggnguuc

SEQ ID NO: 2218584 - RNA, 19 nt, Artificial Sequence
  Description of Artificial Sequence: Synthetic oligonucleotide
ggcuuugugauauaggaau

SEQ ID NO: 2218585 - RNA, 19 nt, Artificial Sequence
  Description of Artificial Sequence: Synthetic oligonucleotide
cuuguaccuauaaaaggcu

SEQ ID NO: 2218586 - RNA, 19 nt, Artificial Sequence
  Description of Artificial Sequence: Synthetic oligonucleotide
auacauguuuugaucauuu

SEQ ID NO: 2218587 - RNA, 19 nt, Artificial Sequence
  Description of Artificial Sequence: Synthetic oligonucleotide
ucagaggaggcaguucuuc

SEQ ID NO: 2218588 - RNA, 19 nt, Artificial Sequence
  Description of Artificial Sequence: Synthetic oligonucleotide
caagugaucaguagcuucu

SEQ ID NO: 2218589 - RNA, 19 nt, Artificial Sequence
  Description of Artificial Sequence: Synthetic oligonucleotide
auggcucuacgugaaaagu

SEQ ID NO: 2218590 - RNA, 19 nt, Artificial Sequence
  Description of Artificial Sequence: Synthetic oligonucleotide
uuggcuauucuaggauccc

SEQ ID NO: 2218591 - RNA, 19 nt, Artificial Sequence
  Description of Artificial Sequence: Synthetic oligonucleotide
guaccuauaaaaggcugga

SEQ ID NO: 2218592 - RNA, 19 nt, Artificial Sequence
  Description of Artificial Sequence: Synthetic oligonucleotide
cuauauggcucuacgugaa

SEQ ID NO: 2218593 - RNA, 19 nt, Artificial Sequence
  Description of Artificial Sequence: Synthetic oligonucleotide
uaccaucaaauuguggguu

SEQ ID NO: 2218594 - RNA, 19 nt, Artificial Sequence
  Description of Artificial Sequence: Synthetic oligonucleotide
ugguaccaagugaucagua

SEQ ID NO: 2218595 - RNA, 19 nt, Artificial Sequence
  Description of Artificial Sequence: Synthetic oligonucleotide
auauggcucuacgugaaaa

SEQ ID NO: 2218596 - RNA, 19 nt, Artificial Sequence
  Description of Artificial Sequence: Synthetic oligonucleotide
cuugucuuguaccuauaaa

SEQ ID NO: 2218597 - RNA, 19 nt, Artificial Sequence
  Description of Artificial Sequence: Synthetic oligonucleotide
agauuauauuuaugagcuu

SEQ ID NO: 2218598 - RNA, 19 nt, Artificial Sequence
  Description of Artificial Sequence: Synthetic oligonucleotide
ccaauugaggcugagcaac

SEQ ID NO: 2218599 - RNA, 19 nt, Artificial Sequence
  Description of Artificial Sequence: Synthetic oligonucleotide
gauugcuauauggcucuac

SEQ ID NO: 2218600 - RNA, 19 nt, Artificial Sequence
  Description of Artificial Sequence: Synthetic oligonucleotide
agcaacuauuugucucaug

SEQ ID NO: 2218601 - RNA, 19 nt, Artificial Sequence
  Description of Artificial Sequence: Synthetic oligonucleotide
uaguugguaccaagugauc

SEQ ID NO: 2218602 - RNA, 19 nt, Artificial Sequence
  Description of Artificial Sequence: Synthetic oligonucleotide
accaucaaauuguggguuu

SEQ ID NO: 2218603 - RNA, 19 nt, Artificial Sequence
  Description of Artificial Sequence: Synthetic oligonucleotide
aauccaucauauggagaau

SEQ ID NO: 2218604 - RNA, 19 nt, Artificial Sequence
  Description of Artificial Sequence: Synthetic oligonucleotide
uguuaacagauuggcccac

SEQ ID NO: 2218605 - RNA, 19 nt, Artificial Sequence
  Description of Artificial Sequence: Synthetic oligonucleotide
ggaguauguaucccuugug

SEQ ID NO: 2218606 - RNA, 19 nt, Artificial Sequence
  Description of Artificial Sequence: Synthetic oligonucleotide
cggguagcaagaaagggcc

SEQ ID NO: 2218607 - RNA, 19 nt, Artificial Sequence
  Description of Artificial Sequence: Synthetic oligonucleotide
gccaguacuccaauugagg

SEQ ID NO: 2218608 - RNA, 19 nt, Artificial Sequence
  Description of Artificial Sequence: Synthetic oligonucleotide
auaauucagaggaggcagu

SEQ ID NO: 2218609 - RNA, 19 nt, Artificial Sequence
  Description of Artificial Sequence: Synthetic oligonucleotide
ccauauguaaagccauuug

SEQ ID NO: 2218610 - RNA, 19 nt, Artificial Sequence
  Description of Artificial Sequence: Synthetic oligonucleotide
uaauucagaggaggcaguu

SEQ ID NO: 2218611 - RNA, 19 nt, Artificial Sequence
  Description of Artificial Sequence: Synthetic oligonucleotide
  modified_base (12)..(12): a, c, u, g, unknown or other
aguccaaaaggnguuccaa

SEQ ID NO: 2218612 - RNA, 19 nt, Artificial Sequence
  Description of Artificial Sequence: Synthetic oligonucleotide
guuuccauaccaacuguaa

SEQ ID NO: 2218613 - RNA, 19 nt, Artificial Sequence
  Description of Artificial Sequence: Synthetic oligonucleotide
ucaggcggguagcaagaaa

SEQ ID NO: 2218614 - RNA, 19 nt, Artificial Sequence
  Description of Artificial Sequence: Synthetic oligonucleotide
aaggcuggauggcuuccau

SEQ ID NO: 2218615 - RNA, 19 nt, Artificial Sequence
  Description of Artificial Sequence: Synthetic oligonucleotide
guauguaucccuuguggau

SEQ ID NO: 2218616 - RNA, 19 nt, Artificial Sequence
  Description of Artificial Sequence: Synthetic oligonucleotide
auaaaaggcuggauggcuu

SEQ ID NO: 2218617 - RNA, 19 nt, Artificial Sequence
  Description of Artificial Sequence: Synthetic oligonucleotide
uggcuauucuaggauccca

SEQ ID NO: 2218618 - RNA, 19 nt, Artificial Sequence
  Description of Artificial Sequence: Synthetic oligonucleotide
acaauccaucauauggaga

SEQ ID NO: 2218619 - RNA, 19 nt, Artificial Sequence
  Description of Artificial Sequence: Synthetic oligonucleotide
uccuaacucaggguagaaa

SEQ ID NO: 2218620 - RNA, 19 nt, Artificial Sequence
  Description of Artificial Sequence: Synthetic oligonucleotide
auccaucauauggagaauu

SEQ ID NO: 2218621 - RNA, 19 nt, Artificial Sequence
  Description of Artificial Sequence: Synthetic oligonucleotide
uaucacucuuuuggaaguc

SEQ ID NO: 2218622 - RNA, 19 nt, Artificial Sequence
  Description of Artificial Sequence: Synthetic oligonucleotide
ucauuugagucaggcgggu

SEQ ID NO: 2218623 - RNA, 19 nt, Artificial Sequence
  Description of Artificial Sequence: Synthetic oligonucleotide
cuaucacucuuuuggaagu

SEQ ID NO: 2218624 - RNA, 19 nt, Artificial Sequence
  Description of Artificial Sequence: Synthetic oligonucleotide
gaacacucugagauccuga

SEQ ID NO: 2218625 - RNA, 19 nt, Artificial Sequence
  Description of Artificial Sequence: Synthetic oligonucleotide
uugcgaacacucugagauc

SEQ ID NO: 2218626 - RNA, 19 nt, Artificial Sequence
  Description of Artificial Sequence: Synthetic oligonucleotide
ccaagugaucaguagcuuc

SEQ ID NO: 2218627 - RNA, 19 nt, Artificial Sequence
  Description of Artificial Sequence: Synthetic oligonucleotide
gugaccuucagauuauauu

SEQ ID NO: 2218628 - RNA, 19 nt, Artificial Sequence
  Description of Artificial Sequence: Synthetic oligonucleotide
ggcggguagcaagaaaggg

SEQ ID NO: 2218629 - RNA, 19 nt, Artificial Sequence
  Description of Artificial Sequence: Synthetic oligonucleotide
ggcuauucuaggaucccag

SEQ ID NO: 2218630 - RNA, 19 nt, Artificial Sequence
  Description of Artificial Sequence: Synthetic oligonucleotide
gaaagggccaguacuccaa

SEQ ID NO: 2218631 - RNA, 19 nt, Artificial Sequence
  Description of Artificial Sequence: Synthetic oligonucleotide
cccgagagcuguaacuucc

SEQ ID NO: 2218632 - RNA, 19 nt, Artificial Sequence
  Description of Artificial Sequence: Synthetic oligonucleotide
cuaacucaggguagaaacu

SEQ ID NO: 2218633 - RNA, 19 nt, Artificial Sequence
  Description of Artificial Sequence: Synthetic oligonucleotide
uucuaggaucccagugcuc

SEQ ID NO: 2218634 - RNA, 19 nt, Artificial Sequence
  Description of Artificial Sequence: Synthetic oligonucleotide
agauuggcccacacauuag

SEQ ID NO: 2218635 - RNA, 19 nt, Artificial Sequence
  Description of Artificial Sequence: Synthetic oligonucleotide
cuauuugucucaugugagu

SEQ ID NO: 2218636 - RNA, 19 nt, Artificial Sequence
  Description of Artificial Sequence: Synthetic oligonucleotide
aggcggguagcaagaaagg

SEQ ID NO: 2218637 - RNA, 19 nt, Artificial Sequence
  Description of Artificial Sequence: Synthetic oligonucleotide
cuacuagaagugcaauaaa

SEQ ID NO: 2218638 - RNA, 19 nt, Artificial Sequence
  Description of Artificial Sequence: Synthetic oligonucleotide
ccaaaggcugauguauugg

SEQ ID NO: 2218639 - RNA, 19 nt, Artificial Sequence
  Description of Artificial Sequence: Synthetic oligonucleotide
gcggguagcaagaaagggc

SEQ ID NO: 2218640 - RNA, 19 nt, Artificial Sequence
  Description of Artificial Sequence: Synthetic oligonucleotide
uugagucaggcggguagca

SEQ ID NO: 2218641 - RNA, 19 nt, Artificial Sequence
  Description of Artificial Sequence: Synthetic oligonucleotide
caguguauauauuuaccau

SEQ ID NO: 2218642 - RNA, 19 nt, Artificial Sequence
  Description of Artificial Sequence: Synthetic oligonucleotide
ucccgagagcuguaacuuc

SEQ ID NO: 2218643 - RNA, 19 nt, Artificial Sequence
  Description of Artificial Sequence: Synthetic oligonucleotide
guauacauguuuugaucau

SEQ ID NO: 2218644 - RNA, 19 nt, Artificial Sequence
  Description of Artificial Sequence: Synthetic oligonucleotide
ugcccaguccuugucuugu

SEQ ID NO: 2218645 - RNA, 19 nt, Artificial Sequence
  Description of Artificial Sequence: Synthetic oligonucleotide
uaccuauaaaaggcuggau

SEQ ID NO: 2218646 - RNA, 19 nt, Artificial Sequence
  Description of Artificial Sequence: Synthetic oligonucleotide
ggcucuacgugaaaaguga

SEQ ID NO: 2218647 - RNA, 19 nt, Artificial Sequence
  Description of Artificial Sequence: Synthetic oligonucleotide
agugaccuucagauuauau

SEQ ID NO: 2218648 - RNA, 19 nt, Artificial Sequence
  Description of Artificial Sequence: Synthetic oligonucleotide
gaccuucagauuauauuua

SEQ ID NO: 2218649 - RNA, 19 nt, Artificial Sequence
  Description of Artificial Sequence: Synthetic oligonucleotide
augacaggaagggucccga

SEQ ID NO: 2218650 - RNA, 19 nt, Artificial Sequence
  Description of Artificial Sequence: Synthetic oligonucleotide
aggcuuuagguggcugcac

SEQ ID NO: 2218651 - RNA, 19 nt, Artificial Sequence
  Description of Artificial Sequence: Synthetic oligonucleotide
  modified_base (16)..(16): a, c, u, g, unknown or other
gucaaguccaaaaggnguu

SEQ ID NO: 2218652 - RNA, 19 nt, Artificial Sequence
  Description of Artificial Sequence: Synthetic oligonucleotide
gaggcuuuagguggcugca

SEQ ID NO: 2218653 - RNA, 19 nt, Artificial Sequence
  Description of Artificial Sequence: Synthetic oligonucleotide
ggcagagaaugcccagucc

SEQ ID NO: 2218654 - RNA, 19 nt, Artificial Sequence
  Description of Artificial Sequence: Synthetic oligonucleotide
  modified_base (4)..(4): a, c, u, g, unknown or other
aggnguuccaaaggcugau

SEQ ID NO: 2218655 - RNA, 19 nt, Artificial Sequence
  Description of Artificial Sequence: Synthetic oligonucleotide
gcagagaaugcccaguccu

SEQ ID NO: 2218656 - RNA, 19 nt, Artificial Sequence
  Description of Artificial Sequence: Synthetic oligonucleotide
cacauuaggcuuugugaua

SEQ ID NO: 2218657 - RNA, 19 nt, Artificial Sequence
  Description of Artificial Sequence: Synthetic oligonucleotide
uauuggccucagcaucuuu

SEQ ID NO: 2218658 - RNA, 19 nt, Artificial Sequence
  Description of Artificial Sequence: Synthetic oligonucleotide
ggcugagcaacuauuuguc

SEQ ID NO: 2218659 - RNA, 19 nt, Artificial Sequence
  Description of Artificial Sequence: Synthetic oligonucleotide
acgugaaaagugaccuuca

SEQ ID NO: 2218660 - RNA, 19 nt, Artificial Sequence
  Description of Artificial Sequence: Synthetic oligonucleotide
cuucuagguucacuucaga

SEQ ID NO: 2218661 - RNA, 19 nt, Artificial Sequence
  Description of Artificial Sequence: Synthetic oligonucleotide
caguacuccaauugaggcu

SEQ ID NO: 2218662 - RNA, 19 nt, Artificial Sequence
  Description of Artificial Sequence: Synthetic oligonucleotide
ggccaguacuccaauugag

SEQ ID NO: 2218663 - RNA, 19 nt, Artificial Sequence
  Description of Artificial Sequence: Synthetic oligonucleotide
agucaggcggguagcaaga

SEQ ID NO: 2218664 - RNA, 19 nt, Artificial Sequence
  Description of Artificial Sequence: Synthetic oligonucleotide
gagcuguaacuuccuaacu

SEQ ID NO: 2218665 - RNA, 19 nt, Artificial Sequence
  Description of Artificial Sequence: Synthetic oligonucleotide
  modified_base (17)..(17): a, c, u, g, unknown or other
ggucaaguccaaaaggngu

SEQ ID NO: 2218666 - RNA, 19 nt, Artificial Sequence
  Description of Artificial Sequence: Synthetic oligonucleotide
uccuugucuuguaccuaua

SEQ ID NO: 2218667 - RNA, 19 nt, Artificial Sequence
  Description of Artificial Sequence: Synthetic oligonucleotide
ggauaguucuuggcuauuc

SEQ ID NO: 2218668 - RNA, 19 nt, Artificial Sequence
  Description of Artificial Sequence: Synthetic oligonucleotide
guuaacagauuggcccaca

SEQ ID NO: 2218669 - RNA, 19 nt, Artificial Sequence
  Description of Artificial Sequence: Synthetic oligonucleotide
ggagccaaugucaucugga

SEQ ID NO: 2218670 - RNA, 19 nt, Artificial Sequence
  Description of Artificial Sequence: Synthetic oligonucleotide
uuccuaacucaggguagaa

SEQ ID NO: 2218671 - RNA, 19 nt, Artificial Sequence
  Description of Artificial Sequence: Synthetic oligonucleotide
ggcuuuagguggcugcaca

SEQ ID NO: 2218672 - RNA, 19 nt, Artificial Sequence
  Description of Artificial Sequence: Synthetic oligonucleotide
guggguuuccauaccaacu

SEQ ID NO: 2218673 - RNA, 19 nt, Artificial Sequence
  Description of Artificial Sequence: Synthetic oligonucleotide
guggauaguucuuggcuau

SEQ ID NO: 2218674 - RNA, 19 nt, Artificial Sequence
  Description of Artificial Sequence: Synthetic oligonucleotide
gaucaguagcuucuccauu

SEQ ID NO: 2218675 - RNA, 19 nt, Artificial Sequence
  Description of Artificial Sequence: Synthetic oligonucleotide
cuaggaucccagugcucca

SEQ ID NO: 2218676 - RNA, 19 nt, Artificial Sequence
  Description of Artificial Sequence: Synthetic oligonucleotide
aagugaccuucagauuaua

SEQ ID NO: 2218677 - RNA, 19 nt, Artificial Sequence
  Description of Artificial Sequence: Synthetic oligonucleotide
gggccaguacuccaauuga

SEQ ID NO: 2218678 - RNA, 19 nt, Artificial Sequence
  Description of Artificial Sequence: Synthetic oligonucleotide
gaggcaguucuucuagguu

SEQ ID NO: 2218679 - RNA, 19 nt, Artificial Sequence
  Description of Artificial Sequence: Synthetic oligonucleotide
guccuugucuuguaccuau

SEQ ID NO: 2218680 - RNA, 19 nt, Artificial Sequence
  Description of Artificial Sequence: Synthetic oligonucleotide
  modified_base (3)..(3): a, c, u, g, unknown or other
ggnguuccaaaggcugaug

SEQ ID NO: 2218681 - RNA, 19 nt, Artificial Sequence
  Description of Artificial Sequence: Synthetic oligonucleotide
gucucaugugaguuucuau

SEQ ID NO: 2218682 - RNA, 19 nt, Artificial Sequence
  Description of Artificial Sequence: Synthetic oligonucleotide
uggauaguucuuggcuauu

SEQ ID NO: 2218683 - RNA, 19 nt, Artificial Sequence
  Description of Artificial Sequence: Synthetic oligonucleotide
uguaucccuuguggauagu

SEQ ID NO: 2218684 - RNA, 19 nt, Artificial Sequence
  Description of Artificial Sequence: Synthetic oligonucleotide
ccugaagguguuaacagau

SEQ ID NO: 2218685 - RNA, 19 nt, Artificial Sequence
  Description of Artificial Sequence: Synthetic oligonucleotide
ggucccgagagcuguaacu

SEQ ID NO: 2218686 - RNA, 19 nt, Artificial Sequence
  Description of Artificial Sequence: Synthetic oligonucleotide
agccauauguaaagccauu

SEQ ID NO: 2218687 - RNA, 19 nt, Artificial Sequence
  Description of Artificial Sequence: Synthetic oligonucleotide
gcucuacgugaaaagugac

SEQ ID NO: 2218688 - RNA, 19 nt, Artificial Sequence
  Description of Artificial Sequence: Synthetic oligonucleotide
gcuuccauauuugucuaua

SEQ ID NO: 2218689 - RNA, 19 nt, Artificial Sequence
  Description of Artificial Sequence: Synthetic oligonucleotide
ggaucccagugcuccagga

SEQ ID NO: 2218690 - RNA, 19 nt, Artificial Sequence
  Description of Artificial Sequence: Synthetic oligonucleotide
gggcguuggguggaugaag

SEQ ID NO: 2218691 - RNA, 19 nt, Artificial Sequence
  Description of Artificial Sequence: Synthetic oligonucleotide
ccauguugauucuaucacu

SEQ ID NO: 2218692 - RNA, 19 nt, Artificial Sequence
  Description of Artificial Sequence: Synthetic oligonucleotide
caaaaccacuuugaagaau

SEQ ID NO: 2218693 - RNA, 19 nt, Artificial Sequence
  Description of Artificial Sequence: Synthetic oligonucleotide
gcugagcaacuauuugucu

SEQ ID NO: 2218694 - RNA, 19 nt, Artificial Sequence
  Description of Artificial Sequence: Synthetic oligonucleotide
cuggaugauuccaguguau

SEQ ID NO: 2218695 - RNA, 19 nt, Artificial Sequence
  Description of Artificial Sequence: Synthetic oligonucleotide
ggagaauugcgaacacucu

SEQ ID NO: 2218696 - RNA, 19 nt, Artificial Sequence
  Description of Artificial Sequence: Synthetic oligonucleotide
cuucuacuagaagugcaau

SEQ ID NO: 2218697 - RNA, 19 nt, Artificial Sequence
  Description of Artificial Sequence: Synthetic oligonucleotide
cugaagguguuaacagauu

SEQ ID NO: 2218698 - RNA, 19 nt, Artificial Sequence
  Description of Artificial Sequence: Synthetic oligonucleotide
cauuaggcuuugugauaua

SEQ ID NO: 2218699 - RNA, 19 nt, Artificial Sequence
  Description of Artificial Sequence: Synthetic oligonucleotide
guaucccuuguggauaguu

SEQ ID NO: 2218700 - RNA, 19 nt, Artificial Sequence
  Description of Artificial Sequence: Synthetic oligonucleotide
cagagaaugcccaguccuu

SEQ ID NO: 2218701 - RNA, 19 nt, Artificial Sequence
  Description of Artificial Sequence: Synthetic oligonucleotide
cuacgugaaaagugaccuu

SEQ ID NO: 2218702 - RNA, 19 nt, Artificial Sequence
  Description of Artificial Sequence: Synthetic oligonucleotide
gucccgagagcuguaacuu

SEQ ID NO: 2218703 - RNA, 19 nt, Artificial Sequence
  Description of Artificial Sequence: Synthetic oligonucleotide
ggcugauguauuggccuca

SEQ ID NO: 2218704 - RNA, 19 nt, Artificial Sequence
  Description of Artificial Sequence: Synthetic oligonucleotide
ccacuuugaagaauaucau

SEQ ID NO: 2218705 - RNA, 19 nt, Artificial Sequence
  Description of Artificial Sequence: Synthetic oligonucleotide
gggucccgagagcuguaac

SEQ ID NO: 2218706 - RNA, 19 nt, Artificial Sequence
  Description of Artificial Sequence: Synthetic oligonucleotide
cgaacacucugagauccug

SEQ ID NO: 2218707 - RNA, 19 nt, Artificial Sequence
  Description of Artificial Sequence: Synthetic oligonucleotide
guacuccaauugaggcuga

SEQ ID NO: 2218708 - RNA, 19 nt, Artificial Sequence
  Description of Artificial Sequence: Synthetic oligonucleotide
gagcaacuauuugucucau

SEQ ID NO: 2218709 - RNA, 19 nt, Artificial Sequence
  Description of Artificial Sequence: Synthetic oligonucleotide
gucaggcggguagcaagaa

SEQ ID NO: 2218710 - RNA, 19 nt, Artificial Sequence
  Description of Artificial Sequence: Synthetic oligonucleotide
gccauauguaaagccauuu

SEQ ID NO: 2218711 - RNA, 19 nt, Artificial Sequence
  Description of Artificial Sequence: Synthetic oligonucleotide
ggguagcaagaaagggcca

SEQ ID NO: 2218712 - RNA, 19 nt, Artificial Sequence
  Description of Artificial Sequence: Synthetic oligonucleotide
cagucucaacagcagcuuu

SEQ ID NO: 2218713 - RNA, 19 nt, Artificial Sequence
  Description of Artificial Sequence: Synthetic oligonucleotide
ggaggaguauguaucccuu

SEQ ID NO: 2218714 - RNA, 19 nt, Artificial Sequence
  Description of Artificial Sequence: Synthetic oligonucleotide
gcccacacauuaggcuuug

SEQ ID NO: 2218715 - RNA, 19 nt, Artificial Sequence
  Description of Artificial Sequence: Synthetic oligonucleotide
gguagaaacuggagccaau

SEQ ID NO: 2218716 - RNA, 19 nt, Artificial Sequence
  Description of Artificial Sequence: Synthetic oligonucleotide
guauuggccucagcaucuu

SEQ ID NO: 2218717 - RNA, 19 nt, Artificial Sequence
  Description of Artificial Sequence: Synthetic oligonucleotide
ggggcguuggguggaugaa

SEQ ID NO: 2218718 - RNA, 19 nt, Artificial Sequence
  Description of Artificial Sequence: Synthetic oligonucleotide
ccgagagcuguaacuuccu

SEQ ID NO: 2218719 - RNA, 19 nt, Artificial Sequence
  Description of Artificial Sequence: Synthetic oligonucleotide
gcguuggguggaugaaguu

SEQ ID NO: 2218720 - RNA, 19 nt, Artificial Sequence
  Description of Artificial Sequence: Synthetic oligonucleotide
ggcccacacauuaggcuuu

SEQ ID NO: 2218721 - RNA, 19 nt, Artificial Sequence
  Description of Artificial Sequence: Synthetic oligonucleotide
gcgaacacucugagauccu

SEQ ID NO: 2218722 - RNA, 19 nt, Artificial Sequence
  Description of Artificial Sequence: Synthetic oligonucleotide
cgauugcuauauggcucua

SEQ ID NO: 2218723 - RNA, 19 nt, Artificial Sequence
  Description of Artificial Sequence: Synthetic oligonucleotide
  modified_base (1)..(1): a, c, u, g, unknown or other
nguuccaaaggcugaugua

SEQ ID NO: 2218724 - RNA, 19 nt, Artificial Sequence
  Description of Artificial Sequence: Synthetic oligonucleotide
uauacuucaaggcaggaug

SEQ ID NO: 2218725 - RNA, 19 nt, Artificial Sequence
  Description of Artificial Sequence: Synthetic oligonucleotide
agcacuguaguauacacgg

SEQ ID NO: 2218726 - RNA, 19 nt, Artificial Sequence
  Description of Artificial Sequence: Synthetic oligonucleotide
guucuuuagaaccagucag

SEQ ID NO: 2218727 - RNA, 19 nt, Artificial Sequence
  Description of Artificial Sequence: Synthetic oligonucleotide
acggaaggcagcuaugugc

SEQ ID NO: 2218728 - RNA, 19 nt, Artificial Sequence
  Description of Artificial Sequence: Synthetic oligonucleotide
ucuggguugagcaaguaga

SEQ ID NO: 2218729 - RNA, 19 nt, Artificial Sequence
  Description of Artificial Sequence: Synthetic oligonucleotide
aauggagugguccacaaua

SEQ ID NO: 2218730 - RNA, 19 nt, Artificial Sequence
  Description of Artificial Sequence: Synthetic oligonucleotide
uucuguaccacuugaacca

SEQ ID NO: 2218731 - RNA, 19 nt, Artificial Sequence
  Description of Artificial Sequence: Synthetic oligonucleotide
acguacacugucuacaauc

SEQ ID NO: 2218732 - RNA, 19 nt, Artificial Sequence
  Description of Artificial Sequence: Synthetic oligonucleotide
uguucuuuagaaccaguca

SEQ ID NO: 2218733 - RNA, 19 nt, Artificial Sequence
  Description of Artificial Sequence: Synthetic oligonucleotide
acugucuacaaucuguucu

SEQ ID NO: 2218734 - RNA, 19 nt, Artificial Sequence
  Description of Artificial Sequence: Synthetic oligonucleotide
uaguauacacgguaguugc

SEQ ID NO: 2218735 - RNA, 19 nt, Artificial Sequence
  Description of Artificial Sequence: Synthetic oligonucleotide
cuucuguaccacuugaacc

SEQ ID NO: 2218736 - RNA, 19 nt, Artificial Sequence
  Description of Artificial Sequence: Synthetic oligonucleotide
ugagugaagccaaaguaca

SEQ ID NO: 2218737 - RNA, 19 nt, Artificial Sequence
  Description of Artificial Sequence: Synthetic oligonucleotide
ucuacaaucuguucugcug

SEQ ID NO: 2218738 - RNA, 19 nt, Artificial Sequence
  Description of Artificial Sequence: Synthetic oligonucleotide
gaagaguccaucuggguug

SEQ ID NO: 2218739 - RNA, 19 nt, Artificial Sequence
  Description of Artificial Sequence: Synthetic oligonucleotide
uacacugucuacaaucugu

SEQ ID NO: 2218740 - RNA, 19 nt, Artificial Sequence
  Description of Artificial Sequence: Synthetic oligonucleotide
ggugaaggggccuugaagg

SEQ ID NO: 2218741 - RNA, 19 nt, Artificial Sequence
  Description of Artificial Sequence: Synthetic oligonucleotide
agugguccacaauauaguc

SEQ ID NO: 2218742 - RNA, 19 nt, Artificial Sequence
  Description of Artificial Sequence: Synthetic oligonucleotide
uguucugcugaccuacucc

SEQ ID NO: 2218743 - RNA, 19 nt, Artificial Sequence
  Description of Artificial Sequence: Synthetic oligonucleotide
aaguagauggcaauggagu

SEQ ID NO: 2218744 - RNA, 19 nt, Artificial Sequence
  Description of Artificial Sequence: Synthetic oligonucleotide
guugcgacuagccugggcc

SEQ ID NO: 2218745 - RNA, 19 nt, Artificial Sequence
  Description of Artificial Sequence: Synthetic oligonucleotide
agccaaaguacaucaguac

SEQ ID NO: 2218746 - RNA, 19 nt, Artificial Sequence
  Description of Artificial Sequence: Synthetic oligonucleotide
uucuuuagaaccagucaga

SEQ ID NO: 2218747 - RNA, 19 nt, Artificial Sequence
  Description of Artificial Sequence: Synthetic oligonucleotide
agugaugaagacaggcugc

SEQ ID NO: 2218748 - RNA, 19 nt, Artificial Sequence
  Description of Artificial Sequence: Synthetic oligonucleotide
ucugugaagaguccaucug

SEQ ID NO: 2218749 - RNA, 19 nt, Artificial Sequence
  Description of Artificial Sequence: Synthetic oligonucleotide
uaguagucugugaagaguc

SEQ ID NO: 2218750 - RNA, 19 nt, Artificial Sequence
  Description of Artificial Sequence: Synthetic oligonucleotide
uuuccagcucaucagggca

SEQ ID NO: 2218751 - RNA, 19 nt, Artificial Sequence
  Description of Artificial Sequence: Synthetic oligonucleotide
guucugcugaccuacuccg

SEQ ID NO: 2218752 - RNA, 19 nt, Artificial Sequence
  Description of Artificial Sequence: Synthetic oligonucleotide
agugagugaagccaaagua

SEQ ID NO: 2218753 - RNA, 19 nt, Artificial Sequence
  Description of Artificial Sequence: Synthetic oligonucleotide
ugaaccagcuuuuccagcu

SEQ ID NO: 2218754 - RNA, 19 nt, Artificial Sequence
  Description of Artificial Sequence: Synthetic oligonucleotide
caucagggcagauaucagg

SEQ ID NO: 2218755 - RNA, 19 nt, Artificial Sequence
  Description of Artificial Sequence: Synthetic oligonucleotide
uaccacuugaaccagcuuu

SEQ ID NO: 2218756 - RNA, 19 nt, Artificial Sequence
  Description of Artificial Sequence: Synthetic oligonucleotide
uguaccacuugaaccagcu

SEQ ID NO: 2218757 - RNA, 19 nt, Artificial Sequence
  Description of Artificial Sequence: Synthetic oligonucleotide
ugaagaguccaucuggguu

SEQ ID NO: 2218758 - RNA, 19 nt, Artificial Sequence
  Description of Artificial Sequence: Synthetic oligonucleotide
aauauaguccugguccuca

SEQ ID NO: 2218759 - RNA, 19 nt, Artificial Sequence
  Description of Artificial Sequence: Synthetic oligonucleotide
uuguucuuuagaaccaguc

SEQ ID NO: 2218760 - RNA, 19 nt, Artificial Sequence
  Description of Artificial Sequence: Synthetic oligonucleotide
cuuuuccagcucaucaggg

SEQ ID NO: 2218761 - RNA, 19 nt, Artificial Sequence
  Description of Artificial Sequence: Synthetic oligonucleotide
gaagacaggcugcaccagg

SEQ ID NO: 2218762 - RNA, 19 nt, Artificial Sequence
  Description of Artificial Sequence: Synthetic oligonucleotide
auggcugccacgucauccc

SEQ ID NO: 2218763 - RNA, 19 nt, Artificial Sequence
  Description of Artificial Sequence: Synthetic oligonucleotide
ugugcugacguacacuguc

SEQ ID NO: 2218764 - RNA, 19 nt, Artificial Sequence
  Description of Artificial Sequence: Synthetic oligonucleotide
ugaccuacuccgaccauag

SEQ ID NO: 2218765 - RNA, 19 nt, Artificial Sequence
  Description of Artificial Sequence: Synthetic oligonucleotide
gauggcaauggaguggucc

SEQ ID NO: 2218766 - RNA, 19 nt, Artificial Sequence
  Description of Artificial Sequence: Synthetic oligonucleotide
aaggcagcuaugugcugac

SEQ ID NO: 2218767 - RNA, 19 nt, Artificial Sequence
  Description of Artificial Sequence: Synthetic oligonucleotide
uuuuccagcucaucagggc

SEQ ID NO: 2218768 - RNA, 19 nt, Artificial Sequence
  Description of Artificial Sequence: Synthetic oligonucleotide
aguccaucuggguugagca

SEQ ID NO: 2218769 - RNA, 19 nt, Artificial Sequence
  Description of Artificial Sequence: Synthetic oligonucleotide
gguaguugcgacuagccug

SEQ ID NO: 2218770 - RNA, 19 nt, Artificial Sequence
  Description of Artificial Sequence: Synthetic oligonucleotide
cuugaaccagcuuuuccag

SEQ ID NO: 2218771 - RNA, 19 nt, Artificial Sequence
  Description of Artificial Sequence: Synthetic oligonucleotide
auacuucaaggcaggaugc

SEQ ID NO: 2218772 - RNA, 19 nt, Artificial Sequence
  Description of Artificial Sequence: Synthetic oligonucleotide
agcuuuuccagcucaucag

SEQ ID NO: 2218773 - RNA, 19 nt, Artificial Sequence
  Description of Artificial Sequence: Synthetic oligonucleotide
accauaguagucugugaag

SEQ ID NO: 2218774 - RNA, 19 nt, Artificial Sequence
  Description of Artificial Sequence: Synthetic oligonucleotide
aucagggcagauaucaggg

SEQ ID NO: 2218775 - RNA, 19 nt, Artificial Sequence
  Description of Artificial Sequence: Synthetic oligonucleotide
agcaaguagauggcaaugg

SEQ ID NO: 2218776 - RNA, 19 nt, Artificial Sequence
  Description of Artificial Sequence: Synthetic oligonucleotide
cuucaaggcaggaugcuac

SEQ ID NO: 2218777 - RNA, 19 nt, Artificial Sequence
  Description of Artificial Sequence: Synthetic oligonucleotide
ggaaguccugcacauaccg

SEQ ID NO: 2218778 - RNA, 19 nt, Artificial Sequence
  Description of Artificial Sequence: Synthetic oligonucleotide
cauaguagucugugaagag

SEQ ID NO: 2218779 - RNA, 19 nt, Artificial Sequence
  Description of Artificial Sequence: Synthetic oligonucleotide
agcucaucagggcagauau

SEQ ID NO: 2218780 - RNA, 19 nt, Artificial Sequence
  Description of Artificial Sequence: Synthetic oligonucleotide
guaguauacacgguaguug

SEQ ID NO: 2218781 - RNA, 19 nt, Artificial Sequence
  Description of Artificial Sequence: Synthetic oligonucleotide
acaauauaguccugguccu

SEQ ID NO: 2218782 - RNA, 19 nt, Artificial Sequence
  Description of Artificial Sequence: Synthetic oligonucleotide
aucuguucugcugaccuac

SEQ ID NO: 2218783 - RNA, 19 nt, Artificial Sequence
  Description of Artificial Sequence: Synthetic oligonucleotide
ucuuuagaaccagucagac

SEQ ID NO: 2218784 - RNA, 19 nt, Artificial Sequence
  Description of Artificial Sequence: Synthetic oligonucleotide
uucaaggcaggaugcuacg

SEQ ID NO: 2218785 - RNA, 19 nt, Artificial Sequence
  Description of Artificial Sequence: Synthetic oligonucleotide
ccacuuguucuuuagaacc

SEQ ID NO: 2218786 - RNA, 19 nt, Artificial Sequence
  Description of Artificial Sequence: Synthetic oligonucleotide
ugaagccaaaguacaucag

SEQ ID NO: 2218787 - RNA, 19 nt, Artificial Sequence
  Description of Artificial Sequence: Synthetic oligonucleotide
guaguugcgacuagccugg

SEQ ID NO: 2218788 - RNA, 19 nt, Artificial Sequence
  Description of Artificial Sequence: Synthetic oligonucleotide
guagauggcaauggagugg

SEQ ID NO: 2218789 - RNA, 19 nt, Artificial Sequence
  Description of Artificial Sequence: Synthetic oligonucleotide
uugagcaaguagauggcaa

SEQ ID NO: 2218790 - RNA, 19 nt, Artificial Sequence
  Description of Artificial Sequence: Synthetic oligonucleotide
uuagcccgggaccuugggg

SEQ ID NO: 2218791 - RNA, 19 nt, Artificial Sequence
  Description of Artificial Sequence: Synthetic oligonucleotide
cagugaugaagacaggcug

SEQ ID NO: 2218792 - RNA, 19 nt, Artificial Sequence
  Description of Artificial Sequence: Synthetic oligonucleotide
cugucuacaaucuguucug

SEQ ID NO: 2218793 - RNA, 19 nt, Artificial Sequence
  Description of Artificial Sequence: Synthetic oligonucleotide
gacccagcagucuugggug

SEQ ID NO: 2218794 - RNA, 19 nt, Artificial Sequence
  Description of Artificial Sequence: Synthetic oligonucleotide
ccaaaguacaucaguaccc

SEQ ID NO: 2218795 - RNA, 19 nt, Artificial Sequence
  Description of Artificial Sequence: Synthetic oligonucleotide
uccaucuggguugagcaag

SEQ ID NO: 2218796 - RNA, 19 nt, Artificial Sequence
  Description of Artificial Sequence: Synthetic oligonucleotide
aagacaggcugcaccaggg

SEQ ID NO: 2218797 - RNA, 19 nt, Artificial Sequence
  Description of Artificial Sequence: Synthetic oligonucleotide
aaccagucagacccagcag

SEQ ID NO: 2218798 - RNA, 19 nt, Artificial Sequence
  Description of Artificial Sequence: Synthetic oligonucleotide
acuguaguauacacgguag

SEQ ID NO: 2218799 - RNA, 19 nt, Artificial Sequence
  Description of Artificial Sequence: Synthetic oligonucleotide
accagucagacccagcagu

SEQ ID NO: 2218800 - RNA, 19 nt, Artificial Sequence
  Description of Artificial Sequence: Synthetic oligonucleotide
guggaaguccugcacauac

SEQ ID NO: 2218801 - RNA, 19 nt, Artificial Sequence
  Description of Artificial Sequence: Synthetic oligonucleotide
aucuggguugagcaaguag

SEQ ID NO: 2218802 - RNA, 19 nt, Artificial Sequence
  Description of Artificial Sequence: Synthetic oligonucleotide
gaccauaguagucugugaa

SEQ ID NO: 2218803 - RNA, 19 nt, Artificial Sequence
  Description of Artificial Sequence: Synthetic oligonucleotide
cacgucaucccguucuggg

SEQ ID NO: 2218804 - RNA, 19 nt, Artificial Sequence
  Description of Artificial Sequence: Synthetic oligonucleotide
agacccagcagucuugggu

SEQ ID NO: 2218805 - RNA, 19 nt, Artificial Sequence
  Description of Artificial Sequence: Synthetic oligonucleotide
aggugaaggggccuugaag

SEQ ID NO: 2218806 - RNA, 19 nt, Artificial Sequence
  Description of Artificial Sequence: Synthetic oligonucleotide
ucaucagggcagauaucag

SEQ ID NO: 2218807 - RNA, 19 nt, Artificial Sequence
  Description of Artificial Sequence: Synthetic oligonucleotide
ggagugguccacaauauag

SEQ ID NO: 2218808 - RNA, 19 nt, Artificial Sequence
  Description of Artificial Sequence: Synthetic oligonucleotide
gccaaaguacaucaguacc

SEQ ID NO: 2218809 - RNA, 19 nt, Artificial Sequence
  Description of Artificial Sequence: Synthetic oligonucleotide
auaguagucugugaagagu

SEQ ID NO: 2218810 - RNA, 19 nt, Artificial Sequence
  Description of Artificial Sequence: Synthetic oligonucleotide
aaggcaggaugcuacggaa

SEQ ID NO: 2218811 - RNA, 19 nt, Artificial Sequence
  Description of Artificial Sequence: Synthetic oligonucleotide
ugguccucauccuugggac

SEQ ID NO: 2218812 - RNA, 19 nt, Artificial Sequence
  Description of Artificial Sequence: Synthetic oligonucleotide
ugagcaaguagauggcaau

SEQ ID NO: 2218813 - RNA, 19 nt, Artificial Sequence
  Description of Artificial Sequence: Synthetic oligonucleotide
uguaguauacacgguaguu

SEQ ID NO: 2218814 - RNA, 19 nt, Artificial Sequence
  Description of Artificial Sequence: Synthetic oligonucleotide
aguagucugugaagagucc

SEQ ID NO: 2218815 - RNA, 19 nt, Artificial Sequence
  Description of Artificial Sequence: Synthetic oligonucleotide
cagcacuguaguauacacg

SEQ ID NO: 2218816 - RNA, 19 nt, Artificial Sequence
  Description of Artificial Sequence: Synthetic oligonucleotide
uauacacgguaguugcgac

SEQ ID NO: 2218817 - RNA, 19 nt, Artificial Sequence
  Description of Artificial Sequence: Synthetic oligonucleotide
ugccacgucaucccguucu

SEQ ID NO: 2218818 - RNA, 19 nt, Artificial Sequence
  Description of Artificial Sequence: Synthetic oligonucleotide
uccacaauauaguccuggu

SEQ ID NO: 2218819 - RNA, 19 nt, Artificial Sequence
  Description of Artificial Sequence: Synthetic oligonucleotide
gugaaggggccuugaaggg

SEQ ID NO: 2218820 - RNA, 19 nt, Artificial Sequence
  Description of Artificial Sequence: Synthetic oligonucleotide
guccacaauauaguccugg

SEQ ID NO: 2218821 - RNA, 19 nt, Artificial Sequence
  Description of Artificial Sequence: Synthetic oligonucleotide
uagauggcaauggaguggu

SEQ ID NO: 2218822 - RNA, 19 nt, Artificial Sequence
  Description of Artificial Sequence: Synthetic oligonucleotide
accuacuccgaccauagua

SEQ ID NO: 2218823 - RNA, 19 nt, Artificial Sequence
  Description of Artificial Sequence: Synthetic oligonucleotide
ugcaccaggggcaggucag

SEQ ID NO: 2218824 - RNA, 19 nt, Artificial Sequence
  Description of Artificial Sequence: Synthetic oligonucleotide
ucauccuugggaccagcac

SEQ ID NO: 2218825 - RNA, 19 nt, Artificial Sequence
  Description of Artificial Sequence: Synthetic oligonucleotide
acaaucuguucugcugacc

SEQ ID NO: 2218826 - RNA, 19 nt, Artificial Sequence
  Description of Artificial Sequence: Synthetic oligonucleotide
gaagccaaaguacaucagu

SEQ ID NO: 2218827 - RNA, 19 nt, Artificial Sequence
  Description of Artificial Sequence: Synthetic oligonucleotide
aguugcgacuagccugggc

SEQ ID NO: 2218828 - RNA, 19 nt, Artificial Sequence
  Description of Artificial Sequence: Synthetic oligonucleotide
uugaaccagcuuuuccagc

SEQ ID NO: 2218829 - RNA, 19 nt, Artificial Sequence
  Description of Artificial Sequence: Synthetic oligonucleotide
ugcuacggaaggcagcuau

SEQ ID NO: 2218830 - RNA, 19 nt, Artificial Sequence
  Description of Artificial Sequence: Synthetic oligonucleotide
auggcaauggaguggucca

SEQ ID NO: 2218831 - RNA, 19 nt, Artificial Sequence
  Description of Artificial Sequence: Synthetic oligonucleotide
cucaucagggcagauauca

SEQ ID NO: 2218832 - RNA, 19 nt, Artificial Sequence
  Description of Artificial Sequence: Synthetic oligonucleotide
acgguaguugcgacuagcc

SEQ ID NO: 2218833 - RNA, 19 nt, Artificial Sequence
  Description of Artificial Sequence: Synthetic oligonucleotide
ugcacauaccgggccaugg

SEQ ID NO: 2218834 - RNA, 19 nt, Artificial Sequence
  Description of Artificial Sequence: Synthetic oligonucleotide
cuacaaucuguucugcuga

SEQ ID NO: 2218835 - RNA, 19 nt, Artificial Sequence
  Description of Artificial Sequence: Synthetic oligonucleotide
ucuuggguggaaguccugc

SEQ ID NO: 2218836 - RNA, 19 nt, Artificial Sequence
  Description of Artificial Sequence: Synthetic oligonucleotide
ucaaggcaggaugcuacgg

SEQ ID NO: 2218837 - RNA, 19 nt, Artificial Sequence
  Description of Artificial Sequence: Synthetic oligonucleotide
ccuacuccgaccauaguag

SEQ ID NO: 2218838 - RNA, 19 nt, Artificial Sequence
  Description of Artificial Sequence: Synthetic oligonucleotide
uggaaguccugcacauacc

SEQ ID NO: 2218839 - RNA, 19 nt, Artificial Sequence
  Description of Artificial Sequence: Synthetic oligonucleotide
uuagaaccagucagaccca

SEQ ID NO: 2218840 - RNA, 19 nt, Artificial Sequence
  Description of Artificial Sequence: Synthetic oligonucleotide
cacuugaaccagcuuuucc

SEQ ID NO: 2218841 - RNA, 19 nt, Artificial Sequence
  Description of Artificial Sequence: Synthetic oligonucleotide
acuccgaccauaguagucu

SEQ ID NO: 2218842 - RNA, 19 nt, Artificial Sequence
  Description of Artificial Sequence: Synthetic oligonucleotide
ucagacccagcagucuugg

SEQ ID NO: 2218843 - RNA, 19 nt, Artificial Sequence
  Description of Artificial Sequence: Synthetic oligonucleotide
acuuguucuuuagaaccag

SEQ ID NO: 2218844 - RNA, 19 nt, Artificial Sequence
  Description of Artificial Sequence: Synthetic oligonucleotide
aagccaaaguacaucagua

SEQ ID NO: 2218845 - RNA, 19 nt, Artificial Sequence
  Description of Artificial Sequence: Synthetic oligonucleotide
gaaguccugcacauaccgg

SEQ ID NO: 2218846 - RNA, 19 nt, Artificial Sequence
  Description of Artificial Sequence: Synthetic oligonucleotide
acuagccugggccacuugu

SEQ ID NO: 2218847 - RNA, 19 nt, Artificial Sequence
  Description of Artificial Sequence: Synthetic oligonucleotide
uuggguggaaguccugcac

SEQ ID NO: 2218848 - RNA, 19 nt, Artificial Sequence
  Description of Artificial Sequence: Synthetic oligonucleotide
uacggaaggcagcuaugug

SEQ ID NO: 2218849 - RNA, 19 nt, Artificial Sequence
  Description of Artificial Sequence: Synthetic oligonucleotide
ugacguacacugucuacaa

SEQ ID NO: 2218850 - RNA, 19 nt, Artificial Sequence
  Description of Artificial Sequence: Synthetic oligonucleotide
cauggcugccacgucaucc

SEQ ID NO: 2218851 - RNA, 19 nt, Artificial Sequence
  Description of Artificial Sequence: Synthetic oligonucleotide
ucuuagcccgggaccuugg

SEQ ID NO: 2218852 - RNA, 19 nt, Artificial Sequence
  Description of Artificial Sequence: Synthetic oligonucleotide
cauaccgggccauggcugc

SEQ ID NO: 2218853 - RNA, 19 nt, Artificial Sequence
  Description of Artificial Sequence: Synthetic oligonucleotide
agggcagugagugaagcca

SEQ ID NO: 2218854 - RNA, 19 nt, Artificial Sequence
  Description of Artificial Sequence: Synthetic oligonucleotide
ucuguaccacuugaaccag

SEQ ID NO: 2218855 - RNA, 19 nt, Artificial Sequence
  Description of Artificial Sequence: Synthetic oligonucleotide
aguauacacgguaguugcg

SEQ ID NO: 2218856 - RNA, 19 nt, Artificial Sequence
  Description of Artificial Sequence: Synthetic oligonucleotide
uacaaucuguucugcugac

SEQ ID NO: 2218857 - RNA, 19 nt, Artificial Sequence
  Description of Artificial Sequence: Synthetic oligonucleotide
agcacgagcgccccugcag

SEQ ID NO: 2218858 - RNA, 19 nt, Artificial Sequence
  Description of Artificial Sequence: Synthetic oligonucleotide
ugggccacuuguucuuuag

SEQ ID NO: 2218859 - RNA, 19 nt, Artificial Sequence
  Description of Artificial Sequence: Synthetic oligonucleotide
uacacgguaguugcgacua

SEQ ID NO: 2218860 - RNA, 19 nt, Artificial Sequence
  Description of Artificial Sequence: Synthetic oligonucleotide
gugguccacaauauagucc

SEQ ID NO: 2218861 - RNA, 19 nt, Artificial Sequence
  Description of Artificial Sequence: Synthetic oligonucleotide
acagugaugaagacaggcu

SEQ ID NO: 2218862 - RNA, 19 nt, Artificial Sequence
  Description of Artificial Sequence: Synthetic oligonucleotide
uggguccacagugaugaag

SEQ ID NO: 2218863 - RNA, 19 nt, Artificial Sequence
  Description of Artificial Sequence: Synthetic oligonucleotide
gagcaaguagauggcaaug

SEQ ID NO: 2218864 - RNA, 19 nt, Artificial Sequence
  Description of Artificial Sequence: Synthetic oligonucleotide
aggcucugucuccagcuuc

SEQ ID NO: 2218865 - RNA, 19 nt, Artificial Sequence
  Description of Artificial Sequence: Synthetic oligonucleotide
agacaggcugcaccagggg

SEQ ID NO: 2218866 - RNA, 19 nt, Artificial Sequence
  Description of Artificial Sequence: Synthetic oligonucleotide
uagucugugaagaguccau

SEQ ID NO: 2218867 - RNA, 19 nt, Artificial Sequence
  Description of Artificial Sequence: Synthetic oligonucleotide
uccagcuucuguaccacuu

SEQ ID NO: 2218868 - RNA, 19 nt, Artificial Sequence
  Description of Artificial Sequence: Synthetic oligonucleotide
uacuccgaccauaguaguc

SEQ ID NO: 2218869 - RNA, 19 nt, Artificial Sequence
  Description of Artificial Sequence: Synthetic oligonucleotide
cagucuuggguggaagucc

SEQ ID NO: 2218870 - RNA, 19 nt, Artificial Sequence
  Description of Artificial Sequence: Synthetic oligonucleotide
uucuggguccacagugaug

SEQ ID NO: 2218871 - RNA, 19 nt, Artificial Sequence
  Description of Artificial Sequence: Synthetic oligonucleotide
guauacacgguaguugcga

SEQ ID NO: 2218872 - RNA, 19 nt, Artificial Sequence
  Description of Artificial Sequence: Synthetic oligonucleotide
ugucuacaaucuguucugc

SEQ ID NO: 2218873 - RNA, 19 nt, Artificial Sequence
  Description of Artificial Sequence: Synthetic oligonucleotide
auacacgguaguugcgacu

SEQ ID NO: 2218874 - RNA, 19 nt, Artificial Sequence
  Description of Artificial Sequence: Synthetic oligonucleotide
caaaguacaucaguaccca

SEQ ID NO: 2218875 - RNA, 19 nt, Artificial Sequence
  Description of Artificial Sequence: Synthetic oligonucleotide
agcagucuuggguggaagu

SEQ ID NO: 2218876 - RNA, 19 nt, Artificial Sequence
  Description of Artificial Sequence: Synthetic oligonucleotide
gaguccaucuggguugagc

SEQ ID NO: 2218877 - RNA, 19 nt, Artificial Sequence
  Description of Artificial Sequence: Synthetic oligonucleotide
cacuuguucuuuagaacca

SEQ ID NO: 2218878 - RNA, 19 nt, Artificial Sequence
  Description of Artificial Sequence: Synthetic oligonucleotide
gcuucuguaccacuugaac

SEQ ID NO: 2218879 - RNA, 19 nt, Artificial Sequence
  Description of Artificial Sequence: Synthetic oligonucleotide
aaaggugaaggggccuuga

SEQ ID NO: 2218880 - RNA, 19 nt, Artificial Sequence
  Description of Artificial Sequence: Synthetic oligonucleotide
guacacugucuacaaucug

SEQ ID NO: 2218881 - RNA, 19 nt, Artificial Sequence
  Description of Artificial Sequence: Synthetic oligonucleotide
acagcacgagcgccccugc

SEQ ID NO: 2218882 - RNA, 19 nt, Artificial Sequence
  Description of Artificial Sequence: Synthetic oligonucleotide
ugaaggggccuugaagggu

SEQ ID NO: 2218883 - RNA, 19 nt, Artificial Sequence
  Description of Artificial Sequence: Synthetic oligonucleotide
cagcuuuuccagcucauca

SEQ ID NO: 2218884 - RNA, 19 nt, Artificial Sequence
  Description of Artificial Sequence: Synthetic oligonucleotide
aaggugaaggggccuugaa

SEQ ID NO: 2218885 - RNA, 19 nt, Artificial Sequence
  Description of Artificial Sequence: Synthetic oligonucleotide
agucagacccagcagucuu

SEQ ID NO: 2218886 - RNA, 19 nt, Artificial Sequence
  Description of Artificial Sequence: Synthetic oligonucleotide
agaaccagucagacccagc

SEQ ID NO: 2218887 - RNA, 19 nt, Artificial Sequence
  Description of Artificial Sequence: Synthetic oligonucleotide
gaugcuacggaaggcagcu

SEQ ID NO: 2218888 - RNA, 19 nt, Artificial Sequence
  Description of Artificial Sequence: Synthetic oligonucleotide
ugaagacaggcugcaccag

SEQ ID NO: 2218889 - RNA, 19 nt, Artificial Sequence
  Description of Artificial Sequence: Synthetic oligonucleotide
uggagugguccacaauaua

SEQ ID NO: 2218890 - RNA, 19 nt, Artificial Sequence
  Description of Artificial Sequence: Synthetic oligonucleotide
cagggcagugagugaagcc

SEQ ID NO: 2218891 - RNA, 19 nt, Artificial Sequence
  Description of Artificial Sequence: Synthetic oligonucleotide
cugacguacacugucuaca

SEQ ID NO: 2218892 - RNA, 19 nt, Artificial Sequence
  Description of Artificial Sequence: Synthetic oligonucleotide
cacuguaguauacacggua

SEQ ID NO: 2218893 - RNA, 19 nt, Artificial Sequence
  Description of Artificial Sequence: Synthetic oligonucleotide
agggcagauaucagggcag

SEQ ID NO: 2218894 - RNA, 19 nt, Artificial Sequence
  Description of Artificial Sequence: Synthetic oligonucleotide
uugcgacuagccugggcca

SEQ ID NO: 2218895 - RNA, 19 nt, Artificial Sequence
  Description of Artificial Sequence: Synthetic oligonucleotide
caaucuguucugcugaccu

SEQ ID NO: 2218896 - RNA, 19 nt, Artificial Sequence
  Description of Artificial Sequence: Synthetic oligonucleotide
guagucugugaagagucca

SEQ ID NO: 2218897 - RNA, 19 nt, Artificial Sequence
  Description of Artificial Sequence: Synthetic oligonucleotide
cagggcagauaucagggca

SEQ ID NO: 2218898 - RNA, 19 nt, Artificial Sequence
  Description of Artificial Sequence: Synthetic oligonucleotide
uucugcugaccuacuccga

SEQ ID NO: 2218899 - RNA, 19 nt, Artificial Sequence
  Description of Artificial Sequence: Synthetic oligonucleotide
ugcugacguacacugucua

SEQ ID NO: 2218900 - RNA, 19 nt, Artificial Sequence
  Description of Artificial Sequence: Synthetic oligonucleotide
uggcugccacgucaucccg

SEQ ID NO: 2218901 - RNA, 19 nt, Artificial Sequence
  Description of Artificial Sequence: Synthetic oligonucleotide
aagaguccaucuggguuga

SEQ ID NO: 2218902 - RNA, 19 nt, Artificial Sequence
  Description of Artificial Sequence: Synthetic oligonucleotide
acccagcagucuugggugg

SEQ ID NO: 2218903 - RNA, 19 nt, Artificial Sequence
  Description of Artificial Sequence: Synthetic oligonucleotide
gaaaggugaaggggccuug

SEQ ID NO: 2218904 - RNA, 19 nt, Artificial Sequence
  Description of Artificial Sequence: Synthetic oligonucleotide
gucaucccguucugggucc

SEQ ID NO: 2218905 - RNA, 19 nt, Artificial Sequence
  Description of Artificial Sequence: Synthetic oligonucleotide
caggucaggcucugucucc

SEQ ID NO: 2218906 - RNA, 19 nt, Artificial Sequence
  Description of Artificial Sequence: Synthetic oligonucleotide
cuuagcccgggaccuuggg

SEQ ID NO: 2218907 - RNA, 19 nt, Artificial Sequence
  Description of Artificial Sequence: Synthetic oligonucleotide
gacagcacgagcgccccug

SEQ ID NO: 2218908 - RNA, 19 nt, Artificial Sequence
  Description of Artificial Sequence: Synthetic oligonucleotide
uacuucaaggcaggaugcu

SEQ ID NO: 2218909 - RNA, 19 nt, Artificial Sequence
  Description of Artificial Sequence: Synthetic oligonucleotide
gccacuuguucuuuagaac

SEQ ID NO: 2218910 - RNA, 19 nt, Artificial Sequence
  Description of Artificial Sequence: Synthetic oligonucleotide
caaggcaggaugcuacgga

SEQ ID NO: 2218911 - RNA, 19 nt, Artificial Sequence
  Description of Artificial Sequence: Synthetic oligonucleotide
acgucaucccguucugggu

SEQ ID NO: 2218912 - RNA, 19 nt, Artificial Sequence
  Description of Artificial Sequence: Synthetic oligonucleotide
uccgaccauaguagucugu

SEQ ID NO: 2218913 - RNA, 19 nt, Artificial Sequence
  Description of Artificial Sequence: Synthetic oligonucleotide
cacgguaguugcgacuagc

SEQ ID NO: 2218914 - RNA, 19 nt, Artificial Sequence
  Description of Artificial Sequence: Synthetic oligonucleotide
cagcuaugugcugacguac

SEQ ID NO: 2218915 - RNA, 19 nt, Artificial Sequence
  Description of Artificial Sequence: Synthetic oligonucleotide
guugagcaaguagauggca

SEQ ID NO: 2218916 - RNA, 19 nt, Artificial Sequence
  Description of Artificial Sequence: Synthetic oligonucleotide
auauaguccugguccucau

SEQ ID NO: 2218917 - RNA, 19 nt, Artificial Sequence
  Description of Artificial Sequence: Synthetic oligonucleotide
aggaugcuacggaaggcag

SEQ ID NO: 2218918 - RNA, 19 nt, Artificial Sequence
  Description of Artificial Sequence: Synthetic oligonucleotide
acauaccgggccauggcug

SEQ ID NO: 2218919 - RNA, 19 nt, Artificial Sequence
  Description of Artificial Sequence: Synthetic oligonucleotide
ccagcacuguaguauacac

SEQ ID NO: 2218920 - RNA, 19 nt, Artificial Sequence
  Description of Artificial Sequence: Synthetic oligonucleotide
accagcacuguaguauaca

SEQ ID NO: 2218921 - RNA, 19 nt, Artificial Sequence
  Description of Artificial Sequence: Synthetic oligonucleotide
cacugucuacaaucuguuc

SEQ ID NO: 2218922 - RNA, 19 nt, Artificial Sequence
  Description of Artificial Sequence: Synthetic oligonucleotide
gucugugaagaguccaucu

SEQ ID NO: 2218923 - RNA, 19 nt, Artificial Sequence
  Description of Artificial Sequence: Synthetic oligonucleotide
ucuccagcuucuguaccac

SEQ ID NO: 2218924 - RNA, 19 nt, Artificial Sequence
  Description of Artificial Sequence: Synthetic oligonucleotide
gugaugaagacaggcugca

SEQ ID NO: 2218925 - RNA, 19 nt, Artificial Sequence
  Description of Artificial Sequence: Synthetic oligonucleotide
cuuggguggaaguccugca

SEQ ID NO: 2218926 - RNA, 19 nt, Artificial Sequence
  Description of Artificial Sequence: Synthetic oligonucleotide
cauccuugggaccagcacu

SEQ ID NO: 2218927 - RNA, 19 nt, Artificial Sequence
  Description of Artificial Sequence: Synthetic oligonucleotide
gcaaguagauggcaaugga

SEQ ID NO: 2218928 - RNA, 19 nt, Artificial Sequence
  Description of Artificial Sequence: Synthetic oligonucleotide
agucuuggguggaaguccu

SEQ ID NO: 2218929 - RNA, 19 nt, Artificial Sequence
  Description of Artificial Sequence: Synthetic oligonucleotide
ugaugaagacaggcugcac

SEQ ID NO: 2218930 - RNA, 19 nt, Artificial Sequence
  Description of Artificial Sequence: Synthetic oligonucleotide
ggccacuuguucuuuagaa

SEQ ID NO: 2218931 - RNA, 19 nt, Artificial Sequence
  Description of Artificial Sequence: Synthetic oligonucleotide
caggaugcuacggaaggca

SEQ ID NO: 2218932 - RNA, 19 nt, Artificial Sequence
  Description of Artificial Sequence: Synthetic oligonucleotide
gagugguccacaauauagu

SEQ ID NO: 2218933 - RNA, 19 nt, Artificial Sequence
  Description of Artificial Sequence: Synthetic oligonucleotide
ggguccacagugaugaaga

SEQ ID NO: 2218934 - RNA, 19 nt, Artificial Sequence
  Description of Artificial Sequence: Synthetic oligonucleotide
acgagcgccccugcagagc

SEQ ID NO: 2218935 - RNA, 19 nt, Artificial Sequence
  Description of Artificial Sequence: Synthetic oligonucleotide
accaggggcaggucaggcu

SEQ ID NO: 2218936 - RNA, 19 nt, Artificial Sequence
  Description of Artificial Sequence: Synthetic oligonucleotide
cuccgaccauaguagucug

SEQ ID NO: 2218937 - RNA, 19 nt, Artificial Sequence
  Description of Artificial Sequence: Synthetic oligonucleotide
caauauaguccugguccuc

SEQ ID NO: 2218938 - RNA, 19 nt, Artificial Sequence
  Description of Artificial Sequence: Synthetic oligonucleotide
guccacagugaugaagaca

SEQ ID NO: 2218939 - RNA, 19 nt, Artificial Sequence
  Description of Artificial Sequence: Synthetic oligonucleotide
agcgccccugcagagcgcg

SEQ ID NO: 2218940 - RNA, 19 nt, Artificial Sequence
  Description of Artificial Sequence: Synthetic oligonucleotide
acuucaaggcaggaugcua

SEQ ID NO: 2218941 - RNA, 19 nt, Artificial Sequence
  Description of Artificial Sequence: Synthetic oligonucleotide
agcuaugugcugacguaca

SEQ ID NO: 2218942 - RNA, 19 nt, Artificial Sequence
  Description of Artificial Sequence: Synthetic oligonucleotide
accacuugaaccagcuuuu

SEQ ID NO: 2218943 - RNA, 19 nt, Artificial Sequence
  Description of Artificial Sequence: Synthetic oligonucleotide
guccucauccuugggacca

SEQ ID NO: 2218944 - RNA, 19 nt, Artificial Sequence
  Description of Artificial Sequence: Synthetic oligonucleotide
acacgguaguugcgacuag

SEQ ID NO: 2218945 - RNA, 19 nt, Artificial Sequence
  Description of Artificial Sequence: Synthetic oligonucleotide
aggcaggaugcuacggaag

SEQ ID NO: 2218946 - RNA, 19 nt, Artificial Sequence
  Description of Artificial Sequence: Synthetic oligonucleotide
auaccgggccauggcugcc

SEQ ID NO: 2218947 - RNA, 19 nt, Artificial Sequence
  Description of Artificial Sequence: Synthetic oligonucleotide
auggagugguccacaauau

SEQ ID NO: 2218948 - RNA, 19 nt, Artificial Sequence
  Description of Artificial Sequence: Synthetic oligonucleotide
acacugucuacaaucuguu

SEQ ID NO: 2218949 - RNA, 19 nt, Artificial Sequence
  Description of Artificial Sequence: Synthetic oligonucleotide
ccguucuggguccacagug

SEQ ID NO: 2218950 - RNA, 19 nt, Artificial Sequence
  Description of Artificial Sequence: Synthetic oligonucleotide
ccauaguagucugugaaga

SEQ ID NO: 2218951 - RNA, 19 nt, Artificial Sequence
  Description of Artificial Sequence: Synthetic oligonucleotide
gcagugagugaagccaaag

SEQ ID NO: 2218952 - RNA, 19 nt, Artificial Sequence
  Description of Artificial Sequence: Synthetic oligonucleotide
cuuguucuuuagaaccagu

SEQ ID NO: 2218953 - RNA, 19 nt, Artificial Sequence
  Description of Artificial Sequence: Synthetic oligonucleotide
gcugacguacacugucuac

SEQ ID NO: 2218954 - RNA, 19 nt, Artificial Sequence
  Description of Artificial Sequence: Synthetic oligonucleotide
cucauccuugggaccagca

SEQ ID NO: 2218955 - RNA, 19 nt, Artificial Sequence
  Description of Artificial Sequence: Synthetic oligonucleotide
gucuacaaucuguucugcu

SEQ ID NO: 2218956 - RNA, 19 nt, Artificial Sequence
  Description of Artificial Sequence: Synthetic oligonucleotide
cacgagcgccccugcagag

SEQ ID NO: 2218957 - RNA, 19 nt, Artificial Sequence
  Description of Artificial Sequence: Synthetic oligonucleotide
cagacccagcagucuuggg

SEQ ID NO: 2218958 - RNA, 19 nt, Artificial Sequence
  Description of Artificial Sequence: Synthetic oligonucleotide
gguccucauccuugggacc

SEQ ID NO: 2218959 - RNA, 19 nt, Artificial Sequence
  Description of Artificial Sequence: Synthetic oligonucleotide
cagcuucuguaccacuuga

SEQ ID NO: 2218960 - RNA, 19 nt, Artificial Sequence
  Description of Artificial Sequence: Synthetic oligonucleotide
gcacauaccgggccauggc

SEQ ID NO: 2218961 - RNA, 19 nt, Artificial Sequence
  Description of Artificial Sequence: Synthetic oligonucleotide
uggcaauggagugguccac

SEQ ID NO: 2218962 - RNA, 19 nt, Artificial Sequence
  Description of Artificial Sequence: Synthetic oligonucleotide
ccacaauauaguccugguc

SEQ ID NO: 2218963 - RNA, 19 nt, Artificial Sequence
  Description of Artificial Sequence: Synthetic oligonucleotide
ugcgacuagccugggccac

SEQ ID NO: 2218964 - RNA, 19 nt, Artificial Sequence
  Description of Artificial Sequence: Synthetic oligonucleotide
cagugagugaagccaaagu

SEQ ID NO: 2218965 - RNA, 19 nt, Artificial Sequence
  Description of Artificial Sequence: Synthetic oligonucleotide
uccucauccuugggaccag

SEQ ID NO: 2218966 - RNA, 19 nt, Artificial Sequence
  Description of Artificial Sequence: Synthetic oligonucleotide
gcaggucaggcucugucuc

SEQ ID NO: 2218967 - RNA, 19 nt, Artificial Sequence
  Description of Artificial Sequence: Synthetic oligonucleotide
ggaugcuacggaaggcagc

SEQ ID NO: 2218968 - RNA, 19 nt, Artificial Sequence
  Description of Artificial Sequence: Synthetic oligonucleotide
cuguaguauacacgguagu

SEQ ID NO: 2218969 - RNA, 19 nt, Artificial Sequence
  Description of Artificial Sequence: Synthetic oligonucleotide
guauacuucaaggcaggau

SEQ ID NO: 2218970 - RNA, 19 nt, Artificial Sequence
  Description of Artificial Sequence: Synthetic oligonucleotide
ccgaccauaguagucugug

SEQ ID NO: 2218971 - RNA, 19 nt, Artificial Sequence
  Description of Artificial Sequence: Synthetic oligonucleotide
ccagucagacccagcaguc

SEQ ID NO: 2218972 - RNA, 19 nt, Artificial Sequence
  Description of Artificial Sequence: Synthetic oligonucleotide
ccagcuucuguaccacuug

SEQ ID NO: 2218973 - RNA, 19 nt, Artificial Sequence
  Description of Artificial Sequence: Synthetic oligonucleotide
gacuagccugggccacuug

SEQ ID NO: 2218974 - RNA, 19 nt, Artificial Sequence
  Description of Artificial Sequence: Synthetic oligonucleotide
ggcagcuaugugcugacgu

SEQ ID NO: 2218975 - RNA, 19 nt, Artificial Sequence
  Description of Artificial Sequence: Synthetic oligonucleotide
agcuucuguaccacuugaa

SEQ ID NO: 2218976 - RNA, 19 nt, Artificial Sequence
  Description of Artificial Sequence: Synthetic oligonucleotide
agcccgggaccuuggggcu

SEQ ID NO: 2218977 - RNA, 19 nt, Artificial Sequence
  Description of Artificial Sequence: Synthetic oligonucleotide
cagcagucuuggguggaag

SEQ ID NO: 2218978 - RNA, 19 nt, Artificial Sequence
  Description of Artificial Sequence: Synthetic oligonucleotide
gguccacagugaugaagac

SEQ ID NO: 2218979 - RNA, 19 nt, Artificial Sequence
  Description of Artificial Sequence: Synthetic oligonucleotide
uaguugcgacuagccuggg

SEQ ID NO: 2218980 - RNA, 19 nt, Artificial Sequence
  Description of Artificial Sequence: Synthetic oligonucleotide
aggcagcuaugugcugacg

SEQ ID NO: 2218981 - RNA, 19 nt, Artificial Sequence
  Description of Artificial Sequence: Synthetic oligonucleotide
cacauaccgggccauggcu

SEQ ID NO: 2218982 - RNA, 19 nt, Artificial Sequence
  Description of Artificial Sequence: Synthetic oligonucleotide
cuggguugagcaaguagau

SEQ ID NO: 2218983 - RNA, 19 nt, Artificial Sequence
  Description of Artificial Sequence: Synthetic oligonucleotide
caccaggggcaggucaggc

SEQ ID NO: 2218984 - RNA, 19 nt, Artificial Sequence
  Description of Artificial Sequence: Synthetic oligonucleotide
guccaucuggguugagcaa

SEQ ID NO: 2218985 - RNA, 19 nt, Artificial Sequence
  Description of Artificial Sequence: Synthetic oligonucleotide
gcagucuuggguggaaguc

SEQ ID NO: 2218986 - RNA, 19 nt, Artificial Sequence
  Description of Artificial Sequence: Synthetic oligonucleotide
ggaccagcacuguaguaua

SEQ ID NO: 2218987 - RNA, 19 nt, Artificial Sequence
  Description of Artificial Sequence: Synthetic oligonucleotide
cuacggaaggcagcuaugu

SEQ ID NO: 2218988 - RNA, 19 nt, Artificial Sequence
  Description of Artificial Sequence: Synthetic oligonucleotide
gcagcuaugugcugacgua

SEQ ID NO: 2218989 - RNA, 19 nt, Artificial Sequence
  Description of Artificial Sequence: Synthetic oligonucleotide
cgagcgccccugcagagcg

SEQ ID NO: 2218990 - RNA, 19 nt, Artificial Sequence
  Description of Artificial Sequence: Synthetic oligonucleotide
uaccgggccauggcugcca

SEQ ID NO: 2218991 - RNA, 19 nt, Artificial Sequence
  Description of Artificial Sequence: Synthetic oligonucleotide
cugaccuacuccgaccaua

SEQ ID NO: 2218992 - RNA, 19 nt, Artificial Sequence
  Description of Artificial Sequence: Synthetic oligonucleotide
cuacuccgaccauaguagu

SEQ ID NO: 2218993 - RNA, 19 nt, Artificial Sequence
  Description of Artificial Sequence: Synthetic oligonucleotide
aucccguucuggguccaca

SEQ ID NO: 2218994 - RNA, 19 nt, Artificial Sequence
  Description of Artificial Sequence: Synthetic oligonucleotide
gcaauggagugguccacaa

SEQ ID NO: 2218995 - RNA, 19 nt, Artificial Sequence
  Description of Artificial Sequence: Synthetic oligonucleotide
ucaucccguucugggucca

SEQ ID NO: 2218996 - RNA, 19 nt, Artificial Sequence
  Description of Artificial Sequence: Synthetic oligonucleotide
guucuggguccacagugau

SEQ ID NO: 2218997 - RNA, 19 nt, Artificial Sequence
  Description of Artificial Sequence: Synthetic oligonucleotide
uccuugggaccagcacugu

SEQ ID NO: 2218998 - RNA, 19 nt, Artificial Sequence
  Description of Artificial Sequence: Synthetic oligonucleotide
agauggcaauggagugguc

SEQ ID NO: 2218999 - RNA, 19 nt, Artificial Sequence
  Description of Artificial Sequence: Synthetic oligonucleotide
gggaccagcacuguaguau

SEQ ID NO: 2219000 - RNA, 19 nt, Artificial Sequence
  Description of Artificial Sequence: Synthetic oligonucleotide
ggcaauggagugguccaca

SEQ ID NO: 2219001 - RNA, 19 nt, Artificial Sequence
  Description of Artificial Sequence: Synthetic oligonucleotide
cgucaucccguucuggguc

SEQ ID NO: 2219002 - RNA, 19 nt, Artificial Sequence
  Description of Artificial Sequence: Synthetic oligonucleotide
ggucaggcucugucuccag

SEQ ID NO: 2219003 - RNA, 19 nt, Artificial Sequence
  Description of Artificial Sequence: Synthetic oligonucleotide
gccacgucaucccguucug

SEQ ID NO: 2219004 - RNA, 19 nt, Artificial Sequence
  Description of Artificial Sequence: Synthetic oligonucleotide
cugcacauaccgggccaug

SEQ ID NO: 2219005 - RNA, 19 nt, Artificial Sequence
  Description of Artificial Sequence: Synthetic oligonucleotide
ggcaggucaggcucugucu

SEQ ID NO: 2219006 - RNA, 19 nt, Artificial Sequence
  Description of Artificial Sequence: Synthetic oligonucleotide
gcacgagcgccccugcaga

SEQ ID NO: 2219007 - RNA, 19 nt, Artificial Sequence
  Description of Artificial Sequence: Synthetic oligonucleotide
gggccacuuguucuuuaga

SEQ ID NO: 2219008 - RNA, 19 nt, Artificial Sequence
  Description of Artificial Sequence: Synthetic oligonucleotide
cguacacugucuacaaucu

SEQ ID NO: 2219009 - RNA, 19 nt, Artificial Sequence
  Description of Artificial Sequence: Synthetic oligonucleotide
agaguccaucuggguugag

SEQ ID NO: 2219010 - RNA, 19 nt, Artificial Sequence
  Description of Artificial Sequence: Synthetic oligonucleotide
gugcugacguacacugucu

SEQ ID NO: 2219011 - RNA, 19 nt, Artificial Sequence
  Description of Artificial Sequence: Synthetic oligonucleotide
gguccacaauauaguccug

SEQ ID NO: 2219012 - RNA, 19 nt, Artificial Sequence
  Description of Artificial Sequence: Synthetic oligonucleotide
gaccuacuccgaccauagu

SEQ ID NO: 2219013 - RNA, 19 nt, Artificial Sequence
  Description of Artificial Sequence: Synthetic oligonucleotide
caauggagugguccacaau

SEQ ID NO: 2219014 - RNA, 19 nt, Artificial Sequence
  Description of Artificial Sequence: Synthetic oligonucleotide
cguucuggguccacaguga

SEQ ID NO: 2219015 - RNA, 19 nt, Artificial Sequence
  Description of Artificial Sequence: Synthetic oligonucleotide
cugccacgucaucccguuc

SEQ ID NO: 2219016 - RNA, 19 nt, Artificial Sequence
  Description of Artificial Sequence: Synthetic oligonucleotide
ccacgucaucccguucugg

SEQ ID NO: 2219017 - RNA, 19 nt, Artificial Sequence
  Description of Artificial Sequence: Synthetic oligonucleotide
ggguggaaguccugcacau

SEQ ID NO: 2219018 - RNA, 19 nt, Artificial Sequence
  Description of Artificial Sequence: Synthetic oligonucleotide
cugggccacuuguucuuua

SEQ ID NO: 2219019 - RNA, 19 nt, Artificial Sequence
  Description of Artificial Sequence: Synthetic oligonucleotide
gggcagugagugaagccaa

SEQ ID NO: 2219020 - RNA, 19 nt, Artificial Sequence
  Description of Artificial Sequence: Synthetic oligonucleotide
caucccguucuggguccac

SEQ ID NO: 2219021 - RNA, 19 nt, Artificial Sequence
  Description of Artificial Sequence: Synthetic oligonucleotide
guaccacuugaaccagcuu

SEQ ID NO: 2219022 - RNA, 19 nt, Artificial Sequence
  Description of Artificial Sequence: Synthetic oligonucleotide
ccacuugaaccagcuuuuc

SEQ ID NO: 2219023 - RNA, 19 nt, Artificial Sequence
  Description of Artificial Sequence: Synthetic oligonucleotide
cagucagacccagcagucu

SEQ ID NO: 2219024 - RNA, 19 nt, Artificial Sequence
  Description of Artificial Sequence: Synthetic oligonucleotide
gagcgccccugcagagcgc

SEQ ID NO: 2219025 - RNA, 19 nt, Artificial Sequence
  Description of Artificial Sequence: Synthetic oligonucleotide
cagcacgagcgccccugca

SEQ ID NO: 2219026 - RNA, 19 nt, Artificial Sequence
  Description of Artificial Sequence: Synthetic oligonucleotide
ccucauccuugggaccagc

SEQ ID NO: 2219027 - RNA, 19 nt, Artificial Sequence
  Description of Artificial Sequence: Synthetic oligonucleotide
gcucaucagggcagauauc

SEQ ID NO: 2219028 - RNA, 19 nt, Artificial Sequence
  Description of Artificial Sequence: Synthetic oligonucleotide
cuggguccacagugaugaa

SEQ ID NO: 2219029 - RNA, 19 nt, Artificial Sequence
  Description of Artificial Sequence: Synthetic oligonucleotide
caucuggguugagcaagua

SEQ ID NO: 2219030 - RNA, 19 nt, Artificial Sequence
  Description of Artificial Sequence: Synthetic oligonucleotide
gguggaaguccugcacaua

SEQ ID NO: 2219031 - RNA, 19 nt, Artificial Sequence
  Description of Artificial Sequence: Synthetic oligonucleotide
augcuacggaaggcagcua

SEQ ID NO: 2219032 - RNA, 19 nt, Artificial Sequence
  Description of Artificial Sequence: Synthetic oligonucleotide
ggcagugagugaagccaaa

SEQ ID NO: 2219033 - RNA, 19 nt, Artificial Sequence
  Description of Artificial Sequence: Synthetic oligonucleotide
caggggcaggucaggcucu

SEQ ID NO: 2219034 - RNA, 19 nt, Artificial Sequence
  Description of Artificial Sequence: Synthetic oligonucleotide
cccgggaccuuggggcugg

SEQ ID NO: 2219035 - RNA, 19 nt, Artificial Sequence
  Description of Artificial Sequence: Synthetic oligonucleotide
gcugccacgucaucccguu

SEQ ID NO: 2219036 - RNA, 19 nt, Artificial Sequence
  Description of Artificial Sequence: Synthetic oligonucleotide
ccaucuggguugagcaagu

SEQ ID NO: 2219037 - RNA, 19 nt, Artificial Sequence
  Description of Artificial Sequence: Synthetic oligonucleotide
ccuugggaccagcacugua

SEQ ID NO: 2219038 - RNA, 19 nt, Artificial Sequence
  Description of Artificial Sequence: Synthetic oligonucleotide
ccgggccauggcugccacg

SEQ ID NO: 2219039 - RNA, 19 nt, Artificial Sequence
  Description of Artificial Sequence: Synthetic oligonucleotide
gggcagauaucagggcagu

SEQ ID NO: 2219040 - RNA, 19 nt, Artificial Sequence
  Description of Artificial Sequence: Synthetic oligonucleotide
gcacuguaguauacacggu

SEQ ID NO: 2219041 - RNA, 19 nt, Artificial Sequence
  Description of Artificial Sequence: Synthetic oligonucleotide
gggccauggcugccacguc

SEQ ID NO: 2219042 - RNA, 19 nt, Artificial Sequence
  Description of Artificial Sequence: Synthetic oligonucleotide
gccugggccacuuguucuu

SEQ ID NO: 2219043 - RNA, 19 nt, Artificial Sequence
  Description of Artificial Sequence: Synthetic oligonucleotide
cgguaguugcgacuagccu

SEQ ID NO: 2219044 - RNA, 19 nt, Artificial Sequence
  Description of Artificial Sequence: Synthetic oligonucleotide
cgccccugcagagcgcggc

SEQ ID NO: 2219045 - RNA, 19 nt, Artificial Sequence
  Description of Artificial Sequence: Synthetic oligonucleotide
gcccgggaccuuggggcug

SEQ ID NO: 2219046 - RNA, 19 nt, Artificial Sequence
  Description of Artificial Sequence: Synthetic oligonucleotide
gccauggcugccacgucau

SEQ ID NO: 2219047 - RNA, 19 nt, Artificial Sequence
  Description of Artificial Sequence: Synthetic oligonucleotide
ggcugccacgucaucccgu

SEQ ID NO: 2219048 - RNA, 19 nt, Artificial Sequence
  Description of Artificial Sequence: Synthetic oligonucleotide
ccagcagucuuggguggaa

SEQ ID NO: 2219049 - RNA, 19 nt, Artificial Sequence
  Description of Artificial Sequence: Synthetic oligonucleotide
cccagcagucuugggugga

SEQ ID NO: 2219050 - RNA, 19 nt, Artificial Sequence
  Description of Artificial Sequence: Synthetic oligonucleotide
gcugaccuacuccgaccau

SEQ ID NO: 2219051 - RNA, 19 nt, Artificial Sequence
  Description of Artificial Sequence: Synthetic oligonucleotide
gcgccccugcagagcgcgg

SEQ ID NO: 2219052 - RNA, 19 nt, Artificial Sequence
  Description of Artificial Sequence: Synthetic oligonucleotide
cgggccauggcugccacgu

SEQ ID NO: 2219053 - RNA, 19 nt, Artificial Sequence
  Description of Artificial Sequence: Synthetic oligonucleotide
gcgacuagccugggccacu

SEQ ID NO: 2219054 - RNA, 19 nt, Artificial Sequence
  Description of Artificial Sequence: Synthetic oligonucleotide
cgaaaggugaaggggccuu

SEQ ID NO: 2219055 - RNA, 19 nt, Artificial Sequence
  Description of Artificial Sequence: Synthetic oligonucleotide
ccugcacauaccgggccau

SEQ ID NO: 2219056 - RNA, 19 nt, Artificial Sequence
  Description of Artificial Sequence: Synthetic oligonucleotide
ccugggccacuuguucuuu

SEQ ID NO: 2219057 - RNA, 19 nt, Artificial Sequence
  Description of Artificial Sequence: Synthetic oligonucleotide
cgacuagccugggccacuu

SEQ ID NO: 2219058 - RNA, 19 nt, Artificial Sequence
  Description of Artificial Sequence: Synthetic oligonucleotide
aauucuauaguggaaaguc

SEQ ID NO: 2219059 - RNA, 19 nt, Artificial Sequence
  Description of Artificial Sequence: Synthetic oligonucleotide
aaugcuuccaaguacuguc

SEQ ID NO: 2219060 - RNA, 19 nt, Artificial Sequence
  Description of Artificial Sequence: Synthetic oligonucleotide
uuuagaagcacgcucaucu

SEQ ID NO: 2219061 - RNA, 19 nt, Artificial Sequence
  Description of Artificial Sequence: Synthetic oligonucleotide
aauagcaaacacuccgccc

SEQ ID NO: 2219062 - RNA, 19 nt, Artificial Sequence
  Description of Artificial Sequence: Synthetic oligonucleotide
uacauuacaauauauuuac

SEQ ID NO: 2219063 - RNA, 19 nt, Artificial Sequence
  Description of Artificial Sequence: Synthetic oligonucleotide
uguaaauacauacagguuu

SEQ ID NO: 2219064 - RNA, 19 nt, Artificial Sequence
  Description of Artificial Sequence: Synthetic oligonucleotide
aaacacuccgcccaagccc

SEQ ID NO: 2219065 - RNA, 19 nt, Artificial Sequence
  Description of Artificial Sequence: Synthetic oligonucleotide
aaaugaauucuauagugga

SEQ ID NO: 2219066 - RNA, 19 nt, Artificial Sequence
  Description of Artificial Sequence: Synthetic oligonucleotide
cuuugaauuccuuuggagg

SEQ ID NO: 2219067 - RNA, 19 nt, Artificial Sequence
  Description of Artificial Sequence: Synthetic oligonucleotide
uuugaauuccuuuggaggc

SEQ ID NO: 2219068 - RNA, 19 nt, Artificial Sequence
  Description of Artificial Sequence: Synthetic oligonucleotide
uccaugaucauuuauuuac

SEQ ID NO: 2219069 - RNA, 19 nt, Artificial Sequence
  Description of Artificial Sequence: Synthetic oligonucleotide
uauaaaagguucaaagaac

SEQ ID NO: 2219070 - RNA, 19 nt, Artificial Sequence
  Description of Artificial Sequence: Synthetic oligonucleotide
ucaguucacaaucacaggc

SEQ ID NO: 2219071 - RNA, 19 nt, Artificial Sequence
  Description of Artificial Sequence: Synthetic oligonucleotide
uguacagacacuaaugaaa

SEQ ID NO: 2219072 - RNA, 19 nt, Artificial Sequence
  Description of Artificial Sequence: Synthetic oligonucleotide
aaagaacacuggcaugucc

SEQ ID NO: 2219073 - RNA, 19 nt, Artificial Sequence
  Description of Artificial Sequence: Synthetic oligonucleotide
uagaguuguaaauacauac

SEQ ID NO: 2219074 - RNA, 19 nt, Artificial Sequence
  Description of Artificial Sequence: Synthetic oligonucleotide
gaguuguaaauacauacag

SEQ ID NO: 2219075 - RNA, 19 nt, Artificial Sequence
  Description of Artificial Sequence: Synthetic oligonucleotide
aaagguucaaagaacacug

SEQ ID NO: 2219076 - RNA, 19 nt, Artificial Sequence
  Description of Artificial Sequence: Synthetic oligonucleotide
aucaccauuguccucauag

SEQ ID NO: 2219077 - RNA, 19 nt, Artificial Sequence
  Description of Artificial Sequence: Synthetic oligonucleotide
cacaauagcaaacacuccg

SEQ ID NO: 2219078 - RNA, 19 nt, Artificial Sequence
  Description of Artificial Sequence: Synthetic oligonucleotide
cauaauagcgcacaauagc

SEQ ID NO: 2219079 - RNA, 19 nt, Artificial Sequence
  Description of Artificial Sequence: Synthetic oligonucleotide
cauaaauacuuucauggag

SEQ ID NO: 2219080 - RNA, 19 nt, Artificial Sequence
  Description of Artificial Sequence: Synthetic oligonucleotide
aguuuuauuuccaugauca

SEQ ID NO: 2219081 - RNA, 19 nt, Artificial Sequence
  Description of Artificial Sequence: Synthetic oligonucleotide
aaugaaaagcacccacaag

SEQ ID NO: 2219082 - RNA, 19 nt, Artificial Sequence
  Description of Artificial Sequence: Synthetic oligonucleotide
aaaagguucaaagaacacu

SEQ ID NO: 2219083 - RNA, 19 nt, Artificial Sequence
  Description of Artificial Sequence: Synthetic oligonucleotide
ucauaauagcgcacaauag

SEQ ID NO: 2219084 - RNA, 19 nt, Artificial Sequence
  Description of Artificial Sequence: Synthetic oligonucleotide
gacacuaaugaaaagcacc

SEQ ID NO: 2219085 - RNA, 19 nt, Artificial Sequence
  Description of Artificial Sequence: Synthetic oligonucleotide
acacuaaugaaaagcaccc

SEQ ID NO: 2219086 - RNA, 19 nt, Artificial Sequence
  Description of Artificial Sequence: Synthetic oligonucleotide
agguucaaagaacacuggc

SEQ ID NO: 2219087 - RNA, 19 nt, Artificial Sequence
  Description of Artificial Sequence: Synthetic oligonucleotide
uuaaguaguuuuauuucca

SEQ ID NO: 2219088 - RNA, 19 nt, Artificial Sequence
  Description of Artificial Sequence: Synthetic oligonucleotide
uucgaguuuuagaagcacg

SEQ ID NO: 2219089 - RNA, 19 nt, Artificial Sequence
  Description of Artificial Sequence: Synthetic oligonucleotide
uauuccuuuauaaaagguu

SEQ ID NO: 2219090 - RNA, 19 nt, Artificial Sequence
  Description of Artificial Sequence: Synthetic oligonucleotide
aaaagcacccacaaguuca

SEQ ID NO: 2219091 - RNA, 19 nt, Artificial Sequence
  Description of Artificial Sequence: Synthetic oligonucleotide
cucuucgaguuuuagaagc

SEQ ID NO: 2219092 - RNA, 19 nt, Artificial Sequence
  Description of Artificial Sequence: Synthetic oligonucleotide
uauugccauguccagcucg

SEQ ID NO: 2219093 - RNA, 19 nt, Artificial Sequence
  Description of Artificial Sequence: Synthetic oligonucleotide
aaguucacaguacauuaca

SEQ ID NO: 2219094 - RNA, 19 nt, Artificial Sequence
  Description of Artificial Sequence: Synthetic oligonucleotide
ucgaguuuuagaagcacgc

SEQ ID NO: 2219095 - RNA, 19 nt, Artificial Sequence
  Description of Artificial Sequence: Synthetic oligonucleotide
uggggcaucaucaccauug

SEQ ID NO: 2219096 - RNA, 19 nt, Artificial Sequence
  Description of Artificial Sequence: Synthetic oligonucleotide
ugaauucuauaguggaaag

SEQ ID NO: 2219097 - RNA, 19 nt, Artificial Sequence
  Description of Artificial Sequence: Synthetic oligonucleotide
aauagcgcacaauagcaaa

SEQ ID NO: 2219098 - RNA, 19 nt, Artificial Sequence
  Description of Artificial Sequence: Synthetic oligonucleotide
acauacagguuuuaaauaa

SEQ ID NO: 2219099 - RNA, 19 nt, Artificial Sequence
  Description of Artificial Sequence: Synthetic oligonucleotide
ucuauaguggaaagucuug

SEQ ID NO: 2219100 - RNA, 19 nt, Artificial Sequence
  Description of Artificial Sequence: Synthetic oligonucleotide
agacuuugaauuccuuugg

SEQ ID NO: 2219101 - RNA, 19 nt, Artificial Sequence
  Description of Artificial Sequence: Synthetic oligonucleotide
aacacuggcauguccacgu

SEQ ID NO: 2219102 - RNA, 19 nt, Artificial Sequence
  Description of Artificial Sequence: Synthetic oligonucleotide
acuguacagacacuaauga

SEQ ID NO: 2219103 - RNA, 19 nt, Artificial Sequence
  Description of Artificial Sequence: Synthetic oligonucleotide
auaaaagguucaaagaaca

SEQ ID NO: 2219104 - RNA, 19 nt, Artificial Sequence
  Description of Artificial Sequence: Synthetic oligonucleotide
auaaauacuuucauggaga

SEQ ID NO: 2219105 - RNA, 19 nt, Artificial Sequence
  Description of Artificial Sequence: Synthetic oligonucleotide
uccucauagauguucgacc

SEQ ID NO: 2219106 - RNA, 19 nt, Artificial Sequence
  Description of Artificial Sequence: Synthetic oligonucleotide
uacguguuaguucauuaac

SEQ ID NO: 2219107 - RNA, 19 nt, Artificial Sequence
  Description of Artificial Sequence: Synthetic oligonucleotide
aacacuccgcccaagcccc

SEQ ID NO: 2219108 - RNA, 19 nt, Artificial Sequence
  Description of Artificial Sequence: Synthetic oligonucleotide
aguuguaaauacauacagg

SEQ ID NO: 2219109 - RNA, 19 nt, Artificial Sequence
  Description of Artificial Sequence: Synthetic oligonucleotide
acaauagcaaacacuccgc

SEQ ID NO: 2219110 - RNA, 19 nt, Artificial Sequence
  Description of Artificial Sequence: Synthetic oligonucleotide
uuccuuuauaaaagguuca

SEQ ID NO: 2219111 - RNA, 19 nt, Artificial Sequence
  Description of Artificial Sequence: Synthetic oligonucleotide
gucaccaauucugugauag

SEQ ID NO: 2219112 - RNA, 19 nt, Artificial Sequence
  Description of Artificial Sequence: Synthetic oligonucleotide
auaauagcgcacaauagca

SEQ ID NO: 2219113 - RNA, 19 nt, Artificial Sequence
  Description of Artificial Sequence: Synthetic oligonucleotide
aguacugucaguucacaau

SEQ ID NO: 2219114 - RNA, 19 nt, Artificial Sequence
  Description of Artificial Sequence: Synthetic oligonucleotide
aagccugucaccaauucug

SEQ ID NO: 2219115 - RNA, 19 nt, Artificial Sequence
  Description of Artificial Sequence: Synthetic oligonucleotide
aaucacaggccaccauuag

SEQ ID NO: 2219116 - RNA, 19 nt, Artificial Sequence
  Description of Artificial Sequence: Synthetic oligonucleotide
auuagaguuguaaauacau

SEQ ID NO: 2219117 - RNA, 19 nt, Artificial Sequence
  Description of Artificial Sequence: Synthetic oligonucleotide
uucuauaguggaaagucuu

SEQ ID NO: 2219118 - RNA, 19 nt, Artificial Sequence
  Description of Artificial Sequence: Synthetic oligonucleotide
uucacaaucacaggccacc

SEQ ID NO: 2219119 - RNA, 19 nt, Artificial Sequence
  Description of Artificial Sequence: Synthetic oligonucleotide
aagucuugaggcgauacgu

SEQ ID NO: 2219120 - RNA, 19 nt, Artificial Sequence
  Description of Artificial Sequence: Synthetic oligonucleotide
gaguuuuagaagcacgcuc

SEQ ID NO: 2219121 - RNA, 19 nt, Artificial Sequence
  Description of Artificial Sequence: Synthetic oligonucleotide
uuuccaugaucauuuauuu

SEQ ID NO: 2219122 - RNA, 19 nt, Artificial Sequence
  Description of Artificial Sequence: Synthetic oligonucleotide
uacguaguuggacuuccag

SEQ ID NO: 2219123 - RNA, 19 nt, Artificial Sequence
  Description of Artificial Sequence: Synthetic oligonucleotide
caugaucauuuauuuacac

SEQ ID NO: 2219124 - RNA, 19 nt, Artificial Sequence
  Description of Artificial Sequence: Synthetic oligonucleotide
uuuuauugccauguccagc

SEQ ID NO: 2219125 - RNA, 19 nt, Artificial Sequence
  Description of Artificial Sequence: Synthetic oligonucleotide
uaaauacuuucauggagau

SEQ ID NO: 2219126 - RNA, 19 nt, Artificial Sequence
  Description of Artificial Sequence: Synthetic oligonucleotide
uacauacagguuuuaaaua

SEQ ID NO: 2219127 - RNA, 19 nt, Artificial Sequence
  Description of Artificial Sequence: Synthetic oligonucleotide
caguucacaaucacaggcc

SEQ ID NO: 2219128 - RNA, 19 nt, Artificial Sequence
  Description of Artificial Sequence: Synthetic oligonucleotide
ucuucgaguuuuagaagca

SEQ ID NO: 2219129 - RNA, 19 nt, Artificial Sequence
  Description of Artificial Sequence: Synthetic oligonucleotide
uaggccgcgaaguagcuca

SEQ ID NO: 2219130 - RNA, 19 nt, Artificial Sequence
  Description of Artificial Sequence: Synthetic oligonucleotide
auguccacgugacaaaacu

SEQ ID NO: 2219131 - RNA, 19 nt, Artificial Sequence
  Description of Artificial Sequence: Synthetic oligonucleotide
aguuuuagaagcacgcuca

SEQ ID NO: 2219132 - RNA, 19 nt, Artificial Sequence
  Description of Artificial Sequence: Synthetic oligonucleotide
uucucggcagcguaggucu

SEQ ID NO: 2219133 - RNA, 19 nt, Artificial Sequence
  Description of Artificial Sequence: Synthetic oligonucleotide
agucacgacucucuacuuc

SEQ ID NO: 2219134 - RNA, 19 nt, Artificial Sequence
  Description of Artificial Sequence: Synthetic oligonucleotide
caccaauucugugauagcc

SEQ ID NO: 2219135 - RNA, 19 nt, Artificial Sequence
  Description of Artificial Sequence: Synthetic oligonucleotide
uaauagcgcacaauagcaa

SEQ ID NO: 2219136 - RNA, 19 nt, Artificial Sequence
  Description of Artificial Sequence: Synthetic oligonucleotide
cacucuucgaguuuuagaa

SEQ ID NO: 2219137 - RNA, 19 nt, Artificial Sequence
  Description of Artificial Sequence: Synthetic oligonucleotide
aaugaauucuauaguggaa

SEQ ID NO: 2219138 - RNA, 19 nt, Artificial Sequence
  Description of Artificial Sequence: Synthetic oligonucleotide
cuaaugaaaagcacccaca

SEQ ID NO: 2219139 - RNA, 19 nt, Artificial Sequence
  Description of Artificial Sequence: Synthetic oligonucleotide
caauagcaaacacuccgcc

SEQ ID NO: 2219140 - RNA, 19 nt, Artificial Sequence
  Description of Artificial Sequence: Synthetic oligonucleotide
uaguuggacuuccagacuu

SEQ ID NO: 2219141 - RNA, 19 nt, Artificial Sequence
  Description of Artificial Sequence: Synthetic oligonucleotide
agcgcacaauagcaaacac

SEQ ID NO: 2219142 - RNA, 19 nt, Artificial Sequence
  Description of Artificial Sequence: Synthetic oligonucleotide
cgugacaaaacucucaaag

SEQ ID NO: 2219143 - RNA, 19 nt, Artificial Sequence
  Description of Artificial Sequence: Synthetic oligonucleotide
acaaaacucucaaagccug

SEQ ID NO: 2219144 - RNA, 19 nt, Artificial Sequence
  Description of Artificial Sequence: Synthetic oligonucleotide
agacacuaaugaaaagcac

SEQ ID NO: 2219145 - RNA, 19 nt, Artificial Sequence
  Description of Artificial Sequence: Synthetic oligonucleotide
gacgagucggagcugcugc

SEQ ID NO: 2219146 - RNA, 19 nt, Artificial Sequence
  Description of Artificial Sequence: Synthetic oligonucleotide
agaguuguaaauacauaca

SEQ ID NO: 2219147 - RNA, 19 nt, Artificial Sequence
  Description of Artificial Sequence: Synthetic oligonucleotide
aggcgauacguguuaguuc

SEQ ID NO: 2219148 - RNA, 19 nt, Artificial Sequence
  Description of Artificial Sequence: Synthetic oligonucleotide
auagcgcacaauagcaaac

SEQ ID NO: 2219149 - RNA, 19 nt, Artificial Sequence
  Description of Artificial Sequence: Synthetic oligonucleotide
aaguacugucaguucacaa

SEQ ID NO: 2219150 - RNA, 19 nt, Artificial Sequence
  Description of Artificial Sequence: Synthetic oligonucleotide
uuacacuguacagacacua

SEQ ID NO: 2219151 - RNA, 19 nt, Artificial Sequence
  Description of Artificial Sequence: Synthetic oligonucleotide
ugcuuccaaguacugucag

SEQ ID NO: 2219152 - RNA, 19 nt, Artificial Sequence
  Description of Artificial Sequence: Synthetic oligonucleotide
acaaucacaggccaccauu

SEQ ID NO: 2219153 - RNA, 19 nt, Artificial Sequence
  Description of Artificial Sequence: Synthetic oligonucleotide
aggagucacgacucucuac

SEQ ID NO: 2219154 - RNA, 19 nt, Artificial Sequence
  Description of Artificial Sequence: Synthetic oligonucleotide
gauacguguuaguucauua

SEQ ID NO: 2219155 - RNA, 19 nt, Artificial Sequence
  Description of Artificial Sequence: Synthetic oligonucleotide
agauguucgaccauuuuau

SEQ ID NO: 2219156 - RNA, 19 nt, Artificial Sequence
  Description of Artificial Sequence: Synthetic oligonucleotide
auacguguuaguucauuaa

SEQ ID NO: 2219157 - RNA, 19 nt, Artificial Sequence
  Description of Artificial Sequence: Synthetic oligonucleotide
aagccgggcuuucuuagca

SEQ ID NO: 2219158 - RNA, 19 nt, Artificial Sequence
  Description of Artificial Sequence: Synthetic oligonucleotide
cuuccagacuuugaauucc

SEQ ID NO: 2219159 - RNA, 19 nt, Artificial Sequence
  Description of Artificial Sequence: Synthetic oligonucleotide
uccccuuccggcagaagcc

SEQ ID NO: 2219160 - RNA, 19 nt, Artificial Sequence
  Description of Artificial Sequence: Synthetic oligonucleotide
ggcgauacguguuaguuca

SEQ ID NO: 2219161 - RNA, 19 nt, Artificial Sequence
  Description of Artificial Sequence: Synthetic oligonucleotide
cugcggaacagcucgucgg

SEQ ID NO: 2219162 - RNA, 19 nt, Artificial Sequence
  Description of Artificial Sequence: Synthetic oligonucleotide
auagccagaaugcuuccaa

SEQ ID NO: 2219163 - RNA, 19 nt, Artificial Sequence
  Description of Artificial Sequence: Synthetic oligonucleotide
gugauagccagaaugcuuc

SEQ ID NO: 2219164 - RNA, 19 nt, Artificial Sequence
  Description of Artificial Sequence: Synthetic oligonucleotide
uccuuuggaggcuccucgg

SEQ ID NO: 2219165 - RNA, 19 nt, Artificial Sequence
  Description of Artificial Sequence: Synthetic oligonucleotide
uguccacgugacaaaacuc

SEQ ID NO: 2219166 - RNA, 19 nt, Artificial Sequence
  Description of Artificial Sequence: Synthetic oligonucleotide
cauuagaguuguaaauaca

SEQ ID NO: 2219167 - RNA, 19 nt, Artificial Sequence
  Description of Artificial Sequence: Synthetic oligonucleotide
auauuccuuuauaaaaggu

SEQ ID NO: 2219168 - RNA, 19 nt, Artificial Sequence
  Description of Artificial Sequence: Synthetic oligonucleotide
cauucuguggggcaucauc

SEQ ID NO: 2219169 - RNA, 19 nt, Artificial Sequence
  Description of Artificial Sequence: Synthetic oligonucleotide
accauuagaguuguaaaua

SEQ ID NO: 2219170 - RNA, 19 nt, Artificial Sequence
  Description of Artificial Sequence: Synthetic oligonucleotide
gacuuugaauuccuuugga

SEQ ID NO: 2219171 - RNA, 19 nt, Artificial Sequence
  Description of Artificial Sequence: Synthetic oligonucleotide
guacauuacaauauauuua

SEQ ID NO: 2219172 - RNA, 19 nt, Artificial Sequence
  Description of Artificial Sequence: Synthetic oligonucleotide
caggccaccauuagaguug

SEQ ID NO: 2219173 - RNA, 19 nt, Artificial Sequence
  Description of Artificial Sequence: Synthetic oligonucleotide
acgacucucuacuucuucu

SEQ ID NO: 2219174 - RNA, 19 nt, Artificial Sequence
  Description of Artificial Sequence: Synthetic oligonucleotide
uucuucucggcagcguagg

SEQ ID NO: 2219175 - RNA, 19 nt, Artificial Sequence
  Description of Artificial Sequence: Synthetic oligonucleotide
uccuuuauaaaagguucaa

SEQ ID NO: 2219176 - RNA, 19 nt, Artificial Sequence
  Description of Artificial Sequence: Synthetic oligonucleotide
uagccagaaugcuuccaag

SEQ ID NO: 2219177 - RNA, 19 nt, Artificial Sequence
  Description of Artificial Sequence: Synthetic oligonucleotide
gaaguagcucagcgggucc

SEQ ID NO: 2219178 - RNA, 19 nt, Artificial Sequence
  Description of Artificial Sequence: Synthetic oligonucleotide
guucgaccauuuuauugcc

SEQ ID NO: 2219179 - RNA, 19 nt, Artificial Sequence
  Description of Artificial Sequence: Synthetic oligonucleotide
auugccauguccagcucgg

SEQ ID NO: 2219180 - RNA, 19 nt, Artificial Sequence
  Description of Artificial Sequence: Synthetic oligonucleotide
cgcacaauagcaaacacuc

SEQ ID NO: 2219181 - RNA, 19 nt, Artificial Sequence
  Description of Artificial Sequence: Synthetic oligonucleotide
agaagcacgcucaucuuug

SEQ ID NO: 2219182 - RNA, 19 nt, Artificial Sequence
  Description of Artificial Sequence: Synthetic oligonucleotide
ugauagccagaaugcuucc

SEQ ID NO: 2219183 - RNA, 19 nt, Artificial Sequence
  Description of Artificial Sequence: Synthetic oligonucleotide
uuggacuuccagacuuuga

SEQ ID NO: 2219184 - RNA, 19 nt, Artificial Sequence
  Description of Artificial Sequence: Synthetic oligonucleotide
uucgaccauuuuauugcca

SEQ ID NO: 2219185 - RNA, 19 nt, Artificial Sequence
  Description of Artificial Sequence: Synthetic oligonucleotide
ucuuagcauucuguggggc

SEQ ID NO: 2219186 - RNA, 19 nt, Artificial Sequence
  Description of Artificial Sequence: Synthetic oligonucleotide
ucauagauguucgaccauu

SEQ ID NO: 2219187 - RNA, 19 nt, Artificial Sequence
  Description of Artificial Sequence: Synthetic oligonucleotide
auucuauaguggaaagucu

SEQ ID NO: 2219188 - RNA, 19 nt, Artificial Sequence
  Description of Artificial Sequence: Synthetic oligonucleotide
ucaccaauucugugauagc

SEQ ID NO: 2219189 - RNA, 19 nt, Artificial Sequence
  Description of Artificial Sequence: Synthetic oligonucleotide
uuucauggagaugucuguc

SEQ ID NO: 2219190 - RNA, 19 nt, Artificial Sequence
  Description of Artificial Sequence: Synthetic oligonucleotide
ggagaugucugucauaaua

SEQ ID NO: 2219191 - RNA, 19 nt, Artificial Sequence
  Description of Artificial Sequence: Synthetic oligonucleotide
uccacgugacaaaacucuc

SEQ ID NO: 2219192 - RNA, 19 nt, Artificial Sequence
  Description of Artificial Sequence: Synthetic oligonucleotide
acaggccaccauuagaguu

SEQ ID NO: 2219193 - RNA, 19 nt, Artificial Sequence
  Description of Artificial Sequence: Synthetic oligonucleotide
uggcauguccacgugacaa

SEQ ID NO: 2219194 - RNA, 19 nt, Artificial Sequence
  Description of Artificial Sequence: Synthetic oligonucleotide
uucaccacgugccgcuccc

SEQ ID NO: 2219195 - RNA, 19 nt, Artificial Sequence
  Description of Artificial Sequence: Synthetic oligonucleotide
acguguuaguucauuaaca

SEQ ID NO: 2219196 - RNA, 19 nt, Artificial Sequence
  Description of Artificial Sequence: Synthetic oligonucleotide
uagcgcacaauagcaaaca

SEQ ID NO: 2219197 - RNA, 19 nt, Artificial Sequence
  Description of Artificial Sequence: Synthetic oligonucleotide
ucuugaggcgauacguguu

SEQ ID NO: 2219198 - RNA, 19 nt, Artificial Sequence
  Description of Artificial Sequence: Synthetic oligonucleotide
cuuagcauucuguggggca

SEQ ID NO: 2219199 - RNA, 19 nt, Artificial Sequence
  Description of Artificial Sequence: Synthetic oligonucleotide
ugucauaauagcgcacaau

SEQ ID NO: 2219200 - RNA, 19 nt, Artificial Sequence
  Description of Artificial Sequence: Synthetic oligonucleotide
uuagcauucuguggggcau

SEQ ID NO: 2219201 - RNA, 19 nt, Artificial Sequence
  Description of Artificial Sequence: Synthetic oligonucleotide
gaagccgggcuuucuuagc

SEQ ID NO: 2219202 - RNA, 19 nt, Artificial Sequence
  Description of Artificial Sequence: Synthetic oligonucleotide
cuauaguggaaagucuuga

SEQ ID NO: 2219203 - RNA, 19 nt, Artificial Sequence
  Description of Artificial Sequence: Synthetic oligonucleotide
gguucaaagaacacuggca

SEQ ID NO: 2219204 - RNA, 19 nt, Artificial Sequence
  Description of Artificial Sequence: Synthetic oligonucleotide
ggcagcguaggucucuggg

SEQ ID NO: 2219205 - RNA, 19 nt, Artificial Sequence
  Description of Artificial Sequence: Synthetic oligonucleotide
uuguagaggaaggccgggc

SEQ ID NO: 2219206 - RNA, 19 nt, Artificial Sequence
  Description of Artificial Sequence: Synthetic oligonucleotide
uuuuagaagcacgcucauc

SEQ ID NO: 2219207 - RNA, 19 nt, Artificial Sequence
  Description of Artificial Sequence: Synthetic oligonucleotide
uccacucuucgaguuuuag

SEQ ID NO: 2219208 - RNA, 19 nt, Artificial Sequence
  Description of Artificial Sequence: Synthetic oligonucleotide
acaguacauuacaauauau

SEQ ID NO: 2219209 - RNA, 19 nt, Artificial Sequence
  Description of Artificial Sequence: Synthetic oligonucleotide
auagauguucgaccauuuu

SEQ ID NO: 2219210 - RNA, 19 nt, Artificial Sequence
  Description of Artificial Sequence: Synthetic oligonucleotide
cugucaguucacaaucaca

SEQ ID NO: 2219211 - RNA, 19 nt, Artificial Sequence
  Description of Artificial Sequence: Synthetic oligonucleotide
guugagcggguuguagagg

SEQ ID NO: 2219212 - RNA, 19 nt, Artificial Sequence
  Description of Artificial Sequence: Synthetic oligonucleotide
guuguagaggaaggccggg

SEQ ID NO: 2219213 - RNA, 19 nt, Artificial Sequence
  Description of Artificial Sequence: Synthetic oligonucleotide
aacagcucgucggggcccg

SEQ ID NO: 2219214 - RNA, 19 nt, Artificial Sequence
  Description of Artificial Sequence: Synthetic oligonucleotide
gguuguagaggaaggccgg

SEQ ID NO: 2219215 - RNA, 19 nt, Artificial Sequence
  Description of Artificial Sequence: Synthetic oligonucleotide
uuggaggcuccucgggcgc

SEQ ID NO: 2219216 - RNA, 19 nt, Artificial Sequence
  Description of Artificial Sequence: Synthetic oligonucleotide
uguccucauagauguucga

SEQ ID NO: 2219217 - RNA, 19 nt, Artificial Sequence
  Description of Artificial Sequence: Synthetic oligonucleotide
uuagaagcacgcucaucuu

SEQ ID NO: 2219218 - RNA, 19 nt, Artificial Sequence
  Description of Artificial Sequence: Synthetic oligonucleotide
uccucgcccgacgagucgg

SEQ ID NO: 2219219 - RNA, 19 nt, Artificial Sequence
  Description of Artificial Sequence: Synthetic oligonucleotide
agcggguuguagaggaagg

SEQ ID NO: 2219220 - RNA, 19 nt, Artificial Sequence
  Description of Artificial Sequence: Synthetic oligonucleotide
cagaaugcuuccaaguacu

SEQ ID NO: 2219221 - RNA, 19 nt, Artificial Sequence
  Description of Artificial Sequence: Synthetic oligonucleotide
uugaggcgauacguguuag

SEQ ID NO: 2219222 - RNA, 19 nt, Artificial Sequence
  Description of Artificial Sequence: Synthetic oligonucleotide
ugaggcgauacguguuagu

SEQ ID NO: 2219223 - RNA, 19 nt, Artificial Sequence
  Description of Artificial Sequence: Synthetic oligonucleotide
gccgcgaaguagcucagcg

SEQ ID NO: 2219224 - RNA, 19 nt, Artificial Sequence
  Description of Artificial Sequence: Synthetic oligonucleotide
ccagaaugcuuccaaguac

SEQ ID NO: 2219225 - RNA, 19 nt, Artificial Sequence
  Description of Artificial Sequence: Synthetic oligonucleotide
acccacaaguucacaguac

SEQ ID NO: 2219226 - RNA, 19 nt, Artificial Sequence
  Description of Artificial Sequence: Synthetic oligonucleotide
gaauucuauaguggaaagu

SEQ ID NO: 2219227 - RNA, 19 nt, Artificial Sequence
  Description of Artificial Sequence: Synthetic oligonucleotide
gcagcguaggucucugggg

SEQ ID NO: 2219228 - RNA, 19 nt, Artificial Sequence
  Description of Artificial Sequence: Synthetic oligonucleotide
ucucaggagucacgacucu

SEQ ID NO: 2219229 - RNA, 19 nt, Artificial Sequence
  Description of Artificial Sequence: Synthetic oligonucleotide
ucacaaucacaggccacca

SEQ ID NO: 2219230 - RNA, 19 nt, Artificial Sequence
  Description of Artificial Sequence: Synthetic oligonucleotide
aguucacaguacauuacaa

SEQ ID NO: 2219231 - RNA, 19 nt, Artificial Sequence
  Description of Artificial Sequence: Synthetic oligonucleotide
agcggguccuucuccucgg

SEQ ID NO: 2219232 - RNA, 19 nt, Artificial Sequence
  Description of Artificial Sequence: Synthetic oligonucleotide
guguuaguucauuaacaua

SEQ ID NO: 2219233 - RNA, 19 nt, Artificial Sequence
  Description of Artificial Sequence: Synthetic oligonucleotide
guccucauagauguucgac

SEQ ID NO: 2219234 - RNA, 19 nt, Artificial Sequence
  Description of Artificial Sequence: Synthetic oligonucleotide
gucacgacucucuacuucu

SEQ ID NO: 2219235 - RNA, 19 nt, Artificial Sequence
  Description of Artificial Sequence: Synthetic oligonucleotide
cacgugacaaaacucucaa

SEQ ID NO: 2219236 - RNA, 19 nt, Artificial Sequence
  Description of Artificial Sequence: Synthetic oligonucleotide
caucucaggagucacgacu

SEQ ID NO: 2219237 - RNA, 19 nt, Artificial Sequence
  Description of Artificial Sequence: Synthetic oligonucleotide
gguacguaguuggacuucc

SEQ ID NO: 2219238 - RNA, 19 nt, Artificial Sequence
  Description of Artificial Sequence: Synthetic oligonucleotide
accugcuugcggcccgucg

SEQ ID NO: 2219239 - RNA, 19 nt, Artificial Sequence
  Description of Artificial Sequence: Synthetic oligonucleotide
uuauugccauguccagcuc

SEQ ID NO: 2219240 - RNA, 19 nt, Artificial Sequence
  Description of Artificial Sequence: Synthetic oligonucleotide
cuccuggcuccacucuucg

SEQ ID NO: 2219241 - RNA, 19 nt, Artificial Sequence
  Description of Artificial Sequence: Synthetic oligonucleotide
ucuucucggcagcguaggu

SEQ ID NO: 2219242 - RNA, 19 nt, Artificial Sequence
  Description of Artificial Sequence: Synthetic oligonucleotide
ggagucacgacucucuacu

SEQ ID NO: 2219243 - RNA, 19 nt, Artificial Sequence
  Description of Artificial Sequence: Synthetic oligonucleotide
gauagccagaaugcuucca

SEQ ID NO: 2219244 - RNA, 19 nt, Artificial Sequence
  Description of Artificial Sequence: Synthetic oligonucleotide
gcugcggaacagcucgucg

SEQ ID NO: 2219245 - RNA, 19 nt, Artificial Sequence
  Description of Artificial Sequence: Synthetic oligonucleotide
agaaugcuuccaaguacug

SEQ ID NO: 2219246 - RNA, 19 nt, Artificial Sequence
  Description of Artificial Sequence: Synthetic oligonucleotide
auacuuucauggagauguc

SEQ ID NO: 2219247 - RNA, 19 nt, Artificial Sequence
  Description of Artificial Sequence: Synthetic oligonucleotide
cugccaugacggcugcggg

SEQ ID NO: 2219248 - RNA, 19 nt, Artificial Sequence
  Description of Artificial Sequence: Synthetic oligonucleotide
ccucauagauguucgacca

SEQ ID NO: 2219249 - RNA, 19 nt, Artificial Sequence
  Description of Artificial Sequence: Synthetic oligonucleotide
ucuccucgcccgacgaguc

SEQ ID NO: 2219250 - RNA, 19 nt, Artificial Sequence
  Description of Artificial Sequence: Synthetic oligonucleotide
ucgggcgccuucaccacgu

SEQ ID NO: 2219251 - RNA, 19 nt, Artificial Sequence
  Description of Artificial Sequence: Synthetic oligonucleotide
cacgacucucuacuucuuc

SEQ ID NO: 2219252 - RNA, 19 nt, Artificial Sequence
  Description of Artificial Sequence: Synthetic oligonucleotide
gcugccaugacggcugcgg

SEQ ID NO: 2219253 - RNA, 19 nt, Artificial Sequence
  Description of Artificial Sequence: Synthetic oligonucleotide
uccagcucgggcggcggcg

SEQ ID NO: 2219254 - RNA, 19 nt, Artificial Sequence
  Description of Artificial Sequence: Synthetic oligonucleotide
cuucucggcagcguagguc

SEQ ID NO: 2219255 - RNA, 19 nt, Artificial Sequence
  Description of Artificial Sequence: Synthetic oligonucleotide
ucgcccgacgagucggagc

SEQ ID NO: 2219256 - RNA, 19 nt, Artificial Sequence
  Description of Artificial Sequence: Synthetic oligonucleotide
gucuugaggcgauacgugu

SEQ ID NO: 2219257 - RNA, 19 nt, Artificial Sequence
  Description of Artificial Sequence: Synthetic oligonucleotide
gaaugcuuccaaguacugu

SEQ ID NO: 2219258 - RNA, 19 nt, Artificial Sequence
  Description of Artificial Sequence: Synthetic oligonucleotide
acgugacaaaacucucaaa

SEQ ID NO: 2219259 - RNA, 19 nt, Artificial Sequence
  Description of Artificial Sequence: Synthetic oligonucleotide
ugcuugcggcccgucgucg

SEQ ID NO: 2219260 - RNA, 19 nt, Artificial Sequence
  Description of Artificial Sequence: Synthetic oligonucleotide
guucacaaucacaggccac

SEQ ID NO: 2219261 - RNA, 19 nt, Artificial Sequence
  Description of Artificial Sequence: Synthetic oligonucleotide
cuugaggcgauacguguua

SEQ ID NO: 2219262 - RNA, 19 nt, Artificial Sequence
  Description of Artificial Sequence: Synthetic oligonucleotide
augacggcugcgggcggcc

SEQ ID NO: 2219263 - RNA, 19 nt, Artificial Sequence
  Description of Artificial Sequence: Synthetic oligonucleotide
ugagcggguuguagaggaa

SEQ ID NO: 2219264 - RNA, 19 nt, Artificial Sequence
  Description of Artificial Sequence: Synthetic oligonucleotide
acgagucggagcugcugcu

SEQ ID NO: 2219265 - RNA, 19 nt, Artificial Sequence
  Description of Artificial Sequence: Synthetic oligonucleotide
uuccggcagaagccgggcu

SEQ ID NO: 2219266 - RNA, 19 nt, Artificial Sequence
  Description of Artificial Sequence: Synthetic oligonucleotide
ccgucuuccggcucgcugc

SEQ ID NO: 2219267 - RNA, 19 nt, Artificial Sequence
  Description of Artificial Sequence: Synthetic oligonucleotide
uguccagcucgggcggcgg

SEQ ID NO: 2219268 - RNA, 19 nt, Artificial Sequence
  Description of Artificial Sequence: Synthetic oligonucleotide
cucgggcgccuucaccacg

SEQ ID NO: 2219269 - RNA, 19 nt, Artificial Sequence
  Description of Artificial Sequence: Synthetic oligonucleotide
auucugugauagccagaau

SEQ ID NO: 2219270 - RNA, 19 nt, Artificial Sequence
  Description of Artificial Sequence: Synthetic oligonucleotide
cacuaaugaaaagcaccca

SEQ ID NO: 2219271 - RNA, 19 nt, Artificial Sequence
  Description of Artificial Sequence: Synthetic oligonucleotide
cucaggagucacgacucuc

SEQ ID NO: 2219272 - RNA, 19 nt, Artificial Sequence
  Description of Artificial Sequence: Synthetic oligonucleotide
ucacgacucucuacuucuu

SEQ ID NO: 2219273 - RNA, 19 nt, Artificial Sequence
  Description of Artificial Sequence: Synthetic oligonucleotide
gauguucgaccauuuuauu

SEQ ID NO: 2219274 - RNA, 19 nt, Artificial Sequence
  Description of Artificial Sequence: Synthetic oligonucleotide
agcaaacacuccgcccaag

SEQ ID NO: 2219275 - RNA, 19 nt, Artificial Sequence
  Description of Artificial Sequence: Synthetic oligonucleotide
ucgucggagccgccgccgc

SEQ ID NO: 2219276 - RNA, 19 nt, Artificial Sequence
  Description of Artificial Sequence: Synthetic oligonucleotide
uggcuccacucuucgaguu

SEQ ID NO: 2219277 - RNA, 19 nt, Artificial Sequence
  Description of Artificial Sequence: Synthetic oligonucleotide
ccaagccccaucucaggag

SEQ ID NO: 2219278 - RNA, 19 nt, Artificial Sequence
  Description of Artificial Sequence: Synthetic oligonucleotide
gucugucauaauagcgcac

SEQ ID NO: 2219279 - RNA, 19 nt, Artificial Sequence
  Description of Artificial Sequence: Synthetic oligonucleotide
caaguacugucaguucaca

SEQ ID NO: 2219280 - RNA, 19 nt, Artificial Sequence
  Description of Artificial Sequence: Synthetic oligonucleotide
gaggcgauacguguuaguu

SEQ ID NO: 2219281 - RNA, 19 nt, Artificial Sequence
  Description of Artificial Sequence: Synthetic oligonucleotide
gccaccauuagaguuguaa

SEQ ID NO: 2219282 - RNA, 19 nt, Artificial Sequence
  Description of Artificial Sequence: Synthetic oligonucleotide
ucccguaggccgcgaagua

SEQ ID NO: 2219283 - RNA, 19 nt, Artificial Sequence
  Description of Artificial Sequence: Synthetic oligonucleotide
cacccacaaguucacagua

SEQ ID NO: 2219284 - RNA, 19 nt, Artificial Sequence
  Description of Artificial Sequence: Synthetic oligonucleotide
accacgugccgcucccagu

SEQ ID NO: 2219285 - RNA, 19 nt, Artificial Sequence
  Description of Artificial Sequence: Synthetic oligonucleotide
uccuggcuccacucuucga

SEQ ID NO: 2219286 - RNA, 19 nt, Artificial Sequence
  Description of Artificial Sequence: Synthetic oligonucleotide
cacgugccgcucccagucg

SEQ ID NO: 2219287 - RNA, 19 nt, Artificial Sequence
  Description of Artificial Sequence: Synthetic oligonucleotide
ucggcagcguaggucucug

SEQ ID NO: 2219288 - RNA, 19 nt, Artificial Sequence
  Description of Artificial Sequence: Synthetic oligonucleotide
gaagcacgcucaucuuugu

SEQ ID NO: 2219289 - RNA, 19 nt, Artificial Sequence
  Description of Artificial Sequence: Synthetic oligonucleotide
agccugucaccaauucugu

SEQ ID NO: 2219290 - RNA, 19 nt, Artificial Sequence
  Description of Artificial Sequence: Synthetic oligonucleotide
ucggagcugcugcucccgu

SEQ ID NO: 2219291 - RNA, 19 nt, Artificial Sequence
  Description of Artificial Sequence: Synthetic oligonucleotide
acgugccgcucccagucga

SEQ ID NO: 2219292 - RNA, 19 nt, Artificial Sequence
  Description of Artificial Sequence: Synthetic oligonucleotide
cugucauaauagcgcacaa

SEQ ID NO: 2219293 - RNA, 19 nt, Artificial Sequence
  Description of Artificial Sequence: Synthetic oligonucleotide
ccauguccagcucgggcgg

SEQ ID NO: 2219294 - RNA, 19 nt, Artificial Sequence
  Description of Artificial Sequence: Synthetic oligonucleotide
gucgucggagccgccgccg

SEQ ID NO: 2219295 - RNA, 19 nt, Artificial Sequence
  Description of Artificial Sequence: Synthetic oligonucleotide
ggcgguacguaguuggacu

SEQ ID NO: 2219296 - RNA, 19 nt, Artificial Sequence
  Description of Artificial Sequence: Synthetic oligonucleotide
caaaacucucaaagccugu

SEQ ID NO: 2219297 - RNA, 19 nt, Artificial Sequence
  Description of Artificial Sequence: Synthetic oligonucleotide
ccgcgaaguagcucagcgg

SEQ ID NO: 2219298 - RNA, 19 nt, Artificial Sequence
  Description of Artificial Sequence: Synthetic oligonucleotide
cugucaccaauucugugau

SEQ ID NO: 2219299 - RNA, 19 nt, Artificial Sequence
  Description of Artificial Sequence: Synthetic oligonucleotide
cauagauguucgaccauuu

SEQ ID NO: 2219300 - RNA, 19 nt, Artificial Sequence
  Description of Artificial Sequence: Synthetic oligonucleotide
cacuggcauguccacguga

SEQ ID NO: 2219301 - RNA, 19 nt, Artificial Sequence
  Description of Artificial Sequence: Synthetic oligonucleotide
uugcggcccgucgucggag

SEQ ID NO: 2219302 - RNA, 19 nt, Artificial Sequence
  Description of Artificial Sequence: Synthetic oligonucleotide
caagccccaucucaggagu

SEQ ID NO: 2219303 - RNA, 19 nt, Artificial Sequence
  Description of Artificial Sequence: Synthetic oligonucleotide
agccgggcuuucuuagcau

SEQ ID NO: 2219304 - RNA, 19 nt, Artificial Sequence
  Description of Artificial Sequence: Synthetic oligonucleotide
ugcggcccgucgucggagc

SEQ ID NO: 2219305 - RNA, 19 nt, Artificial Sequence
  Description of Artificial Sequence: Synthetic oligonucleotide
cagaagccgggcuuucuua

SEQ ID NO: 2219306 - RNA, 19 nt, Artificial Sequence
  Description of Artificial Sequence: Synthetic oligonucleotide
uccgcccaagccccaucuc

SEQ ID NO: 2219307 - RNA, 19 nt, Artificial Sequence
  Description of Artificial Sequence: Synthetic oligonucleotide
ccacgugacaaaacucuca

SEQ ID NO: 2219308 - RNA, 19 nt, Artificial Sequence
  Description of Artificial Sequence: Synthetic oligonucleotide
gcuugcggcccgucgucgg

SEQ ID NO: 2219309 - RNA, 19 nt, Artificial Sequence
  Description of Artificial Sequence: Synthetic oligonucleotide
cugcuugcggcccgucguc

SEQ ID NO: 2219310 - RNA, 19 nt, Artificial Sequence
  Description of Artificial Sequence: Synthetic oligonucleotide
cacgcucaucuuugucauc

SEQ ID NO: 2219311 - RNA, 19 nt, Artificial Sequence
  Description of Artificial Sequence: Synthetic oligonucleotide
aguuggacuuccagacuuu

SEQ ID NO: 2219312 - RNA, 19 nt, Artificial Sequence
  Description of Artificial Sequence: Synthetic oligonucleotide
gaaggccgggcggcucacg

SEQ ID NO: 2219313 - RNA, 19 nt, Artificial Sequence
  Description of Artificial Sequence: Synthetic oligonucleotide
ucucggcagcguaggucuc

SEQ ID NO: 2219314 - RNA, 19 nt, Artificial Sequence
  Description of Artificial Sequence: Synthetic oligonucleotide
ccacucuucgaguuuuaga

SEQ ID NO: 2219315 - RNA, 19 nt, Artificial Sequence
  Description of Artificial Sequence: Synthetic oligonucleotide
gcucccguaggccgcgaag

SEQ ID NO: 2219316 - RNA, 19 nt, Artificial Sequence
  Description of Artificial Sequence: Synthetic oligonucleotide
ugcucccguaggccgcgaa

SEQ ID NO: 2219317 - RNA, 19 nt, Artificial Sequence
  Description of Artificial Sequence: Synthetic oligonucleotide
gcggguuguagaggaaggc

SEQ ID NO: 2219318 - RNA, 19 nt, Artificial Sequence
  Description of Artificial Sequence: Synthetic oligonucleotide
ccacgugccgcucccaguc

SEQ ID NO: 2219319 - RNA, 19 nt, Artificial Sequence
  Description of Artificial Sequence: Synthetic oligonucleotide
cuggcauguccacgugaca

SEQ ID NO: 2219320 - RNA, 19 nt, Artificial Sequence
  Description of Artificial Sequence: Synthetic oligonucleotide
cugugauagccagaaugcu

SEQ ID NO: 2219321 - RNA, 19 nt, Artificial Sequence
  Description of Artificial Sequence: Synthetic oligonucleotide
ccgggcuuucuuagcauuc

SEQ ID NO: 2219322 - RNA, 19 nt, Artificial Sequence
  Description of Artificial Sequence: Synthetic oligonucleotide
guacguaguuggacuucca

SEQ ID NO: 2219323 - RNA, 19 nt, Artificial Sequence
  Description of Artificial Sequence: Synthetic oligonucleotide
guaggccgcgaaguagcuc

SEQ ID NO: 2219324 - RNA, 19 nt, Artificial Sequence
  Description of Artificial Sequence: Synthetic oligonucleotide
gcacccacaaguucacagu

SEQ ID NO: 2219325 - RNA, 19 nt, Artificial Sequence
  Description of Artificial Sequence: Synthetic oligonucleotide
cuggcuccacucuucgagu

SEQ ID NO: 2219326 - RNA, 19 nt, Artificial Sequence
  Description of Artificial Sequence: Synthetic oligonucleotide
cguguuaguucauuaacau

SEQ ID NO: 2219327 - RNA, 19 nt, Artificial Sequence
  Description of Artificial Sequence: Synthetic oligonucleotide
ccaucucaggagucacgac

SEQ ID NO: 2219328 - RNA, 19 nt, Artificial Sequence
  Description of Artificial Sequence: Synthetic oligonucleotide
caggagucacgacucucua

SEQ ID NO: 2219329 - RNA, 19 nt, Artificial Sequence
  Description of Artificial Sequence: Synthetic oligonucleotide
gcggaacagcucgucgggg

SEQ ID NO: 2219330 - RNA, 19 nt, Artificial Sequence
  Description of Artificial Sequence: Synthetic oligonucleotide
ucaccacgugccgcuccca

SEQ ID NO: 2219331 - RNA, 19 nt, Artificial Sequence
  Description of Artificial Sequence: Synthetic oligonucleotide
gcugcgggcggccacccuc

SEQ ID NO: 2219332 - RNA, 19 nt, Artificial Sequence
  Description of Artificial Sequence: Synthetic oligonucleotide
gggcgccuucaccacgugc

SEQ ID NO: 2219333 - RNA, 19 nt, Artificial Sequence
  Description of Artificial Sequence: Synthetic oligonucleotide
cgaccauuuuauugccaug

SEQ ID NO: 2219334 - RNA, 19 nt, Artificial Sequence
  Description of Artificial Sequence: Synthetic oligonucleotide
gagucacgacucucuacuu

SEQ ID NO: 2219335 - RNA, 19 nt, Artificial Sequence
  Description of Artificial Sequence: Synthetic oligonucleotide
cccgacgagucggagcugc

SEQ ID NO: 2219336 - RNA, 19 nt, Artificial Sequence
  Description of Artificial Sequence: Synthetic oligonucleotide
gaggaaggccgggcggcuc

SEQ ID NO: 2219337 - RNA, 19 nt, Artificial Sequence
  Description of Artificial Sequence: Synthetic oligonucleotide
gcucacgcugcggaacagc

SEQ ID NO: 2219338 - RNA, 19 nt, Artificial Sequence
  Description of Artificial Sequence: Synthetic oligonucleotide
gcucuccucgcccgacgag

SEQ ID NO: 2219339 - RNA, 19 nt, Artificial Sequence
  Description of Artificial Sequence: Synthetic oligonucleotide
cucauagauguucgaccau

SEQ ID NO: 2219340 - RNA, 19 nt, Artificial Sequence
  Description of Artificial Sequence: Synthetic oligonucleotide
cacaggccaccauuagagu

SEQ ID NO: 2219341 - RNA, 19 nt, Artificial Sequence
  Description of Artificial Sequence: Synthetic oligonucleotide
cgaaguagcucagcggguc

SEQ ID NO: 2219342 - RNA, 19 nt, Artificial Sequence
  Description of Artificial Sequence: Synthetic oligonucleotide
cccuuccggcagaagccgg

SEQ ID NO: 2219343 - RNA, 19 nt, Artificial Sequence
  Description of Artificial Sequence: Synthetic oligonucleotide
cgcccaagccccaucucag

SEQ ID NO: 2219344 - RNA, 19 nt, Artificial Sequence
  Description of Artificial Sequence: Synthetic oligonucleotide
cucgcccgacgagucggag

SEQ ID NO: 2219345 - RNA, 19 nt, Artificial Sequence
  Description of Artificial Sequence: Synthetic oligonucleotide
ccccuuccggcagaagccg

SEQ ID NO: 2219346 - RNA, 19 nt, Artificial Sequence
  Description of Artificial Sequence: Synthetic oligonucleotide
gcgcacaauagcaaacacu

SEQ ID NO: 2219347 - RNA, 19 nt, Artificial Sequence
  Description of Artificial Sequence: Synthetic oligonucleotide
gggcgguacguaguuggac

SEQ ID NO: 2219348 - RNA, 19 nt, Artificial Sequence
  Description of Artificial Sequence: Synthetic oligonucleotide
ccagacuuugaauuccuuu

SEQ ID NO: 2219349 - RNA, 19 nt, Artificial Sequence
  Description of Artificial Sequence: Synthetic oligonucleotide
cccaagccccaucucagga

SEQ ID NO: 2219350 - RNA, 19 nt, Artificial Sequence
  Description of Artificial Sequence: Synthetic oligonucleotide
gcacgcucaucuuugucau

SEQ ID NO: 2219351 - RNA, 19 nt, Artificial Sequence
  Description of Artificial Sequence: Synthetic oligonucleotide
cccgucuuccggcucgcug

SEQ ID NO: 2219352 - RNA, 19 nt, Artificial Sequence
  Description of Artificial Sequence: Synthetic oligonucleotide
cucccguaggccgcgaagu

SEQ ID NO: 2219353 - RNA, 19 nt, Artificial Sequence
  Description of Artificial Sequence: Synthetic oligonucleotide
gcggcggcuucuucucggc

SEQ ID NO: 2219354 - RNA, 19 nt, Artificial Sequence
  Description of Artificial Sequence: Synthetic oligonucleotide
cggcucgcugcucuccucg

SEQ ID NO: 2219355 - RNA, 19 nt, Artificial Sequence
  Description of Artificial Sequence: Synthetic oligonucleotide
cucuccucgcccgacgagu

SEQ ID NO: 2219356 - RNA, 19 nt, Artificial Sequence
  Description of Artificial Sequence: Synthetic oligonucleotide
agccgccgccgccgccgcc

SEQ ID NO: 2219357 - RNA, 19 nt, Artificial Sequence
  Description of Artificial Sequence: Synthetic oligonucleotide
gggcggcucacgcugcgga

SEQ ID NO: 2219358 - RNA, 19 nt, Artificial Sequence
  Description of Artificial Sequence: Synthetic oligonucleotide
cacaaucacaggccaccau

SEQ ID NO: 2219359 - RNA, 19 nt, Artificial Sequence
  Description of Artificial Sequence: Synthetic oligonucleotide
aggccgcgaaguagcucag

SEQ ID NO: 2219360 - RNA, 19 nt, Artificial Sequence
  Description of Artificial Sequence: Synthetic oligonucleotide
ggggcaucaucaccauugu

SEQ ID NO: 2219361 - RNA, 19 nt, Artificial Sequence
  Description of Artificial Sequence: Synthetic oligonucleotide
ccgcccaagccccaucuca

SEQ ID NO: 2219362 - RNA, 19 nt, Artificial Sequence
  Description of Artificial Sequence: Synthetic oligonucleotide
gagccgccgccgccgccgc

SEQ ID NO: 2219363 - RNA, 19 nt, Artificial Sequence
  Description of Artificial Sequence: Synthetic oligonucleotide
cuccacucuucgaguuuua

SEQ ID NO: 2219364 - RNA, 19 nt, Artificial Sequence
  Description of Artificial Sequence: Synthetic oligonucleotide
acagcucgucggggcccgg

SEQ ID NO: 2219365 - RNA, 19 nt, Artificial Sequence
  Description of Artificial Sequence: Synthetic oligonucleotide
ggcucacgcugcggaacag

SEQ ID NO: 2219366 - RNA, 19 nt, Artificial Sequence
  Description of Artificial Sequence: Synthetic oligonucleotide
gcggcucacgcugcggaac

SEQ ID NO: 2219367 - RNA, 19 nt, Artificial Sequence
  Description of Artificial Sequence: Synthetic oligonucleotide
ccucgggcgccuucaccac

SEQ ID NO: 2219368 - RNA, 19 nt, Artificial Sequence
  Description of Artificial Sequence: Synthetic oligonucleotide
ccaugacggcugcgggcgg

SEQ ID NO: 2219369 - RNA, 19 nt, Artificial Sequence
  Description of Artificial Sequence: Synthetic oligonucleotide
ggaaagucuugaggcgaua

SEQ ID NO: 2219370 - RNA, 19 nt, Artificial Sequence
  Description of Artificial Sequence: Synthetic oligonucleotide
gccgccgccgccgccgccg

SEQ ID NO: 2219371 - RNA, 19 nt, Artificial Sequence
  Description of Artificial Sequence: Synthetic oligonucleotide
ccagcucgggcggcggcgg

SEQ ID NO: 2219372 - RNA, 19 nt, Artificial Sequence
  Description of Artificial Sequence: Synthetic oligonucleotide
caucaccauuguccucaua

SEQ ID NO: 2219373 - RNA, 19 nt, Artificial Sequence
  Description of Artificial Sequence: Synthetic oligonucleotide
cauuguccucauagauguu

SEQ ID NO: 2219374 - RNA, 19 nt, Artificial Sequence
  Description of Artificial Sequence: Synthetic oligonucleotide
ggccgcgaaguagcucagc

SEQ ID NO: 2219375 - RNA, 19 nt, Artificial Sequence
  Description of Artificial Sequence: Synthetic oligonucleotide
ccaccgucuccuccccuuc

SEQ ID NO: 2219376 - RNA, 19 nt, Artificial Sequence
  Description of Artificial Sequence: Synthetic oligonucleotide
acgcugcggaacagcucgu

SEQ ID NO: 2219377 - RNA, 19 nt, Artificial Sequence
  Description of Artificial Sequence: Synthetic oligonucleotide
ggcggcucacgcugcggaa

SEQ ID NO: 2219378 - RNA, 19 nt, Artificial Sequence
  Description of Artificial Sequence: Synthetic oligonucleotide
cucggcagcguaggucucu

SEQ ID NO: 2219379 - RNA, 19 nt, Artificial Sequence
  Description of Artificial Sequence: Synthetic oligonucleotide
ggggcgguacguaguugga

SEQ ID NO: 2219380 - RNA, 19 nt, Artificial Sequence
  Description of Artificial Sequence: Synthetic oligonucleotide
gcgguacguaguuggacuu

SEQ ID NO: 2219381 - RNA, 19 nt, Artificial Sequence
  Description of Artificial Sequence: Synthetic oligonucleotide
ccugcuugcggcccgucgu

SEQ ID NO: 2219382 - RNA, 19 nt, Artificial Sequence
  Description of Artificial Sequence: Synthetic oligonucleotide
acacuccgcccaagcccca

SEQ ID NO: 2219383 - RNA, 19 nt, Artificial Sequence
  Description of Artificial Sequence: Synthetic oligonucleotide
cgguacguaguuggacuuc

SEQ ID NO: 2219384 - RNA, 19 nt, Artificial Sequence
  Description of Artificial Sequence: Synthetic oligonucleotide
gcccggcagccgcuucucc

SEQ ID NO: 2219385 - RNA, 19 nt, Artificial Sequence
  Description of Artificial Sequence: Synthetic oligonucleotide
cgaguuuuagaagcacgcu

SEQ ID NO: 2219386 - RNA, 19 nt, Artificial Sequence
  Description of Artificial Sequence: Synthetic oligonucleotide
gccgggcuuucuuagcauu

SEQ ID NO: 2219387 - RNA, 19 nt, Artificial Sequence
  Description of Artificial Sequence: Synthetic oligonucleotide
ggaaggccgggcggcucac

SEQ ID NO: 2219388 - RNA, 19 nt, Artificial Sequence
  Description of Artificial Sequence: Synthetic oligonucleotide
cgccuucaccacgugccgc

SEQ ID NO: 2219389 - RNA, 19 nt, Artificial Sequence
  Description of Artificial Sequence: Synthetic oligonucleotide
cgcccgacgagucggagcu

SEQ ID NO: 2219390 - RNA, 19 nt, Artificial Sequence
  Description of Artificial Sequence: Synthetic oligonucleotide
cggcagcguaggucucugg

SEQ ID NO: 2219391 - RNA, 19 nt, Artificial Sequence
  Description of Artificial Sequence: Synthetic oligonucleotide
cgucggagccgccgccgcc

SEQ ID NO: 2219392 - RNA, 19 nt, Artificial Sequence
  Description of Artificial Sequence: Synthetic oligonucleotide
ccggcucgcugcucuccuc

SEQ ID NO: 2219393 - RNA, 19 nt, Artificial Sequence
  Description of Artificial Sequence: Synthetic oligonucleotide
cggcucacgcugcggaaca

SEQ ID NO: 2219394 - RNA, 19 nt, Artificial Sequence
  Description of Artificial Sequence: Synthetic oligonucleotide
cggcccgucgucggagccg

SEQ ID NO: 2219395 - RNA, 19 nt, Artificial Sequence
  Description of Artificial Sequence: Synthetic oligonucleotide
gccgggcggcucacgcugc

SEQ ID NO: 2219396 - RNA, 19 nt, Artificial Sequence
  Description of Artificial Sequence: Synthetic oligonucleotide
gggcccggcagccgcuucu

SEQ ID NO: 2219397 - RNA, 19 nt, Artificial Sequence
  Description of Artificial Sequence: Synthetic oligonucleotide
ggcccggcagccgcuucuc

SEQ ID NO: 2219398 - RNA, 19 nt, Artificial Sequence
  Description of Artificial Sequence: Synthetic oligonucleotide
gcucccagucgaucugcuu

SEQ ID NO: 2219399 - RNA, 19 nt, Artificial Sequence
  Description of Artificial Sequence: Synthetic oligonucleotide
ccucgcccgacgagucgga

SEQ ID NO: 2219400 - RNA, 19 nt, Artificial Sequence
  Description of Artificial Sequence: Synthetic oligonucleotide
cgcugcggaacagcucguc

SEQ ID NO: 2219401 - RNA, 19 nt, Artificial Sequence
  Description of Artificial Sequence: Synthetic oligonucleotide
cgggcuuucuuagcauucu

SEQ ID NO: 2219402 - RNA, 19 nt, Artificial Sequence
  Description of Artificial Sequence: Synthetic oligonucleotide
cgauacguguuaguucauu

SEQ ID NO: 2219403 - RNA, 19 nt, Artificial Sequence
  Description of Artificial Sequence: Synthetic oligonucleotide
cacuccgcccaagccccau

SEQ ID NO: 2219404 - RNA, 19 nt, Artificial Sequence
  Description of Artificial Sequence: Synthetic oligonucleotide
gcgauacguguuaguucau

SEQ ID NO: 2219405 - RNA, 19 nt, Artificial Sequence
  Description of Artificial Sequence: Synthetic oligonucleotide
gcauucuguggggcaucau

SEQ ID NO: 2219406 - RNA, 19 nt, Artificial Sequence
  Description of Artificial Sequence: Synthetic oligonucleotide
cggcggcuucuucucggca

SEQ ID NO: 2219407 - RNA, 19 nt, Artificial Sequence
  Description of Artificial Sequence: Synthetic oligonucleotide
ccgacgagucggagcugcu

SEQ ID NO: 2219408 - RNA, 19 nt, Artificial Sequence
  Description of Artificial Sequence: Synthetic oligonucleotide
cgggcgccuucaccacgug

SEQ ID NO: 2219409 - RNA, 19 nt, Artificial Sequence
  Description of Artificial Sequence: Synthetic oligonucleotide
cgucuuccggcucgcugcu

SEQ ID NO: 2219410 - RNA, 19 nt, Artificial Sequence
  Description of Artificial Sequence: Synthetic oligonucleotide
gccgccgccgccgccgccu

SEQ ID NO: 2219411 - RNA, 19 nt, Artificial Sequence
  Description of Artificial Sequence: Synthetic oligonucleotide
ccgccgccgccgccgccgc

SEQ ID NO: 2219412 - RNA, 19 nt, Artificial Sequence
  Description of Artificial Sequence: Synthetic oligonucleotide
ggcugcgggcggccacccu

SEQ ID NO: 2219413 - RNA, 19 nt, Artificial Sequence
  Description of Artificial Sequence: Synthetic oligonucleotide
cgugccgcucccagucgau

SEQ ID NO: 2219414 - RNA, 19 nt, Artificial Sequence
  Description of Artificial Sequence: Synthetic oligonucleotide
ccgccgccgccgccgccuc

SEQ ID NO: 2219415 - RNA, 19 nt, Artificial Sequence
  Description of Artificial Sequence: Synthetic oligonucleotide
cgccgccgccgccgccgcc

SEQ ID NO: 2219416 - RNA, 19 nt, Artificial Sequence
  Description of Artificial Sequence: Synthetic oligonucleotide
ccccgucuuccggcucgcu

SEQ ID NO: 2219417 - RNA, 19 nt, Artificial Sequence
  Description of Artificial Sequence: Synthetic oligonucleotide
agauuaauaaauuuaaguc

SEQ ID NO: 2219418 - RNA, 19 nt, Artificial Sequence
  Description of Artificial Sequence: Synthetic oligonucleotide
cuuuauucaagucagaacc

SEQ ID NO: 2219419 - RNA, 19 nt, Artificial Sequence
  Description of Artificial Sequence: Synthetic oligonucleotide
uucacuaucaguccgagcc

SEQ ID NO: 2219420 - RNA, 19 nt, Artificial Sequence
  Description of Artificial Sequence: Synthetic oligonucleotide
uuaacaacugcucugagga

SEQ ID NO: 2219421 - RNA, 19 nt, Artificial Sequence
  Description of Artificial Sequence: Synthetic oligonucleotide
aaauaacaaaacuccuugc

SEQ ID NO: 2219422 - RNA, 19 nt, Artificial Sequence
  Description of Artificial Sequence: Synthetic oligonucleotide
uuucagaaauacaagauca

SEQ ID NO: 2219423 - RNA, 19 nt, Artificial Sequence
  Description of Artificial Sequence: Synthetic oligonucleotide
uuaagauuaauaaauuuaa

SEQ ID NO: 2219424 - RNA, 19 nt, Artificial Sequence
  Description of Artificial Sequence: Synthetic oligonucleotide
aaauuuaagucuucuagca

SEQ ID NO: 2219425 - RNA, 19 nt, Artificial Sequence
  Description of Artificial Sequence: Synthetic oligonucleotide
aucauuacgccaaagaacc

SEQ ID NO: 2219426 - RNA, 19 nt, Artificial Sequence
  Description of Artificial Sequence: Synthetic oligonucleotide
uaaaguauacgauuuaaga

SEQ ID NO: 2219427 - RNA, 19 nt, Artificial Sequence
  Description of Artificial Sequence: Synthetic oligonucleotide
aaaguauacgauuuaagau

SEQ ID NO: 2219428 - RNA, 19 nt, Artificial Sequence
  Description of Artificial Sequence: Synthetic oligonucleotide
aauuuaagucuucuagcac

SEQ ID NO: 2219429 - RNA, 19 nt, Artificial Sequence
  Description of Artificial Sequence: Synthetic oligonucleotide
caaauuaacaaccgaaggg

SEQ ID NO: 2219430 - RNA, 19 nt, Artificial Sequence
  Description of Artificial Sequence: Synthetic oligonucleotide
uaugaauuaaaucuguuua

SEQ ID NO: 2219431 - RNA, 19 nt, Artificial Sequence
  Description of Artificial Sequence: Synthetic oligonucleotide
uacgauuuaagauuaauaa

SEQ ID NO: 2219432 - RNA, 19 nt, Artificial Sequence
  Description of Artificial Sequence: Synthetic oligonucleotide
uuuaucucaaccaaauuaa

SEQ ID NO: 2219433 - RNA, 19 nt, Artificial Sequence
  Description of Artificial Sequence: Synthetic oligonucleotide
uauaaaguaauuuguacuc

SEQ ID NO: 2219434 - RNA, 19 nt, Artificial Sequence
  Description of Artificial Sequence: Synthetic oligonucleotide
uuuauuugugaucuguaca

SEQ ID NO: 2219435 - RNA, 19 nt, Artificial Sequence
  Description of Artificial Sequence: Synthetic oligonucleotide
ucugcuuagcuuuacauca

SEQ ID NO: 2219436 - RNA, 19 nt, Artificial Sequence
  Description of Artificial Sequence: Synthetic oligonucleotide
aaguuucagaaauacaaga

SEQ ID NO: 2219437 - RNA, 19 nt, Artificial Sequence
  Description of Artificial Sequence: Synthetic oligonucleotide
aucacuuugaaguuuaccu

SEQ ID NO: 2219438 - RNA, 19 nt, Artificial Sequence
  Description of Artificial Sequence: Synthetic oligonucleotide
uguauaaaguaauuuguac

SEQ ID NO: 2219439 - RNA, 19 nt, Artificial Sequence
  Description of Artificial Sequence: Synthetic oligonucleotide
uuaaaucuguuuaaaacaa

SEQ ID NO: 2219440 - RNA, 19 nt, Artificial Sequence
  Description of Artificial Sequence: Synthetic oligonucleotide
ugugacauauguauaaagu

SEQ ID NO: 2219441 - RNA, 19 nt, Artificial Sequence
  Description of Artificial Sequence: Synthetic oligonucleotide
aggacaaucagugugaaag

SEQ ID NO: 2219442 - RNA, 19 nt, Artificial Sequence
  Description of Artificial Sequence: Synthetic oligonucleotide
aguaauuuguacucacgac

SEQ ID NO: 2219443 - RNA, 19 nt, Artificial Sequence
  Description of Artificial Sequence: Synthetic oligonucleotide
aaguaauuuguacucacga

SEQ ID NO: 2219444 - RNA, 19 nt, Artificial Sequence
  Description of Artificial Sequence: Synthetic oligonucleotide
uuuaacaacugcucugagg

SEQ ID NO: 2219445 - RNA, 19 nt, Artificial Sequence
  Description of Artificial Sequence: Synthetic oligonucleotide
aucuguuuaaaacaaauaa

SEQ ID NO: 2219446 - RNA, 19 nt, Artificial Sequence
  Description of Artificial Sequence: Synthetic oligonucleotide
aauacugacuguugagauc

SEQ ID NO: 2219447 - RNA, 19 nt, Artificial Sequence
  Description of Artificial Sequence: Synthetic oligonucleotide
agcuuuacaucauuacgcc

SEQ ID NO: 2219448 - RNA, 19 nt, Artificial Sequence
  Description of Artificial Sequence: Synthetic oligonucleotide
uggacuaacgguuagcucu

SEQ ID NO: 2219449 - RNA, 19 nt, Artificial Sequence
  Description of Artificial Sequence: Synthetic oligonucleotide
cugaauggguacuaaagcg

SEQ ID NO: 2219450 - RNA, 19 nt, Artificial Sequence
  Description of Artificial Sequence: Synthetic oligonucleotide
caaucagugugaaaggugg

SEQ ID NO: 2219451 - RNA, 19 nt, Artificial Sequence
  Description of Artificial Sequence: Synthetic oligonucleotide
ugacauauguauaaaguaa

SEQ ID NO: 2219452 - RNA, 19 nt, Artificial Sequence
  Description of Artificial Sequence: Synthetic oligonucleotide
cucucuuucacuaucaguc

SEQ ID NO: 2219453 - RNA, 19 nt, Artificial Sequence
  Description of Artificial Sequence: Synthetic oligonucleotide
guacaugugauaaaguggg

SEQ ID NO: 2219454 - RNA, 19 nt, Artificial Sequence
  Description of Artificial Sequence: Synthetic oligonucleotide
cucaaccaaauuaacaacc

SEQ ID NO: 2219455 - RNA, 19 nt, Artificial Sequence
  Description of Artificial Sequence: Synthetic oligonucleotide
ugaauggguacuaaagcgc

SEQ ID NO: 2219456 - RNA, 19 nt, Artificial Sequence
  Description of Artificial Sequence: Synthetic oligonucleotide
auguguuaugaauuaaauc

SEQ ID NO: 2219457 - RNA, 19 nt, Artificial Sequence
  Description of Artificial Sequence: Synthetic oligonucleotide
uuuaccuuccuuuaaugac

SEQ ID NO: 2219458 - RNA, 19 nt, Artificial Sequence
  Description of Artificial Sequence: Synthetic oligonucleotide
auacauacugcacugucuc

SEQ ID NO: 2219459 - RNA, 19 nt, Artificial Sequence
  Description of Artificial Sequence: Synthetic oligonucleotide
agaaccuuuggcugaaugg

SEQ ID NO: 2219460 - RNA, 19 nt, Artificial Sequence
  Description of Artificial Sequence: Synthetic oligonucleotide
ugagaucauuucuugaaag

SEQ ID NO: 2219461 - RNA, 19 nt, Artificial Sequence
  Description of Artificial Sequence: Synthetic oligonucleotide
aaauuuauuugugaucugu

SEQ ID NO: 2219462 - RNA, 19 nt, Artificial Sequence
  Description of Artificial Sequence: Synthetic oligonucleotide
uguuaugaauuaaaucugu

SEQ ID NO: 2219463 - RNA, 19 nt, Artificial Sequence
  Description of Artificial Sequence: Synthetic oligonucleotide
aucucaaccaaauuaacaa

SEQ ID NO: 2219464 - RNA, 19 nt, Artificial Sequence
  Description of Artificial Sequence: Synthetic oligonucleotide
ugugaaagguggacuaacg

SEQ ID NO: 2219465 - RNA, 19 nt, Artificial Sequence
  Description of Artificial Sequence: Synthetic oligonucleotide
aauaaauuuaagucuucua

SEQ ID NO: 2219466 - RNA, 19 nt, Artificial Sequence
  Description of Artificial Sequence: Synthetic oligonucleotide
ugcacuuaagagauaaaac

SEQ ID NO: 2219467 - RNA, 19 nt, Artificial Sequence
  Description of Artificial Sequence: Synthetic oligonucleotide
aaauacugacuguugagau

SEQ ID NO: 2219468 - RNA, 19 nt, Artificial Sequence
  Description of Artificial Sequence: Synthetic oligonucleotide
uuagcucucacgaugcucu

SEQ ID NO: 2219469 - RNA, 19 nt, Artificial Sequence
  Description of Artificial Sequence: Synthetic oligonucleotide
uacaucauuacgccaaaga

SEQ ID NO: 2219470 - RNA, 19 nt, Artificial Sequence
  Description of Artificial Sequence: Synthetic oligonucleotide
gacuucuuaacccuggcac

SEQ ID NO: 2219471 - RNA, 19 nt, Artificial Sequence
  Description of Artificial Sequence: Synthetic oligonucleotide
ugauuggcauuuaacaacu

SEQ ID NO: 2219472 - RNA, 19 nt, Artificial Sequence
  Description of Artificial Sequence: Synthetic oligonucleotide
aaaguaauuuguacucacg

SEQ ID NO: 2219473 - RNA, 19 nt, Artificial Sequence
  Description of Artificial Sequence: Synthetic oligonucleotide
ucacaugcacuuaagagau

SEQ ID NO: 2219474 - RNA, 19 nt, Artificial Sequence
  Description of Artificial Sequence: Synthetic oligonucleotide
ugaaagguggacuaacggu

SEQ ID NO: 2219475 - RNA, 19 nt, Artificial Sequence
  Description of Artificial Sequence: Synthetic oligonucleotide
uaacgguuagcucucacga

SEQ ID NO: 2219476 - RNA, 19 nt, Artificial Sequence
  Description of Artificial Sequence: Synthetic oligonucleotide
caucauuacgccaaagaac

SEQ ID NO: 2219477 - RNA, 19 nt, Artificial Sequence
  Description of Artificial Sequence: Synthetic oligonucleotide
gaaccuuuggcugaauggg

SEQ ID NO: 2219478 - RNA, 19 nt, Artificial Sequence
  Description of Artificial Sequence: Synthetic oligonucleotide
uuuauucaagucagaaccu

SEQ ID NO: 2219479 - RNA, 19 nt, Artificial Sequence
  Description of Artificial Sequence: Synthetic oligonucleotide
cagacuuccauuacagggg

SEQ ID NO: 2219480 - RNA, 19 nt, Artificial Sequence
  Description of Artificial Sequence: Synthetic oligonucleotide
uuaacaaccgaagggaaac

SEQ ID NO: 2219481 - RNA, 19 nt, Artificial Sequence
  Description of Artificial Sequence: Synthetic oligonucleotide
ugaaaguuucagaaauaca

SEQ ID NO: 2219482 - RNA, 19 nt, Artificial Sequence
  Description of Artificial Sequence: Synthetic oligonucleotide
uauacauacugcacugucu

SEQ ID NO: 2219483 - RNA, 19 nt, Artificial Sequence
  Description of Artificial Sequence: Synthetic oligonucleotide
ugcacugucucuauuuuac

SEQ ID NO: 2219484 - RNA, 19 nt, Artificial Sequence
  Description of Artificial Sequence: Synthetic oligonucleotide
agggagacacuuuuguuuc

SEQ ID NO: 2219485 - RNA, 19 nt, Artificial Sequence
  Description of Artificial Sequence: Synthetic oligonucleotide
acaguuaagccuuuccuca

SEQ ID NO: 2219486 - RNA, 19 nt, Artificial Sequence
  Description of Artificial Sequence: Synthetic oligonucleotide
gaauggguacuaaagcgcg

SEQ ID NO: 2219487 - RNA, 19 nt, Artificial Sequence
  Description of Artificial Sequence: Synthetic oligonucleotide
uguacucacgacaguaccc

SEQ ID NO: 2219488 - RNA, 19 nt, Artificial Sequence
  Description of Artificial Sequence: Synthetic oligonucleotide
ugaucuguacaugugauaa

SEQ ID NO: 2219489 - RNA, 19 nt, Artificial Sequence
  Description of Artificial Sequence: Synthetic oligonucleotide
auuugugaucuguacaugu

SEQ ID NO: 2219490 - RNA, 19 nt, Artificial Sequence
  Description of Artificial Sequence: Synthetic oligonucleotide
agaaauacaagaucacuuu

SEQ ID NO: 2219491 - RNA, 19 nt, Artificial Sequence
  Description of Artificial Sequence: Synthetic oligonucleotide
ugccuauaaaagcugcugc

SEQ ID NO: 2219492 - RNA, 19 nt, Artificial Sequence
  Description of Artificial Sequence: Synthetic oligonucleotide
ucauguguuaugaauuaaa

SEQ ID NO: 2219493 - RNA, 19 nt, Artificial Sequence
  Description of Artificial Sequence: Synthetic oligonucleotide
cuaacgguuagcucucacg

SEQ ID NO: 2219494 - RNA, 19 nt, Artificial Sequence
  Description of Artificial Sequence: Synthetic oligonucleotide
uuacaggggaaauaaagua

SEQ ID NO: 2219495 - RNA, 19 nt, Artificial Sequence
  Description of Artificial Sequence: Synthetic oligonucleotide
auaaaacacaaaagaugcc

SEQ ID NO: 2219496 - RNA, 19 nt, Artificial Sequence
  Description of Artificial Sequence: Synthetic oligonucleotide
gaaugugacauauguauaa

SEQ ID NO: 2219497 - RNA, 19 nt, Artificial Sequence
  Description of Artificial Sequence: Synthetic oligonucleotide
ucacaguuaagccuuuccu

SEQ ID NO: 2219498 - RNA, 19 nt, Artificial Sequence
  Description of Artificial Sequence: Synthetic oligonucleotide
acaucauuacgccaaagaa

SEQ ID NO: 2219499 - RNA, 19 nt, Artificial Sequence
  Description of Artificial Sequence: Synthetic oligonucleotide
aaaccucagauuucugcug

SEQ ID NO: 2219500 - RNA, 19 nt, Artificial Sequence
  Description of Artificial Sequence: Synthetic oligonucleotide
uuguacucacgacaguacc

SEQ ID NO: 2219501 - RNA, 19 nt, Artificial Sequence
  Description of Artificial Sequence: Synthetic oligonucleotide
ucucuauuuuacaaauuuc

SEQ ID NO: 2219502 - RNA, 19 nt, Artificial Sequence
  Description of Artificial Sequence: Synthetic oligonucleotide
aaguuuaccuuccuuuaau

SEQ ID NO: 2219503 - RNA, 19 nt, Artificial Sequence
  Description of Artificial Sequence: Synthetic oligonucleotide
gugaaagguggacuaacgg

SEQ ID NO: 2219504 - RNA, 19 nt, Artificial Sequence
  Description of Artificial Sequence: Synthetic oligonucleotide
acgauuuaagauuaauaaa

SEQ ID NO: 2219505 - RNA, 19 nt, Artificial Sequence
  Description of Artificial Sequence: Synthetic oligonucleotide
guauaaaguaauuuguacu

SEQ ID NO: 2219506 - RNA, 19 nt, Artificial Sequence
  Description of Artificial Sequence: Synthetic oligonucleotide
uacuaaagcgcgaugcccu

SEQ ID NO: 2219507 - RNA, 19 nt, Artificial Sequence
  Description of Artificial Sequence: Synthetic oligonucleotide
agaaccagacuuccauuac

SEQ ID NO: 2219508 - RNA, 19 nt, Artificial Sequence
  Description of Artificial Sequence: Synthetic oligonucleotide
uuuguacucacgacaguac

SEQ ID NO: 2219509 - RNA, 19 nt, Artificial Sequence
  Description of Artificial Sequence: Synthetic oligonucleotide
aucaguccgagccuguuag

SEQ ID NO: 2219510 - RNA, 19 nt, Artificial Sequence
  Description of Artificial Sequence: Synthetic oligonucleotide
augaauuaaaucuguuuaa

SEQ ID NO: 2219511 - RNA, 19 nt, Artificial Sequence
  Description of Artificial Sequence: Synthetic oligonucleotide
ucucaaccaaauuaacaac

SEQ ID NO: 2219512 - RNA, 19 nt, Artificial Sequence
  Description of Artificial Sequence: Synthetic oligonucleotide
ggggaaauaaaguauacga

SEQ ID NO: 2219513 - RNA, 19 nt, Artificial Sequence
  Description of Artificial Sequence: Synthetic oligonucleotide
cuuugccuauaaaagcugc

SEQ ID NO: 2219514 - RNA, 19 nt, Artificial Sequence
  Description of Artificial Sequence: Synthetic oligonucleotide
aagaaccagacuuccauua

SEQ ID NO: 2219515 - RNA, 19 nt, Artificial Sequence
  Description of Artificial Sequence: Synthetic oligonucleotide
aaauacaagaucacuuuaa

SEQ ID NO: 2219516 - RNA, 19 nt, Artificial Sequence
  Description of Artificial Sequence: Synthetic oligonucleotide
uccuuuaaugacuucuuaa

SEQ ID NO: 2219517 - RNA, 19 nt, Artificial Sequence
  Description of Artificial Sequence: Synthetic oligonucleotide
uuaagagauaaaacacaaa

SEQ ID NO: 2219518 - RNA, 19 nt, Artificial Sequence
  Description of Artificial Sequence: Synthetic oligonucleotide
ugaggaacugagcagcccu

SEQ ID NO: 2219519 - RNA, 19 nt, Artificial Sequence
  Description of Artificial Sequence: Synthetic oligonucleotide
ucuuaacccuggcacaagc

SEQ ID NO: 2219520 - RNA, 19 nt, Artificial Sequence
  Description of Artificial Sequence: Synthetic oligonucleotide
uuaucucaaccaaauuaac

SEQ ID NO: 2219521 - RNA, 19 nt, Artificial Sequence
  Description of Artificial Sequence: Synthetic oligonucleotide
ucagauuucugcugcuuug

SEQ ID NO: 2219522 - RNA, 19 nt, Artificial Sequence
  Description of Artificial Sequence: Synthetic oligonucleotide
uaacaaaacuccuugcauu

SEQ ID NO: 2219523 - RNA, 19 nt, Artificial Sequence
  Description of Artificial Sequence: Synthetic oligonucleotide
guuaagccuuuccucaggg

SEQ ID NO: 2219524 - RNA, 19 nt, Artificial Sequence
  Description of Artificial Sequence: Synthetic oligonucleotide
ccagacuuccauuacaggg

SEQ ID NO: 2219525 - RNA, 19 nt, Artificial Sequence
  Description of Artificial Sequence: Synthetic oligonucleotide
aguuuaccuuccuuuaaug

SEQ ID NO: 2219526 - RNA, 19 nt, Artificial Sequence
  Description of Artificial Sequence: Synthetic oligonucleotide
uguguaguggcaguuaaaa

SEQ ID NO: 2219527 - RNA, 19 nt, Artificial Sequence
  Description of Artificial Sequence: Synthetic oligonucleotide
acgccaaagaaccagacuu

SEQ ID NO: 2219528 - RNA, 19 nt, Artificial Sequence
  Description of Artificial Sequence: Synthetic oligonucleotide
cuuuacaucauuacgccaa

SEQ ID NO: 2219529 - RNA, 19 nt, Artificial Sequence
  Description of Artificial Sequence: Synthetic oligonucleotide
auuucacaugcacuuaaga

SEQ ID NO: 2219530 - RNA, 19 nt, Artificial Sequence
  Description of Artificial Sequence: Synthetic oligonucleotide
aaccagacuuccauuacag

SEQ ID NO: 2219531 - RNA, 19 nt, Artificial Sequence
  Description of Artificial Sequence: Synthetic oligonucleotide
uucuagcacauuucaaaga

SEQ ID NO: 2219532 - RNA, 19 nt, Artificial Sequence
  Description of Artificial Sequence: Synthetic oligonucleotide
ucucuuucacuaucagucc

SEQ ID NO: 2219533 - RNA, 19 nt, Artificial Sequence
  Description of Artificial Sequence: Synthetic oligonucleotide
aguuaagccuuuccucagg

SEQ ID NO: 2219534 - RNA, 19 nt, Artificial Sequence
  Description of Artificial Sequence: Synthetic oligonucleotide
uacaugugauaaagugggg

SEQ ID NO: 2219535 - RNA, 19 nt, Artificial Sequence
  Description of Artificial Sequence: Synthetic oligonucleotide
uguugagaucauuucuuga

SEQ ID NO: 2219536 - RNA, 19 nt, Artificial Sequence
  Description of Artificial Sequence: Synthetic oligonucleotide
ugugaucuguacaugugau

SEQ ID NO: 2219537 - RNA, 19 nt, Artificial Sequence
  Description of Artificial Sequence: Synthetic oligonucleotide
ugaaugugacauauguaua

SEQ ID NO: 2219538 - RNA, 19 nt, Artificial Sequence
  Description of Artificial Sequence: Synthetic oligonucleotide
uuugccuauaaaagcugcu

SEQ ID NO: 2219539 - RNA, 19 nt, Artificial Sequence
  Description of Artificial Sequence: Synthetic oligonucleotide
guugagaucauuucuugaa

SEQ ID NO: 2219540 - RNA, 19 nt, Artificial Sequence
  Description of Artificial Sequence: Synthetic oligonucleotide
uaaugacuucuuaacccug

SEQ ID NO: 2219541 - RNA, 19 nt, Artificial Sequence
  Description of Artificial Sequence: Synthetic oligonucleotide
ugaaguuuaccuuccuuua

SEQ ID NO: 2219542 - RNA, 19 nt, Artificial Sequence
  Description of Artificial Sequence: Synthetic oligonucleotide
ccaaauuaacaaccgaagg

SEQ ID NO: 2219543 - RNA, 19 nt, Artificial Sequence
  Description of Artificial Sequence: Synthetic oligonucleotide
aggggaaauaaaguauacg

SEQ ID NO: 2219544 - RNA, 19 nt, Artificial Sequence
  Description of Artificial Sequence: Synthetic oligonucleotide
auucaacugaaugugacau

SEQ ID NO: 2219545 - RNA, 19 nt, Artificial Sequence
  Description of Artificial Sequence: Synthetic oligonucleotide
aauguuuaucucaaccaaa

SEQ ID NO: 2219546 - RNA, 19 nt, Artificial Sequence
  Description of Artificial Sequence: Synthetic oligonucleotide
uggcauuuaacaacugcuc

SEQ ID NO: 2219547 - RNA, 19 nt, Artificial Sequence
  Description of Artificial Sequence: Synthetic oligonucleotide
acgguuagcucucacgaug

SEQ ID NO: 2219548 - RNA, 19 nt, Artificial Sequence
  Description of Artificial Sequence: Synthetic oligonucleotide
aaagaaccagacuuccauu

SEQ ID NO: 2219549 - RNA, 19 nt, Artificial Sequence
  Description of Artificial Sequence: Synthetic oligonucleotide
acugucucuauuuuacaaa

SEQ ID NO: 2219550 - RNA, 19 nt, Artificial Sequence
  Description of Artificial Sequence: Synthetic oligonucleotide
auaaaguaauuuguacuca

SEQ ID NO: 2219551 - RNA, 19 nt, Artificial Sequence
  Description of Artificial Sequence: Synthetic oligonucleotide
uauacgauuuaagauuaau

SEQ ID NO: 2219552 - RNA, 19 nt, Artificial Sequence
  Description of Artificial Sequence: Synthetic oligonucleotide
guguuaugaauuaaaucug

SEQ ID NO: 2219553 - RNA, 19 nt, Artificial Sequence
  Description of Artificial Sequence: Synthetic oligonucleotide
ugccaaaccuguguagugg

SEQ ID NO: 2219554 - RNA, 19 nt, Artificial Sequence
  Description of Artificial Sequence: Synthetic oligonucleotide
guuuaccuuccuuuaauga

SEQ ID NO: 2219555 - RNA, 19 nt, Artificial Sequence
  Description of Artificial Sequence: Synthetic oligonucleotide
gugacauauguauaaagua

SEQ ID NO: 2219556 - RNA, 19 nt, Artificial Sequence
  Description of Artificial Sequence: Synthetic oligonucleotide
aagaugccaaaccugugua

SEQ ID NO: 2219557 - RNA, 19 nt, Artificial Sequence
  Description of Artificial Sequence: Synthetic oligonucleotide
aagguggacuaacgguuag

SEQ ID NO: 2219558 - RNA, 19 nt, Artificial Sequence
  Description of Artificial Sequence: Synthetic oligonucleotide
cacaguuaagccuuuccuc

SEQ ID NO: 2219559 - RNA, 19 nt, Artificial Sequence
  Description of Artificial Sequence: Synthetic oligonucleotide
aaagcgcgaugcccuuugc

SEQ ID NO: 2219560 - RNA, 19 nt, Artificial Sequence
  Description of Artificial Sequence: Synthetic oligonucleotide
uaaagcgcgaugcccuuug

SEQ ID NO: 2219561 - RNA, 19 nt, Artificial Sequence
  Description of Artificial Sequence: Synthetic oligonucleotide
acaaaagaugccaaaccug

SEQ ID NO: 2219562 - RNA, 19 nt, Artificial Sequence
  Description of Artificial Sequence: Synthetic oligonucleotide
agccuguuagaucaugugu

SEQ ID NO: 2219563 - RNA, 19 nt, Artificial Sequence
  Description of Artificial Sequence: Synthetic oligonucleotide
uccauucaacugaauguga

SEQ ID NO: 2219564 - RNA, 19 nt, Artificial Sequence
  Description of Artificial Sequence: Synthetic oligonucleotide
guuagaucauguguuauga

SEQ ID NO: 2219565 - RNA, 19 nt, Artificial Sequence
  Description of Artificial Sequence: Synthetic oligonucleotide
cauuacgccaaagaaccag

SEQ ID NO: 2219566 - RNA, 19 nt, Artificial Sequence
  Description of Artificial Sequence: Synthetic oligonucleotide
uccuuuauucaagucagaa

SEQ ID NO: 2219567 - RNA, 19 nt, Artificial Sequence
  Description of Artificial Sequence: Synthetic oligonucleotide
uugccuauaaaagcugcug

SEQ ID NO: 2219568 - RNA, 19 nt, Artificial Sequence
  Description of Artificial Sequence: Synthetic oligonucleotide
aaaccuguguaguggcagu

SEQ ID NO: 2219569 - RNA, 19 nt, Artificial Sequence
  Description of Artificial Sequence: Synthetic oligonucleotide
acuucuuaacccuggcaca

SEQ ID NO: 2219570 - RNA, 19 nt, Artificial Sequence
  Description of Artificial Sequence: Synthetic oligonucleotide
uuuacaucauuacgccaaa

SEQ ID NO: 2219571 - RNA, 19 nt, Artificial Sequence
  Description of Artificial Sequence: Synthetic oligonucleotide
ucauuucuugaaaguuuca

SEQ ID NO: 2219572 - RNA, 19 nt, Artificial Sequence
  Description of Artificial Sequence: Synthetic oligonucleotide
gcugcuuugccuauaaaag

SEQ ID NO: 2219573 - RNA, 19 nt, Artificial Sequence
  Description of Artificial Sequence: Synthetic oligonucleotide
uauucaagucagaaccuuu

SEQ ID NO: 2219574 - RNA, 19 nt, Artificial Sequence
  Description of Artificial Sequence: Synthetic oligonucleotide
aauuaacaaccgaagggaa

SEQ ID NO: 2219575 - RNA, 19 nt, Artificial Sequence
  Description of Artificial Sequence: Synthetic oligonucleotide
aacaaccgaagggaaaccu

SEQ ID NO: 2219576 - RNA, 19 nt, Artificial Sequence
  Description of Artificial Sequence: Synthetic oligonucleotide
gaaauaaaguauacgauuu

SEQ ID NO: 2219577 - RNA, 19 nt, Artificial Sequence
  Description of Artificial Sequence: Synthetic oligonucleotide
ugacuucuuaacccuggca

SEQ ID NO: 2219578 - RNA, 19 nt, Artificial Sequence
  Description of Artificial Sequence: Synthetic oligonucleotide
auuuaacaacugcucugag

SEQ ID NO: 2219579 - RNA, 19 nt, Artificial Sequence
  Description of Artificial Sequence: Synthetic oligonucleotide
acuaacgguuagcucucac

SEQ ID NO: 2219580 - RNA, 19 nt, Artificial Sequence
  Description of Artificial Sequence: Synthetic oligonucleotide
ugacuguugagaucauuuc

SEQ ID NO: 2219581 - RNA, 19 nt, Artificial Sequence
  Description of Artificial Sequence: Synthetic oligonucleotide
agaugccaaaccuguguag

SEQ ID NO: 2219582 - RNA, 19 nt, Artificial Sequence
  Description of Artificial Sequence: Synthetic oligonucleotide
gaucauguguuaugaauua

SEQ ID NO: 2219583 - RNA, 19 nt, Artificial Sequence
  Description of Artificial Sequence: Synthetic oligonucleotide
ucagugugaaagguggacu

SEQ ID NO: 2219584 - RNA, 19 nt, Artificial Sequence
  Description of Artificial Sequence: Synthetic oligonucleotide
gagauaaaacacaaaagau

SEQ ID NO: 2219585 - RNA, 19 nt, Artificial Sequence
  Description of Artificial Sequence: Synthetic oligonucleotide
aguauacgauuuaagauua

SEQ ID NO: 2219586 - RNA, 19 nt, Artificial Sequence
  Description of Artificial Sequence: Synthetic oligonucleotide
uauuugugaucuguacaug

SEQ ID NO: 2219587 - RNA, 19 nt, Artificial Sequence
  Description of Artificial Sequence: Synthetic oligonucleotide
uguuuaucucaaccaaauu

SEQ ID NO: 2219588 - RNA, 19 nt, Artificial Sequence
  Description of Artificial Sequence: Synthetic oligonucleotide
aaugggagauuuacaaaau

SEQ ID NO: 2219589 - RNA, 19 nt, Artificial Sequence
  Description of Artificial Sequence: Synthetic oligonucleotide
accagacuuccauuacagg

SEQ ID NO: 2219590 - RNA, 19 nt, Artificial Sequence
  Description of Artificial Sequence: Synthetic oligonucleotide
augcacuuaagagauaaaa

SEQ ID NO: 2219591 - RNA, 19 nt, Artificial Sequence
  Description of Artificial Sequence: Synthetic oligonucleotide
aguccgagccuguuagauc

SEQ ID NO: 2219592 - RNA, 19 nt, Artificial Sequence
  Description of Artificial Sequence: Synthetic oligonucleotide
aaaguggggcuucauugua

SEQ ID NO: 2219593 - RNA, 19 nt, Artificial Sequence
  Description of Artificial Sequence: Synthetic oligonucleotide
uuagaucauguguuaugaa

SEQ ID NO: 2219594 - RNA, 19 nt, Artificial Sequence
  Description of Artificial Sequence: Synthetic oligonucleotide
acaaauaacaaaacuccuu

SEQ ID NO: 2219595 - RNA, 19 nt, Artificial Sequence
  Description of Artificial Sequence: Synthetic oligonucleotide
ggacaaucagugugaaagg

SEQ ID NO: 2219596 - RNA, 19 nt, Artificial Sequence
  Description of Artificial Sequence: Synthetic oligonucleotide
agaucauguguuaugaauu

SEQ ID NO: 2219597 - RNA, 19 nt, Artificial Sequence
  Description of Artificial Sequence: Synthetic oligonucleotide
acaaucagugugaaaggug

SEQ ID NO: 2219598 - RNA, 19 nt, Artificial Sequence
  Description of Artificial Sequence: Synthetic oligonucleotide
ugugauaaaguggggcuuc

SEQ ID NO: 2219599 - RNA, 19 nt, Artificial Sequence
  Description of Artificial Sequence: Synthetic oligonucleotide
agacuuccauuacagggga

SEQ ID NO: 2219600 - RNA, 19 nt, Artificial Sequence
  Description of Artificial Sequence: Synthetic oligonucleotide
caaaccuguguaguggcag

SEQ ID NO: 2219601 - RNA, 19 nt, Artificial Sequence
  Description of Artificial Sequence: Synthetic oligonucleotide
guacucacgacaguacccc

SEQ ID NO: 2219602 - RNA, 19 nt, Artificial Sequence
  Description of Artificial Sequence: Synthetic oligonucleotide
guacuaaagcgcgaugccc

SEQ ID NO: 2219603 - RNA, 19 nt, Artificial Sequence
  Description of Artificial Sequence: Synthetic oligonucleotide
ucacuaucaguccgagccu

SEQ ID NO: 2219604 - RNA, 19 nt, Artificial Sequence
  Description of Artificial Sequence: Synthetic oligonucleotide
ccuugcauuuccuuuauuc

SEQ ID NO: 2219605 - RNA, 19 nt, Artificial Sequence
  Description of Artificial Sequence: Synthetic oligonucleotide
auguuuaucucaaccaaau

SEQ ID NO: 2219606 - RNA, 19 nt, Artificial Sequence
  Description of Artificial Sequence: Synthetic oligonucleotide
auacgauuuaagauuaaua

SEQ ID NO: 2219607 - RNA, 19 nt, Artificial Sequence
  Description of Artificial Sequence: Synthetic oligonucleotide
gguacuaaagcgcgaugcc

SEQ ID NO: 2219608 - RNA, 19 nt, Artificial Sequence
  Description of Artificial Sequence: Synthetic oligonucleotide
aggacgggaggacaaucag

SEQ ID NO: 2219609 - RNA, 19 nt, Artificial Sequence
  Description of Artificial Sequence: Synthetic oligonucleotide
uacugcacugucucuauuu

SEQ ID NO: 2219610 - RNA, 19 nt, Artificial Sequence
  Description of Artificial Sequence: Synthetic oligonucleotide
ucauuacgccaaagaacca

SEQ ID NO: 2219611 - RNA, 19 nt, Artificial Sequence
  Description of Artificial Sequence: Synthetic oligonucleotide
aacgguuagcucucacgau

SEQ ID NO: 2219612 - RNA, 19 nt, Artificial Sequence
  Description of Artificial Sequence: Synthetic oligonucleotide
ggaaauaaaguauacgauu

SEQ ID NO: 2219613 - RNA, 19 nt, Artificial Sequence
  Description of Artificial Sequence: Synthetic oligonucleotide
aguggggcuucauuguaga

SEQ ID NO: 2219614 - RNA, 19 nt, Artificial Sequence
  Description of Artificial Sequence: Synthetic oligonucleotide
uuauucaagucagaaccuu

SEQ ID NO: 2219615 - RNA, 19 nt, Artificial Sequence
  Description of Artificial Sequence: Synthetic oligonucleotide
aaguggggcuucauuguag

SEQ ID NO: 2219616 - RNA, 19 nt, Artificial Sequence
  Description of Artificial Sequence: Synthetic oligonucleotide
cauuuccuuuauucaaguc

SEQ ID NO: 2219617 - RNA, 19 nt, Artificial Sequence
  Description of Artificial Sequence: Synthetic oligonucleotide
acaaccgaagggaaaccuc

SEQ ID NO: 2219618 - RNA, 19 nt, Artificial Sequence
  Description of Artificial Sequence: Synthetic oligonucleotide
gccuauaaaagcugcugcc

SEQ ID NO: 2219619 - RNA, 19 nt, Artificial Sequence
  Description of Artificial Sequence: Synthetic oligonucleotide
gacauauguauaaaguaau

SEQ ID NO: 2219620 - RNA, 19 nt, Artificial Sequence
  Description of Artificial Sequence: Synthetic oligonucleotide
gucucuauuuuacaaauuu

SEQ ID NO: 2219621 - RNA, 19 nt, Artificial Sequence
  Description of Artificial Sequence: Synthetic oligonucleotide
caaccgaagggaaaccuca

SEQ ID NO: 2219622 - RNA, 19 nt, Artificial Sequence
  Description of Artificial Sequence: Synthetic oligonucleotide
augccaaaccuguguagug

SEQ ID NO: 2219623 - RNA, 19 nt, Artificial Sequence
  Description of Artificial Sequence: Synthetic oligonucleotide
aaacuccuugcauuuccuu

SEQ ID NO: 2219624 - RNA, 19 nt, Artificial Sequence
  Description of Artificial Sequence: Synthetic oligonucleotide
uuacaucauuacgccaaag

SEQ ID NO: 2219625 - RNA, 19 nt, Artificial Sequence
  Description of Artificial Sequence: Synthetic oligonucleotide
cacaaaagaugccaaaccu

SEQ ID NO: 2219626 - RNA, 19 nt, Artificial Sequence
  Description of Artificial Sequence: Synthetic oligonucleotide
caguuaagccuuuccucag

SEQ ID NO: 2219627 - RNA, 19 nt, Artificial Sequence
  Description of Artificial Sequence: Synthetic oligonucleotide
caugugauaaaguggggcu

SEQ ID NO: 2219628 - RNA, 19 nt, Artificial Sequence
  Description of Artificial Sequence: Synthetic oligonucleotide
auuaacaaccgaagggaaa

SEQ ID NO: 2219629 - RNA, 19 nt, Artificial Sequence
  Description of Artificial Sequence: Synthetic oligonucleotide
uaacaaccgaagggaaacc

SEQ ID NO: 2219630 - RNA, 19 nt, Artificial Sequence
  Description of Artificial Sequence: Synthetic oligonucleotide
aagcgcgaugcccuuugcu

SEQ ID NO: 2219631 - RNA, 19 nt, Artificial Sequence
  Description of Artificial Sequence: Synthetic oligonucleotide
agguggacuaacgguuagc

SEQ ID NO: 2219632 - RNA, 19 nt, Artificial Sequence
  Description of Artificial Sequence: Synthetic oligonucleotide
uucaacugaaugugacaua

SEQ ID NO: 2219633 - RNA, 19 nt, Artificial Sequence
  Description of Artificial Sequence: Synthetic oligonucleotide
ggguacuaaagcgcgaugc

SEQ ID NO: 2219634 - RNA, 19 nt, Artificial Sequence
  Description of Artificial Sequence: Synthetic oligonucleotide
cagaaccuuuggcugaaug

SEQ ID NO: 2219635 - RNA, 19 nt, Artificial Sequence
  Description of Artificial Sequence: Synthetic oligonucleotide
auuacgccaaagaaccaga

SEQ ID NO: 2219636 - RNA, 19 nt, Artificial Sequence
  Description of Artificial Sequence: Synthetic oligonucleotide
ucagggagacacuuuuguu

SEQ ID NO: 2219637 - RNA, 19 nt, Artificial Sequence
  Description of Artificial Sequence: Synthetic oligonucleotide
acaggggaaauaaaguaua

SEQ ID NO: 2219638 - RNA, 19 nt, Artificial Sequence
  Description of Artificial Sequence: Synthetic oligonucleotide
ccauucaacugaaugugac

SEQ ID NO: 2219639 - RNA, 19 nt, Artificial Sequence
  Description of Artificial Sequence: Synthetic oligonucleotide
aaccuuuggcugaaugggu

SEQ ID NO: 2219640 - RNA, 19 nt, Artificial Sequence
  Description of Artificial Sequence: Synthetic oligonucleotide
uaucaguccgagccuguua

SEQ ID NO: 2219641 - RNA, 19 nt, Artificial Sequence
  Description of Artificial Sequence: Synthetic oligonucleotide
aauggguacuaaagcgcga

SEQ ID NO: 2219642 - RNA, 19 nt, Artificial Sequence
  Description of Artificial Sequence: Synthetic oligonucleotide
aaccgaagggaaaccucag

SEQ ID NO: 2219643 - RNA, 19 nt, Artificial Sequence
  Description of Artificial Sequence: Synthetic oligonucleotide
acuccagaaucacuuugaa

SEQ ID NO: 2219644 - RNA, 19 nt, Artificial Sequence
  Description of Artificial Sequence: Synthetic oligonucleotide
agcucucacgaugcucugc

SEQ ID NO: 2219645 - RNA, 19 nt, Artificial Sequence
  Description of Artificial Sequence: Synthetic oligonucleotide
gaaagguggacuaacgguu

SEQ ID NO: 2219646 - RNA, 19 nt, Artificial Sequence
  Description of Artificial Sequence: Synthetic oligonucleotide
agcgcgaugcccuuugcuu

SEQ ID NO: 2219647 - RNA, 19 nt, Artificial Sequence
  Description of Artificial Sequence: Synthetic oligonucleotide
aaagguggacuaacgguua

SEQ ID NO: 2219648 - RNA, 19 nt, Artificial Sequence
  Description of Artificial Sequence: Synthetic oligonucleotide
ugcuuagcuuuacaucauu

SEQ ID NO: 2219649 - RNA, 19 nt, Artificial Sequence
  Description of Artificial Sequence: Synthetic oligonucleotide
uucuuaacccuggcacaag

SEQ ID NO: 2219650 - RNA, 19 nt, Artificial Sequence
  Description of Artificial Sequence: Synthetic oligonucleotide
cacugucucuauuuuacaa

SEQ ID NO: 2219651 - RNA, 19 nt, Artificial Sequence
  Description of Artificial Sequence: Synthetic oligonucleotide
uuuccucagggagacacuu

SEQ ID NO: 2219652 - RNA, 19 nt, Artificial Sequence
  Description of Artificial Sequence: Synthetic oligonucleotide
accgaagggaaaccucaga

SEQ ID NO: 2219653 - RNA, 19 nt, Artificial Sequence
  Description of Artificial Sequence: Synthetic oligonucleotide
caacugaaugugacauaug

SEQ ID NO: 2219654 - RNA, 19 nt, Artificial Sequence
  Description of Artificial Sequence: Synthetic oligonucleotide
uggcugaauggguacuaaa

SEQ ID NO: 2219655 - RNA, 19 nt, Artificial Sequence
  Description of Artificial Sequence: Synthetic oligonucleotide
cgauuuaagauuaauaaau

SEQ ID NO: 2219656 - RNA, 19 nt, Artificial Sequence
  Description of Artificial Sequence: Synthetic oligonucleotide
gacaaucagugugaaaggu

SEQ ID NO: 2219657 - RNA, 19 nt, Artificial Sequence
  Description of Artificial Sequence: Synthetic oligonucleotide
uuccauuacaggggaaaua

SEQ ID NO: 2219658 - RNA, 19 nt, Artificial Sequence
  Description of Artificial Sequence: Synthetic oligonucleotide
ggggcuucauuguagaucu

SEQ ID NO: 2219659 - RNA, 19 nt, Artificial Sequence
  Description of Artificial Sequence: Synthetic oligonucleotide
uuuggcugaauggguacua

SEQ ID NO: 2219660 - RNA, 19 nt, Artificial Sequence
  Description of Artificial Sequence: Synthetic oligonucleotide
guuagcucucacgaugcuc

SEQ ID NO: 2219661 - RNA, 19 nt, Artificial Sequence
  Description of Artificial Sequence: Synthetic oligonucleotide
aucauguguuaugaauuaa

SEQ ID NO: 2219662 - RNA, 19 nt, Artificial Sequence
  Description of Artificial Sequence: Synthetic oligonucleotide
accuuccuuuaaugacuuc

SEQ ID NO: 2219663 - RNA, 19 nt, Artificial Sequence
  Description of Artificial Sequence: Synthetic oligonucleotide
cugucucuauuuuacaaau

SEQ ID NO: 2219664 - RNA, 19 nt, Artificial Sequence
  Description of Artificial Sequence: Synthetic oligonucleotide
cacuaucaguccgagccug

SEQ ID NO: 2219665 - RNA, 19 nt, Artificial Sequence
  Description of Artificial Sequence: Synthetic oligonucleotide
gccaaaccuguguaguggc

SEQ ID NO: 2219666 - RNA, 19 nt, Artificial Sequence
  Description of Artificial Sequence: Synthetic oligonucleotide
caagcucuccucucuuuca

SEQ ID NO: 2219667 - RNA, 19 nt, Artificial Sequence
  Description of Artificial Sequence: Synthetic oligonucleotide
gaggaacugagcagcccug

SEQ ID NO: 2219668 - RNA, 19 nt, Artificial Sequence
  Description of Artificial Sequence: Synthetic oligonucleotide
agcucuccucucuuucacu

SEQ ID NO: 2219669 - RNA, 19 nt, Artificial Sequence
  Description of Artificial Sequence: Synthetic oligonucleotide
guggacuaacgguuagcuc

SEQ ID NO: 2219670 - RNA, 19 nt, Artificial Sequence
  Description of Artificial Sequence: Synthetic oligonucleotide
agugugaaagguggacuaa

SEQ ID NO: 2219671 - RNA, 19 nt, Artificial Sequence
  Description of Artificial Sequence: Synthetic oligonucleotide
cagugugaaagguggacua

SEQ ID NO: 2219672 - RNA, 19 nt, Artificial Sequence
  Description of Artificial Sequence: Synthetic oligonucleotide
ucaguccgagccuguuaga

SEQ ID NO: 2219673 - RNA, 19 nt, Artificial Sequence
  Description of Artificial Sequence: Synthetic oligonucleotide
caggacgggaggacaauca

SEQ ID NO: 2219674 - RNA, 19 nt, Artificial Sequence
  Description of Artificial Sequence: Synthetic oligonucleotide
acuaaagcgcgaugcccuu

SEQ ID NO: 2219675 - RNA, 19 nt, Artificial Sequence
  Description of Artificial Sequence: Synthetic oligonucleotide
augugauaaaguggggcuu

SEQ ID NO: 2219676 - RNA, 19 nt, Artificial Sequence
  Description of Artificial Sequence: Synthetic oligonucleotide
cagcccugcaggacgggag

SEQ ID NO: 2219677 - RNA, 19 nt, Artificial Sequence
  Description of Artificial Sequence: Synthetic oligonucleotide
ucacgaugcucugcuuagc

SEQ ID NO: 2219678 - RNA, 19 nt, Artificial Sequence
  Description of Artificial Sequence: Synthetic oligonucleotide
uuggcugaauggguacuaa

SEQ ID NO: 2219679 - RNA, 19 nt, Artificial Sequence
  Description of Artificial Sequence: Synthetic oligonucleotide
gugaucuguacaugugaua

SEQ ID NO: 2219680 - RNA, 19 nt, Artificial Sequence
  Description of Artificial Sequence: Synthetic oligonucleotide
gcuuuacaucauuacgcca

SEQ ID NO: 2219681 - RNA, 19 nt, Artificial Sequence
  Description of Artificial Sequence: Synthetic oligonucleotide
acgggaggacaaucagugu

SEQ ID NO: 2219682 - RNA, 19 nt, Artificial Sequence
  Description of Artificial Sequence: Synthetic oligonucleotide
gcuuugccuauaaaagcug

SEQ ID NO: 2219683 - RNA, 19 nt, Artificial Sequence
  Description of Artificial Sequence: Synthetic oligonucleotide
cagggagacacuuuuguuu

SEQ ID NO: 2219684 - RNA, 19 nt, Artificial Sequence
  Description of Artificial Sequence: Synthetic oligonucleotide
ugauaaaguggggcuucau

SEQ ID NO: 2219685 - RNA, 19 nt, Artificial Sequence
  Description of Artificial Sequence: Synthetic oligonucleotide
gaugcccuuugcuuuuccu

SEQ ID NO: 2219686 - RNA, 19 nt, Artificial Sequence
  Description of Artificial Sequence: Synthetic oligonucleotide
uggcacaagcucuccucuc

SEQ ID NO: 2219687 - RNA, 19 nt, Artificial Sequence
  Description of Artificial Sequence: Synthetic oligonucleotide
cuuaacccuggcacaagcu

SEQ ID NO: 2219688 - RNA, 19 nt, Artificial Sequence
  Description of Artificial Sequence: Synthetic oligonucleotide
gaggacaaucagugugaaa

SEQ ID NO: 2219689 - RNA, 19 nt, Artificial Sequence
  Description of Artificial Sequence: Synthetic oligonucleotide
ccuuuggcugaauggguac

SEQ ID NO: 2219690 - RNA, 19 nt, Artificial Sequence
  Description of Artificial Sequence: Synthetic oligonucleotide
cgggaggacaaucagugug

SEQ ID NO: 2219691 - RNA, 19 nt, Artificial Sequence
  Description of Artificial Sequence: Synthetic oligonucleotide
caugcacuuaagagauaaa

SEQ ID NO: 2219692 - RNA, 19 nt, Artificial Sequence
  Description of Artificial Sequence: Synthetic oligonucleotide
gggaggacaaucaguguga

SEQ ID NO: 2219693 - RNA, 19 nt, Artificial Sequence
  Description of Artificial Sequence: Synthetic oligonucleotide
accuuuggcugaaugggua

SEQ ID NO: 2219694 - RNA, 19 nt, Artificial Sequence
  Description of Artificial Sequence: Synthetic oligonucleotide
cgguuagcucucacgaugc

SEQ ID NO: 2219695 - RNA, 19 nt, Artificial Sequence
  Description of Artificial Sequence: Synthetic oligonucleotide
acuaucaguccgagccugu

SEQ ID NO: 2219696 - RNA, 19 nt, Artificial Sequence
  Description of Artificial Sequence: Synthetic oligonucleotide
gugauaaaguggggcuuca

SEQ ID NO: 2219697 - RNA, 19 nt, Artificial Sequence
  Description of Artificial Sequence: Synthetic oligonucleotide
uacugacuguugagaucau

SEQ ID NO: 2219698 - RNA, 19 nt, Artificial Sequence
  Description of Artificial Sequence: Synthetic oligonucleotide
cuguguaguggcaguuaaa

SEQ ID NO: 2219699 - RNA, 19 nt, Artificial Sequence
  Description of Artificial Sequence: Synthetic oligonucleotide
cacgaugcucugcuuagcu

SEQ ID NO: 2219700 - RNA, 19 nt, Artificial Sequence
  Description of Artificial Sequence: Synthetic oligonucleotide
gguggacuaacgguuagcu

SEQ ID NO: 2219701 - RNA, 19 nt, Artificial Sequence
  Description of Artificial Sequence: Synthetic oligonucleotide
gcauuuccuuuauucaagu

SEQ ID NO: 2219702 - RNA, 19 nt, Artificial Sequence
  Description of Artificial Sequence: Synthetic oligonucleotide
guauacgauuuaagauuaa

SEQ ID NO: 2219703 - RNA, 19 nt, Artificial Sequence
  Description of Artificial Sequence: Synthetic oligonucleotide
cugcacugucucuauuuua

SEQ ID NO: 2219704 - RNA, 19 nt, Artificial Sequence
  Description of Artificial Sequence: Synthetic oligonucleotide
ugcaggacgggaggacaau

SEQ ID NO: 2219705 - RNA, 19 nt, Artificial Sequence
  Description of Artificial Sequence: Synthetic oligonucleotide
uccgagccuguuagaucau

SEQ ID NO: 2219706 - RNA, 19 nt, Artificial Sequence
  Description of Artificial Sequence: Synthetic oligonucleotide
ggacuaacgguuagcucuc

SEQ ID NO: 2219707 - RNA, 19 nt, Artificial Sequence
  Description of Artificial Sequence: Synthetic oligonucleotide
cugcaggacgggaggacaa

SEQ ID NO: 2219708 - RNA, 19 nt, Artificial Sequence
  Description of Artificial Sequence: Synthetic oligonucleotide
ccucagggagacacuuuug

SEQ ID NO: 2219709 - RNA, 19 nt, Artificial Sequence
  Description of Artificial Sequence: Synthetic oligonucleotide
cuggcacaagcucuccucu

SEQ ID NO: 2219710 - RNA, 19 nt, Artificial Sequence
  Description of Artificial Sequence: Synthetic oligonucleotide
gacuaacgguuagcucuca

SEQ ID NO: 2219711 - RNA, 19 nt, Artificial Sequence
  Description of Artificial Sequence: Synthetic oligonucleotide
gcucucacgaugcucugcu

SEQ ID NO: 2219712 - RNA, 19 nt, Artificial Sequence
  Description of Artificial Sequence: Synthetic oligonucleotide
ccccuuugucucuuacaac

SEQ ID NO: 2219713 - RNA, 19 nt, Artificial Sequence
  Description of Artificial Sequence: Synthetic oligonucleotide
ccuguguaguggcaguuaa

SEQ ID NO: 2219714 - RNA, 19 nt, Artificial Sequence
  Description of Artificial Sequence: Synthetic oligonucleotide
cuuuggcugaauggguacu

SEQ ID NO: 2219715 - RNA, 19 nt, Artificial Sequence
  Description of Artificial Sequence: Synthetic oligonucleotide
cuuccauuacaggggaaau

SEQ ID NO: 2219716 - RNA, 19 nt, Artificial Sequence
  Description of Artificial Sequence: Synthetic oligonucleotide
gacuuccauuacaggggaa

SEQ ID NO: 2219717 - RNA, 19 nt, Artificial Sequence
  Description of Artificial Sequence: Synthetic oligonucleotide
cuguuagaucauguguuau

SEQ ID NO: 2219718 - RNA, 19 nt, Artificial Sequence
  Description of Artificial Sequence: Synthetic oligonucleotide
gccuguuagaucauguguu

SEQ ID NO: 2219719 - RNA, 19 nt, Artificial Sequence
  Description of Artificial Sequence: Synthetic oligonucleotide
ccaaaccuguguaguggca

SEQ ID NO: 2219720 - RNA, 19 nt, Artificial Sequence
  Description of Artificial Sequence: Synthetic oligonucleotide
ccgaagggaaaccucagau

SEQ ID NO: 2219721 - RNA, 19 nt, Artificial Sequence
  Description of Artificial Sequence: Synthetic oligonucleotide
gcaggacgggaggacaauc

SEQ ID NO: 2219722 - RNA, 19 nt, Artificial Sequence
  Description of Artificial Sequence: Synthetic oligonucleotide
gcccuuugcuuuuccuuaa

SEQ ID NO: 2219723 - RNA, 19 nt, Artificial Sequence
  Description of Artificial Sequence: Synthetic oligonucleotide
cucuccucucuuucacuau

SEQ ID NO: 2219724 - RNA, 19 nt, Artificial Sequence
  Description of Artificial Sequence: Synthetic oligonucleotide
caguccgagccuguuagau

SEQ ID NO: 2219725 - RNA, 19 nt, Artificial Sequence
  Description of Artificial Sequence: Synthetic oligonucleotide
cuccuugcauuuccuuuau

SEQ ID NO: 2219726 - RNA, 19 nt, Artificial Sequence
  Description of Artificial Sequence: Synthetic oligonucleotide
gguuagcucucacgaugcu

SEQ ID NO: 2219727 - RNA, 19 nt, Artificial Sequence
  Description of Artificial Sequence: Synthetic oligonucleotide
ggacgggaggacaaucagu

SEQ ID NO: 2219728 - RNA, 19 nt, Artificial Sequence
  Description of Artificial Sequence: Synthetic oligonucleotide
cugcugcuuugccuauaaa

SEQ ID NO: 2219729 - RNA, 19 nt, Artificial Sequence
  Description of Artificial Sequence: Synthetic oligonucleotide
ccgagccuguuagaucaug

SEQ ID NO: 2219730 - RNA, 19 nt, Artificial Sequence
  Description of Artificial Sequence: Synthetic oligonucleotide
cgaugcccuuugcuuuucc

SEQ ID NO: 2219731 - RNA, 19 nt, Artificial Sequence
  Description of Artificial Sequence: Synthetic oligonucleotide
cuaucaguccgagccuguu

SEQ ID NO: 2219732 - RNA, 19 nt, Artificial Sequence
  Description of Artificial Sequence: Synthetic oligonucleotide
cccugcaggacgggaggac

SEQ ID NO: 2219733 - RNA, 19 nt, Artificial Sequence
  Description of Artificial Sequence: Synthetic oligonucleotide
gcgcgaugcccuuugcuuu

SEQ ID NO: 2219734 - RNA, 19 nt, Artificial Sequence
  Description of Artificial Sequence: Synthetic oligonucleotide
cuaaagcgcgaugcccuuu

SEQ ID NO: 2219735 - RNA, 19 nt, Artificial Sequence
  Description of Artificial Sequence: Synthetic oligonucleotide
cucucacgaugcucugcuu

SEQ ID NO: 2219736 - RNA, 19 nt, Artificial Sequence
  Description of Artificial Sequence: Synthetic oligonucleotide
cgcgaugcccuuugcuuuu

SEQ ID NO: 2219737 - RNA, 19 nt, Artificial Sequence
  Description of Artificial Sequence: Synthetic oligonucleotide
aaucuacagguuuaaaucc

SEQ ID NO: 2219738 - RNA, 19 nt, Artificial Sequence
  Description of Artificial Sequence: Synthetic oligonucleotide
acauuaaagaauuacuagc

SEQ ID NO: 2219739 - RNA, 19 nt, Artificial Sequence
  Description of Artificial Sequence: Synthetic oligonucleotide
acaaauaucacacgaaugg

SEQ ID NO: 2219740 - RNA, 19 nt, Artificial Sequence
  Description of Artificial Sequence: Synthetic oligonucleotide
aauuuaugcacauuaaaga

SEQ ID NO: 2219741 - RNA, 19 nt, Artificial Sequence
  Description of Artificial Sequence: Synthetic oligonucleotide
aaguucagcacauaugugg

SEQ ID NO: 2219742 - RNA, 19 nt, Artificial Sequence
  Description of Artificial Sequence: Synthetic oligonucleotide
ucuaaaugaaucuacaggu

SEQ ID NO: 2219743 - RNA, 19 nt, Artificial Sequence
  Description of Artificial Sequence: Synthetic oligonucleotide
uaaacuuaaugaaagaagu

SEQ ID NO: 2219744 - RNA, 19 nt, Artificial Sequence
  Description of Artificial Sequence: Synthetic oligonucleotide
uaaagaauuacuagcaaug

SEQ ID NO: 2219745 - RNA, 19 nt, Artificial Sequence
  Description of Artificial Sequence: Synthetic oligonucleotide
aagaauuacuagcaauggc

SEQ ID NO: 2219746 - RNA, 19 nt, Artificial Sequence
  Description of Artificial Sequence: Synthetic oligonucleotide
uuuguuauaccugaaauug

SEQ ID NO: 2219747 - RNA, 19 nt, Artificial Sequence
  Description of Artificial Sequence: Synthetic oligonucleotide
ugaaauugaauuuaugcac

SEQ ID NO: 2219748 - RNA, 19 nt, Artificial Sequence
  Description of Artificial Sequence: Synthetic oligonucleotide
uuguaauugaugaugagga

SEQ ID NO: 2219749 - RNA, 19 nt, Artificial Sequence
  Description of Artificial Sequence: Synthetic oligonucleotide
uauguggugacgcagauga

SEQ ID NO: 2219750 - RNA, 19 nt, Artificial Sequence
  Description of Artificial Sequence: Synthetic oligonucleotide
aauuacuagcaauggcugc

SEQ ID NO: 2219751 - RNA, 19 nt, Artificial Sequence
  Description of Artificial Sequence: Synthetic oligonucleotide
ucaagguaaaguuaaagcu

SEQ ID NO: 2219752 - RNA, 19 nt, Artificial Sequence
  Description of Artificial Sequence: Synthetic oligonucleotide
uacagguuuaaauccaucg

SEQ ID NO: 2219753 - RNA, 19 nt, Artificial Sequence
  Description of Artificial Sequence: Synthetic oligonucleotide
uucaagguaaaguuaaagc

SEQ ID NO: 2219754 - RNA, 19 nt, Artificial Sequence
  Description of Artificial Sequence: Synthetic oligonucleotide
uacaaagaccccaaaacag

SEQ ID NO: 2219755 - RNA, 19 nt, Artificial Sequence
  Description of Artificial Sequence: Synthetic oligonucleotide
aaaguacagaauguaggcc

SEQ ID NO: 2219756 - RNA, 19 nt, Artificial Sequence
  Description of Artificial Sequence: Synthetic oligonucleotide
aaagaauuacuagcaaugg

SEQ ID NO: 2219757 - RNA, 19 nt, Artificial Sequence
  Description of Artificial Sequence: Synthetic oligonucleotide
gaaucuacagguuuaaauc

SEQ ID NO: 2219758 - RNA, 19 nt, Artificial Sequence
  Description of Artificial Sequence: Synthetic oligonucleotide
aacuuaaugaaagaagugu

SEQ ID NO: 2219759 - RNA, 19 nt, Artificial Sequence
  Description of Artificial Sequence: Synthetic oligonucleotide
uccggauuuaaaaugaaga

SEQ ID NO: 2219760 - RNA, 19 nt, Artificial Sequence
  Description of Artificial Sequence: Synthetic oligonucleotide
aauaaacuuaaugaaagaa

SEQ ID NO: 2219761 - RNA, 19 nt, Artificial Sequence
  Description of Artificial Sequence: Synthetic oligonucleotide
cauucaaguaaacuagucg

SEQ ID NO: 2219762 - RNA, 19 nt, Artificial Sequence
  Description of Artificial Sequence: Synthetic oligonucleotide
aaauaaacuuaaugaaaga

SEQ ID NO: 2219763 - RNA, 19 nt, Artificial Sequence
  Description of Artificial Sequence: Synthetic oligonucleotide
uguauccggauuuaaaaug

SEQ ID NO: 2219764 - RNA, 19 nt, Artificial Sequence
  Description of Artificial Sequence: Synthetic oligonucleotide
auugaauuuaugcacauua

SEQ ID NO: 2219765 - RNA, 19 nt, Artificial Sequence
  Description of Artificial Sequence: Synthetic oligonucleotide
acuuagacaaaauaaacuu

SEQ ID NO: 2219766 - RNA, 19 nt, Artificial Sequence
  Description of Artificial Sequence: Synthetic oligonucleotide
ggauuuaaaaugaagauug

SEQ ID NO: 2219767 - RNA, 19 nt, Artificial Sequence
  Description of Artificial Sequence: Synthetic oligonucleotide
aaugaaguucagcacauau

SEQ ID NO: 2219768 - RNA, 19 nt, Artificial Sequence
  Description of Artificial Sequence: Synthetic oligonucleotide
auaaacuuaaugaaagaag

SEQ ID NO: 2219769 - RNA, 19 nt, Artificial Sequence
  Description of Artificial Sequence: Synthetic oligonucleotide
ugcacauuaaagaauuacu

SEQ ID NO: 2219770 - RNA, 19 nt, Artificial Sequence
  Description of Artificial Sequence: Synthetic oligonucleotide
acauauuacauauuguaaa

SEQ ID NO: 2219771 - RNA, 19 nt, Artificial Sequence
  Description of Artificial Sequence: Synthetic oligonucleotide
uuuguauccggauuuaaaa

SEQ ID NO: 2219772 - RNA, 19 nt, Artificial Sequence
  Description of Artificial Sequence: Synthetic oligonucleotide
agucguuuguaauugauga

SEQ ID NO: 2219773 - RNA, 19 nt, Artificial Sequence
  Description of Artificial Sequence: Synthetic oligonucleotide
uaucuauucuaaaauauuu

SEQ ID NO: 2219774 - RNA, 19 nt, Artificial Sequence
  Description of Artificial Sequence: Synthetic oligonucleotide
uacaaauaucacacgaaug

SEQ ID NO: 2219775 - RNA, 19 nt, Artificial Sequence
  Description of Artificial Sequence: Synthetic oligonucleotide
guuugagacaguugggugg

SEQ ID NO: 2219776 - RNA, 19 nt, Artificial Sequence
  Description of Artificial Sequence: Synthetic oligonucleotide
aacuuagacaaaauaaacu

SEQ ID NO: 2219777 - RNA, 19 nt, Artificial Sequence
  Description of Artificial Sequence: Synthetic oligonucleotide
uuaugcacauuaaagaauu

SEQ ID NO: 2219778 - RNA, 19 nt, Artificial Sequence
  Description of Artificial Sequence: Synthetic oligonucleotide
ugaauuuaugcacauuaaa

SEQ ID NO: 2219779 - RNA, 19 nt, Artificial Sequence
  Description of Artificial Sequence: Synthetic oligonucleotide
uuauaccugaaauugaauu

SEQ ID NO: 2219780 - RNA, 19 nt, Artificial Sequence
  Description of Artificial Sequence: Synthetic oligonucleotide
uguuauaccugaaauugaa

SEQ ID NO: 2219781 - RNA, 19 nt, Artificial Sequence
  Description of Artificial Sequence: Synthetic oligonucleotide
acauauuguaaacauggca

SEQ ID NO: 2219782 - RNA, 19 nt, Artificial Sequence
  Description of Artificial Sequence: Synthetic oligonucleotide
acgugguaggcguagaugg

SEQ ID NO: 2219783 - RNA, 19 nt, Artificial Sequence
  Description of Artificial Sequence: Synthetic oligonucleotide
augaucacauuuguuauac

SEQ ID NO: 2219784 - RNA, 19 nt, Artificial Sequence
  Description of Artificial Sequence: Synthetic oligonucleotide
aagauugacacagaaaaua

SEQ ID NO: 2219785 - RNA, 19 nt, Artificial Sequence
  Description of Artificial Sequence: Synthetic oligonucleotide
gauggaggaggucaugagg

SEQ ID NO: 2219786 - RNA, 19 nt, Artificial Sequence
  Description of Artificial Sequence: Synthetic oligonucleotide
ugaugcaaaacuccuucag

SEQ ID NO: 2219787 - RNA, 19 nt, Artificial Sequence
  Description of Artificial Sequence: Synthetic oligonucleotide
gaugaugcaaaacuccuuc

SEQ ID NO: 2219788 - RNA, 19 nt, Artificial Sequence
  Description of Artificial Sequence: Synthetic oligonucleotide
auggcaauauuuaauacag

SEQ ID NO: 2219789 - RNA, 19 nt, Artificial Sequence
  Description of Artificial Sequence: Synthetic oligonucleotide
agaauuacuagcaauggcu

SEQ ID NO: 2219790 - RNA, 19 nt, Artificial Sequence
  Description of Artificial Sequence: Synthetic oligonucleotide
cuugucuuugauuggcucg

SEQ ID NO: 2219791 - RNA, 19 nt, Artificial Sequence
  Description of Artificial Sequence: Synthetic oligonucleotide
auugacacagaaaauagcu

SEQ ID NO: 2219792 - RNA, 19 nt, Artificial Sequence
  Description of Artificial Sequence: Synthetic oligonucleotide
cugaaauugaauuuaugca

SEQ ID NO: 2219793 - RNA, 19 nt, Artificial Sequence
  Description of Artificial Sequence: Synthetic oligonucleotide
gaugcaaaacuccuucagc

SEQ ID NO: 2219794 - RNA, 19 nt, Artificial Sequence
  Description of Artificial Sequence: Synthetic oligonucleotide
aagagcugcaacugcacug

SEQ ID NO: 2219795 - RNA, 19 nt, Artificial Sequence
  Description of Artificial Sequence: Synthetic oligonucleotide
acauggcaauauuuaauac

SEQ ID NO: 2219796 - RNA, 19 nt, Artificial Sequence
  Description of Artificial Sequence: Synthetic oligonucleotide
acucuaaaugaaucuacag

SEQ ID NO: 2219797 - RNA, 19 nt, Artificial Sequence
  Description of Artificial Sequence: Synthetic oligonucleotide
uguuucuaccuuuauuuac

SEQ ID NO: 2219798 - RNA, 19 nt, Artificial Sequence
  Description of Artificial Sequence: Synthetic oligonucleotide
aggucaugaggacaagagc

SEQ ID NO: 2219799 - RNA, 19 nt, Artificial Sequence
  Description of Artificial Sequence: Synthetic oligonucleotide
aaguaaacuagucguuugu

SEQ ID NO: 2219800 - RNA, 19 nt, Artificial Sequence
  Description of Artificial Sequence: Synthetic oligonucleotide
agcacauauguggugacgc

SEQ ID NO: 2219801 - RNA, 19 nt, Artificial Sequence
  Description of Artificial Sequence: Synthetic oligonucleotide
uauaccugaaauugaauuu

SEQ ID NO: 2219802 - RNA, 19 nt, Artificial Sequence
  Description of Artificial Sequence: Synthetic oligonucleotide
acagacacgauggaggagg

SEQ ID NO: 2219803 - RNA, 19 nt, Artificial Sequence
  Description of Artificial Sequence: Synthetic oligonucleotide
cagguuuaaauccaucggc

SEQ ID NO: 2219804 - RNA, 19 nt, Artificial Sequence
  Description of Artificial Sequence: Synthetic oligonucleotide
uguaauugaugaugaggag

SEQ ID NO: 2219805 - RNA, 19 nt, Artificial Sequence
  Description of Artificial Sequence: Synthetic oligonucleotide
auaucacacgaauggacuc

SEQ ID NO: 2219806 - RNA, 19 nt, Artificial Sequence
  Description of Artificial Sequence: Synthetic oligonucleotide
ucguuuguaauugaugaug

SEQ ID NO: 2219807 - RNA, 19 nt, Artificial Sequence
  Description of Artificial Sequence: Synthetic oligonucleotide
acgaauggacucuaaauga

SEQ ID NO: 2219808 - RNA, 19 nt, Artificial Sequence
  Description of Artificial Sequence: Synthetic oligonucleotide
aagauucucagggaaaagu

SEQ ID NO: 2219809 - RNA, 19 nt, Artificial Sequence
  Description of Artificial Sequence: Synthetic oligonucleotide
cacaaaguacagaauguag

SEQ ID NO: 2219810 - RNA, 19 nt, Artificial Sequence
  Description of Artificial Sequence: Synthetic oligonucleotide
uaaacuagucguuuguaau

SEQ ID NO: 2219811 - RNA, 19 nt, Artificial Sequence
  Description of Artificial Sequence: Synthetic oligonucleotide
aaaacauauuacauauugu

SEQ ID NO: 2219812 - RNA, 19 nt, Artificial Sequence
  Description of Artificial Sequence: Synthetic oligonucleotide
gacacucucagcaggacgg

SEQ ID NO: 2219813 - RNA, 19 nt, Artificial Sequence
  Description of Artificial Sequence: Synthetic oligonucleotide
aaacuuaaugaaagaagug

SEQ ID NO: 2219814 - RNA, 19 nt, Artificial Sequence
  Description of Artificial Sequence: Synthetic oligonucleotide
augcacauuaaagaauuac

SEQ ID NO: 2219815 - RNA, 19 nt, Artificial Sequence
  Description of Artificial Sequence: Synthetic oligonucleotide
uacauauuguaaacauggc

SEQ ID NO: 2219816 - RNA, 19 nt, Artificial Sequence
  Description of Artificial Sequence: Synthetic oligonucleotide
aacuagucguuuguaauug

SEQ ID NO: 2219817 - RNA, 19 nt, Artificial Sequence
  Description of Artificial Sequence: Synthetic oligonucleotide
aacauauuacauauuguaa

SEQ ID NO: 2219818 - RNA, 19 nt, Artificial Sequence
  Description of Artificial Sequence: Synthetic oligonucleotide
uuuuguauccggauuuaaa

SEQ ID NO: 2219819 - RNA, 19 nt, Artificial Sequence
  Description of Artificial Sequence: Synthetic oligonucleotide
aaaagugucuguugugaau

SEQ ID NO: 2219820 - RNA, 19 nt, Artificial Sequence
  Description of Artificial Sequence: Synthetic oligonucleotide
gguacaaagaccccaaaac

SEQ ID NO: 2219821 - RNA, 19 nt, Artificial Sequence
  Description of Artificial Sequence: Synthetic oligonucleotide
gaaauugaauuuaugcaca

SEQ ID NO: 2219822 - RNA, 19 nt, Artificial Sequence
  Description of Artificial Sequence: Synthetic oligonucleotide
cacuuuacgguugaggacc

SEQ ID NO: 2219823 - RNA, 19 nt, Artificial Sequence
  Description of Artificial Sequence: Synthetic oligonucleotide
aauagcuagggccccuucu

SEQ ID NO: 2219824 - RNA, 19 nt, Artificial Sequence
  Description of Artificial Sequence: Synthetic oligonucleotide
acgcagaugaugcaaaacu

SEQ ID NO: 2219825 - RNA, 19 nt, Artificial Sequence
  Description of Artificial Sequence: Synthetic oligonucleotide
gaauuacuagcaauggcug

SEQ ID NO: 2219826 - RNA, 19 nt, Artificial Sequence
  Description of Artificial Sequence: Synthetic oligonucleotide
agauugacacagaaaauag

SEQ ID NO: 2219827 - RNA, 19 nt, Artificial Sequence
  Description of Artificial Sequence: Synthetic oligonucleotide
uagucguuuguaauugaug

SEQ ID NO: 2219828 - RNA, 19 nt, Artificial Sequence
  Description of Artificial Sequence: Synthetic oligonucleotide
uugaauuuaugcacauuaa

SEQ ID NO: 2219829 - RNA, 19 nt, Artificial Sequence
  Description of Artificial Sequence: Synthetic oligonucleotide
uuuacgguugaggaccggg

SEQ ID NO: 2219830 - RNA, 19 nt, Artificial Sequence
  Description of Artificial Sequence: Synthetic oligonucleotide
cauggcaauauuuaauaca

SEQ ID NO: 2219831 - RNA, 19 nt, Artificial Sequence
  Description of Artificial Sequence: Synthetic oligonucleotide
aaguuaaagcuugucuuug

SEQ ID NO: 2219832 - RNA, 19 nt, Artificial Sequence
  Description of Artificial Sequence: Synthetic oligonucleotide
uuacgguugaggaccgggg

SEQ ID NO: 2219833 - RNA, 19 nt, Artificial Sequence
  Description of Artificial Sequence: Synthetic oligonucleotide
guacaaagaccccaaaaca

SEQ ID NO: 2219834 - RNA, 19 nt, Artificial Sequence
  Description of Artificial Sequence: Synthetic oligonucleotide
agaaaauagcuagggcccc

SEQ ID NO: 2219835 - RNA, 19 nt, Artificial Sequence
  Description of Artificial Sequence: Synthetic oligonucleotide
gauugacacagaaaauagc

SEQ ID NO: 2219836 - RNA, 19 nt, Artificial Sequence
  Description of Artificial Sequence: Synthetic oligonucleotide
uugucuuugauuggcucgg

SEQ ID NO: 2219837 - RNA, 19 nt, Artificial Sequence
  Description of Artificial Sequence: Synthetic oligonucleotide
auggacucuaaaugaaucu

SEQ ID NO: 2219838 - RNA, 19 nt, Artificial Sequence
  Description of Artificial Sequence: Synthetic oligonucleotide
aguaucuauucuaaaauau

SEQ ID NO: 2219839 - RNA, 19 nt, Artificial Sequence
  Description of Artificial Sequence: Synthetic oligonucleotide
agggaaaagugucuguugu

SEQ ID NO: 2219840 - RNA, 19 nt, Artificial Sequence
  Description of Artificial Sequence: Synthetic oligonucleotide
caaagaccccaaaacagac

SEQ ID NO: 2219841 - RNA, 19 nt, Artificial Sequence
  Description of Artificial Sequence: Synthetic oligonucleotide
uucagcacauaugugguga

SEQ ID NO: 2219842 - RNA, 19 nt, Artificial Sequence
  Description of Artificial Sequence: Synthetic oligonucleotide
uuguauccggauuuaaaau

SEQ ID NO: 2219843 - RNA, 19 nt, Artificial Sequence
  Description of Artificial Sequence: Synthetic oligonucleotide
gaaagaaguguuugagaca

SEQ ID NO: 2219844 - RNA, 19 nt, Artificial Sequence
  Description of Artificial Sequence: Synthetic oligonucleotide
aaacauggcaauauuuaau

SEQ ID NO: 2219845 - RNA, 19 nt, Artificial Sequence
  Description of Artificial Sequence: Synthetic oligonucleotide
uugggugggaauccgccag

SEQ ID NO: 2219846 - RNA, 19 nt, Artificial Sequence
  Description of Artificial Sequence: Synthetic oligonucleotide
ccucauucaaguaaacuag

SEQ ID NO: 2219847 - RNA, 19 nt, Artificial Sequence
  Description of Artificial Sequence: Synthetic oligonucleotide
uuuaaauccaucggcuaaa

SEQ ID NO: 2219848 - RNA, 19 nt, Artificial Sequence
  Description of Artificial Sequence: Synthetic oligonucleotide
acacgaauggacucuaaau

SEQ ID NO: 2219849 - RNA, 19 nt, Artificial Sequence
  Description of Artificial Sequence: Synthetic oligonucleotide
auuacuagcaauggcugcu

SEQ ID NO: 2219850 - RNA, 19 nt, Artificial Sequence
  Description of Artificial Sequence: Synthetic oligonucleotide
cacagaaaauagcuagggc

SEQ ID NO: 2219851 - RNA, 19 nt, Artificial Sequence
  Description of Artificial Sequence: Synthetic oligonucleotide
gacacgauggaggagguca

SEQ ID NO: 2219852 - RNA, 19 nt, Artificial Sequence
  Description of Artificial Sequence: Synthetic oligonucleotide
aaugaaucuacagguuuaa

SEQ ID NO: 2219853 - RNA, 19 nt, Artificial Sequence
  Description of Artificial Sequence: Synthetic oligonucleotide
ugcaaaacuccuucagcac

SEQ ID NO: 2219854 - RNA, 19 nt, Artificial Sequence
  Description of Artificial Sequence: Synthetic oligonucleotide
uugacacagaaaauagcua

SEQ ID NO: 2219855 - RNA, 19 nt, Artificial Sequence
  Description of Artificial Sequence: Synthetic oligonucleotide
uucuaauuuacaguauuuu

SEQ ID NO: 2219856 - RNA, 19 nt, Artificial Sequence
  Description of Artificial Sequence: Synthetic oligonucleotide
aguugggugggaauccgcc

SEQ ID NO: 2219857 - RNA, 19 nt, Artificial Sequence
  Description of Artificial Sequence: Synthetic oligonucleotide
uuaaagcuugucuuugauu

SEQ ID NO: 2219858 - RNA, 19 nt, Artificial Sequence
  Description of Artificial Sequence: Synthetic oligonucleotide
agauucucagggaaaagug

SEQ ID NO: 2219859 - RNA, 19 nt, Artificial Sequence
  Description of Artificial Sequence: Synthetic oligonucleotide
guuuaaauccaucggcuaa

SEQ ID NO: 2219860 - RNA, 19 nt, Artificial Sequence
  Description of Artificial Sequence: Synthetic oligonucleotide
ugucuguugugaauuuuaa

SEQ ID NO: 2219861 - RNA, 19 nt, Artificial Sequence
  Description of Artificial Sequence: Synthetic oligonucleotide
aauccgccagccgucaguc

SEQ ID NO: 2219862 - RNA, 19 nt, Artificial Sequence
  Description of Artificial Sequence: Synthetic oligonucleotide
gaccccaaaacagacacga

SEQ ID NO: 2219863 - RNA, 19 nt, Artificial Sequence
  Description of Artificial Sequence: Synthetic oligonucleotide
ucacuuuacgguugaggac

SEQ ID NO: 2219864 - RNA, 19 nt, Artificial Sequence
  Description of Artificial Sequence: Synthetic oligonucleotide
ucaaguaaacuagucguuu

SEQ ID NO: 2219865 - RNA, 19 nt, Artificial Sequence
  Description of Artificial Sequence: Synthetic oligonucleotide
uggccgucaugccuggagg

SEQ ID NO: 2219866 - RNA, 19 nt, Artificial Sequence
  Description of Artificial Sequence: Synthetic oligonucleotide
uaagauucucagggaaaag

SEQ ID NO: 2219867 - RNA, 19 nt, Artificial Sequence
  Description of Artificial Sequence: Synthetic oligonucleotide
guaaacuagucguuuguaa

SEQ ID NO: 2219868 - RNA, 19 nt, Artificial Sequence
  Description of Artificial Sequence: Synthetic oligonucleotide
uuucuaccuuuauuuacaa

SEQ ID NO: 2219869 - RNA, 19 nt, Artificial Sequence
  Description of Artificial Sequence: Synthetic oligonucleotide
aaaaucaguuuaagauucu

SEQ ID NO: 2219870 - RNA, 19 nt, Artificial Sequence
  Description of Artificial Sequence: Synthetic oligonucleotide
auaccgggccacccguucc

SEQ ID NO: 2219871 - RNA, 19 nt, Artificial Sequence
  Description of Artificial Sequence: Synthetic oligonucleotide
acuuaaugaaagaaguguu

SEQ ID NO: 2219872 - RNA, 19 nt, Artificial Sequence
  Description of Artificial Sequence: Synthetic oligonucleotide
acaaagaccccaaaacaga

SEQ ID NO: 2219873 - RNA, 19 nt, Artificial Sequence
  Description of Artificial Sequence: Synthetic oligonucleotide
uauuguaaacauggcaaua

SEQ ID NO: 2219874 - RNA, 19 nt, Artificial Sequence
  Description of Artificial Sequence: Synthetic oligonucleotide
uaucacacgaauggacucu

SEQ ID NO: 2219875 - RNA, 19 nt, Artificial Sequence
  Description of Artificial Sequence: Synthetic oligonucleotide
guggugacgcagaugaugc

SEQ ID NO: 2219876 - RNA, 19 nt, Artificial Sequence
  Description of Artificial Sequence: Synthetic oligonucleotide
agguacaaagaccccaaaa

SEQ ID NO: 2219877 - RNA, 19 nt, Artificial Sequence
  Description of Artificial Sequence: Synthetic oligonucleotide
guauccggauuuaaaauga

SEQ ID NO: 2219878 - RNA, 19 nt, Artificial Sequence
  Description of Artificial Sequence: Synthetic oligonucleotide
gacucuaaaugaaucuaca

SEQ ID NO: 2219879 - RNA, 19 nt, Artificial Sequence
  Description of Artificial Sequence: Synthetic oligonucleotide
uauccggauuuaaaaugaa

SEQ ID NO: 2219880 - RNA, 19 nt, Artificial Sequence
  Description of Artificial Sequence: Synthetic oligonucleotide
augaugcaaaacuccuuca

SEQ ID NO: 2219881 - RNA, 19 nt, Artificial Sequence
  Description of Artificial Sequence: Synthetic oligonucleotide
acugcauaccgggccaccc

SEQ ID NO: 2219882 - RNA, 19 nt, Artificial Sequence
  Description of Artificial Sequence: Synthetic oligonucleotide
agguuuaaauccaucggcu

SEQ ID NO: 2219883 - RNA, 19 nt, Artificial Sequence
  Description of Artificial Sequence: Synthetic oligonucleotide
guaggccagguacaaagac

SEQ ID NO: 2219884 - RNA, 19 nt, Artificial Sequence
  Description of Artificial Sequence: Synthetic oligonucleotide
aggacaagagcugcaacug

SEQ ID NO: 2219885 - RNA, 19 nt, Artificial Sequence
  Description of Artificial Sequence: Synthetic oligonucleotide
ugaggacaagagcugcaac

SEQ ID NO: 2219886 - RNA, 19 nt, Artificial Sequence
  Description of Artificial Sequence: Synthetic oligonucleotide
aaagaccccaaaacagaca

SEQ ID NO: 2219887 - RNA, 19 nt, Artificial Sequence
  Description of Artificial Sequence: Synthetic oligonucleotide
gaggacaagagcugcaacu

SEQ ID NO: 2219888 - RNA, 19 nt, Artificial Sequence
  Description of Artificial Sequence: Synthetic oligonucleotide
gaggagaaugaaguucagc

SEQ ID NO: 2219889 - RNA, 19 nt, Artificial Sequence
  Description of Artificial Sequence: Synthetic oligonucleotide
uggcaauauuuaauacagu

SEQ ID NO: 2219890 - RNA, 19 nt, Artificial Sequence
  Description of Artificial Sequence: Synthetic oligonucleotide
uggacucuaaaugaaucua

SEQ ID NO: 2219891 - RNA, 19 nt, Artificial Sequence
  Description of Artificial Sequence: Synthetic oligonucleotide
aguucagcacauauguggu

SEQ ID NO: 2219892 - RNA, 19 nt, Artificial Sequence
  Description of Artificial Sequence: Synthetic oligonucleotide
aguacagaauguaggccag

SEQ ID NO: 2219893 - RNA, 19 nt, Artificial Sequence
  Description of Artificial Sequence: Synthetic oligonucleotide
cacauauguggugacgcag

SEQ ID NO: 2219894 - RNA, 19 nt, Artificial Sequence
  Description of Artificial Sequence: Synthetic oligonucleotide
ugauuggcucggcguaucc

SEQ ID NO: 2219895 - RNA, 19 nt, Artificial Sequence
  Description of Artificial Sequence: Synthetic oligonucleotide
gacaguugggugggaaucc

SEQ ID NO: 2219896 - RNA, 19 nt, Artificial Sequence
  Description of Artificial Sequence: Synthetic oligonucleotide
cagggaaaagugucuguug

SEQ ID NO: 2219897 - RNA, 19 nt, Artificial Sequence
  Description of Artificial Sequence: Synthetic oligonucleotide
cacccagggccccaggucg

SEQ ID NO: 2219898 - RNA, 19 nt, Artificial Sequence
  Description of Artificial Sequence: Synthetic oligonucleotide
cauuuguuauaccugaaau

SEQ ID NO: 2219899 - RNA, 19 nt, Artificial Sequence
  Description of Artificial Sequence: Synthetic oligonucleotide
acuagucguuuguaauuga

SEQ ID NO: 2219900 - RNA, 19 nt, Artificial Sequence
  Description of Artificial Sequence: Synthetic oligonucleotide
auccggauuuaaaaugaag

SEQ ID NO: 2219901 - RNA, 19 nt, Artificial Sequence
  Description of Artificial Sequence: Synthetic oligonucleotide
ggccccuucuaauuuacag

SEQ ID NO: 2219902 - RNA, 19 nt, Artificial Sequence
  Description of Artificial Sequence: Synthetic oligonucleotide
auguuucuaccuuuauuua

SEQ ID NO: 2219903 - RNA, 19 nt, Artificial Sequence
  Description of Artificial Sequence: Synthetic oligonucleotide
cuuaggcugcagcugucgc

SEQ ID NO: 2219904 - RNA, 19 nt, Artificial Sequence
  Description of Artificial Sequence: Synthetic oligonucleotide
uacuagcaauggcugcuca

SEQ ID NO: 2219905 - RNA, 19 nt, Artificial Sequence
  Description of Artificial Sequence: Synthetic oligonucleotide
caguaucuauucuaaaaua

SEQ ID NO: 2219906 - RNA, 19 nt, Artificial Sequence
  Description of Artificial Sequence: Synthetic oligonucleotide
caaauaucacacgaaugga

SEQ ID NO: 2219907 - RNA, 19 nt, Artificial Sequence
  Description of Artificial Sequence: Synthetic oligonucleotide
cuacagguuuaaauccauc

SEQ ID NO: 2219908 - RNA, 19 nt, Artificial Sequence
  Description of Artificial Sequence: Synthetic oligonucleotide
ugcauaccgggccacccgu

SEQ ID NO: 2219909 - RNA, 19 nt, Artificial Sequence
  Description of Artificial Sequence: Synthetic oligonucleotide
uuaaauccaucggcuaaaa

SEQ ID NO: 2219910 - RNA, 19 nt, Artificial Sequence
  Description of Artificial Sequence: Synthetic oligonucleotide
gucaugaggacaagagcug

SEQ ID NO: 2219911 - RNA, 19 nt, Artificial Sequence
  Description of Artificial Sequence: Synthetic oligonucleotide
cuucucccgcuccacgugg

SEQ ID NO: 2219912 - RNA, 19 nt, Artificial Sequence
  Description of Artificial Sequence: Synthetic oligonucleotide
auuggcucggcguauccuu

SEQ ID NO: 2219913 - RNA, 19 nt, Artificial Sequence
  Description of Artificial Sequence: Synthetic oligonucleotide
auagcuagggccccuucua

SEQ ID NO: 2219914 - RNA, 19 nt, Artificial Sequence
  Description of Artificial Sequence: Synthetic oligonucleotide
agaaugaaguucagcacau

SEQ ID NO: 2219915 - RNA, 19 nt, Artificial Sequence
  Description of Artificial Sequence: Synthetic oligonucleotide
caaaacuccuucagcacaa

SEQ ID NO: 2219916 - RNA, 19 nt, Artificial Sequence
  Description of Artificial Sequence: Synthetic oligonucleotide
acaguugggugggaauccg

SEQ ID NO: 2219917 - RNA, 19 nt, Artificial Sequence
  Description of Artificial Sequence: Synthetic oligonucleotide
cuuaaugaaagaaguguuu

SEQ ID NO: 2219918 - RNA, 19 nt, Artificial Sequence
  Description of Artificial Sequence: Synthetic oligonucleotide
gucgcagagggcccggugc

SEQ ID NO: 2219919 - RNA, 19 nt, Artificial Sequence
  Description of Artificial Sequence: Synthetic oligonucleotide
gacgcagaugaugcaaaac

SEQ ID NO: 2219920 - RNA, 19 nt, Artificial Sequence
  Description of Artificial Sequence: Synthetic oligonucleotide
gcaaaacuccuucagcaca

SEQ ID NO: 2219921 - RNA, 19 nt, Artificial Sequence
  Description of Artificial Sequence: Synthetic oligonucleotide
aucccggcggcgcacacug

SEQ ID NO: 2219922 - RNA, 19 nt, Artificial Sequence
  Description of Artificial Sequence: Synthetic oligonucleotide
aguaaacuagucguuugua

SEQ ID NO: 2219923 - RNA, 19 nt, Artificial Sequence
  Description of Artificial Sequence: Synthetic oligonucleotide
acauauguggugacgcaga

SEQ ID NO: 2219924 - RNA, 19 nt, Artificial Sequence
  Description of Artificial Sequence: Synthetic oligonucleotide
caccgacacucucagcagg

SEQ ID NO: 2219925 - RNA, 19 nt, Artificial Sequence
  Description of Artificial Sequence: Synthetic oligonucleotide
caugccuggaggccagggc

SEQ ID NO: 2219926 - RNA, 19 nt, Artificial Sequence
  Description of Artificial Sequence: Synthetic oligonucleotide
cuagggcuacauuuuauua

SEQ ID NO: 2219927 - RNA, 19 nt, Artificial Sequence
  Description of Artificial Sequence: Synthetic oligonucleotide
ugacgcagaugaugcaaaa

SEQ ID NO: 2219928 - RNA, 19 nt, Artificial Sequence
  Description of Artificial Sequence: Synthetic oligonucleotide
ggucaugaggacaagagcu

SEQ ID NO: 2219929 - RNA, 19 nt, Artificial Sequence
  Description of Artificial Sequence: Synthetic oligonucleotide
acuuuacgguugaggaccg

SEQ ID NO: 2219930 - RNA, 19 nt, Artificial Sequence
  Description of Artificial Sequence: Synthetic oligonucleotide
gcucacuuuacgguugagg

SEQ ID NO: 2219931 - RNA, 19 nt, Artificial Sequence
  Description of Artificial Sequence: Synthetic oligonucleotide
agcugucgcuuccaggccu

SEQ ID NO: 2219932 - RNA, 19 nt, Artificial Sequence
  Description of Artificial Sequence: Synthetic oligonucleotide
aauguaggccagguacaaa

SEQ ID NO: 2219933 - RNA, 19 nt, Artificial Sequence
  Description of Artificial Sequence: Synthetic oligonucleotide
cuuccuuaggcugcagcug

SEQ ID NO: 2219934 - RNA, 19 nt, Artificial Sequence
  Description of Artificial Sequence: Synthetic oligonucleotide
ugggugggaauccgccagc

SEQ ID NO: 2219935 - RNA, 19 nt, Artificial Sequence
  Description of Artificial Sequence: Synthetic oligonucleotide
acgauggaggaggucauga

SEQ ID NO: 2219936 - RNA, 19 nt, Artificial Sequence
  Description of Artificial Sequence: Synthetic oligonucleotide
cuggccgucaugccuggag

SEQ ID NO: 2219937 - RNA, 19 nt, Artificial Sequence
  Description of Artificial Sequence: Synthetic oligonucleotide
ggacucuaaaugaaucuac

SEQ ID NO: 2219938 - RNA, 19 nt, Artificial Sequence
  Description of Artificial Sequence: Synthetic oligonucleotide
aauugaugaugaggagaau

SEQ ID NO: 2219939 - RNA, 19 nt, Artificial Sequence
  Description of Artificial Sequence: Synthetic oligonucleotide
cagaugaugcaaaacuccu

SEQ ID NO: 2219940 - RNA, 19 nt, Artificial Sequence
  Description of Artificial Sequence: Synthetic oligonucleotide
gggaaaagugucuguugug

SEQ ID NO: 2219941 - RNA, 19 nt, Artificial Sequence
  Description of Artificial Sequence: Synthetic oligonucleotide
gcgcacacugcauaccggg

SEQ ID NO: 2219942 - RNA, 19 nt, Artificial Sequence
  Description of Artificial Sequence: Synthetic oligonucleotide
gguaaaguuaaagcuuguc

SEQ ID NO: 2219943 - RNA, 19 nt, Artificial Sequence
  Description of Artificial Sequence: Synthetic oligonucleotide
gucuguugugaauuuuaaa

SEQ ID NO: 2219944 - RNA, 19 nt, Artificial Sequence
  Description of Artificial Sequence: Synthetic oligonucleotide
ccgucagucuuccuuaggc

SEQ ID NO: 2219945 - RNA, 19 nt, Artificial Sequence
  Description of Artificial Sequence: Synthetic oligonucleotide
accugaaauugaauuuaug

SEQ ID NO: 2219946 - RNA, 19 nt, Artificial Sequence
  Description of Artificial Sequence: Synthetic oligonucleotide
gaauguaggccagguacaa

SEQ ID NO: 2219947 - RNA, 19 nt, Artificial Sequence
  Description of Artificial Sequence: Synthetic oligonucleotide
uaccgggccacccguuccc

SEQ ID NO: 2219948 - RNA, 19 nt, Artificial Sequence
  Description of Artificial Sequence: Synthetic oligonucleotide
uuacuagcaauggcugcuc

SEQ ID NO: 2219949 - RNA, 19 nt, Artificial Sequence
  Description of Artificial Sequence: Synthetic oligonucleotide
auauguggugacgcagaug

SEQ ID NO: 2219950 - RNA, 19 nt, Artificial Sequence
  Description of Artificial Sequence: Synthetic oligonucleotide
caugaucacauuuguuaua

SEQ ID NO: 2219951 - RNA, 19 nt, Artificial Sequence
  Description of Artificial Sequence: Synthetic oligonucleotide
caguugggugggaauccgc

SEQ ID NO: 2219952 - RNA, 19 nt, Artificial Sequence
  Description of Artificial Sequence: Synthetic oligonucleotide
guaggcguagauggagagc

SEQ ID NO: 2219953 - RNA, 19 nt, Artificial Sequence
  Description of Artificial Sequence: Synthetic oligonucleotide
cagcacauauguggugacg

SEQ ID NO: 2219954 - RNA, 19 nt, Artificial Sequence
  Description of Artificial Sequence: Synthetic oligonucleotide
guugggugggaauccgcca

SEQ ID NO: 2219955 - RNA, 19 nt, Artificial Sequence
  Description of Artificial Sequence: Synthetic oligonucleotide
agcaauggcugcucacuuu

SEQ ID NO: 2219956 - RNA, 19 nt, Artificial Sequence
  Description of Artificial Sequence: Synthetic oligonucleotide
agggcggcggagcacuuca

SEQ ID NO: 2219957 - RNA, 19 nt, Artificial Sequence
  Description of Artificial Sequence: Synthetic oligonucleotide
acgggcggccgccaucuuc

SEQ ID NO: 2219958 - RNA, 19 nt, Artificial Sequence
  Description of Artificial Sequence: Synthetic oligonucleotide
cuucuaauuuacaguauuu

SEQ ID NO: 2219959 - RNA, 19 nt, Artificial Sequence
  Description of Artificial Sequence: Synthetic oligonucleotide
gguuuaaauccaucggcua

SEQ ID NO: 2219960 - RNA, 19 nt, Artificial Sequence
  Description of Artificial Sequence: Synthetic oligonucleotide
cuaaaugaaucuacagguu

SEQ ID NO: 2219961 - RNA, 19 nt, Artificial Sequence
  Description of Artificial Sequence: Synthetic oligonucleotide
gaagauugacacagaaaau

SEQ ID NO: 2219962 - RNA, 19 nt, Artificial Sequence
  Description of Artificial Sequence: Synthetic oligonucleotide
cacgugguaggcguagaug

SEQ ID NO: 2219963 - RNA, 19 nt, Artificial Sequence
  Description of Artificial Sequence: Synthetic oligonucleotide
agggccccuucuaauuuac

SEQ ID NO: 2219964 - RNA, 19 nt, Artificial Sequence
  Description of Artificial Sequence: Synthetic oligonucleotide
ugcaacugcacuggccguc

SEQ ID NO: 2219965 - RNA, 19 nt, Artificial Sequence
  Description of Artificial Sequence: Synthetic oligonucleotide
ucacacgaauggacucuaa

SEQ ID NO: 2219966 - RNA, 19 nt, Artificial Sequence
  Description of Artificial Sequence: Synthetic oligonucleotide
agccgucagucuuccuuag

SEQ ID NO: 2219967 - RNA, 19 nt, Artificial Sequence
  Description of Artificial Sequence: Synthetic oligonucleotide
agcuagggccccuucuaau

SEQ ID NO: 2219968 - RNA, 19 nt, Artificial Sequence
  Description of Artificial Sequence: Synthetic oligonucleotide
ugucuuugauuggcucggc

SEQ ID NO: 2219969 - RNA, 19 nt, Artificial Sequence
  Description of Artificial Sequence: Synthetic oligonucleotide
acacucucagcaggacggg

SEQ ID NO: 2219970 - RNA, 19 nt, Artificial Sequence
  Description of Artificial Sequence: Synthetic oligonucleotide
gaauggacucuaaaugaau

SEQ ID NO: 2219971 - RNA, 19 nt, Artificial Sequence
  Description of Artificial Sequence: Synthetic oligonucleotide
cauaccgggccacccguuc

SEQ ID NO: 2219972 - RNA, 19 nt, Artificial Sequence
  Description of Artificial Sequence: Synthetic oligonucleotide
uccgggucccucuccuucu

SEQ ID NO: 2219973 - RNA, 19 nt, Artificial Sequence
  Description of Artificial Sequence: Synthetic oligonucleotide
cguuuguaauugaugauga

SEQ ID NO: 2219974 - RNA, 19 nt, Artificial Sequence
  Description of Artificial Sequence: Synthetic oligonucleotide
cacacgaauggacucuaaa

SEQ ID NO: 2219975 - RNA, 19 nt, Artificial Sequence
  Description of Artificial Sequence: Synthetic oligonucleotide
cucagcaggacgggcggcc

SEQ ID NO: 2219976 - RNA, 19 nt, Artificial Sequence
  Description of Artificial Sequence: Synthetic oligonucleotide
uagggccccuucuaauuua

SEQ ID NO: 2219977 - RNA, 19 nt, Artificial Sequence
  Description of Artificial Sequence: Synthetic oligonucleotide
ggugggaauccgccagccg

SEQ ID NO: 2219978 - RNA, 19 nt, Artificial Sequence
  Description of Artificial Sequence: Synthetic oligonucleotide
ggcggagcacuucacccag

SEQ ID NO: 2219979 - RNA, 19 nt, Artificial Sequence
  Description of Artificial Sequence: Synthetic oligonucleotide
agaugaugcaaaacuccuu

SEQ ID NO: 2219980 - RNA, 19 nt, Artificial Sequence
  Description of Artificial Sequence: Synthetic oligonucleotide
cacauuuguuauaccugaa

SEQ ID NO: 2219981 - RNA, 19 nt, Artificial Sequence
  Description of Artificial Sequence: Synthetic oligonucleotide
uugauuggcucggcguauc

SEQ ID NO: 2219982 - RNA, 19 nt, Artificial Sequence
  Description of Artificial Sequence: Synthetic oligonucleotide
uucucccgcuccacguggu

SEQ ID NO: 2219983 - RNA, 19 nt, Artificial Sequence
  Description of Artificial Sequence: Synthetic oligonucleotide
cuagucguuuguaauugau

SEQ ID NO: 2219984 - RNA, 19 nt, Artificial Sequence
  Description of Artificial Sequence: Synthetic oligonucleotide
gugucuguugugaauuuua

SEQ ID NO: 2219985 - RNA, 19 nt, Artificial Sequence
  Description of Artificial Sequence: Synthetic oligonucleotide
gcggcggagcacuucaccc

SEQ ID NO: 2219986 - RNA, 19 nt, Artificial Sequence
  Description of Artificial Sequence: Synthetic oligonucleotide
augaaucuacagguuuaaa

SEQ ID NO: 2219987 - RNA, 19 nt, Artificial Sequence
  Description of Artificial Sequence: Synthetic oligonucleotide
uuggcucggcguauccuuu

SEQ ID NO: 2219988 - RNA, 19 nt, Artificial Sequence
  Description of Artificial Sequence: Synthetic oligonucleotide
gcaauauuuaauacaguau

SEQ ID NO: 2219989 - RNA, 19 nt, Artificial Sequence
  Description of Artificial Sequence: Synthetic oligonucleotide
uccuuaggcugcagcuguc

SEQ ID NO: 2219990 - RNA, 19 nt, Artificial Sequence
  Description of Artificial Sequence: Synthetic oligonucleotide
gaauccgccagccgucagu

SEQ ID NO: 2219991 - RNA, 19 nt, Artificial Sequence
  Description of Artificial Sequence: Synthetic oligonucleotide
aggccucauucaaguaaac

SEQ ID NO: 2219992 - RNA, 19 nt, Artificial Sequence
  Description of Artificial Sequence: Synthetic oligonucleotide
agacacgauggaggagguc

SEQ ID NO: 2219993 - RNA, 19 nt, Artificial Sequence
  Description of Artificial Sequence: Synthetic oligonucleotide
gagcugcaacugcacuggc

SEQ ID NO: 2219994 - RNA, 19 nt, Artificial Sequence
  Description of Artificial Sequence: Synthetic oligonucleotide
caauguuucuaccuuuauu

SEQ ID NO: 2219995 - RNA, 19 nt, Artificial Sequence
  Description of Artificial Sequence: Synthetic oligonucleotide
agguaaaguuaaagcuugu

SEQ ID NO: 2219996 - RNA, 19 nt, Artificial Sequence
  Description of Artificial Sequence: Synthetic oligonucleotide
cagcugucgcuuccaggcc

SEQ ID NO: 2219997 - RNA, 19 nt, Artificial Sequence
  Description of Artificial Sequence: Synthetic oligonucleotide
gagacaguugggugggaau

SEQ ID NO: 2219998 - RNA, 19 nt, Artificial Sequence
  Description of Artificial Sequence: Synthetic oligonucleotide
cuagcaauggcugcucacu

SEQ ID NO: 2219999 - RNA, 19 nt, Artificial Sequence
  Description of Artificial Sequence: Synthetic oligonucleotide
gaaaauagcuagggccccu

SEQ ID NO: 2220000 - RNA, 19 nt, Artificial Sequence
  Description of Artificial Sequence: Synthetic oligonucleotide
cuucagcacaaaguacaga

SEQ ID NO: 2220001 - RNA, 19 nt, Artificial Sequence
  Description of Artificial Sequence: Synthetic oligonucleotide
cuuuacgguugaggaccgg

SEQ ID NO: 2220002 - RNA, 19 nt, Artificial Sequence
  Description of Artificial Sequence: Synthetic oligonucleotide
gucguuuguaauugaugau

SEQ ID NO: 2220003 - RNA, 19 nt, Artificial Sequence
  Description of Artificial Sequence: Synthetic oligonucleotide
ccccuucuaauuuacagua

SEQ ID NO: 2220004 - RNA, 19 nt, Artificial Sequence
  Description of Artificial Sequence: Synthetic oligonucleotide
cuccacgugguaggcguag

SEQ ID NO: 2220005 - RNA, 19 nt, Artificial Sequence
  Description of Artificial Sequence: Synthetic oligonucleotide
cacucucagcaggacgggc

SEQ ID NO: 2220006 - RNA, 19 nt, Artificial Sequence
  Description of Artificial Sequence: Synthetic oligonucleotide
ugcucacuuuacgguugag

SEQ ID NO: 2220007 - RNA, 19 nt, Artificial Sequence
  Description of Artificial Sequence: Synthetic oligonucleotide
guuauaccugaaauugaau

SEQ ID NO: 2220008 - RNA, 19 nt, Artificial Sequence
  Description of Artificial Sequence: Synthetic oligonucleotide
ucucagcaggacgggcggc

SEQ ID NO: 2220009 - RNA, 19 nt, Artificial Sequence
  Description of Artificial Sequence: Synthetic oligonucleotide
aucacacgaauggacucua

SEQ ID NO: 2220010 - RNA, 19 nt, Artificial Sequence
  Description of Artificial Sequence: Synthetic oligonucleotide
ggccgucaugccuggaggc

SEQ ID NO: 2220011 - RNA, 19 nt, Artificial Sequence
  Description of Artificial Sequence: Synthetic oligonucleotide
gcggcaccgacacucucag

SEQ ID NO: 2220012 - RNA, 19 nt, Artificial Sequence
  Description of Artificial Sequence: Synthetic oligonucleotide
gugacgcagaugaugcaaa

SEQ ID NO: 2220013 - RNA, 19 nt, Artificial Sequence
  Description of Artificial Sequence: Synthetic oligonucleotide
uucccaccgcggcaccgac

SEQ ID NO: 2220014 - RNA, 19 nt, Artificial Sequence
  Description of Artificial Sequence: Synthetic oligonucleotide
cgacacucucagcaggacg

SEQ ID NO: 2220015 - RNA, 19 nt, Artificial Sequence
  Description of Artificial Sequence: Synthetic oligonucleotide
gcacauauguggugacgca

SEQ ID NO: 2220016 - RNA, 19 nt, Artificial Sequence
  Description of Artificial Sequence: Synthetic oligonucleotide
acccguucccaccgcggca

SEQ ID NO: 2220017 - RNA, 19 nt, Artificial Sequence
  Description of Artificial Sequence: Synthetic oligonucleotide
ccuuaggcugcagcugucg

SEQ ID NO: 2220018 - RNA, 19 nt, Artificial Sequence
  Description of Artificial Sequence: Synthetic oligonucleotide
aggaggucaugaggacaag

SEQ ID NO: 2220019 - RNA, 19 nt, Artificial Sequence
  Description of Artificial Sequence: Synthetic oligonucleotide
ggcggcggagcacuucacc

SEQ ID NO: 2220020 - RNA, 19 nt, Artificial Sequence
  Description of Artificial Sequence: Synthetic oligonucleotide
ccggauuuaaaaugaagau

SEQ ID NO: 2220021 - RNA, 19 nt, Artificial Sequence
  Description of Artificial Sequence: Synthetic oligonucleotide
cacugcauaccgggccacc

SEQ ID NO: 2220022 - RNA, 19 nt, Artificial Sequence
  Description of Artificial Sequence: Synthetic oligonucleotide
cagccgucagucuuccuua

SEQ ID NO: 2220023 - RNA, 19 nt, Artificial Sequence
  Description of Artificial Sequence: Synthetic oligonucleotide
ccaggccucauucaaguaa

SEQ ID NO: 2220024 - RNA, 19 nt, Artificial Sequence
  Description of Artificial Sequence: Synthetic oligonucleotide
cccaccgcggcaccgacac

SEQ ID NO: 2220025 - RNA, 19 nt, Artificial Sequence
  Description of Artificial Sequence: Synthetic oligonucleotide
ucccaccgcggcaccgaca

SEQ ID NO: 2220026 - RNA, 19 nt, Artificial Sequence
  Description of Artificial Sequence: Synthetic oligonucleotide
gauuggcucggcguauccu

SEQ ID NO: 2220027 - RNA, 19 nt, Artificial Sequence
  Description of Artificial Sequence: Synthetic oligonucleotide
ucucccgcuccacguggua

SEQ ID NO: 2220028 - RNA, 19 nt, Artificial Sequence
  Description of Artificial Sequence: Synthetic oligonucleotide
cacgauggaggaggucaug

SEQ ID NO: 2220029 - RNA, 19 nt, Artificial Sequence
  Description of Artificial Sequence: Synthetic oligonucleotide
ggcggcgcacacugcauac

SEQ ID NO: 2220030 - RNA, 19 nt, Artificial Sequence
  Description of Artificial Sequence: Synthetic oligonucleotide
uugagacaguuggguggga

SEQ ID NO: 2220031 - RNA, 19 nt, Artificial Sequence
  Description of Artificial Sequence: Synthetic oligonucleotide
gccccuucuaauuuacagu

SEQ ID NO: 2220032 - RNA, 19 nt, Artificial Sequence
  Description of Artificial Sequence: Synthetic oligonucleotide
cauauguggugacgcagau

SEQ ID NO: 2220033 - RNA, 19 nt, Artificial Sequence
  Description of Artificial Sequence: Synthetic oligonucleotide
ggcgcacacugcauaccgg

SEQ ID NO: 2220034 - RNA, 19 nt, Artificial Sequence
  Description of Artificial Sequence: Synthetic oligonucleotide
cgaauggacucuaaaugaa

SEQ ID NO: 2220035 - RNA, 19 nt, Artificial Sequence
  Description of Artificial Sequence: Synthetic oligonucleotide
uggcucggcguauccuuuu

SEQ ID NO: 2220036 - RNA, 19 nt, Artificial Sequence
  Description of Artificial Sequence: Synthetic oligonucleotide
gccacccguucccaccgcg

SEQ ID NO: 2220037 - RNA, 19 nt, Artificial Sequence
  Description of Artificial Sequence: Synthetic oligonucleotide
ccaaaacagacacgaugga

SEQ ID NO: 2220038 - RNA, 19 nt, Artificial Sequence
  Description of Artificial Sequence: Synthetic oligonucleotide
acacgauggaggaggucau

SEQ ID NO: 2220039 - RNA, 19 nt, Artificial Sequence
  Description of Artificial Sequence: Synthetic oligonucleotide
ggaauccgccagccgucag

SEQ ID NO: 2220040 - RNA, 19 nt, Artificial Sequence
  Description of Artificial Sequence: Synthetic oligonucleotide
gcuagggcuacauuuuauu

SEQ ID NO: 2220041 - RNA, 19 nt, Artificial Sequence
  Description of Artificial Sequence: Synthetic oligonucleotide
cggcgcacacugcauaccg

SEQ ID NO: 2220042 - RNA, 19 nt, Artificial Sequence
  Description of Artificial Sequence: Synthetic oligonucleotide
ccuucuaauuuacaguauu

SEQ ID NO: 2220043 - RNA, 19 nt, Artificial Sequence
  Description of Artificial Sequence: Synthetic oligonucleotide
ccacccguucccaccgcgg

SEQ ID NO: 2220044 - RNA, 19 nt, Artificial Sequence
  Description of Artificial Sequence: Synthetic oligonucleotide
gcagagggcccggugcucc

SEQ ID NO: 2220045 - RNA, 19 nt, Artificial Sequence
  Description of Artificial Sequence: Synthetic oligonucleotide
ggucgcagagggcccggug

SEQ ID NO: 2220046 - RNA, 19 nt, Artificial Sequence
  Description of Artificial Sequence: Synthetic oligonucleotide
auccgccagccgucagucu

SEQ ID NO: 2220047 - RNA, 19 nt, Artificial Sequence
  Description of Artificial Sequence: Synthetic oligonucleotide
cgggcggccgccaucuucc

SEQ ID NO: 2220048 - RNA, 19 nt, Artificial Sequence
  Description of Artificial Sequence: Synthetic oligonucleotide
ugucgcuuccaggccucau

SEQ ID NO: 2220049 - RNA, 19 nt, Artificial Sequence
  Description of Artificial Sequence: Synthetic oligonucleotide
cuagggccccuucuaauuu

SEQ ID NO: 2220050 - RNA, 19 nt, Artificial Sequence
  Description of Artificial Sequence: Synthetic oligonucleotide
caggucgcagagggcccgg

SEQ ID NO: 2220051 - RNA, 19 nt, Artificial Sequence
  Description of Artificial Sequence: Synthetic oligonucleotide
ggccucauucaaguaaacu

SEQ ID NO: 2220052 - RNA, 19 nt, Artificial Sequence
  Description of Artificial Sequence: Synthetic oligonucleotide
gucgcuuccaggccucauu

SEQ ID NO: 2220053 - RNA, 19 nt, Artificial Sequence
  Description of Artificial Sequence: Synthetic oligonucleotide
gcaacugcacuggccguca

SEQ ID NO: 2220054 - RNA, 19 nt, Artificial Sequence
  Description of Artificial Sequence: Synthetic oligonucleotide
cagacacgauggaggaggu

SEQ ID NO: 2220055 - RNA, 19 nt, Artificial Sequence
  Description of Artificial Sequence: Synthetic oligonucleotide
gcuagggccccuucuaauu

SEQ ID NO: 2220056 - RNA, 19 nt, Artificial Sequence
  Description of Artificial Sequence: Synthetic oligonucleotide
ggccagguacaaagacccc

SEQ ID NO: 2220057 - RNA, 19 nt, Artificial Sequence
  Description of Artificial Sequence: Synthetic oligonucleotide
gggcuagggcuacauuuua

SEQ ID NO: 2220058 - RNA, 19 nt, Artificial Sequence
  Description of Artificial Sequence: Synthetic oligonucleotide
cgucaugccuggaggccag

SEQ ID NO: 2220059 - RNA, 19 nt, Artificial Sequence
  Description of Artificial Sequence: Synthetic oligonucleotide
accgcggcaccgacacucu

SEQ ID NO: 2220060 - RNA, 19 nt, Artificial Sequence
  Description of Artificial Sequence: Synthetic oligonucleotide
cccguucccaccgcggcac

SEQ ID NO: 2220061 - RNA, 19 nt, Artificial Sequence
  Description of Artificial Sequence: Synthetic oligonucleotide
cugcaacugcacuggccgu

SEQ ID NO: 2220062 - RNA, 19 nt, Artificial Sequence
  Description of Artificial Sequence: Synthetic oligonucleotide
gggaauccgccagccguca

SEQ ID NO: 2220063 - RNA, 19 nt, Artificial Sequence
  Description of Artificial Sequence: Synthetic oligonucleotide
accgggccacccguuccca

SEQ ID NO: 2220064 - RNA, 19 nt, Artificial Sequence
  Description of Artificial Sequence: Synthetic oligonucleotide
gcggcgcacacugcauacc

SEQ ID NO: 2220065 - RNA, 19 nt, Artificial Sequence
  Description of Artificial Sequence: Synthetic oligonucleotide
cagggcggcggagcacuuc

SEQ ID NO: 2220066 - RNA, 19 nt, Artificial Sequence
  Description of Artificial Sequence: Synthetic oligonucleotide
gcacuucacccagggcccc

SEQ ID NO: 2220067 - RNA, 19 nt, Artificial Sequence
  Description of Artificial Sequence: Synthetic oligonucleotide
gaucccggcggcgcacacu

SEQ ID NO: 2220068 - RNA, 19 nt, Artificial Sequence
  Description of Artificial Sequence: Synthetic oligonucleotide
acuggccgucaugccugga

SEQ ID NO: 2220069 - RNA, 19 nt, Artificial Sequence
  Description of Artificial Sequence: Synthetic oligonucleotide
ccgccagccgucagucuuc

SEQ ID NO: 2220070 - RNA, 19 nt, Artificial Sequence
  Description of Artificial Sequence: Synthetic oligonucleotide
gggcccggugcuccggguc

SEQ ID NO: 2220071 - RNA, 19 nt, Artificial Sequence
  Description of Artificial Sequence: Synthetic oligonucleotide
ucccgccgccgccgccgcc

SEQ ID NO: 2220072 - RNA, 19 nt, Artificial Sequence
  Description of Artificial Sequence: Synthetic oligonucleotide
ggggcuagggcuacauuuu

SEQ ID NO: 2220073 - RNA, 19 nt, Artificial Sequence
  Description of Artificial Sequence: Synthetic oligonucleotide
ccaauguuucuaccuuuau

SEQ ID NO: 2220074 - RNA, 19 nt, Artificial Sequence
  Description of Artificial Sequence: Synthetic oligonucleotide
ggcuagggcuacauuuuau

SEQ ID NO: 2220075 - RNA, 19 nt, Artificial Sequence
  Description of Artificial Sequence: Synthetic oligonucleotide
cgcggcaccgacacucuca

SEQ ID NO: 2220076 - RNA, 19 nt, Artificial Sequence
  Description of Artificial Sequence: Synthetic oligonucleotide
ccuggaggccagggcggcg

SEQ ID NO: 2220077 - RNA, 19 nt, Artificial Sequence
  Description of Artificial Sequence: Synthetic oligonucleotide
cccggcggcgcacacugca

SEQ ID NO: 2220078 - RNA, 19 nt, Artificial Sequence
  Description of Artificial Sequence: Synthetic oligonucleotide
ggccacccguucccaccgc

SEQ ID NO: 2220079 - RNA, 19 nt, Artificial Sequence
  Description of Artificial Sequence: Synthetic oligonucleotide
cccuucuaauuuacaguau

SEQ ID NO: 2220080 - RNA, 19 nt, Artificial Sequence
  Description of Artificial Sequence: Synthetic oligonucleotide
ggacgggcggccgccaucu

SEQ ID NO: 2220081 - RNA, 19 nt, Artificial Sequence
  Description of Artificial Sequence: Synthetic oligonucleotide
cgggucccucuccuucucc

SEQ ID NO: 2220082 - RNA, 19 nt, Artificial Sequence
  Description of Artificial Sequence: Synthetic oligonucleotide
gggccccuucuaauuuaca

SEQ ID NO: 2220083 - RNA, 19 nt, Artificial Sequence
  Description of Artificial Sequence: Synthetic oligonucleotide
cggcggagcacuucaccca

SEQ ID NO: 2220084 - RNA, 19 nt, Artificial Sequence
  Description of Artificial Sequence: Synthetic oligonucleotide
cgcuccacgugguaggcgu

SEQ ID NO: 2220085 - RNA, 19 nt, Artificial Sequence
  Description of Artificial Sequence: Synthetic oligonucleotide
ccguucccaccgcggcacc

SEQ ID NO: 2220086 - RNA, 19 nt, Artificial Sequence
  Description of Artificial Sequence: Synthetic oligonucleotide
ccgggucccucuccuucuc

SEQ ID NO: 2220087 - RNA, 19 nt, Artificial Sequence
  Description of Artificial Sequence: Synthetic oligonucleotide
ggccagggcggcggagcac

SEQ ID NO: 2220088 - RNA, 19 nt, Artificial Sequence
  Description of Artificial Sequence: Synthetic oligonucleotide
caacugcacuggccgucau

SEQ ID NO: 2220089 - RNA, 19 nt, Artificial Sequence
  Description of Artificial Sequence: Synthetic oligonucleotide
gggcggcggagcacuucac

SEQ ID NO: 2220090 - RNA, 19 nt, Artificial Sequence
  Description of Artificial Sequence: Synthetic oligonucleotide
cggcaccgacacucucagc

SEQ ID NO: 2220091 - RNA, 19 nt, Artificial Sequence
  Description of Artificial Sequence: Synthetic oligonucleotide
ccacgugguaggcguagau

SEQ ID NO: 2220092 - RNA, 19 nt, Artificial Sequence
  Description of Artificial Sequence: Synthetic oligonucleotide
ccgcggcaccgacacucuc

SEQ ID NO: 2220093 - RNA, 19 nt, Artificial Sequence
  Description of Artificial Sequence: Synthetic oligonucleotide
gcaggacgggcggccgcca

SEQ ID NO: 2220094 - RNA, 19 nt, Artificial Sequence
  Description of Artificial Sequence: Synthetic oligonucleotide
gcuccacgugguaggcgua

SEQ ID NO: 2220095 - RNA, 19 nt, Artificial Sequence
  Description of Artificial Sequence: Synthetic oligonucleotide
caggacgggcggccgccau

SEQ ID NO: 2220096 - RNA, 19 nt, Artificial Sequence
  Description of Artificial Sequence: Synthetic oligonucleotide
gacgggcggccgccaucuu

SEQ ID NO: 2220097 - RNA, 19 nt, Artificial Sequence
  Description of Artificial Sequence: Synthetic oligonucleotide
ccggugcuccgggucccuc

SEQ ID NO: 2220098 - RNA, 19 nt, Artificial Sequence
  Description of Artificial Sequence: Synthetic oligonucleotide
gcauaccgggccacccguu

SEQ ID NO: 2220099 - RNA, 19 nt, Artificial Sequence
  Description of Artificial Sequence: Synthetic oligonucleotide
cggcggcgcacacugcaua

SEQ ID NO: 2220100 - RNA, 19 nt, Artificial Sequence
  Description of Artificial Sequence: Synthetic oligonucleotide
ccggcggcgcacacugcau

SEQ ID NO: 2220101 - RNA, 19 nt, Artificial Sequence
  Description of Artificial Sequence: Synthetic oligonucleotide
ccaccgcggcaccgacacu

SEQ ID NO: 2220102 - RNA, 19 nt, Artificial Sequence
  Description of Artificial Sequence: Synthetic oligonucleotide
aauuaaauaugugaguccc

SEQ ID NO: 2220103 - RNA, 19 nt, Artificial Sequence
  Description of Artificial Sequence: Synthetic oligonucleotide
aauaucaagacucggggac

SEQ ID NO: 2220104 - RNA, 19 nt, Artificial Sequence
  Description of Artificial Sequence: Synthetic oligonucleotide
cuuuaauuaaauaugugag

SEQ ID NO: 2220105 - RNA, 19 nt, Artificial Sequence
  Description of Artificial Sequence: Synthetic oligonucleotide
aaauaugugagucccgcac

SEQ ID NO: 2220106 - RNA, 19 nt, Artificial Sequence
  Description of Artificial Sequence: Synthetic oligonucleotide
uguggaaugugcuaggugg

SEQ ID NO: 2220107 - RNA, 19 nt, Artificial Sequence
  Description of Artificial Sequence: Synthetic oligonucleotide
augggaagcgccuagagcc

SEQ ID NO: 2220108 - RNA, 19 nt, Artificial Sequence
  Description of Artificial Sequence: Synthetic oligonucleotide
ucugcccuaacuaugaagg

SEQ ID NO: 2220109 - RNA, 19 nt, Artificial Sequence
  Description of Artificial Sequence: Synthetic oligonucleotide
uacaagaauaucaagacuc

SEQ ID NO: 2220110 - RNA, 19 nt, Artificial Sequence
  Description of Artificial Sequence: Synthetic oligonucleotide
ugauucaugaaucucgugc

SEQ ID NO: 2220111 - RNA, 19 nt, Artificial Sequence
  Description of Artificial Sequence: Synthetic oligonucleotide
agaauaucaagacucgggg

SEQ ID NO: 2220112 - RNA, 19 nt, Artificial Sequence
  Description of Artificial Sequence: Synthetic oligonucleotide
ugcuagguggucaaaaggg

SEQ ID NO: 2220113 - RNA, 19 nt, Artificial Sequence
  Description of Artificial Sequence: Synthetic oligonucleotide
aacaagccaacacuauggc

SEQ ID NO: 2220114 - RNA, 19 nt, Artificial Sequence
  Description of Artificial Sequence: Synthetic oligonucleotide
cuuacaagaauaucaagac

SEQ ID NO: 2220115 - RNA, 19 nt, Artificial Sequence
  Description of Artificial Sequence: Synthetic oligonucleotide
cuaagaagagccuugcagg

SEQ ID NO: 2220116 - RNA, 19 nt, Artificial Sequence
  Description of Artificial Sequence: Synthetic oligonucleotide
ucauaaacaagccaacacu

SEQ ID NO: 2220117 - RNA, 19 nt, Artificial Sequence
  Description of Artificial Sequence: Synthetic oligonucleotide
auacagagcaaaugggugc

SEQ ID NO: 2220118 - RNA, 19 nt, Artificial Sequence
  Description of Artificial Sequence: Synthetic oligonucleotide
uuuaauuaaauaugugagu

SEQ ID NO: 2220119 - RNA, 19 nt, Artificial Sequence
  Description of Artificial Sequence: Synthetic oligonucleotide
acuaacuuaaacuuuaauu

SEQ ID NO: 2220120 - RNA, 19 nt, Artificial Sequence
  Description of Artificial Sequence: Synthetic oligonucleotide
aaacaagccaacacuaugg

SEQ ID NO: 2220121 - RNA, 19 nt, Artificial Sequence
  Description of Artificial Sequence: Synthetic oligonucleotide
ugcuuguugaucuuugggg

SEQ ID NO: 2220122 - RNA, 19 nt, Artificial Sequence
  Description of Artificial Sequence: Synthetic oligonucleotide
uuuacuaacuuaaacuuua

SEQ ID NO: 2220123 - RNA, 19 nt, Artificial Sequence
  Description of Artificial Sequence: Synthetic oligonucleotide
acuugaaagagcauguccc

SEQ ID NO: 2220124 - RNA, 19 nt, Artificial Sequence
  Description of Artificial Sequence: Synthetic oligonucleotide
aagaauaucaagacucggg

SEQ ID NO: 2220125 - RNA, 19 nt, Artificial Sequence
  Description of Artificial Sequence: Synthetic oligonucleotide
gaaauuccuaagaagagcc

SEQ ID NO: 2220126 - RNA, 19 nt, Artificial Sequence
  Description of Artificial Sequence: Synthetic oligonucleotide
aaagggacagcuccgacug

SEQ ID NO: 2220127 - RNA, 19 nt, Artificial Sequence
  Description of Artificial Sequence: Synthetic oligonucleotide
cuaacuuaaacuuuaauua

SEQ ID NO: 2220128 - RNA, 19 nt, Artificial Sequence
  Description of Artificial Sequence: Synthetic oligonucleotide
ucaaccaucaugaaagcaa

SEQ ID NO: 2220129 - RNA, 19 nt, Artificial Sequence
  Description of Artificial Sequence: Synthetic oligonucleotide
agccauacagagcaaaugg

SEQ ID NO: 2220130 - RNA, 19 nt, Artificial Sequence
  Description of Artificial Sequence: Synthetic oligonucleotide
agaagagccuugcaggacc

SEQ ID NO: 2220131 - RNA, 19 nt, Artificial Sequence
  Description of Artificial Sequence: Synthetic oligonucleotide
uggcaaauaaggcacuagg

SEQ ID NO: 2220132 - RNA, 19 nt, Artificial Sequence
  Description of Artificial Sequence: Synthetic oligonucleotide
uaauuaaauaugugagucc

SEQ ID NO: 2220133 - RNA, 19 nt, Artificial Sequence
  Description of Artificial Sequence: Synthetic oligonucleotide
agauuaaaaucuuuaaaau

SEQ ID NO: 2220134 - RNA, 19 nt, Artificial Sequence
  Description of Artificial Sequence: Synthetic oligonucleotide
aaauaaggcacuaggaugu

SEQ ID NO: 2220135 - RNA, 19 nt, Artificial Sequence
  Description of Artificial Sequence: Synthetic oligonucleotide
aaacacuugaaagagcaug

SEQ ID NO: 2220136 - RNA, 19 nt, Artificial Sequence
  Description of Artificial Sequence: Synthetic oligonucleotide
aaacuuuaauuaaauaugu

SEQ ID NO: 2220137 - RNA, 19 nt, Artificial Sequence
  Description of Artificial Sequence: Synthetic oligonucleotide
uaaacaagccaacacuaug

SEQ ID NO: 2220138 - RNA, 19 nt, Artificial Sequence
  Description of Artificial Sequence: Synthetic oligonucleotide
uaacuaugaagguagguga

SEQ ID NO: 2220139 - RNA, 19 nt, Artificial Sequence
  Description of Artificial Sequence: Synthetic oligonucleotide
uguacuacgaggagggugu

SEQ ID NO: 2220140 - RNA, 19 nt, Artificial Sequence
  Description of Artificial Sequence: Synthetic oligonucleotide
uggaaauuccuaagaagag

SEQ ID NO: 2220141 - RNA, 19 nt, Artificial Sequence
  Description of Artificial Sequence: Synthetic oligonucleotide
uuaaauaugugagucccgc

SEQ ID NO: 2220142 - RNA, 19 nt, Artificial Sequence
  Description of Artificial Sequence: Synthetic oligonucleotide
aguagcaccgcauguacuc

SEQ ID NO: 2220143 - RNA, 19 nt, Artificial Sequence
  Description of Artificial Sequence: Synthetic oligonucleotide
gaugcacagacauugugug

SEQ ID NO: 2220144 - RNA, 19 nt, Artificial Sequence
  Description of Artificial Sequence: Synthetic oligonucleotide
augaaucucgugcacagag

SEQ ID NO: 2220145 - RNA, 19 nt, Artificial Sequence
  Description of Artificial Sequence: Synthetic oligonucleotide
gaaucucgugcacagaggc

SEQ ID NO: 2220146 - RNA, 19 nt, Artificial Sequence
  Description of Artificial Sequence: Synthetic oligonucleotide
uuugguguggguaucucca

SEQ ID NO: 2220147 - RNA, 19 nt, Artificial Sequence
  Description of Artificial Sequence: Synthetic oligonucleotide
auaaacacuugaaagagca

SEQ ID NO: 2220148 - RNA, 19 nt, Artificial Sequence
  Description of Artificial Sequence: Synthetic oligonucleotide
aaaagggacagcuccgacu

SEQ ID NO: 2220149 - RNA, 19 nt, Artificial Sequence
  Description of Artificial Sequence: Synthetic oligonucleotide
cuaacuaugaagguaggug

SEQ ID NO: 2220150 - RNA, 19 nt, Artificial Sequence
  Description of Artificial Sequence: Synthetic oligonucleotide
aauaugugagucccgcacu

SEQ ID NO: 2220151 - RNA, 19 nt, Artificial Sequence
  Description of Artificial Sequence: Synthetic oligonucleotide
guuaaaggcauuuggugug

SEQ ID NO: 2220152 - RNA, 19 nt, Artificial Sequence
  Description of Artificial Sequence: Synthetic oligonucleotide
ucaugaaucucgugcacag

SEQ ID NO: 2220153 - RNA, 19 nt, Artificial Sequence
  Description of Artificial Sequence: Synthetic oligonucleotide
gacuguacuacgaggaggg

SEQ ID NO: 2220154 - RNA, 19 nt, Artificial Sequence
  Description of Artificial Sequence: Synthetic oligonucleotide
uaaggcacuaggauguugu

SEQ ID NO: 2220155 - RNA, 19 nt, Artificial Sequence
  Description of Artificial Sequence: Synthetic oligonucleotide
uugaugaucugcccuaacu

SEQ ID NO: 2220156 - RNA, 19 nt, Artificial Sequence
  Description of Artificial Sequence: Synthetic oligonucleotide
ugaaucucgugcacagagg

SEQ ID NO: 2220157 - RNA, 19 nt, Artificial Sequence
  Description of Artificial Sequence: Synthetic oligonucleotide
aagugcugauucaugaauc

SEQ ID NO: 2220158 - RNA, 19 nt, Artificial Sequence
  Description of Artificial Sequence: Synthetic oligonucleotide
ugaaagagcaugucccagc

SEQ ID NO: 2220159 - RNA, 19 nt, Artificial Sequence
  Description of Artificial Sequence: Synthetic oligonucleotide
uccgacuguacuacgagga

SEQ ID NO: 2220160 - RNA, 19 nt, Artificial Sequence
  Description of Artificial Sequence: Synthetic oligonucleotide
aaaacucuuacaagaauau

SEQ ID NO: 2220161 - RNA, 19 nt, Artificial Sequence
  Description of Artificial Sequence: Synthetic oligonucleotide
acuaggauguugucgaggu

SEQ ID NO: 2220162 - RNA, 19 nt, Artificial Sequence
  Description of Artificial Sequence: Synthetic oligonucleotide
ugugcuagguggucaaaag

SEQ ID NO: 2220163 - RNA, 19 nt, Artificial Sequence
  Description of Artificial Sequence: Synthetic oligonucleotide
acauugugugucuucugac

SEQ ID NO: 2220164 - RNA, 19 nt, Artificial Sequence
  Description of Artificial Sequence: Synthetic oligonucleotide
ugaucugcccuaacuauga

SEQ ID NO: 2220165 - RNA, 19 nt, Artificial Sequence
  Description of Artificial Sequence: Synthetic oligonucleotide
uggguaucuccaaagauua

SEQ ID NO: 2220166 - RNA, 19 nt, Artificial Sequence
  Description of Artificial Sequence: Synthetic oligonucleotide
uaagaagagccuugcagga

SEQ ID NO: 2220167 - RNA, 19 nt, Artificial Sequence
  Description of Artificial Sequence: Synthetic oligonucleotide
auguugucgagguucgggg

SEQ ID NO: 2220168 - RNA, 19 nt, Artificial Sequence
  Description of Artificial Sequence: Synthetic oligonucleotide
cauaaacacuugaaagagc

SEQ ID NO: 2220169 - RNA, 19 nt, Artificial Sequence
  Description of Artificial Sequence: Synthetic oligonucleotide
ugugagucccgcacugugg

SEQ ID NO: 2220170 - RNA, 19 nt, Artificial Sequence
  Description of Artificial Sequence: Synthetic oligonucleotide
ucgaagugcugauucauga

SEQ ID NO: 2220171 - RNA, 19 nt, Artificial Sequence
  Description of Artificial Sequence: Synthetic oligonucleotide
cugucagucucuuuugccc

SEQ ID NO: 2220172 - RNA, 19 nt, Artificial Sequence
  Description of Artificial Sequence: Synthetic oligonucleotide
ugaugaucugcccuaacua

SEQ ID NO: 2220173 - RNA, 19 nt, Artificial Sequence
  Description of Artificial Sequence: Synthetic oligonucleotide
cacuugaaagagcaugucc

SEQ ID NO: 2220174 - RNA, 19 nt, Artificial Sequence
  Description of Artificial Sequence: Synthetic oligonucleotide
acaagaauaucaagacucg

SEQ ID NO: 2220175 - RNA, 19 nt, Artificial Sequence
  Description of Artificial Sequence: Synthetic oligonucleotide
uagguggucaaaagggaca

SEQ ID NO: 2220176 - RNA, 19 nt, Artificial Sequence
  Description of Artificial Sequence: Synthetic oligonucleotide
ucuguucuuggcucgaagu

SEQ ID NO: 2220177 - RNA, 19 nt, Artificial Sequence
  Description of Artificial Sequence: Synthetic oligonucleotide
uuaaaggcauuuggugugg

SEQ ID NO: 2220178 - RNA, 19 nt, Artificial Sequence
  Description of Artificial Sequence: Synthetic oligonucleotide
ugaguagcaccgcauguac

SEQ ID NO: 2220179 - RNA, 19 nt, Artificial Sequence
  Description of Artificial Sequence: Synthetic oligonucleotide
uguacucugucagccacgg

SEQ ID NO: 2220180 - RNA, 19 nt, Artificial Sequence
  Description of Artificial Sequence: Synthetic oligonucleotide
agugcugauucaugaaucu

SEQ ID NO: 2220181 - RNA, 19 nt, Artificial Sequence
  Description of Artificial Sequence: Synthetic oligonucleotide
uguggguaucuccaaagau

SEQ ID NO: 2220182 - RNA, 19 nt, Artificial Sequence
  Description of Artificial Sequence: Synthetic oligonucleotide
ccuagagccgguuaaaggc

SEQ ID NO: 2220183 - RNA, 19 nt, Artificial Sequence
  Description of Artificial Sequence: Synthetic oligonucleotide
gacauugugugucuucuga

SEQ ID NO: 2220184 - RNA, 19 nt, Artificial Sequence
  Description of Artificial Sequence: Synthetic oligonucleotide
gaauaucaagacucgggga

SEQ ID NO: 2220185 - RNA, 19 nt, Artificial Sequence
  Description of Artificial Sequence: Synthetic oligonucleotide
aauuccuaagaagagccuu

SEQ ID NO: 2220186 - RNA, 19 nt, Artificial Sequence
  Description of Artificial Sequence: Synthetic oligonucleotide
gaagguaggugaucaacca

SEQ ID NO: 2220187 - RNA, 19 nt, Artificial Sequence
  Description of Artificial Sequence: Synthetic oligonucleotide
aagacucggggacuugucu

SEQ ID NO: 2220188 - RNA, 19 nt, Artificial Sequence
  Description of Artificial Sequence: Synthetic oligonucleotide
cuagguggucaaaagggac

SEQ ID NO: 2220189 - RNA, 19 nt, Artificial Sequence
  Description of Artificial Sequence: Synthetic oligonucleotide
aggugaucaaccaucauga

SEQ ID NO: 2220190 - RNA, 19 nt, Artificial Sequence
  Description of Artificial Sequence: Synthetic oligonucleotide
cauuugcuaguuuugguca

SEQ ID NO: 2220191 - RNA, 19 nt, Artificial Sequence
  Description of Artificial Sequence: Synthetic oligonucleotide
gugcuagguggucaaaagg

SEQ ID NO: 2220192 - RNA, 19 nt, Artificial Sequence
  Description of Artificial Sequence: Synthetic oligonucleotide
ucccauuugcuaguuuugg

SEQ ID NO: 2220193 - RNA, 19 nt, Artificial Sequence
  Description of Artificial Sequence: Synthetic oligonucleotide
uaaauaugugagucccgca

SEQ ID NO: 2220194 - RNA, 19 nt, Artificial Sequence
  Description of Artificial Sequence: Synthetic oligonucleotide
auuaaauaugugagucccg

SEQ ID NO: 2220195 - RNA, 19 nt, Artificial Sequence
  Description of Artificial Sequence: Synthetic oligonucleotide
aucucgugcacagaggcag

SEQ ID NO: 2220196 - RNA, 19 nt, Artificial Sequence
  Description of Artificial Sequence: Synthetic oligonucleotide
ugcacagacauuguguguc

SEQ ID NO: 2220197 - RNA, 19 nt, Artificial Sequence
  Description of Artificial Sequence: Synthetic oligonucleotide
agguaggugaucaaccauc

SEQ ID NO: 2220198 - RNA, 19 nt, Artificial Sequence
  Description of Artificial Sequence: Synthetic oligonucleotide
aaggcacuaggauguuguc

SEQ ID NO: 2220199 - RNA, 19 nt, Artificial Sequence
  Description of Artificial Sequence: Synthetic oligonucleotide
aucugcccuaacuaugaag

SEQ ID NO: 2220200 - RNA, 19 nt, Artificial Sequence
  Description of Artificial Sequence: Synthetic oligonucleotide
guauccaucuguuucucuc

SEQ ID NO: 2220201 - RNA, 19 nt, Artificial Sequence
  Description of Artificial Sequence: Synthetic oligonucleotide
agcaucuaugcccuugcug

SEQ ID NO: 2220202 - RNA, 19 nt, Artificial Sequence
  Description of Artificial Sequence: Synthetic oligonucleotide
caagaauaucaagacucgg

SEQ ID NO: 2220203 - RNA, 19 nt, Artificial Sequence
  Description of Artificial Sequence: Synthetic oligonucleotide
accagucuguuucuuccac

SEQ ID NO: 2220204 - RNA, 19 nt, Artificial Sequence
  Description of Artificial Sequence: Synthetic oligonucleotide
gaucaaccaucaugaaagc

SEQ ID NO: 2220205 - RNA, 19 nt, Artificial Sequence
  Description of Artificial Sequence: Synthetic oligonucleotide
acuuaaacuuuaauuaaau

SEQ ID NO: 2220206 - RNA, 19 nt, Artificial Sequence
  Description of Artificial Sequence: Synthetic oligonucleotide
uugugugucuucugacucc

SEQ ID NO: 2220207 - RNA, 19 nt, Artificial Sequence
  Description of Artificial Sequence: Synthetic oligonucleotide
uugaaagagcaugucccag

SEQ ID NO: 2220208 - RNA, 19 nt, Artificial Sequence
  Description of Artificial Sequence: Synthetic oligonucleotide
uuacuaacuuaaacuuuaa

SEQ ID NO: 2220209 - RNA, 19 nt, Artificial Sequence
  Description of Artificial Sequence: Synthetic oligonucleotide
ugcugaguagcaccgcaug

SEQ ID NO: 2220210 - RNA, 19 nt, Artificial Sequence
  Description of Artificial Sequence: Synthetic oligonucleotide
uucaugaaucucgugcaca

SEQ ID NO: 2220211 - RNA, 19 nt, Artificial Sequence
  Description of Artificial Sequence: Synthetic oligonucleotide
guguggucccauuugcuag

SEQ ID NO: 2220212 - RNA, 19 nt, Artificial Sequence
  Description of Artificial Sequence: Synthetic oligonucleotide
ugucuucuguucuuggcuc

SEQ ID NO: 2220213 - RNA, 19 nt, Artificial Sequence
  Description of Artificial Sequence: Synthetic oligonucleotide
uuuccacauccaccgagug

SEQ ID NO: 2220214 - RNA, 19 nt, Artificial Sequence
  Description of Artificial Sequence: Synthetic oligonucleotide
ucuucugacuccccguauc

SEQ ID NO: 2220215 - RNA, 19 nt, Artificial Sequence
  Description of Artificial Sequence: Synthetic oligonucleotide
uccaccugucuucuguucu

SEQ ID NO: 2220216 - RNA, 19 nt, Artificial Sequence
  Description of Artificial Sequence: Synthetic oligonucleotide
ggaaauuccuaagaagagc

SEQ ID NO: 2220217 - RNA, 19 nt, Artificial Sequence
  Description of Artificial Sequence: Synthetic oligonucleotide
acuaugaagguaggugauc

SEQ ID NO: 2220218 - RNA, 19 nt, Artificial Sequence
  Description of Artificial Sequence: Synthetic oligonucleotide
caacacuauggcuuugaug

SEQ ID NO: 2220219 - RNA, 19 nt, Artificial Sequence
  Description of Artificial Sequence: Synthetic oligonucleotide
uguugucgagguucggggc

SEQ ID NO: 2220220 - RNA, 19 nt, Artificial Sequence
  Description of Artificial Sequence: Synthetic oligonucleotide
cuucugacuccccguaucc

SEQ ID NO: 2220221 - RNA, 19 nt, Artificial Sequence
  Description of Artificial Sequence: Synthetic oligonucleotide
ugggaagcgccuagagccg

SEQ ID NO: 2220222 - RNA, 19 nt, Artificial Sequence
  Description of Artificial Sequence: Synthetic oligonucleotide
augucccagcaucuaugcc

SEQ ID NO: 2220223 - RNA, 19 nt, Artificial Sequence
  Description of Artificial Sequence: Synthetic oligonucleotide
aggaccagucuguuucuuc

SEQ ID NO: 2220224 - RNA, 19 nt, Artificial Sequence
  Description of Artificial Sequence: Synthetic oligonucleotide
uguguggucccauuugcua

SEQ ID NO: 2220225 - RNA, 19 nt, Artificial Sequence
  Description of Artificial Sequence: Synthetic oligonucleotide
agaugcacagacauugugu

SEQ ID NO: 2220226 - RNA, 19 nt, Artificial Sequence
  Description of Artificial Sequence: Synthetic oligonucleotide
uucucugcggaagauggcu

SEQ ID NO: 2220227 - RNA, 19 nt, Artificial Sequence
  Description of Artificial Sequence: Synthetic oligonucleotide
guugucgagguucggggcc

SEQ ID NO: 2220228 - RNA, 19 nt, Artificial Sequence
  Description of Artificial Sequence: Synthetic oligonucleotide
aaggcauuuggugugggua

SEQ ID NO: 2220229 - RNA, 19 nt, Artificial Sequence
  Description of Artificial Sequence: Synthetic oligonucleotide
ucuuccaccuguguguggu

SEQ ID NO: 2220230 - RNA, 19 nt, Artificial Sequence
  Description of Artificial Sequence: Synthetic oligonucleotide
uggcucgaagugcugauuc

SEQ ID NO: 2220231 - RNA, 19 nt, Artificial Sequence
  Description of Artificial Sequence: Synthetic oligonucleotide
gccgguuaaaggcauuugg

SEQ ID NO: 2220232 - RNA, 19 nt, Artificial Sequence
  Description of Artificial Sequence: Synthetic oligonucleotide
uaaacacuugaaagagcau

SEQ ID NO: 2220233 - RNA, 19 nt, Artificial Sequence
  Description of Artificial Sequence: Synthetic oligonucleotide
gagguucggggccacuggg

SEQ ID NO: 2220234 - RNA, 19 nt, Artificial Sequence
  Description of Artificial Sequence: Synthetic oligonucleotide
aggcacuaggauguugucg

SEQ ID NO: 2220235 - RNA, 19 nt, Artificial Sequence
  Description of Artificial Sequence: Synthetic oligonucleotide
acuacgaggagggugugca

SEQ ID NO: 2220236 - RNA, 19 nt, Artificial Sequence
  Description of Artificial Sequence: Synthetic oligonucleotide
ugcggaagauggcuuuacc

SEQ ID NO: 2220237 - RNA, 19 nt, Artificial Sequence
  Description of Artificial Sequence: Synthetic oligonucleotide
uuugaugaucugcccuaac

SEQ ID NO: 2220238 - RNA, 19 nt, Artificial Sequence
  Description of Artificial Sequence: Synthetic oligonucleotide
gugaucaaccaucaugaaa

SEQ ID NO: 2220239 - RNA, 19 nt, Artificial Sequence
  Description of Artificial Sequence: Synthetic oligonucleotide
uaguuuuggucauucuuuu

SEQ ID NO: 2220240 - RNA, 19 nt, Artificial Sequence
  Description of Artificial Sequence: Synthetic oligonucleotide
cauccaccgagugagcccg

SEQ ID NO: 2220241 - RNA, 19 nt, Artificial Sequence
  Description of Artificial Sequence: Synthetic oligonucleotide
cuccgacuguacuacgagg

SEQ ID NO: 2220242 - RNA, 19 nt, Artificial Sequence
  Description of Artificial Sequence: Synthetic oligonucleotide
gauggcuuuacccuccggu

SEQ ID NO: 2220243 - RNA, 19 nt, Artificial Sequence
  Description of Artificial Sequence: Synthetic oligonucleotide
ggcacuaggauguugucga

SEQ ID NO: 2220244 - RNA, 19 nt, Artificial Sequence
  Description of Artificial Sequence: Synthetic oligonucleotide
ucugacuccccguauccau

SEQ ID NO: 2220245 - RNA, 19 nt, Artificial Sequence
  Description of Artificial Sequence: Synthetic oligonucleotide
aacuaugaagguaggugau

SEQ ID NO: 2220246 - RNA, 19 nt, Artificial Sequence
  Description of Artificial Sequence: Synthetic oligonucleotide
uuccuaagaagagccuugc

SEQ ID NO: 2220247 - RNA, 19 nt, Artificial Sequence
  Description of Artificial Sequence: Synthetic oligonucleotide
gggacuugucuucauaaac

SEQ ID NO: 2220248 - RNA, 19 nt, Artificial Sequence
  Description of Artificial Sequence: Synthetic oligonucleotide
agcacugugucuugcuccu

SEQ ID NO: 2220249 - RNA, 19 nt, Artificial Sequence
  Description of Artificial Sequence: Synthetic oligonucleotide
uccuaagaagagccuugca

SEQ ID NO: 2220250 - RNA, 19 nt, Artificial Sequence
  Description of Artificial Sequence: Synthetic oligonucleotide
agguggucaaaagggacag

SEQ ID NO: 2220251 - RNA, 19 nt, Artificial Sequence
  Description of Artificial Sequence: Synthetic oligonucleotide
gaugaucugcccuaacuau

SEQ ID NO: 2220252 - RNA, 19 nt, Artificial Sequence
  Description of Artificial Sequence: Synthetic oligonucleotide
gagggugugcaugggaagc

SEQ ID NO: 2220253 - RNA, 19 nt, Artificial Sequence
  Description of Artificial Sequence: Synthetic oligonucleotide
ggaccagucuguuucuucc

SEQ ID NO: 2220254 - RNA, 19 nt, Artificial Sequence
  Description of Artificial Sequence: Synthetic oligonucleotide
auuugcuaguuuuggucau

SEQ ID NO: 2220255 - RNA, 19 nt, Artificial Sequence
  Description of Artificial Sequence: Synthetic oligonucleotide
ugccccaguuuguaguuca

SEQ ID NO: 2220256 - RNA, 19 nt, Artificial Sequence
  Description of Artificial Sequence: Synthetic oligonucleotide
gguuaaaggcauuuggugu

SEQ ID NO: 2220257 - RNA, 19 nt, Artificial Sequence
  Description of Artificial Sequence: Synthetic oligonucleotide
uucugguugcuuucuuacu

SEQ ID NO: 2220258 - RNA, 19 nt, Artificial Sequence
  Description of Artificial Sequence: Synthetic oligonucleotide
uggcuuuacccuccgguuc

SEQ ID NO: 2220259 - RNA, 19 nt, Artificial Sequence
  Description of Artificial Sequence: Synthetic oligonucleotide
cucgaagugcugauucaug

SEQ ID NO: 2220260 - RNA, 19 nt, Artificial Sequence
  Description of Artificial Sequence: Synthetic oligonucleotide
aaugggugcuuguucucuu

SEQ ID NO: 2220261 - RNA, 19 nt, Artificial Sequence
  Description of Artificial Sequence: Synthetic oligonucleotide
acuugucuucauaaacaag

SEQ ID NO: 2220262 - RNA, 19 nt, Artificial Sequence
  Description of Artificial Sequence: Synthetic oligonucleotide
accugucuucuguucuugg

SEQ ID NO: 2220263 - RNA, 19 nt, Artificial Sequence
  Description of Artificial Sequence: Synthetic oligonucleotide
ccucuggcaaauaaggcac

SEQ ID NO: 2220264 - RNA, 19 nt, Artificial Sequence
  Description of Artificial Sequence: Synthetic oligonucleotide
uuacccuccgguucuuuuc

SEQ ID NO: 2220265 - RNA, 19 nt, Artificial Sequence
  Description of Artificial Sequence: Synthetic oligonucleotide
cugguugcuuucuuacuuc

SEQ ID NO: 2220266 - RNA, 19 nt, Artificial Sequence
  Description of Artificial Sequence: Synthetic oligonucleotide
cuguacuacgaggagggug

SEQ ID NO: 2220267 - RNA, 19 nt, Artificial Sequence
  Description of Artificial Sequence: Synthetic oligonucleotide
guaucuccaaagauuaaaa

SEQ ID NO: 2220268 - RNA, 19 nt, Artificial Sequence
  Description of Artificial Sequence: Synthetic oligonucleotide
gaugggaugcccugccaga

SEQ ID NO: 2220269 - RNA, 19 nt, Artificial Sequence
  Description of Artificial Sequence: Synthetic oligonucleotide
uccgcguccccaaccuccg

SEQ ID NO: 2220270 - RNA, 19 nt, Artificial Sequence
  Description of Artificial Sequence: Synthetic oligonucleotide
gcggaagauggcuuuaccc

SEQ ID NO: 2220271 - RNA, 19 nt, Artificial Sequence
  Description of Artificial Sequence: Synthetic oligonucleotide
ccauuugcuaguuuugguc

SEQ ID NO: 2220272 - RNA, 19 nt, Artificial Sequence
  Description of Artificial Sequence: Synthetic oligonucleotide
aaagagcaugucccagcau

SEQ ID NO: 2220273 - RNA, 19 nt, Artificial Sequence
  Description of Artificial Sequence: Synthetic oligonucleotide
aucaaccaucaugaaagca

SEQ ID NO: 2220274 - RNA, 19 nt, Artificial Sequence
  Description of Artificial Sequence: Synthetic oligonucleotide
gcccuaacuaugaagguag

SEQ ID NO: 2220275 - RNA, 19 nt, Artificial Sequence
  Description of Artificial Sequence: Synthetic oligonucleotide
auaaacaagccaacacuau

SEQ ID NO: 2220276 - RNA, 19 nt, Artificial Sequence
  Description of Artificial Sequence: Synthetic oligonucleotide
ucaagacucggggacuugu

SEQ ID NO: 2220277 - RNA, 19 nt, Artificial Sequence
  Description of Artificial Sequence: Synthetic oligonucleotide
caccgagugagcccgcugc

SEQ ID NO: 2220278 - RNA, 19 nt, Artificial Sequence
  Description of Artificial Sequence: Synthetic oligonucleotide
agacauugugugucuucug

SEQ ID NO: 2220279 - RNA, 19 nt, Artificial Sequence
  Description of Artificial Sequence: Synthetic oligonucleotide
aggcauuugguguggguau

SEQ ID NO: 2220280 - RNA, 19 nt, Artificial Sequence
  Description of Artificial Sequence: Synthetic oligonucleotide
auaucaagacucggggacu

SEQ ID NO: 2220281 - RNA, 19 nt, Artificial Sequence
  Description of Artificial Sequence: Synthetic oligonucleotide
gaaugugcuagguggucaa

SEQ ID NO: 2220282 - RNA, 19 nt, Artificial Sequence
  Description of Artificial Sequence: Synthetic oligonucleotide
gccuagagccgguuaaagg

SEQ ID NO: 2220283 - RNA, 19 nt, Artificial Sequence
  Description of Artificial Sequence: Synthetic oligonucleotide
uuugccccaguuuguaguu

SEQ ID NO: 2220284 - RNA, 19 nt, Artificial Sequence
  Description of Artificial Sequence: Synthetic oligonucleotide
caaccaucaugaaagcaaa

SEQ ID NO: 2220285 - RNA, 19 nt, Artificial Sequence
  Description of Artificial Sequence: Synthetic oligonucleotide
ugcccuaacuaugaaggua

SEQ ID NO: 2220286 - RNA, 19 nt, Artificial Sequence
  Description of Artificial Sequence: Synthetic oligonucleotide
uuuacccuccgguucuuuu

SEQ ID NO: 2220287 - RNA, 19 nt, Artificial Sequence
  Description of Artificial Sequence: Synthetic oligonucleotide
uucuuccaccugugugugg

SEQ ID NO: 2220288 - RNA, 19 nt, Artificial Sequence
  Description of Artificial Sequence: Synthetic oligonucleotide
ugcuaguuuuggucauucu

SEQ ID NO: 2220289 - RNA, 19 nt, Artificial Sequence
  Description of Artificial Sequence: Synthetic oligonucleotide
ggacuugucuucauaaaca

SEQ ID NO: 2220290 - RNA, 19 nt, Artificial Sequence
  Description of Artificial Sequence: Synthetic oligonucleotide
gacucggggacuugucuuc

SEQ ID NO: 2220291 - RNA, 19 nt, Artificial Sequence
  Description of Artificial Sequence: Synthetic oligonucleotide
auggcuuuacccuccgguu

SEQ ID NO: 2220292 - RNA, 19 nt, Artificial Sequence
  Description of Artificial Sequence: Synthetic oligonucleotide
gacagcuccgacuguacua

SEQ ID NO: 2220293 - RNA, 19 nt, Artificial Sequence
  Description of Artificial Sequence: Synthetic oligonucleotide
agucuguuucuuccaccug

SEQ ID NO: 2220294 - RNA, 19 nt, Artificial Sequence
  Description of Artificial Sequence: Synthetic oligonucleotide
uagagccgguuaaaggcau

SEQ ID NO: 2220295 - RNA, 19 nt, Artificial Sequence
  Description of Artificial Sequence: Synthetic oligonucleotide
aaucucgugcacagaggca

SEQ ID NO: 2220296 - RNA, 19 nt, Artificial Sequence
  Description of Artificial Sequence: Synthetic oligonucleotide
ucuuuugccccaguuugua

SEQ ID NO: 2220297 - RNA, 19 nt, Artificial Sequence
  Description of Artificial Sequence: Synthetic oligonucleotide
uagcaccgcauguacucug

SEQ ID NO: 2220298 - RNA, 19 nt, Artificial Sequence
  Description of Artificial Sequence: Synthetic oligonucleotide
uugcuaguuuuggucauuc

SEQ ID NO: 2220299 - RNA, 19 nt, Artificial Sequence
  Description of Artificial Sequence: Synthetic oligonucleotide
ggaugggaugcccugccag

SEQ ID NO: 2220300 - RNA, 19 nt, Artificial Sequence
  Description of Artificial Sequence: Synthetic oligonucleotide
caaaaccaucucuuggaaa

SEQ ID NO: 2220301 - RNA, 19 nt, Artificial Sequence
  Description of Artificial Sequence: Synthetic oligonucleotide
gguaucuccaaagauuaaa

SEQ ID NO: 2220302 - RNA, 19 nt, Artificial Sequence
  Description of Artificial Sequence: Synthetic oligonucleotide
ugggaugcccugccagaug

SEQ ID NO: 2220303 - RNA, 19 nt, Artificial Sequence
  Description of Artificial Sequence: Synthetic oligonucleotide
acuccccguauccaucugu

SEQ ID NO: 2220304 - RNA, 19 nt, Artificial Sequence
  Description of Artificial Sequence: Synthetic oligonucleotide
cagccauacagagcaaaug

SEQ ID NO: 2220305 - RNA, 19 nt, Artificial Sequence
  Description of Artificial Sequence: Synthetic oligonucleotide
caguuuguaguucagguuu

SEQ ID NO: 2220306 - RNA, 19 nt, Artificial Sequence
  Description of Artificial Sequence: Synthetic oligonucleotide
gcaaauaaggcacuaggau

SEQ ID NO: 2220307 - RNA, 19 nt, Artificial Sequence
  Description of Artificial Sequence: Synthetic oligonucleotide
agauggcuuuacccuccgg

SEQ ID NO: 2220308 - RNA, 19 nt, Artificial Sequence
  Description of Artificial Sequence: Synthetic oligonucleotide
agcgccuagagccgguuaa

SEQ ID NO: 2220309 - RNA, 19 nt, Artificial Sequence
  Description of Artificial Sequence: Synthetic oligonucleotide
uucggggccacugggcacc

SEQ ID NO: 2220310 - RNA, 19 nt, Artificial Sequence
  Description of Artificial Sequence: Synthetic oligonucleotide
uugcugaguagcaccgcau

SEQ ID NO: 2220311 - RNA, 19 nt, Artificial Sequence
  Description of Artificial Sequence: Synthetic oligonucleotide
ugggcacccugucagucuc

SEQ ID NO: 2220312 - RNA, 19 nt, Artificial Sequence
  Description of Artificial Sequence: Synthetic oligonucleotide
ucucgugcacagaggcaga

SEQ ID NO: 2220313 - RNA, 19 nt, Artificial Sequence
  Description of Artificial Sequence: Synthetic oligonucleotide
aaaccaucucuuggaaauu

SEQ ID NO: 2220314 - RNA, 19 nt, Artificial Sequence
  Description of Artificial Sequence: Synthetic oligonucleotide
ucuucuguucuuggcucga

SEQ ID NO: 2220315 - RNA, 19 nt, Artificial Sequence
  Description of Artificial Sequence: Synthetic oligonucleotide
agacucggggacuugucuu

SEQ ID NO: 2220316 - RNA, 19 nt, Artificial Sequence
  Description of Artificial Sequence: Synthetic oligonucleotide
auguacucugucagccacg

SEQ ID NO: 2220317 - RNA, 19 nt, Artificial Sequence
  Description of Artificial Sequence: Synthetic oligonucleotide
ucucugcggaagauggcuu

SEQ ID NO: 2220318 - RNA, 19 nt, Artificial Sequence
  Description of Artificial Sequence: Synthetic oligonucleotide
ggcaaauaaggcacuagga

SEQ ID NO: 2220319 - RNA, 19 nt, Artificial Sequence
  Description of Artificial Sequence: Synthetic oligonucleotide
ucgagguucggggccacug

SEQ ID NO: 2220320 - RNA, 19 nt, Artificial Sequence
  Description of Artificial Sequence: Synthetic oligonucleotide
aauaaggcacuaggauguu

SEQ ID NO: 2220321 - RNA, 19 nt, Artificial Sequence
  Description of Artificial Sequence: Synthetic oligonucleotide
uaugugagucccgcacugu

SEQ ID NO: 2220322 - RNA, 19 nt, Artificial Sequence
  Description of Artificial Sequence: Synthetic oligonucleotide
gaccagucuguuucuucca

SEQ ID NO: 2220323 - RNA, 19 nt, Artificial Sequence
  Description of Artificial Sequence: Synthetic oligonucleotide
cauugugugucuucugacu

SEQ ID NO: 2220324 - RNA, 19 nt, Artificial Sequence
  Description of Artificial Sequence: Synthetic oligonucleotide
agguucggggccacugggc

SEQ ID NO: 2220325 - RNA, 19 nt, Artificial Sequence
  Description of Artificial Sequence: Synthetic oligonucleotide
cugacuccccguauccauc

SEQ ID NO: 2220326 - RNA, 19 nt, Artificial Sequence
  Description of Artificial Sequence: Synthetic oligonucleotide
caagacucggggacuuguc

SEQ ID NO: 2220327 - RNA, 19 nt, Artificial Sequence
  Description of Artificial Sequence: Synthetic oligonucleotide
agccacggguucucugcgg

SEQ ID NO: 2220328 - RNA, 19 nt, Artificial Sequence
  Description of Artificial Sequence: Synthetic oligonucleotide
uucugacuccccguaucca

SEQ ID NO: 2220329 - RNA, 19 nt, Artificial Sequence
  Description of Artificial Sequence: Synthetic oligonucleotide
uggaaugugcuaggugguc

SEQ ID NO: 2220330 - RNA, 19 nt, Artificial Sequence
  Description of Artificial Sequence: Synthetic oligonucleotide
uaucaagacucggggacuu

SEQ ID NO: 2220331 - RNA, 19 nt, Artificial Sequence
  Description of Artificial Sequence: Synthetic oligonucleotide
uacuacgaggagggugugc

SEQ ID NO: 2220332 - RNA, 19 nt, Artificial Sequence
  Description of Artificial Sequence: Synthetic oligonucleotide
gugcaugggaagcgccuag

SEQ ID NO: 2220333 - RNA, 19 nt, Artificial Sequence
  Description of Artificial Sequence: Synthetic oligonucleotide
acggguucucugcggaaga

SEQ ID NO: 2220334 - RNA, 19 nt, Artificial Sequence
  Description of Artificial Sequence: Synthetic oligonucleotide
gcuccgacuguacuacgag

SEQ ID NO: 2220335 - RNA, 19 nt, Artificial Sequence
  Description of Artificial Sequence: Synthetic oligonucleotide
cacggguucucugcggaag

SEQ ID NO: 2220336 - RNA, 19 nt, Artificial Sequence
  Description of Artificial Sequence: Synthetic oligonucleotide
ucggggacuugucuucaua

SEQ ID NO: 2220337 - RNA, 19 nt, Artificial Sequence
  Description of Artificial Sequence: Synthetic oligonucleotide
aaugugcuagguggucaaa

SEQ ID NO: 2220338 - RNA, 19 nt, Artificial Sequence
  Description of Artificial Sequence: Synthetic oligonucleotide
ugcaugggaagcgccuaga

SEQ ID NO: 2220339 - RNA, 19 nt, Artificial Sequence
  Description of Artificial Sequence: Synthetic oligonucleotide
agucccgcacugugggaug

SEQ ID NO: 2220340 - RNA, 19 nt, Artificial Sequence
  Description of Artificial Sequence: Synthetic oligonucleotide
uuugcuaguuuuggucauu

SEQ ID NO: 2220341 - RNA, 19 nt, Artificial Sequence
  Description of Artificial Sequence: Synthetic oligonucleotide
uugucgagguucggggcca

SEQ ID NO: 2220342 - RNA, 19 nt, Artificial Sequence
  Description of Artificial Sequence: Synthetic oligonucleotide
cuaugcccuugcugaguag

SEQ ID NO: 2220343 - RNA, 19 nt, Artificial Sequence
  Description of Artificial Sequence: Synthetic oligonucleotide
cagccacggguucucugcg

SEQ ID NO: 2220344 - RNA, 19 nt, Artificial Sequence
  Description of Artificial Sequence: Synthetic oligonucleotide
caccgcauguacucuguca

SEQ ID NO: 2220345 - RNA, 19 nt, Artificial Sequence
  Description of Artificial Sequence: Synthetic oligonucleotide
ugagucccgcacuguggga

SEQ ID NO: 2220346 - RNA, 19 nt, Artificial Sequence
  Description of Artificial Sequence: Synthetic oligonucleotide
gaagagccuugcaggacca

SEQ ID NO: 2220347 - RNA, 19 nt, Artificial Sequence
  Description of Artificial Sequence: Synthetic oligonucleotide
cugguagcacugugucuug

SEQ ID NO: 2220348 - RNA, 19 nt, Artificial Sequence
  Description of Artificial Sequence: Synthetic oligonucleotide
cagucuguuucuuccaccu

SEQ ID NO: 2220349 - RNA, 19 nt, Artificial Sequence
  Description of Artificial Sequence: Synthetic oligonucleotide
ccagucuguuucuuccacc

SEQ ID NO: 2220350 - RNA, 19 nt, Artificial Sequence
  Description of Artificial Sequence: Synthetic oligonucleotide
aguuuguaguucagguuuu

SEQ ID NO: 2220351 - RNA, 19 nt, Artificial Sequence
  Description of Artificial Sequence: Synthetic oligonucleotide
gauguggaaugugcuaggu

SEQ ID NO: 2220352 - RNA, 19 nt, Artificial Sequence
  Description of Artificial Sequence: Synthetic oligonucleotide
ucgugcacagaggcagaug

SEQ ID NO: 2220353 - RNA, 19 nt, Artificial Sequence
  Description of Artificial Sequence: Synthetic oligonucleotide
ccccguauccaucuguuuc

SEQ ID NO: 2220354 - RNA, 19 nt, Artificial Sequence
  Description of Artificial Sequence: Synthetic oligonucleotide
cauuugguguggguaucuc

SEQ ID NO: 2220355 - RNA, 19 nt, Artificial Sequence
  Description of Artificial Sequence: Synthetic oligonucleotide
ggaaugugcuaggugguca

SEQ ID NO: 2220356 - RNA, 19 nt, Artificial Sequence
  Description of Artificial Sequence: Synthetic oligonucleotide
gugcugauucaugaaucuc

SEQ ID NO: 2220357 - RNA, 19 nt, Artificial Sequence
  Description of Artificial Sequence: Synthetic oligonucleotide
gaucugcccuaacuaugaa

SEQ ID NO: 2220358 - RNA, 19 nt, Artificial Sequence
  Description of Artificial Sequence: Synthetic oligonucleotide
cuauggcuuugaugaucug

SEQ ID NO: 2220359 - RNA, 19 nt, Artificial Sequence
  Description of Artificial Sequence: Synthetic oligonucleotide
ucugcggaagauggcuuua

SEQ ID NO: 2220360 - RNA, 19 nt, Artificial Sequence
  Description of Artificial Sequence: Synthetic oligonucleotide
agccgguuaaaggcauuug

SEQ ID NO: 2220361 - RNA, 19 nt, Artificial Sequence
  Description of Artificial Sequence: Synthetic oligonucleotide
cagcuccgacuguacuacg

SEQ ID NO: 2220362 - RNA, 19 nt, Artificial Sequence
  Description of Artificial Sequence: Synthetic oligonucleotide
aagcgccuagagccgguua

SEQ ID NO: 2220363 - RNA, 19 nt, Artificial Sequence
  Description of Artificial Sequence: Synthetic oligonucleotide
augggugcuuguucucuuu

SEQ ID NO: 2220364 - RNA, 19 nt, Artificial Sequence
  Description of Artificial Sequence: Synthetic oligonucleotide
gguucggggccacugggca

SEQ ID NO: 2220365 - RNA, 19 nt, Artificial Sequence
  Description of Artificial Sequence: Synthetic oligonucleotide
agcuccgacuguacuacga

SEQ ID NO: 2220366 - RNA, 19 nt, Artificial Sequence
  Description of Artificial Sequence: Synthetic oligonucleotide
gacuccccguauccaucug

SEQ ID NO: 2220367 - RNA, 19 nt, Artificial Sequence
  Description of Artificial Sequence: Synthetic oligonucleotide
guccccaaccuccgcgccc

SEQ ID NO: 2220368 - RNA, 19 nt, Artificial Sequence
  Description of Artificial Sequence: Synthetic oligonucleotide
cuccuccgcguccccaacc

SEQ ID NO: 2220369 - RNA, 19 nt, Artificial Sequence
  Description of Artificial Sequence: Synthetic oligonucleotide
cucugucagccacggguuc

SEQ ID NO: 2220370 - RNA, 19 nt, Artificial Sequence
  Description of Artificial Sequence: Synthetic oligonucleotide
gcuagguggucaaaaggga

SEQ ID NO: 2220371 - RNA, 19 nt, Artificial Sequence
  Description of Artificial Sequence: Synthetic oligonucleotide
gugggaugggaugcccugc

SEQ ID NO: 2220372 - RNA, 19 nt, Artificial Sequence
  Description of Artificial Sequence: Synthetic oligonucleotide
aucaagacucggggacuug

SEQ ID NO: 2220373 - RNA, 19 nt, Artificial Sequence
  Description of Artificial Sequence: Synthetic oligonucleotide
cacugugggaugggaugcc

SEQ ID NO: 2220374 - RNA, 19 nt, Artificial Sequence
  Description of Artificial Sequence: Synthetic oligonucleotide
cccuaacuaugaagguagg

SEQ ID NO: 2220375 - RNA, 19 nt, Artificial Sequence
  Description of Artificial Sequence: Synthetic oligonucleotide
guucggggccacugggcac

SEQ ID NO: 2220376 - RNA, 19 nt, Artificial Sequence
  Description of Artificial Sequence: Synthetic oligonucleotide
caccugucuucuguucuug

SEQ ID NO: 2220377 - RNA, 19 nt, Artificial Sequence
  Description of Artificial Sequence: Synthetic oligonucleotide
ccauacagagcaaaugggu

SEQ ID NO: 2220378 - RNA, 19 nt, Artificial Sequence
  Description of Artificial Sequence: Synthetic oligonucleotide
cugaguagcaccgcaugua

SEQ ID NO: 2220379 - RNA, 19 nt, Artificial Sequence
  Description of Artificial Sequence: Synthetic oligonucleotide
gucccgcacugugggaugg

SEQ ID NO: 2220380 - RNA, 19 nt, Artificial Sequence
  Description of Artificial Sequence: Synthetic oligonucleotide
acucugucagccacggguu

SEQ ID NO: 2220381 - RNA, 19 nt, Artificial Sequence
  Description of Artificial Sequence: Synthetic oligonucleotide
ggugugcaugggaagcgcc

SEQ ID NO: 2220382 - RNA, 19 nt, Artificial Sequence
  Description of Artificial Sequence: Synthetic oligonucleotide
uccccguauccaucuguuu

SEQ ID NO: 2220383 - RNA, 19 nt, Artificial Sequence
  Description of Artificial Sequence: Synthetic oligonucleotide
agugagcccgcugccucug

SEQ ID NO: 2220384 - RNA, 19 nt, Artificial Sequence
  Description of Artificial Sequence: Synthetic oligonucleotide
acucggggacuugucuuca

SEQ ID NO: 2220385 - RNA, 19 nt, Artificial Sequence
  Description of Artificial Sequence: Synthetic oligonucleotide
agcaccgcauguacucugu

SEQ ID NO: 2220386 - RNA, 19 nt, Artificial Sequence
  Description of Artificial Sequence: Synthetic oligonucleotide
ccgacuguacuacgaggag

SEQ ID NO: 2220387 - RNA, 19 nt, Artificial Sequence
  Description of Artificial Sequence: Synthetic oligonucleotide
acuguacuacgaggagggu

SEQ ID NO: 2220388 - RNA, 19 nt, Artificial Sequence
  Description of Artificial Sequence: Synthetic oligonucleotide
ccaucuguuucucucccca

SEQ ID NO: 2220389 - RNA, 19 nt, Artificial Sequence
  Description of Artificial Sequence: Synthetic oligonucleotide
gugucuucugacuccccgu

SEQ ID NO: 2220390 - RNA, 19 nt, Artificial Sequence
  Description of Artificial Sequence: Synthetic oligonucleotide
ggugcuuguucucuuuuau

SEQ ID NO: 2220391 - RNA, 19 nt, Artificial Sequence
  Description of Artificial Sequence: Synthetic oligonucleotide
uuggcucgaagugcugauu

SEQ ID NO: 2220392 - RNA, 19 nt, Artificial Sequence
  Description of Artificial Sequence: Synthetic oligonucleotide
ucccgcacugugggauggg

SEQ ID NO: 2220393 - RNA, 19 nt, Artificial Sequence
  Description of Artificial Sequence: Synthetic oligonucleotide
augcccuugcugaguagca

SEQ ID NO: 2220394 - RNA, 19 nt, Artificial Sequence
  Description of Artificial Sequence: Synthetic oligonucleotide
ggugaucaaccaucaugaa

SEQ ID NO: 2220395 - RNA, 19 nt, Artificial Sequence
  Description of Artificial Sequence: Synthetic oligonucleotide
gggaagcgccuagagccgg

SEQ ID NO: 2220396 - RNA, 19 nt, Artificial Sequence
  Description of Artificial Sequence: Synthetic oligonucleotide
ggggacuugucuucauaaa

SEQ ID NO: 2220397 - RNA, 19 nt, Artificial Sequence
  Description of Artificial Sequence: Synthetic oligonucleotide
cucuuuugccccaguuugu

SEQ ID NO: 2220398 - RNA, 19 nt, Artificial Sequence
  Description of Artificial Sequence: Synthetic oligonucleotide
ugucagccacggguucucu

SEQ ID NO: 2220399 - RNA, 19 nt, Artificial Sequence
  Description of Artificial Sequence: Synthetic oligonucleotide
gguagcacugugucuugcu

SEQ ID NO: 2220400 - RNA, 19 nt, Artificial Sequence
  Description of Artificial Sequence: Synthetic oligonucleotide
ccgcauguacucugucagc

SEQ ID NO: 2220401 - RNA, 19 nt, Artificial Sequence
  Description of Artificial Sequence: Synthetic oligonucleotide
guacuacgaggagggugug

SEQ ID NO: 2220402 - RNA, 19 nt, Artificial Sequence
  Description of Artificial Sequence: Synthetic oligonucleotide
gaguagcaccgcauguacu

SEQ ID NO: 2220403 - RNA, 19 nt, Artificial Sequence
  Description of Artificial Sequence: Synthetic oligonucleotide
gguggucaaaagggacagc

SEQ ID NO: 2220404 - RNA, 19 nt, Artificial Sequence
  Description of Artificial Sequence: Synthetic oligonucleotide
gcugaguagcaccgcaugu

SEQ ID NO: 2220405 - RNA, 19 nt, Artificial Sequence
  Description of Artificial Sequence: Synthetic oligonucleotide
gagugagcccgcugccucu

SEQ ID NO: 2220406 - RNA, 19 nt, Artificial Sequence
  Description of Artificial Sequence: Synthetic oligonucleotide
cuuggcucgaagugcugau

SEQ ID NO: 2220407 - RNA, 19 nt, Artificial Sequence
  Description of Artificial Sequence: Synthetic oligonucleotide
gggugugcaugggaagcgc

SEQ ID NO: 2220408 - RNA, 19 nt, Artificial Sequence
  Description of Artificial Sequence: Synthetic oligonucleotide
gagucccgcacugugggau

SEQ ID NO: 2220409 - RNA, 19 nt, Artificial Sequence
  Description of Artificial Sequence: Synthetic oligonucleotide
ccgguuaaaggcauuuggu

SEQ ID NO: 2220410 - RNA, 19 nt, Artificial Sequence
  Description of Artificial Sequence: Synthetic oligonucleotide
cucuggcaaauaaggcacu

SEQ ID NO: 2220411 - RNA, 19 nt, Artificial Sequence
  Description of Artificial Sequence: Synthetic oligonucleotide
cgagguucggggccacugg

SEQ ID NO: 2220412 - RNA, 19 nt, Artificial Sequence
  Description of Artificial Sequence: Synthetic oligonucleotide
ggcauuugguguggguauc

SEQ ID NO: 2220413 - RNA, 19 nt, Artificial Sequence
  Description of Artificial Sequence: Synthetic oligonucleotide
gccacggguucucugcgga

SEQ ID NO: 2220414 - RNA, 19 nt, Artificial Sequence
  Description of Artificial Sequence: Synthetic oligonucleotide
guagcaccgcauguacucu

SEQ ID NO: 2220415 - RNA, 19 nt, Artificial Sequence
  Description of Artificial Sequence: Synthetic oligonucleotide
gagcaugucccagcaucua

SEQ ID NO: 2220416 - RNA, 19 nt, Artificial Sequence
  Description of Artificial Sequence: Synthetic oligonucleotide
guaggugaucaaccaucau

SEQ ID NO: 2220417 - RNA, 19 nt, Artificial Sequence
  Description of Artificial Sequence: Synthetic oligonucleotide
ugucgagguucggggccac

SEQ ID NO: 2220418 - RNA, 19 nt, Artificial Sequence
  Description of Artificial Sequence: Synthetic oligonucleotide
gugugcaugggaagcgccu

SEQ ID NO: 2220419 - RNA, 19 nt, Artificial Sequence
  Description of Artificial Sequence: Synthetic oligonucleotide
ccuccgguucuuuuccaca

SEQ ID NO: 2220420 - RNA, 19 nt, Artificial Sequence
  Description of Artificial Sequence: Synthetic oligonucleotide
gagccgguuaaaggcauuu

SEQ ID NO: 2220421 - RNA, 19 nt, Artificial Sequence
  Description of Artificial Sequence: Synthetic oligonucleotide
cgcguccccaaccuccgcg

SEQ ID NO: 2220422 - RNA, 19 nt, Artificial Sequence
  Description of Artificial Sequence: Synthetic oligonucleotide
aggcagaugcacagacauu

SEQ ID NO: 2220423 - RNA, 19 nt, Artificial Sequence
  Description of Artificial Sequence: Synthetic oligonucleotide
gucuucugacuccccguau

SEQ ID NO: 2220424 - RNA, 19 nt, Artificial Sequence
  Description of Artificial Sequence: Synthetic oligonucleotide
cuucuguucuuggcucgaa

SEQ ID NO: 2220425 - RNA, 19 nt, Artificial Sequence
  Description of Artificial Sequence: Synthetic oligonucleotide
cccguauccaucuguuucu

SEQ ID NO: 2220426 - RNA, 19 nt, Artificial Sequence
  Description of Artificial Sequence: Synthetic oligonucleotide
cucugcggaagauggcuuu

SEQ ID NO: 2220427 - RNA, 19 nt, Artificial Sequence
  Description of Artificial Sequence: Synthetic oligonucleotide
gggaugggaugcccugcca

SEQ ID NO: 2220428 - RNA, 19 nt, Artificial Sequence
  Description of Artificial Sequence: Synthetic oligonucleotide
gccagauguggaaugugcu

SEQ ID NO: 2220429 - RNA, 19 nt, Artificial Sequence
  Description of Artificial Sequence: Synthetic oligonucleotide
agagccgguuaaaggcauu

SEQ ID NO: 2220430 - RNA, 19 nt, Artificial Sequence
  Description of Artificial Sequence: Synthetic oligonucleotide
cgagugagcccgcugccuc

SEQ ID NO: 2220431 - RNA, 19 nt, Artificial Sequence
  Description of Artificial Sequence: Synthetic oligonucleotide
gguugcuuucuuacuuccu

SEQ ID NO: 2220432 - RNA, 19 nt, Artificial Sequence
  Description of Artificial Sequence: Synthetic oligonucleotide
cggggacuugucuucauaa

SEQ ID NO: 2220433 - RNA, 19 nt, Artificial Sequence
  Description of Artificial Sequence: Synthetic oligonucleotide
ccuaacuaugaagguaggu

SEQ ID NO: 2220434 - RNA, 19 nt, Artificial Sequence
  Description of Artificial Sequence: Synthetic oligonucleotide
ccaguuuguaguucagguu

SEQ ID NO: 2220435 - RNA, 19 nt, Artificial Sequence
  Description of Artificial Sequence: Synthetic oligonucleotide
gcaccgcauguacucuguc

SEQ ID NO: 2220436 - RNA, 19 nt, Artificial Sequence
  Description of Artificial Sequence: Synthetic oligonucleotide
gccccaguuuguaguucag

SEQ ID NO: 2220437 - RNA, 19 nt, Artificial Sequence
  Description of Artificial Sequence: Synthetic oligonucleotide
ggguaucuccaaagauuaa

SEQ ID NO: 2220438 - RNA, 19 nt, Artificial Sequence
  Description of Artificial Sequence: Synthetic oligonucleotide
cuaggauguugucgagguu

SEQ ID NO: 2220439 - RNA, 19 nt, Artificial Sequence
  Description of Artificial Sequence: Synthetic oligonucleotide
gcauuugguguggguaucu

SEQ ID NO: 2220440 - RNA, 19 nt, Artificial Sequence
  Description of Artificial Sequence: Synthetic oligonucleotide
ccguauccaucuguuucuc

SEQ ID NO: 2220441 - RNA, 19 nt, Artificial Sequence
  Description of Artificial Sequence: Synthetic oligonucleotide
cgccuagagccgguuaaag

SEQ ID NO: 2220442 - RNA, 19 nt, Artificial Sequence
  Description of Artificial Sequence: Synthetic oligonucleotide
gcaggaccagucuguuucu

SEQ ID NO: 2220443 - RNA, 19 nt, Artificial Sequence
  Description of Artificial Sequence: Synthetic oligonucleotide
ccagccauacagagcaaau

SEQ ID NO: 2220444 - RNA, 19 nt, Artificial Sequence
  Description of Artificial Sequence: Synthetic oligonucleotide
cuacgaggagggugugcau

SEQ ID NO: 2220445 - RNA, 19 nt, Artificial Sequence
  Description of Artificial Sequence: Synthetic oligonucleotide
gcagaugcacagacauugu

SEQ ID NO: 2220446 - RNA, 19 nt, Artificial Sequence
  Description of Artificial Sequence: Synthetic oligonucleotide
gaagcgccuagagccgguu

SEQ ID NO: 2220447 - RNA, 19 nt, Artificial Sequence
  Description of Artificial Sequence: Synthetic oligonucleotide
cccagccauacagagcaaa

SEQ ID NO: 2220448 - RNA, 19 nt, Artificial Sequence
  Description of Artificial Sequence: Synthetic oligonucleotide
cucgugcacagaggcagau

SEQ ID NO: 2220449 - RNA, 19 nt, Artificial Sequence
  Description of Artificial Sequence: Synthetic oligonucleotide
cucggggacuugucuucau

SEQ ID NO: 2220450 - RNA, 19 nt, Artificial Sequence
  Description of Artificial Sequence: Synthetic oligonucleotide
cagucucuuuugccccagu

SEQ ID NO: 2220451 - RNA, 19 nt, Artificial Sequence
  Description of Artificial Sequence: Synthetic oligonucleotide
gcgccuagagccgguuaaa

SEQ ID NO: 2220452 - RNA, 19 nt, Artificial Sequence
  Description of Artificial Sequence: Synthetic oligonucleotide
gggcuucugguugcuuucu

SEQ ID NO: 2220453 - RNA, 19 nt, Artificial Sequence
  Description of Artificial Sequence: Synthetic oligonucleotide
cguauccaucuguuucucu

SEQ ID NO: 2220454 - RNA, 19 nt, Artificial Sequence
  Description of Artificial Sequence: Synthetic oligonucleotide
ggaagcgccuagagccggu

SEQ ID NO: 2220455 - RNA, 19 nt, Artificial Sequence
  Description of Artificial Sequence: Synthetic oligonucleotide
cccgcacugugggauggga

SEQ ID NO: 2220456 - RNA, 19 nt, Artificial Sequence
  Description of Artificial Sequence: Synthetic oligonucleotide
caggaccagucuguuucuu

SEQ ID NO: 2220457 - RNA, 19 nt, Artificial Sequence
  Description of Artificial Sequence: Synthetic oligonucleotide
gucgagguucggggccacu

SEQ ID NO: 2220458 - RNA, 19 nt, Artificial Sequence
  Description of Artificial Sequence: Synthetic oligonucleotide
gggcagccaguuuccuuuu

SEQ ID NO: 2220459 - RNA, 19 nt, Artificial Sequence
  Description of Artificial Sequence: Synthetic oligonucleotide
ccccaaccuccgcgccccg

SEQ ID NO: 2220460 - RNA, 19 nt, Artificial Sequence
  Description of Artificial Sequence: Synthetic oligonucleotide
ccgcacugugggaugggau

SEQ ID NO: 2220461 - RNA, 19 nt, Artificial Sequence
  Description of Artificial Sequence: Synthetic oligonucleotide
ccgagugagcccgcugccu

SEQ ID NO: 2220462 - RNA, 19 nt, Artificial Sequence
  Description of Artificial Sequence: Synthetic oligonucleotide
uugauugugcuguauaugg

SEQ ID NO: 2220463 - RNA, 19 nt, Artificial Sequence
  Description of Artificial Sequence: Synthetic oligonucleotide
ugcuguauauggcucaggg

SEQ ID NO: 2220464 - RNA, 19 nt, Artificial Sequence
  Description of Artificial Sequence: Synthetic oligonucleotide
gacaaaguagcuucuccgg

SEQ ID NO: 2220465 - RNA, 19 nt, Artificial Sequence
  Description of Artificial Sequence: Synthetic oligonucleotide
gcugcuauaagcugcaugg

SEQ ID NO: 2220466 - RNA, 19 nt, Artificial Sequence
  Description of Artificial Sequence: Synthetic oligonucleotide
aacugcgugacuccagcac

SEQ ID NO: 2220467 - RNA, 19 nt, Artificial Sequence
  Description of Artificial Sequence: Synthetic oligonucleotide
aaacaguguccuuggugcc

SEQ ID NO: 2220468 - RNA, 19 nt, Artificial Sequence
  Description of Artificial Sequence: Synthetic oligonucleotide
ugcuauaagcugcauggag

SEQ ID NO: 2220469 - RNA, 19 nt, Artificial Sequence
  Description of Artificial Sequence: Synthetic oligonucleotide
  modified_base (7)..(7): a, c, u, g, unknown or other
uuggucnccacgaccacag

SEQ ID NO: 2220470 - RNA, 19 nt, Artificial Sequence
  Description of Artificial Sequence: Synthetic oligonucleotide
agugcagcaaagcuuguag

SEQ ID NO: 2220471 - RNA, 19 nt, Artificial Sequence
  Description of Artificial Sequence: Synthetic oligonucleotide
aacgcaggugcccaccugg

SEQ ID NO: 2220472 - RNA, 19 nt, Artificial Sequence
  Description of Artificial Sequence: Synthetic oligonucleotide
cuguauauggcucagggca

SEQ ID NO: 2220473 - RNA, 19 nt, Artificial Sequence
  Description of Artificial Sequence: Synthetic oligonucleotide
auaagcugcauggagcugg

SEQ ID NO: 2220474 - RNA, 19 nt, Artificial Sequence
  Description of Artificial Sequence: Synthetic oligonucleotide
aaaguagcuucuccgguca

SEQ ID NO: 2220475 - RNA, 19 nt, Artificial Sequence
  Description of Artificial Sequence: Synthetic oligonucleotide
ucaggcugcuauaagcugc

SEQ ID NO: 2220476 - RNA, 19 nt, Artificial Sequence
  Description of Artificial Sequence: Synthetic oligonucleotide
acuugcagaggacacgagg

SEQ ID NO: 2220477 - RNA, 19 nt, Artificial Sequence
  Description of Artificial Sequence: Synthetic oligonucleotide
uguccaggccucuuggugg

SEQ ID NO: 2220478 - RNA, 19 nt, Artificial Sequence
  Description of Artificial Sequence: Synthetic oligonucleotide
gucgacaccacuugcagag

SEQ ID NO: 2220479 - RNA, 19 nt, Artificial Sequence
  Description of Artificial Sequence: Synthetic oligonucleotide
uguucaaaagcccgcuggc

SEQ ID NO: 2220480 - RNA, 19 nt, Artificial Sequence
  Description of Artificial Sequence: Synthetic oligonucleotide
ugcagcaaagcuuguagca

SEQ ID NO: 2220481 - RNA, 19 nt, Artificial Sequence
  Description of Artificial Sequence: Synthetic oligonucleotide
acaaacaguguccuuggug

SEQ ID NO: 2220482 - RNA, 19 nt, Artificial Sequence
  Description of Artificial Sequence: Synthetic oligonucleotide
aggcggacaaaguagcuuc

SEQ ID NO: 2220483 - RNA, 19 nt, Artificial Sequence
  Description of Artificial Sequence: Synthetic oligonucleotide
aaacacgcaccuuuugggu

SEQ ID NO: 2220484 - RNA, 19 nt, Artificial Sequence
  Description of Artificial Sequence: Synthetic oligonucleotide
ucagggcauguucaaaagc

SEQ ID NO: 2220485 - RNA, 19 nt, Artificial Sequence
  Description of Artificial Sequence: Synthetic oligonucleotide
caacucaucaugaagugca

SEQ ID NO: 2220486 - RNA, 19 nt, Artificial Sequence
  Description of Artificial Sequence: Synthetic oligonucleotide
cuuggaauugauugugcug

SEQ ID NO: 2220487 - RNA, 19 nt, Artificial Sequence
  Description of Artificial Sequence: Synthetic oligonucleotide
cugucaggcugcuauaagc

SEQ ID NO: 2220488 - RNA, 19 nt, Artificial Sequence
  Description of Artificial Sequence: Synthetic oligonucleotide
ugagccauggaaacacgca

SEQ ID NO: 2220489 - RNA, 19 nt, Artificial Sequence
  Description of Artificial Sequence: Synthetic oligonucleotide
agcacaaacaguguccuug

SEQ ID NO: 2220490 - RNA, 19 nt, Artificial Sequence
  Description of Artificial Sequence: Synthetic oligonucleotide
ggacaaaguagcuucuccg

SEQ ID NO: 2220491 - RNA, 19 nt, Artificial Sequence
  Description of Artificial Sequence: Synthetic oligonucleotide
uccaacucaucaugaagug

SEQ ID NO: 2220492 - RNA, 19 nt, Artificial Sequence
  Description of Artificial Sequence: Synthetic oligonucleotide
uucuccggucagcagagag

SEQ ID NO: 2220493 - RNA, 19 nt, Artificial Sequence
  Description of Artificial Sequence: Synthetic oligonucleotide
acacgcaccuuuuggguac

SEQ ID NO: 2220494 - RNA, 19 nt, Artificial Sequence
  Description of Artificial Sequence: Synthetic oligonucleotide
ucuguccugagccauggaa

SEQ ID NO: 2220495 - RNA, 19 nt, Artificial Sequence
  Description of Artificial Sequence: Synthetic oligonucleotide
gaagcugggugccagguca

SEQ ID NO: 2220496 - RNA, 19 nt, Artificial Sequence
  Description of Artificial Sequence: Synthetic oligonucleotide
uuugcagccccugugaguc

SEQ ID NO: 2220497 - RNA, 19 nt, Artificial Sequence
  Description of Artificial Sequence: Synthetic oligonucleotide
  modified_base (19)..(19): a, c, u, g, unknown or other
gucaucguguccuuggucn

SEQ ID NO: 2220498 - RNA, 19 nt, Artificial Sequence
  Description of Artificial Sequence: Synthetic oligonucleotide
aaagcccgcuggcggaagc

SEQ ID NO: 2220499 - RNA, 19 nt, Artificial Sequence
  Description of Artificial Sequence: Synthetic oligonucleotide
cuggaaggccuccugaagc

SEQ ID NO: 2220500 - RNA, 19 nt, Artificial Sequence
  Description of Artificial Sequence: Synthetic oligonucleotide
ucaagcccuggucccaacg

SEQ ID NO: 2220501 - RNA, 19 nt, Artificial Sequence
  Description of Artificial Sequence: Synthetic oligonucleotide
uguuugcagccccugugag

SEQ ID NO: 2220502 - RNA, 19 nt, Artificial Sequence
  Description of Artificial Sequence: Synthetic oligonucleotide
uauggcucagggcauguuc

SEQ ID NO: 2220503 - RNA, 19 nt, Artificial Sequence
  Description of Artificial Sequence: Synthetic oligonucleotide
cacgaggccauacagcuug

SEQ ID NO: 2220504 - RNA, 19 nt, Artificial Sequence
  Description of Artificial Sequence: Synthetic oligonucleotide
auugauugugcuguauaug

SEQ ID NO: 2220505 - RNA, 19 nt, Artificial Sequence
  Description of Artificial Sequence: Synthetic oligonucleotide
uguccugagccauggaaac

SEQ ID NO: 2220506 - RNA, 19 nt, Artificial Sequence
  Description of Artificial Sequence: Synthetic oligonucleotide
acaaaguagcuucuccggu

SEQ ID NO: 2220507 - RNA, 19 nt, Artificial Sequence
  Description of Artificial Sequence: Synthetic oligonucleotide
aggccauacagcuugcaga

SEQ ID NO: 2220508 - RNA, 19 nt, Artificial Sequence
  Description of Artificial Sequence: Synthetic oligonucleotide
ugcacagucuguccugagc

SEQ ID NO: 2220509 - RNA, 19 nt, Artificial Sequence
  Description of Artificial Sequence: Synthetic oligonucleotide
ugcaggucgacaccacuug

SEQ ID NO: 2220510 - RNA, 19 nt, Artificial Sequence
  Description of Artificial Sequence: Synthetic oligonucleotide
gacuuggugguguccaggc

SEQ ID NO: 2220511 - RNA, 19 nt, Artificial Sequence
  Description of Artificial Sequence: Synthetic oligonucleotide
gaggccauacagcuugcag

SEQ ID NO: 2220512 - RNA, 19 nt, Artificial Sequence
  Description of Artificial Sequence: Synthetic oligonucleotide
gauugugcuguauauggcu

SEQ ID NO: 2220513 - RNA, 19 nt, Artificial Sequence
  Description of Artificial Sequence: Synthetic oligonucleotide
agcaaagcuuguagcagcc

SEQ ID NO: 2220514 - RNA, 19 nt, Artificial Sequence
  Description of Artificial Sequence: Synthetic oligonucleotide
cacuguggagcucaagccc

SEQ ID NO: 2220515 - RNA, 19 nt, Artificial Sequence
  Description of Artificial Sequence: Synthetic oligonucleotide
cagcaaagcuuguagcagc

SEQ ID NO: 2220516 - RNA, 19 nt, Artificial Sequence
  Description of Artificial Sequence: Synthetic oligonucleotide
uguauauggcucagggcau

SEQ ID NO: 2220517 - RNA, 19 nt, Artificial Sequence
  Description of Artificial Sequence: Synthetic oligonucleotide
cagcugaccacacuccucc

SEQ ID NO: 2220518 - RNA, 19 nt, Artificial Sequence
  Description of Artificial Sequence: Synthetic oligonucleotide
uugcagaggacacgaggcc

SEQ ID NO: 2220519 - RNA, 19 nt, Artificial Sequence
  Description of Artificial Sequence: Synthetic oligonucleotide
ucaaaagcccgcuggcgga

SEQ ID NO: 2220520 - RNA, 19 nt, Artificial Sequence
  Description of Artificial Sequence: Synthetic oligonucleotide
ugguguccaggccucuugg

SEQ ID NO: 2220521 - RNA, 19 nt, Artificial Sequence
  Description of Artificial Sequence: Synthetic oligonucleotide
caaaguagcuucuccgguc

SEQ ID NO: 2220522 - RNA, 19 nt, Artificial Sequence
  Description of Artificial Sequence: Synthetic oligonucleotide
gacacgaggccauacagcu

SEQ ID NO: 2220523 - RNA, 19 nt, Artificial Sequence
  Description of Artificial Sequence: Synthetic oligonucleotide
aagcuuguagcagccagcu

SEQ ID NO: 2220524 - RNA, 19 nt, Artificial Sequence
  Description of Artificial Sequence: Synthetic oligonucleotide
uccuguggcuaccguaucc

SEQ ID NO: 2220525 - RNA, 19 nt, Artificial Sequence
  Description of Artificial Sequence: Synthetic oligonucleotide
gucaccuaggcggacaaag

SEQ ID NO: 2220526 - RNA, 19 nt, Artificial Sequence
  Description of Artificial Sequence: Synthetic oligonucleotide
gcuuguagcagccagcuga

SEQ ID NO: 2220527 - RNA, 19 nt, Artificial Sequence
  Description of Artificial Sequence: Synthetic oligonucleotide
cugagccauggaaacacgc

SEQ ID NO: 2220528 - RNA, 19 nt, Artificial Sequence
  Description of Artificial Sequence: Synthetic oligonucleotide
aacacgcaccuuuugggua

SEQ ID NO: 2220529 - RNA, 19 nt, Artificial Sequence
  Description of Artificial Sequence: Synthetic oligonucleotide
aggucgacaccacuugcag

SEQ ID NO: 2220530 - RNA, 19 nt, Artificial Sequence
  Description of Artificial Sequence: Synthetic oligonucleotide
cauguuugcagccccugug

SEQ ID NO: 2220531 - RNA, 19 nt, Artificial Sequence
  Description of Artificial Sequence: Synthetic oligonucleotide
acugcgugacuccagcaca

SEQ ID NO: 2220532 - RNA, 19 nt, Artificial Sequence
  Description of Artificial Sequence: Synthetic oligonucleotide
ugaagggucccaccagcca

SEQ ID NO: 2220533 - RNA, 19 nt, Artificial Sequence
  Description of Artificial Sequence: Synthetic oligonucleotide
gccacuaggcaucacagug

SEQ ID NO: 2220534 - RNA, 19 nt, Artificial Sequence
  Description of Artificial Sequence: Synthetic oligonucleotide
gagcuggcaggcuagcgug

SEQ ID NO: 2220535 - RNA, 19 nt, Artificial Sequence
  Description of Artificial Sequence: Synthetic oligonucleotide
guucaaaagcccgcuggcg

SEQ ID NO: 2220536 - RNA, 19 nt, Artificial Sequence
  Description of Artificial Sequence: Synthetic oligonucleotide
aucaugaagugcagcaaag

SEQ ID NO: 2220537 - RNA, 19 nt, Artificial Sequence
  Description of Artificial Sequence: Synthetic oligonucleotide
cuuguagcagccagcugac

SEQ ID NO: 2220538 - RNA, 19 nt, Artificial Sequence
  Description of Artificial Sequence: Synthetic oligonucleotide
gcuauaagcugcauggagc

SEQ ID NO: 2220539 - RNA, 19 nt, Artificial Sequence
  Description of Artificial Sequence: Synthetic oligonucleotide
uccccuagcccuuccaacu

SEQ ID NO: 2220540 - RNA, 19 nt, Artificial Sequence
  Description of Artificial Sequence: Synthetic oligonucleotide
ugugcuguauauggcucag

SEQ ID NO: 2220541 - RNA, 19 nt, Artificial Sequence
  Description of Artificial Sequence: Synthetic oligonucleotide
gaguccuguggucaucgug

SEQ ID NO: 2220542 - RNA, 19 nt, Artificial Sequence
  Description of Artificial Sequence: Synthetic oligonucleotide
ucaccuaggcggacaaagu

SEQ ID NO: 2220543 - RNA, 19 nt, Artificial Sequence
  Description of Artificial Sequence: Synthetic oligonucleotide
aguccuguggucaucgugu

SEQ ID NO: 2220544 - RNA, 19 nt, Artificial Sequence
  Description of Artificial Sequence: Synthetic oligonucleotide
cauggagcuggcaggcuag

SEQ ID NO: 2220545 - RNA, 19 nt, Artificial Sequence
  Description of Artificial Sequence: Synthetic oligonucleotide
gcacagucuguccugagcc

SEQ ID NO: 2220546 - RNA, 19 nt, Artificial Sequence
  Description of Artificial Sequence: Synthetic oligonucleotide
aaguagcuucuccggucag

SEQ ID NO: 2220547 - RNA, 19 nt, Artificial Sequence
  Description of Artificial Sequence: Synthetic oligonucleotide
accacaccggcacugcucu

SEQ ID NO: 2220548 - RNA, 19 nt, Artificial Sequence
  Description of Artificial Sequence: Synthetic oligonucleotide
  modified_base (3)..(3): a, c, u, g, unknown or other
ucnccacgaccacagacuu

SEQ ID NO: 2220549 - RNA, 19 nt, Artificial Sequence
  Description of Artificial Sequence: Synthetic oligonucleotide
ugggcuuguuccucggcug

SEQ ID NO: 2220550 - RNA, 19 nt, Artificial Sequence
  Description of Artificial Sequence: Synthetic oligonucleotide
accacuugcagaggacacg

SEQ ID NO: 2220551 - RNA, 19 nt, Artificial Sequence
  Description of Artificial Sequence: Synthetic oligonucleotide
cuauaagcugcauggagcu

SEQ ID NO: 2220552 - RNA, 19 nt, Artificial Sequence
  Description of Artificial Sequence: Synthetic oligonucleotide
cagaccugggaacugcgug

SEQ ID NO: 2220553 - RNA, 19 nt, Artificial Sequence
  Description of Artificial Sequence: Synthetic oligonucleotide
gugaguccuguggucaucg

SEQ ID NO: 2220554 - RNA, 19 nt, Artificial Sequence
  Description of Artificial Sequence: Synthetic oligonucleotide
agcgugcacagucuguccu

SEQ ID NO: 2220555 - RNA, 19 nt, Artificial Sequence
  Description of Artificial Sequence: Synthetic oligonucleotide
caccagccaggcaaguggg

SEQ ID NO: 2220556 - RNA, 19 nt, Artificial Sequence
  Description of Artificial Sequence: Synthetic oligonucleotide
gcugucaugggcuggaaga

SEQ ID NO: 2220557 - RNA, 19 nt, Artificial Sequence
  Description of Artificial Sequence: Synthetic oligonucleotide
uuggccauguuugcagccc

SEQ ID NO: 2220558 - RNA, 19 nt, Artificial Sequence
  Description of Artificial Sequence: Synthetic oligonucleotide
gcacaaacaguguccuugg

SEQ ID NO: 2220559 - RNA, 19 nt, Artificial Sequence
  Description of Artificial Sequence: Synthetic oligonucleotide
uccgaggcugccagcuggg

SEQ ID NO: 2220560 - RNA, 19 nt, Artificial Sequence
  Description of Artificial Sequence: Synthetic oligonucleotide
caugaagugcagcaaagcu

SEQ ID NO: 2220561 - RNA, 19 nt, Artificial Sequence
  Description of Artificial Sequence: Synthetic oligonucleotide
uggccauguuugcagcccc

SEQ ID NO: 2220562 - RNA, 19 nt, Artificial Sequence
  Description of Artificial Sequence: Synthetic oligonucleotide
auacagcuugcagaggcug

SEQ ID NO: 2220563 - RNA, 19 nt, Artificial Sequence
  Description of Artificial Sequence: Synthetic oligonucleotide
acccugccaugccuggacc

SEQ ID NO: 2220564 - RNA, 19 nt, Artificial Sequence
  Description of Artificial Sequence: Synthetic oligonucleotide
  modified_base (18)..(18): a, c, u, g, unknown or other
ucaucguguccuuggucnc

SEQ ID NO: 2220565 - RNA, 19 nt, Artificial Sequence
  Description of Artificial Sequence: Synthetic oligonucleotide
uccagacccugccaugccu

SEQ ID NO: 2220566 - RNA, 19 nt, Artificial Sequence
  Description of Artificial Sequence: Synthetic oligonucleotide
augaagugcagcaaagcuu

SEQ ID NO: 2220567 - RNA, 19 nt, Artificial Sequence
  Description of Artificial Sequence: Synthetic oligonucleotide
ugucugucaccuggaaggc

SEQ ID NO: 2220568 - RNA, 19 nt, Artificial Sequence
  Description of Artificial Sequence: Synthetic oligonucleotide
ucagaccugggaacugcgu

SEQ ID NO: 2220569 - RNA, 19 nt, Artificial Sequence
  Description of Artificial Sequence: Synthetic oligonucleotide
aggccugucugcacugucc

SEQ ID NO: 2220570 - RNA, 19 nt, Artificial Sequence
  Description of Artificial Sequence: Synthetic oligonucleotide
gcagagagcacccggggcc

SEQ ID NO: 2220571 - RNA, 19 nt, Artificial Sequence
  Description of Artificial Sequence: Synthetic oligonucleotide
ccuaggcggacaaaguagc

SEQ ID NO: 2220572 - RNA, 19 nt, Artificial Sequence
  Description of Artificial Sequence: Synthetic oligonucleotide
agacuuggugguguccagg

SEQ ID NO: 2220573 - RNA, 19 nt, Artificial Sequence
  Description of Artificial Sequence: Synthetic oligonucleotide
ccuacagcuggccacuagg

SEQ ID NO: 2220574 - RNA, 19 nt, Artificial Sequence
  Description of Artificial Sequence: Synthetic oligonucleotide
ugucaugggcuggaagaug

SEQ ID NO: 2220575 - RNA, 19 nt, Artificial Sequence
  Description of Artificial Sequence: Synthetic oligonucleotide
ggaacugcgugacuccagc

SEQ ID NO: 2220576 - RNA, 19 nt, Artificial Sequence
  Description of Artificial Sequence: Synthetic oligonucleotide
aagcccuagcuuggaauug

SEQ ID NO: 2220577 - RNA, 19 nt, Artificial Sequence
  Description of Artificial Sequence: Synthetic oligonucleotide
uauaagcugcauggagcug

SEQ ID NO: 2220578 - RNA, 19 nt, Artificial Sequence
  Description of Artificial Sequence: Synthetic oligonucleotide
agcccucagaugccuacag

SEQ ID NO: 2220579 - RNA, 19 nt, Artificial Sequence
  Description of Artificial Sequence: Synthetic oligonucleotide
ccuuuuggguaccagcagc

SEQ ID NO: 2220580 - RNA, 19 nt, Artificial Sequence
  Description of Artificial Sequence: Synthetic oligonucleotide
cuagcgugcacagucuguc

SEQ ID NO: 2220581 - RNA, 19 nt, Artificial Sequence
  Description of Artificial Sequence: Synthetic oligonucleotide
cugcaacucuggcaggccc

SEQ ID NO: 2220582 - RNA, 19 nt, Artificial Sequence
  Description of Artificial Sequence: Synthetic oligonucleotide
gggcauguucaaaagcccg

SEQ ID NO: 2220583 - RNA, 19 nt, Artificial Sequence
  Description of Artificial Sequence: Synthetic oligonucleotide
uguggagcucaagcccugg

SEQ ID NO: 2220584 - RNA, 19 nt, Artificial Sequence
  Description of Artificial Sequence: Synthetic oligonucleotide
agaugccuacagcuggcca

SEQ ID NO: 2220585 - RNA, 19 nt, Artificial Sequence
  Description of Artificial Sequence: Synthetic oligonucleotide
cuagcuuggaauugauugu

SEQ ID NO: 2220586 - RNA, 19 nt, Artificial Sequence
  Description of Artificial Sequence: Synthetic oligonucleotide
uguccccuagcccuuccaa

SEQ ID NO: 2220587 - RNA, 19 nt, Artificial Sequence
  Description of Artificial Sequence: Synthetic oligonucleotide
  modified_base (5)..(5): a, c, u, g, unknown or other
ggucnccacgaccacagac

SEQ ID NO: 2220588 - RNA, 19 nt, Artificial Sequence
  Description of Artificial Sequence: Synthetic oligonucleotide
caccacuugcagaggacac

SEQ ID NO: 2220589 - RNA, 19 nt, Artificial Sequence
  Description of Artificial Sequence: Synthetic oligonucleotide
ggugccaggucaccuaggc

SEQ ID NO: 2220590 - RNA, 19 nt, Artificial Sequence
  Description of Artificial Sequence: Synthetic oligonucleotide
uauauggcucagggcaugu

SEQ ID NO: 2220591 - RNA, 19 nt, Artificial Sequence
  Description of Artificial Sequence: Synthetic oligonucleotide
ugaccacacuccuccucag

SEQ ID NO: 2220592 - RNA, 19 nt, Artificial Sequence
  Description of Artificial Sequence: Synthetic oligonucleotide
agaggcugugccgugccag

SEQ ID NO: 2220593 - RNA, 19 nt, Artificial Sequence
  Description of Artificial Sequence: Synthetic oligonucleotide
uuuuggguaccagcagccu

SEQ ID NO: 2220594 - RNA, 19 nt, Artificial Sequence
  Description of Artificial Sequence: Synthetic oligonucleotide
gcaccuuuuggguaccagc

SEQ ID NO: 2220595 - RNA, 19 nt, Artificial Sequence
  Description of Artificial Sequence: Synthetic oligonucleotide
cugaccacacuccuccuca

SEQ ID NO: 2220596 - RNA, 19 nt, Artificial Sequence
  Description of Artificial Sequence: Synthetic oligonucleotide
uagcgugcacagucugucc

SEQ ID NO: 2220597 - RNA, 19 nt, Artificial Sequence
  Description of Artificial Sequence: Synthetic oligonucleotide
cuguccugagccauggaaa

SEQ ID NO: 2220598 - RNA, 19 nt, Artificial Sequence
  Description of Artificial Sequence: Synthetic oligonucleotide
gacccugccaugccuggac

SEQ ID NO: 2220599 - RNA, 19 nt, Artificial Sequence
  Description of Artificial Sequence: Synthetic oligonucleotide
cugugaguccuguggcuac

SEQ ID NO: 2220600 - RNA, 19 nt, Artificial Sequence
  Description of Artificial Sequence: Synthetic oligonucleotide
uggagcuggcaggcuagcg

SEQ ID NO: 2220601 - RNA, 19 nt, Artificial Sequence
  Description of Artificial Sequence: Synthetic oligonucleotide
uuguuccucggcugucaug

SEQ ID NO: 2220602 - RNA, 19 nt, Artificial Sequence
  Description of Artificial Sequence: Synthetic oligonucleotide
aaaagcccgcuggcggaag

SEQ ID NO: 2220603 - RNA, 19 nt, Artificial Sequence
  Description of Artificial Sequence: Synthetic oligonucleotide
uccccuuggccauguuugc

SEQ ID NO: 2220604 - RNA, 19 nt, Artificial Sequence
  Description of Artificial Sequence: Synthetic oligonucleotide
ccacuguggagcucaagcc

SEQ ID NO: 2220605 - RNA, 19 nt, Artificial Sequence
  Description of Artificial Sequence: Synthetic oligonucleotide
  modified_base (16)..(16): a, c, u, g, unknown or other
aucguguccuuggucncca

SEQ ID NO: 2220606 - RNA, 19 nt, Artificial Sequence
  Description of Artificial Sequence: Synthetic oligonucleotide
gcaggugcccaccuggagc

SEQ ID NO: 2220607 - RNA, 19 nt, Artificial Sequence
  Description of Artificial Sequence: Synthetic oligonucleotide
aagcugggugccaggucac

SEQ ID NO: 2220608 - RNA, 19 nt, Artificial Sequence
  Description of Artificial Sequence: Synthetic oligonucleotide
ggcugcuauaagcugcaug

SEQ ID NO: 2220609 - RNA, 19 nt, Artificial Sequence
  Description of Artificial Sequence: Synthetic oligonucleotide
ucgacaccacuugcagagg

SEQ ID NO: 2220610 - RNA, 19 nt, Artificial Sequence
  Description of Artificial Sequence: Synthetic oligonucleotide
caucacagugaaggguccc

SEQ ID NO: 2220611 - RNA, 19 nt, Artificial Sequence
  Description of Artificial Sequence: Synthetic oligonucleotide
aucacagugaaggguccca

SEQ ID NO: 2220612 - RNA, 19 nt, Artificial Sequence
  Description of Artificial Sequence: Synthetic oligonucleotide
uggaauugauugugcugua

SEQ ID NO: 2220613 - RNA, 19 nt, Artificial Sequence
  Description of Artificial Sequence: Synthetic oligonucleotide
cuggccacuaggcaucaca

SEQ ID NO: 2220614 - RNA, 19 nt, Artificial Sequence
  Description of Artificial Sequence: Synthetic oligonucleotide
aagugcagcaaagcuugua

SEQ ID NO: 2220615 - RNA, 19 nt, Artificial Sequence
  Description of Artificial Sequence: Synthetic oligonucleotide
gaacugcgugacuccagca

SEQ ID NO: 2220616 - RNA, 19 nt, Artificial Sequence
  Description of Artificial Sequence: Synthetic oligonucleotide
ugugccgugccagcccugc

SEQ ID NO: 2220617 - RNA, 19 nt, Artificial Sequence
  Description of Artificial Sequence: Synthetic oligonucleotide
uaggcggacaaaguagcuu

SEQ ID NO: 2220618 - RNA, 19 nt, Artificial Sequence
  Description of Artificial Sequence: Synthetic oligonucleotide
ucuccgaggcugccagcug

SEQ ID NO: 2220619 - RNA, 19 nt, Artificial Sequence
  Description of Artificial Sequence: Synthetic oligonucleotide
ggccugucugcacuguucc

SEQ ID NO: 2220620 - RNA, 19 nt, Artificial Sequence
  Description of Artificial Sequence: Synthetic oligonucleotide
ggcauguucaaaagcccgc

SEQ ID NO: 2220621 - RNA, 19 nt, Artificial Sequence
  Description of Artificial Sequence: Synthetic oligonucleotide
ugucugcacuguccccuug

SEQ ID NO: 2220622 - RNA, 19 nt, Artificial Sequence
  Description of Artificial Sequence: Synthetic oligonucleotide
gugaagggucccaccagcc

SEQ ID NO: 2220623 - RNA, 19 nt, Artificial Sequence
  Description of Artificial Sequence: Synthetic oligonucleotide
  modified_base (17)..(17): a, c, u, g, unknown or other
caucguguccuuggucncc

SEQ ID NO: 2220624 - RNA, 19 nt, Artificial Sequence
  Description of Artificial Sequence: Synthetic oligonucleotide
cagacuuggugguguccag

SEQ ID NO: 2220625 - RNA, 19 nt, Artificial Sequence
  Description of Artificial Sequence: Synthetic oligonucleotide
caggucgacaccacuugca

SEQ ID NO: 2220626 - RNA, 19 nt, Artificial Sequence
  Description of Artificial Sequence: Synthetic oligonucleotide
cacuaggcaucacagugaa

SEQ ID NO: 2220627 - RNA, 19 nt, Artificial Sequence
  Description of Artificial Sequence: Synthetic oligonucleotide
aggccugucugcacuguuc

SEQ ID NO: 2220628 - RNA, 19 nt, Artificial Sequence
  Description of Artificial Sequence: Synthetic oligonucleotide
ugcagaggcugugccgugc

SEQ ID NO: 2220629 - RNA, 19 nt, Artificial Sequence
  Description of Artificial Sequence: Synthetic oligonucleotide
cacacuccuccucagaccu

SEQ ID NO: 2220630 - RNA, 19 nt, Artificial Sequence
  Description of Artificial Sequence: Synthetic oligonucleotide
  modified_base (4)..(4): a, c, u, g, unknown or other
gucnccacgaccacagacu

SEQ ID NO: 2220631 - RNA, 19 nt, Artificial Sequence
  Description of Artificial Sequence: Synthetic oligonucleotide
guccccuagcccuuccaac

SEQ ID NO: 2220632 - RNA, 19 nt, Artificial Sequence
  Description of Artificial Sequence: Synthetic oligonucleotide
ucggcugucaugggcugga

SEQ ID NO: 2220633 - RNA, 19 nt, Artificial Sequence
  Description of Artificial Sequence: Synthetic oligonucleotide
gcugucaggcugcuauaag

SEQ ID NO: 2220634 - RNA, 19 nt, Artificial Sequence
  Description of Artificial Sequence: Synthetic oligonucleotide
gaccugggaacugcgugac

SEQ ID NO: 2220635 - RNA, 19 nt, Artificial Sequence
  Description of Artificial Sequence: Synthetic oligonucleotide
ucauggccccgugaguccu

SEQ ID NO: 2220636 - RNA, 19 nt, Artificial Sequence
  Description of Artificial Sequence: Synthetic oligonucleotide
uggucccaacgcaggugcc

SEQ ID NO: 2220637 - RNA, 19 nt, Artificial Sequence
  Description of Artificial Sequence: Synthetic oligonucleotide
caggcugcuauaagcugca

SEQ ID NO: 2220638 - RNA, 19 nt, Artificial Sequence
  Description of Artificial Sequence: Synthetic oligonucleotide
agcugggugccaggucacc

SEQ ID NO: 2220639 - RNA, 19 nt, Artificial Sequence
  Description of Artificial Sequence: Synthetic oligonucleotide
ccaacucaucaugaagugc

SEQ ID NO: 2220640 - RNA, 19 nt, Artificial Sequence
  Description of Artificial Sequence: Synthetic oligonucleotide
aguguccuuggugccuguc

SEQ ID NO: 2220641 - RNA, 19 nt, Artificial Sequence
  Description of Artificial Sequence: Synthetic oligonucleotide
ugucaccuggaaggccucc

SEQ ID NO: 2220642 - RNA, 19 nt, Artificial Sequence
  Description of Artificial Sequence: Synthetic oligonucleotide
gucaugggcuggaagaugu

SEQ ID NO: 2220643 - RNA, 19 nt, Artificial Sequence
  Description of Artificial Sequence: Synthetic oligonucleotide
guuccucggcugucauggg

SEQ ID NO: 2220644 - RNA, 19 nt, Artificial Sequence
  Description of Artificial Sequence: Synthetic oligonucleotide
cagucuguccugagccaug

SEQ ID NO: 2220645 - RNA, 19 nt, Artificial Sequence
  Description of Artificial Sequence: Synthetic oligonucleotide
ggacacgaggccauacagc

SEQ ID NO: 2220646 - RNA, 19 nt, Artificial Sequence
  Description of Artificial Sequence: Synthetic oligonucleotide
gcucagggcauguucaaaa

SEQ ID NO: 2220647 - RNA, 19 nt, Artificial Sequence
  Description of Artificial Sequence: Synthetic oligonucleotide
gaccacacuccuccucaga

SEQ ID NO: 2220648 - RNA, 19 nt, Artificial Sequence
  Description of Artificial Sequence: Synthetic oligonucleotide
cagaugccuacagcuggcc

SEQ ID NO: 2220649 - RNA, 19 nt, Artificial Sequence
  Description of Artificial Sequence: Synthetic oligonucleotide
ugaguccuguggucaucgu

SEQ ID NO: 2220650 - RNA, 19 nt, Artificial Sequence
  Description of Artificial Sequence: Synthetic oligonucleotide
gugcuguauauggcucagg

SEQ ID NO: 2220651 - RNA, 19 nt, Artificial Sequence
  Description of Artificial Sequence: Synthetic oligonucleotide
caccuaggcggacaaagua

SEQ ID NO: 2220652 - RNA, 19 nt, Artificial Sequence
  Description of Artificial Sequence: Synthetic oligonucleotide
  modified_base (2)..(2): a, c, u, g, unknown or other
cnccacgaccacagacuug

SEQ ID NO: 2220653 - RNA, 19 nt, Artificial Sequence
  Description of Artificial Sequence: Synthetic oligonucleotide
cacagucuguccugagcca

SEQ ID NO: 2220654 - RNA, 19 nt, Artificial Sequence
  Description of Artificial Sequence: Synthetic oligonucleotide
gaccacagacuugguggug

SEQ ID NO: 2220655 - RNA, 19 nt, Artificial Sequence
  Description of Artificial Sequence: Synthetic oligonucleotide
  modified_base (6)..(6): a, c, u, g, unknown or other
uggucnccacgaccacaga

SEQ ID NO: 2220656 - RNA, 19 nt, Artificial Sequence
  Description of Artificial Sequence: Synthetic oligonucleotide
ggcaggcuagcgugcacag

SEQ ID NO: 2220657 - RNA, 19 nt, Artificial Sequence
  Description of Artificial Sequence: Synthetic oligonucleotide
  modified_base (8)..(8): a, c, u, g, unknown or other
cuuggucnccacgaccaca

SEQ ID NO: 2220658 - RNA, 19 nt, Artificial Sequence
  Description of Artificial Sequence: Synthetic oligonucleotide
gcaggucgacaccacuugc

SEQ ID NO: 2220659 - RNA, 19 nt, Artificial Sequence
  Description of Artificial Sequence: Synthetic oligonucleotide
gucugucaccuggaaggcc

SEQ ID NO: 2220660 - RNA, 19 nt, Artificial Sequence
  Description of Artificial Sequence: Synthetic oligonucleotide
ccugagccauggaaacacg

SEQ ID NO: 2220661 - RNA, 19 nt, Artificial Sequence
  Description of Artificial Sequence: Synthetic oligonucleotide
caggcugucaggcugcuau

SEQ ID NO: 2220662 - RNA, 19 nt, Artificial Sequence
  Description of Artificial Sequence: Synthetic oligonucleotide
gcuucuccggucagcagag

SEQ ID NO: 2220663 - RNA, 19 nt, Artificial Sequence
  Description of Artificial Sequence: Synthetic oligonucleotide
aagcccgcuggcggaagcu

SEQ ID NO: 2220664 - RNA, 19 nt, Artificial Sequence
  Description of Artificial Sequence: Synthetic oligonucleotide
acgaggccauacagcuugc

SEQ ID NO: 2220665 - RNA, 19 nt, Artificial Sequence
  Description of Artificial Sequence: Synthetic oligonucleotide
uaccagcagccuccacugu

SEQ ID NO: 2220666 - RNA, 19 nt, Artificial Sequence
  Description of Artificial Sequence: Synthetic oligonucleotide
auguccccuagcccuucca

SEQ ID NO: 2220667 - RNA, 19 nt, Artificial Sequence
  Description of Artificial Sequence: Synthetic oligonucleotide
gugcacagucuguccugag

SEQ ID NO: 2220668 - RNA, 19 nt, Artificial Sequence
  Description of Artificial Sequence: Synthetic oligonucleotide
  modified_base (14)..(14): a, c, u, g, unknown or other
cguguccuuggucnccacg

SEQ ID NO: 2220669 - RNA, 19 nt, Artificial Sequence
  Description of Artificial Sequence: Synthetic oligonucleotide
guuugcagccccugugagu

SEQ ID NO: 2220670 - RNA, 19 nt, Artificial Sequence
  Description of Artificial Sequence: Synthetic oligonucleotide
ggcuagcgugcacagucug

SEQ ID NO: 2220671 - RNA, 19 nt, Artificial Sequence
  Description of Artificial Sequence: Synthetic oligonucleotide
uugcagccccugugagucc

SEQ ID NO: 2220672 - RNA, 19 nt, Artificial Sequence
  Description of Artificial Sequence: Synthetic oligonucleotide
guccuguggucaucguguc

SEQ ID NO: 2220673 - RNA, 19 nt, Artificial Sequence
  Description of Artificial Sequence: Synthetic oligonucleotide
acuaggcaucacagugaag

SEQ ID NO: 2220674 - RNA, 19 nt, Artificial Sequence
  Description of Artificial Sequence: Synthetic oligonucleotide
cauacagcuugcagaggcu

SEQ ID NO: 2220675 - RNA, 19 nt, Artificial Sequence
  Description of Artificial Sequence: Synthetic oligonucleotide
cucggcugucaugggcugg

SEQ ID NO: 2220676 - RNA, 19 nt, Artificial Sequence
  Description of Artificial Sequence: Synthetic oligonucleotide
ggucaucguguccuugguc

SEQ ID NO: 2220677 - RNA, 19 nt, Artificial Sequence
  Description of Artificial Sequence: Synthetic oligonucleotide
ggucgacaccacuugcaga

SEQ ID NO: 2220678 - RNA, 19 nt, Artificial Sequence
  Description of Artificial Sequence: Synthetic oligonucleotide
gcgugacuccagcacaaac

SEQ ID NO: 2220679 - RNA, 19 nt, Artificial Sequence
  Description of Artificial Sequence: Synthetic oligonucleotide
caacgcaggugcccaccug

SEQ ID NO: 2220680 - RNA, 19 nt, Artificial Sequence
  Description of Artificial Sequence: Synthetic oligonucleotide
cucaagcccuggucccaac

SEQ ID NO: 2220681 - RNA, 19 nt, Artificial Sequence
  Description of Artificial Sequence: Synthetic oligonucleotide
cugcgugacuccagcacaa

SEQ ID NO: 2220682 - RNA, 19 nt, Artificial Sequence
  Description of Artificial Sequence: Synthetic oligonucleotide
ggucccaacgcaggugccc

SEQ ID NO: 2220683 - RNA, 19 nt, Artificial Sequence
  Description of Artificial Sequence: Synthetic oligonucleotide
agccccugugaguccugug

SEQ ID NO: 2220684 - RNA, 19 nt, Artificial Sequence
  Description of Artificial Sequence: Synthetic oligonucleotide
cugcuauaagcugcaugga

SEQ ID NO: 2220685 - RNA, 19 nt, Artificial Sequence
  Description of Artificial Sequence: Synthetic oligonucleotide
cuaggcggacaaaguagcu

SEQ ID NO: 2220686 - RNA, 19 nt, Artificial Sequence
  Description of Artificial Sequence: Synthetic oligonucleotide
ccuccagacccugccaugc

SEQ ID NO: 2220687 - RNA, 19 nt, Artificial Sequence
  Description of Artificial Sequence: Synthetic oligonucleotide
ugcgugacuccagcacaaa

SEQ ID NO: 2220688 - RNA, 19 nt, Artificial Sequence
  Description of Artificial Sequence: Synthetic oligonucleotide
ccacuaggcaucacaguga

SEQ ID NO: 2220689 - RNA, 19 nt, Artificial Sequence
  Description of Artificial Sequence: Synthetic oligonucleotide
agcgaagcccuagcuugga

SEQ ID NO: 2220690 - RNA, 19 nt, Artificial Sequence
  Description of Artificial Sequence: Synthetic oligonucleotide
cacccggggcccugucucc

SEQ ID NO: 2220691 - RNA, 19 nt, Artificial Sequence
  Description of Artificial Sequence: Synthetic oligonucleotide
gccauggaaacacgcaccu

SEQ ID NO: 2220692 - RNA, 19 nt, Artificial Sequence
  Description of Artificial Sequence: Synthetic oligonucleotide
gucccaacgcaggugccca

SEQ ID NO: 2220693 - RNA, 19 nt, Artificial Sequence
  Description of Artificial Sequence: Synthetic oligonucleotide
gcaucacagugaagggucc

SEQ ID NO: 2220694 - RNA, 19 nt, Artificial Sequence
  Description of Artificial Sequence: Synthetic oligonucleotide
gugccugucagcacacucu

SEQ ID NO: 2220695 - RNA, 19 nt, Artificial Sequence
  Description of Artificial Sequence: Synthetic oligonucleotide
ucccaacgcaggugcccac

SEQ ID NO: 2220696 - RNA, 19 nt, Artificial Sequence
  Description of Artificial Sequence: Synthetic oligonucleotide
gcgugcacagucuguccug

SEQ ID NO: 2220697 - RNA, 19 nt, Artificial Sequence
  Description of Artificial Sequence: Synthetic oligonucleotide
ggucagcagagagcacccg

SEQ ID NO: 2220698 - RNA, 19 nt, Artificial Sequence
  Description of Artificial Sequence: Synthetic oligonucleotide
cauggccccgugaguccug

SEQ ID NO: 2220699 - RNA, 19 nt, Artificial Sequence
  Description of Artificial Sequence: Synthetic oligonucleotide
ccucuuggugguguccagg

SEQ ID NO: 2220700 - RNA, 19 nt, Artificial Sequence
  Description of Artificial Sequence: Synthetic oligonucleotide
cacgcaccuuuuggguacc

SEQ ID NO: 2220701 - RNA, 19 nt, Artificial Sequence
  Description of Artificial Sequence: Synthetic oligonucleotide
guccuguggcuaccguauc

SEQ ID NO: 2220702 - RNA, 19 nt, Artificial Sequence
  Description of Artificial Sequence: Synthetic oligonucleotide
gggaacugcgugacuccag

SEQ ID NO: 2220703 - RNA, 19 nt, Artificial Sequence
  Description of Artificial Sequence: Synthetic oligonucleotide
guccaggccugucugcacu

SEQ ID NO: 2220704 - RNA, 19 nt, Artificial Sequence
  Description of Artificial Sequence: Synthetic oligonucleotide
aggcuagcgugcacagucu

SEQ ID NO: 2220705 - RNA, 19 nt, Artificial Sequence
  Description of Artificial Sequence: Synthetic oligonucleotide
acccggggcccugucuccg

SEQ ID NO: 2220706 - RNA, 19 nt, Artificial Sequence
  Description of Artificial Sequence: Synthetic oligonucleotide
aggcugucaggcugcuaua

SEQ ID NO: 2220707 - RNA, 19 nt, Artificial Sequence
  Description of Artificial Sequence: Synthetic oligonucleotide
gccuacagcuggccacuag

SEQ ID NO: 2220708 - RNA, 19 nt, Artificial Sequence
  Description of Artificial Sequence: Synthetic oligonucleotide
caccggcacugcucugggc

SEQ ID NO: 2220709 - RNA, 19 nt, Artificial Sequence
  Description of Artificial Sequence: Synthetic oligonucleotide
cauucauggccccgugagu

SEQ ID NO: 2220710 - RNA, 19 nt, Artificial Sequence
  Description of Artificial Sequence: Synthetic oligonucleotide
cugggugccaggucaccua

SEQ ID NO: 2220711 - RNA, 19 nt, Artificial Sequence
  Description of Artificial Sequence: Synthetic oligonucleotide
agcccgcuggcggaagcug

SEQ ID NO: 2220712 - RNA, 19 nt, Artificial Sequence
  Description of Artificial Sequence: Synthetic oligonucleotide
gggccagcgaagcccuagc

SEQ ID NO: 2220713 - RNA, 19 nt, Artificial Sequence
  Description of Artificial Sequence: Synthetic oligonucleotide
gccuccacuguggagcuca

SEQ ID NO: 2220714 - RNA, 19 nt, Artificial Sequence
  Description of Artificial Sequence: Synthetic oligonucleotide
auauggcucagggcauguu

SEQ ID NO: 2220715 - RNA, 19 nt, Artificial Sequence
  Description of Artificial Sequence: Synthetic oligonucleotide
cccuuccaacucaucauga

SEQ ID NO: 2220716 - RNA, 19 nt, Artificial Sequence
  Description of Artificial Sequence: Synthetic oligonucleotide
agacccugccaugccugga

SEQ ID NO: 2220717 - RNA, 19 nt, Artificial Sequence
  Description of Artificial Sequence: Synthetic oligonucleotide
gucuccgaggcugccagcu

SEQ ID NO: 2220718 - RNA, 19 nt, Artificial Sequence
  Description of Artificial Sequence: Synthetic oligonucleotide
cacuguuccuuuggccaca

SEQ ID NO: 2220719 - RNA, 19 nt, Artificial Sequence
  Description of Artificial Sequence: Synthetic oligonucleotide
gccauguuugcagccccug

SEQ ID NO: 2220720 - RNA, 19 nt, Artificial Sequence
  Description of Artificial Sequence: Synthetic oligonucleotide
gcccuggucccaacgcagg

SEQ ID NO: 2220721 - RNA, 19 nt, Artificial Sequence
  Description of Artificial Sequence: Synthetic oligonucleotide
caaaagcccgcuggcggaa

SEQ ID NO: 2220722 - RNA, 19 nt, Artificial Sequence
  Description of Artificial Sequence: Synthetic oligonucleotide
agagcacccggggcccugu

SEQ ID NO: 2220723 - RNA, 19 nt, Artificial Sequence
  Description of Artificial Sequence: Synthetic oligonucleotide
  modified_base (9)..(9): a, c, u, g, unknown or other
ccuuggucnccacgaccac

SEQ ID NO: 2220724 - RNA, 19 nt, Artificial Sequence
  Description of Artificial Sequence: Synthetic oligonucleotide
uggcggaagcugggugcca

SEQ ID NO: 2220725 - RNA, 19 nt, Artificial Sequence
  Description of Artificial Sequence: Synthetic oligonucleotide
guggagcucaagcccuggu

SEQ ID NO: 2220726 - RNA, 19 nt, Artificial Sequence
  Description of Artificial Sequence: Synthetic oligonucleotide
ggcugucaggcugcuauaa

SEQ ID NO: 2220727 - RNA, 19 nt, Artificial Sequence
  Description of Artificial Sequence: Synthetic oligonucleotide
cugugccgugccagcccug

SEQ ID NO: 2220728 - RNA, 19 nt, Artificial Sequence
  Description of Artificial Sequence: Synthetic oligonucleotide
cacaaacaguguccuuggu

SEQ ID NO: 2220729 - RNA, 19 nt, Artificial Sequence
  Description of Artificial Sequence: Synthetic oligonucleotide
ggaauugauugugcuguau

SEQ ID NO: 2220730 - RNA, 19 nt, Artificial Sequence
  Description of Artificial Sequence: Synthetic oligonucleotide
cugucaugggcuggaagau

SEQ ID NO: 2220731 - RNA, 19 nt, Artificial Sequence
  Description of Artificial Sequence: Synthetic oligonucleotide
cugccaugccuggaccaca

SEQ ID NO: 2220732 - RNA, 19 nt, Artificial Sequence
  Description of Artificial Sequence: Synthetic oligonucleotide
cuuguuccucggcugucau

SEQ ID NO: 2220733 - RNA, 19 nt, Artificial Sequence
  Description of Artificial Sequence: Synthetic oligonucleotide
acacgaggccauacagcuu

SEQ ID NO: 2220734 - RNA, 19 nt, Artificial Sequence
  Description of Artificial Sequence: Synthetic oligonucleotide
gcggacaaaguagcuucuc

SEQ ID NO: 2220735 - RNA, 19 nt, Artificial Sequence
  Description of Artificial Sequence: Synthetic oligonucleotide
cccaacgcaggugcccacc

SEQ ID NO: 2220736 - RNA, 19 nt, Artificial Sequence
  Description of Artificial Sequence: Synthetic oligonucleotide
cagaggcugugccgugcca

SEQ ID NO: 2220737 - RNA, 19 nt, Artificial Sequence
  Description of Artificial Sequence: Synthetic oligonucleotide
cagcccucagaugccuaca

SEQ ID NO: 2220738 - RNA, 19 nt, Artificial Sequence
  Description of Artificial Sequence: Synthetic oligonucleotide
gguguccaggccucuuggu

SEQ ID NO: 2220739 - RNA, 19 nt, Artificial Sequence
  Description of Artificial Sequence: Synthetic oligonucleotide
cccgugaguccugugguca

SEQ ID NO: 2220740 - RNA, 19 nt, Artificial Sequence
  Description of Artificial Sequence: Synthetic oligonucleotide
ugcccaccuggagccucca

SEQ ID NO: 2220741 - RNA, 19 nt, Artificial Sequence
  Description of Artificial Sequence: Synthetic oligonucleotide
ggccacuaggcaucacagu

SEQ ID NO: 2220742 - RNA, 19 nt, Artificial Sequence
  Description of Artificial Sequence: Synthetic oligonucleotide
ugccuacagcuggccacua

SEQ ID NO: 2220743 - RNA, 19 nt, Artificial Sequence
  Description of Artificial Sequence: Synthetic oligonucleotide
gagcacccggggcccuguc

SEQ ID NO: 2220744 - RNA, 19 nt, Artificial Sequence
  Description of Artificial Sequence: Synthetic oligonucleotide
ccagcacaaacaguguccu

SEQ ID NO: 2220745 - RNA, 19 nt, Artificial Sequence
  Description of Artificial Sequence: Synthetic oligonucleotide
gcugugccgugccagcccu

SEQ ID NO: 2220746 - RNA, 19 nt, Artificial Sequence
  Description of Artificial Sequence: Synthetic oligonucleotide
gccugucagcacacucuug

SEQ ID NO: 2220747 - RNA, 19 nt, Artificial Sequence
  Description of Artificial Sequence: Synthetic oligonucleotide
gcgaagcccuagcuuggaa

SEQ ID NO: 2220748 - RNA, 19 nt, Artificial Sequence
  Description of Artificial Sequence: Synthetic oligonucleotide
gccagcgaagcccuagcuu

SEQ ID NO: 2220749 - RNA, 19 nt, Artificial Sequence
  Description of Artificial Sequence: Synthetic oligonucleotide
gcuagcgugcacagucugu

SEQ ID NO: 2220750 - RNA, 19 nt, Artificial Sequence
  Description of Artificial Sequence: Synthetic oligonucleotide
cgcaccuuuuggguaccag

SEQ ID NO: 2220751 - RNA, 19 nt, Artificial Sequence
  Description of Artificial Sequence: Synthetic oligonucleotide
ggccagcgaagcccuagcu

SEQ ID NO: 2220752 - RNA, 19 nt, Artificial Sequence
  Description of Artificial Sequence: Synthetic oligonucleotide
ggcggacaaaguagcuucu

SEQ ID NO: 2220753 - RNA, 19 nt, Artificial Sequence
  Description of Artificial Sequence: Synthetic oligonucleotide
ggaccacaccggcacugcu

SEQ ID NO: 2220754 - RNA, 19 nt, Artificial Sequence
  Description of Artificial Sequence: Synthetic oligonucleotide
gcucaagcccuggucccaa

SEQ ID NO: 2220755 - RNA, 19 nt, Artificial Sequence
  Description of Artificial Sequence: Synthetic oligonucleotide
gccugcaggucgacaccac

SEQ ID NO: 2220756 - RNA, 19 nt, Artificial Sequence
  Description of Artificial Sequence: Synthetic oligonucleotide
cgugcacagucuguccuga

SEQ ID NO: 2220757 - RNA, 19 nt, Artificial Sequence
  Description of Artificial Sequence: Synthetic oligonucleotide
ccugucugcacuguuccuu

SEQ ID NO: 2220758 - RNA, 19 nt, Artificial Sequence
  Description of Artificial Sequence: Synthetic oligonucleotide
cgugaguccuguggucauc

SEQ ID NO: 2220759 - RNA, 19 nt, Artificial Sequence
  Description of Artificial Sequence: Synthetic oligonucleotide
ccgaggcugccagcugggc

SEQ ID NO: 2220760 - RNA, 19 nt, Artificial Sequence
  Description of Artificial Sequence: Synthetic oligonucleotide
ggucaccuaggcggacaaa

SEQ ID NO: 2220761 - RNA, 19 nt, Artificial Sequence
  Description of Artificial Sequence: Synthetic oligonucleotide
caggccugucugcacuguu

SEQ ID NO: 2220762 - RNA, 19 nt, Artificial Sequence
  Description of Artificial Sequence: Synthetic oligonucleotide
ccaacgcaggugcccaccu

SEQ ID NO: 2220763 - RNA, 19 nt, Artificial Sequence
  Description of Artificial Sequence: Synthetic oligonucleotide
ggccauguuugcagccccu

SEQ ID NO: 2220764 - RNA, 19 nt, Artificial Sequence
  Description of Artificial Sequence: Synthetic oligonucleotide
cugggccagcgaagcccua

SEQ ID NO: 2220765 - RNA, 19 nt, Artificial Sequence
  Description of Artificial Sequence: Synthetic oligonucleotide
gcaggcuagcgugcacagu

SEQ ID NO: 2220766 - RNA, 19 nt, Artificial Sequence
  Description of Artificial Sequence: Synthetic oligonucleotide
ccgugaguccuguggucau

SEQ ID NO: 2220767 - RNA, 19 nt, Artificial Sequence
  Description of Artificial Sequence: Synthetic oligonucleotide
ccauggaaacacgcaccuu

SEQ ID NO: 2220768 - RNA, 19 nt, Artificial Sequence
  Description of Artificial Sequence: Synthetic oligonucleotide
ccacgaccacagacuuggu

SEQ ID NO: 2220769 - RNA, 19 nt, Artificial Sequence
  Description of Artificial Sequence: Synthetic oligonucleotide
aauaagcaggcacaaaagg

SEQ ID NO: 2220770 - RNA, 19 nt, Artificial Sequence
  Description of Artificial Sequence: Synthetic oligonucleotide
gaucaaauuguccagaccc

SEQ ID NO: 2220771 - RNA, 19 nt, Artificial Sequence
  Description of Artificial Sequence: Synthetic oligonucleotide
augagaucagcccugagcc

SEQ ID NO: 2220772 - RNA, 19 nt, Artificial Sequence
  Description of Artificial Sequence: Synthetic oligonucleotide
aagggaacugcccacuacc

SEQ ID NO: 2220773 - RNA, 19 nt, Artificial Sequence
  Description of Artificial Sequence: Synthetic oligonucleotide
accuuugucauucaccagc

SEQ ID NO: 2220774 - RNA, 19 nt, Artificial Sequence
  Description of Artificial Sequence: Synthetic oligonucleotide
ucauguacgaagagaaggg

SEQ ID NO: 2220775 - RNA, 19 nt, Artificial Sequence
  Description of Artificial Sequence: Synthetic oligonucleotide
aagauggucacagugcugg

SEQ ID NO: 2220776 - RNA, 19 nt, Artificial Sequence
  Description of Artificial Sequence: Synthetic oligonucleotide
uaagcaggcacaaaaggcc

SEQ ID NO: 2220777 - RNA, 19 nt, Artificial Sequence
  Description of Artificial Sequence: Synthetic oligonucleotide
aaggaggcggaucaaauug

SEQ ID NO: 2220778 - RNA, 19 nt, Artificial Sequence
  Description of Artificial Sequence: Synthetic oligonucleotide
caugguuagggccagaagc

SEQ ID NO: 2220779 - RNA, 19 nt, Artificial Sequence
  Description of Artificial Sequence: Synthetic oligonucleotide
uaauaagcaggcacaaaag

SEQ ID NO: 2220780 - RNA, 19 nt, Artificial Sequence
  Description of Artificial Sequence: Synthetic oligonucleotide
auaagcaggcacaaaaggc

SEQ ID NO: 2220781 - RNA, 19 nt, Artificial Sequence
  Description of Artificial Sequence: Synthetic oligonucleotide
caugccauaauaagcaggc

SEQ ID NO: 2220782 - RNA, 19 nt, Artificial Sequence
  Description of Artificial Sequence: Synthetic oligonucleotide
uucuguguguaguagguag

SEQ ID NO: 2220783 - RNA, 19 nt, Artificial Sequence
  Description of Artificial Sequence: Synthetic oligonucleotide
gaugagaucagcccugagc

SEQ ID NO: 2220784 - RNA, 19 nt, Artificial Sequence
  Description of Artificial Sequence: Synthetic oligonucleotide
aaggagaaaccuccucccc

SEQ ID NO: 2220785 - RNA, 19 nt, Artificial Sequence
  Description of Artificial Sequence: Synthetic oligonucleotide
uguacgaagagaagggaac

SEQ ID NO: 2220786 - RNA, 19 nt, Artificial Sequence
  Description of Artificial Sequence: Synthetic oligonucleotide
ucaaucauccagaccuugg

SEQ ID NO: 2220787 - RNA, 19 nt, Artificial Sequence
  Description of Artificial Sequence: Synthetic oligonucleotide
ugcaccaugccauaauaag

SEQ ID NO: 2220788 - RNA, 19 nt, Artificial Sequence
  Description of Artificial Sequence: Synthetic oligonucleotide
uauucggugaggcaaggca

SEQ ID NO: 2220789 - RNA, 19 nt, Artificial Sequence
  Description of Artificial Sequence: Synthetic oligonucleotide
uucccaaggagaaaccucc

SEQ ID NO: 2220790 - RNA, 19 nt, Artificial Sequence
  Description of Artificial Sequence: Synthetic oligonucleotide
ugccauaauaagcaggcac

SEQ ID NO: 2220791 - RNA, 19 nt, Artificial Sequence
  Description of Artificial Sequence: Synthetic oligonucleotide
ugcaagugagccuagcagc

SEQ ID NO: 2220792 - RNA, 19 nt, Artificial Sequence
  Description of Artificial Sequence: Synthetic oligonucleotide
uggucauguacgaagagaa

SEQ ID NO: 2220793 - RNA, 19 nt, Artificial Sequence
  Description of Artificial Sequence: Synthetic oligonucleotide
uuuagguuccugcuugccc

SEQ ID NO: 2220794 - RNA, 19 nt, Artificial Sequence
  Description of Artificial Sequence: Synthetic oligonucleotide
uuguccagaccccagaggu

SEQ ID NO: 2220795 - RNA, 19 nt, Artificial Sequence
  Description of Artificial Sequence: Synthetic oligonucleotide
uguguaguagguaggggca

SEQ ID NO: 2220796 - RNA, 19 nt, Artificial Sequence
  Description of Artificial Sequence: Synthetic oligonucleotide
ucuuugguuagaaccaggu

SEQ ID NO: 2220797 - RNA, 19 nt, Artificial Sequence
  Description of Artificial Sequence: Synthetic oligonucleotide
uuucucaggaguccaaggu

SEQ ID NO: 2220798 - RNA, 19 nt, Artificial Sequence
  Description of Artificial Sequence: Synthetic oligonucleotide
uuagguuccugcuugccca

SEQ ID NO: 2220799 - RNA, 19 nt, Artificial Sequence
  Description of Artificial Sequence: Synthetic oligonucleotide
uugguuagaaccagguagu

SEQ ID NO: 2220800 - RNA, 19 nt, Artificial Sequence
  Description of Artificial Sequence: Synthetic oligonucleotide
uuuauucccaucccagagu

SEQ ID NO: 2220801 - RNA, 19 nt, Artificial Sequence
  Description of Artificial Sequence: Synthetic oligonucleotide
auggucacagugcuggcac

SEQ ID NO: 2220802 - RNA, 19 nt, Artificial Sequence
  Description of Artificial Sequence: Synthetic oligonucleotide
uuauucccaucccagaguc

SEQ ID NO: 2220803 - RNA, 19 nt, Artificial Sequence
  Description of Artificial Sequence: Synthetic oligonucleotide
acacgugcuaucuugcaag

SEQ ID NO: 2220804 - RNA, 19 nt, Artificial Sequence
  Description of Artificial Sequence: Synthetic oligonucleotide
guguguaguagguaggggc

SEQ ID NO: 2220805 - RNA, 19 nt, Artificial Sequence
  Description of Artificial Sequence: Synthetic oligonucleotide
caggagaucuuccaucugg

SEQ ID NO: 2220806 - RNA, 19 nt, Artificial Sequence
  Description of Artificial Sequence: Synthetic oligonucleotide
aaauuguccagaccccaga

SEQ ID NO: 2220807 - RNA, 19 nt, Artificial Sequence
  Description of Artificial Sequence: Synthetic oligonucleotide
acgaagagaagggaacugc

SEQ ID NO: 2220808 - RNA, 19 nt, Artificial Sequence
  Description of Artificial Sequence: Synthetic oligonucleotide
acggagguccuccagucgc

SEQ ID NO: 2220809 - RNA, 19 nt, Artificial Sequence
  Description of Artificial Sequence: Synthetic oligonucleotide
gguaggggcacuuauucgg

SEQ ID NO: 2220810 - RNA, 19 nt, Artificial Sequence
  Description of Artificial Sequence: Synthetic oligonucleotide
agagaagggaacugcccac

SEQ ID NO: 2220811 - RNA, 19 nt, Artificial Sequence
  Description of Artificial Sequence: Synthetic oligonucleotide
accucaugggucuuggaag

SEQ ID NO: 2220812 - RNA, 19 nt, Artificial Sequence
  Description of Artificial Sequence: Synthetic oligonucleotide
agggagaguucuccaaagc

SEQ ID NO: 2220813 - RNA, 19 nt, Artificial Sequence
  Description of Artificial Sequence: Synthetic oligonucleotide
cucacgguugcccucagcc

SEQ ID NO: 2220814 - RNA, 19 nt, Artificial Sequence
  Description of Artificial Sequence: Synthetic oligonucleotide
gaagaagggagaguucucc

SEQ ID NO: 2220815 - RNA, 19 nt, Artificial Sequence
  Description of Artificial Sequence: Synthetic oligonucleotide
uagguaggggcacuuauuc

SEQ ID NO: 2220816 - RNA, 19 nt, Artificial Sequence
  Description of Artificial Sequence: Synthetic oligonucleotide
agucgcgccacguacuuuc

SEQ ID NO: 2220817 - RNA, 19 nt, Artificial Sequence
  Description of Artificial Sequence: Synthetic oligonucleotide
aucaaauuguccagacccc

SEQ ID NO: 2220818 - RNA, 19 nt, Artificial Sequence
  Description of Artificial Sequence: Synthetic oligonucleotide
uggaagaagggagaguucu

SEQ ID NO: 2220819 - RNA, 19 nt, Artificial Sequence
  Description of Artificial Sequence: Synthetic oligonucleotide
cuaguucccaaggagaaac

SEQ ID NO: 2220820 - RNA, 19 nt, Artificial Sequence
  Description of Artificial Sequence: Synthetic oligonucleotide
uccaagguccccaucgaca

SEQ ID NO: 2220821 - RNA, 19 nt, Artificial Sequence
  Description of Artificial Sequence: Synthetic oligonucleotide
ugaaggccugcccaucccg

SEQ ID NO: 2220822 - RNA, 19 nt, Artificial Sequence
  Description of Artificial Sequence: Synthetic oligonucleotide
ugagacaggagagcgccgg

SEQ ID NO: 2220823 - RNA, 19 nt, Artificial Sequence
  Description of Artificial Sequence: Synthetic oligonucleotide
agaaaccuccuccccugcc

SEQ ID NO: 2220824 - RNA, 19 nt, Artificial Sequence
  Description of Artificial Sequence: Synthetic oligonucleotide
caaucauccagaccuuggc

SEQ ID NO: 2220825 - RNA, 19 nt, Artificial Sequence
  Description of Artificial Sequence: Synthetic oligonucleotide
gcugacagcaucuuagggc

SEQ ID NO: 2220826 - RNA, 19 nt, Artificial Sequence
  Description of Artificial Sequence: Synthetic oligonucleotide
agcugacagcaucuuaggg

SEQ ID NO: 2220827 - RNA, 19 nt, Artificial Sequence
  Description of Artificial Sequence: Synthetic oligonucleotide
caccaugccauaauaagca

SEQ ID NO: 2220828 - RNA, 19 nt, Artificial Sequence
  Description of Artificial Sequence: Synthetic oligonucleotide
uucucaggaguccaagguc

SEQ ID NO: 2220829 - RNA, 19 nt, Artificial Sequence
  Description of Artificial Sequence: Synthetic oligonucleotide
gagaucagcccugagccag

SEQ ID NO: 2220830 - RNA, 19 nt, Artificial Sequence
  Description of Artificial Sequence: Synthetic oligonucleotide
aguucuccaaagccucacg

SEQ ID NO: 2220831 - RNA, 19 nt, Artificial Sequence
  Description of Artificial Sequence: Synthetic oligonucleotide
uaccucaugggucuuggaa

SEQ ID NO: 2220832 - RNA, 19 nt, Artificial Sequence
  Description of Artificial Sequence: Synthetic oligonucleotide
aaccagguaguccaugguu

SEQ ID NO: 2220833 - RNA, 19 nt, Artificial Sequence
  Description of Artificial Sequence: Synthetic oligonucleotide
ucaaauuguccagacccca

SEQ ID NO: 2220834 - RNA, 19 nt, Artificial Sequence
  Description of Artificial Sequence: Synthetic oligonucleotide
uccccaucgacaaagucuu

SEQ ID NO: 2220835 - RNA, 19 nt, Artificial Sequence
  Description of Artificial Sequence: Synthetic oligonucleotide
agguaggggcacuuauucg

SEQ ID NO: 2220836 - RNA, 19 nt, Artificial Sequence
  Description of Artificial Sequence: Synthetic oligonucleotide
ugagccuagcagcagccga

SEQ ID NO: 2220837 - RNA, 19 nt, Artificial Sequence
  Description of Artificial Sequence: Synthetic oligonucleotide
uucggugaggcaaggcagc

SEQ ID NO: 2220838 - RNA, 19 nt, Artificial Sequence
  Description of Artificial Sequence: Synthetic oligonucleotide
caaauuguccagaccccag

SEQ ID NO: 2220839 - RNA, 19 nt, Artificial Sequence
  Description of Artificial Sequence: Synthetic oligonucleotide
uccuccagguuuagguucc

SEQ ID NO: 2220840 - RNA, 19 nt, Artificial Sequence
  Description of Artificial Sequence: Synthetic oligonucleotide
gcuaucuugcaagugagcc

SEQ ID NO: 2220841 - RNA, 19 nt, Artificial Sequence
  Description of Artificial Sequence: Synthetic oligonucleotide
ugagcauuugguggucagg

SEQ ID NO: 2220842 - RNA, 19 nt, Artificial Sequence
  Description of Artificial Sequence: Synthetic oligonucleotide
guugcccucagcccaaggc

SEQ ID NO: 2220843 - RNA, 19 nt, Artificial Sequence
  Description of Artificial Sequence: Synthetic oligonucleotide
ucuuagggcuccucuggcc

SEQ ID NO: 2220844 - RNA, 19 nt, Artificial Sequence
  Description of Artificial Sequence: Synthetic oligonucleotide
aagccccgcccacuugugc

SEQ ID NO: 2220845 - RNA, 19 nt, Artificial Sequence
  Description of Artificial Sequence: Synthetic oligonucleotide
agcaucuuagggcuccucu

SEQ ID NO: 2220846 - RNA, 19 nt, Artificial Sequence
  Description of Artificial Sequence: Synthetic oligonucleotide
cuggacucuccugagacag

SEQ ID NO: 2220847 - RNA, 19 nt, Artificial Sequence
  Description of Artificial Sequence: Synthetic oligonucleotide
ugucuugccgaagucaauc

SEQ ID NO: 2220848 - RNA, 19 nt, Artificial Sequence
  Description of Artificial Sequence: Synthetic oligonucleotide
accaugccauaauaagcag

SEQ ID NO: 2220849 - RNA, 19 nt, Artificial Sequence
  Description of Artificial Sequence: Synthetic oligonucleotide
cacuggacucuccugagac

SEQ ID NO: 2220850 - RNA, 19 nt, Artificial Sequence
  Description of Artificial Sequence: Synthetic oligonucleotide
auucccaucccagaguccu

SEQ ID NO: 2220851 - RNA, 19 nt, Artificial Sequence
  Description of Artificial Sequence: Synthetic oligonucleotide
cagccgaugagaucagccc

SEQ ID NO: 2220852 - RNA, 19 nt, Artificial Sequence
  Description of Artificial Sequence: Synthetic oligonucleotide
ugcuaucuugcaagugagc

SEQ ID NO: 2220853 - RNA, 19 nt, Artificial Sequence
  Description of Artificial Sequence: Synthetic oligonucleotide
aguagguaggggcacuuau

SEQ ID NO: 2220854 - RNA, 19 nt, Artificial Sequence
  Description of Artificial Sequence: Synthetic oligonucleotide
aucuugcaguccaugauag

SEQ ID NO: 2220855 - RNA, 19 nt, Artificial Sequence
  Description of Artificial Sequence: Synthetic oligonucleotide
aggagaaaccuccuccccu

SEQ ID NO: 2220856 - RNA, 19 nt, Artificial Sequence
  Description of Artificial Sequence: Synthetic oligonucleotide
agauggucacagugcuggc

SEQ ID NO: 2220857 - RNA, 19 nt, Artificial Sequence
  Description of Artificial Sequence: Synthetic oligonucleotide
ugcuugcccaucuugcagu

SEQ ID NO: 2220858 - RNA, 19 nt, Artificial Sequence
  Description of Artificial Sequence: Synthetic oligonucleotide
agaguccuggagucuuugg

SEQ ID NO: 2220859 - RNA, 19 nt, Artificial Sequence
  Description of Artificial Sequence: Synthetic oligonucleotide
aucccgaugcaccaugcca

SEQ ID NO: 2220860 - RNA, 19 nt, Artificial Sequence
  Description of Artificial Sequence: Synthetic oligonucleotide
cuguguguaguagguaggg

SEQ ID NO: 2220861 - RNA, 19 nt, Artificial Sequence
  Description of Artificial Sequence: Synthetic oligonucleotide
ucaugggucuuggaagaag

SEQ ID NO: 2220862 - RNA, 19 nt, Artificial Sequence
  Description of Artificial Sequence: Synthetic oligonucleotide
acaccaaggaaggaagaug

SEQ ID NO: 2220863 - RNA, 19 nt, Artificial Sequence
  Description of Artificial Sequence: Synthetic oligonucleotide
auucggugaggcaaggcag

SEQ ID NO: 2220864 - RNA, 19 nt, Artificial Sequence
  Description of Artificial Sequence: Synthetic oligonucleotide
uaguucccaaggagaaacc

SEQ ID NO: 2220865 - RNA, 19 nt, Artificial Sequence
  Description of Artificial Sequence: Synthetic oligonucleotide
ucccgaugcaccaugccau

SEQ ID NO: 2220866 - RNA, 19 nt, Artificial Sequence
  Description of Artificial Sequence: Synthetic oligonucleotide
cugcccaucccgaugcacc

SEQ ID NO: 2220867 - RNA, 19 nt, Artificial Sequence
  Description of Artificial Sequence: Synthetic oligonucleotide
ugaggcaaggcagcucuag

SEQ ID NO: 2220868 - RNA, 19 nt, Artificial Sequence
  Description of Artificial Sequence: Synthetic oligonucleotide
uggcacaaggaggaagucc

SEQ ID NO: 2220869 - RNA, 19 nt, Artificial Sequence
  Description of Artificial Sequence: Synthetic oligonucleotide
uucugggcaaccuggcagu

SEQ ID NO: 2220870 - RNA, 19 nt, Artificial Sequence
  Description of Artificial Sequence: Synthetic oligonucleotide
agccgaugagaucagcccu

SEQ ID NO: 2220871 - RNA, 19 nt, Artificial Sequence
  Description of Artificial Sequence: Synthetic oligonucleotide
cagacacgugcuaucuugc

SEQ ID NO: 2220872 - RNA, 19 nt, Artificial Sequence
  Description of Artificial Sequence: Synthetic oligonucleotide
gaagggagaguucuccaaa

SEQ ID NO: 2220873 - RNA, 19 nt, Artificial Sequence
  Description of Artificial Sequence: Synthetic oligonucleotide
gaagggaacugcccacuac

SEQ ID NO: 2220874 - RNA, 19 nt, Artificial Sequence
  Description of Artificial Sequence: Synthetic oligonucleotide
ucuugccgaagucaaucau

SEQ ID NO: 2220875 - RNA, 19 nt, Artificial Sequence
  Description of Artificial Sequence: Synthetic oligonucleotide
agaagccccgcccacuugu

SEQ ID NO: 2220876 - RNA, 19 nt, Artificial Sequence
  Description of Artificial Sequence: Synthetic oligonucleotide
accccagagguagccaucc

SEQ ID NO: 2220877 - RNA, 19 nt, Artificial Sequence
  Description of Artificial Sequence: Synthetic oligonucleotide
uguugaauuuaguccuuuu

SEQ ID NO: 2220878 - RNA, 19 nt, Artificial Sequence
  Description of Artificial Sequence: Synthetic oligonucleotide
acuuauucggugaggcaag

SEQ ID NO: 2220879 - RNA, 19 nt, Artificial Sequence
  Description of Artificial Sequence: Synthetic oligonucleotide
cagcugacagcaucuuagg

SEQ ID NO: 2220880 - RNA, 19 nt, Artificial Sequence
  Description of Artificial Sequence: Synthetic oligonucleotide
ugauagaggggcccucaaa

SEQ ID NO: 2220881 - RNA, 19 nt, Artificial Sequence
  Description of Artificial Sequence: Synthetic oligonucleotide
uauucccaucccagagucc

SEQ ID NO: 2220882 - RNA, 19 nt, Artificial Sequence
  Description of Artificial Sequence: Synthetic oligonucleotide
agucuuugguuagaaccag

SEQ ID NO: 2220883 - RNA, 19 nt, Artificial Sequence
  Description of Artificial Sequence: Synthetic oligonucleotide
uccugagacaggagagcgc

SEQ ID NO: 2220884 - RNA, 19 nt, Artificial Sequence
  Description of Artificial Sequence: Synthetic oligonucleotide
guuagggccagaagccccg

SEQ ID NO: 2220885 - RNA, 19 nt, Artificial Sequence
  Description of Artificial Sequence: Synthetic oligonucleotide
acguacuuucucaggaguc

SEQ ID NO: 2220886 - RNA, 19 nt, Artificial Sequence
  Description of Artificial Sequence: Synthetic oligonucleotide
cugacagcaucuuagggcu

SEQ ID NO: 2220887 - RNA, 19 nt, Artificial Sequence
  Description of Artificial Sequence: Synthetic oligonucleotide
uuagggcuccucuggccag

SEQ ID NO: 2220888 - RNA, 19 nt, Artificial Sequence
  Description of Artificial Sequence: Synthetic oligonucleotide
ugagaucagcccugagcca

SEQ ID NO: 2220889 - RNA, 19 nt, Artificial Sequence
  Description of Artificial Sequence: Synthetic oligonucleotide
uuggaagaagggagaguuc

SEQ ID NO: 2220890 - RNA, 19 nt, Artificial Sequence
  Description of Artificial Sequence: Synthetic oligonucleotide
ggaucaaauuguccagacc

SEQ ID NO: 2220891 - RNA, 19 nt, Artificial Sequence
  Description of Artificial Sequence: Synthetic oligonucleotide
agcagcagccgaugagauc

SEQ ID NO: 2220892 - RNA, 19 nt, Artificial Sequence
  Description of Artificial Sequence: Synthetic oligonucleotide
aguucccaaggagaaaccu

SEQ ID NO: 2220893 - RNA, 19 nt, Artificial Sequence
  Description of Artificial Sequence: Synthetic oligonucleotide
uuauucggugaggcaaggc

SEQ ID NO: 2220894 - RNA, 19 nt, Artificial Sequence
  Description of Artificial Sequence: Synthetic oligonucleotide
cuuauucggugaggcaagg

SEQ ID NO: 2220895 - RNA, 19 nt, Artificial Sequence
  Description of Artificial Sequence: Synthetic oligonucleotide
gugcuaucuugcaagugag

SEQ ID NO: 2220896 - RNA, 19 nt, Artificial Sequence
  Description of Artificial Sequence: Synthetic oligonucleotide
cucuaguucccaaggagaa

SEQ ID NO: 2220897 - RNA, 19 nt, Artificial Sequence
  Description of Artificial Sequence: Synthetic oligonucleotide
gaggcggaucaaauugucc

SEQ ID NO: 2220898 - RNA, 19 nt, Artificial Sequence
  Description of Artificial Sequence: Synthetic oligonucleotide
ccugugacugagcauuugg

SEQ ID NO: 2220899 - RNA, 19 nt, Artificial Sequence
  Description of Artificial Sequence: Synthetic oligonucleotide
gcagcagccgaugagauca

SEQ ID NO: 2220900 - RNA, 19 nt, Artificial Sequence
  Description of Artificial Sequence: Synthetic oligonucleotide
ucuugcaguccaugauaga

SEQ ID NO: 2220901 - RNA, 19 nt, Artificial Sequence
  Description of Artificial Sequence: Synthetic oligonucleotide
cuuagggcuccucuggcca

SEQ ID NO: 2220902 - RNA, 19 nt, Artificial Sequence
  Description of Artificial Sequence: Synthetic oligonucleotide
ggagaaaccuccuccccug

SEQ ID NO: 2220903 - RNA, 19 nt, Artificial Sequence
  Description of Artificial Sequence: Synthetic oligonucleotide
gacacgugcuaucuugcaa

SEQ ID NO: 2220904 - RNA, 19 nt, Artificial Sequence
  Description of Artificial Sequence: Synthetic oligonucleotide
uguaguagguaggggcacu

SEQ ID NO: 2220905 - RNA, 19 nt, Artificial Sequence
  Description of Artificial Sequence: Synthetic oligonucleotide
ugguuagggccagaagccc

SEQ ID NO: 2220906 - RNA, 19 nt, Artificial Sequence
  Description of Artificial Sequence: Synthetic oligonucleotide
agcaggcacaaaaggccgc

SEQ ID NO: 2220907 - RNA, 19 nt, Artificial Sequence
  Description of Artificial Sequence: Synthetic oligonucleotide
agcauuugguggucaggca

SEQ ID NO: 2220908 - RNA, 19 nt, Artificial Sequence
  Description of Artificial Sequence: Synthetic oligonucleotide
cacuuauucggugaggcaa

SEQ ID NO: 2220909 - RNA, 19 nt, Artificial Sequence
  Description of Artificial Sequence: Synthetic oligonucleotide
gauguggccguggucuggc

SEQ ID NO: 2220910 - RNA, 19 nt, Artificial Sequence
  Description of Artificial Sequence: Synthetic oligonucleotide
ggguccguggcacaaggag

SEQ ID NO: 2220911 - RNA, 19 nt, Artificial Sequence
  Description of Artificial Sequence: Synthetic oligonucleotide
gcaccaguggauguggccg

SEQ ID NO: 2220912 - RNA, 19 nt, Artificial Sequence
  Description of Artificial Sequence: Synthetic oligonucleotide
uacuuucucaggaguccaa

SEQ ID NO: 2220913 - RNA, 19 nt, Artificial Sequence
  Description of Artificial Sequence: Synthetic oligonucleotide
ccagacacgugcuaucuug

SEQ ID NO: 2220914 - RNA, 19 nt, Artificial Sequence
  Description of Artificial Sequence: Synthetic oligonucleotide
agacacgugcuaucuugca

SEQ ID NO: 2220915 - RNA, 19 nt, Artificial Sequence
  Description of Artificial Sequence: Synthetic oligonucleotide
gccgguguggucauguacg

SEQ ID NO: 2220916 - RNA, 19 nt, Artificial Sequence
  Description of Artificial Sequence: Synthetic oligonucleotide
gagaaaccuccuccccugc

SEQ ID NO: 2220917 - RNA, 19 nt, Artificial Sequence
  Description of Artificial Sequence: Synthetic oligonucleotide
uccaugauagaggggcccu

SEQ ID NO: 2220918 - RNA, 19 nt, Artificial Sequence
  Description of Artificial Sequence: Synthetic oligonucleotide
gaagauggucacagugcug

SEQ ID NO: 2220919 - RNA, 19 nt, Artificial Sequence
  Description of Artificial Sequence: Synthetic oligonucleotide
auguacgaagagaagggaa

SEQ ID NO: 2220920 - RNA, 19 nt, Artificial Sequence
  Description of Artificial Sequence: Synthetic oligonucleotide
cuagcagcagccgaugaga

SEQ ID NO: 2220921 - RNA, 19 nt, Artificial Sequence
  Description of Artificial Sequence: Synthetic oligonucleotide
ucuaguucccaaggagaaa

SEQ ID NO: 2220922 - RNA, 19 nt, Artificial Sequence
  Description of Artificial Sequence: Synthetic oligonucleotide
acuggacucuccugagaca

SEQ ID NO: 2220923 - RNA, 19 nt, Artificial Sequence
  Description of Artificial Sequence: Synthetic oligonucleotide
acugucuugccgaagucaa

SEQ ID NO: 2220924 - RNA, 19 nt, Artificial Sequence
  Description of Artificial Sequence: Synthetic oligonucleotide
guuuagguuccugcuugcc

SEQ ID NO: 2220925 - RNA, 19 nt, Artificial Sequence
  Description of Artificial Sequence: Synthetic oligonucleotide
gguccguggcacaaggagg

SEQ ID NO: 2220926 - RNA, 19 nt, Artificial Sequence
  Description of Artificial Sequence: Synthetic oligonucleotide
ggcaaggcagcucuaguuc

SEQ ID NO: 2220927 - RNA, 19 nt, Artificial Sequence
  Description of Artificial Sequence: Synthetic oligonucleotide
uccaugguuagggccagaa

SEQ ID NO: 2220928 - RNA, 19 nt, Artificial Sequence
  Description of Artificial Sequence: Synthetic oligonucleotide
ccugagacaggagagcgcc

SEQ ID NO: 2220929 - RNA, 19 nt, Artificial Sequence
  Description of Artificial Sequence: Synthetic oligonucleotide
gucaaucauccagaccuug

SEQ ID NO: 2220930 - RNA, 19 nt, Artificial Sequence
  Description of Artificial Sequence: Synthetic oligonucleotide
gccauaauaagcaggcaca

SEQ ID NO: 2220931 - RNA, 19 nt, Artificial Sequence
  Description of Artificial Sequence: Synthetic oligonucleotide
agaccccagagguagccau

SEQ ID NO: 2220932 - RNA, 19 nt, Artificial Sequence
  Description of Artificial Sequence: Synthetic oligonucleotide
guucccaaggagaaaccuc

SEQ ID NO: 2220933 - RNA, 19 nt, Artificial Sequence
  Description of Artificial Sequence: Synthetic oligonucleotide
ugguugaaggccugcccau

SEQ ID NO: 2220934 - RNA, 19 nt, Artificial Sequence
  Description of Artificial Sequence: Synthetic oligonucleotide
agucugccaggagaucuuc

SEQ ID NO: 2220935 - RNA, 19 nt, Artificial Sequence
  Description of Artificial Sequence: Synthetic oligonucleotide
cugagacaggagagcgccg

SEQ ID NO: 2220936 - RNA, 19 nt, Artificial Sequence
  Description of Artificial Sequence: Synthetic oligonucleotide
ggcagcucuaguucccaag

SEQ ID NO: 2220937 - RNA, 19 nt, Artificial Sequence
  Description of Artificial Sequence: Synthetic oligonucleotide
cugccucagaaauggcuuc

SEQ ID NO: 2220938 - RNA, 19 nt, Artificial Sequence
  Description of Artificial Sequence: Synthetic oligonucleotide
agaucagcccugagccagc

SEQ ID NO: 2220939 - RNA, 19 nt, Artificial Sequence
  Description of Artificial Sequence: Synthetic oligonucleotide
ccagaccuuggccaggccg

SEQ ID NO: 2220940 - RNA, 19 nt, Artificial Sequence
  Description of Artificial Sequence: Synthetic oligonucleotide
gaaaccuccuccccugccu

SEQ ID NO: 2220941 - RNA, 19 nt, Artificial Sequence
  Description of Artificial Sequence: Synthetic oligonucleotide
caucccgaugcaccaugcc

SEQ ID NO: 2220942 - RNA, 19 nt, Artificial Sequence
  Description of Artificial Sequence: Synthetic oligonucleotide
gcaucuuagggcuccucug

SEQ ID NO: 2220943 - RNA, 19 nt, Artificial Sequence
  Description of Artificial Sequence: Synthetic oligonucleotide
cauguacgaagagaaggga

SEQ ID NO: 2220944 - RNA, 19 nt, Artificial Sequence
  Description of Artificial Sequence: Synthetic oligonucleotide
cacggagguccuccagucg

SEQ ID NO: 2220945 - RNA, 19 nt, Artificial Sequence
  Description of Artificial Sequence: Synthetic oligonucleotide
uguccagaccccagaggua

SEQ ID NO: 2220946 - RNA, 19 nt, Artificial Sequence
  Description of Artificial Sequence: Synthetic oligonucleotide
uggucacagugcuggcacc

SEQ ID NO: 2220947 - RNA, 19 nt, Artificial Sequence
  Description of Artificial Sequence: Synthetic oligonucleotide
aaagccucacggagguccu

SEQ ID NO: 2220948 - RNA, 19 nt, Artificial Sequence
  Description of Artificial Sequence: Synthetic oligonucleotide
guccaugauagaggggccc

SEQ ID NO: 2220949 - RNA, 19 nt, Artificial Sequence
  Description of Artificial Sequence: Synthetic oligonucleotide
caccuuugucauucaccag

SEQ ID NO: 2220950 - RNA, 19 nt, Artificial Sequence
  Description of Artificial Sequence: Synthetic oligonucleotide
aaggccugcccaucccgau

SEQ ID NO: 2220951 - RNA, 19 nt, Artificial Sequence
  Description of Artificial Sequence: Synthetic oligonucleotide
uuguugaauuuaguccuuu

SEQ ID NO: 2220952 - RNA, 19 nt, Artificial Sequence
  Description of Artificial Sequence: Synthetic oligonucleotide
ugucacuggcacacaccaa

SEQ ID NO: 2220953 - RNA, 19 nt, Artificial Sequence
  Description of Artificial Sequence: Synthetic oligonucleotide
agcagccgaugagaucagc

SEQ ID NO: 2220954 - RNA, 19 nt, Artificial Sequence
  Description of Artificial Sequence: Synthetic oligonucleotide
gcacaaaaggccgcagggg

SEQ ID NO: 2220955 - RNA, 19 nt, Artificial Sequence
  Description of Artificial Sequence: Synthetic oligonucleotide
gguuuagguuccugcuugc

SEQ ID NO: 2220956 - RNA, 19 nt, Artificial Sequence
  Description of Artificial Sequence: Synthetic oligonucleotide
aggagaucuuccaucuggu

SEQ ID NO: 2220957 - RNA, 19 nt, Artificial Sequence
  Description of Artificial Sequence: Synthetic oligonucleotide
auguggccguggucuggcc

SEQ ID NO: 2220958 - RNA, 19 nt, Artificial Sequence
  Description of Artificial Sequence: Synthetic oligonucleotide
cagccccugaaggaggcgg

SEQ ID NO: 2220959 - RNA, 19 nt, Artificial Sequence
  Description of Artificial Sequence: Synthetic oligonucleotide
guccccaucgacaaagucu

SEQ ID NO: 2220960 - RNA, 19 nt, Artificial Sequence
  Description of Artificial Sequence: Synthetic oligonucleotide
ugguuagaaccagguaguc

SEQ ID NO: 2220961 - RNA, 19 nt, Artificial Sequence
  Description of Artificial Sequence: Synthetic oligonucleotide
cuuugguuagaaccaggua

SEQ ID NO: 2220962 - RNA, 19 nt, Artificial Sequence
  Description of Artificial Sequence: Synthetic oligonucleotide
guacuuucucaggagucca

SEQ ID NO: 2220963 - RNA, 19 nt, Artificial Sequence
  Description of Artificial Sequence: Synthetic oligonucleotide
accagguaguccaugguua

SEQ ID NO: 2220964 - RNA, 19 nt, Artificial Sequence
  Description of Artificial Sequence: Synthetic oligonucleotide
ucagcccaaggcagccugu

SEQ ID NO: 2220965 - RNA, 19 nt, Artificial Sequence
  Description of Artificial Sequence: Synthetic oligonucleotide
caagugagccuagcagcag

SEQ ID NO: 2220966 - RNA, 19 nt, Artificial Sequence
  Description of Artificial Sequence: Synthetic oligonucleotide
agaagggaacugcccacua

SEQ ID NO: 2220967 - RNA, 19 nt, Artificial Sequence
  Description of Artificial Sequence: Synthetic oligonucleotide
guccuggagucuuugguua

SEQ ID NO: 2220968 - RNA, 19 nt, Artificial Sequence
  Description of Artificial Sequence: Synthetic oligonucleotide
ggugaggcaaggcagcucu

SEQ ID NO: 2220969 - RNA, 19 nt, Artificial Sequence
  Description of Artificial Sequence: Synthetic oligonucleotide
guccguggcacaaggagga

SEQ ID NO: 2220970 - RNA, 19 nt, Artificial Sequence
  Description of Artificial Sequence: Synthetic oligonucleotide
gaaauggcuuccugucacu

SEQ ID NO: 2220971 - RNA, 19 nt, Artificial Sequence
  Description of Artificial Sequence: Synthetic oligonucleotide
aggaggcggaucaaauugu

SEQ ID NO: 2220972 - RNA, 19 nt, Artificial Sequence
  Description of Artificial Sequence: Synthetic oligonucleotide
cccaucgacaaagucuucc

SEQ ID NO: 2220973 - RNA, 19 nt, Artificial Sequence
  Description of Artificial Sequence: Synthetic oligonucleotide
augauagaggggcccucaa

SEQ ID NO: 2220974 - RNA, 19 nt, Artificial Sequence
  Description of Artificial Sequence: Synthetic oligonucleotide
gaggggcccucaaagucug

SEQ ID NO: 2220975 - RNA, 19 nt, Artificial Sequence
  Description of Artificial Sequence: Synthetic oligonucleotide
ggggcacuuauucggugag

SEQ ID NO: 2220976 - RNA, 19 nt, Artificial Sequence
  Description of Artificial Sequence: Synthetic oligonucleotide
gaaggaggcggaucaaauu

SEQ ID NO: 2220977 - RNA, 19 nt, Artificial Sequence
  Description of Artificial Sequence: Synthetic oligonucleotide
guguggucauguacgaaga

SEQ ID NO: 2220978 - RNA, 19 nt, Artificial Sequence
  Description of Artificial Sequence: Synthetic oligonucleotide
guccaagguccccaucgac

SEQ ID NO: 2220979 - RNA, 19 nt, Artificial Sequence
  Description of Artificial Sequence: Synthetic oligonucleotide
gguuagggccagaagcccc

SEQ ID NO: 2220980 - RNA, 19 nt, Artificial Sequence
  Description of Artificial Sequence: Synthetic oligonucleotide
gugagccuagcagcagccg

SEQ ID NO: 2220981 - RNA, 19 nt, Artificial Sequence
  Description of Artificial Sequence: Synthetic oligonucleotide
gaucagcccugagccagcc

SEQ ID NO: 2220982 - RNA, 19 nt, Artificial Sequence
  Description of Artificial Sequence: Synthetic oligonucleotide
ccaaggaaggaagaugguc

SEQ ID NO: 2220983 - RNA, 19 nt, Artificial Sequence
  Description of Artificial Sequence: Synthetic oligonucleotide
ccagagguagccauccuca

SEQ ID NO: 2220984 - RNA, 19 nt, Artificial Sequence
  Description of Artificial Sequence: Synthetic oligonucleotide
uggccagacacgugcuauc

SEQ ID NO: 2220985 - RNA, 19 nt, Artificial Sequence
  Description of Artificial Sequence: Synthetic oligonucleotide
gcagccgaugagaucagcc

SEQ ID NO: 2220986 - RNA, 19 nt, Artificial Sequence
  Description of Artificial Sequence: Synthetic oligonucleotide
ugacagcaucuuagggcuc

SEQ ID NO: 2220987 - RNA, 19 nt, Artificial Sequence
  Description of Artificial Sequence: Synthetic oligonucleotide
ggcaccaguggauguggcc

SEQ ID NO: 2220988 - RNA, 19 nt, Artificial Sequence
  Description of Artificial Sequence: Synthetic oligonucleotide
aguccaugguuagggccag

SEQ ID NO: 2220989 - RNA, 19 nt, Artificial Sequence
  Description of Artificial Sequence: Synthetic oligonucleotide
cauaauaagcaggcacaaa

SEQ ID NO: 2220990 - RNA, 19 nt, Artificial Sequence
  Description of Artificial Sequence: Synthetic oligonucleotide
ggccugcccaucccgaugc

SEQ ID NO: 2220991 - RNA, 19 nt, Artificial Sequence
  Description of Artificial Sequence: Synthetic oligonucleotide
caugauagaggggcccuca

SEQ ID NO: 2220992 - RNA, 19 nt, Artificial Sequence
  Description of Artificial Sequence: Synthetic oligonucleotide
gcucuaguucccaaggaga

SEQ ID NO: 2220993 - RNA, 19 nt, Artificial Sequence
  Description of Artificial Sequence: Synthetic oligonucleotide
aggccugcccaucccgaug

SEQ ID NO: 2220994 - RNA, 19 nt, Artificial Sequence
  Description of Artificial Sequence: Synthetic oligonucleotide
caucgacaaagucuuccaa

SEQ ID NO: 2220995 - RNA, 19 nt, Artificial Sequence
  Description of Artificial Sequence: Synthetic oligonucleotide
agaguucuccaaagccuca

SEQ ID NO: 2220996 - RNA, 19 nt, Artificial Sequence
  Description of Artificial Sequence: Synthetic oligonucleotide
gacaggagagcgccggggu

SEQ ID NO: 2220997 - RNA, 19 nt, Artificial Sequence
  Description of Artificial Sequence: Synthetic oligonucleotide
guacgaagagaagggaacu

SEQ ID NO: 2220998 - RNA, 19 nt, Artificial Sequence
  Description of Artificial Sequence: Synthetic oligonucleotide
ggagaguucuccaaagccu

SEQ ID NO: 2220999 - RNA, 19 nt, Artificial Sequence
  Description of Artificial Sequence: Synthetic oligonucleotide
gaaccagguaguccauggu

SEQ ID NO: 2221000 - RNA, 19 nt, Artificial Sequence
  Description of Artificial Sequence: Synthetic oligonucleotide
augcaccaugccauaauaa

SEQ ID NO: 2221001 - RNA, 19 nt, Artificial Sequence
  Description of Artificial Sequence: Synthetic oligonucleotide
ccacguacuuucucaggag

SEQ ID NO: 2221002 - RNA, 19 nt, Artificial Sequence
  Description of Artificial Sequence: Synthetic oligonucleotide
gcccaaggcagccugugac

SEQ ID NO: 2221003 - RNA, 19 nt, Artificial Sequence
  Description of Artificial Sequence: Synthetic oligonucleotide
uagguuccugcuugcccau

SEQ ID NO: 2221004 - RNA, 19 nt, Artificial Sequence
  Description of Artificial Sequence: Synthetic oligonucleotide
augccauaauaagcaggca

SEQ ID NO: 2221005 - RNA, 19 nt, Artificial Sequence
  Description of Artificial Sequence: Synthetic oligonucleotide
gaaggccugcccaucccga

SEQ ID NO: 2221006 - RNA, 19 nt, Artificial Sequence
  Description of Artificial Sequence: Synthetic oligonucleotide
cacguacuuucucaggagu

SEQ ID NO: 2221007 - RNA, 19 nt, Artificial Sequence
  Description of Artificial Sequence: Synthetic oligonucleotide
caaagucugccaggagauc

SEQ ID NO: 2221008 - RNA, 19 nt, Artificial Sequence
  Description of Artificial Sequence: Synthetic oligonucleotide
gagagcgccgggguccgug

SEQ ID NO: 2221009 - RNA, 19 nt, Artificial Sequence
  Description of Artificial Sequence: Synthetic oligonucleotide
accaaggaaggaagauggu

SEQ ID NO: 2221010 - RNA, 19 nt, Artificial Sequence
  Description of Artificial Sequence: Synthetic oligonucleotide
agguagccauccucacggu

SEQ ID NO: 2221011 - RNA, 19 nt, Artificial Sequence
  Description of Artificial Sequence: Synthetic oligonucleotide
gcaaccuggcaguuccuuc

SEQ ID NO: 2221012 - RNA, 19 nt, Artificial Sequence
  Description of Artificial Sequence: Synthetic oligonucleotide
ccucaugggucuuggaaga

SEQ ID NO: 2221013 - RNA, 19 nt, Artificial Sequence
  Description of Artificial Sequence: Synthetic oligonucleotide
uccuccagucgcgccacgu

SEQ ID NO: 2221014 - RNA, 19 nt, Artificial Sequence
  Description of Artificial Sequence: Synthetic oligonucleotide
cggaucaaauuguccagac

SEQ ID NO: 2221015 - RNA, 19 nt, Artificial Sequence
  Description of Artificial Sequence: Synthetic oligonucleotide
gagaagggaacugcccacu

SEQ ID NO: 2221016 - RNA, 19 nt, Artificial Sequence
  Description of Artificial Sequence: Synthetic oligonucleotide
uuccugucacuggacucuc

SEQ ID NO: 2221017 - RNA, 19 nt, Artificial Sequence
  Description of Artificial Sequence: Synthetic oligonucleotide
gaagccccgcccacuugug

SEQ ID NO: 2221018 - RNA, 19 nt, Artificial Sequence
  Description of Artificial Sequence: Synthetic oligonucleotide
uaguagguaggggcacuua

SEQ ID NO: 2221019 - RNA, 19 nt, Artificial Sequence
  Description of Artificial Sequence: Synthetic oligonucleotide
ucgcgccacguacuuucuc

SEQ ID NO: 2221020 - RNA, 19 nt, Artificial Sequence
  Description of Artificial Sequence: Synthetic oligonucleotide
ccaugguuagggccagaag

SEQ ID NO: 2221021 - RNA, 19 nt, Artificial Sequence
  Description of Artificial Sequence: Synthetic oligonucleotide
cugaaggaggcggaucaaa

SEQ ID NO: 2221022 - RNA, 19 nt, Artificial Sequence
  Description of Artificial Sequence: Synthetic oligonucleotide
ggccgguguggucauguac

SEQ ID NO: 2221023 - RNA, 19 nt, Artificial Sequence
  Description of Artificial Sequence: Synthetic oligonucleotide
gcgccacguacuuucucag

SEQ ID NO: 2221024 - RNA, 19 nt, Artificial Sequence
  Description of Artificial Sequence: Synthetic oligonucleotide
agcgccgggguccguggca

SEQ ID NO: 2221025 - RNA, 19 nt, Artificial Sequence
  Description of Artificial Sequence: Synthetic oligonucleotide
uuccaacaccuuugucauu

SEQ ID NO: 2221026 - RNA, 19 nt, Artificial Sequence
  Description of Artificial Sequence: Synthetic oligonucleotide
gccaggagaucuuccaucu

SEQ ID NO: 2221027 - RNA, 19 nt, Artificial Sequence
  Description of Artificial Sequence: Synthetic oligonucleotide
gcacuuauucggugaggca

SEQ ID NO: 2221028 - RNA, 19 nt, Artificial Sequence
  Description of Artificial Sequence: Synthetic oligonucleotide
cccagagguagccauccuc

SEQ ID NO: 2221029 - RNA, 19 nt, Artificial Sequence
  Description of Artificial Sequence: Synthetic oligonucleotide
ggauguggccguggucugg

SEQ ID NO: 2221030 - RNA, 19 nt, Artificial Sequence
  Description of Artificial Sequence: Synthetic oligonucleotide
gccgaugagaucagcccug

SEQ ID NO: 2221031 - RNA, 19 nt, Artificial Sequence
  Description of Artificial Sequence: Synthetic oligonucleotide
uagggcuccucuggccaga

SEQ ID NO: 2221032 - RNA, 19 nt, Artificial Sequence
  Description of Artificial Sequence: Synthetic oligonucleotide
ccaaggcagccugugacug

SEQ ID NO: 2221033 - RNA, 19 nt, Artificial Sequence
  Description of Artificial Sequence: Synthetic oligonucleotide
cccugaaggaggcggauca

SEQ ID NO: 2221034 - RNA, 19 nt, Artificial Sequence
  Description of Artificial Sequence: Synthetic oligonucleotide
ggaagaagggagaguucuc

SEQ ID NO: 2221035 - RNA, 19 nt, Artificial Sequence
  Description of Artificial Sequence: Synthetic oligonucleotide
gggcacuuauucggugagg

SEQ ID NO: 2221036 - RNA, 19 nt, Artificial Sequence
  Description of Artificial Sequence: Synthetic oligonucleotide
cagaagccccgcccacuug

SEQ ID NO: 2221037 - RNA, 19 nt, Artificial Sequence
  Description of Artificial Sequence: Synthetic oligonucleotide
ggaggcggaucaaauuguc

SEQ ID NO: 2221038 - RNA, 19 nt, Artificial Sequence
  Description of Artificial Sequence: Synthetic oligonucleotide
gaccccagagguagccauc

SEQ ID NO: 2221039 - RNA, 19 nt, Artificial Sequence
  Description of Artificial Sequence: Synthetic oligonucleotide
ggucacagugcuggcacca

SEQ ID NO: 2221040 - RNA, 19 nt, Artificial Sequence
  Description of Artificial Sequence: Synthetic oligonucleotide
cccaaggagaaaccuccuc

SEQ ID NO: 2221041 - RNA, 19 nt, Artificial Sequence
  Description of Artificial Sequence: Synthetic oligonucleotide
cagcccaaggcagccugug

SEQ ID NO: 2221042 - RNA, 19 nt, Artificial Sequence
  Description of Artificial Sequence: Synthetic oligonucleotide
cuaccucaugggucuugga

SEQ ID NO: 2221043 - RNA, 19 nt, Artificial Sequence
  Description of Artificial Sequence: Synthetic oligonucleotide
guaggggcacuuauucggu

SEQ ID NO: 2221044 - RNA, 19 nt, Artificial Sequence
  Description of Artificial Sequence: Synthetic oligonucleotide
guggccguggucuggcccu

SEQ ID NO: 2221045 - RNA, 19 nt, Artificial Sequence
  Description of Artificial Sequence: Synthetic oligonucleotide
ucugggcaaccuggcaguu

SEQ ID NO: 2221046 - RNA, 19 nt, Artificial Sequence
  Description of Artificial Sequence: Synthetic oligonucleotide
cuucuguguguaguaggua

SEQ ID NO: 2221047 - RNA, 19 nt, Artificial Sequence
  Description of Artificial Sequence: Synthetic oligonucleotide
guggcacaaggaggaaguc

SEQ ID NO: 2221048 - RNA, 19 nt, Artificial Sequence
  Description of Artificial Sequence: Synthetic oligonucleotide
gcggaucaaauuguccaga

SEQ ID NO: 2221049 - RNA, 19 nt, Artificial Sequence
  Description of Artificial Sequence: Synthetic oligonucleotide
cccacuaccucaugggucu

SEQ ID NO: 2221050 - RNA, 19 nt, Artificial Sequence
  Description of Artificial Sequence: Synthetic oligonucleotide
cccaucccgaugcaccaug

SEQ ID NO: 2221051 - RNA, 19 nt, Artificial Sequence
  Description of Artificial Sequence: Synthetic oligonucleotide
ccauaauaagcaggcacaa

SEQ ID NO: 2221052 - RNA, 19 nt, Artificial Sequence
  Description of Artificial Sequence: Synthetic oligonucleotide
cacaccaaggaaggaagau

SEQ ID NO: 2221053 - RNA, 19 nt, Artificial Sequence
  Description of Artificial Sequence: Synthetic oligonucleotide
ggaaguccugagacuguca

SEQ ID NO: 2221054 - RNA, 19 nt, Artificial Sequence
  Description of Artificial Sequence: Synthetic oligonucleotide
uccguggcacaaggaggaa

SEQ ID NO: 2221055 - RNA, 19 nt, Artificial Sequence
  Description of Artificial Sequence: Synthetic oligonucleotide
gguugaaggccugcccauc

SEQ ID NO: 2221056 - RNA, 19 nt, Artificial Sequence
  Description of Artificial Sequence: Synthetic oligonucleotide
gcccacuaccucauggguc

SEQ ID NO: 2221057 - RNA, 19 nt, Artificial Sequence
  Description of Artificial Sequence: Synthetic oligonucleotide
gccguggucuggcccugcg

SEQ ID NO: 2221058 - RNA, 19 nt, Artificial Sequence
  Description of Artificial Sequence: Synthetic oligonucleotide
gagccuagcagcagccgau

SEQ ID NO: 2221059 - RNA, 19 nt, Artificial Sequence
  Description of Artificial Sequence: Synthetic oligonucleotide
guagguaggggcacuuauu

SEQ ID NO: 2221060 - RNA, 19 nt, Artificial Sequence
  Description of Artificial Sequence: Synthetic oligonucleotide
cagguuuagguuccugcuu

SEQ ID NO: 2221061 - RNA, 19 nt, Artificial Sequence
  Description of Artificial Sequence: Synthetic oligonucleotide
cuccuccccugccucagaa

SEQ ID NO: 2221062 - RNA, 19 nt, Artificial Sequence
  Description of Artificial Sequence: Synthetic oligonucleotide
cgccacguacuuucucagg

SEQ ID NO: 2221063 - RNA, 19 nt, Artificial Sequence
  Description of Artificial Sequence: Synthetic oligonucleotide
ggaguccaagguccccauc

SEQ ID NO: 2221064 - RNA, 19 nt, Artificial Sequence
  Description of Artificial Sequence: Synthetic oligonucleotide
agguccccaucgacaaagu

SEQ ID NO: 2221065 - RNA, 19 nt, Artificial Sequence
  Description of Artificial Sequence: Synthetic oligonucleotide
ggcagcugacagcaucuua

SEQ ID NO: 2221066 - RNA, 19 nt, Artificial Sequence
  Description of Artificial Sequence: Synthetic oligonucleotide
cccugcggcagcugacagc

SEQ ID NO: 2221067 - RNA, 19 nt, Artificial Sequence
  Description of Artificial Sequence: Synthetic oligonucleotide
gcccugcggcagcugacag

SEQ ID NO: 2221068 - RNA, 19 nt, Artificial Sequence
  Description of Artificial Sequence: Synthetic oligonucleotide
cagcaucuuagggcuccuc

SEQ ID NO: 2221069 - RNA, 19 nt, Artificial Sequence
  Description of Artificial Sequence: Synthetic oligonucleotide
cgcgccacguacuuucuca

SEQ ID NO: 2221070 - RNA, 19 nt, Artificial Sequence
  Description of Artificial Sequence: Synthetic oligonucleotide
caccaguggauguggccgu

SEQ ID NO: 2221071 - RNA, 19 nt, Artificial Sequence
  Description of Artificial Sequence: Synthetic oligonucleotide
cgggguccguggcacaagg

SEQ ID NO: 2221072 - RNA, 19 nt, Artificial Sequence
  Description of Artificial Sequence: Synthetic oligonucleotide
cuccucuggccagacacgu

SEQ ID NO: 2221073 - RNA, 19 nt, Artificial Sequence
  Description of Artificial Sequence: Synthetic oligonucleotide
ccguggucuggcccugcgg

SEQ ID NO: 2221074 - RNA, 19 nt, Artificial Sequence
  Description of Artificial Sequence: Synthetic oligonucleotide
aggccgguguggucaugua

SEQ ID NO: 2221075 - RNA, 19 nt, Artificial Sequence
  Description of Artificial Sequence: Synthetic oligonucleotide
gccugugacugagcauuug

SEQ ID NO: 2221076 - RNA, 19 nt, Artificial Sequence
  Description of Artificial Sequence: Synthetic oligonucleotide
guaguagguaggggcacuu

SEQ ID NO: 2221077 - RNA, 19 nt, Artificial Sequence
  Description of Artificial Sequence: Synthetic oligonucleotide
agccugugacugagcauuu

SEQ ID NO: 2221078 - RNA, 19 nt, Artificial Sequence
  Description of Artificial Sequence: Synthetic oligonucleotide
cugucuugccgaagucaau

SEQ ID NO: 2221079 - RNA, 19 nt, Artificial Sequence
  Description of Artificial Sequence: Synthetic oligonucleotide
ccgguguggucauguacga

SEQ ID NO: 2221080 - RNA, 19 nt, Artificial Sequence
  Description of Artificial Sequence: Synthetic oligonucleotide
ccaugauagaggggcccuc

SEQ ID NO: 2221081 - RNA, 19 nt, Artificial Sequence
  Description of Artificial Sequence: Synthetic oligonucleotide
ggccagacacgugcuaucu

SEQ ID NO: 2221082 - RNA, 19 nt, Artificial Sequence
  Description of Artificial Sequence: Synthetic oligonucleotide
cgaugagaucagcccugag

SEQ ID NO: 2221083 - RNA, 19 nt, Artificial Sequence
  Description of Artificial Sequence: Synthetic oligonucleotide
caggcagggccacugucuu

SEQ ID NO: 2221084 - RNA, 19 nt, Artificial Sequence
  Description of Artificial Sequence: Synthetic oligonucleotide
ggcccugcggcagcugaca

SEQ ID NO: 2221085 - RNA, 19 nt, Artificial Sequence
  Description of Artificial Sequence: Synthetic oligonucleotide
cccaaggcagccugugacu

SEQ ID NO: 2221086 - RNA, 19 nt, Artificial Sequence
  Description of Artificial Sequence: Synthetic oligonucleotide
ggucaggcagggccacugu

SEQ ID NO: 2221087 - RNA, 19 nt, Artificial Sequence
  Description of Artificial Sequence: Synthetic oligonucleotide
cagcccugagccagccccu

SEQ ID NO: 2221088 - RNA, 19 nt, Artificial Sequence
  Description of Artificial Sequence: Synthetic oligonucleotide
guccaugguuagggccaga

SEQ ID NO: 2221089 - RNA, 19 nt, Artificial Sequence
  Description of Artificial Sequence: Synthetic oligonucleotide
gugaggcaaggcagcucua

SEQ ID NO: 2221090 - RNA, 19 nt, Artificial Sequence
  Description of Artificial Sequence: Synthetic oligonucleotide
gggccacugucuugccgaa

SEQ ID NO: 2221091 - RNA, 19 nt, Artificial Sequence
  Description of Artificial Sequence: Synthetic oligonucleotide
gggguccguggcacaagga

SEQ ID NO: 2221092 - RNA, 19 nt, Artificial Sequence
  Description of Artificial Sequence: Synthetic oligonucleotide
ccgaugagaucagcccuga

SEQ ID NO: 2221093 - RNA, 19 nt, Artificial Sequence
  Description of Artificial Sequence: Synthetic oligonucleotide
ccccaucgacaaagucuuc

SEQ ID NO: 2221094 - RNA, 19 nt, Artificial Sequence
  Description of Artificial Sequence: Synthetic oligonucleotide
gucgcgccacguacuuucu

SEQ ID NO: 2221095 - RNA, 19 nt, Artificial Sequence
  Description of Artificial Sequence: Synthetic oligonucleotide
gcgccgggguccguggcac

SEQ ID NO: 2221096 - RNA, 19 nt, Artificial Sequence
  Description of Artificial Sequence: Synthetic oligonucleotide
cccgaugcaccaugccaua

SEQ ID NO: 2221097 - RNA, 19 nt, Artificial Sequence
  Description of Artificial Sequence: Synthetic oligonucleotide
ggcaaccuggcaguuccuu

SEQ ID NO: 2221098 - RNA, 19 nt, Artificial Sequence
  Description of Artificial Sequence: Synthetic oligonucleotide
ccaaagccucacggagguc

SEQ ID NO: 2221099 - RNA, 19 nt, Artificial Sequence
  Description of Artificial Sequence: Synthetic oligonucleotide
ccuccagucgcgccacgua

SEQ ID NO: 2221100 - RNA, 19 nt, Artificial Sequence
  Description of Artificial Sequence: Synthetic oligonucleotide
ccgggguccguggcacaag

SEQ ID NO: 2221101 - RNA, 19 nt, Artificial Sequence
  Description of Artificial Sequence: Synthetic oligonucleotide
gccagacacgugcuaucuu

SEQ ID NO: 2221102 - RNA, 19 nt, Artificial Sequence
  Description of Artificial Sequence: Synthetic oligonucleotide
ccgaugcaccaugccauaa

SEQ ID NO: 2221103 - RNA, 19 nt, Artificial Sequence
  Description of Artificial Sequence: Synthetic oligonucleotide
gccgggguccguggcacaa

SEQ ID NO: 2221104 - RNA, 19 nt, Artificial Sequence
  Description of Artificial Sequence: Synthetic oligonucleotide
ccgcccacuugugcuucug

SEQ ID NO: 2221105 - RNA, 19 nt, Artificial Sequence
  Description of Artificial Sequence: Synthetic oligonucleotide
ccagaagccccgcccacuu

SEQ ID NO: 2221106 - RNA, 19 nt, Artificial Sequence
  Description of Artificial Sequence: Synthetic oligonucleotide
cggugaggcaaggcagcuc

SEQ ID NO: 2221107 - RNA, 19 nt, Artificial Sequence
  Description of Artificial Sequence: Synthetic oligonucleotide
ccccgcccacuugugcuuc

SEQ ID NO: 2221108 - RNA, 19 nt, Artificial Sequence
  Description of Artificial Sequence: Synthetic oligonucleotide
ccagucgcgccacguacuu

SEQ ID NO: 2221109 - RNA, 19 nt, Artificial Sequence
  Description of Artificial Sequence: Synthetic oligonucleotide
gccaggccgguguggucau

SEQ ID NO: 2221110 - RNA, 19 nt, Artificial Sequence
  Description of Artificial Sequence: Synthetic oligonucleotide
cagucgcgccacguacuuu

SEQ ID NO: 2221111 - RNA, 19 nt, Artificial Sequence
  Description of Artificial Sequence: Synthetic oligonucleotide
ccaggccgguguggucaug

SEQ ID NO: 2221112 - RNA, 19 nt, Artificial Sequence
  Description of Artificial Sequence: Synthetic oligonucleotide
gggcaaccuggcaguuccu

SEQ ID NO: 2221113 - RNA, 19 nt, Artificial Sequence
  Description of Artificial Sequence: Synthetic oligonucleotide
cgccgggguccguggcaca

SEQ ID NO: 2221114 - RNA, 19 nt, Artificial Sequence
  Description of Artificial Sequence: Synthetic oligonucleotide
ggagagcgccgggguccgu

SEQ ID NO: 2221115 - RNA, 19 nt, Artificial Sequence
  Description of Artificial Sequence: Synthetic oligonucleotide
ccacuaccucaugggucuu

SEQ ID NO: 2221116 - RNA, 19 nt, Artificial Sequence
  Description of Artificial Sequence: Synthetic oligonucleotide
aaaucauucccuuaguuuc

SEQ ID NO: 2221117 - RNA, 19 nt, Artificial Sequence
  Description of Artificial Sequence: Synthetic oligonucleotide
gaugucauauaacacagcg

SEQ ID NO: 2221118 - RNA, 19 nt, Artificial Sequence
  Description of Artificial Sequence: Synthetic oligonucleotide
aagaagauuggguacaguc

SEQ ID NO: 2221119 - RNA, 19 nt, Artificial Sequence
  Description of Artificial Sequence: Synthetic oligonucleotide
uguaguugcaaccaaguag

SEQ ID NO: 2221120 - RNA, 19 nt, Artificial Sequence
  Description of Artificial Sequence: Synthetic oligonucleotide
uuggguacagucuauauag

SEQ ID NO: 2221121 - RNA, 19 nt, Artificial Sequence
  Description of Artificial Sequence: Synthetic oligonucleotide
uauuuauuguguuugggag

SEQ ID NO: 2221122 - RNA, 19 nt, Artificial Sequence
  Description of Artificial Sequence: Synthetic oligonucleotide
gaaaauagcucccaagcag

SEQ ID NO: 2221123 - RNA, 19 nt, Artificial Sequence
  Description of Artificial Sequence: Synthetic oligonucleotide
ucaggauggacccucaggg

SEQ ID NO: 2221124 - RNA, 19 nt, Artificial Sequence
  Description of Artificial Sequence: Synthetic oligonucleotide
aauucuuuaggaugauguc

SEQ ID NO: 2221125 - RNA, 19 nt, Artificial Sequence
  Description of Artificial Sequence: Synthetic oligonucleotide
ucuucuugggaaaauagcu

SEQ ID NO: 2221126 - RNA, 19 nt, Artificial Sequence
  Description of Artificial Sequence: Synthetic oligonucleotide
guacuuagagauuugagug

SEQ ID NO: 2221127 - RNA, 19 nt, Artificial Sequence
  Description of Artificial Sequence: Synthetic oligonucleotide
ucugcuguacccaucacag

SEQ ID NO: 2221128 - RNA, 19 nt, Artificial Sequence
  Description of Artificial Sequence: Synthetic oligonucleotide
aguacuuagagauuugagu

SEQ ID NO: 2221129 - RNA, 19 nt, Artificial Sequence
  Description of Artificial Sequence: Synthetic oligonucleotide
uuucauugcaguucacugg

SEQ ID NO: 2221130 - RNA, 19 nt, Artificial Sequence
  Description of Artificial Sequence: Synthetic oligonucleotide
uuacggaucuccaugacca

SEQ ID NO: 2221131 - RNA, 19 nt, Artificial Sequence
  Description of Artificial Sequence: Synthetic oligonucleotide
aacacauccaccuuggcuu

SEQ ID NO: 2221132 - RNA, 19 nt, Artificial Sequence
  Description of Artificial Sequence: Synthetic oligonucleotide
auuacggaucuccaugacc

SEQ ID NO: 2221133 - RNA, 19 nt, Artificial Sequence
  Description of Artificial Sequence: Synthetic oligonucleotide
cacagaauaagagaggagg

SEQ ID NO: 2221134 - RNA, 19 nt, Artificial Sequence
  Description of Artificial Sequence: Synthetic oligonucleotide
ucuauauaguuccugguaa

SEQ ID NO: 2221135 - RNA, 19 nt, Artificial Sequence
  Description of Artificial Sequence: Synthetic oligonucleotide
guugcaaccaaguagugac

SEQ ID NO: 2221136 - RNA, 19 nt, Artificial Sequence
  Description of Artificial Sequence: Synthetic oligonucleotide
cacagcguaagcauuacgg

SEQ ID NO: 2221137 - RNA, 19 nt, Artificial Sequence
  Description of Artificial Sequence: Synthetic oligonucleotide
aaugcauccagcucugaga

SEQ ID NO: 2221138 - RNA, 19 nt, Artificial Sequence
  Description of Artificial Sequence: Synthetic oligonucleotide
auaaucacccacguggggc

SEQ ID NO: 2221139 - RNA, 19 nt, Artificial Sequence
  Description of Artificial Sequence: Synthetic oligonucleotide
auauuuauuguguuuggga

SEQ ID NO: 2221140 - RNA, 19 nt, Artificial Sequence
  Description of Artificial Sequence: Synthetic oligonucleotide
uuuauuguguuugggaggc

SEQ ID NO: 2221141 - RNA, 19 nt, Artificial Sequence
  Description of Artificial Sequence: Synthetic oligonucleotide
auagcucccaagcagguuc

SEQ ID NO: 2221142 - RNA, 19 nt, Artificial Sequence
  Description of Artificial Sequence: Synthetic oligonucleotide
guacagucuauauaguucc

SEQ ID NO: 2221143 - RNA, 19 nt, Artificial Sequence
  Description of Artificial Sequence: Synthetic oligonucleotide
uauauuuauuguguuuggg

SEQ ID NO: 2221144 - RNA, 19 nt, Artificial Sequence
  Description of Artificial Sequence: Synthetic oligonucleotide
aaacacauccaccuuggcu

SEQ ID NO: 2221145 - RNA, 19 nt, Artificial Sequence
  Description of Artificial Sequence: Synthetic oligonucleotide
uuaggaugaugucauauaa

SEQ ID NO: 2221146 - RNA, 19 nt, Artificial Sequence
  Description of Artificial Sequence: Synthetic oligonucleotide
aaaaccccagcgcaggaag

SEQ ID NO: 2221147 - RNA, 19 nt, Artificial Sequence
  Description of Artificial Sequence: Synthetic oligonucleotide
uuuaggaaugcauccagcu

SEQ ID NO: 2221148 - RNA, 19 nt, Artificial Sequence
  Description of Artificial Sequence: Synthetic oligonucleotide
uauaacacagcguaagcau

SEQ ID NO: 2221149 - RNA, 19 nt, Artificial Sequence
  Description of Artificial Sequence: Synthetic oligonucleotide
aauuauuuccauccucuau

SEQ ID NO: 2221150 - RNA, 19 nt, Artificial Sequence
  Description of Artificial Sequence: Synthetic oligonucleotide
uggucaucagcucaaacac

SEQ ID NO: 2221151 - RNA, 19 nt, Artificial Sequence
  Description of Artificial Sequence: Synthetic oligonucleotide
agugaccagauugaguugc

SEQ ID NO: 2221152 - RNA, 19 nt, Artificial Sequence
  Description of Artificial Sequence: Synthetic oligonucleotide
uucucgaaauucuuuagga

SEQ ID NO: 2221153 - RNA, 19 nt, Artificial Sequence
  Description of Artificial Sequence: Synthetic oligonucleotide
ugcuacacaggucuucccg

SEQ ID NO: 2221154 - RNA, 19 nt, Artificial Sequence
  Description of Artificial Sequence: Synthetic oligonucleotide
gaucucaggcuuuaggcgc

SEQ ID NO: 2221155 - RNA, 19 nt, Artificial Sequence
  Description of Artificial Sequence: Synthetic oligonucleotide
uuuccauccucuauccgag

SEQ ID NO: 2221156 - RNA, 19 nt, Artificial Sequence
  Description of Artificial Sequence: Synthetic oligonucleotide
uugggcuucaggauggacc

SEQ ID NO: 2221157 - RNA, 19 nt, Artificial Sequence
  Description of Artificial Sequence: Synthetic oligonucleotide
acagaauaagagaggaggc

SEQ ID NO: 2221158 - RNA, 19 nt, Artificial Sequence
  Description of Artificial Sequence: Synthetic oligonucleotide
auuuccauccucuauccga

SEQ ID NO: 2221159 - RNA, 19 nt, Artificial Sequence
  Description of Artificial Sequence: Synthetic oligonucleotide
caaccauauauuuauugug

SEQ ID NO: 2221160 - RNA, 19 nt, Artificial Sequence
  Description of Artificial Sequence: Synthetic oligonucleotide
aaccauauauuuauugugu

SEQ ID NO: 2221161 - RNA, 19 nt, Artificial Sequence
  Description of Artificial Sequence: Synthetic oligonucleotide
uaaaucauucccuuaguuu

SEQ ID NO: 2221162 - RNA, 19 nt, Artificial Sequence
  Description of Artificial Sequence: Synthetic oligonucleotide
cagucuauauaguuccugg

SEQ ID NO: 2221163 - RNA, 19 nt, Artificial Sequence
  Description of Artificial Sequence: Synthetic oligonucleotide
aggcucaauaaaucauucc

SEQ ID NO: 2221164 - RNA, 19 nt, Artificial Sequence
  Description of Artificial Sequence: Synthetic oligonucleotide
uucuuuaggaugaugucau

SEQ ID NO: 2221165 - RNA, 19 nt, Artificial Sequence
  Description of Artificial Sequence: Synthetic oligonucleotide
cucucugagaaguacuuag

SEQ ID NO: 2221166 - RNA, 19 nt, Artificial Sequence
  Description of Artificial Sequence: Synthetic oligonucleotide
agcauuacggaucuccaug

SEQ ID NO: 2221167 - RNA, 19 nt, Artificial Sequence
  Description of Artificial Sequence: Synthetic oligonucleotide
ggcucaauaaaucauuccc

SEQ ID NO: 2221168 - RNA, 19 nt, Artificial Sequence
  Description of Artificial Sequence: Synthetic oligonucleotide
ccgauaaucacccacgugg

SEQ ID NO: 2221169 - RNA, 19 nt, Artificial Sequence
  Description of Artificial Sequence: Synthetic oligonucleotide
uauauaguuccugguaaag

SEQ ID NO: 2221170 - RNA, 19 nt, Artificial Sequence
  Description of Artificial Sequence: Synthetic oligonucleotide
uucccuuaguuucuccacg

SEQ ID NO: 2221171 - RNA, 19 nt, Artificial Sequence
  Description of Artificial Sequence: Synthetic oligonucleotide
uuuggucaccgcaucaccc

SEQ ID NO: 2221172 - RNA, 19 nt, Artificial Sequence
  Description of Artificial Sequence: Synthetic oligonucleotide
uauugggauguccagugga

SEQ ID NO: 2221173 - RNA, 19 nt, Artificial Sequence
  Description of Artificial Sequence: Synthetic oligonucleotide
uaagagaggaggcucaaua

SEQ ID NO: 2221174 - RNA, 19 nt, Artificial Sequence
  Description of Artificial Sequence: Synthetic oligonucleotide
auucccuuaguuucuccac

SEQ ID NO: 2221175 - RNA, 19 nt, Artificial Sequence
  Description of Artificial Sequence: Synthetic oligonucleotide
acagggaggaccuuugucu

SEQ ID NO: 2221176 - RNA, 19 nt, Artificial Sequence
  Description of Artificial Sequence: Synthetic oligonucleotide
guaagcauuacggaucucc

SEQ ID NO: 2221177 - RNA, 19 nt, Artificial Sequence
  Description of Artificial Sequence: Synthetic oligonucleotide
cauauaacacagcguaagc

SEQ ID NO: 2221178 - RNA, 19 nt, Artificial Sequence
  Description of Artificial Sequence: Synthetic oligonucleotide
gaagggaaagcgaaagcag

SEQ ID NO: 2221179 - RNA, 19 nt, Artificial Sequence
  Description of Artificial Sequence: Synthetic oligonucleotide
gauaaucacccacgugggg

SEQ ID NO: 2221180 - RNA, 19 nt, Artificial Sequence
  Description of Artificial Sequence: Synthetic oligonucleotide
gggaaaauagcucccaagc

SEQ ID NO: 2221181 - RNA, 19 nt, Artificial Sequence
  Description of Artificial Sequence: Synthetic oligonucleotide
uuuaggaugaugucauaua

SEQ ID NO: 2221182 - RNA, 19 nt, Artificial Sequence
  Description of Artificial Sequence: Synthetic oligonucleotide
uaagcauuacggaucucca

SEQ ID NO: 2221183 - RNA, 19 nt, Artificial Sequence
  Description of Artificial Sequence: Synthetic oligonucleotide
aaguacuuagagauuugag

SEQ ID NO: 2221184 - RNA, 19 nt, Artificial Sequence
  Description of Artificial Sequence: Synthetic oligonucleotide
guacccaucacagaauaag

SEQ ID NO: 2221185 - RNA, 19 nt, Artificial Sequence
  Description of Artificial Sequence: Synthetic oligonucleotide
uacuuagagauuugagugu

SEQ ID NO: 2221186 - RNA, 19 nt, Artificial Sequence
  Description of Artificial Sequence: Synthetic oligonucleotide
agguuggcuucauugagag

SEQ ID NO: 2221187 - RNA, 19 nt, Artificial Sequence
  Description of Artificial Sequence: Synthetic oligonucleotide
uuuaggcgcugcaggaggg

SEQ ID NO: 2221188 - RNA, 19 nt, Artificial Sequence
  Description of Artificial Sequence: Synthetic oligonucleotide
ccaaguagugaccagauug

SEQ ID NO: 2221189 - RNA, 19 nt, Artificial Sequence
  Description of Artificial Sequence: Synthetic oligonucleotide
cagcgcaggaagaagauug

SEQ ID NO: 2221190 - RNA, 19 nt, Artificial Sequence
  Description of Artificial Sequence: Synthetic oligonucleotide
auauaacacagcguaagca

SEQ ID NO: 2221191 - RNA, 19 nt, Artificial Sequence
  Description of Artificial Sequence: Synthetic oligonucleotide
ucccgaaacacauccaccu

SEQ ID NO: 2221192 - RNA, 19 nt, Artificial Sequence
  Description of Artificial Sequence: Synthetic oligonucleotide
agguaucuguaguugcaac

SEQ ID NO: 2221193 - RNA, 19 nt, Artificial Sequence
  Description of Artificial Sequence: Synthetic oligonucleotide
cuuuaggcgcugcaggagg

SEQ ID NO: 2221194 - RNA, 19 nt, Artificial Sequence
  Description of Artificial Sequence: Synthetic oligonucleotide
uuaggaaugcauccagcuc

SEQ ID NO: 2221195 - RNA, 19 nt, Artificial Sequence
  Description of Artificial Sequence: Synthetic oligonucleotide
cuuuaggaaugcauccagc

SEQ ID NO: 2221196 - RNA, 19 nt, Artificial Sequence
  Description of Artificial Sequence: Synthetic oligonucleotide
ucccuuaguuucuccacgg

SEQ ID NO: 2221197 - RNA, 19 nt, Artificial Sequence
  Description of Artificial Sequence: Synthetic oligonucleotide
gaagauuggguacagucua

SEQ ID NO: 2221198 - RNA, 19 nt, Artificial Sequence
  Description of Artificial Sequence: Synthetic oligonucleotide
uauccgagguaucuguagu

SEQ ID NO: 2221199 - RNA, 19 nt, Artificial Sequence
  Description of Artificial Sequence: Synthetic oligonucleotide
uccaguggagccuucagau

SEQ ID NO: 2221200 - RNA, 19 nt, Artificial Sequence
  Description of Artificial Sequence: Synthetic oligonucleotide
cauugcaguucacugggcc

SEQ ID NO: 2221201 - RNA, 19 nt, Artificial Sequence
  Description of Artificial Sequence: Synthetic oligonucleotide
agcguaagcauuacggauc

SEQ ID NO: 2221202 - RNA, 19 nt, Artificial Sequence
  Description of Artificial Sequence: Synthetic oligonucleotide
aggauggacccucagggug

SEQ ID NO: 2221203 - RNA, 19 nt, Artificial Sequence
  Description of Artificial Sequence: Synthetic oligonucleotide
acuuagagauuugagugug

SEQ ID NO: 2221204 - RNA, 19 nt, Artificial Sequence
  Description of Artificial Sequence: Synthetic oligonucleotide
cugccgauaaucacccacg

SEQ ID NO: 2221205 - RNA, 19 nt, Artificial Sequence
  Description of Artificial Sequence: Synthetic oligonucleotide
aacacagcguaagcauuac

SEQ ID NO: 2221206 - RNA, 19 nt, Artificial Sequence
  Description of Artificial Sequence: Synthetic oligonucleotide
uccaugaccaucagccgga

SEQ ID NO: 2221207 - RNA, 19 nt, Artificial Sequence
  Description of Artificial Sequence: Synthetic oligonucleotide
auugaguugcucaaugaca

SEQ ID NO: 2221208 - RNA, 19 nt, Artificial Sequence
  Description of Artificial Sequence: Synthetic oligonucleotide
aggcuuuaggcgcugcagg

SEQ ID NO: 2221209 - RNA, 19 nt, Artificial Sequence
  Description of Artificial Sequence: Synthetic oligonucleotide
cuauccgagguaucuguag

SEQ ID NO: 2221210 - RNA, 19 nt, Artificial Sequence
  Description of Artificial Sequence: Synthetic oligonucleotide
gguauugggauguccagug

SEQ ID NO: 2221211 - RNA, 19 nt, Artificial Sequence
  Description of Artificial Sequence: Synthetic oligonucleotide
guagugaccagauugaguu

SEQ ID NO: 2221212 - RNA, 19 nt, Artificial Sequence
  Description of Artificial Sequence: Synthetic oligonucleotide
gauuugaguguggaagccc

SEQ ID NO: 2221213 - RNA, 19 nt, Artificial Sequence
  Description of Artificial Sequence: Synthetic oligonucleotide
aaguagugaccagauugag

SEQ ID NO: 2221214 - RNA, 19 nt, Artificial Sequence
  Description of Artificial Sequence: Synthetic oligonucleotide
uaacacagcguaagcauua

SEQ ID NO: 2221215 - RNA, 19 nt, Artificial Sequence
  Description of Artificial Sequence: Synthetic oligonucleotide
agucuauauaguuccuggu

SEQ ID NO: 2221216 - RNA, 19 nt, Artificial Sequence
  Description of Artificial Sequence: Synthetic oligonucleotide
ggagccuucagauugcuca

SEQ ID NO: 2221217 - RNA, 19 nt, Artificial Sequence
  Description of Artificial Sequence: Synthetic oligonucleotide
accagcugccgauaaucac

SEQ ID NO: 2221218 - RNA, 19 nt, Artificial Sequence
  Description of Artificial Sequence: Synthetic oligonucleotide
auuggguacagucuauaua

SEQ ID NO: 2221219 - RNA, 19 nt, Artificial Sequence
  Description of Artificial Sequence: Synthetic oligonucleotide
guaaagagcaggaaggucu

SEQ ID NO: 2221220 - RNA, 19 nt, Artificial Sequence
  Description of Artificial Sequence: Synthetic oligonucleotide
cagauugaguugcucaaug

SEQ ID NO: 2221221 - RNA, 19 nt, Artificial Sequence
  Description of Artificial Sequence: Synthetic oligonucleotide
ugcaaccaaguagugacca

SEQ ID NO: 2221222 - RNA, 19 nt, Artificial Sequence
  Description of Artificial Sequence: Synthetic oligonucleotide
uuggucaccgcaucacccc

SEQ ID NO: 2221223 - RNA, 19 nt, Artificial Sequence
  Description of Artificial Sequence: Synthetic oligonucleotide
cuucauugagagcuggcuc

SEQ ID NO: 2221224 - RNA, 19 nt, Artificial Sequence
  Description of Artificial Sequence: Synthetic oligonucleotide
agaagauuggguacagucu

SEQ ID NO: 2221225 - RNA, 19 nt, Artificial Sequence
  Description of Artificial Sequence: Synthetic oligonucleotide
uaaucacccacguggggcu

SEQ ID NO: 2221226 - RNA, 19 nt, Artificial Sequence
  Description of Artificial Sequence: Synthetic oligonucleotide
uuggcugcuuuggucaccg

SEQ ID NO: 2221227 - RNA, 19 nt, Artificial Sequence
  Description of Artificial Sequence: Synthetic oligonucleotide
augcauccagcucugagau

SEQ ID NO: 2221228 - RNA, 19 nt, Artificial Sequence
  Description of Artificial Sequence: Synthetic oligonucleotide
cuuuggucaccgcaucacc

SEQ ID NO: 2221229 - RNA, 19 nt, Artificial Sequence
  Description of Artificial Sequence: Synthetic oligonucleotide
uccacgggguuucuugagc

SEQ ID NO: 2221230 - RNA, 19 nt, Artificial Sequence
  Description of Artificial Sequence: Synthetic oligonucleotide
guaguugcaaccaaguagu

SEQ ID NO: 2221231 - RNA, 19 nt, Artificial Sequence
  Description of Artificial Sequence: Synthetic oligonucleotide
aagcauuacggaucuccau

SEQ ID NO: 2221232 - RNA, 19 nt, Artificial Sequence
  Description of Artificial Sequence: Synthetic oligonucleotide
guauugggauguccagugg

SEQ ID NO: 2221233 - RNA, 19 nt, Artificial Sequence
  Description of Artificial Sequence: Synthetic oligonucleotide
uugcaaccaaguagugacc

SEQ ID NO: 2221234 - RNA, 19 nt, Artificial Sequence
  Description of Artificial Sequence: Synthetic oligonucleotide
ugagcuucucgaaauucuu

SEQ ID NO: 2221235 - RNA, 19 nt, Artificial Sequence
  Description of Artificial Sequence: Synthetic oligonucleotide
guaucuguaguugcaacca

SEQ ID NO: 2221236 - RNA, 19 nt, Artificial Sequence
  Description of Artificial Sequence: Synthetic oligonucleotide
uugaguguggaagcccucc

SEQ ID NO: 2221237 - RNA, 19 nt, Artificial Sequence
  Description of Artificial Sequence: Synthetic oligonucleotide
uugacuggaucagguauug

SEQ ID NO: 2221238 - RNA, 19 nt, Artificial Sequence
  Description of Artificial Sequence: Synthetic oligonucleotide
cuugguaugaaggcugguc

SEQ ID NO: 2221239 - RNA, 19 nt, Artificial Sequence
  Description of Artificial Sequence: Synthetic oligonucleotide
uccgagguaucuguaguug

SEQ ID NO: 2221240 - RNA, 19 nt, Artificial Sequence
  Description of Artificial Sequence: Synthetic oligonucleotide
cagcugccgauaaucaccc

SEQ ID NO: 2221241 - RNA, 19 nt, Artificial Sequence
  Description of Artificial Sequence: Synthetic oligonucleotide
acagucuauauaguuccug

SEQ ID NO: 2221242 - RNA, 19 nt, Artificial Sequence
  Description of Artificial Sequence: Synthetic oligonucleotide
ugcuuuggucaccgcauca

SEQ ID NO: 2221243 - RNA, 19 nt, Artificial Sequence
  Description of Artificial Sequence: Synthetic oligonucleotide
cuuaguuucuccacggggu

SEQ ID NO: 2221244 - RNA, 19 nt, Artificial Sequence
  Description of Artificial Sequence: Synthetic oligonucleotide
ugaguguggaagcccucca

SEQ ID NO: 2221245 - RNA, 19 nt, Artificial Sequence
  Description of Artificial Sequence: Synthetic oligonucleotide
agggaaagcgaaagcagag

SEQ ID NO: 2221246 - RNA, 19 nt, Artificial Sequence
  Description of Artificial Sequence: Synthetic oligonucleotide
auuugaguguggaagcccu

SEQ ID NO: 2221247 - RNA, 19 nt, Artificial Sequence
  Description of Artificial Sequence: Synthetic oligonucleotide
auugggauguccaguggag

SEQ ID NO: 2221248 - RNA, 19 nt, Artificial Sequence
  Description of Artificial Sequence: Synthetic oligonucleotide
aaauagcucccaagcaggu

SEQ ID NO: 2221249 - RNA, 19 nt, Artificial Sequence
  Description of Artificial Sequence: Synthetic oligonucleotide
uacagucuauauaguuccu

SEQ ID NO: 2221250 - RNA, 19 nt, Artificial Sequence
  Description of Artificial Sequence: Synthetic oligonucleotide
uccagcucgugcaccagcu

SEQ ID NO: 2221251 - RNA, 19 nt, Artificial Sequence
  Description of Artificial Sequence: Synthetic oligonucleotide
aguugcaaccaaguaguga

SEQ ID NO: 2221252 - RNA, 19 nt, Artificial Sequence
  Description of Artificial Sequence: Synthetic oligonucleotide
cucccaagcagguucucug

SEQ ID NO: 2221253 - RNA, 19 nt, Artificial Sequence
  Description of Artificial Sequence: Synthetic oligonucleotide
uccaccuuggcuugggcuu

SEQ ID NO: 2221254 - RNA, 19 nt, Artificial Sequence
  Description of Artificial Sequence: Synthetic oligonucleotide
aucuguaguugcaaccaag

SEQ ID NO: 2221255 - RNA, 19 nt, Artificial Sequence
  Description of Artificial Sequence: Synthetic oligonucleotide
cuugagcuucucgaaauuc

SEQ ID NO: 2221256 - RNA, 19 nt, Artificial Sequence
  Description of Artificial Sequence: Synthetic oligonucleotide
ccuuaguuucuccacgggg

SEQ ID NO: 2221257 - RNA, 19 nt, Artificial Sequence
  Description of Artificial Sequence: Synthetic oligonucleotide
ggaagggaaagcgaaagca

SEQ ID NO: 2221258 - RNA, 19 nt, Artificial Sequence
  Description of Artificial Sequence: Synthetic oligonucleotide
gaggcucaauaaaucauuc

SEQ ID NO: 2221259 - RNA, 19 nt, Artificial Sequence
  Description of Artificial Sequence: Synthetic oligonucleotide
ucuauccgagguaucugua

SEQ ID NO: 2221260 - RNA, 19 nt, Artificial Sequence
  Description of Artificial Sequence: Synthetic oligonucleotide
cuauauaguuccugguaaa

SEQ ID NO: 2221261 - RNA, 19 nt, Artificial Sequence
  Description of Artificial Sequence: Synthetic oligonucleotide
uagugaccagauugaguug

SEQ ID NO: 2221262 - RNA, 19 nt, Artificial Sequence
  Description of Artificial Sequence: Synthetic oligonucleotide
gaaagcgaaagcagagcuc

SEQ ID NO: 2221263 - RNA, 19 nt, Artificial Sequence
  Description of Artificial Sequence: Synthetic oligonucleotide
uggguacagucuauauagu

SEQ ID NO: 2221264 - RNA, 19 nt, Artificial Sequence
  Description of Artificial Sequence: Synthetic oligonucleotide
ugccgauaaucacccacgu

SEQ ID NO: 2221265 - RNA, 19 nt, Artificial Sequence
  Description of Artificial Sequence: Synthetic oligonucleotide
ugguaugaaggcuggucau

SEQ ID NO: 2221266 - RNA, 19 nt, Artificial Sequence
  Description of Artificial Sequence: Synthetic oligonucleotide
ucuccacgggguuucuuga

SEQ ID NO: 2221267 - RNA, 19 nt, Artificial Sequence
  Description of Artificial Sequence: Synthetic oligonucleotide
aguagugaccagauugagu

SEQ ID NO: 2221268 - RNA, 19 nt, Artificial Sequence
  Description of Artificial Sequence: Synthetic oligonucleotide
ccacuccaaaauuauuucc

SEQ ID NO: 2221269 - RNA, 19 nt, Artificial Sequence
  Description of Artificial Sequence: Synthetic oligonucleotide
aaccaaguagugaccagau

SEQ ID NO: 2221270 - RNA, 19 nt, Artificial Sequence
  Description of Artificial Sequence: Synthetic oligonucleotide
ugagaucuucuugggaaaa

SEQ ID NO: 2221271 - RNA, 19 nt, Artificial Sequence
  Description of Artificial Sequence: Synthetic oligonucleotide
accgcaucaccccucucug

SEQ ID NO: 2221272 - RNA, 19 nt, Artificial Sequence
  Description of Artificial Sequence: Synthetic oligonucleotide
agccacuccaaaauuauuu

SEQ ID NO: 2221273 - RNA, 19 nt, Artificial Sequence
  Description of Artificial Sequence: Synthetic oligonucleotide
uuugaguguggaagcccuc

SEQ ID NO: 2221274 - RNA, 19 nt, Artificial Sequence
  Description of Artificial Sequence: Synthetic oligonucleotide
augucauauaacacagcgu

SEQ ID NO: 2221275 - RNA, 19 nt, Artificial Sequence
  Description of Artificial Sequence: Synthetic oligonucleotide
ugacuggaucagguauugg

SEQ ID NO: 2221276 - RNA, 19 nt, Artificial Sequence
  Description of Artificial Sequence: Synthetic oligonucleotide
ucuccuggacagccacucc

SEQ ID NO: 2221277 - RNA, 19 nt, Artificial Sequence
  Description of Artificial Sequence: Synthetic oligonucleotide
acggaucuccaugaccauc

SEQ ID NO: 2221278 - RNA, 19 nt, Artificial Sequence
  Description of Artificial Sequence: Synthetic oligonucleotide
ccuuuaggaaugcauccag

SEQ ID NO: 2221279 - RNA, 19 nt, Artificial Sequence
  Description of Artificial Sequence: Synthetic oligonucleotide
cauuacggaucuccaugac

SEQ ID NO: 2221280 - RNA, 19 nt, Artificial Sequence
  Description of Artificial Sequence: Synthetic oligonucleotide
agcgcaggaagaagauugg

SEQ ID NO: 2221281 - RNA, 19 nt, Artificial Sequence
  Description of Artificial Sequence: Synthetic oligonucleotide
agaucuucuugggaaaaua

SEQ ID NO: 2221282 - RNA, 19 nt, Artificial Sequence
  Description of Artificial Sequence: Synthetic oligonucleotide
acccacguggggcugcuug

SEQ ID NO: 2221283 - RNA, 19 nt, Artificial Sequence
  Description of Artificial Sequence: Synthetic oligonucleotide
gcagcgggaagggaaagcg

SEQ ID NO: 2221284 - RNA, 19 nt, Artificial Sequence
  Description of Artificial Sequence: Synthetic oligonucleotide
agcuugguaugaaggcugg

SEQ ID NO: 2221285 - RNA, 19 nt, Artificial Sequence
  Description of Artificial Sequence: Synthetic oligonucleotide
uugcuacacaggucuuccc

SEQ ID NO: 2221286 - RNA, 19 nt, Artificial Sequence
  Description of Artificial Sequence: Synthetic oligonucleotide
cgaaacacauccaccuugg

SEQ ID NO: 2221287 - RNA, 19 nt, Artificial Sequence
  Description of Artificial Sequence: Synthetic oligonucleotide
ggguuucuugagcuucucg

SEQ ID NO: 2221288 - RNA, 19 nt, Artificial Sequence
  Description of Artificial Sequence: Synthetic oligonucleotide
ggaaagcgaaagcagagcu

SEQ ID NO: 2221289 - RNA, 19 nt, Artificial Sequence
  Description of Artificial Sequence: Synthetic oligonucleotide
gcugccgauaaucacccac

SEQ ID NO: 2221290 - RNA, 19 nt, Artificial Sequence
  Description of Artificial Sequence: Synthetic oligonucleotide
ugagcgccgcacgaggagc

SEQ ID NO: 2221291 - RNA, 19 nt, Artificial Sequence
  Description of Artificial Sequence: Synthetic oligonucleotide
auaacacagcguaagcauu

SEQ ID NO: 2221292 - RNA, 19 nt, Artificial Sequence
  Description of Artificial Sequence: Synthetic oligonucleotide
cacagggaggaccuuuguc

SEQ ID NO: 2221293 - RNA, 19 nt, Artificial Sequence
  Description of Artificial Sequence: Synthetic oligonucleotide
ggauggacccucagggugg

SEQ ID NO: 2221294 - RNA, 19 nt, Artificial Sequence
  Description of Artificial Sequence: Synthetic oligonucleotide
caaccaaguagugaccaga

SEQ ID NO: 2221295 - RNA, 19 nt, Artificial Sequence
  Description of Artificial Sequence: Synthetic oligonucleotide
acguggggcugcuuggcug

SEQ ID NO: 2221296 - RNA, 19 nt, Artificial Sequence
  Description of Artificial Sequence: Synthetic oligonucleotide
gccacuccaaaauuauuuc

SEQ ID NO: 2221297 - RNA, 19 nt, Artificial Sequence
  Description of Artificial Sequence: Synthetic oligonucleotide
aagauuggguacagucuau

SEQ ID NO: 2221298 - RNA, 19 nt, Artificial Sequence
  Description of Artificial Sequence: Synthetic oligonucleotide
gacagccacuccaaaauua

SEQ ID NO: 2221299 - RNA, 19 nt, Artificial Sequence
  Description of Artificial Sequence: Synthetic oligonucleotide
cagccggauguccugguac

SEQ ID NO: 2221300 - RNA, 19 nt, Artificial Sequence
  Description of Artificial Sequence: Synthetic oligonucleotide
caggcuuuaggcgcugcag

SEQ ID NO: 2221301 - RNA, 19 nt, Artificial Sequence
  Description of Artificial Sequence: Synthetic oligonucleotide
ucuuuaggaugaugucaua

SEQ ID NO: 2221302 - RNA, 19 nt, Artificial Sequence
  Description of Artificial Sequence: Synthetic oligonucleotide
cgauaaucacccacguggg

SEQ ID NO: 2221303 - RNA, 19 nt, Artificial Sequence
  Description of Artificial Sequence: Synthetic oligonucleotide
aggaggcucaauaaaucau

SEQ ID NO: 2221304 - RNA, 19 nt, Artificial Sequence
  Description of Artificial Sequence: Synthetic oligonucleotide
ucgugcaccagcugccgau

SEQ ID NO: 2221305 - RNA, 19 nt, Artificial Sequence
  Description of Artificial Sequence: Synthetic oligonucleotide
ccgaaacacauccaccuug

SEQ ID NO: 2221306 - RNA, 19 nt, Artificial Sequence
  Description of Artificial Sequence: Synthetic oligonucleotide
auccgagguaucuguaguu

SEQ ID NO: 2221307 - RNA, 19 nt, Artificial Sequence
  Description of Artificial Sequence: Synthetic oligonucleotide
gagaggaggcucaauaaau

SEQ ID NO: 2221308 - RNA, 19 nt, Artificial Sequence
  Description of Artificial Sequence: Synthetic oligonucleotide
ggaagaagauuggguacag

SEQ ID NO: 2221309 - RNA, 19 nt, Artificial Sequence
  Description of Artificial Sequence: Synthetic oligonucleotide
aucacccacguggggcugc

SEQ ID NO: 2221310 - RNA, 19 nt, Artificial Sequence
  Description of Artificial Sequence: Synthetic oligonucleotide
agcgggaagggaaagcgaa

SEQ ID NO: 2221311 - RNA, 19 nt, Artificial Sequence
  Description of Artificial Sequence: Synthetic oligonucleotide
cugagaucuucuugggaaa

SEQ ID NO: 2221312 - RNA, 19 nt, Artificial Sequence
  Description of Artificial Sequence: Synthetic oligonucleotide
gagccuggagugggcagcg

SEQ ID NO: 2221313 - RNA, 19 nt, Artificial Sequence
  Description of Artificial Sequence: Synthetic oligonucleotide
aaccccagcgcaggaagaa

SEQ ID NO: 2221314 - RNA, 19 nt, Artificial Sequence
  Description of Artificial Sequence: Synthetic oligonucleotide
gagguaucuguaguugcaa

SEQ ID NO: 2221315 - RNA, 19 nt, Artificial Sequence
  Description of Artificial Sequence: Synthetic oligonucleotide
cugagcgccgcacgaggag

SEQ ID NO: 2221316 - RNA, 19 nt, Artificial Sequence
  Description of Artificial Sequence: Synthetic oligonucleotide
gggaaagcgaaagcagagc

SEQ ID NO: 2221317 - RNA, 19 nt, Artificial Sequence
  Description of Artificial Sequence: Synthetic oligonucleotide
ccgagguaucuguaguugc

SEQ ID NO: 2221318 - RNA, 19 nt, Artificial Sequence
  Description of Artificial Sequence: Synthetic oligonucleotide
auugcucagguuggcuuca

SEQ ID NO: 2221319 - RNA, 19 nt, Artificial Sequence
  Description of Artificial Sequence: Synthetic oligonucleotide
gguaaagagcaggaagguc

SEQ ID NO: 2221320 - RNA, 19 nt, Artificial Sequence
  Description of Artificial Sequence: Synthetic oligonucleotide
gcaaccaaguagugaccag

SEQ ID NO: 2221321 - RNA, 19 nt, Artificial Sequence
  Description of Artificial Sequence: Synthetic oligonucleotide
uccugguaaagagcaggaa

SEQ ID NO: 2221322 - RNA, 19 nt, Artificial Sequence
  Description of Artificial Sequence: Synthetic oligonucleotide
ucucugcuguacccaucac

SEQ ID NO: 2221323 - RNA, 19 nt, Artificial Sequence
  Description of Artificial Sequence: Synthetic oligonucleotide
gcacgaggagccuggagug

SEQ ID NO: 2221324 - RNA, 19 nt, Artificial Sequence
  Description of Artificial Sequence: Synthetic oligonucleotide
cucuauccgagguaucugu

SEQ ID NO: 2221325 - RNA, 19 nt, Artificial Sequence
  Description of Artificial Sequence: Synthetic oligonucleotide
ggcugagcgccgcacgagg

SEQ ID NO: 2221326 - RNA, 19 nt, Artificial Sequence
  Description of Artificial Sequence: Synthetic oligonucleotide
uuauuguguuugggaggca

SEQ ID NO: 2221327 - RNA, 19 nt, Artificial Sequence
  Description of Artificial Sequence: Synthetic oligonucleotide
ugaccagauugaguugcuc

SEQ ID NO: 2221328 - RNA, 19 nt, Artificial Sequence
  Description of Artificial Sequence: Synthetic oligonucleotide
accaucagccggauguccu

SEQ ID NO: 2221329 - RNA, 19 nt, Artificial Sequence
  Description of Artificial Sequence: Synthetic oligonucleotide
agauuggguacagucuaua

SEQ ID NO: 2221330 - RNA, 19 nt, Artificial Sequence
  Description of Artificial Sequence: Synthetic oligonucleotide
gcuacacaggucuucccga

SEQ ID NO: 2221331 - RNA, 19 nt, Artificial Sequence
  Description of Artificial Sequence: Synthetic oligonucleotide
auaagagaggaggcucaau

SEQ ID NO: 2221332 - RNA, 19 nt, Artificial Sequence
  Description of Artificial Sequence: Synthetic oligonucleotide
uacggaucuccaugaccau

SEQ ID NO: 2221333 - RNA, 19 nt, Artificial Sequence
  Description of Artificial Sequence: Synthetic oligonucleotide
ugaccaucagccggauguc

SEQ ID NO: 2221334 - RNA, 19 nt, Artificial Sequence
  Description of Artificial Sequence: Synthetic oligonucleotide
cauccaccuuggcuugggc

SEQ ID NO: 2221335 - RNA, 19 nt, Artificial Sequence
  Description of Artificial Sequence: Synthetic oligonucleotide
ggcuuuaggcgcugcagga

SEQ ID NO: 2221336 - RNA, 19 nt, Artificial Sequence
  Description of Artificial Sequence: Synthetic oligonucleotide
uccuugaucucaggcuuua

SEQ ID NO: 2221337 - RNA, 19 nt, Artificial Sequence
  Description of Artificial Sequence: Synthetic oligonucleotide
cugcuuuggucaccgcauc

SEQ ID NO: 2221338 - RNA, 19 nt, Artificial Sequence
  Description of Artificial Sequence: Synthetic oligonucleotide
gaggcagagcaagggaaaa

SEQ ID NO: 2221339 - RNA, 19 nt, Artificial Sequence
  Description of Artificial Sequence: Synthetic oligonucleotide
gguaugaaggcuggucauc

SEQ ID NO: 2221340 - RNA, 19 nt, Artificial Sequence
  Description of Artificial Sequence: Synthetic oligonucleotide
cuggaucagguauugggau

SEQ ID NO: 2221341 - RNA, 19 nt, Artificial Sequence
  Description of Artificial Sequence: Synthetic oligonucleotide
caugaccaucagccggaug

SEQ ID NO: 2221342 - RNA, 19 nt, Artificial Sequence
  Description of Artificial Sequence: Synthetic oligonucleotide
cuugacuggaucagguauu

SEQ ID NO: 2221343 - RNA, 19 nt, Artificial Sequence
  Description of Artificial Sequence: Synthetic oligonucleotide
gccgauaaucacccacgug

SEQ ID NO: 2221344 - RNA, 19 nt, Artificial Sequence
  Description of Artificial Sequence: Synthetic oligonucleotide
cacugggccacagggagga

SEQ ID NO: 2221345 - RNA, 19 nt, Artificial Sequence
  Description of Artificial Sequence: Synthetic oligonucleotide
gcuuuggucaccgcaucac

SEQ ID NO: 2221346 - RNA, 19 nt, Artificial Sequence
  Description of Artificial Sequence: Synthetic oligonucleotide
cccuuaguuucuccacggg

SEQ ID NO: 2221347 - RNA, 19 nt, Artificial Sequence
  Description of Artificial Sequence: Synthetic oligonucleotide
gcuggucaucagcucaaac

SEQ ID NO: 2221348 - RNA, 19 nt, Artificial Sequence
  Description of Artificial Sequence: Synthetic oligonucleotide
cacauccaccuuggcuugg

SEQ ID NO: 2221349 - RNA, 19 nt, Artificial Sequence
  Description of Artificial Sequence: Synthetic oligonucleotide
gcaccagcugccgauaauc

SEQ ID NO: 2221350 - RNA, 19 nt, Artificial Sequence
  Description of Artificial Sequence: Synthetic oligonucleotide
ggaucagguauugggaugu

SEQ ID NO: 2221351 - RNA, 19 nt, Artificial Sequence
  Description of Artificial Sequence: Synthetic oligonucleotide
gcgcaggaagaagauuggg

SEQ ID NO: 2221352 - RNA, 19 nt, Artificial Sequence
  Description of Artificial Sequence: Synthetic oligonucleotide
auguccaguggagccuuca

SEQ ID NO: 2221353 - RNA, 19 nt, Artificial Sequence
  Description of Artificial Sequence: Synthetic oligonucleotide
ucucaggcuuuaggcgcug

SEQ ID NO: 2221354 - RNA, 19 nt, Artificial Sequence
  Description of Artificial Sequence: Synthetic oligonucleotide
gaagaagauuggguacagu

SEQ ID NO: 2221355 - RNA, 19 nt, Artificial Sequence
  Description of Artificial Sequence: Synthetic oligonucleotide
gggaggaccuuugucuuca

SEQ ID NO: 2221356 - RNA, 19 nt, Artificial Sequence
  Description of Artificial Sequence: Synthetic oligonucleotide
caccgcaucaccccucucu

SEQ ID NO: 2221357 - RNA, 19 nt, Artificial Sequence
  Description of Artificial Sequence: Synthetic oligonucleotide
cagcgggaagggaaagcga

SEQ ID NO: 2221358 - RNA, 19 nt, Artificial Sequence
  Description of Artificial Sequence: Synthetic oligonucleotide
ggcuucauugagagcuggc

SEQ ID NO: 2221359 - RNA, 19 nt, Artificial Sequence
  Description of Artificial Sequence: Synthetic oligonucleotide
cugcuguacccaucacaga

SEQ ID NO: 2221360 - RNA, 19 nt, Artificial Sequence
  Description of Artificial Sequence: Synthetic oligonucleotide
ccaucagccggauguccug

SEQ ID NO: 2221361 - RNA, 19 nt, Artificial Sequence
  Description of Artificial Sequence: Synthetic oligonucleotide
ccaaaauuauuuccauccu

SEQ ID NO: 2221362 - RNA, 19 nt, Artificial Sequence
  Description of Artificial Sequence: Synthetic oligonucleotide
agcucccaagcagguucuc

SEQ ID NO: 2221363 - RNA, 19 nt, Artificial Sequence
  Description of Artificial Sequence: Synthetic oligonucleotide
gcuucauugagagcuggcu

SEQ ID NO: 2221364 - RNA, 19 nt, Artificial Sequence
  Description of Artificial Sequence: Synthetic oligonucleotide
agcugccgauaaucaccca

SEQ ID NO: 2221365 - RNA, 19 nt, Artificial Sequence
  Description of Artificial Sequence: Synthetic oligonucleotide
cgagguaucuguaguugca

SEQ ID NO: 2221366 - RNA, 19 nt, Artificial Sequence
  Description of Artificial Sequence: Synthetic oligonucleotide
ggaggcucaauaaaucauu

SEQ ID NO: 2221367 - RNA, 19 nt, Artificial Sequence
  Description of Artificial Sequence: Synthetic oligonucleotide
gcucgugcaccagcugccg

SEQ ID NO: 2221368 - RNA, 19 nt, Artificial Sequence
  Description of Artificial Sequence: Synthetic oligonucleotide
caggauggacccucagggu

SEQ ID NO: 2221369 - RNA, 19 nt, Artificial Sequence
  Description of Artificial Sequence: Synthetic oligonucleotide
ucacccacguggggcugcu

SEQ ID NO: 2221370 - RNA, 19 nt, Artificial Sequence
  Description of Artificial Sequence: Synthetic oligonucleotide
ccucuauccgagguaucug

SEQ ID NO: 2221371 - RNA, 19 nt, Artificial Sequence
  Description of Artificial Sequence: Synthetic oligonucleotide
gugcaccagcugccgauaa

SEQ ID NO: 2221372 - RNA, 19 nt, Artificial Sequence
  Description of Artificial Sequence: Synthetic oligonucleotide
ccaagcagguucucugucu

SEQ ID NO: 2221373 - RNA, 19 nt, Artificial Sequence
  Description of Artificial Sequence: Synthetic oligonucleotide
gcugcuuuggucaccgcau

SEQ ID NO: 2221374 - RNA, 19 nt, Artificial Sequence
  Description of Artificial Sequence: Synthetic oligonucleotide
gugaccagauugaguugcu

SEQ ID NO: 2221375 - RNA, 19 nt, Artificial Sequence
  Description of Artificial Sequence: Synthetic oligonucleotide
agcgccgcacgaggagccu

SEQ ID NO: 2221376 - RNA, 19 nt, Artificial Sequence
  Description of Artificial Sequence: Synthetic oligonucleotide
gcugagcgccgcacgagga

SEQ ID NO: 2221377 - RNA, 19 nt, Artificial Sequence
  Description of Artificial Sequence: Synthetic oligonucleotide
cagccacuccaaaauuauu

SEQ ID NO: 2221378 - RNA, 19 nt, Artificial Sequence
  Description of Artificial Sequence: Synthetic oligonucleotide
cgcacgaggagccuggagu

SEQ ID NO: 2221379 - RNA, 19 nt, Artificial Sequence
  Description of Artificial Sequence: Synthetic oligonucleotide
cgccgcacgaggagccugg

SEQ ID NO: 2221380 - RNA, 19 nt, Artificial Sequence
  Description of Artificial Sequence: Synthetic oligonucleotide
ccacgggguuucuugagcu

SEQ ID NO: 2221381 - RNA, 19 nt, Artificial Sequence
  Description of Artificial Sequence: Synthetic oligonucleotide
caccccucucugagaagua

SEQ ID NO: 2221382 - RNA, 19 nt, Artificial Sequence
  Description of Artificial Sequence: Synthetic oligonucleotide
ccauccucuauccgaggua

SEQ ID NO: 2221383 - RNA, 19 nt, Artificial Sequence
  Description of Artificial Sequence: Synthetic oligonucleotide
ggaaugcauccagcucuga

SEQ ID NO: 2221384 - RNA, 19 nt, Artificial Sequence
  Description of Artificial Sequence: Synthetic oligonucleotide
guggagccuucagauugcu

SEQ ID NO: 2221385 - RNA, 19 nt, Artificial Sequence
  Description of Artificial Sequence: Synthetic oligonucleotide
ggccauggucggagcgggg

SEQ ID NO: 2221386 - RNA, 19 nt, Artificial Sequence
  Description of Artificial Sequence: Synthetic oligonucleotide
ccgcacgaggagccuggag

SEQ ID NO: 2221387 - RNA, 19 nt, Artificial Sequence
  Description of Artificial Sequence: Synthetic oligonucleotide
gcgggaagggaaagcgaaa

SEQ ID NO: 2221388 - RNA, 19 nt, Artificial Sequence
  Description of Artificial Sequence: Synthetic oligonucleotide
ggguggcugagcgccgcac

SEQ ID NO: 2221389 - RNA, 19 nt, Artificial Sequence
  Description of Artificial Sequence: Synthetic oligonucleotide
gccggauguccugguacuc

SEQ ID NO: 2221390 - RNA, 19 nt, Artificial Sequence
  Description of Artificial Sequence: Synthetic oligonucleotide
cacgggguuucuugagcuu

SEQ ID NO: 2221391 - RNA, 19 nt, Artificial Sequence
  Description of Artificial Sequence: Synthetic oligonucleotide
gcucccaagcagguucucu

SEQ ID NO: 2221392 - RNA, 19 nt, Artificial Sequence
  Description of Artificial Sequence: Synthetic oligonucleotide
ggacccucaggguggccau

SEQ ID NO: 2221393 - RNA, 19 nt, Artificial Sequence
  Description of Artificial Sequence: Synthetic oligonucleotide
gggguggcugagcgccgca

SEQ ID NO: 2221394 - RNA, 19 nt, Artificial Sequence
  Description of Artificial Sequence: Synthetic oligonucleotide
gcgccgcacgaggagccug

SEQ ID NO: 2221395 - RNA, 19 nt, Artificial Sequence
  Description of Artificial Sequence: Synthetic oligonucleotide
cccagcgcaggaagaagau

SEQ ID NO: 2221396 - RNA, 19 nt, Artificial Sequence
  Description of Artificial Sequence: Synthetic oligonucleotide
ccagauugaguugcucaau

SEQ ID NO: 2221397 - RNA, 19 nt, Artificial Sequence
  Description of Artificial Sequence: Synthetic oligonucleotide
ccggauguccugguacucu

SEQ ID NO: 2221398 - RNA, 19 nt, Artificial Sequence
  Description of Artificial Sequence: Synthetic oligonucleotide
gcccuccagcuugguauga

SEQ ID NO: 2221399 - RNA, 19 nt, Artificial Sequence
  Description of Artificial Sequence: Synthetic oligonucleotide
ggccacagggaggaccuuu

SEQ ID NO: 2221400 - RNA, 19 nt, Artificial Sequence
  Description of Artificial Sequence: Synthetic oligonucleotide
ggaggaccuuugucuucau

SEQ ID NO: 2221401 - RNA, 19 nt, Artificial Sequence
  Description of Artificial Sequence: Synthetic oligonucleotide
cguaagcauuacggaucuc

SEQ ID NO: 2221402 - RNA, 19 nt, Artificial Sequence
  Description of Artificial Sequence: Synthetic oligonucleotide
cccgaaacacauccaccuu

SEQ ID NO: 2221403 - RNA, 19 nt, Artificial Sequence
  Description of Artificial Sequence: Synthetic oligonucleotide
cccuccagcuugguaugaa

SEQ ID NO: 2221404 - RNA, 19 nt, Artificial Sequence
  Description of Artificial Sequence: Synthetic oligonucleotide
gccgcacgaggagccugga

SEQ ID NO: 2221405 - RNA, 19 nt, Artificial Sequence
  Description of Artificial Sequence: Synthetic oligonucleotide
ccagcgcaggaagaagauu

SEQ ID NO: 2221406 - RNA, 19 nt, Artificial Sequence
  Description of Artificial Sequence: Synthetic oligonucleotide
cacccacguggggcugcuu

SEQ ID NO: 2221407 - RNA, 19 nt, Artificial Sequence
  Description of Artificial Sequence: Synthetic oligonucleotide
aaugauauccuucagggag

SEQ ID NO: 2221408 - RNA, 19 nt, Artificial Sequence
  Description of Artificial Sequence: Synthetic oligonucleotide
aauuauagcaccuuuuguc

SEQ ID NO: 2221409 - RNA, 19 nt, Artificial Sequence
  Description of Artificial Sequence: Synthetic oligonucleotide
aacaugacagaauauacac

SEQ ID NO: 2221410 - RNA, 19 nt, Artificial Sequence
  Description of Artificial Sequence: Synthetic oligonucleotide
ucugcaagaagcuagaacc

SEQ ID NO: 2221411 - RNA, 19 nt, Artificial Sequence
  Description of Artificial Sequence: Synthetic oligonucleotide
aaaucuaauagucugacaa

SEQ ID NO: 2221412 - RNA, 19 nt, Artificial Sequence
  Description of Artificial Sequence: Synthetic oligonucleotide
aagagaaaaucacaggcac

SEQ ID NO: 2221413 - RNA, 19 nt, Artificial Sequence
  Description of Artificial Sequence: Synthetic oligonucleotide
aaauuuugaaagcaauuuc

SEQ ID NO: 2221414 - RNA, 19 nt, Artificial Sequence
  Description of Artificial Sequence: Synthetic oligonucleotide
aauagauaaguauggcaac

SEQ ID NO: 2221415 - RNA, 19 nt, Artificial Sequence
  Description of Artificial Sequence: Synthetic oligonucleotide
acuauauccaguuaauguc

SEQ ID NO: 2221416 - RNA, 19 nt, Artificial Sequence
  Description of Artificial Sequence: Synthetic oligonucleotide
uaacaauagauaaguaugg

SEQ ID NO: 2221417 - RNA, 19 nt, Artificial Sequence
  Description of Artificial Sequence: Synthetic oligonucleotide
aaucucaugguggaaacgc

SEQ ID NO: 2221418 - RNA, 19 nt, Artificial Sequence
  Description of Artificial Sequence: Synthetic oligonucleotide
aaugucugauuauagggag

SEQ ID NO: 2221419 - RNA, 19 nt, Artificial Sequence
  Description of Artificial Sequence: Synthetic oligonucleotide
aauuccauccauguauugc

SEQ ID NO: 2221420 - RNA, 19 nt, Artificial Sequence
  Description of Artificial Sequence: Synthetic oligonucleotide
auauauguaucuuucaugu

SEQ ID NO: 2221421 - RNA, 19 nt, Artificial Sequence
  Description of Artificial Sequence: Synthetic oligonucleotide
uaucauaccacacuugaug

SEQ ID NO: 2221422 - RNA, 19 nt, Artificial Sequence
  Description of Artificial Sequence: Synthetic oligonucleotide
uccaguauaauuauagcac

SEQ ID NO: 2221423 - RNA, 19 nt, Artificial Sequence
  Description of Artificial Sequence: Synthetic oligonucleotide
uguugaaguauaacaauag

SEQ ID NO: 2221424 - RNA, 19 nt, Artificial Sequence
  Description of Artificial Sequence: Synthetic oligonucleotide
ugauguagucacuauaucc

SEQ ID NO: 2221425 - RNA, 19 nt, Artificial Sequence
  Description of Artificial Sequence: Synthetic oligonucleotide
aauacauucugaccagauc

SEQ ID NO: 2221426 - RNA, 19 nt, Artificial Sequence
  Description of Artificial Sequence: Synthetic oligonucleotide
uauauuaauuccauccaug

SEQ ID NO: 2221427 - RNA, 19 nt, Artificial Sequence
  Description of Artificial Sequence: Synthetic oligonucleotide
ucuuacaaaaucuaauagu

SEQ ID NO: 2221428 - RNA, 19 nt, Artificial Sequence
  Description of Artificial Sequence: Synthetic oligonucleotide
gcuagaaccacuuaaacag

SEQ ID NO: 2221429 - RNA, 19 nt, Artificial Sequence
  Description of Artificial Sequence: Synthetic oligonucleotide
aacaauagauaaguauggc

SEQ ID NO: 2221430 - RNA, 19 nt, Artificial Sequence
  Description of Artificial Sequence: Synthetic oligonucleotide
auaacaauagauaaguaug

SEQ ID NO: 2221431 - RNA, 19 nt, Artificial Sequence
  Description of Artificial Sequence: Synthetic oligonucleotide
uaaucauaaccauaccagg

SEQ ID NO: 2221432 - RNA, 19 nt, Artificial Sequence
  Description of Artificial Sequence: Synthetic oligonucleotide
ucuaugucuauauuaauuc

SEQ ID NO: 2221433 - RNA, 19 nt, Artificial Sequence
  Description of Artificial Sequence: Synthetic oligonucleotide
ugauaagcaaucaacuucu

SEQ ID NO: 2221434 - RNA, 19 nt, Artificial Sequence
  Description of Artificial Sequence: Synthetic oligonucleotide
auaauuauagcaccuuuug

SEQ ID NO: 2221435 - RNA, 19 nt, Artificial Sequence
  Description of Artificial Sequence: Synthetic oligonucleotide
aaucuaauagucugacaag

SEQ ID NO: 2221436 - RNA, 19 nt, Artificial Sequence
  Description of Artificial Sequence: Synthetic oligonucleotide
uaugucuauauuaauucca

SEQ ID NO: 2221437 - RNA, 19 nt, Artificial Sequence
  Description of Artificial Sequence: Synthetic oligonucleotide
aaucauaaccauaccaggg

SEQ ID NO: 2221438 - RNA, 19 nt, Artificial Sequence
  Description of Artificial Sequence: Synthetic oligonucleotide
uuuaauagaauguugccuu

SEQ ID NO: 2221439 - RNA, 19 nt, Artificial Sequence
  Description of Artificial Sequence: Synthetic oligonucleotide
uauuuaauagaauguugcc

SEQ ID NO: 2221440 - RNA, 19 nt, Artificial Sequence
  Description of Artificial Sequence: Synthetic oligonucleotide
uuccaguauaauuauagca

SEQ ID NO: 2221441 - RNA, 19 nt, Artificial Sequence
  Description of Artificial Sequence: Synthetic oligonucleotide
aagcuagaaccacuuaaac

SEQ ID NO: 2221442 - RNA, 19 nt, Artificial Sequence
  Description of Artificial Sequence: Synthetic oligonucleotide
uuuugagcuauccacgaug

SEQ ID NO: 2221443 - RNA, 19 nt, Artificial Sequence
  Description of Artificial Sequence: Synthetic oligonucleotide
guaaucauaaccauaccag

SEQ ID NO: 2221444 - RNA, 19 nt, Artificial Sequence
  Description of Artificial Sequence: Synthetic oligonucleotide
ucuaauagucugacaagag

SEQ ID NO: 2221445 - RNA, 19 nt, Artificial Sequence
  Description of Artificial Sequence: Synthetic oligonucleotide
uaaugucugauuauaggga

SEQ ID NO: 2221446 - RNA, 19 nt, Artificial Sequence
  Description of Artificial Sequence: Synthetic oligonucleotide
guuguguugaaguauaaca

SEQ ID NO: 2221447 - RNA, 19 nt, Artificial Sequence
  Description of Artificial Sequence: Synthetic oligonucleotide
auuauagcaccuuuugucu

SEQ ID NO: 2221448 - RNA, 19 nt, Artificial Sequence
  Description of Artificial Sequence: Synthetic oligonucleotide
aaaugaagaaucucuuuau

SEQ ID NO: 2221449 - RNA, 19 nt, Artificial Sequence
  Description of Artificial Sequence: Synthetic oligonucleotide
ugaccaagcuacaucaaag

SEQ ID NO: 2221450 - RNA, 19 nt, Artificial Sequence
  Description of Artificial Sequence: Synthetic oligonucleotide
auauuaauuccauccaugu

SEQ ID NO: 2221451 - RNA, 19 nt, Artificial Sequence
  Description of Artificial Sequence: Synthetic oligonucleotide
uugucuauguucuuuggug

SEQ ID NO: 2221452 - RNA, 19 nt, Artificial Sequence
  Description of Artificial Sequence: Synthetic oligonucleotide
aaugcuucguauucaggug

SEQ ID NO: 2221453 - RNA, 19 nt, Artificial Sequence
  Description of Artificial Sequence: Synthetic oligonucleotide
ucaucguaagacaucacga

SEQ ID NO: 2221454 - RNA, 19 nt, Artificial Sequence
  Description of Artificial Sequence: Synthetic oligonucleotide
auuuuagccaaauuaacuu

SEQ ID NO: 2221455 - RNA, 19 nt, Artificial Sequence
  Description of Artificial Sequence: Synthetic oligonucleotide
gagaaaaucacaggcaccc

SEQ ID NO: 2221456 - RNA, 19 nt, Artificial Sequence
  Description of Artificial Sequence: Synthetic oligonucleotide
ucguaagacaucacgaaga

SEQ ID NO: 2221457 - RNA, 19 nt, Artificial Sequence
  Description of Artificial Sequence: Synthetic oligonucleotide
augaagaaucucuuuaucu

SEQ ID NO: 2221458 - RNA, 19 nt, Artificial Sequence
  Description of Artificial Sequence: Synthetic oligonucleotide
uuuaucucuuaccuguugu

SEQ ID NO: 2221459 - RNA, 19 nt, Artificial Sequence
  Description of Artificial Sequence: Synthetic oligonucleotide
ugaugaguuucuuagggcu

SEQ ID NO: 2221460 - RNA, 19 nt, Artificial Sequence
  Description of Artificial Sequence: Synthetic oligonucleotide
aucucuuuaucucuuaccu

SEQ ID NO: 2221461 - RNA, 19 nt, Artificial Sequence
  Description of Artificial Sequence: Synthetic oligonucleotide
gaucugacuuugcucaucg

SEQ ID NO: 2221462 - RNA, 19 nt, Artificial Sequence
  Description of Artificial Sequence: Synthetic oligonucleotide
gauaaguauggcaacauga

SEQ ID NO: 2221463 - RNA, 19 nt, Artificial Sequence
  Description of Artificial Sequence: Synthetic oligonucleotide
aggauccugugauagauuc

SEQ ID NO: 2221464 - RNA, 19 nt, Artificial Sequence
  Description of Artificial Sequence: Synthetic oligonucleotide
uuaccuguuguguugaagu

SEQ ID NO: 2221465 - RNA, 19 nt, Artificial Sequence
  Description of Artificial Sequence: Synthetic oligonucleotide
cugugauagauucaggcag

SEQ ID NO: 2221466 - RNA, 19 nt, Artificial Sequence
  Description of Artificial Sequence: Synthetic oligonucleotide
uuagugaaaugcucugggg

SEQ ID NO: 2221467 - RNA, 19 nt, Artificial Sequence
  Description of Artificial Sequence: Synthetic oligonucleotide
uuauagggagcauuggcug

SEQ ID NO: 2221468 - RNA, 19 nt, Artificial Sequence
  Description of Artificial Sequence: Synthetic oligonucleotide
uucauguucaaaugaagaa

SEQ ID NO: 2221469 - RNA, 19 nt, Artificial Sequence
  Description of Artificial Sequence: Synthetic oligonucleotide
auaaguauggcaacaugac

SEQ ID NO: 2221470 - RNA, 19 nt, Artificial Sequence
  Description of Artificial Sequence: Synthetic oligonucleotide
uuugcauuccacaugccaa

SEQ ID NO: 2221471 - RNA, 19 nt, Artificial Sequence
  Description of Artificial Sequence: Synthetic oligonucleotide
uugguuuuaaagcucccca

SEQ ID NO: 2221472 - RNA, 19 nt, Artificial Sequence
  Description of Artificial Sequence: Synthetic oligonucleotide
uccaguuaaugucugauua

SEQ ID NO: 2221473 - RNA, 19 nt, Artificial Sequence
  Description of Artificial Sequence: Synthetic oligonucleotide
uauaauuauagcaccuuuu

SEQ ID NO: 2221474 - RNA, 19 nt, Artificial Sequence
  Description of Artificial Sequence: Synthetic oligonucleotide
uucuaugucuauauuaauu

SEQ ID NO: 2221475 - RNA, 19 nt, Artificial Sequence
  Description of Artificial Sequence: Synthetic oligonucleotide
aguagucaagacuguuugc

SEQ ID NO: 2221476 - RNA, 19 nt, Artificial Sequence
  Description of Artificial Sequence: Synthetic oligonucleotide
caauagauaaguauggcaa

SEQ ID NO: 2221477 - RNA, 19 nt, Artificial Sequence
  Description of Artificial Sequence: Synthetic oligonucleotide
gaguagucaagacuguuug

SEQ ID NO: 2221478 - RNA, 19 nt, Artificial Sequence
  Description of Artificial Sequence: Synthetic oligonucleotide
auuuaauagaauguugccu

SEQ ID NO: 2221479 - RNA, 19 nt, Artificial Sequence
  Description of Artificial Sequence: Synthetic oligonucleotide
gagacaucaccuuuuagca

SEQ ID NO: 2221480 - RNA, 19 nt, Artificial Sequence
  Description of Artificial Sequence: Synthetic oligonucleotide
uaaguauggcaacaugaca

SEQ ID NO: 2221481 - RNA, 19 nt, Artificial Sequence
  Description of Artificial Sequence: Synthetic oligonucleotide
ggagacaucaccuuuuagc

SEQ ID NO: 2221482 - RNA, 19 nt, Artificial Sequence
  Description of Artificial Sequence: Synthetic oligonucleotide
ucguauucaggugauaagc

SEQ ID NO: 2221483 - RNA, 19 nt, Artificial Sequence
  Description of Artificial Sequence: Synthetic oligonucleotide
gugauaagcaaucaacuuc

SEQ ID NO: 2221484 - RNA, 19 nt, Artificial Sequence
  Description of Artificial Sequence: Synthetic oligonucleotide
uuuugucuauguucuuugg

SEQ ID NO: 2221485 - RNA, 19 nt, Artificial Sequence
  Description of Artificial Sequence: Synthetic oligonucleotide
gauguagucacuauaucca

SEQ ID NO: 2221486 - RNA, 19 nt, Artificial Sequence
  Description of Artificial Sequence: Synthetic oligonucleotide
gauccugugauagauucag

SEQ ID NO: 2221487 - RNA, 19 nt, Artificial Sequence
  Description of Artificial Sequence: Synthetic oligonucleotide
uaaagcuccccacauuucu

SEQ ID NO: 2221488 - RNA, 19 nt, Artificial Sequence
  Description of Artificial Sequence: Synthetic oligonucleotide
uauuuaagauauauaugua

SEQ ID NO: 2221489 - RNA, 19 nt, Artificial Sequence
  Description of Artificial Sequence: Synthetic oligonucleotide
cugauuauagggagcauug

SEQ ID NO: 2221490 - RNA, 19 nt, Artificial Sequence
  Description of Artificial Sequence: Synthetic oligonucleotide
acauacgcugccuuuagug

SEQ ID NO: 2221491 - RNA, 19 nt, Artificial Sequence
  Description of Artificial Sequence: Synthetic oligonucleotide
uccucacuauuuaagauau

SEQ ID NO: 2221492 - RNA, 19 nt, Artificial Sequence
  Description of Artificial Sequence: Synthetic oligonucleotide
caggugauaagcaaucaac

SEQ ID NO: 2221493 - RNA, 19 nt, Artificial Sequence
  Description of Artificial Sequence: Synthetic oligonucleotide
acuauuuaagauauauaug

SEQ ID NO: 2221494 - RNA, 19 nt, Artificial Sequence
  Description of Artificial Sequence: Synthetic oligonucleotide
uuugucuauguucuuuggu

SEQ ID NO: 2221495 - RNA, 19 nt, Artificial Sequence
  Description of Artificial Sequence: Synthetic oligonucleotide
uguguugaaguauaacaau

SEQ ID NO: 2221496 - RNA, 19 nt, Artificial Sequence
  Description of Artificial Sequence: Synthetic oligonucleotide
uuuagccaaauuaacuuuu

SEQ ID NO: 2221497 - RNA, 19 nt, Artificial Sequence
  Description of Artificial Sequence: Synthetic oligonucleotide
aaucuugguuuuaaagcuc

SEQ ID NO: 2221498 - RNA, 19 nt, Artificial Sequence
  Description of Artificial Sequence: Synthetic oligonucleotide
agucacuauauccaguuaa

SEQ ID NO: 2221499 - RNA, 19 nt, Artificial Sequence
  Description of Artificial Sequence: Synthetic oligonucleotide
aauagucugacaagagaug

SEQ ID NO: 2221500 - RNA, 19 nt, Artificial Sequence
  Description of Artificial Sequence: Synthetic oligonucleotide
uagagcaucuucugaguag

SEQ ID NO: 2221501 - RNA, 19 nt, Artificial Sequence
  Description of Artificial Sequence: Synthetic oligonucleotide
ucaaugcuucguauucagg

SEQ ID NO: 2221502 - RNA, 19 nt, Artificial Sequence
  Description of Artificial Sequence: Synthetic oligonucleotide
ucuucaaccaaagcuguca

SEQ ID NO: 2221503 - RNA, 19 nt, Artificial Sequence
  Description of Artificial Sequence: Synthetic oligonucleotide
uccauguauugcauuuuag

SEQ ID NO: 2221504 - RNA, 19 nt, Artificial Sequence
  Description of Artificial Sequence: Synthetic oligonucleotide
uuuuagccaaauuaacuuu

SEQ ID NO: 2221505 - RNA, 19 nt, Artificial Sequence
  Description of Artificial Sequence: Synthetic oligonucleotide
uagaaccacuuaaacagcu

SEQ ID NO: 2221506 - RNA, 19 nt, Artificial Sequence
  Description of Artificial Sequence: Synthetic oligonucleotide
uucguauucaggugauaag

SEQ ID NO: 2221507 - RNA, 19 nt, Artificial Sequence
  Description of Artificial Sequence: Synthetic oligonucleotide
ucugacuuugcucaucgua

SEQ ID NO: 2221508 - RNA, 19 nt, Artificial Sequence
  Description of Artificial Sequence: Synthetic oligonucleotide
augcucugaagguaggauc

SEQ ID NO: 2221509 - RNA, 19 nt, Artificial Sequence
  Description of Artificial Sequence: Synthetic oligonucleotide
agggcuaaugcccaucuug

SEQ ID NO: 2221510 - RNA, 19 nt, Artificial Sequence
  Description of Artificial Sequence: Synthetic oligonucleotide
agcuacaucaaagguuacc

SEQ ID NO: 2221511 - RNA, 19 nt, Artificial Sequence
  Description of Artificial Sequence: Synthetic oligonucleotide
agacaucaccuuuuagcac

SEQ ID NO: 2221512 - RNA, 19 nt, Artificial Sequence
  Description of Artificial Sequence: Synthetic oligonucleotide
aacacccaugaugaguuuc

SEQ ID NO: 2221513 - RNA, 19 nt, Artificial Sequence
  Description of Artificial Sequence: Synthetic oligonucleotide
cacacuugaugaaaauggc

SEQ ID NO: 2221514 - RNA, 19 nt, Artificial Sequence
  Description of Artificial Sequence: Synthetic oligonucleotide
uuuugaaagcaauuuccua

SEQ ID NO: 2221515 - RNA, 19 nt, Artificial Sequence
  Description of Artificial Sequence: Synthetic oligonucleotide
agauaaguauggcaacaug

SEQ ID NO: 2221516 - RNA, 19 nt, Artificial Sequence
  Description of Artificial Sequence: Synthetic oligonucleotide
aacgcuguguggucucuuc

SEQ ID NO: 2221517 - RNA, 19 nt, Artificial Sequence
  Description of Artificial Sequence: Synthetic oligonucleotide
ucuugauguagucacuaua

SEQ ID NO: 2221518 - RNA, 19 nt, Artificial Sequence
  Description of Artificial Sequence: Synthetic oligonucleotide
auuauagggagcauuggcu

SEQ ID NO: 2221519 - RNA, 19 nt, Artificial Sequence
  Description of Artificial Sequence: Synthetic oligonucleotide
auggcaacaugacagaaua

SEQ ID NO: 2221520 - RNA, 19 nt, Artificial Sequence
  Description of Artificial Sequence: Synthetic oligonucleotide
uauagggagcauuggcugc

SEQ ID NO: 2221521 - RNA, 19 nt, Artificial Sequence
  Description of Artificial Sequence: Synthetic oligonucleotide
ucucuuaccuguuguguug

SEQ ID NO: 2221522 - RNA, 19 nt, Artificial Sequence
  Description of Artificial Sequence: Synthetic oligonucleotide
ugcugcaauacauucugac

SEQ ID NO: 2221523 - RNA, 19 nt, Artificial Sequence
  Description of Artificial Sequence: Synthetic oligonucleotide
gaagagaaaaucacaggca

SEQ ID NO: 2221524 - RNA, 19 nt, Artificial Sequence
  Description of Artificial Sequence: Synthetic oligonucleotide
ugauuauagggagcauugg

SEQ ID NO: 2221525 - RNA, 19 nt, Artificial Sequence
  Description of Artificial Sequence: Synthetic oligonucleotide
ugaaucucaugguggaaac

SEQ ID NO: 2221526 - RNA, 19 nt, Artificial Sequence
  Description of Artificial Sequence: Synthetic oligonucleotide
guugaaguauaacaauaga

SEQ ID NO: 2221527 - RNA, 19 nt, Artificial Sequence
  Description of Artificial Sequence: Synthetic oligonucleotide
cuagaaccacuuaaacagc

SEQ ID NO: 2221528 - RNA, 19 nt, Artificial Sequence
  Description of Artificial Sequence: Synthetic oligonucleotide
aucuaauagucugacaaga

SEQ ID NO: 2221529 - RNA, 19 nt, Artificial Sequence
  Description of Artificial Sequence: Synthetic oligonucleotide
caaccaaagcugucaaugc

SEQ ID NO: 2221530 - RNA, 19 nt, Artificial Sequence
  Description of Artificial Sequence: Synthetic oligonucleotide
acaucacgaagagaaaauc

SEQ ID NO: 2221531 - RNA, 19 nt, Artificial Sequence
  Description of Artificial Sequence: Synthetic oligonucleotide
ucucuuuaucucuuaccug

SEQ ID NO: 2221532 - RNA, 19 nt, Artificial Sequence
  Description of Artificial Sequence: Synthetic oligonucleotide
ugacuuugcucaucguaag

SEQ ID NO: 2221533 - RNA, 19 nt, Artificial Sequence
  Description of Artificial Sequence: Synthetic oligonucleotide
caagcuacaucaaagguua

SEQ ID NO: 2221534 - RNA, 19 nt, Artificial Sequence
  Description of Artificial Sequence: Synthetic oligonucleotide
auauuccucacuauuuaag

SEQ ID NO: 2221535 - RNA, 19 nt, Artificial Sequence
  Description of Artificial Sequence: Synthetic oligonucleotide
uuuuguuugcugucuggcu

SEQ ID NO: 2221536 - RNA, 19 nt, Artificial Sequence
  Description of Artificial Sequence: Synthetic oligonucleotide
cuuuagugaaaugcucugg

SEQ ID NO: 2221537 - RNA, 19 nt, Artificial Sequence
  Description of Artificial Sequence: Synthetic oligonucleotide
ucacuauuuaagauauaua

SEQ ID NO: 2221538 - RNA, 19 nt, Artificial Sequence
  Description of Artificial Sequence: Synthetic oligonucleotide
uguagucacuauauccagu

SEQ ID NO: 2221539 - RNA, 19 nt, Artificial Sequence
  Description of Artificial Sequence: Synthetic oligonucleotide
ugcucaucguaagacauca

SEQ ID NO: 2221540 - RNA, 19 nt, Artificial Sequence
  Description of Artificial Sequence: Synthetic oligonucleotide
aagguaggaucaaugauau

SEQ ID NO: 2221541 - RNA, 19 nt, Artificial Sequence
  Description of Artificial Sequence: Synthetic oligonucleotide
uuagggcuaaugcccaucu

SEQ ID NO: 2221542 - RNA, 19 nt, Artificial Sequence
  Description of Artificial Sequence: Synthetic oligonucleotide
ugagcuauccacgaugcuc

SEQ ID NO: 2221543 - RNA, 19 nt, Artificial Sequence
  Description of Artificial Sequence: Synthetic oligonucleotide
auagauaaguauggcaaca

SEQ ID NO: 2221544 - RNA, 19 nt, Artificial Sequence
  Description of Artificial Sequence: Synthetic oligonucleotide
gucaaugcuucguauucag

SEQ ID NO: 2221545 - RNA, 19 nt, Artificial Sequence
  Description of Artificial Sequence: Synthetic oligonucleotide
aagguuaccugugaucccu

SEQ ID NO: 2221546 - RNA, 19 nt, Artificial Sequence
  Description of Artificial Sequence: Synthetic oligonucleotide
ggcagguguaaucauaacc

SEQ ID NO: 2221547 - RNA, 19 nt, Artificial Sequence
  Description of Artificial Sequence: Synthetic oligonucleotide
ugaguagucaagacuguuu

SEQ ID NO: 2221548 - RNA, 19 nt, Artificial Sequence
  Description of Artificial Sequence: Synthetic oligonucleotide
uguucaaaugaagaaucuc

SEQ ID NO: 2221549 - RNA, 19 nt, Artificial Sequence
  Description of Artificial Sequence: Synthetic oligonucleotide
agaugcuccucucuccauc

SEQ ID NO: 2221550 - RNA, 19 nt, Artificial Sequence
  Description of Artificial Sequence: Synthetic oligonucleotide
ugacauacgcugccuuuag

SEQ ID NO: 2221551 - RNA, 19 nt, Artificial Sequence
  Description of Artificial Sequence: Synthetic oligonucleotide
accaagcuacaucaaaggu

SEQ ID NO: 2221552 - RNA, 19 nt, Artificial Sequence
  Description of Artificial Sequence: Synthetic oligonucleotide
aguauggcaacaugacaga

SEQ ID NO: 2221553 - RNA, 19 nt, Artificial Sequence
  Description of Artificial Sequence: Synthetic oligonucleotide
cacgaugcucugaagguag

SEQ ID NO: 2221554 - RNA, 19 nt, Artificial Sequence
  Description of Artificial Sequence: Synthetic oligonucleotide
cagggaacacccaugauga

SEQ ID NO: 2221555 - RNA, 19 nt, Artificial Sequence
  Description of Artificial Sequence: Synthetic oligonucleotide
ugguuuuaaagcuccccac

SEQ ID NO: 2221556 - RNA, 19 nt, Artificial Sequence
  Description of Artificial Sequence: Synthetic oligonucleotide
accauaccagggaacaccc

SEQ ID NO: 2221557 - RNA, 19 nt, Artificial Sequence
  Description of Artificial Sequence: Synthetic oligonucleotide
cauaaccauaccagggaac

SEQ ID NO: 2221558 - RNA, 19 nt, Artificial Sequence
  Description of Artificial Sequence: Synthetic oligonucleotide
caugacagaauauacacau

SEQ ID NO: 2221559 - RNA, 19 nt, Artificial Sequence
  Description of Artificial Sequence: Synthetic oligonucleotide
gucaagacuguuugcauuc

SEQ ID NO: 2221560 - RNA, 19 nt, Artificial Sequence
  Description of Artificial Sequence: Synthetic oligonucleotide
ccaguauaauuauagcacc

SEQ ID NO: 2221561 - RNA, 19 nt, Artificial Sequence
  Description of Artificial Sequence: Synthetic oligonucleotide
uugauguagucacuauauc

SEQ ID NO: 2221562 - RNA, 19 nt, Artificial Sequence
  Description of Artificial Sequence: Synthetic oligonucleotide
cuugguuuuaaagcucccc

SEQ ID NO: 2221563 - RNA, 19 nt, Artificial Sequence
  Description of Artificial Sequence: Synthetic oligonucleotide
guuugcauuccacaugcca

SEQ ID NO: 2221564 - RNA, 19 nt, Artificial Sequence
  Description of Artificial Sequence: Synthetic oligonucleotide
uauagcaccuuuugucuau

SEQ ID NO: 2221565 - RNA, 19 nt, Artificial Sequence
  Description of Artificial Sequence: Synthetic oligonucleotide
cauuuuagccaaauuaacu

SEQ ID NO: 2221566 - RNA, 19 nt, Artificial Sequence
  Description of Artificial Sequence: Synthetic oligonucleotide
uuaucauaccacacuugau

SEQ ID NO: 2221567 - RNA, 19 nt, Artificial Sequence
  Description of Artificial Sequence: Synthetic oligonucleotide
ucugauuauagggagcauu

SEQ ID NO: 2221568 - RNA, 19 nt, Artificial Sequence
  Description of Artificial Sequence: Synthetic oligonucleotide
gaaucucaugguggaaacg

SEQ ID NO: 2221569 - RNA, 19 nt, Artificial Sequence
  Description of Artificial Sequence: Synthetic oligonucleotide
aacaggauccugugauaga

SEQ ID NO: 2221570 - RNA, 19 nt, Artificial Sequence
  Description of Artificial Sequence: Synthetic oligonucleotide
uaucucuuaccuguugugu

SEQ ID NO: 2221571 - RNA, 19 nt, Artificial Sequence
  Description of Artificial Sequence: Synthetic oligonucleotide
augcuucguauucagguga

SEQ ID NO: 2221572 - RNA, 19 nt, Artificial Sequence
  Description of Artificial Sequence: Synthetic oligonucleotide
guagucaagacuguuugca

SEQ ID NO: 2221573 - RNA, 19 nt, Artificial Sequence
  Description of Artificial Sequence: Synthetic oligonucleotide
uguuguguugaaguauaac

SEQ ID NO: 2221574 - RNA, 19 nt, Artificial Sequence
  Description of Artificial Sequence: Synthetic oligonucleotide
ggcuagagcaucuucugag

SEQ ID NO: 2221575 - RNA, 19 nt, Artificial Sequence
  Description of Artificial Sequence: Synthetic oligonucleotide
cucugcaagaagcuagaac

SEQ ID NO: 2221576 - RNA, 19 nt, Artificial Sequence
  Description of Artificial Sequence: Synthetic oligonucleotide
ucuugguuuuaaagcuccc

SEQ ID NO: 2221577 - RNA, 19 nt, Artificial Sequence
  Description of Artificial Sequence: Synthetic oligonucleotide
ugucuauauuaauuccauc

SEQ ID NO: 2221578 - RNA, 19 nt, Artificial Sequence
  Description of Artificial Sequence: Synthetic oligonucleotide
cucuuuaucucuuaccugu

SEQ ID NO: 2221579 - RNA, 19 nt, Artificial Sequence
  Description of Artificial Sequence: Synthetic oligonucleotide
uuaaagcuccccacauuuc

SEQ ID NO: 2221580 - RNA, 19 nt, Artificial Sequence
  Description of Artificial Sequence: Synthetic oligonucleotide
augucugauuauagggagc

SEQ ID NO: 2221581 - RNA, 19 nt, Artificial Sequence
  Description of Artificial Sequence: Synthetic oligonucleotide
ugccuuuagugaaaugcuc

SEQ ID NO: 2221582 - RNA, 19 nt, Artificial Sequence
  Description of Artificial Sequence: Synthetic oligonucleotide
caugccaaugccccgcaag

SEQ ID NO: 2221583 - RNA, 19 nt, Artificial Sequence
  Description of Artificial Sequence: Synthetic oligonucleotide
acaagagaugcuccucucu

SEQ ID NO: 2221584 - RNA, 19 nt, Artificial Sequence
  Description of Artificial Sequence: Synthetic oligonucleotide
uagucugacaagagaugcu

SEQ ID NO: 2221585 - RNA, 19 nt, Artificial Sequence
  Description of Artificial Sequence: Synthetic oligonucleotide
aggugauaagcaaucaacu

SEQ ID NO: 2221586 - RNA, 19 nt, Artificial Sequence
  Description of Artificial Sequence: Synthetic oligonucleotide
cuacaucaaagguuaccug

SEQ ID NO: 2221587 - RNA, 19 nt, Artificial Sequence
  Description of Artificial Sequence: Synthetic oligonucleotide
gcugcaauacauucugacc

SEQ ID NO: 2221588 - RNA, 19 nt, Artificial Sequence
  Description of Artificial Sequence: Synthetic oligonucleotide
uccacaugccaaugccccg

SEQ ID NO: 2221589 - RNA, 19 nt, Artificial Sequence
  Description of Artificial Sequence: Synthetic oligonucleotide
ucaugguggaaacgcugug

SEQ ID NO: 2221590 - RNA, 19 nt, Artificial Sequence
  Description of Artificial Sequence: Synthetic oligonucleotide
cuugaugaaaauggccaac

SEQ ID NO: 2221591 - RNA, 19 nt, Artificial Sequence
  Description of Artificial Sequence: Synthetic oligonucleotide
uuuugacauacgcugccuu

SEQ ID NO: 2221592 - RNA, 19 nt, Artificial Sequence
  Description of Artificial Sequence: Synthetic oligonucleotide
uuauagcaccuuuugucua

SEQ ID NO: 2221593 - RNA, 19 nt, Artificial Sequence
  Description of Artificial Sequence: Synthetic oligonucleotide
cugacuuugcucaucguaa

SEQ ID NO: 2221594 - RNA, 19 nt, Artificial Sequence
  Description of Artificial Sequence: Synthetic oligonucleotide
aguauaauuauagcaccuu

SEQ ID NO: 2221595 - RNA, 19 nt, Artificial Sequence
  Description of Artificial Sequence: Synthetic oligonucleotide
caaagcugucaaugcuucg

SEQ ID NO: 2221596 - RNA, 19 nt, Artificial Sequence
  Description of Artificial Sequence: Synthetic oligonucleotide
gcuaaugcccaucuugaug

SEQ ID NO: 2221597 - RNA, 19 nt, Artificial Sequence
  Description of Artificial Sequence: Synthetic oligonucleotide
agucaagacuguuugcauu

SEQ ID NO: 2221598 - RNA, 19 nt, Artificial Sequence
  Description of Artificial Sequence: Synthetic oligonucleotide
ugcaagaagcuagaaccac

SEQ ID NO: 2221599 - RNA, 19 nt, Artificial Sequence
  Description of Artificial Sequence: Synthetic oligonucleotide
uggucucuucaaccaaagc

SEQ ID NO: 2221600 - RNA, 19 nt, Artificial Sequence
  Description of Artificial Sequence: Synthetic oligonucleotide
cuauauccaguuaaugucu

SEQ ID NO: 2221601 - RNA, 19 nt, Artificial Sequence
  Description of Artificial Sequence: Synthetic oligonucleotide
caaugcuucguauucaggu

SEQ ID NO: 2221602 - RNA, 19 nt, Artificial Sequence
  Description of Artificial Sequence: Synthetic oligonucleotide
gaugcuccucucuccauca

SEQ ID NO: 2221603 - RNA, 19 nt, Artificial Sequence
  Description of Artificial Sequence: Synthetic oligonucleotide
gcagguguaaucauaacca

SEQ ID NO: 2221604 - RNA, 19 nt, Artificial Sequence
  Description of Artificial Sequence: Synthetic oligonucleotide
uagauaaguauggcaacau

SEQ ID NO: 2221605 - RNA, 19 nt, Artificial Sequence
  Description of Artificial Sequence: Synthetic oligonucleotide
cccaucuugauguagucac

SEQ ID NO: 2221606 - RNA, 19 nt, Artificial Sequence
  Description of Artificial Sequence: Synthetic oligonucleotide
cuuugcucaucguaagaca

SEQ ID NO: 2221607 - RNA, 19 nt, Artificial Sequence
  Description of Artificial Sequence: Synthetic oligonucleotide
gucuauguucuuuggugac

SEQ ID NO: 2221608 - RNA, 19 nt, Artificial Sequence
  Description of Artificial Sequence: Synthetic oligonucleotide
ugccccgcaagccauaguu

SEQ ID NO: 2221609 - RNA, 19 nt, Artificial Sequence
  Description of Artificial Sequence: Synthetic oligonucleotide
cuggcuagagcaucuucug

SEQ ID NO: 2221610 - RNA, 19 nt, Artificial Sequence
  Description of Artificial Sequence: Synthetic oligonucleotide
ucauaccacacuugaugaa

SEQ ID NO: 2221611 - RNA, 19 nt, Artificial Sequence
  Description of Artificial Sequence: Synthetic oligonucleotide
uggcuagagcaucuucuga

SEQ ID NO: 2221612 - RNA, 19 nt, Artificial Sequence
  Description of Artificial Sequence: Synthetic oligonucleotide
cauacgcugccuuuaguga

SEQ ID NO: 2221613 - RNA, 19 nt, Artificial Sequence
  Description of Artificial Sequence: Synthetic oligonucleotide
aucucuuaccuguuguguu

SEQ ID NO: 2221614 - RNA, 19 nt, Artificial Sequence
  Description of Artificial Sequence: Synthetic oligonucleotide
cuuaccuguuguguugaag

SEQ ID NO: 2221615 - RNA, 19 nt, Artificial Sequence
  Description of Artificial Sequence: Synthetic oligonucleotide
uagucaagacuguuugcau

SEQ ID NO: 2221616 - RNA, 19 nt, Artificial Sequence
  Description of Artificial Sequence: Synthetic oligonucleotide
aagcugucaaugcuucgua

SEQ ID NO: 2221617 - RNA, 19 nt, Artificial Sequence
  Description of Artificial Sequence: Synthetic oligonucleotide
ugugaucccugaaucucau

SEQ ID NO: 2221618 - RNA, 19 nt, Artificial Sequence
  Description of Artificial Sequence: Synthetic oligonucleotide
uguuugcauuccacaugcc

SEQ ID NO: 2221619 - RNA, 19 nt, Artificial Sequence
  Description of Artificial Sequence: Synthetic oligonucleotide
caucguaagacaucacgaa

SEQ ID NO: 2221620 - RNA, 19 nt, Artificial Sequence
  Description of Artificial Sequence: Synthetic oligonucleotide
augucuauauuaauuccau

SEQ ID NO: 2221621 - RNA, 19 nt, Artificial Sequence
  Description of Artificial Sequence: Synthetic oligonucleotide
agaucugacuuugcucauc

SEQ ID NO: 2221622 - RNA, 19 nt, Artificial Sequence
  Description of Artificial Sequence: Synthetic oligonucleotide
ucuuuaucucuuaccuguu

SEQ ID NO: 2221623 - RNA, 19 nt, Artificial Sequence
  Description of Artificial Sequence: Synthetic oligonucleotide
gacuuugcucaucguaaga

SEQ ID NO: 2221624 - RNA, 19 nt, Artificial Sequence
  Description of Artificial Sequence: Synthetic oligonucleotide
ugauagauucaggcaggug

SEQ ID NO: 2221625 - RNA, 19 nt, Artificial Sequence
  Description of Artificial Sequence: Synthetic oligonucleotide
uggcugcugcaauacauuc

SEQ ID NO: 2221626 - RNA, 19 nt, Artificial Sequence
  Description of Artificial Sequence: Synthetic oligonucleotide
acaugacagaauauacaca

SEQ ID NO: 2221627 - RNA, 19 nt, Artificial Sequence
  Description of Artificial Sequence: Synthetic oligonucleotide
uggccaacaggauccugug

SEQ ID NO: 2221628 - RNA, 19 nt, Artificial Sequence
  Description of Artificial Sequence: Synthetic oligonucleotide
cuucguauucaggugauaa

SEQ ID NO: 2221629 - RNA, 19 nt, Artificial Sequence
  Description of Artificial Sequence: Synthetic oligonucleotide
uacgcugccuuuagugaaa

SEQ ID NO: 2221630 - RNA, 19 nt, Artificial Sequence
  Description of Artificial Sequence: Synthetic oligonucleotide
uauccacgaugcucugaag

SEQ ID NO: 2221631 - RNA, 19 nt, Artificial Sequence
  Description of Artificial Sequence: Synthetic oligonucleotide
cuauccacgaugcucugaa

SEQ ID NO: 2221632 - RNA, 19 nt, Artificial Sequence
  Description of Artificial Sequence: Synthetic oligonucleotide
uucaaccaaagcugucaau

SEQ ID NO: 2221633 - RNA, 19 nt, Artificial Sequence
  Description of Artificial Sequence: Synthetic oligonucleotide
uugacauacgcugccuuua

SEQ ID NO: 2221634 - RNA, 19 nt, Artificial Sequence
  Description of Artificial Sequence: Synthetic oligonucleotide
cuuguuucuugcuuuuaua

SEQ ID NO: 2221635 - RNA, 19 nt, Artificial Sequence
  Description of Artificial Sequence: Synthetic oligonucleotide
uaccuguuguguugaagua

SEQ ID NO: 2221636 - RNA, 19 nt, Artificial Sequence
  Description of Artificial Sequence: Synthetic oligonucleotide
cauaccacacuugaugaaa

SEQ ID NO: 2221637 - RNA, 19 nt, Artificial Sequence
  Description of Artificial Sequence: Synthetic oligonucleotide
ugcuucguauucaggugau

SEQ ID NO: 2221638 - RNA, 19 nt, Artificial Sequence
  Description of Artificial Sequence: Synthetic oligonucleotide
guagucacuauauccaguu

SEQ ID NO: 2221639 - RNA, 19 nt, Artificial Sequence
  Description of Artificial Sequence: Synthetic oligonucleotide
auggccaacaggauccugu

SEQ ID NO: 2221640 - RNA, 19 nt, Artificial Sequence
  Description of Artificial Sequence: Synthetic oligonucleotide
aagcuacaucaaagguuac

SEQ ID NO: 2221641 - RNA, 19 nt, Artificial Sequence
  Description of Artificial Sequence: Synthetic oligonucleotide
acauucugaccagaucuga

SEQ ID NO: 2221642 - RNA, 19 nt, Artificial Sequence
  Description of Artificial Sequence: Synthetic oligonucleotide
gugaccaagcuacaucaaa

SEQ ID NO: 2221643 - RNA, 19 nt, Artificial Sequence
  Description of Artificial Sequence: Synthetic oligonucleotide
cuauauuaauuccauccau

SEQ ID NO: 2221644 - RNA, 19 nt, Artificial Sequence
  Description of Artificial Sequence: Synthetic oligonucleotide
agguaggaucaaugauauc

SEQ ID NO: 2221645 - RNA, 19 nt, Artificial Sequence
  Description of Artificial Sequence: Synthetic oligonucleotide
guauaauuauagcaccuuu

SEQ ID NO: 2221646 - RNA, 19 nt, Artificial Sequence
  Description of Artificial Sequence: Synthetic oligonucleotide
uagucacuauauccaguua

SEQ ID NO: 2221647 - RNA, 19 nt, Artificial Sequence
  Description of Artificial Sequence: Synthetic oligonucleotide
agcaccuuuugucuauguu

SEQ ID NO: 2221648 - RNA, 19 nt, Artificial Sequence
  Description of Artificial Sequence: Synthetic oligonucleotide
auagggagcauuggcugcu

SEQ ID NO: 2221649 - RNA, 19 nt, Artificial Sequence
  Description of Artificial Sequence: Synthetic oligonucleotide
cugugaucccugaaucuca

SEQ ID NO: 2221650 - RNA, 19 nt, Artificial Sequence
  Description of Artificial Sequence: Synthetic oligonucleotide
agcauuggcugcugcaaua

SEQ ID NO: 2221651 - RNA, 19 nt, Artificial Sequence
  Description of Artificial Sequence: Synthetic oligonucleotide
caggcagguguaaucauaa

SEQ ID NO: 2221652 - RNA, 19 nt, Artificial Sequence
  Description of Artificial Sequence: Synthetic oligonucleotide
aaauggccaacaggauccu

SEQ ID NO: 2221653 - RNA, 19 nt, Artificial Sequence
  Description of Artificial Sequence: Synthetic oligonucleotide
agcugucaaugcuucguau

SEQ ID NO: 2221654 - RNA, 19 nt, Artificial Sequence
  Description of Artificial Sequence: Synthetic oligonucleotide
ccacuuaaacagcucauuc

SEQ ID NO: 2221655 - RNA, 19 nt, Artificial Sequence
  Description of Artificial Sequence: Synthetic oligonucleotide
guggucucuucaaccaaag

SEQ ID NO: 2221656 - RNA, 19 nt, Artificial Sequence
  Description of Artificial Sequence: Synthetic oligonucleotide
caguauaauuauagcaccu

SEQ ID NO: 2221657 - RNA, 19 nt, Artificial Sequence
  Description of Artificial Sequence: Synthetic oligonucleotide
augaguuucuuagggcuaa

SEQ ID NO: 2221658 - RNA, 19 nt, Artificial Sequence
  Description of Artificial Sequence: Synthetic oligonucleotide
uaaccauaccagggaacac

SEQ ID NO: 2221659 - RNA, 19 nt, Artificial Sequence
  Description of Artificial Sequence: Synthetic oligonucleotide
cucuucaaccaaagcuguc

SEQ ID NO: 2221660 - RNA, 19 nt, Artificial Sequence
  Description of Artificial Sequence: Synthetic oligonucleotide
cguaagacaucacgaagag

SEQ ID NO: 2221661 - RNA, 19 nt, Artificial Sequence
  Description of Artificial Sequence: Synthetic oligonucleotide
cgcaauuccaguauaauua

SEQ ID NO: 2221662 - RNA, 19 nt, Artificial Sequence
  Description of Artificial Sequence: Synthetic oligonucleotide
accuguuguguugaaguau

SEQ ID NO: 2221663 - RNA, 19 nt, Artificial Sequence
  Description of Artificial Sequence: Synthetic oligonucleotide
gaccagaucugacuuugcu

SEQ ID NO: 2221664 - RNA, 19 nt, Artificial Sequence
  Description of Artificial Sequence: Synthetic oligonucleotide
aaagcuccccacauuucuu

SEQ ID NO: 2221665 - RNA, 19 nt, Artificial Sequence
  Description of Artificial Sequence: Synthetic oligonucleotide
gcauuccacaugccaaugc

SEQ ID NO: 2221666 - RNA, 19 nt, Artificial Sequence
  Description of Artificial Sequence: Synthetic oligonucleotide
auaccagggaacacccaug

SEQ ID NO: 2221667 - RNA, 19 nt, Artificial Sequence
  Description of Artificial Sequence: Synthetic oligonucleotide
cacaggcacccgcaauucc

SEQ ID NO: 2221668 - RNA, 19 nt, Artificial Sequence
  Description of Artificial Sequence: Synthetic oligonucleotide
agggaacacccaugaugag

SEQ ID NO: 2221669 - RNA, 19 nt, Artificial Sequence
  Description of Artificial Sequence: Synthetic oligonucleotide
gacaucacgaagagaaaau

SEQ ID NO: 2221670 - RNA, 19 nt, Artificial Sequence
  Description of Artificial Sequence: Synthetic oligonucleotide
guaggaucaaugauauccu

SEQ ID NO: 2221671 - RNA, 19 nt, Artificial Sequence
  Description of Artificial Sequence: Synthetic oligonucleotide
cuagagcaucuucugagua

SEQ ID NO: 2221672 - RNA, 19 nt, Artificial Sequence
  Description of Artificial Sequence: Synthetic oligonucleotide
auaccacacuugaugaaaa

SEQ ID NO: 2221673 - RNA, 19 nt, Artificial Sequence
  Description of Artificial Sequence: Synthetic oligonucleotide
uagcaccuuuugucuaugu

SEQ ID NO: 2221674 - RNA, 19 nt, Artificial Sequence
  Description of Artificial Sequence: Synthetic oligonucleotide
aucucugcaagaagcuaga

SEQ ID NO: 2221675 - RNA, 19 nt, Artificial Sequence
  Description of Artificial Sequence: Synthetic oligonucleotide
guuaccugugaucccugaa

SEQ ID NO: 2221676 - RNA, 19 nt, Artificial Sequence
  Description of Artificial Sequence: Synthetic oligonucleotide
caguuaaugucugauuaua

SEQ ID NO: 2221677 - RNA, 19 nt, Artificial Sequence
  Description of Artificial Sequence: Synthetic oligonucleotide
ucuuagggcuaaugcccau

SEQ ID NO: 2221678 - RNA, 19 nt, Artificial Sequence
  Description of Artificial Sequence: Synthetic oligonucleotide
uagauucaggcagguguaa

SEQ ID NO: 2221679 - RNA, 19 nt, Artificial Sequence
  Description of Artificial Sequence: Synthetic oligonucleotide
auccugugauagauucagg

SEQ ID NO: 2221680 - RNA, 19 nt, Artificial Sequence
  Description of Artificial Sequence: Synthetic oligonucleotide
cugccuuuagugaaaugcu

SEQ ID NO: 2221681 - RNA, 19 nt, Artificial Sequence
  Description of Artificial Sequence: Synthetic oligonucleotide
guaagacaucacgaagaga

SEQ ID NO: 2221682 - RNA, 19 nt, Artificial Sequence
  Description of Artificial Sequence: Synthetic oligonucleotide
ucuuaccuguuguguugaa

SEQ ID NO: 2221683 - RNA, 19 nt, Artificial Sequence
  Description of Artificial Sequence: Synthetic oligonucleotide
agggagacaucaccuuuua

SEQ ID NO: 2221684 - RNA, 19 nt, Artificial Sequence
  Description of Artificial Sequence: Synthetic oligonucleotide
guggaaacgcugugugguc

SEQ ID NO: 2221685 - RNA, 19 nt, Artificial Sequence
  Description of Artificial Sequence: Synthetic oligonucleotide
ggugauaagcaaucaacuu

SEQ ID NO: 2221686 - RNA, 19 nt, Artificial Sequence
  Description of Artificial Sequence: Synthetic oligonucleotide
cauaccagggaacacccau

SEQ ID NO: 2221687 - RNA, 19 nt, Artificial Sequence
  Description of Artificial Sequence: Synthetic oligonucleotide
cuuuuauauuccucacuau

SEQ ID NO: 2221688 - RNA, 19 nt, Artificial Sequence
  Description of Artificial Sequence: Synthetic oligonucleotide
gaugcucugaagguaggau

SEQ ID NO: 2221689 - RNA, 19 nt, Artificial Sequence
  Description of Artificial Sequence: Synthetic oligonucleotide
gggguuaucauaccacacu

SEQ ID NO: 2221690 - RNA, 19 nt, Artificial Sequence
  Description of Artificial Sequence: Synthetic oligonucleotide
caagaagcuagaaccacuu

SEQ ID NO: 2221691 - RNA, 19 nt, Artificial Sequence
  Description of Artificial Sequence: Synthetic oligonucleotide
gucuggcuagagcaucuuc

SEQ ID NO: 2221692 - RNA, 19 nt, Artificial Sequence
  Description of Artificial Sequence: Synthetic oligonucleotide
caucuugauguagucacua

SEQ ID NO: 2221693 - RNA, 19 nt, Artificial Sequence
  Description of Artificial Sequence: Synthetic oligonucleotide
agcuauccacgaugcucug

SEQ ID NO: 2221694 - RNA, 19 nt, Artificial Sequence
  Description of Artificial Sequence: Synthetic oligonucleotide
aucugacuuugcucaucgu

SEQ ID NO: 2221695 - RNA, 19 nt, Artificial Sequence
  Description of Artificial Sequence: Synthetic oligonucleotide
guucuaugucuauauuaau

SEQ ID NO: 2221696 - RNA, 19 nt, Artificial Sequence
  Description of Artificial Sequence: Synthetic oligonucleotide
acgaugcucugaagguagg

SEQ ID NO: 2221697 - RNA, 19 nt, Artificial Sequence
  Description of Artificial Sequence: Synthetic oligonucleotide
gggagacaucaccuuuuag

SEQ ID NO: 2221698 - RNA, 19 nt, Artificial Sequence
  Description of Artificial Sequence: Synthetic oligonucleotide
gcuguguggucucuucaac

SEQ ID NO: 2221699 - RNA, 19 nt, Artificial Sequence
  Description of Artificial Sequence: Synthetic oligonucleotide
uguuugcugucuggcuaga

SEQ ID NO: 2221700 - RNA, 19 nt, Artificial Sequence
  Description of Artificial Sequence: Synthetic oligonucleotide
gguggaaacgcuguguggu

SEQ ID NO: 2221701 - RNA, 19 nt, Artificial Sequence
  Description of Artificial Sequence: Synthetic oligonucleotide
cguauucaggugauaagca

SEQ ID NO: 2221702 - RNA, 19 nt, Artificial Sequence
  Description of Artificial Sequence: Synthetic oligonucleotide
ccugugaucccugaaucuc

SEQ ID NO: 2221703 - RNA, 19 nt, Artificial Sequence
  Description of Artificial Sequence: Synthetic oligonucleotide
gcaauuccaguauaauuau

SEQ ID NO: 2221704 - RNA, 19 nt, Artificial Sequence
  Description of Artificial Sequence: Synthetic oligonucleotide
cucuuaccuguuguguuga

SEQ ID NO: 2221705 - RNA, 19 nt, Artificial Sequence
  Description of Artificial Sequence: Synthetic oligonucleotide
ggaaacgcuguguggucuc

SEQ ID NO: 2221706 - RNA, 19 nt, Artificial Sequence
  Description of Artificial Sequence: Synthetic oligonucleotide
cuguuguguugaaguauaa

SEQ ID NO: 2221707 - RNA, 19 nt, Artificial Sequence
  Description of Artificial Sequence: Synthetic oligonucleotide
uagggcuaaugcccaucuu

SEQ ID NO: 2221708 - RNA, 19 nt, Artificial Sequence
  Description of Artificial Sequence: Synthetic oligonucleotide
augacagaauauacacauu

SEQ ID NO: 2221709 - RNA, 19 nt, Artificial Sequence
  Description of Artificial Sequence: Synthetic oligonucleotide
gucacuauauccaguuaau

SEQ ID NO: 2221710 - RNA, 19 nt, Artificial Sequence
  Description of Artificial Sequence: Synthetic oligonucleotide
gccaacaggauccugugau

SEQ ID NO: 2221711 - RNA, 19 nt, Artificial Sequence
  Description of Artificial Sequence: Synthetic oligonucleotide
gggcuaaugcccaucuuga

SEQ ID NO: 2221712 - RNA, 19 nt, Artificial Sequence
  Description of Artificial Sequence: Synthetic oligonucleotide
gacauacgcugccuuuagu

SEQ ID NO: 2221713 - RNA, 19 nt, Artificial Sequence
  Description of Artificial Sequence: Synthetic oligonucleotide
ccuguuguguugaaguaua

SEQ ID NO: 2221714 - RNA, 19 nt, Artificial Sequence
  Description of Artificial Sequence: Synthetic oligonucleotide
gcauuggcugcugcaauac

SEQ ID NO: 2221715 - RNA, 19 nt, Artificial Sequence
  Description of Artificial Sequence: Synthetic oligonucleotide
uagggagcauuggcugcug

SEQ ID NO: 2221716 - RNA, 19 nt, Artificial Sequence
  Description of Artificial Sequence: Synthetic oligonucleotide
gggagcauuggcugcugca

SEQ ID NO: 2221717 - RNA, 19 nt, Artificial Sequence
  Description of Artificial Sequence: Synthetic oligonucleotide
aaacgcuguguggucucuu

SEQ ID NO: 2221718 - RNA, 19 nt, Artificial Sequence
  Description of Artificial Sequence: Synthetic oligonucleotide
ggaacacccaugaugaguu

SEQ ID NO: 2221719 - RNA, 19 nt, Artificial Sequence
  Description of Artificial Sequence: Synthetic oligonucleotide
uccccacauuucuuuuguu

SEQ ID NO: 2221720 - RNA, 19 nt, Artificial Sequence
  Description of Artificial Sequence: Synthetic oligonucleotide
cugcugcaauacauucuga

SEQ ID NO: 2221721 - RNA, 19 nt, Artificial Sequence
  Description of Artificial Sequence: Synthetic oligonucleotide
caugguggaaacgcugugu

SEQ ID NO: 2221722 - RNA, 19 nt, Artificial Sequence
  Description of Artificial Sequence: Synthetic oligonucleotide
aggcacccgcaauuccagu

SEQ ID NO: 2221723 - RNA, 19 nt, Artificial Sequence
  Description of Artificial Sequence: Synthetic oligonucleotide
ccacaugccaaugccccgc

SEQ ID NO: 2221724 - RNA, 19 nt, Artificial Sequence
  Description of Artificial Sequence: Synthetic oligonucleotide
acccgcaauuccaguauaa

SEQ ID NO: 2221725 - RNA, 19 nt, Artificial Sequence
  Description of Artificial Sequence: Synthetic oligonucleotide
agguuaccugugaucccug

SEQ ID NO: 2221726 - RNA, 19 nt, Artificial Sequence
  Description of Artificial Sequence: Synthetic oligonucleotide
ugucuggcuagagcaucuu

SEQ ID NO: 2221727 - RNA, 19 nt, Artificial Sequence
  Description of Artificial Sequence: Synthetic oligonucleotide
cugucuggcuagagcaucu

SEQ ID NO: 2221728 - RNA, 19 nt, Artificial Sequence
  Description of Artificial Sequence: Synthetic oligonucleotide
gcaauacauucugaccaga

SEQ ID NO: 2221729 - RNA, 19 nt, Artificial Sequence
  Description of Artificial Sequence: Synthetic oligonucleotide
gggaacacccaugaugagu

SEQ ID NO: 2221730 - RNA, 19 nt, Artificial Sequence
  Description of Artificial Sequence: Synthetic oligonucleotide
ggcacccgcaauuccagua

SEQ ID NO: 2221731 - RNA, 19 nt, Artificial Sequence
  Description of Artificial Sequence: Synthetic oligonucleotide
acaugccaaugccccgcaa

SEQ ID NO: 2221732 - RNA, 19 nt, Artificial Sequence
  Description of Artificial Sequence: Synthetic oligonucleotide
gugauagauucaggcaggu

SEQ ID NO: 2221733 - RNA, 19 nt, Artificial Sequence
  Description of Artificial Sequence: Synthetic oligonucleotide
cacaugccaaugccccgca

SEQ ID NO: 2221734 - RNA, 19 nt, Artificial Sequence
  Description of Artificial Sequence: Synthetic oligonucleotide
gcaagaagcuagaaccacu

SEQ ID NO: 2221735 - RNA, 19 nt, Artificial Sequence
  Description of Artificial Sequence: Synthetic oligonucleotide
gaaacgcuguguggucucu

SEQ ID NO: 2221736 - RNA, 19 nt, Artificial Sequence
  Description of Artificial Sequence: Synthetic oligonucleotide
gauaagcaaucaacuucuu

SEQ ID NO: 2221737 - RNA, 19 nt, Artificial Sequence
  Description of Artificial Sequence: Synthetic oligonucleotide
gagaugcuccucucuccau

SEQ ID NO: 2221738 - RNA, 19 nt, Artificial Sequence
  Description of Artificial Sequence: Synthetic oligonucleotide
acgcugccuuuagugaaau

SEQ ID NO: 2221739 - RNA, 19 nt, Artificial Sequence
  Description of Artificial Sequence: Synthetic oligonucleotide
ccauccauguauugcauuu

SEQ ID NO: 2221740 - RNA, 19 nt, Artificial Sequence
  Description of Artificial Sequence: Synthetic oligonucleotide
ccaguuaaugucugauuau

SEQ ID NO: 2221741 - RNA, 19 nt, Artificial Sequence
  Description of Artificial Sequence: Synthetic oligonucleotide
gcuauccacgaugcucuga

SEQ ID NO: 2221742 - RNA, 19 nt, Artificial Sequence
  Description of Artificial Sequence: Synthetic oligonucleotide
cacccgcaauuccaguaua

SEQ ID NO: 2221743 - RNA, 19 nt, Artificial Sequence
  Description of Artificial Sequence: Synthetic oligonucleotide
cugaguagucaagacuguu

SEQ ID NO: 2221744 - RNA, 19 nt, Artificial Sequence
  Description of Artificial Sequence: Synthetic oligonucleotide
ggugaccaagcuacaucaa

SEQ ID NO: 2221745 - RNA, 19 nt, Artificial Sequence
  Description of Artificial Sequence: Synthetic oligonucleotide
ccaacaggauccugugaua

SEQ ID NO: 2221746 - RNA, 19 nt, Artificial Sequence
  Description of Artificial Sequence: Synthetic oligonucleotide
caaugccccgcaagccaua

SEQ ID NO: 2221747 - RNA, 19 nt, Artificial Sequence
  Description of Artificial Sequence: Synthetic oligonucleotide
ggcuaaugcccaucuugau

SEQ ID NO: 2221748 - RNA, 19 nt, Artificial Sequence
  Description of Artificial Sequence: Synthetic oligonucleotide
ccgcaauuccaguauaauu

SEQ ID NO: 2221749 - RNA, 19 nt, Artificial Sequence
  Description of Artificial Sequence: Synthetic oligonucleotide
gcacccgcaauuccaguau

SEQ ID NO: 2221750 - RNA, 19 nt, Artificial Sequence
  Description of Artificial Sequence: Synthetic oligonucleotide
ccauaccagggaacaccca

SEQ ID NO: 2221751 - RNA, 19 nt, Artificial Sequence
  Description of Artificial Sequence: Synthetic oligonucleotide
ccaucuugauguagucacu

SEQ ID NO: 2221752 - RNA, 19 nt, Artificial Sequence
  Description of Artificial Sequence: Synthetic oligonucleotide
gucugauuauagggagcau

SEQ ID NO: 2221753 - RNA, 19 nt, Artificial Sequence
  Description of Artificial Sequence: Synthetic oligonucleotide
ccaaugccccgcaagccau

SEQ ID NO: 2221754 - RNA, 19 nt, Artificial Sequence
  Description of Artificial Sequence: Synthetic oligonucleotide
gcuucguauucaggugaua

SEQ ID NO: 2221755 - RNA, 19 nt, Artificial Sequence
  Description of Artificial Sequence: Synthetic oligonucleotide
ccucacuauuuaagauaua

SEQ ID NO: 2221756 - RNA, 19 nt, Artificial Sequence
  Description of Artificial Sequence: Synthetic oligonucleotide
ccccgcaagccauaguuuu

SEQ ID NO: 2221757 - RNA, 19 nt, Artificial Sequence
  Description of Artificial Sequence: Synthetic oligonucleotide
cgcugccuuuagugaaaug

SEQ ID NO: 2221758 - RNA, 19 nt, Artificial Sequence
  Description of Artificial Sequence: Synthetic oligonucleotide
cgaugcucugaagguagga

SEQ ID NO: 2221759 - RNA, 19 nt, Artificial Sequence
  Description of Artificial Sequence: Synthetic oligonucleotide
cccgcaauuccaguauaau

SEQ ID NO: 2221760 - RNA, 19 nt, Artificial Sequence
  Description of Artificial Sequence: Synthetic oligonucleotide
gccccgcaagccauaguuu

SEQ ID NO: 2221761 - RNA, 19 nt, Artificial Sequence
  Description of Artificial Sequence: Synthetic oligonucleotide
uugacugcuaccuucaugg

SEQ ID NO: 2221762 - RNA, 19 nt, Artificial Sequence
  Description of Artificial Sequence: Synthetic oligonucleotide
aauacguuggcuuugaguu

SEQ ID NO: 2221763 - RNA, 19 nt, Artificial Sequence
  Description of Artificial Sequence: Synthetic oligonucleotide
uugagcaagaauacguugg

SEQ ID NO: 2221764 - RNA, 19 nt, Artificial Sequence
  Description of Artificial Sequence: Synthetic oligonucleotide
ucugcugucccuaacaucu

SEQ ID NO: 2221765 - RNA, 19 nt, Artificial Sequence
  Description of Artificial Sequence: Synthetic oligonucleotide
uaagcuaaagaaauucugu

SEQ ID NO: 2221766 - RNA, 19 nt, Artificial Sequence
  Description of Artificial Sequence: Synthetic oligonucleotide
uauacugcuggucucagcu

SEQ ID NO: 2221767 - RNA, 19 nt, Artificial Sequence
  Description of Artificial Sequence: Synthetic oligonucleotide
ugauucuugacuucggcgc

SEQ ID NO: 2221768 - RNA, 19 nt, Artificial Sequence
  Description of Artificial Sequence: Synthetic oligonucleotide
acugcggccagcuugugcc

SEQ ID NO: 2221769 - RNA, 19 nt, Artificial Sequence
  Description of Artificial Sequence: Synthetic oligonucleotide
cucaguuucaccccgauac

SEQ ID NO: 2221770 - RNA, 19 nt, Artificial Sequence
  Description of Artificial Sequence: Synthetic oligonucleotide
uaccauaagcuaaagaaau

SEQ ID NO: 2221771 - RNA, 19 nt, Artificial Sequence
  Description of Artificial Sequence: Synthetic oligonucleotide
uuggcuuugaguucauucc

SEQ ID NO: 2221772 - RNA, 19 nt, Artificial Sequence
  Description of Artificial Sequence: Synthetic oligonucleotide
acuucggcgcauuagaucu

SEQ ID NO: 2221773 - RNA, 19 nt, Artificial Sequence
  Description of Artificial Sequence: Synthetic oligonucleotide
ucaaguagaagcccaggga

SEQ ID NO: 2221774 - RNA, 19 nt, Artificial Sequence
  Description of Artificial Sequence: Synthetic oligonucleotide
uccuugagcaagaauacgu

SEQ ID NO: 2221775 - RNA, 19 nt, Artificial Sequence
  Description of Artificial Sequence: Synthetic oligonucleotide
cuaaagaaauucuguauuc

SEQ ID NO: 2221776 - RNA, 19 nt, Artificial Sequence
  Description of Artificial Sequence: Synthetic oligonucleotide
ucugaguugggucugcacu

SEQ ID NO: 2221777 - RNA, 19 nt, Artificial Sequence
  Description of Artificial Sequence: Synthetic oligonucleotide
aagcuaaagaaauucugua

SEQ ID NO: 2221778 - RNA, 19 nt, Artificial Sequence
  Description of Artificial Sequence: Synthetic oligonucleotide
cuugucauuggagagcagg

SEQ ID NO: 2221779 - RNA, 19 nt, Artificial Sequence
  Description of Artificial Sequence: Synthetic oligonucleotide
ugagcaagaauacguuggc

SEQ ID NO: 2221780 - RNA, 19 nt, Artificial Sequence
  Description of Artificial Sequence: Synthetic oligonucleotide
cugauucuugacuucggcg

SEQ ID NO: 2221781 - RNA, 19 nt, Artificial Sequence
  Description of Artificial Sequence: Synthetic oligonucleotide
ucugauucuugacuucggc

SEQ ID NO: 2221782 - RNA, 19 nt, Artificial Sequence
  Description of Artificial Sequence: Synthetic oligonucleotide
uguuucuugacugcuaccu

SEQ ID NO: 2221783 - RNA, 19 nt, Artificial Sequence
  Description of Artificial Sequence: Synthetic oligonucleotide
cugaacguccucuggaggg

SEQ ID NO: 2221784 - RNA, 19 nt, Artificial Sequence
  Description of Artificial Sequence: Synthetic oligonucleotide
ucuggauccaggaacuagu

SEQ ID NO: 2221785 - RNA, 19 nt, Artificial Sequence
  Description of Artificial Sequence: Synthetic oligonucleotide
uaaagaaauucuguauucu

SEQ ID NO: 2221786 - RNA, 19 nt, Artificial Sequence
  Description of Artificial Sequence: Synthetic oligonucleotide
uccgucacuuccuugagcu

SEQ ID NO: 2221787 - RNA, 19 nt, Artificial Sequence
  Description of Artificial Sequence: Synthetic oligonucleotide
cuggaaguaggccaauucc

SEQ ID NO: 2221788 - RNA, 19 nt, Artificial Sequence
  Description of Artificial Sequence: Synthetic oligonucleotide
gaaguaggccaauuccucc

SEQ ID NO: 2221789 - RNA, 19 nt, Artificial Sequence
  Description of Artificial Sequence: Synthetic oligonucleotide
auaagcuaaagaaauucug

SEQ ID NO: 2221790 - RNA, 19 nt, Artificial Sequence
  Description of Artificial Sequence: Synthetic oligonucleotide
uuccaagaguuccagcgcc

SEQ ID NO: 2221791 - RNA, 19 nt, Artificial Sequence
  Description of Artificial Sequence: Synthetic oligonucleotide
agcuccucccggcugaagc

SEQ ID NO: 2221792 - RNA, 19 nt, Artificial Sequence
  Description of Artificial Sequence: Synthetic oligonucleotide
agcuauuuggcgcucccuc

SEQ ID NO: 2221793 - RNA, 19 nt, Artificial Sequence
  Description of Artificial Sequence: Synthetic oligonucleotide
agcuaaagaaauucuguau

SEQ ID NO: 2221794 - RNA, 19 nt, Artificial Sequence
  Description of Artificial Sequence: Synthetic oligonucleotide
gaguugaccagcaggaggc

SEQ ID NO: 2221795 - RNA, 19 nt, Artificial Sequence
  Description of Artificial Sequence: Synthetic oligonucleotide
ugucccuaacaucuuggcc

SEQ ID NO: 2221796 - RNA, 19 nt, Artificial Sequence
  Description of Artificial Sequence: Synthetic oligonucleotide
cugggagcuauacugcugg

SEQ ID NO: 2221797 - RNA, 19 nt, Artificial Sequence
  Description of Artificial Sequence: Synthetic oligonucleotide
ucucgcuggaaguaggcca

SEQ ID NO: 2221798 - RNA, 19 nt, Artificial Sequence
  Description of Artificial Sequence: Synthetic oligonucleotide
uucugauucuugacuucgg

SEQ ID NO: 2221799 - RNA, 19 nt, Artificial Sequence
  Description of Artificial Sequence: Synthetic oligonucleotide
agcaagaauacguuggcuu

SEQ ID NO: 2221800 - RNA, 19 nt, Artificial Sequence
  Description of Artificial Sequence: Synthetic oligonucleotide
ugugccgcaacuccgaguu

SEQ ID NO: 2221801 - RNA, 19 nt, Artificial Sequence
  Description of Artificial Sequence: Synthetic oligonucleotide
uagaucucggcugugugcc

SEQ ID NO: 2221802 - RNA, 19 nt, Artificial Sequence
  Description of Artificial Sequence: Synthetic oligonucleotide
acugaacguccucuggagg

SEQ ID NO: 2221803 - RNA, 19 nt, Artificial Sequence
  Description of Artificial Sequence: Synthetic oligonucleotide
ucaguuucaccccgauacc

SEQ ID NO: 2221804 - RNA, 19 nt, Artificial Sequence
  Description of Artificial Sequence: Synthetic oligonucleotide
ugaucugugagcagcucuc

SEQ ID NO: 2221805 - RNA, 19 nt, Artificial Sequence
  Description of Artificial Sequence: Synthetic oligonucleotide
gcugcuucgggcuucagcc

SEQ ID NO: 2221806 - RNA, 19 nt, Artificial Sequence
  Description of Artificial Sequence: Synthetic oligonucleotide
ggaguuggugguuggaagg

SEQ ID NO: 2221807 - RNA, 19 nt, Artificial Sequence
  Description of Artificial Sequence: Synthetic oligonucleotide
ugagccuagcucccugcgg

SEQ ID NO: 2221808 - RNA, 19 nt, Artificial Sequence
  Description of Artificial Sequence: Synthetic oligonucleotide
cuccgaguugaccagcagg

SEQ ID NO: 2221809 - RNA, 19 nt, Artificial Sequence
  Description of Artificial Sequence: Synthetic oligonucleotide
guuggaaggcuguccacag

SEQ ID NO: 2221810 - RNA, 19 nt, Artificial Sequence
  Description of Artificial Sequence: Synthetic oligonucleotide
uccggagcaggccccacgg

SEQ ID NO: 2221811 - RNA, 19 nt, Artificial Sequence
  Description of Artificial Sequence: Synthetic oligonucleotide
ugucauuggagagcaggag

SEQ ID NO: 2221812 - RNA, 19 nt, Artificial Sequence
  Description of Artificial Sequence: Synthetic oligonucleotide
ucggcugugugcccgaagu

SEQ ID NO: 2221813 - RNA, 19 nt, Artificial Sequence
  Description of Artificial Sequence: Synthetic oligonucleotide
ugagcuauuuggcgcuccc

SEQ ID NO: 2221814 - RNA, 19 nt, Artificial Sequence
  Description of Artificial Sequence: Synthetic oligonucleotide
uuucaccccgauaccauaa

SEQ ID NO: 2221815 - RNA, 19 nt, Artificial Sequence
  Description of Artificial Sequence: Synthetic oligonucleotide
acuaguggagccucuuccu

SEQ ID NO: 2221816 - RNA, 19 nt, Artificial Sequence
  Description of Artificial Sequence: Synthetic oligonucleotide
ucauuccucuccugaagga

SEQ ID NO: 2221817 - RNA, 19 nt, Artificial Sequence
  Description of Artificial Sequence: Synthetic oligonucleotide
uucaccccgauaccauaag

SEQ ID NO: 2221818 - RNA, 19 nt, Artificial Sequence
  Description of Artificial Sequence: Synthetic oligonucleotide
gagcugucgcagcagugcg

SEQ ID NO: 2221819 - RNA, 19 nt, Artificial Sequence
  Description of Artificial Sequence: Synthetic oligonucleotide
auaccauaagcuaaagaaa

SEQ ID NO: 2221820 - RNA, 19 nt, Artificial Sequence
  Description of Artificial Sequence: Synthetic oligonucleotide
gauucuugacuucggcgca

SEQ ID NO: 2221821 - RNA, 19 nt, Artificial Sequence
  Description of Artificial Sequence: Synthetic oligonucleotide
agagcauccacccggucau

SEQ ID NO: 2221822 - RNA, 19 nt, Artificial Sequence
  Description of Artificial Sequence: Synthetic oligonucleotide
uucggcgcauuagaucucg

SEQ ID NO: 2221823 - RNA, 19 nt, Artificial Sequence
  Description of Artificial Sequence: Synthetic oligonucleotide
ugugcccgaaguucguccc

SEQ ID NO: 2221824 - RNA, 19 nt, Artificial Sequence
  Description of Artificial Sequence: Synthetic oligonucleotide
agcuucugauucuugacuu

SEQ ID NO: 2221825 - RNA, 19 nt, Artificial Sequence
  Description of Artificial Sequence: Synthetic oligonucleotide
cauccacccggucaucugg

SEQ ID NO: 2221826 - RNA, 19 nt, Artificial Sequence
  Description of Artificial Sequence: Synthetic oligonucleotide
aagaguuccagcgcccgca

SEQ ID NO: 2221827 - RNA, 19 nt, Artificial Sequence
  Description of Artificial Sequence: Synthetic oligonucleotide
ugcuuaagcuccucccggc

SEQ ID NO: 2221828 - RNA, 19 nt, Artificial Sequence
  Description of Artificial Sequence: Synthetic oligonucleotide
cuugacugcuaccuucaug

SEQ ID NO: 2221829 - RNA, 19 nt, Artificial Sequence
  Description of Artificial Sequence: Synthetic oligonucleotide
uccugcgccgcucugaguu

SEQ ID NO: 2221830 - RNA, 19 nt, Artificial Sequence
  Description of Artificial Sequence: Synthetic oligonucleotide
ugggguugcugcuucgggc

SEQ ID NO: 2221831 - RNA, 19 nt, Artificial Sequence
  Description of Artificial Sequence: Synthetic oligonucleotide
cacugaacguccucuggag

SEQ ID NO: 2221832 - RNA, 19 nt, Artificial Sequence
  Description of Artificial Sequence: Synthetic oligonucleotide
uccugagcuauuuggcgcu

SEQ ID NO: 2221833 - RNA, 19 nt, Artificial Sequence
  Description of Artificial Sequence: Synthetic oligonucleotide
uguccugcgccgcucugag

SEQ ID NO: 2221834 - RNA, 19 nt, Artificial Sequence
  Description of Artificial Sequence: Synthetic oligonucleotide
cuugacuucggcgcauuag

SEQ ID NO: 2221835 - RNA, 19 nt, Artificial Sequence
  Description of Artificial Sequence: Synthetic oligonucleotide
uauuuggcgcucccucucu

SEQ ID NO: 2221836 - RNA, 19 nt, Artificial Sequence
  Description of Artificial Sequence: Synthetic oligonucleotide
uuccaggugggguuggcgu

SEQ ID NO: 2221837 - RNA, 19 nt, Artificial Sequence
  Description of Artificial Sequence: Synthetic oligonucleotide
gacuucggcgcauuagauc

SEQ ID NO: 2221838 - RNA, 19 nt, Artificial Sequence
  Description of Artificial Sequence: Synthetic oligonucleotide
gaucugugagcagcucucg

SEQ ID NO: 2221839 - RNA, 19 nt, Artificial Sequence
  Description of Artificial Sequence: Synthetic oligonucleotide
ugaagccacacugaacguc

SEQ ID NO: 2221840 - RNA, 19 nt, Artificial Sequence
  Description of Artificial Sequence: Synthetic oligonucleotide
aguggagccucuuccuugu

SEQ ID NO: 2221841 - RNA, 19 nt, Artificial Sequence
  Description of Artificial Sequence: Synthetic oligonucleotide
ugggguugcuucuccuucc

SEQ ID NO: 2221842 - RNA, 19 nt, Artificial Sequence
  Description of Artificial Sequence: Synthetic oligonucleotide
ugcuggucucagcuucagg

SEQ ID NO: 2221843 - RNA, 19 nt, Artificial Sequence
  Description of Artificial Sequence: Synthetic oligonucleotide
aguuccgccugcugcgcgg

SEQ ID NO: 2221844 - RNA, 19 nt, Artificial Sequence
  Description of Artificial Sequence: Synthetic oligonucleotide
cuaccuucauggcuucaag

SEQ ID NO: 2221845 - RNA, 19 nt, Artificial Sequence
  Description of Artificial Sequence: Synthetic oligonucleotide
cuuugaguucauuccucuc

SEQ ID NO: 2221846 - RNA, 19 nt, Artificial Sequence
  Description of Artificial Sequence: Synthetic oligonucleotide
cuggauccaggaacuagug

SEQ ID NO: 2221847 - RNA, 19 nt, Artificial Sequence
  Description of Artificial Sequence: Synthetic oligonucleotide
caauuccuccuugagcaag

SEQ ID NO: 2221848 - RNA, 19 nt, Artificial Sequence
  Description of Artificial Sequence: Synthetic oligonucleotide
ucguccucaucaucacugc

SEQ ID NO: 2221849 - RNA, 19 nt, Artificial Sequence
  Description of Artificial Sequence: Synthetic oligonucleotide
ccauaagcuaaagaaauuc

SEQ ID NO: 2221850 - RNA, 19 nt, Artificial Sequence
  Description of Artificial Sequence: Synthetic oligonucleotide
cagcuugugccgcaacucc

SEQ ID NO: 2221851 - RNA, 19 nt, Artificial Sequence
  Description of Artificial Sequence: Synthetic oligonucleotide
aggccaauuccuccuugag

SEQ ID NO: 2221852 - RNA, 19 nt, Artificial Sequence
  Description of Artificial Sequence: Synthetic oligonucleotide
ucgucccgcugucuguccg

SEQ ID NO: 2221853 - RNA, 19 nt, Artificial Sequence
  Description of Artificial Sequence: Synthetic oligonucleotide
ucgggcuucagccucuguu

SEQ ID NO: 2221854 - RNA, 19 nt, Artificial Sequence
  Description of Artificial Sequence: Synthetic oligonucleotide
cuccuugagcaagaauacg

SEQ ID NO: 2221855 - RNA, 19 nt, Artificial Sequence
  Description of Artificial Sequence: Synthetic oligonucleotide
ugaacguccucuggagggc

SEQ ID NO: 2221856 - RNA, 19 nt, Artificial Sequence
  Description of Artificial Sequence: Synthetic oligonucleotide
ugacuucggcgcauuagau

SEQ ID NO: 2221857 - RNA, 19 nt, Artificial Sequence
  Description of Artificial Sequence: Synthetic oligonucleotide
cucucucuguccugcgccg

SEQ ID NO: 2221858 - RNA, 19 nt, Artificial Sequence
  Description of Artificial Sequence: Synthetic oligonucleotide
cuauacugcuggucucagc

SEQ ID NO: 2221859 - RNA, 19 nt, Artificial Sequence
  Description of Artificial Sequence: Synthetic oligonucleotide
acgagucguccucaucauc

SEQ ID NO: 2221860 - RNA, 19 nt, Artificial Sequence
  Description of Artificial Sequence: Synthetic oligonucleotide
ugccgcaacuccgaguuga

SEQ ID NO: 2221861 - RNA, 19 nt, Artificial Sequence
  Description of Artificial Sequence: Synthetic oligonucleotide
ggucaucugggguugcugc

SEQ ID NO: 2221862 - RNA, 19 nt, Artificial Sequence
  Description of Artificial Sequence: Synthetic oligonucleotide
gaacuaguggagccucuuc

SEQ ID NO: 2221863 - RNA, 19 nt, Artificial Sequence
  Description of Artificial Sequence: Synthetic oligonucleotide
agcagcucucgcuggaagu

SEQ ID NO: 2221864 - RNA, 19 nt, Artificial Sequence
  Description of Artificial Sequence: Synthetic oligonucleotide
acuagaggcaccagcccag

SEQ ID NO: 2221865 - RNA, 19 nt, Artificial Sequence
  Description of Artificial Sequence: Synthetic oligonucleotide
cuauuuggcgcucccucuc

SEQ ID NO: 2221866 - RNA, 19 nt, Artificial Sequence
  Description of Artificial Sequence: Synthetic oligonucleotide
ugaguugggucugcacugc

SEQ ID NO: 2221867 - RNA, 19 nt, Artificial Sequence
  Description of Artificial Sequence: Synthetic oligonucleotide
ugcuucgggcuucagccuc

SEQ ID NO: 2221868 - RNA, 19 nt, Artificial Sequence
  Description of Artificial Sequence: Synthetic oligonucleotide
agacugcugggagcuauac

SEQ ID NO: 2221869 - RNA, 19 nt, Artificial Sequence
  Description of Artificial Sequence: Synthetic oligonucleotide
uggcgugugggguugcuuc

SEQ ID NO: 2221870 - RNA, 19 nt, Artificial Sequence
  Description of Artificial Sequence: Synthetic oligonucleotide
gagcaggagccacgagucg

SEQ ID NO: 2221871 - RNA, 19 nt, Artificial Sequence
  Description of Artificial Sequence: Synthetic oligonucleotide
uuggcgcucccucucucug

SEQ ID NO: 2221872 - RNA, 19 nt, Artificial Sequence
  Description of Artificial Sequence: Synthetic oligonucleotide
agcgaguccggagcaggcc

SEQ ID NO: 2221873 - RNA, 19 nt, Artificial Sequence
  Description of Artificial Sequence: Synthetic oligonucleotide
aacguccucuggagggcgc

SEQ ID NO: 2221874 - RNA, 19 nt, Artificial Sequence
  Description of Artificial Sequence: Synthetic oligonucleotide
gaacguccucuggagggcg

SEQ ID NO: 2221875 - RNA, 19 nt, Artificial Sequence
  Description of Artificial Sequence: Synthetic oligonucleotide
gccucuguucuucagccag

SEQ ID NO: 2221876 - RNA, 19 nt, Artificial Sequence
  Description of Artificial Sequence: Synthetic oligonucleotide
gugugcccgaaguucgucc

SEQ ID NO: 2221877 - RNA, 19 nt, Artificial Sequence
  Description of Artificial Sequence: Synthetic oligonucleotide
accccgauaccauaagcua

SEQ ID NO: 2221878 - RNA, 19 nt, Artificial Sequence
  Description of Artificial Sequence: Synthetic oligonucleotide
ugacugcuaccuucauggc

SEQ ID NO: 2221879 - RNA, 19 nt, Artificial Sequence
  Description of Artificial Sequence: Synthetic oligonucleotide
ugggucugcacugcggcca

SEQ ID NO: 2221880 - RNA, 19 nt, Artificial Sequence
  Description of Artificial Sequence: Synthetic oligonucleotide
cugagccuagcucccugcg

SEQ ID NO: 2221881 - RNA, 19 nt, Artificial Sequence
  Description of Artificial Sequence: Synthetic oligonucleotide
gcgcauuagaucucggcug

SEQ ID NO: 2221882 - RNA, 19 nt, Artificial Sequence
  Description of Artificial Sequence: Synthetic oligonucleotide
ggagcuauacugcuggucu

SEQ ID NO: 2221883 - RNA, 19 nt, Artificial Sequence
  Description of Artificial Sequence: Synthetic oligonucleotide
cagagcauccacccgguca

SEQ ID NO: 2221884 - RNA, 19 nt, Artificial Sequence
  Description of Artificial Sequence: Synthetic oligonucleotide
agcuugugccgcaacuccg

SEQ ID NO: 2221885 - RNA, 19 nt, Artificial Sequence
  Description of Artificial Sequence: Synthetic oligonucleotide
agcuauacugcuggucuca

SEQ ID NO: 2221886 - RNA, 19 nt, Artificial Sequence
  Description of Artificial Sequence: Synthetic oligonucleotide
aguucgucccgcugucugu

SEQ ID NO: 2221887 - RNA, 19 nt, Artificial Sequence
  Description of Artificial Sequence: Synthetic oligonucleotide
cugggguugcugcuucggg

SEQ ID NO: 2221888 - RNA, 19 nt, Artificial Sequence
  Description of Artificial Sequence: Synthetic oligonucleotide
gcugugugcccgaaguucg

SEQ ID NO: 2221889 - RNA, 19 nt, Artificial Sequence
  Description of Artificial Sequence: Synthetic oligonucleotide
uccacccggucaucugggg

SEQ ID NO: 2221890 - RNA, 19 nt, Artificial Sequence
  Description of Artificial Sequence: Synthetic oligonucleotide
ugucgcagcagugcgcgcu

SEQ ID NO: 2221891 - RNA, 19 nt, Artificial Sequence
  Description of Artificial Sequence: Synthetic oligonucleotide
gcuaaagaaauucuguauu

SEQ ID NO: 2221892 - RNA, 19 nt, Artificial Sequence
  Description of Artificial Sequence: Synthetic oligonucleotide
cacuagaggcaccagccca

SEQ ID NO: 2221893 - RNA, 19 nt, Artificial Sequence
  Description of Artificial Sequence: Synthetic oligonucleotide
gacugcuaccuucauggcu

SEQ ID NO: 2221894 - RNA, 19 nt, Artificial Sequence
  Description of Artificial Sequence: Synthetic oligonucleotide
aacuccgaguugaccagca

SEQ ID NO: 2221895 - RNA, 19 nt, Artificial Sequence
  Description of Artificial Sequence: Synthetic oligonucleotide
agggcgcccuggcugcugc

SEQ ID NO: 2221896 - RNA, 19 nt, Artificial Sequence
  Description of Artificial Sequence: Synthetic oligonucleotide
uucuccucgcgcagccgcc

SEQ ID NO: 2221897 - RNA, 19 nt, Artificial Sequence
  Description of Artificial Sequence: Synthetic oligonucleotide
guaggccaauuccuccuug

SEQ ID NO: 2221898 - RNA, 19 nt, Artificial Sequence
  Description of Artificial Sequence: Synthetic oligonucleotide
cacuuccuugagcugucgc

SEQ ID NO: 2221899 - RNA, 19 nt, Artificial Sequence
  Description of Artificial Sequence: Synthetic oligonucleotide
gagcuauacugcuggucuc

SEQ ID NO: 2221900 - RNA, 19 nt, Artificial Sequence
  Description of Artificial Sequence: Synthetic oligonucleotide
aguugaccagcaggaggcg

SEQ ID NO: 2221901 - RNA, 19 nt, Artificial Sequence
  Description of Artificial Sequence: Synthetic oligonucleotide
ugugggguugcuucuccuu

SEQ ID NO: 2221902 - RNA, 19 nt, Artificial Sequence
  Description of Artificial Sequence: Synthetic oligonucleotide
acggccgccuuuuccaaga

SEQ ID NO: 2221903 - RNA, 19 nt, Artificial Sequence
  Description of Artificial Sequence: Synthetic oligonucleotide
agcaggagccacgagucgu

SEQ ID NO: 2221904 - RNA, 19 nt, Artificial Sequence
  Description of Artificial Sequence: Synthetic oligonucleotide
cucugaguugggucugcac

SEQ ID NO: 2221905 - RNA, 19 nt, Artificial Sequence
  Description of Artificial Sequence: Synthetic oligonucleotide
cuugugccgcaacuccgag

SEQ ID NO: 2221906 - RNA, 19 nt, Artificial Sequence
  Description of Artificial Sequence: Synthetic oligonucleotide
ucggcgcauuagaucucgg

SEQ ID NO: 2221907 - RNA, 19 nt, Artificial Sequence
  Description of Artificial Sequence: Synthetic oligonucleotide
acuccgaguugaccagcag

SEQ ID NO: 2221908 - RNA, 19 nt, Artificial Sequence
  Description of Artificial Sequence: Synthetic oligonucleotide
cgaguugaccagcaggagg

SEQ ID NO: 2221909 - RNA, 19 nt, Artificial Sequence
  Description of Artificial Sequence: Synthetic oligonucleotide
gugggguugcuucuccuuc

SEQ ID NO: 2221910 - RNA, 19 nt, Artificial Sequence
  Description of Artificial Sequence: Synthetic oligonucleotide
gcuggaaguaggccaauuc

SEQ ID NO: 2221911 - RNA, 19 nt, Artificial Sequence
  Description of Artificial Sequence: Synthetic oligonucleotide
cucucgcuggaaguaggcc

SEQ ID NO: 2221912 - RNA, 19 nt, Artificial Sequence
  Description of Artificial Sequence: Synthetic oligonucleotide
uugugccgcaacuccgagu

SEQ ID NO: 2221913 - RNA, 19 nt, Artificial Sequence
  Description of Artificial Sequence: Synthetic oligonucleotide
agccauccugagcuauuug

SEQ ID NO: 2221914 - RNA, 19 nt, Artificial Sequence
  Description of Artificial Sequence: Synthetic oligonucleotide
agcucucgcuggaaguagg

SEQ ID NO: 2221915 - RNA, 19 nt, Artificial Sequence
  Description of Artificial Sequence: Synthetic oligonucleotide
aguaggccaauuccuccuu

SEQ ID NO: 2221916 - RNA, 19 nt, Artificial Sequence
  Description of Artificial Sequence: Synthetic oligonucleotide
ccuguagacugcugggagc

SEQ ID NO: 2221917 - RNA, 19 nt, Artificial Sequence
  Description of Artificial Sequence: Synthetic oligonucleotide
cagcagugcgcgcuccucc

SEQ ID NO: 2221918 - RNA, 19 nt, Artificial Sequence
  Description of Artificial Sequence: Synthetic oligonucleotide
ggacccggugaucugugag

SEQ ID NO: 2221919 - RNA, 19 nt, Artificial Sequence
  Description of Artificial Sequence: Synthetic oligonucleotide
agcagugcgcgcuccuccu

SEQ ID NO: 2221920 - RNA, 19 nt, Artificial Sequence
  Description of Artificial Sequence: Synthetic oligonucleotide
acguccucuggagggcgcc

SEQ ID NO: 2221921 - RNA, 19 nt, Artificial Sequence
  Description of Artificial Sequence: Synthetic oligonucleotide
acccggugaucugugagca

SEQ ID NO: 2221922 - RNA, 19 nt, Artificial Sequence
  Description of Artificial Sequence: Synthetic oligonucleotide
aguuucaccccgauaccau

SEQ ID NO: 2221923 - RNA, 19 nt, Artificial Sequence
  Description of Artificial Sequence: Synthetic oligonucleotide
caccccgauaccauaagcu

SEQ ID NO: 2221924 - RNA, 19 nt, Artificial Sequence
  Description of Artificial Sequence: Synthetic oligonucleotide
uucgucccgcugucugucc

SEQ ID NO: 2221925 - RNA, 19 nt, Artificial Sequence
  Description of Artificial Sequence: Synthetic oligonucleotide
gugcccgaaguucgucccg

SEQ ID NO: 2221926 - RNA, 19 nt, Artificial Sequence
  Description of Artificial Sequence: Synthetic oligonucleotide
uuccucugcugucccuaac

SEQ ID NO: 2221927 - RNA, 19 nt, Artificial Sequence
  Description of Artificial Sequence: Synthetic oligonucleotide
uagacugcugggagcuaua

SEQ ID NO: 2221928 - RNA, 19 nt, Artificial Sequence
  Description of Artificial Sequence: Synthetic oligonucleotide
gcuucaaguagaagcccag

SEQ ID NO: 2221929 - RNA, 19 nt, Artificial Sequence
  Description of Artificial Sequence: Synthetic oligonucleotide
cucgcuggaaguaggccaa

SEQ ID NO: 2221930 - RNA, 19 nt, Artificial Sequence
  Description of Artificial Sequence: Synthetic oligonucleotide
caguuucaccccgauacca

SEQ ID NO: 2221931 - RNA, 19 nt, Artificial Sequence
  Description of Artificial Sequence: Synthetic oligonucleotide
cacugcggccagcuugugc

SEQ ID NO: 2221932 - RNA, 19 nt, Artificial Sequence
  Description of Artificial Sequence: Synthetic oligonucleotide
cagcgaguccggagcaggc

SEQ ID NO: 2221933 - RNA, 19 nt, Artificial Sequence
  Description of Artificial Sequence: Synthetic oligonucleotide
caggaacuaguggagccuc

SEQ ID NO: 2221934 - RNA, 19 nt, Artificial Sequence
  Description of Artificial Sequence: Synthetic oligonucleotide
agcgcccgcaccacuagag

SEQ ID NO: 2221935 - RNA, 19 nt, Artificial Sequence
  Description of Artificial Sequence: Synthetic oligonucleotide
guuucaccccgauaccaua

SEQ ID NO: 2221936 - RNA, 19 nt, Artificial Sequence
  Description of Artificial Sequence: Synthetic oligonucleotide
cugagcuauuuggcgcucc

SEQ ID NO: 2221937 - RNA, 19 nt, Artificial Sequence
  Description of Artificial Sequence: Synthetic oligonucleotide
cccggcugaagccacacug

SEQ ID NO: 2221938 - RNA, 19 nt, Artificial Sequence
  Description of Artificial Sequence: Synthetic oligonucleotide
ugugugcccgaaguucguc

SEQ ID NO: 2221939 - RNA, 19 nt, Artificial Sequence
  Description of Artificial Sequence: Synthetic oligonucleotide
caacuccgaguugaccagc

SEQ ID NO: 2221940 - RNA, 19 nt, Artificial Sequence
  Description of Artificial Sequence: Synthetic oligonucleotide
ccacgagucguccucauca

SEQ ID NO: 2221941 - RNA, 19 nt, Artificial Sequence
  Description of Artificial Sequence: Synthetic oligonucleotide
ggcgcauuagaucucggcu

SEQ ID NO: 2221942 - RNA, 19 nt, Artificial Sequence
  Description of Artificial Sequence: Synthetic oligonucleotide
gguuggaaggcuguccaca

SEQ ID NO: 2221943 - RNA, 19 nt, Artificial Sequence
  Description of Artificial Sequence: Synthetic oligonucleotide
ugggagcuauacugcuggu

SEQ ID NO: 2221944 - RNA, 19 nt, Artificial Sequence
  Description of Artificial Sequence: Synthetic oligonucleotide
acaccugcagcgaguccgg

SEQ ID NO: 2221945 - RNA, 19 nt, Artificial Sequence
  Description of Artificial Sequence: Synthetic oligonucleotide
uccucccggcugaagccac

SEQ ID NO: 2221946 - RNA, 19 nt, Artificial Sequence
  Description of Artificial Sequence: Synthetic oligonucleotide
cugcgcggacaccugcagc

SEQ ID NO: 2221947 - RNA, 19 nt, Artificial Sequence
  Description of Artificial Sequence: Synthetic oligonucleotide
ccggugaucugugagcagc

SEQ ID NO: 2221948 - RNA, 19 nt, Artificial Sequence
  Description of Artificial Sequence: Synthetic oligonucleotide
cagcuggcggcagccaucc

SEQ ID NO: 2221949 - RNA, 19 nt, Artificial Sequence
  Description of Artificial Sequence: Synthetic oligonucleotide
gcgaguccggagcaggccc

SEQ ID NO: 2221950 - RNA, 19 nt, Artificial Sequence
  Description of Artificial Sequence: Synthetic oligonucleotide
ggcuucaaguagaagccca

SEQ ID NO: 2221951 - RNA, 19 nt, Artificial Sequence
  Description of Artificial Sequence: Synthetic oligonucleotide
cugcggccagcuugugccg

SEQ ID NO: 2221952 - RNA, 19 nt, Artificial Sequence
  Description of Artificial Sequence: Synthetic oligonucleotide
cuucggcgcauuagaucuc

SEQ ID NO: 2221953 - RNA, 19 nt, Artificial Sequence
  Description of Artificial Sequence: Synthetic oligonucleotide
cacggccgccuuuuccaag

SEQ ID NO: 2221954 - RNA, 19 nt, Artificial Sequence
  Description of Artificial Sequence: Synthetic oligonucleotide
auucuugacuucggcgcau

SEQ ID NO: 2221955 - RNA, 19 nt, Artificial Sequence
  Description of Artificial Sequence: Synthetic oligonucleotide
uggcgcucccucucucugu

SEQ ID NO: 2221956 - RNA, 19 nt, Artificial Sequence
  Description of Artificial Sequence: Synthetic oligonucleotide
ggcgcugguucuccucgcg

SEQ ID NO: 2221957 - RNA, 19 nt, Artificial Sequence
  Description of Artificial Sequence: Synthetic oligonucleotide
ugcggcccugagccuagcu

SEQ ID NO: 2221958 - RNA, 19 nt, Artificial Sequence
  Description of Artificial Sequence: Synthetic oligonucleotide
gagcaagaauacguuggcu

SEQ ID NO: 2221959 - RNA, 19 nt, Artificial Sequence
  Description of Artificial Sequence: Synthetic oligonucleotide
ccaagaguuccagcgcccg

SEQ ID NO: 2221960 - RNA, 19 nt, Artificial Sequence
  Description of Artificial Sequence: Synthetic oligonucleotide
gcuuugaguucauuccucu

SEQ ID NO: 2221961 - RNA, 19 nt, Artificial Sequence
  Description of Artificial Sequence: Synthetic oligonucleotide
cuguagacugcugggagcu

SEQ ID NO: 2221962 - RNA, 19 nt, Artificial Sequence
  Description of Artificial Sequence: Synthetic oligonucleotide
ugcggccagcuugugccgc

SEQ ID NO: 2221963 - RNA, 19 nt, Artificial Sequence
  Description of Artificial Sequence: Synthetic oligonucleotide
cauuggagagcaggagcca

SEQ ID NO: 2221964 - RNA, 19 nt, Artificial Sequence
  Description of Artificial Sequence: Synthetic oligonucleotide
gcuauacugcuggucucag

SEQ ID NO: 2221965 - RNA, 19 nt, Artificial Sequence
  Description of Artificial Sequence: Synthetic oligonucleotide
ccucuguucuucagccagc

SEQ ID NO: 2221966 - RNA, 19 nt, Artificial Sequence
  Description of Artificial Sequence: Synthetic oligonucleotide
cucggcugugugcccgaag

SEQ ID NO: 2221967 - RNA, 19 nt, Artificial Sequence
  Description of Artificial Sequence: Synthetic oligonucleotide
ucccggcugaagccacacu

SEQ ID NO: 2221968 - RNA, 19 nt, Artificial Sequence
  Description of Artificial Sequence: Synthetic oligonucleotide
guucgucccgcugucuguc

SEQ ID NO: 2221969 - RNA, 19 nt, Artificial Sequence
  Description of Artificial Sequence: Synthetic oligonucleotide
ccugagccuagcucccugc

SEQ ID NO: 2221970 - RNA, 19 nt, Artificial Sequence
  Description of Artificial Sequence: Synthetic oligonucleotide
gcaagaauacguuggcuuu

SEQ ID NO: 2221971 - RNA, 19 nt, Artificial Sequence
  Description of Artificial Sequence: Synthetic oligonucleotide
ggcuuugaguucauuccuc

SEQ ID NO: 2221972 - RNA, 19 nt, Artificial Sequence
  Description of Artificial Sequence: Synthetic oligonucleotide
aucucggcugugugcccga

SEQ ID NO: 2221973 - RNA, 19 nt, Artificial Sequence
  Description of Artificial Sequence: Synthetic oligonucleotide
cauuagaucucggcugugu

SEQ ID NO: 2221974 - RNA, 19 nt, Artificial Sequence
  Description of Artificial Sequence: Synthetic oligonucleotide
gugcgcgcuccuccugcgg

SEQ ID NO: 2221975 - RNA, 19 nt, Artificial Sequence
  Description of Artificial Sequence: Synthetic oligonucleotide
aggaacuaguggagccucu

SEQ ID NO: 2221976 - RNA, 19 nt, Artificial Sequence
  Description of Artificial Sequence: Synthetic oligonucleotide
guuucuugacugcuaccuu

SEQ ID NO: 2221977 - RNA, 19 nt, Artificial Sequence
  Description of Artificial Sequence: Synthetic oligonucleotide
ucccgcugucuguccguca

SEQ ID NO: 2221978 - RNA, 19 nt, Artificial Sequence
  Description of Artificial Sequence: Synthetic oligonucleotide
ccacacugaacguccucug

SEQ ID NO: 2221979 - RNA, 19 nt, Artificial Sequence
  Description of Artificial Sequence: Synthetic oligonucleotide
gcuauuuggcgcucccucu

SEQ ID NO: 2221980 - RNA, 19 nt, Artificial Sequence
  Description of Artificial Sequence: Synthetic oligonucleotide
gggagcuauacugcugguc

SEQ ID NO: 2221981 - RNA, 19 nt, Artificial Sequence
  Description of Artificial Sequence: Synthetic oligonucleotide
gcgcccgcaccacuagagg

SEQ ID NO: 2221982 - RNA, 19 nt, Artificial Sequence
  Description of Artificial Sequence: Synthetic oligonucleotide
uggcggcagccauccugag

SEQ ID NO: 2221983 - RNA, 19 nt, Artificial Sequence
  Description of Artificial Sequence: Synthetic oligonucleotide
auucuggauccaggaacua

SEQ ID NO: 2221984 - RNA, 19 nt, Artificial Sequence
  Description of Artificial Sequence: Synthetic oligonucleotide
gucgcagcagugcgcgcuc

SEQ ID NO: 2221985 - RNA, 19 nt, Artificial Sequence
  Description of Artificial Sequence: Synthetic oligonucleotide
aguccggagcaggccccac

SEQ ID NO: 2221986 - RNA, 19 nt, Artificial Sequence
  Description of Artificial Sequence: Synthetic oligonucleotide
uguagacugcugggagcua

SEQ ID NO: 2221987 - RNA, 19 nt, Artificial Sequence
  Description of Artificial Sequence: Synthetic oligonucleotide
gggguugcugcuucgggcu

SEQ ID NO: 2221988 - RNA, 19 nt, Artificial Sequence
  Description of Artificial Sequence: Synthetic oligonucleotide
cucccggcugaagccacac

SEQ ID NO: 2221989 - RNA, 19 nt, Artificial Sequence
  Description of Artificial Sequence: Synthetic oligonucleotide
guugcugcuucgggcuuca

SEQ ID NO: 2221990 - RNA, 19 nt, Artificial Sequence
  Description of Artificial Sequence: Synthetic oligonucleotide
gagccacgagucguccuca

SEQ ID NO: 2221991 - RNA, 19 nt, Artificial Sequence
  Description of Artificial Sequence: Synthetic oligonucleotide
cugucgcagcagugcgcgc

SEQ ID NO: 2221992 - RNA, 19 nt, Artificial Sequence
  Description of Artificial Sequence: Synthetic oligonucleotide
guagacugcugggagcuau

SEQ ID NO: 2221993 - RNA, 19 nt, Artificial Sequence
  Description of Artificial Sequence: Synthetic oligonucleotide
cgcccgcaccacuagaggc

SEQ ID NO: 2221994 - RNA, 19 nt, Artificial Sequence
  Description of Artificial Sequence: Synthetic oligonucleotide
ccccgauaccauaagcuaa

SEQ ID NO: 2221995 - RNA, 19 nt, Artificial Sequence
  Description of Artificial Sequence: Synthetic oligonucleotide
agggacccggugaucugug

SEQ ID NO: 2221996 - RNA, 19 nt, Artificial Sequence
  Description of Artificial Sequence: Synthetic oligonucleotide
cccgcugucuguccgucac

SEQ ID NO: 2221997 - RNA, 19 nt, Artificial Sequence
  Description of Artificial Sequence: Synthetic oligonucleotide
cugaagccacacugaacgu

SEQ ID NO: 2221998 - RNA, 19 nt, Artificial Sequence
  Description of Artificial Sequence: Synthetic oligonucleotide
gccgcucugaguugggucu

SEQ ID NO: 2221999 - RNA, 19 nt, Artificial Sequence
  Description of Artificial Sequence: Synthetic oligonucleotide
agccgccgcagcuccaguu

SEQ ID NO: 2222000 - RNA, 19 nt, Artificial Sequence
  Description of Artificial Sequence: Synthetic oligonucleotide
cauuccucuccugaaggau

SEQ ID NO: 2222001 - RNA, 19 nt, Artificial Sequence
  Description of Artificial Sequence: Synthetic oligonucleotide
uuggcgugugggguugcuu

SEQ ID NO: 2222002 - RNA, 19 nt, Artificial Sequence
  Description of Artificial Sequence: Synthetic oligonucleotide
cggcgcauuagaucucggc

SEQ ID NO: 2222003 - RNA, 19 nt, Artificial Sequence
  Description of Artificial Sequence: Synthetic oligonucleotide
gcgcugguucuccucgcgc

SEQ ID NO: 2222004 - RNA, 19 nt, Artificial Sequence
  Description of Artificial Sequence: Synthetic oligonucleotide
gcuugugccgcaacuccga

SEQ ID NO: 2222005 - RNA, 19 nt, Artificial Sequence
  Description of Artificial Sequence: Synthetic oligonucleotide
cuaguggagccucuuccuu

SEQ ID NO: 2222006 - RNA, 19 nt, Artificial Sequence
  Description of Artificial Sequence: Synthetic oligonucleotide
ccgauaccauaagcuaaag

SEQ ID NO: 2222007 - RNA, 19 nt, Artificial Sequence
  Description of Artificial Sequence: Synthetic oligonucleotide
ccuaacaucuuggccuuga

SEQ ID NO: 2222008 - RNA, 19 nt, Artificial Sequence
  Description of Artificial Sequence: Synthetic oligonucleotide
gaaguucgucccgcugucu

SEQ ID NO: 2222009 - RNA, 19 nt, Artificial Sequence
  Description of Artificial Sequence: Synthetic oligonucleotide
gugccgcaacuccgaguug

SEQ ID NO: 2222010 - RNA, 19 nt, Artificial Sequence
  Description of Artificial Sequence: Synthetic oligonucleotide
gcggcccugagccuagcuc

SEQ ID NO: 2222011 - RNA, 19 nt, Artificial Sequence
  Description of Artificial Sequence: Synthetic oligonucleotide
gagcuauuuggcgcucccu

SEQ ID NO: 2222012 - RNA, 19 nt, Artificial Sequence
  Description of Artificial Sequence: Synthetic oligonucleotide
ggugaucugugagcagcuc

SEQ ID NO: 2222013 - RNA, 19 nt, Artificial Sequence
  Description of Artificial Sequence: Synthetic oligonucleotide
cgugugggguugcuucucc

SEQ ID NO: 2222014 - RNA, 19 nt, Artificial Sequence
  Description of Artificial Sequence: Synthetic oligonucleotide
cuucgggcuucagccucug

SEQ ID NO: 2222015 - RNA, 19 nt, Artificial Sequence
  Description of Artificial Sequence: Synthetic oligonucleotide
cuccucccggcugaagcca

SEQ ID NO: 2222016 - RNA, 19 nt, Artificial Sequence
  Description of Artificial Sequence: Synthetic oligonucleotide
cacccggucaucugggguu

SEQ ID NO: 2222017 - RNA, 19 nt, Artificial Sequence
  Description of Artificial Sequence: Synthetic oligonucleotide
gccgccuuuuccaagaguu

SEQ ID NO: 2222018 - RNA, 19 nt, Artificial Sequence
  Description of Artificial Sequence: Synthetic oligonucleotide
gcuuaagcuccucccggcu

SEQ ID NO: 2222019 - RNA, 19 nt, Artificial Sequence
  Description of Artificial Sequence: Synthetic oligonucleotide
ccggcugaagccacacuga

SEQ ID NO: 2222020 - RNA, 19 nt, Artificial Sequence
  Description of Artificial Sequence: Synthetic oligonucleotide
gcauuagaucucggcugug

SEQ ID NO: 2222021 - RNA, 19 nt, Artificial Sequence
  Description of Artificial Sequence: Synthetic oligonucleotide
gaguccggagcaggcccca

SEQ ID NO: 2222022 - RNA, 19 nt, Artificial Sequence
  Description of Artificial Sequence: Synthetic oligonucleotide
gccgccgcagcuccaguuc

SEQ ID NO: 2222023 - RNA, 19 nt, Artificial Sequence
  Description of Artificial Sequence: Synthetic oligonucleotide
cccgaaguucgucccgcug

SEQ ID NO: 2222024 - RNA, 19 nt, Artificial Sequence
  Description of Artificial Sequence: Synthetic oligonucleotide
cgaaguucgucccgcuguc

SEQ ID NO: 2222025 - RNA, 19 nt, Artificial Sequence
  Description of Artificial Sequence: Synthetic oligonucleotide
ccgaguugaccagcaggag

SEQ ID NO: 2222026 - RNA, 19 nt, Artificial Sequence
  Description of Artificial Sequence: Synthetic oligonucleotide
ccuugagcaagaauacguu

SEQ ID NO: 2222027 - RNA, 19 nt, Artificial Sequence
  Description of Artificial Sequence: Synthetic oligonucleotide
ccgccgcagcuccaguucc

SEQ ID NO: 2222028 - RNA, 19 nt, Artificial Sequence
  Description of Artificial Sequence: Synthetic oligonucleotide
ucgcuggaaguaggccaau

SEQ ID NO: 2222029 - RNA, 19 nt, Artificial Sequence
  Description of Artificial Sequence: Synthetic oligonucleotide
gcagugcgcgcuccuccug

SEQ ID NO: 2222030 - RNA, 19 nt, Artificial Sequence
  Description of Artificial Sequence: Synthetic oligonucleotide
cgaguccggagcaggcccc

SEQ ID NO: 2222031 - RNA, 19 nt, Artificial Sequence
  Description of Artificial Sequence: Synthetic oligonucleotide
cacgagucguccucaucau

SEQ ID NO: 2222032 - RNA, 19 nt, Artificial Sequence
  Description of Artificial Sequence: Synthetic oligonucleotide
gcccgcaccacuagaggca

SEQ ID NO: 2222033 - RNA, 19 nt, Artificial Sequence
  Description of Artificial Sequence: Synthetic oligonucleotide
uugcugcuucgggcuucag

SEQ ID NO: 2222034 - RNA, 19 nt, Artificial Sequence
  Description of Artificial Sequence: Synthetic oligonucleotide
caggugggguuggcgugug

SEQ ID NO: 2222035 - RNA, 19 nt, Artificial Sequence
  Description of Artificial Sequence: Synthetic oligonucleotide
ccgaaguucgucccgcugu

SEQ ID NO: 2222036 - RNA, 19 nt, Artificial Sequence
  Description of Artificial Sequence: Synthetic oligonucleotide
ccgucacuuccuugagcug

SEQ ID NO: 2222037 - RNA, 19 nt, Artificial Sequence
  Description of Artificial Sequence: Synthetic oligonucleotide
guuccgccugcugcgcgga

SEQ ID NO: 2222038 - RNA, 19 nt, Artificial Sequence
  Description of Artificial Sequence: Synthetic oligonucleotide
ccagggacccggugaucug

SEQ ID NO: 2222039 - RNA, 19 nt, Artificial Sequence
  Description of Artificial Sequence: Synthetic oligonucleotide
ggcgcccuggcugcugcag

SEQ ID NO: 2222040 - RNA, 19 nt, Artificial Sequence
  Description of Artificial Sequence: Synthetic oligonucleotide
cugcuucgggcuucagccu

SEQ ID NO: 2222041 - RNA, 19 nt, Artificial Sequence
  Description of Artificial Sequence: Synthetic oligonucleotide
gucccgcugucuguccguc

SEQ ID NO: 2222042 - RNA, 19 nt, Artificial Sequence
  Description of Artificial Sequence: Synthetic oligonucleotide
cugugugcccgaaguucgu

SEQ ID NO: 2222043 - RNA, 19 nt, Artificial Sequence
  Description of Artificial Sequence: Synthetic oligonucleotide
cccugagccuagcucccug

SEQ ID NO: 2222044 - RNA, 19 nt, Artificial Sequence
  Description of Artificial Sequence: Synthetic oligonucleotide
ccgcagcuccaguuccgcc

SEQ ID NO: 2222045 - RNA, 19 nt, Artificial Sequence
  Description of Artificial Sequence: Synthetic oligonucleotide
gggacccggugaucuguga

SEQ ID NO: 2222046 - RNA, 19 nt, Artificial Sequence
  Description of Artificial Sequence: Synthetic oligonucleotide
ccgcaacuccgaguugacc

SEQ ID NO: 2222047 - RNA, 19 nt, Artificial Sequence
  Description of Artificial Sequence: Synthetic oligonucleotide
cugcggaggcgcugguucu

SEQ ID NO: 2222048 - RNA, 19 nt, Artificial Sequence
  Description of Artificial Sequence: Synthetic oligonucleotide
ggcgugugggguugcuucu

SEQ ID NO: 2222049 - RNA, 19 nt, Artificial Sequence
  Description of Artificial Sequence: Synthetic oligonucleotide
gggguugcuucuccuuccu

SEQ ID NO: 2222050 - RNA, 19 nt, Artificial Sequence
  Description of Artificial Sequence: Synthetic oligonucleotide
gcagagcauccacccgguc

SEQ ID NO: 2222051 - RNA, 19 nt, Artificial Sequence
  Description of Artificial Sequence: Synthetic oligonucleotide
ggccagcuugugccgcaac

SEQ ID NO: 2222052 - RNA, 19 nt, Artificial Sequence
  Description of Artificial Sequence: Synthetic oligonucleotide
cgccgcucugaguuggguc

SEQ ID NO: 2222053 - RNA, 19 nt, Artificial Sequence
  Description of Artificial Sequence: Synthetic oligonucleotide
cgcggacaccugcagcgag

SEQ ID NO: 2222054 - RNA, 19 nt, Artificial Sequence
  Description of Artificial Sequence: Synthetic oligonucleotide
gguuggcgugugggguugc

SEQ ID NO: 2222055 - RNA, 19 nt, Artificial Sequence
  Description of Artificial Sequence: Synthetic oligonucleotide
gccgcaacuccgaguugac

SEQ ID NO: 2222056 - RNA, 19 nt, Artificial Sequence
  Description of Artificial Sequence: Synthetic oligonucleotide
cgcauuagaucucggcugu

SEQ ID NO: 2222057 - RNA, 19 nt, Artificial Sequence
  Description of Artificial Sequence: Synthetic oligonucleotide
gcucugaguugggucugca

SEQ ID NO: 2222058 - RNA, 19 nt, Artificial Sequence
  Description of Artificial Sequence: Synthetic oligonucleotide
ccggagcaggccccacggc

SEQ ID NO: 2222059 - RNA, 19 nt, Artificial Sequence
  Description of Artificial Sequence: Synthetic oligonucleotide
ccugagcuauuuggcgcuc

SEQ ID NO: 2222060 - RNA, 19 nt, Artificial Sequence
  Description of Artificial Sequence: Synthetic oligonucleotide
guuggcgugugggguugcu

SEQ ID NO: 2222061 - RNA, 19 nt, Artificial Sequence
  Description of Artificial Sequence: Synthetic oligonucleotide
cggacaccugcagcgaguc

SEQ ID NO: 2222062 - RNA, 19 nt, Artificial Sequence
  Description of Artificial Sequence: Synthetic oligonucleotide
ccgcaccacuagaggcacc

SEQ ID NO: 2222063 - RNA, 19 nt, Artificial Sequence
  Description of Artificial Sequence: Synthetic oligonucleotide
ccucaguuucaccccgaua

SEQ ID NO: 2222064 - RNA, 19 nt, Artificial Sequence
  Description of Artificial Sequence: Synthetic oligonucleotide
gcgugugggguugcuucuc

SEQ ID NO: 2222065 - RNA, 19 nt, Artificial Sequence
  Description of Artificial Sequence: Synthetic oligonucleotide
ggccgccuuuuccaagagu

SEQ ID NO: 2222066 - RNA, 19 nt, Artificial Sequence
  Description of Artificial Sequence: Synthetic oligonucleotide
ggccucaguuucaccccga

SEQ ID NO: 2222067 - RNA, 19 nt, Artificial Sequence
  Description of Artificial Sequence: Synthetic oligonucleotide
ccgcucugaguugggucug

SEQ ID NO: 2222068 - RNA, 19 nt, Artificial Sequence
  Description of Artificial Sequence: Synthetic oligonucleotide
cggcugaagccacacugaa

SEQ ID NO: 2222069 - RNA, 19 nt, Artificial Sequence
  Description of Artificial Sequence: Synthetic oligonucleotide
gccucaguuucaccccgau

SEQ ID NO: 2222070 - RNA, 19 nt, Artificial Sequence
  Description of Artificial Sequence: Synthetic oligonucleotide
caccugcagcgaguccgga

SEQ ID NO: 2222071 - RNA, 19 nt, Artificial Sequence
  Description of Artificial Sequence: Synthetic oligonucleotide
cgcuguuucuugacugcua

SEQ ID NO: 2222072 - RNA, 19 nt, Artificial Sequence
  Description of Artificial Sequence: Synthetic oligonucleotide
guccugcgccgcucugagu

SEQ ID NO: 2222073 - RNA, 19 nt, Artificial Sequence
  Description of Artificial Sequence: Synthetic oligonucleotide
gcuucgggcuucagccucu

SEQ ID NO: 2222074 - RNA, 19 nt, Artificial Sequence
  Description of Artificial Sequence: Synthetic oligonucleotide
cguccucuggagggcgccc

SEQ ID NO: 2222075 - RNA, 19 nt, Artificial Sequence
  Description of Artificial Sequence: Synthetic oligonucleotide
ccacccggucaucuggggu

SEQ ID NO: 2222076 - RNA, 19 nt, Artificial Sequence
  Description of Artificial Sequence: Synthetic oligonucleotide
gcggacaccugcagcgagu

SEQ ID NO: 2222077 - RNA, 19 nt, Artificial Sequence
  Description of Artificial Sequence: Synthetic oligonucleotide
ccacggccgccuuuuccaa

SEQ ID NO: 2222078 - RNA, 19 nt, Artificial Sequence
  Description of Artificial Sequence: Synthetic oligonucleotide
gcgcggacaccugcagcga

SEQ ID NO: 2222079 - RNA, 19 nt, Artificial Sequence
  Description of Artificial Sequence: Synthetic oligonucleotide
ccucccggcugaagccaca

SEQ ID NO: 2222080 - RNA, 19 nt, Artificial Sequence
  Description of Artificial Sequence: Synthetic oligonucleotide
cccggucaucugggguugc

SEQ ID NO: 2222081 - RNA, 19 nt, Artificial Sequence
  Description of Artificial Sequence: Synthetic oligonucleotide
gcccgaaguucgucccgcu

SEQ ID NO: 2222082 - RNA, 19 nt, Artificial Sequence
  Description of Artificial Sequence: Synthetic oligonucleotide
ggguugcugcuucgggcuu

SEQ ID NO: 2222083 - RNA, 19 nt, Artificial Sequence
  Description of Artificial Sequence: Synthetic oligonucleotide
ccgcuguuucuugacugcu

SEQ ID NO: 2222084 - RNA, 19 nt, Artificial Sequence
  Description of Artificial Sequence: Synthetic oligonucleotide
gggcgcccuggcugcugca

SEQ ID NO: 2222085 - RNA, 19 nt, Artificial Sequence
  Description of Artificial Sequence: Synthetic oligonucleotide
gcccagggacccggugauc

SEQ ID NO: 2222086 - RNA, 19 nt, Artificial Sequence
  Description of Artificial Sequence: Synthetic oligonucleotide
gccccacggccgccuuuuc

SEQ ID NO: 2222087 - RNA, 19 nt, Artificial Sequence
  Description of Artificial Sequence: Synthetic oligonucleotide
ggccccacggccgccuuuu

SEQ ID NO: 2222088 - RNA, 19 nt, Artificial Sequence
  Description of Artificial Sequence: Synthetic oligonucleotide
ccgcugucuguccgucacu

SEQ ID NO: 2222089 - RNA, 19 nt, Artificial Sequence
  Description of Artificial Sequence: Synthetic oligonucleotide
cgucccgcugucuguccgu

SEQ ID NO: 2222090 - RNA, 19 nt, Artificial Sequence
  Description of Artificial Sequence: Synthetic oligonucleotide
caggccccacggccgccuu

SEQ ID NO: 2222091 - RNA, 19 nt, Artificial Sequence
  Description of Artificial Sequence: Synthetic oligonucleotide
cgcuggaaguaggccaauu

SEQ ID NO: 2222092 - RNA, 19 nt, Artificial Sequence
  Description of Artificial Sequence: Synthetic oligonucleotide
cggcugugugcccgaaguu

SEQ ID NO: 2222093 - RNA, 19 nt, Artificial Sequence
  Description of Artificial Sequence: Synthetic oligonucleotide
aaaaccaaaagacauaggg

SEQ ID NO: 2222094 - RNA, 19 nt, Artificial Sequence
  Description of Artificial Sequence: Synthetic oligonucleotide
aaccaaaagacauaggggc

SEQ ID NO: 2222095 - RNA, 19 nt, Artificial Sequence
  Description of Artificial Sequence: Synthetic oligonucleotide
aguuguaacagauauguuc

SEQ ID NO: 2222096 - RNA, 19 nt, Artificial Sequence
  Description of Artificial Sequence: Synthetic oligonucleotide
agauuuauggacuccuugc

SEQ ID NO: 2222097 - RNA, 19 nt, Artificial Sequence
  Description of Artificial Sequence: Synthetic oligonucleotide
uaucaagacauaauaagug

SEQ ID NO: 2222098 - RNA, 19 nt, Artificial Sequence
  Description of Artificial Sequence: Synthetic oligonucleotide
uuaguuguaacagauaugu

SEQ ID NO: 2222099 - RNA, 19 nt, Artificial Sequence
  Description of Artificial Sequence: Synthetic oligonucleotide
auaaguggcugccacaggc

SEQ ID NO: 2222100 - RNA, 19 nt, Artificial Sequence
  Description of Artificial Sequence: Synthetic oligonucleotide
aucaagacauaauaagugg

SEQ ID NO: 2222101 - RNA, 19 nt, Artificial Sequence
  Description of Artificial Sequence: Synthetic oligonucleotide
cuuaaggacccuuagcugg

SEQ ID NO: 2222102 - RNA, 19 nt, Artificial Sequence
  Description of Artificial Sequence: Synthetic oligonucleotide
agacauaauaaguggcugc

SEQ ID NO: 2222103 - RNA, 19 nt, Artificial Sequence
  Description of Artificial Sequence: Synthetic oligonucleotide
gauaguuggcuucuuagcc

SEQ ID NO: 2222104 - RNA, 19 nt, Artificial Sequence
  Description of Artificial Sequence: Synthetic oligonucleotide
gaagagguauucuuggucc

SEQ ID NO: 2222105 - RNA, 19 nt, Artificial Sequence
  Description of Artificial Sequence: Synthetic oligonucleotide
ucaagacauaauaaguggc

SEQ ID NO: 2222106 - RNA, 19 nt, Artificial Sequence
  Description of Artificial Sequence: Synthetic oligonucleotide
ugacauaaaauggaacugg

SEQ ID NO: 2222107 - RNA, 19 nt, Artificial Sequence
  Description of Artificial Sequence: Synthetic oligonucleotide
uagugagacauauagcugc

SEQ ID NO: 2222108 - RNA, 19 nt, Artificial Sequence
  Description of Artificial Sequence: Synthetic oligonucleotide
ucuagaauguggcaaagaa

SEQ ID NO: 2222109 - RNA, 19 nt, Artificial Sequence
  Description of Artificial Sequence: Synthetic oligonucleotide
aaugacuuuggcucucauc

SEQ ID NO: 2222110 - RNA, 19 nt, Artificial Sequence
  Description of Artificial Sequence: Synthetic oligonucleotide
ugugaucuggucuuguugc

SEQ ID NO: 2222111 - RNA, 19 nt, Artificial Sequence
  Description of Artificial Sequence: Synthetic oligonucleotide
ccuauagagaaauugaagc

SEQ ID NO: 2222112 - RNA, 19 nt, Artificial Sequence
  Description of Artificial Sequence: Synthetic oligonucleotide
agaaauugaagcuggccag

SEQ ID NO: 2222113 - RNA, 19 nt, Artificial Sequence
  Description of Artificial Sequence: Synthetic oligonucleotide
guggcaaagaaccaugucc

SEQ ID NO: 2222114 - RNA, 19 nt, Artificial Sequence
  Description of Artificial Sequence: Synthetic oligonucleotide
cuugaguuaggguugggcc

SEQ ID NO: 2222115 - RNA, 19 nt, Artificial Sequence
  Description of Artificial Sequence: Synthetic oligonucleotide
uugauaguuggcuucuuag

SEQ ID NO: 2222116 - RNA, 19 nt, Artificial Sequence
  Description of Artificial Sequence: Synthetic oligonucleotide
cuugcuuuaguuguaacag

SEQ ID NO: 2222117 - RNA, 19 nt, Artificial Sequence
  Description of Artificial Sequence: Synthetic oligonucleotide
gagaaauugaagcuggcca

SEQ ID NO: 2222118 - RNA, 19 nt, Artificial Sequence
  Description of Artificial Sequence: Synthetic oligonucleotide
gagacauauagcugcacag

SEQ ID NO: 2222119 - RNA, 19 nt, Artificial Sequence
  Description of Artificial Sequence: Synthetic oligonucleotide
aauuugcccucucacagcu

SEQ ID NO: 2222120 - RNA, 19 nt, Artificial Sequence
  Description of Artificial Sequence: Synthetic oligonucleotide
aagacauaggggcauccag

SEQ ID NO: 2222121 - RNA, 19 nt, Artificial Sequence
  Description of Artificial Sequence: Synthetic oligonucleotide
uuuaguuguaacagauaug

SEQ ID NO: 2222122 - RNA, 19 nt, Artificial Sequence
  Description of Artificial Sequence: Synthetic oligonucleotide
ucuacaugcgagaaggaaa

SEQ ID NO: 2222123 - RNA, 19 nt, Artificial Sequence
  Description of Artificial Sequence: Synthetic oligonucleotide
uuccuuacgggccaguuca

SEQ ID NO: 2222124 - RNA, 19 nt, Artificial Sequence
  Description of Artificial Sequence: Synthetic oligonucleotide
gcuaucaagacauaauaag

SEQ ID NO: 2222125 - RNA, 19 nt, Artificial Sequence
  Description of Artificial Sequence: Synthetic oligonucleotide
accacuucaauggauggcc

SEQ ID NO: 2222126 - RNA, 19 nt, Artificial Sequence
  Description of Artificial Sequence: Synthetic oligonucleotide
acucagcugacauaaaaug

SEQ ID NO: 2222127 - RNA, 19 nt, Artificial Sequence
  Description of Artificial Sequence: Synthetic oligonucleotide
aaggguuucuagaaugugg

SEQ ID NO: 2222128 - RNA, 19 nt, Artificial Sequence
  Description of Artificial Sequence: Synthetic oligonucleotide
ucaggguuaaguuuggcuc

SEQ ID NO: 2222129 - RNA, 19 nt, Artificial Sequence
  Description of Artificial Sequence: Synthetic oligonucleotide
uuugaguguacacucugca

SEQ ID NO: 2222130 - RNA, 19 nt, Artificial Sequence
  Description of Artificial Sequence: Synthetic oligonucleotide
uuagugagacauauagcug

SEQ ID NO: 2222131 - RNA, 19 nt, Artificial Sequence
  Description of Artificial Sequence: Synthetic oligonucleotide
uggcaaagaaccaugucca

SEQ ID NO: 2222132 - RNA, 19 nt, Artificial Sequence
  Description of Artificial Sequence: Synthetic oligonucleotide
aagaagguauuggcgaugg

SEQ ID NO: 2222133 - RNA, 19 nt, Artificial Sequence
  Description of Artificial Sequence: Synthetic oligonucleotide
aacucaauccagcccaucu

SEQ ID NO: 2222134 - RNA, 19 nt, Artificial Sequence
  Description of Artificial Sequence: Synthetic oligonucleotide
aguucauaguacuuggccu

SEQ ID NO: 2222135 - RNA, 19 nt, Artificial Sequence
  Description of Artificial Sequence: Synthetic oligonucleotide
ggagcuaugacucagcuga

SEQ ID NO: 2222136 - RNA, 19 nt, Artificial Sequence
  Description of Artificial Sequence: Synthetic oligonucleotide
ugaguguacacucugcaau

SEQ ID NO: 2222137 - RNA, 19 nt, Artificial Sequence
  Description of Artificial Sequence: Synthetic oligonucleotide
uaugacucagcugacauaa

SEQ ID NO: 2222138 - RNA, 19 nt, Artificial Sequence
  Description of Artificial Sequence: Synthetic oligonucleotide
aauugaagcuggccaguuc

SEQ ID NO: 2222139 - RNA, 19 nt, Artificial Sequence
  Description of Artificial Sequence: Synthetic oligonucleotide
uucagcaccuuaaggaccc

SEQ ID NO: 2222140 - RNA, 19 nt, Artificial Sequence
  Description of Artificial Sequence: Synthetic oligonucleotide
gacauaaaauggaacuggg

SEQ ID NO: 2222141 - RNA, 19 nt, Artificial Sequence
  Description of Artificial Sequence: Synthetic oligonucleotide
gauauguuccuuccugcag

SEQ ID NO: 2222142 - RNA, 19 nt, Artificial Sequence
  Description of Artificial Sequence: Synthetic oligonucleotide
acaagagauuuauggacuc

SEQ ID NO: 2222143 - RNA, 19 nt, Artificial Sequence
  Description of Artificial Sequence: Synthetic oligonucleotide
uccacaagagauuuaugga

SEQ ID NO: 2222144 - RNA, 19 nt, Artificial Sequence
  Description of Artificial Sequence: Synthetic oligonucleotide
aagaaccauguccacaaga

SEQ ID NO: 2222145 - RNA, 19 nt, Artificial Sequence
  Description of Artificial Sequence: Synthetic oligonucleotide
aaauggaacugggaagagg

SEQ ID NO: 2222146 - RNA, 19 nt, Artificial Sequence
  Description of Artificial Sequence: Synthetic oligonucleotide
ugauaguuggcuucuuagc

SEQ ID NO: 2222147 - RNA, 19 nt, Artificial Sequence
  Description of Artificial Sequence: Synthetic oligonucleotide
uuugcccucucacagcugc

SEQ ID NO: 2222148 - RNA, 19 nt, Artificial Sequence
  Description of Artificial Sequence: Synthetic oligonucleotide
ucuuuccguaguuaucccg

SEQ ID NO: 2222149 - RNA, 19 nt, Artificial Sequence
  Description of Artificial Sequence: Synthetic oligonucleotide
agugcaugccaccugcgac

SEQ ID NO: 2222150 - RNA, 19 nt, Artificial Sequence
  Description of Artificial Sequence: Synthetic oligonucleotide
aggguuucuagaauguggc

SEQ ID NO: 2222151 - RNA, 19 nt, Artificial Sequence
  Description of Artificial Sequence: Synthetic oligonucleotide
ucuucagcaccuuaaggac

SEQ ID NO: 2222152 - RNA, 19 nt, Artificial Sequence
  Description of Artificial Sequence: Synthetic oligonucleotide
ucuuugaguguacacucug

SEQ ID NO: 2222153 - RNA, 19 nt, Artificial Sequence
  Description of Artificial Sequence: Synthetic oligonucleotide
cauaauaaguggcugccac

SEQ ID NO: 2222154 - RNA, 19 nt, Artificial Sequence
  Description of Artificial Sequence: Synthetic oligonucleotide
uaacagauauguuccuucc

SEQ ID NO: 2222155 - RNA, 19 nt, Artificial Sequence
  Description of Artificial Sequence: Synthetic oligonucleotide
aauaaguggcugccacagg

SEQ ID NO: 2222156 - RNA, 19 nt, Artificial Sequence
  Description of Artificial Sequence: Synthetic oligonucleotide
ugaugcuuuucccuugacc

SEQ ID NO: 2222157 - RNA, 19 nt, Artificial Sequence
  Description of Artificial Sequence: Synthetic oligonucleotide
gacauaauaaguggcugcc

SEQ ID NO: 2222158 - RNA, 19 nt, Artificial Sequence
  Description of Artificial Sequence: Synthetic oligonucleotide
uuuauggacuccuugcuuu

SEQ ID NO: 2222159 - RNA, 19 nt, Artificial Sequence
  Description of Artificial Sequence: Synthetic oligonucleotide
aauguggcaaagaaccaug

SEQ ID NO: 2222160 - RNA, 19 nt, Artificial Sequence
  Description of Artificial Sequence: Synthetic oligonucleotide
cugaccugcaacaacaaca

SEQ ID NO: 2222161 - RNA, 19 nt, Artificial Sequence
  Description of Artificial Sequence: Synthetic oligonucleotide
aguuaucccgcgcugacca

SEQ ID NO: 2222162 - RNA, 19 nt, Artificial Sequence
  Description of Artificial Sequence: Synthetic oligonucleotide
ugaccugcaacaacaacaa

SEQ ID NO: 2222163 - RNA, 19 nt, Artificial Sequence
  Description of Artificial Sequence: Synthetic oligonucleotide
agaaccauguccacaagag

SEQ ID NO: 2222164 - RNA, 19 nt, Artificial Sequence
  Description of Artificial Sequence: Synthetic oligonucleotide
aacagauauguuccuuccu

SEQ ID NO: 2222165 - RNA, 19 nt, Artificial Sequence
  Description of Artificial Sequence: Synthetic oligonucleotide
aggguugggccccuggagc

SEQ ID NO: 2222166 - RNA, 19 nt, Artificial Sequence
  Description of Artificial Sequence: Synthetic oligonucleotide
ugacucagcugacauaaaa

SEQ ID NO: 2222167 - RNA, 19 nt, Artificial Sequence
  Description of Artificial Sequence: Synthetic oligonucleotide
aaaaggguuucuagaaugu

SEQ ID NO: 2222168 - RNA, 19 nt, Artificial Sequence
  Description of Artificial Sequence: Synthetic oligonucleotide
ucugauccccaccacuuca

SEQ ID NO: 2222169 - RNA, 19 nt, Artificial Sequence
  Description of Artificial Sequence: Synthetic oligonucleotide
uggguauagcugcaugugc

SEQ ID NO: 2222170 - RNA, 19 nt, Artificial Sequence
  Description of Artificial Sequence: Synthetic oligonucleotide
cauauagcugcacagaucu

SEQ ID NO: 2222171 - RNA, 19 nt, Artificial Sequence
  Description of Artificial Sequence: Synthetic oligonucleotide
cuuugaguguacacucugc

SEQ ID NO: 2222172 - RNA, 19 nt, Artificial Sequence
  Description of Artificial Sequence: Synthetic oligonucleotide
aaagaaccauguccacaag

SEQ ID NO: 2222173 - RNA, 19 nt, Artificial Sequence
  Description of Artificial Sequence: Synthetic oligonucleotide
uucaauggauggccucugg

SEQ ID NO: 2222174 - RNA, 19 nt, Artificial Sequence
  Description of Artificial Sequence: Synthetic oligonucleotide
auaguacuuggccugcucu

SEQ ID NO: 2222175 - RNA, 19 nt, Artificial Sequence
  Description of Artificial Sequence: Synthetic oligonucleotide
cagauauguuccuuccugc

SEQ ID NO: 2222176 - RNA, 19 nt, Artificial Sequence
  Description of Artificial Sequence: Synthetic oligonucleotide
gaauuugcccucucacagc

SEQ ID NO: 2222177 - RNA, 19 nt, Artificial Sequence
  Description of Artificial Sequence: Synthetic oligonucleotide
aaaggguuucuagaaugug

SEQ ID NO: 2222178 - RNA, 19 nt, Artificial Sequence
  Description of Artificial Sequence: Synthetic oligonucleotide
uuuccguaguuaucccgcg

SEQ ID NO: 2222179 - RNA, 19 nt, Artificial Sequence
  Description of Artificial Sequence: Synthetic oligonucleotide
uauguuccuuccugcagcc

SEQ ID NO: 2222180 - RNA, 19 nt, Artificial Sequence
  Description of Artificial Sequence: Synthetic oligonucleotide
aaaauggaacugggaagag

SEQ ID NO: 2222181 - RNA, 19 nt, Artificial Sequence
  Description of Artificial Sequence: Synthetic oligonucleotide
aagagguauucuuggucca

SEQ ID NO: 2222182 - RNA, 19 nt, Artificial Sequence
  Description of Artificial Sequence: Synthetic oligonucleotide
uuugauaguuggcuucuua

SEQ ID NO: 2222183 - RNA, 19 nt, Artificial Sequence
  Description of Artificial Sequence: Synthetic oligonucleotide
aaggcucaggguuaaguuu

SEQ ID NO: 2222184 - RNA, 19 nt, Artificial Sequence
  Description of Artificial Sequence: Synthetic oligonucleotide
uccguaguuaucccgcgcu

SEQ ID NO: 2222185 - RNA, 19 nt, Artificial Sequence
  Description of Artificial Sequence: Synthetic oligonucleotide
uucuucuuuccguaguuau

SEQ ID NO: 2222186 - RNA, 19 nt, Artificial Sequence
  Description of Artificial Sequence: Synthetic oligonucleotide
ucuugaguuaggguugggc

SEQ ID NO: 2222187 - RNA, 19 nt, Artificial Sequence
  Description of Artificial Sequence: Synthetic oligonucleotide
cccuuagugagacauauag

SEQ ID NO: 2222188 - RNA, 19 nt, Artificial Sequence
  Description of Artificial Sequence: Synthetic oligonucleotide
ugcccaggagcuaugacuc

SEQ ID NO: 2222189 - RNA, 19 nt, Artificial Sequence
  Description of Artificial Sequence: Synthetic oligonucleotide
aagguauuggcgaugggaa

SEQ ID NO: 2222190 - RNA, 19 nt, Artificial Sequence
  Description of Artificial Sequence: Synthetic oligonucleotide
agauauguuccuuccugca

SEQ ID NO: 2222191 - RNA, 19 nt, Artificial Sequence
  Description of Artificial Sequence: Synthetic oligonucleotide
cugacauaaaauggaacug

SEQ ID NO: 2222192 - RNA, 19 nt, Artificial Sequence
  Description of Artificial Sequence: Synthetic oligonucleotide
aagcuggccaguucuaaau

SEQ ID NO: 2222193 - RNA, 19 nt, Artificial Sequence
  Description of Artificial Sequence: Synthetic oligonucleotide
ucaauggauggccucuggu

SEQ ID NO: 2222194 - RNA, 19 nt, Artificial Sequence
  Description of Artificial Sequence: Synthetic oligonucleotide
aggggaauagugaagucag

SEQ ID NO: 2222195 - RNA, 19 nt, Artificial Sequence
  Description of Artificial Sequence: Synthetic oligonucleotide
cuuuaguuguaacagauau

SEQ ID NO: 2222196 - RNA, 19 nt, Artificial Sequence
  Description of Artificial Sequence: Synthetic oligonucleotide
uuaaggacccuuagcuggu

SEQ ID NO: 2222197 - RNA, 19 nt, Artificial Sequence
  Description of Artificial Sequence: Synthetic oligonucleotide
caaucuucagcaccuuaag

SEQ ID NO: 2222198 - RNA, 19 nt, Artificial Sequence
  Description of Artificial Sequence: Synthetic oligonucleotide
uuggcgaugggaaggcgug

SEQ ID NO: 2222199 - RNA, 19 nt, Artificial Sequence
  Description of Artificial Sequence: Synthetic oligonucleotide
caucugaccugcaacaaca

SEQ ID NO: 2222200 - RNA, 19 nt, Artificial Sequence
  Description of Artificial Sequence: Synthetic oligonucleotide
auguaaagcaugaaggcau

SEQ ID NO: 2222201 - RNA, 19 nt, Artificial Sequence
  Description of Artificial Sequence: Synthetic oligonucleotide
gguauuggcgaugggaagg

SEQ ID NO: 2222202 - RNA, 19 nt, Artificial Sequence
  Description of Artificial Sequence: Synthetic oligonucleotide
agaucugauccccaccacu

SEQ ID NO: 2222203 - RNA, 19 nt, Artificial Sequence
  Description of Artificial Sequence: Synthetic oligonucleotide
cuauagagaaauugaagcu

SEQ ID NO: 2222204 - RNA, 19 nt, Artificial Sequence
  Description of Artificial Sequence: Synthetic oligonucleotide
uggccucugguucagggga

SEQ ID NO: 2222205 - RNA, 19 nt, Artificial Sequence
  Description of Artificial Sequence: Synthetic oligonucleotide
agcacuugcagagaaggca

SEQ ID NO: 2222206 - RNA, 19 nt, Artificial Sequence
  Description of Artificial Sequence: Synthetic oligonucleotide
agcugacauaaaauggaac

SEQ ID NO: 2222207 - RNA, 19 nt, Artificial Sequence
  Description of Artificial Sequence: Synthetic oligonucleotide
acucaauccagcccaucug

SEQ ID NO: 2222208 - RNA, 19 nt, Artificial Sequence
  Description of Artificial Sequence: Synthetic oligonucleotide
ugaguuaggguugggcccc

SEQ ID NO: 2222209 - RNA, 19 nt, Artificial Sequence
  Description of Artificial Sequence: Synthetic oligonucleotide
uucucgagacagugcaugc

SEQ ID NO: 2222210 - RNA, 19 nt, Artificial Sequence
  Description of Artificial Sequence: Synthetic oligonucleotide
ucugaccugcaacaacaac

SEQ ID NO: 2222211 - RNA, 19 nt, Artificial Sequence
  Description of Artificial Sequence: Synthetic oligonucleotide
aaagacauaggggcaucca

SEQ ID NO: 2222212 - RNA, 19 nt, Artificial Sequence
  Description of Artificial Sequence: Synthetic oligonucleotide
cuggaacucaauccagccc

SEQ ID NO: 2222213 - RNA, 19 nt, Artificial Sequence
  Description of Artificial Sequence: Synthetic oligonucleotide
uggccaguucuaaaugcug

SEQ ID NO: 2222214 - RNA, 19 nt, Artificial Sequence
  Description of Artificial Sequence: Synthetic oligonucleotide
agcugguuccaugugaucu

SEQ ID NO: 2222215 - RNA, 19 nt, Artificial Sequence
  Description of Artificial Sequence: Synthetic oligonucleotide
aagucagccuuugcaaucu

SEQ ID NO: 2222216 - RNA, 19 nt, Artificial Sequence
  Description of Artificial Sequence: Synthetic oligonucleotide
uguggcaaagaaccauguc

SEQ ID NO: 2222217 - RNA, 19 nt, Artificial Sequence
  Description of Artificial Sequence: Synthetic oligonucleotide
acauauagcugcacagauc

SEQ ID NO: 2222218 - RNA, 19 nt, Artificial Sequence
  Description of Artificial Sequence: Synthetic oligonucleotide
uugaguguacacucugcaa

SEQ ID NO: 2222219 - RNA, 19 nt, Artificial Sequence
  Description of Artificial Sequence: Synthetic oligonucleotide
cugguucaggggaauagug

SEQ ID NO: 2222220 - RNA, 19 nt, Artificial Sequence
  Description of Artificial Sequence: Synthetic oligonucleotide
ggcagcuggaacucaaucc

SEQ ID NO: 2222221 - RNA, 19 nt, Artificial Sequence
  Description of Artificial Sequence: Synthetic oligonucleotide
ccacaagagauuuauggac

SEQ ID NO: 2222222 - RNA, 19 nt, Artificial Sequence
  Description of Artificial Sequence: Synthetic oligonucleotide
gauuuauggacuccuugcu

SEQ ID NO: 2222223 - RNA, 19 nt, Artificial Sequence
  Description of Artificial Sequence: Synthetic oligonucleotide
auuuauggacuccuugcuu

SEQ ID NO: 2222224 - RNA, 19 nt, Artificial Sequence
  Description of Artificial Sequence: Synthetic oligonucleotide
agcgguuggggaauuugcc

SEQ ID NO: 2222225 - RNA, 19 nt, Artificial Sequence
  Description of Artificial Sequence: Synthetic oligonucleotide
cuacaugcgagaaggaaaa

SEQ ID NO: 2222226 - RNA, 19 nt, Artificial Sequence
  Description of Artificial Sequence: Synthetic oligonucleotide
uguaaagcaugaaggcauu

SEQ ID NO: 2222227 - RNA, 19 nt, Artificial Sequence
  Description of Artificial Sequence: Synthetic oligonucleotide
acucugcaaugacuuuggc

SEQ ID NO: 2222228 - RNA, 19 nt, Artificial Sequence
  Description of Artificial Sequence: Synthetic oligonucleotide
gaaggcguggcagagggca

SEQ ID NO: 2222229 - RNA, 19 nt, Artificial Sequence
  Description of Artificial Sequence: Synthetic oligonucleotide
gggaauagugaagucagcc

SEQ ID NO: 2222230 - RNA, 19 nt, Artificial Sequence
  Description of Artificial Sequence: Synthetic oligonucleotide
agguauuggcgaugggaag

SEQ ID NO: 2222231 - RNA, 19 nt, Artificial Sequence
  Description of Artificial Sequence: Synthetic oligonucleotide
cucuucucgagacagugca

SEQ ID NO: 2222232 - RNA, 19 nt, Artificial Sequence
  Description of Artificial Sequence: Synthetic oligonucleotide
cauguaaagcaugaaggca

SEQ ID NO: 2222233 - RNA, 19 nt, Artificial Sequence
  Description of Artificial Sequence: Synthetic oligonucleotide
acacucugcaaugacuuug

SEQ ID NO: 2222234 - RNA, 19 nt, Artificial Sequence
  Description of Artificial Sequence: Synthetic oligonucleotide
uguccacaagagauuuaug

SEQ ID NO: 2222235 - RNA, 19 nt, Artificial Sequence
  Description of Artificial Sequence: Synthetic oligonucleotide
gaauagugaagucagccuu

SEQ ID NO: 2222236 - RNA, 19 nt, Artificial Sequence
  Description of Artificial Sequence: Synthetic oligonucleotide
aucugauccccaccacuuc

SEQ ID NO: 2222237 - RNA, 19 nt, Artificial Sequence
  Description of Artificial Sequence: Synthetic oligonucleotide
caguucuaaaugcugaaaa

SEQ ID NO: 2222238 - RNA, 19 nt, Artificial Sequence
  Description of Artificial Sequence: Synthetic oligonucleotide
cugugguggauucuugaug

SEQ ID NO: 2222239 - RNA, 19 nt, Artificial Sequence
  Description of Artificial Sequence: Synthetic oligonucleotide
uucuuuccguaguuauccc

SEQ ID NO: 2222240 - RNA, 19 nt, Artificial Sequence
  Description of Artificial Sequence: Synthetic oligonucleotide
cuuagcugguuccauguga

SEQ ID NO: 2222241 - RNA, 19 nt, Artificial Sequence
  Description of Artificial Sequence: Synthetic oligonucleotide
agacauauagcugcacaga

SEQ ID NO: 2222242 - RNA, 19 nt, Artificial Sequence
  Description of Artificial Sequence: Synthetic oligonucleotide
acuucaauggauggccucu

SEQ ID NO: 2222243 - RNA, 19 nt, Artificial Sequence
  Description of Artificial Sequence: Synthetic oligonucleotide
uggggaauuugcccucuca

SEQ ID NO: 2222244 - RNA, 19 nt, Artificial Sequence
  Description of Artificial Sequence: Synthetic oligonucleotide
gaaccauguccacaagaga

SEQ ID NO: 2222245 - RNA, 19 nt, Artificial Sequence
  Description of Artificial Sequence: Synthetic oligonucleotide
cuucucgagacagugcaug

SEQ ID NO: 2222246 - RNA, 19 nt, Artificial Sequence
  Description of Artificial Sequence: Synthetic oligonucleotide
uucuagaauguggcaaaga

SEQ ID NO: 2222247 - RNA, 19 nt, Artificial Sequence
  Description of Artificial Sequence: Synthetic oligonucleotide
caagacauaauaaguggcu

SEQ ID NO: 2222248 - RNA, 19 nt, Artificial Sequence
  Description of Artificial Sequence: Synthetic oligonucleotide
gugcaugccaccugcgacc

SEQ ID NO: 2222249 - RNA, 19 nt, Artificial Sequence
  Description of Artificial Sequence: Synthetic oligonucleotide
cauccagcuaucaagacau

SEQ ID NO: 2222250 - RNA, 19 nt, Artificial Sequence
  Description of Artificial Sequence: Synthetic oligonucleotide
ucugguucaggggaauagu

SEQ ID NO: 2222251 - RNA, 19 nt, Artificial Sequence
  Description of Artificial Sequence: Synthetic oligonucleotide
agcccuauagagaaauuga

SEQ ID NO: 2222252 - RNA, 19 nt, Artificial Sequence
  Description of Artificial Sequence: Synthetic oligonucleotide
auguccacaagagauuuau

SEQ ID NO: 2222253 - RNA, 19 nt, Artificial Sequence
  Description of Artificial Sequence: Synthetic oligonucleotide
caccuuaaggacccuuagc

SEQ ID NO: 2222254 - RNA, 19 nt, Artificial Sequence
  Description of Artificial Sequence: Synthetic oligonucleotide
ugcacagaucugaucccca

SEQ ID NO: 2222255 - RNA, 19 nt, Artificial Sequence
  Description of Artificial Sequence: Synthetic oligonucleotide
uggucuuguugccuccucu

SEQ ID NO: 2222256 - RNA, 19 nt, Artificial Sequence
  Description of Artificial Sequence: Synthetic oligonucleotide
cagcccuauagagaaauug

SEQ ID NO: 2222257 - RNA, 19 nt, Artificial Sequence
  Description of Artificial Sequence: Synthetic oligonucleotide
uacgggccaguucauagua

SEQ ID NO: 2222258 - RNA, 19 nt, Artificial Sequence
  Description of Artificial Sequence: Synthetic oligonucleotide
acauaaaauggaacuggga

SEQ ID NO: 2222259 - RNA, 19 nt, Artificial Sequence
  Description of Artificial Sequence: Synthetic oligonucleotide
uuccguaguuaucccgcgc

SEQ ID NO: 2222260 - RNA, 19 nt, Artificial Sequence
  Description of Artificial Sequence: Synthetic oligonucleotide
ugcagcccuauagagaaau

SEQ ID NO: 2222261 - RNA, 19 nt, Artificial Sequence
  Description of Artificial Sequence: Synthetic oligonucleotide
agcuaucaagacauaauaa

SEQ ID NO: 2222262 - RNA, 19 nt, Artificial Sequence
  Description of Artificial Sequence: Synthetic oligonucleotide
aggagcuaugacucagcug

SEQ ID NO: 2222263 - RNA, 19 nt, Artificial Sequence
  Description of Artificial Sequence: Synthetic oligonucleotide
uuggccugcucuucucgag

SEQ ID NO: 2222264 - RNA, 19 nt, Artificial Sequence
  Description of Artificial Sequence: Synthetic oligonucleotide
cucaauccagcccaucuga

SEQ ID NO: 2222265 - RNA, 19 nt, Artificial Sequence
  Description of Artificial Sequence: Synthetic oligonucleotide
cagcgguuggggaauuugc

SEQ ID NO: 2222266 - RNA, 19 nt, Artificial Sequence
  Description of Artificial Sequence: Synthetic oligonucleotide
aggcucaggguuaaguuug

SEQ ID NO: 2222267 - RNA, 19 nt, Artificial Sequence
  Description of Artificial Sequence: Synthetic oligonucleotide
ucucgagacagugcaugcc

SEQ ID NO: 2222268 - RNA, 19 nt, Artificial Sequence
  Description of Artificial Sequence: Synthetic oligonucleotide
gacauaggggcauccagcu

SEQ ID NO: 2222269 - RNA, 19 nt, Artificial Sequence
  Description of Artificial Sequence: Synthetic oligonucleotide
aaauugaagcuggccaguu

SEQ ID NO: 2222270 - RNA, 19 nt, Artificial Sequence
  Description of Artificial Sequence: Synthetic oligonucleotide
caccaggaugcccuuagug

SEQ ID NO: 2222271 - RNA, 19 nt, Artificial Sequence
  Description of Artificial Sequence: Synthetic oligonucleotide
ccuuagugagacauauagc

SEQ ID NO: 2222272 - RNA, 19 nt, Artificial Sequence
  Description of Artificial Sequence: Synthetic oligonucleotide
ugcccuuagugagacauau

SEQ ID NO: 2222273 - RNA, 19 nt, Artificial Sequence
  Description of Artificial Sequence: Synthetic oligonucleotide
cacaagagauuuauggacu

SEQ ID NO: 2222274 - RNA, 19 nt, Artificial Sequence
  Description of Artificial Sequence: Synthetic oligonucleotide
auagugaagucagccuuug

SEQ ID NO: 2222275 - RNA, 19 nt, Artificial Sequence
  Description of Artificial Sequence: Synthetic oligonucleotide
uagugaagucagccuuugc

SEQ ID NO: 2222276 - RNA, 19 nt, Artificial Sequence
  Description of Artificial Sequence: Synthetic oligonucleotide
uuauggacuccuugcuuua

SEQ ID NO: 2222277 - RNA, 19 nt, Artificial Sequence
  Description of Artificial Sequence: Synthetic oligonucleotide
cucugguucaggggaauag

SEQ ID NO: 2222278 - RNA, 19 nt, Artificial Sequence
  Description of Artificial Sequence: Synthetic oligonucleotide
aacugggaagagguauucu

SEQ ID NO: 2222279 - RNA, 19 nt, Artificial Sequence
  Description of Artificial Sequence: Synthetic oligonucleotide
gcagcgcuuucuuugagug

SEQ ID NO: 2222280 - RNA, 19 nt, Artificial Sequence
  Description of Artificial Sequence: Synthetic oligonucleotide
guuccaugugaucuggucu

SEQ ID NO: 2222281 - RNA, 19 nt, Artificial Sequence
  Description of Artificial Sequence: Synthetic oligonucleotide
uuaucccgcgcugaccagc

SEQ ID NO: 2222282 - RNA, 19 nt, Artificial Sequence
  Description of Artificial Sequence: Synthetic oligonucleotide
caggguuaaguuuggcuca

SEQ ID NO: 2222283 - RNA, 19 nt, Artificial Sequence
  Description of Artificial Sequence: Synthetic oligonucleotide
guucaggggaauagugaag

SEQ ID NO: 2222284 - RNA, 19 nt, Artificial Sequence
  Description of Artificial Sequence: Synthetic oligonucleotide
cuggguauagcugcaugug

SEQ ID NO: 2222285 - RNA, 19 nt, Artificial Sequence
  Description of Artificial Sequence: Synthetic oligonucleotide
caugccaccugcgacccag

SEQ ID NO: 2222286 - RNA, 19 nt, Artificial Sequence
  Description of Artificial Sequence: Synthetic oligonucleotide
guauuggcgaugggaaggc

SEQ ID NO: 2222287 - RNA, 19 nt, Artificial Sequence
  Description of Artificial Sequence: Synthetic oligonucleotide
gaugcccuuagugagacau

SEQ ID NO: 2222288 - RNA, 19 nt, Artificial Sequence
  Description of Artificial Sequence: Synthetic oligonucleotide
gguucaggggaauagugaa

SEQ ID NO: 2222289 - RNA, 19 nt, Artificial Sequence
  Description of Artificial Sequence: Synthetic oligonucleotide
uauuggcgaugggaaggcg

SEQ ID NO: 2222290 - RNA, 19 nt, Artificial Sequence
  Description of Artificial Sequence: Synthetic oligonucleotide
guguacacucugcaaugac

SEQ ID NO: 2222291 - RNA, 19 nt, Artificial Sequence
  Description of Artificial Sequence: Synthetic oligonucleotide
ucaggggaauagugaaguc

SEQ ID NO: 2222292 - RNA, 19 nt, Artificial Sequence
  Description of Artificial Sequence: Synthetic oligonucleotide
gaagcuggccaguucuaaa

SEQ ID NO: 2222293 - RNA, 19 nt, Artificial Sequence
  Description of Artificial Sequence: Synthetic oligonucleotide
guaaagcaugaaggcauug

SEQ ID NO: 2222294 - RNA, 19 nt, Artificial Sequence
  Description of Artificial Sequence: Synthetic oligonucleotide
acccuuagcugguuccaug

SEQ ID NO: 2222295 - RNA, 19 nt, Artificial Sequence
  Description of Artificial Sequence: Synthetic oligonucleotide
acauaauaaguggcugcca

SEQ ID NO: 2222296 - RNA, 19 nt, Artificial Sequence
  Description of Artificial Sequence: Synthetic oligonucleotide
guccugugcccuguggugg

SEQ ID NO: 2222297 - RNA, 19 nt, Artificial Sequence
  Description of Artificial Sequence: Synthetic oligonucleotide
auggcagcgcuuucuuuga

SEQ ID NO: 2222298 - RNA, 19 nt, Artificial Sequence
  Description of Artificial Sequence: Synthetic oligonucleotide
gcagcugccguuccuuacg

SEQ ID NO: 2222299 - RNA, 19 nt, Artificial Sequence
  Description of Artificial Sequence: Synthetic oligonucleotide
agacagugcaugccaccug

SEQ ID NO: 2222300 - RNA, 19 nt, Artificial Sequence
  Description of Artificial Sequence: Synthetic oligonucleotide
agaauguggcaaagaacca

SEQ ID NO: 2222301 - RNA, 19 nt, Artificial Sequence
  Description of Artificial Sequence: Synthetic oligonucleotide
gguuucuagaauguggcaa

SEQ ID NO: 2222302 - RNA, 19 nt, Artificial Sequence
  Description of Artificial Sequence: Synthetic oligonucleotide
uccuugcuuuaguuguaac

SEQ ID NO: 2222303 - RNA, 19 nt, Artificial Sequence
  Description of Artificial Sequence: Synthetic oligonucleotide
uucuugguccaagaaggua

SEQ ID NO: 2222304 - RNA, 19 nt, Artificial Sequence
  Description of Artificial Sequence: Synthetic oligonucleotide
caggggaauagugaaguca

SEQ ID NO: 2222305 - RNA, 19 nt, Artificial Sequence
  Description of Artificial Sequence: Synthetic oligonucleotide
cacuucaauggauggccuc

SEQ ID NO: 2222306 - RNA, 19 nt, Artificial Sequence
  Description of Artificial Sequence: Synthetic oligonucleotide
auuggcgaugggaaggcgu

SEQ ID NO: 2222307 - RNA, 19 nt, Artificial Sequence
  Description of Artificial Sequence: Synthetic oligonucleotide
ugacuuuggcucucaucuc

SEQ ID NO: 2222308 - RNA, 19 nt, Artificial Sequence
  Description of Artificial Sequence: Synthetic oligonucleotide
ucuucucgagacagugcau

SEQ ID NO: 2222309 - RNA, 19 nt, Artificial Sequence
  Description of Artificial Sequence: Synthetic oligonucleotide
uaguuaucccgcgcugacc

SEQ ID NO: 2222310 - RNA, 19 nt, Artificial Sequence
  Description of Artificial Sequence: Synthetic oligonucleotide
ugaagcuggccaguucuaa

SEQ ID NO: 2222311 - RNA, 19 nt, Artificial Sequence
  Description of Artificial Sequence: Synthetic oligonucleotide
agugagacauauagcugca

SEQ ID NO: 2222312 - RNA, 19 nt, Artificial Sequence
  Description of Artificial Sequence: Synthetic oligonucleotide
uggagcaagccaggugucc

SEQ ID NO: 2222313 - RNA, 19 nt, Artificial Sequence
  Description of Artificial Sequence: Synthetic oligonucleotide
ugcaugccaccugcgaccc

SEQ ID NO: 2222314 - RNA, 19 nt, Artificial Sequence
  Description of Artificial Sequence: Synthetic oligonucleotide
uugaugcuuuucccuugac

SEQ ID NO: 2222315 - RNA, 19 nt, Artificial Sequence
  Description of Artificial Sequence: Synthetic oligonucleotide
ggggaauuugcccucucac

SEQ ID NO: 2222316 - RNA, 19 nt, Artificial Sequence
  Description of Artificial Sequence: Synthetic oligonucleotide
caccacuucaauggauggc

SEQ ID NO: 2222317 - RNA, 19 nt, Artificial Sequence
  Description of Artificial Sequence: Synthetic oligonucleotide
cauaggggcauccagcuau

SEQ ID NO: 2222318 - RNA, 19 nt, Artificial Sequence
  Description of Artificial Sequence: Synthetic oligonucleotide
gguuaaguuuggcucaaaa

SEQ ID NO: 2222319 - RNA, 19 nt, Artificial Sequence
  Description of Artificial Sequence: Synthetic oligonucleotide
guuccuuacgggccaguuc

SEQ ID NO: 2222320 - RNA, 19 nt, Artificial Sequence
  Description of Artificial Sequence: Synthetic oligonucleotide
uugguccaagaagguauug

SEQ ID NO: 2222321 - RNA, 19 nt, Artificial Sequence
  Description of Artificial Sequence: Synthetic oligonucleotide
uccccaccacuucaaugga

SEQ ID NO: 2222322 - RNA, 19 nt, Artificial Sequence
  Description of Artificial Sequence: Synthetic oligonucleotide
gguauucuugguccaagaa

SEQ ID NO: 2222323 - RNA, 19 nt, Artificial Sequence
  Description of Artificial Sequence: Synthetic oligonucleotide
gggaauuugcccucucaca

SEQ ID NO: 2222324 - RNA, 19 nt, Artificial Sequence
  Description of Artificial Sequence: Synthetic oligonucleotide
ccaccugcgacccaggauc

SEQ ID NO: 2222325 - RNA, 19 nt, Artificial Sequence
  Description of Artificial Sequence: Synthetic oligonucleotide
uugaagcuggccaguucua

SEQ ID NO: 2222326 - RNA, 19 nt, Artificial Sequence
  Description of Artificial Sequence: Synthetic oligonucleotide
gaauguggcaaagaaccau

SEQ ID NO: 2222327 - RNA, 19 nt, Artificial Sequence
  Description of Artificial Sequence: Synthetic oligonucleotide
cccaccacuucaauggaug

SEQ ID NO: 2222328 - RNA, 19 nt, Artificial Sequence
  Description of Artificial Sequence: Synthetic oligonucleotide
cucaggguuaaguuuggcu

SEQ ID NO: 2222329 - RNA, 19 nt, Artificial Sequence
  Description of Artificial Sequence: Synthetic oligonucleotide
uggcagcgcuuucuuugag

SEQ ID NO: 2222330 - RNA, 19 nt, Artificial Sequence
  Description of Artificial Sequence: Synthetic oligonucleotide
uuucccuugaccgccucuu

SEQ ID NO: 2222331 - RNA, 19 nt, Artificial Sequence
  Description of Artificial Sequence: Synthetic oligonucleotide
caaaagacauaggggcauc

SEQ ID NO: 2222332 - RNA, 19 nt, Artificial Sequence
  Description of Artificial Sequence: Synthetic oligonucleotide
auguuccuuccugcagccc

SEQ ID NO: 2222333 - RNA, 19 nt, Artificial Sequence
  Description of Artificial Sequence: Synthetic oligonucleotide
gcgguuggggaauuugccc

SEQ ID NO: 2222334 - RNA, 19 nt, Artificial Sequence
  Description of Artificial Sequence: Synthetic oligonucleotide
gaaauugaagcuggccagu

SEQ ID NO: 2222335 - RNA, 19 nt, Artificial Sequence
  Description of Artificial Sequence: Synthetic oligonucleotide
cucugcaaugacuuuggcu

SEQ ID NO: 2222336 - RNA, 19 nt, Artificial Sequence
  Description of Artificial Sequence: Synthetic oligonucleotide
ggccaguucauaguacuug

SEQ ID NO: 2222337 - RNA, 19 nt, Artificial Sequence
  Description of Artificial Sequence: Synthetic oligonucleotide
guuaucccgcgcugaccag

SEQ ID NO: 2222338 - RNA, 19 nt, Artificial Sequence
  Description of Artificial Sequence: Synthetic oligonucleotide
cugaccagccuggguauag

SEQ ID NO: 2222339 - RNA, 19 nt, Artificial Sequence
  Description of Artificial Sequence: Synthetic oligonucleotide
gcaccuuaaggacccuuag

SEQ ID NO: 2222340 - RNA, 19 nt, Artificial Sequence
  Description of Artificial Sequence: Synthetic oligonucleotide
gacucagcugacauaaaau

SEQ ID NO: 2222341 - RNA, 19 nt, Artificial Sequence
  Description of Artificial Sequence: Synthetic oligonucleotide
ccaccacuucaauggaugg

SEQ ID NO: 2222342 - RNA, 19 nt, Artificial Sequence
  Description of Artificial Sequence: Synthetic oligonucleotide
cuucaauggauggccucug

SEQ ID NO: 2222343 - RNA, 19 nt, Artificial Sequence
  Description of Artificial Sequence: Synthetic oligonucleotide
uugaccgccucuucuucuu

SEQ ID NO: 2222344 - RNA, 19 nt, Artificial Sequence
  Description of Artificial Sequence: Synthetic oligonucleotide
ccugcucuucucgagacag

SEQ ID NO: 2222345 - RNA, 19 nt, Artificial Sequence
  Description of Artificial Sequence: Synthetic oligonucleotide
agcuaugacucagcugaca

SEQ ID NO: 2222346 - RNA, 19 nt, Artificial Sequence
  Description of Artificial Sequence: Synthetic oligonucleotide
aggggcauccagcuaucaa

SEQ ID NO: 2222347 - RNA, 19 nt, Artificial Sequence
  Description of Artificial Sequence: Synthetic oligonucleotide
ugaccagccuggguauagc

SEQ ID NO: 2222348 - RNA, 19 nt, Artificial Sequence
  Description of Artificial Sequence: Synthetic oligonucleotide
auguggcaaagaaccaugu

SEQ ID NO: 2222349 - RNA, 19 nt, Artificial Sequence
  Description of Artificial Sequence: Synthetic oligonucleotide
uugcccucucacagcugcc

SEQ ID NO: 2222350 - RNA, 19 nt, Artificial Sequence
  Description of Artificial Sequence: Synthetic oligonucleotide
ggguauagcugcaugugca

SEQ ID NO: 2222351 - RNA, 19 nt, Artificial Sequence
  Description of Artificial Sequence: Synthetic oligonucleotide
gcugcacagaucugauccc

SEQ ID NO: 2222352 - RNA, 19 nt, Artificial Sequence
  Description of Artificial Sequence: Synthetic oligonucleotide
auagcugcacagaucugau

SEQ ID NO: 2222353 - RNA, 19 nt, Artificial Sequence
  Description of Artificial Sequence: Synthetic oligonucleotide
auaggggcauccagcuauc

SEQ ID NO: 2222354 - RNA, 19 nt, Artificial Sequence
  Description of Artificial Sequence: Synthetic oligonucleotide
gaccgccucuucuucuuuc

SEQ ID NO: 2222355 - RNA, 19 nt, Artificial Sequence
  Description of Artificial Sequence: Synthetic oligonucleotide
uagcugcacagaucugauc

SEQ ID NO: 2222356 - RNA, 19 nt, Artificial Sequence
  Description of Artificial Sequence: Synthetic oligonucleotide
acgggccaguucauaguac

SEQ ID NO: 2222357 - RNA, 19 nt, Artificial Sequence
  Description of Artificial Sequence: Synthetic oligonucleotide
gagacagugcaugccaccu

SEQ ID NO: 2222358 - RNA, 19 nt, Artificial Sequence
  Description of Artificial Sequence: Synthetic oligonucleotide
uucccuugaccgccucuuc

SEQ ID NO: 2222359 - RNA, 19 nt, Artificial Sequence
  Description of Artificial Sequence: Synthetic oligonucleotide
ugccaccugcgacccagga

SEQ ID NO: 2222360 - RNA, 19 nt, Artificial Sequence
  Description of Artificial Sequence: Synthetic oligonucleotide
agagguauucuugguccaa

SEQ ID NO: 2222361 - RNA, 19 nt, Artificial Sequence
  Description of Artificial Sequence: Synthetic oligonucleotide
ggcaaagaaccauguccac

SEQ ID NO: 2222362 - RNA, 19 nt, Artificial Sequence
  Description of Artificial Sequence: Synthetic oligonucleotide
cuaugacucagcugacaua

SEQ ID NO: 2222363 - RNA, 19 nt, Artificial Sequence
  Description of Artificial Sequence: Synthetic oligonucleotide
gcaaucuucagcaccuuaa

SEQ ID NO: 2222364 - RNA, 19 nt, Artificial Sequence
  Description of Artificial Sequence: Synthetic oligonucleotide
cuggagcaagccagguguc

SEQ ID NO: 2222365 - RNA, 19 nt, Artificial Sequence
  Description of Artificial Sequence: Synthetic oligonucleotide
uuggggaauuugcccucuc

SEQ ID NO: 2222366 - RNA, 19 nt, Artificial Sequence
  Description of Artificial Sequence: Synthetic oligonucleotide
caggaugcccuuagugaga

SEQ ID NO: 2222367 - RNA, 19 nt, Artificial Sequence
  Description of Artificial Sequence: Synthetic oligonucleotide
uuuugauaguuggcuucuu

SEQ ID NO: 2222368 - RNA, 19 nt, Artificial Sequence
  Description of Artificial Sequence: Synthetic oligonucleotide
gaucugauccccaccacuu

SEQ ID NO: 2222369 - RNA, 19 nt, Artificial Sequence
  Description of Artificial Sequence: Synthetic oligonucleotide
uugggccccuggagcaagc

SEQ ID NO: 2222370 - RNA, 19 nt, Artificial Sequence
  Description of Artificial Sequence: Synthetic oligonucleotide
agagauuuauggacuccuu

SEQ ID NO: 2222371 - RNA, 19 nt, Artificial Sequence
  Description of Artificial Sequence: Synthetic oligonucleotide
agcaccuuaaggacccuua

SEQ ID NO: 2222372 - RNA, 19 nt, Artificial Sequence
  Description of Artificial Sequence: Synthetic oligonucleotide
ccaucugaccugcaacaac

SEQ ID NO: 2222373 - RNA, 19 nt, Artificial Sequence
  Description of Artificial Sequence: Synthetic oligonucleotide
acauaggggcauccagcua

SEQ ID NO: 2222374 - RNA, 19 nt, Artificial Sequence
  Description of Artificial Sequence: Synthetic oligonucleotide
gcuaugacucagcugacau

SEQ ID NO: 2222375 - RNA, 19 nt, Artificial Sequence
  Description of Artificial Sequence: Synthetic oligonucleotide
gaacucaauccagcccauc

SEQ ID NO: 2222376 - RNA, 19 nt, Artificial Sequence
  Description of Artificial Sequence: Synthetic oligonucleotide
gguuggggaauuugcccuc

SEQ ID NO: 2222377 - RNA, 19 nt, Artificial Sequence
  Description of Artificial Sequence: Synthetic oligonucleotide
gugagacauauagcugcac

SEQ ID NO: 2222378 - RNA, 19 nt, Artificial Sequence
  Description of Artificial Sequence: Synthetic oligonucleotide
ggccaguucuaaaugcuga

SEQ ID NO: 2222379 - RNA, 19 nt, Artificial Sequence
  Description of Artificial Sequence: Synthetic oligonucleotide
ccugcgacccaggaucugg

SEQ ID NO: 2222380 - RNA, 19 nt, Artificial Sequence
  Description of Artificial Sequence: Synthetic oligonucleotide
caaggcucaggguuaaguu

SEQ ID NO: 2222381 - RNA, 19 nt, Artificial Sequence
  Description of Artificial Sequence: Synthetic oligonucleotide
ggguuucuagaauguggca

SEQ ID NO: 2222382 - RNA, 19 nt, Artificial Sequence
  Description of Artificial Sequence: Synthetic oligonucleotide
uccuuacgggccaguucau

SEQ ID NO: 2222383 - RNA, 19 nt, Artificial Sequence
  Description of Artificial Sequence: Synthetic oligonucleotide
aggguuaaguuuggcucaa

SEQ ID NO: 2222384 - RNA, 19 nt, Artificial Sequence
  Description of Artificial Sequence: Synthetic oligonucleotide
cucuugaguuaggguuggg

SEQ ID NO: 2222385 - RNA, 19 nt, Artificial Sequence
  Description of Artificial Sequence: Synthetic oligonucleotide
ccuggagcaagccaggugu

SEQ ID NO: 2222386 - RNA, 19 nt, Artificial Sequence
  Description of Artificial Sequence: Synthetic oligonucleotide
uaggggcauccagcuauca

SEQ ID NO: 2222387 - RNA, 19 nt, Artificial Sequence
  Description of Artificial Sequence: Synthetic oligonucleotide
cuggucuuguugccuccuc

SEQ ID NO: 2222388 - RNA, 19 nt, Artificial Sequence
  Description of Artificial Sequence: Synthetic oligonucleotide
cuuuucccuugaccgccuc

SEQ ID NO: 2222389 - RNA, 19 nt, Artificial Sequence
  Description of Artificial Sequence: Synthetic oligonucleotide
gagcuaugacucagcugac

SEQ ID NO: 2222390 - RNA, 19 nt, Artificial Sequence
  Description of Artificial Sequence: Synthetic oligonucleotide
ggccugcucuucucgagac

SEQ ID NO: 2222391 - RNA, 19 nt, Artificial Sequence
  Description of Artificial Sequence: Synthetic oligonucleotide
gccuggguauagcugcaug

SEQ ID NO: 2222392 - RNA, 19 nt, Artificial Sequence
  Description of Artificial Sequence: Synthetic oligonucleotide
ccucuugaguuaggguugg

SEQ ID NO: 2222393 - RNA, 19 nt, Artificial Sequence
  Description of Artificial Sequence: Synthetic oligonucleotide
aucugaccugcaacaacaa

SEQ ID NO: 2222394 - RNA, 19 nt, Artificial Sequence
  Description of Artificial Sequence: Synthetic oligonucleotide
ugcgacccaggaucugguu

SEQ ID NO: 2222395 - RNA, 19 nt, Artificial Sequence
  Description of Artificial Sequence: Synthetic oligonucleotide
ggcgaugggaaggcguggc

SEQ ID NO: 2222396 - RNA, 19 nt, Artificial Sequence
  Description of Artificial Sequence: Synthetic oligonucleotide
gcccuauagagaaauugaa

SEQ ID NO: 2222397 - RNA, 19 nt, Artificial Sequence
  Description of Artificial Sequence: Synthetic oligonucleotide
ugggccccuggagcaagcc

SEQ ID NO: 2222398 - RNA, 19 nt, Artificial Sequence
  Description of Artificial Sequence: Synthetic oligonucleotide
ggguugggccccuggagca

SEQ ID NO: 2222399 - RNA, 19 nt, Artificial Sequence
  Description of Artificial Sequence: Synthetic oligonucleotide
caggagcuaugacucagcu

SEQ ID NO: 2222400 - RNA, 19 nt, Artificial Sequence
  Description of Artificial Sequence: Synthetic oligonucleotide
ggggaauagugaagucagc

SEQ ID NO: 2222401 - RNA, 19 nt, Artificial Sequence
  Description of Artificial Sequence: Synthetic oligonucleotide
auuugcccucucacagcug

SEQ ID NO: 2222402 - RNA, 19 nt, Artificial Sequence
  Description of Artificial Sequence: Synthetic oligonucleotide
ccuuagcugguuccaugug

SEQ ID NO: 2222403 - RNA, 19 nt, Artificial Sequence
  Description of Artificial Sequence: Synthetic oligonucleotide
gcgcugaccagccugggua

SEQ ID NO: 2222404 - RNA, 19 nt, Artificial Sequence
  Description of Artificial Sequence: Synthetic oligonucleotide
cuugguccaagaagguauu

SEQ ID NO: 2222405 - RNA, 19 nt, Artificial Sequence
  Description of Artificial Sequence: Synthetic oligonucleotide
uaaggacccuuagcugguu

SEQ ID NO: 2222406 - RNA, 19 nt, Artificial Sequence
  Description of Artificial Sequence: Synthetic oligonucleotide
cccgcgcugaccagccugg

SEQ ID NO: 2222407 - RNA, 19 nt, Artificial Sequence
  Description of Artificial Sequence: Synthetic oligonucleotide
ugaaggcauugagggguuu

SEQ ID NO: 2222408 - RNA, 19 nt, Artificial Sequence
  Description of Artificial Sequence: Synthetic oligonucleotide
gcuuuaguuguaacagaua

SEQ ID NO: 2222409 - RNA, 19 nt, Artificial Sequence
  Description of Artificial Sequence: Synthetic oligonucleotide
cccucucacagcugcccag

SEQ ID NO: 2222410 - RNA, 19 nt, Artificial Sequence
  Description of Artificial Sequence: Synthetic oligonucleotide
ccuggguauagcugcaugu

SEQ ID NO: 2222411 - RNA, 19 nt, Artificial Sequence
  Description of Artificial Sequence: Synthetic oligonucleotide
uccuuccugcagcccuaua

SEQ ID NO: 2222412 - RNA, 19 nt, Artificial Sequence
  Description of Artificial Sequence: Synthetic oligonucleotide
gguugauggcagcgcuuuc

SEQ ID NO: 2222413 - RNA, 19 nt, Artificial Sequence
  Description of Artificial Sequence: Synthetic oligonucleotide
gcaagccagguguccugug

SEQ ID NO: 2222414 - RNA, 19 nt, Artificial Sequence
  Description of Artificial Sequence: Synthetic oligonucleotide
ccagcgguuggggaauuug

SEQ ID NO: 2222415 - RNA, 19 nt, Artificial Sequence
  Description of Artificial Sequence: Synthetic oligonucleotide
cgaugggaaggcguggcag

SEQ ID NO: 2222416 - RNA, 19 nt, Artificial Sequence
  Description of Artificial Sequence: Synthetic oligonucleotide
ccguaguuaucccgcgcug

SEQ ID NO: 2222417 - RNA, 19 nt, Artificial Sequence
  Description of Artificial Sequence: Synthetic oligonucleotide
gugguggauucuugaugcu

SEQ ID NO: 2222418 - RNA, 19 nt, Artificial Sequence
  Description of Artificial Sequence: Synthetic oligonucleotide
ggcagcgcuuucuuugagu

SEQ ID NO: 2222419 - RNA, 19 nt, Artificial Sequence
  Description of Artificial Sequence: Synthetic oligonucleotide
ccagguguccugugcccug

SEQ ID NO: 2222420 - RNA, 19 nt, Artificial Sequence
  Description of Artificial Sequence: Synthetic oligonucleotide
ggacccuuagcugguucca

SEQ ID NO: 2222421 - RNA, 19 nt, Artificial Sequence
  Description of Artificial Sequence: Synthetic oligonucleotide
augacucagcugacauaaa

SEQ ID NO: 2222422 - RNA, 19 nt, Artificial Sequence
  Description of Artificial Sequence: Synthetic oligonucleotide
gcaaugacuuuggcucuca

SEQ ID NO: 2222423 - RNA, 19 nt, Artificial Sequence
  Description of Artificial Sequence: Synthetic oligonucleotide
accugcgacccaggaucug

SEQ ID NO: 2222424 - RNA, 19 nt, Artificial Sequence
  Description of Artificial Sequence: Synthetic oligonucleotide
ccaguucuaaaugcugaaa

SEQ ID NO: 2222425 - RNA, 19 nt, Artificial Sequence
  Description of Artificial Sequence: Synthetic oligonucleotide
ggucuuguugccuccucuu

SEQ ID NO: 2222426 - RNA, 19 nt, Artificial Sequence
  Description of Artificial Sequence: Synthetic oligonucleotide
uccagcgguuggggaauuu

SEQ ID NO: 2222427 - RNA, 19 nt, Artificial Sequence
  Description of Artificial Sequence: Synthetic oligonucleotide
ggauggccucugguucagg

SEQ ID NO: 2222428 - RNA, 19 nt, Artificial Sequence
  Description of Artificial Sequence: Synthetic oligonucleotide
gcgaugggaaggcguggca

SEQ ID NO: 2222429 - RNA, 19 nt, Artificial Sequence
  Description of Artificial Sequence: Synthetic oligonucleotide
ccaagaagguauuggcgau

SEQ ID NO: 2222430 - RNA, 19 nt, Artificial Sequence
  Description of Artificial Sequence: Synthetic oligonucleotide
augcccuuagugagacaua

SEQ ID NO: 2222431 - RNA, 19 nt, Artificial Sequence
  Description of Artificial Sequence: Synthetic oligonucleotide
ggaacugggaagagguauu

SEQ ID NO: 2222432 - RNA, 19 nt, Artificial Sequence
  Description of Artificial Sequence: Synthetic oligonucleotide
cccuuagcugguuccaugu

SEQ ID NO: 2222433 - RNA, 19 nt, Artificial Sequence
  Description of Artificial Sequence: Synthetic oligonucleotide
ggaaggcguggcagagggc

SEQ ID NO: 2222434 - RNA, 19 nt, Artificial Sequence
  Description of Artificial Sequence: Synthetic oligonucleotide
gcccucucacagcugccca

SEQ ID NO: 2222435 - RNA, 19 nt, Artificial Sequence
  Description of Artificial Sequence: Synthetic oligonucleotide
gacccuuagcugguuccau

SEQ ID NO: 2222436 - RNA, 19 nt, Artificial Sequence
  Description of Artificial Sequence: Synthetic oligonucleotide
cugcgacccaggaucuggu

SEQ ID NO: 2222437 - RNA, 19 nt, Artificial Sequence
  Description of Artificial Sequence: Synthetic oligonucleotide
cugcagcccuauagagaaa

SEQ ID NO: 2222438 - RNA, 19 nt, Artificial Sequence
  Description of Artificial Sequence: Synthetic oligonucleotide
caccugcgacccaggaucu

SEQ ID NO: 2222439 - RNA, 19 nt, Artificial Sequence
  Description of Artificial Sequence: Synthetic oligonucleotide
cugguugauggcagcgcuu

SEQ ID NO: 2222440 - RNA, 19 nt, Artificial Sequence
  Description of Artificial Sequence: Synthetic oligonucleotide
gcguggcagagggcaagag

SEQ ID NO: 2222441 - RNA, 19 nt, Artificial Sequence
  Description of Artificial Sequence: Synthetic oligonucleotide
caaugacuuuggcucucau

SEQ ID NO: 2222442 - RNA, 19 nt, Artificial Sequence
  Description of Artificial Sequence: Synthetic oligonucleotide
gcccaggagcuaugacuca

SEQ ID NO: 2222443 - RNA, 19 nt, Artificial Sequence
  Description of Artificial Sequence: Synthetic oligonucleotide
gcccugugguggauucuug

SEQ ID NO: 2222444 - RNA, 19 nt, Artificial Sequence
  Description of Artificial Sequence: Synthetic oligonucleotide
gcgcuuucuuugaguguac

SEQ ID NO: 2222445 - RNA, 19 nt, Artificial Sequence
  Description of Artificial Sequence: Synthetic oligonucleotide
ccacuucaauggauggccu

SEQ ID NO: 2222446 - RNA, 19 nt, Artificial Sequence
  Description of Artificial Sequence: Synthetic oligonucleotide
cgggccaguucauaguacu

SEQ ID NO: 2222447 - RNA, 19 nt, Artificial Sequence
  Description of Artificial Sequence: Synthetic oligonucleotide
gaguuaggguugggccccu

SEQ ID NO: 2222448 - RNA, 19 nt, Artificial Sequence
  Description of Artificial Sequence: Synthetic oligonucleotide
cccaucugaccugcaacaa

SEQ ID NO: 2222449 - RNA, 19 nt, Artificial Sequence
  Description of Artificial Sequence: Synthetic oligonucleotide
gguugggccccuggagcaa

SEQ ID NO: 2222450 - RNA, 19 nt, Artificial Sequence
  Description of Artificial Sequence: Synthetic oligonucleotide
gccaccugcgacccaggau

SEQ ID NO: 2222451 - RNA, 19 nt, Artificial Sequence
  Description of Artificial Sequence: Synthetic oligonucleotide
ggaacucaauccagcccau

SEQ ID NO: 2222452 - RNA, 19 nt, Artificial Sequence
  Description of Artificial Sequence: Synthetic oligonucleotide
ggguuaaguuuggcucaaa

SEQ ID NO: 2222453 - RNA, 19 nt, Artificial Sequence
  Description of Artificial Sequence: Synthetic oligonucleotide
ggccucugguucaggggaa

SEQ ID NO: 2222454 - RNA, 19 nt, Artificial Sequence
  Description of Artificial Sequence: Synthetic oligonucleotide
cugccacaggcaccaggau

SEQ ID NO: 2222455 - RNA, 19 nt, Artificial Sequence
  Description of Artificial Sequence: Synthetic oligonucleotide
gcaccaggaugcccuuagu

SEQ ID NO: 2222456 - RNA, 19 nt, Artificial Sequence
  Description of Artificial Sequence: Synthetic oligonucleotide
gcuuuucccuugaccgccu

SEQ ID NO: 2222457 - RNA, 19 nt, Artificial Sequence
  Description of Artificial Sequence: Synthetic oligonucleotide
ccuuacgggccaguucaua

SEQ ID NO: 2222458 - RNA, 19 nt, Artificial Sequence
  Description of Artificial Sequence: Synthetic oligonucleotide
gggccaguucauaguacuu

SEQ ID NO: 2222459 - RNA, 19 nt, Artificial Sequence
  Description of Artificial Sequence: Synthetic oligonucleotide
gcugaccagccuggguaua

SEQ ID NO: 2222460 - RNA, 19 nt, Artificial Sequence
  Description of Artificial Sequence: Synthetic oligonucleotide
ccaugugaucuggucuugu

SEQ ID NO: 2222461 - RNA, 19 nt, Artificial Sequence
  Description of Artificial Sequence: Synthetic oligonucleotide
ccgcgcugaccagccuggg

SEQ ID NO: 2222462 - RNA, 19 nt, Artificial Sequence
  Description of Artificial Sequence: Synthetic oligonucleotide
ccccaccacuucaauggau

SEQ ID NO: 2222463 - RNA, 19 nt, Artificial Sequence
  Description of Artificial Sequence: Synthetic oligonucleotide
gcagcccuauagagaaauu

SEQ ID NO: 2222464 - RNA, 19 nt, Artificial Sequence
  Description of Artificial Sequence: Synthetic oligonucleotide
gccucugguucaggggaau

SEQ ID NO: 2222465 - RNA, 19 nt, Artificial Sequence
  Description of Artificial Sequence: Synthetic oligonucleotide
cguuccuuacgggccaguu

SEQ ID NO: 2222466 - RNA, 19 nt, Artificial Sequence
  Description of Artificial Sequence: Synthetic oligonucleotide
cgcgcugaccagccugggu

SEQ ID NO: 2222467 - RNA, 19 nt, Artificial Sequence
  Description of Artificial Sequence: Synthetic oligonucleotide
ccguuccuuacgggccagu

SEQ ID NO: 2222468 - RNA, 19 nt, Artificial Sequence
  Description of Artificial Sequence: Synthetic oligonucleotide
uuaguguagacaaacaugg

SEQ ID NO: 2222469 - RNA, 19 nt, Artificial Sequence
  Description of Artificial Sequence: Synthetic oligonucleotide
agaguuaagaccucugacc

SEQ ID NO: 2222470 - RNA, 19 nt, Artificial Sequence
  Description of Artificial Sequence: Synthetic oligonucleotide
aacuccaaggaguagagag

SEQ ID NO: 2222471 - RNA, 19 nt, Artificial Sequence
  Description of Artificial Sequence: Synthetic oligonucleotide
aagacaguccugcaguggc

SEQ ID NO: 2222472 - RNA, 19 nt, Artificial Sequence
  Description of Artificial Sequence: Synthetic oligonucleotide
ucaaagagucgcaagacag

SEQ ID NO: 2222473 - RNA, 19 nt, Artificial Sequence
  Description of Artificial Sequence: Synthetic oligonucleotide
uuguugauaacccacagua

SEQ ID NO: 2222474 - RNA, 19 nt, Artificial Sequence
  Description of Artificial Sequence: Synthetic oligonucleotide
aguaucuucuaccugccac

SEQ ID NO: 2222475 - RNA, 19 nt, Artificial Sequence
  Description of Artificial Sequence: Synthetic oligonucleotide
uguuacucaggacagacaa

SEQ ID NO: 2222476 - RNA, 19 nt, Artificial Sequence
  Description of Artificial Sequence: Synthetic oligonucleotide
gauaccaccagcaaucgcc

SEQ ID NO: 2222477 - RNA, 19 nt, Artificial Sequence
  Description of Artificial Sequence: Synthetic oligonucleotide
acagacaacaaucggauga

SEQ ID NO: 2222478 - RNA, 19 nt, Artificial Sequence
  Description of Artificial Sequence: Synthetic oligonucleotide
ucauaugccccuuacuucc

SEQ ID NO: 2222479 - RNA, 19 nt, Artificial Sequence
  Description of Artificial Sequence: Synthetic oligonucleotide
aaagagucgcaagacaguc

SEQ ID NO: 2222480 - RNA, 19 nt, Artificial Sequence
  Description of Artificial Sequence: Synthetic oligonucleotide
gacaugcucacauggauag

SEQ ID NO: 2222481 - RNA, 19 nt, Artificial Sequence
  Description of Artificial Sequence: Synthetic oligonucleotide
uuauggauguaucuuuggc

SEQ ID NO: 2222482 - RNA, 19 nt, Artificial Sequence
  Description of Artificial Sequence: Synthetic oligonucleotide
uggauaguacagcugauca

SEQ ID NO: 2222483 - RNA, 19 nt, Artificial Sequence
  Description of Artificial Sequence: Synthetic oligonucleotide
aaaugggagguucuagcag

SEQ ID NO: 2222484 - RNA, 19 nt, Artificial Sequence
  Description of Artificial Sequence: Synthetic oligonucleotide
gaaucugagccuuuuguug

SEQ ID NO: 2222485 - RNA, 19 nt, Artificial Sequence
  Description of Artificial Sequence: Synthetic oligonucleotide
aacaaucggaugaagaugu

SEQ ID NO: 2222486 - RNA, 19 nt, Artificial Sequence
  Description of Artificial Sequence: Synthetic oligonucleotide
cacucugggaaucugagcc

SEQ ID NO: 2222487 - RNA, 19 nt, Artificial Sequence
  Description of Artificial Sequence: Synthetic oligonucleotide
aagcgacaugcucacaugg

SEQ ID NO: 2222488 - RNA, 19 nt, Artificial Sequence
  Description of Artificial Sequence: Synthetic oligonucleotide
guguagacaaacauggccg

SEQ ID NO: 2222489 - RNA, 19 nt, Artificial Sequence
  Description of Artificial Sequence: Synthetic oligonucleotide
ucaaaugggagguucuagc

SEQ ID NO: 2222490 - RNA, 19 nt, Artificial Sequence
  Description of Artificial Sequence: Synthetic oligonucleotide
ucugucuuagcuucagugc

SEQ ID NO: 2222491 - RNA, 19 nt, Artificial Sequence
  Description of Artificial Sequence: Synthetic oligonucleotide
acauggauaguacagcuga

SEQ ID NO: 2222492 - RNA, 19 nt, Artificial Sequence
  Description of Artificial Sequence: Synthetic oligonucleotide
uguagacaaacauggccgg

SEQ ID NO: 2222493 - RNA, 19 nt, Artificial Sequence
  Description of Artificial Sequence: Synthetic oligonucleotide
auuucagaccugcugggac

SEQ ID NO: 2222494 - RNA, 19 nt, Artificial Sequence
  Description of Artificial Sequence: Synthetic oligonucleotide
uugauaacccacaguaucu

SEQ ID NO: 2222495 - RNA, 19 nt, Artificial Sequence
  Description of Artificial Sequence: Synthetic oligonucleotide
ucuucuaccugccacucca

SEQ ID NO: 2222496 - RNA, 19 nt, Artificial Sequence
  Description of Artificial Sequence: Synthetic oligonucleotide
guugauaacccacaguauc

SEQ ID NO: 2222497 - RNA, 19 nt, Artificial Sequence
  Description of Artificial Sequence: Synthetic oligonucleotide
gaugguacccaugaggccc

SEQ ID NO: 2222498 - RNA, 19 nt, Artificial Sequence
  Description of Artificial Sequence: Synthetic oligonucleotide
gacaccaccgacgagcugg

SEQ ID NO: 2222499 - RNA, 19 nt, Artificial Sequence
  Description of Artificial Sequence: Synthetic oligonucleotide
ucuaccugccacuccaggg

SEQ ID NO: 2222500 - RNA, 19 nt, Artificial Sequence
  Description of Artificial Sequence: Synthetic oligonucleotide
acccacaguaucuucuacc

SEQ ID NO: 2222501 - RNA, 19 nt, Artificial Sequence
  Description of Artificial Sequence: Synthetic oligonucleotide
uacugcuuaguguagacaa

SEQ ID NO: 2222502 - RNA, 19 nt, Artificial Sequence
  Description of Artificial Sequence: Synthetic oligonucleotide
guagagagagaauccagag

SEQ ID NO: 2222503 - RNA, 19 nt, Artificial Sequence
  Description of Artificial Sequence: Synthetic oligonucleotide
acaacaaucggaugaagau

SEQ ID NO: 2222504 - RNA, 19 nt, Artificial Sequence
  Description of Artificial Sequence: Synthetic oligonucleotide
ugcucaguguccaccaccg

SEQ ID NO: 2222505 - RNA, 19 nt, Artificial Sequence
  Description of Artificial Sequence: Synthetic oligonucleotide
cuugcuucugggcagcugg

SEQ ID NO: 2222506 - RNA, 19 nt, Artificial Sequence
  Description of Artificial Sequence: Synthetic oligonucleotide
gagaugguacccaugaggc

SEQ ID NO: 2222507 - RNA, 19 nt, Artificial Sequence
  Description of Artificial Sequence: Synthetic oligonucleotide
uagaguuaagaccucugac

SEQ ID NO: 2222508 - RNA, 19 nt, Artificial Sequence
  Description of Artificial Sequence: Synthetic oligonucleotide
aaucggaugaagauguccu

SEQ ID NO: 2222509 - RNA, 19 nt, Artificial Sequence
  Description of Artificial Sequence: Synthetic oligonucleotide
ugucuuagcuucagugccg

SEQ ID NO: 2222510 - RNA, 19 nt, Artificial Sequence
  Description of Artificial Sequence: Synthetic oligonucleotide
caggcaugccaucaaaugg

SEQ ID NO: 2222511 - RNA, 19 nt, Artificial Sequence
  Description of Artificial Sequence: Synthetic oligonucleotide
uuuguugauaacccacagu

SEQ ID NO: 2222512 - RNA, 19 nt, Artificial Sequence
  Description of Artificial Sequence: Synthetic oligonucleotide
guuauggauguaucuuugg

SEQ ID NO: 2222513 - RNA, 19 nt, Artificial Sequence
  Description of Artificial Sequence: Synthetic oligonucleotide
ucuccuaucagcccuuuuc

SEQ ID NO: 2222514 - RNA, 19 nt, Artificial Sequence
  Description of Artificial Sequence: Synthetic oligonucleotide
ucaggcaugccaucaaaug

SEQ ID NO: 2222515 - RNA, 19 nt, Artificial Sequence
  Description of Artificial Sequence: Synthetic oligonucleotide
gagccuuuuguugauaacc

SEQ ID NO: 2222516 - RNA, 19 nt, Artificial Sequence
  Description of Artificial Sequence: Synthetic oligonucleotide
agucgcaagacaguccugc

SEQ ID NO: 2222517 - RNA, 19 nt, Artificial Sequence
  Description of Artificial Sequence: Synthetic oligonucleotide
ucaguguccaccaccgagc

SEQ ID NO: 2222518 - RNA, 19 nt, Artificial Sequence
  Description of Artificial Sequence: Synthetic oligonucleotide
cugucuuagcuucagugcc

SEQ ID NO: 2222519 - RNA, 19 nt, Artificial Sequence
  Description of Artificial Sequence: Synthetic oligonucleotide
ugcugaguagaguuaagac

SEQ ID NO: 2222520 - RNA, 19 nt, Artificial Sequence
  Description of Artificial Sequence: Synthetic oligonucleotide
cuggagugcacaguuaugg

SEQ ID NO: 2222521 - RNA, 19 nt, Artificial Sequence
  Description of Artificial Sequence: Synthetic oligonucleotide
agagucgcaagacaguccu

SEQ ID NO: 2222522 - RNA, 19 nt, Artificial Sequence
  Description of Artificial Sequence: Synthetic oligonucleotide
ucacauggauaguacagcu

SEQ ID NO: 2222523 - RNA, 19 nt, Artificial Sequence
  Description of Artificial Sequence: Synthetic oligonucleotide
gcugaguagaguuaagacc

SEQ ID NO: 2222524 - RNA, 19 nt, Artificial Sequence
  Description of Artificial Sequence: Synthetic oligonucleotide
aggaguagagagagaaucc

SEQ ID NO: 2222525 - RNA, 19 nt, Artificial Sequence
  Description of Artificial Sequence: Synthetic oligonucleotide
agaugguacccaugaggcc

SEQ ID NO: 2222526 - RNA, 19 nt, Artificial Sequence
  Description of Artificial Sequence: Synthetic oligonucleotide
ucaucaagagcugucugcc

SEQ ID NO: 2222527 - RNA, 19 nt, Artificial Sequence
  Description of Artificial Sequence: Synthetic oligonucleotide
aguacagcugaucagccau

SEQ ID NO: 2222528 - RNA, 19 nt, Artificial Sequence
  Description of Artificial Sequence: Synthetic oligonucleotide
aacccacaguaucuucuac

SEQ ID NO: 2222529 - RNA, 19 nt, Artificial Sequence
  Description of Artificial Sequence: Synthetic oligonucleotide
cuuagcuucagugccgucc

SEQ ID NO: 2222530 - RNA, 19 nt, Artificial Sequence
  Description of Artificial Sequence: Synthetic oligonucleotide
aguuaagaccucugaccac

SEQ ID NO: 2222531 - RNA, 19 nt, Artificial Sequence
  Description of Artificial Sequence: Synthetic oligonucleotide
agcagcccaagcgacaugc

SEQ ID NO: 2222532 - RNA, 19 nt, Artificial Sequence
  Description of Artificial Sequence: Synthetic oligonucleotide
uuagcuucagugccgucca

SEQ ID NO: 2222533 - RNA, 19 nt, Artificial Sequence
  Description of Artificial Sequence: Synthetic oligonucleotide
aagagucgcaagacagucc

SEQ ID NO: 2222534 - RNA, 19 nt, Artificial Sequence
  Description of Artificial Sequence: Synthetic oligonucleotide
ucucccacucaccuucagg

SEQ ID NO: 2222535 - RNA, 19 nt, Artificial Sequence
  Description of Artificial Sequence: Synthetic oligonucleotide
acuaggacaccaccgacga

SEQ ID NO: 2222536 - RNA, 19 nt, Artificial Sequence
  Description of Artificial Sequence: Synthetic oligonucleotide
auagcccuccgcuugcuuc

SEQ ID NO: 2222537 - RNA, 19 nt, Artificial Sequence
  Description of Artificial Sequence: Synthetic oligonucleotide
ugaaacccuagcugggacc

SEQ ID NO: 2222538 - RNA, 19 nt, Artificial Sequence
  Description of Artificial Sequence: Synthetic oligonucleotide
ugccccuuacuucccaagg

SEQ ID NO: 2222539 - RNA, 19 nt, Artificial Sequence
  Description of Artificial Sequence: Synthetic oligonucleotide
cauggccggaucaucaaag

SEQ ID NO: 2222540 - RNA, 19 nt, Artificial Sequence
  Description of Artificial Sequence: Synthetic oligonucleotide
ugcuuaguguagacaaaca

SEQ ID NO: 2222541 - RNA, 19 nt, Artificial Sequence
  Description of Artificial Sequence: Synthetic oligonucleotide
aaguggccagcccacagga

SEQ ID NO: 2222542 - RNA, 19 nt, Artificial Sequence
  Description of Artificial Sequence: Synthetic oligonucleotide
accaccagcaaucgccuuc

SEQ ID NO: 2222543 - RNA, 19 nt, Artificial Sequence
  Description of Artificial Sequence: Synthetic oligonucleotide
cucaguguccaccaccgag

SEQ ID NO: 2222544 - RNA, 19 nt, Artificial Sequence
  Description of Artificial Sequence: Synthetic oligonucleotide
aggcaugccaucaaauggg

SEQ ID NO: 2222545 - RNA, 19 nt, Artificial Sequence
  Description of Artificial Sequence: Synthetic oligonucleotide
ucgccuucccauuucagac

SEQ ID NO: 2222546 - RNA, 19 nt, Artificial Sequence
  Description of Artificial Sequence: Synthetic oligonucleotide
gggacauuguuccacuagg

SEQ ID NO: 2222547 - RNA, 19 nt, Artificial Sequence
  Description of Artificial Sequence: Synthetic oligonucleotide
ugagaucuccuaucagccc

SEQ ID NO: 2222548 - RNA, 19 nt, Artificial Sequence
  Description of Artificial Sequence: Synthetic oligonucleotide
cuccuaucagcccuuuucc

SEQ ID NO: 2222549 - RNA, 19 nt, Artificial Sequence
  Description of Artificial Sequence: Synthetic oligonucleotide
uguugauaacccacaguau

SEQ ID NO: 2222550 - RNA, 19 nt, Artificial Sequence
  Description of Artificial Sequence: Synthetic oligonucleotide
uggccggaucaucaaagag

SEQ ID NO: 2222551 - RNA, 19 nt, Artificial Sequence
  Description of Artificial Sequence: Synthetic oligonucleotide
ucgcaagacaguccugcag

SEQ ID NO: 2222552 - RNA, 19 nt, Artificial Sequence
  Description of Artificial Sequence: Synthetic oligonucleotide
agcguuugccaggucagcc

SEQ ID NO: 2222553 - RNA, 19 nt, Artificial Sequence
  Description of Artificial Sequence: Synthetic oligonucleotide
ucggaugaagauguccucc

SEQ ID NO: 2222554 - RNA, 19 nt, Artificial Sequence
  Description of Artificial Sequence: Synthetic oligonucleotide
gacaacaaucggaugaaga

SEQ ID NO: 2222555 - RNA, 19 nt, Artificial Sequence
  Description of Artificial Sequence: Synthetic oligonucleotide
cuaccugccacuccagggc

SEQ ID NO: 2222556 - RNA, 19 nt, Artificial Sequence
  Description of Artificial Sequence: Synthetic oligonucleotide
auggauaguacagcugauc

SEQ ID NO: 2222557 - RNA, 19 nt, Artificial Sequence
  Description of Artificial Sequence: Synthetic oligonucleotide
cuaucagcccuuuucccac

SEQ ID NO: 2222558 - RNA, 19 nt, Artificial Sequence
  Description of Artificial Sequence: Synthetic oligonucleotide
gacaacuccaaggaguaga

SEQ ID NO: 2222559 - RNA, 19 nt, Artificial Sequence
  Description of Artificial Sequence: Synthetic oligonucleotide
cucauaugccccuuacuuc

SEQ ID NO: 2222560 - RNA, 19 nt, Artificial Sequence
  Description of Artificial Sequence: Synthetic oligonucleotide
cucacauggauaguacagc

SEQ ID NO: 2222561 - RNA, 19 nt, Artificial Sequence
  Description of Artificial Sequence: Synthetic oligonucleotide
ccugagaucuccuaucagc

SEQ ID NO: 2222562 - RNA, 19 nt, Artificial Sequence
  Description of Artificial Sequence: Synthetic oligonucleotide
guagaguuaagaccucuga

SEQ ID NO: 2222563 - RNA, 19 nt, Artificial Sequence
  Description of Artificial Sequence: Synthetic oligonucleotide
gaguagagagagaauccag

SEQ ID NO: 2222564 - RNA, 19 nt, Artificial Sequence
  Description of Artificial Sequence: Synthetic oligonucleotide
agugcacaguuauggaugu

SEQ ID NO: 2222565 - RNA, 19 nt, Artificial Sequence
  Description of Artificial Sequence: Synthetic oligonucleotide
acgagcuggcagcaauacc

SEQ ID NO: 2222566 - RNA, 19 nt, Artificial Sequence
  Description of Artificial Sequence: Synthetic oligonucleotide
acaguaucuucuaccugcc

SEQ ID NO: 2222567 - RNA, 19 nt, Artificial Sequence
  Description of Artificial Sequence: Synthetic oligonucleotide
gauaacccacaguaucuuc

SEQ ID NO: 2222568 - RNA, 19 nt, Artificial Sequence
  Description of Artificial Sequence: Synthetic oligonucleotide
caaucggaugaagaugucc

SEQ ID NO: 2222569 - RNA, 19 nt, Artificial Sequence
  Description of Artificial Sequence: Synthetic oligonucleotide
caggacagacaacaaucgg

SEQ ID NO: 2222570 - RNA, 19 nt, Artificial Sequence
  Description of Artificial Sequence: Synthetic oligonucleotide
aguagagagagaauccaga

SEQ ID NO: 2222571 - RNA, 19 nt, Artificial Sequence
  Description of Artificial Sequence: Synthetic oligonucleotide
ugcacaguuauggauguau

SEQ ID NO: 2222572 - RNA, 19 nt, Artificial Sequence
  Description of Artificial Sequence: Synthetic oligonucleotide
guuaagaccucugaccaca

SEQ ID NO: 2222573 - RNA, 19 nt, Artificial Sequence
  Description of Artificial Sequence: Synthetic oligonucleotide
caacaaucggaugaagaug

SEQ ID NO: 2222574 - RNA, 19 nt, Artificial Sequence
  Description of Artificial Sequence: Synthetic oligonucleotide
aggacagacaacaaucgga

SEQ ID NO: 2222575 - RNA, 19 nt, Artificial Sequence
  Description of Artificial Sequence: Synthetic oligonucleotide
aucagcccuuuucccaccc

SEQ ID NO: 2222576 - RNA, 19 nt, Artificial Sequence
  Description of Artificial Sequence: Synthetic oligonucleotide
uggauguaucuuuggccag

SEQ ID NO: 2222577 - RNA, 19 nt, Artificial Sequence
  Description of Artificial Sequence: Synthetic oligonucleotide
aguuauggauguaucuuug

SEQ ID NO: 2222578 - RNA, 19 nt, Artificial Sequence
  Description of Artificial Sequence: Synthetic oligonucleotide
cuucccauuucagaccugc

SEQ ID NO: 2222579 - RNA, 19 nt, Artificial Sequence
  Description of Artificial Sequence: Synthetic oligonucleotide
uugcugaguagaguuaaga

SEQ ID NO: 2222580 - RNA, 19 nt, Artificial Sequence
  Description of Artificial Sequence: Synthetic oligonucleotide
accaccgacgagcuggcag

SEQ ID NO: 2222581 - RNA, 19 nt, Artificial Sequence
  Description of Artificial Sequence: Synthetic oligonucleotide
agugccguccacagggacc

SEQ ID NO: 2222582 - RNA, 19 nt, Artificial Sequence
  Description of Artificial Sequence: Synthetic oligonucleotide
uuuucccaccccacccagg

SEQ ID NO: 2222583 - RNA, 19 nt, Artificial Sequence
  Description of Artificial Sequence: Synthetic oligonucleotide
uucaggcaugccaucaaau

SEQ ID NO: 2222584 - RNA, 19 nt, Artificial Sequence
  Description of Artificial Sequence: Synthetic oligonucleotide
uccgcuugcuucugggcag

SEQ ID NO: 2222585 - RNA, 19 nt, Artificial Sequence
  Description of Artificial Sequence: Synthetic oligonucleotide
aucgccuucccauuucaga

SEQ ID NO: 2222586 - RNA, 19 nt, Artificial Sequence
  Description of Artificial Sequence: Synthetic oligonucleotide
caggccauacugcuuagug

SEQ ID NO: 2222587 - RNA, 19 nt, Artificial Sequence
  Description of Artificial Sequence: Synthetic oligonucleotide
caaaugggagguucuagca

SEQ ID NO: 2222588 - RNA, 19 nt, Artificial Sequence
  Description of Artificial Sequence: Synthetic oligonucleotide
caucaaagagucgcaagac

SEQ ID NO: 2222589 - RNA, 19 nt, Artificial Sequence
  Description of Artificial Sequence: Synthetic oligonucleotide
cucaccuucaggcaugcca

SEQ ID NO: 2222590 - RNA, 19 nt, Artificial Sequence
  Description of Artificial Sequence: Synthetic oligonucleotide
guuccacuaggacaccacc

SEQ ID NO: 2222591 - RNA, 19 nt, Artificial Sequence
  Description of Artificial Sequence: Synthetic oligonucleotide
ugauaccaccagcaaucgc

SEQ ID NO: 2222592 - RNA, 19 nt, Artificial Sequence
  Description of Artificial Sequence: Synthetic oligonucleotide
gaccuuggcaucagcagcc

SEQ ID NO: 2222593 - RNA, 19 nt, Artificial Sequence
  Description of Artificial Sequence: Synthetic oligonucleotide
acaguuauggauguaucuu

SEQ ID NO: 2222594 - RNA, 19 nt, Artificial Sequence
  Description of Artificial Sequence: Synthetic oligonucleotide
gacagacaacaaucggaug

SEQ ID NO: 2222595 - RNA, 19 nt, Artificial Sequence
  Description of Artificial Sequence: Synthetic oligonucleotide
ggauaguacagcugaucag

SEQ ID NO: 2222596 - RNA, 19 nt, Artificial Sequence
  Description of Artificial Sequence: Synthetic oligonucleotide
cacauggauaguacagcug

SEQ ID NO: 2222597 - RNA, 19 nt, Artificial Sequence
  Description of Artificial Sequence: Synthetic oligonucleotide
ccuuuuguugauaacccac

SEQ ID NO: 2222598 - RNA, 19 nt, Artificial Sequence
  Description of Artificial Sequence: Synthetic oligonucleotide
acagcuacuggagugcaca

SEQ ID NO: 2222599 - RNA, 19 nt, Artificial Sequence
  Description of Artificial Sequence: Synthetic oligonucleotide
aacauggccggaucaucaa

SEQ ID NO: 2222600 - RNA, 19 nt, Artificial Sequence
  Description of Artificial Sequence: Synthetic oligonucleotide
gagggaaguggccagccca

SEQ ID NO: 2222601 - RNA, 19 nt, Artificial Sequence
  Description of Artificial Sequence: Synthetic oligonucleotide
uggagugcacaguuaugga

SEQ ID NO: 2222602 - RNA, 19 nt, Artificial Sequence
  Description of Artificial Sequence: Synthetic oligonucleotide
agccaaggagggaaguggc

SEQ ID NO: 2222603 - RNA, 19 nt, Artificial Sequence
  Description of Artificial Sequence: Synthetic oligonucleotide
uccucauaugccccuuacu

SEQ ID NO: 2222604 - RNA, 19 nt, Artificial Sequence
  Description of Artificial Sequence: Synthetic oligonucleotide
acaacuccaaggaguagag

SEQ ID NO: 2222605 - RNA, 19 nt, Artificial Sequence
  Description of Artificial Sequence: Synthetic oligonucleotide
gauguaucuuuggccagug

SEQ ID NO: 2222606 - RNA, 19 nt, Artificial Sequence
  Description of Artificial Sequence: Synthetic oligonucleotide
uccauagcccuccgcuugc

SEQ ID NO: 2222607 - RNA, 19 nt, Artificial Sequence
  Description of Artificial Sequence: Synthetic oligonucleotide
guacccaugaggcccacca

SEQ ID NO: 2222608 - RNA, 19 nt, Artificial Sequence
  Description of Artificial Sequence: Synthetic oligonucleotide
uaucuuuggccaguggcuc

SEQ ID NO: 2222609 - RNA, 19 nt, Artificial Sequence
  Description of Artificial Sequence: Synthetic oligonucleotide
ugagccuuuuguugauaac

SEQ ID NO: 2222610 - RNA, 19 nt, Artificial Sequence
  Description of Artificial Sequence: Synthetic oligonucleotide
uaccugccacuccagggcc

SEQ ID NO: 2222611 - RNA, 19 nt, Artificial Sequence
  Description of Artificial Sequence: Synthetic oligonucleotide
ggugaaggcgccugugggg

SEQ ID NO: 2222612 - RNA, 19 nt, Artificial Sequence
  Description of Artificial Sequence: Synthetic oligonucleotide
uagacaaacauggccggau

SEQ ID NO: 2222613 - RNA, 19 nt, Artificial Sequence
  Description of Artificial Sequence: Synthetic oligonucleotide
agcugucugccucagccgu

SEQ ID NO: 2222614 - RNA, 19 nt, Artificial Sequence
  Description of Artificial Sequence: Synthetic oligonucleotide
caagacaguccugcagugg

SEQ ID NO: 2222615 - RNA, 19 nt, Artificial Sequence
  Description of Artificial Sequence: Synthetic oligonucleotide
caagcgacaugcucacaug

SEQ ID NO: 2222616 - RNA, 19 nt, Artificial Sequence
  Description of Artificial Sequence: Synthetic oligonucleotide
caucagcagcccaagcgac

SEQ ID NO: 2222617 - RNA, 19 nt, Artificial Sequence
  Description of Artificial Sequence: Synthetic oligonucleotide
gccugauacaugcugagga

SEQ ID NO: 2222618 - RNA, 19 nt, Artificial Sequence
  Description of Artificial Sequence: Synthetic oligonucleotide
gggagguucuagcagaguc

SEQ ID NO: 2222619 - RNA, 19 nt, Artificial Sequence
  Description of Artificial Sequence: Synthetic oligonucleotide
cuccauagcccuccgcuug

SEQ ID NO: 2222620 - RNA, 19 nt, Artificial Sequence
  Description of Artificial Sequence: Synthetic oligonucleotide
cugaaacccuagcugggac

SEQ ID NO: 2222621 - RNA, 19 nt, Artificial Sequence
  Description of Artificial Sequence: Synthetic oligonucleotide
uacccaugaggcccaccag

SEQ ID NO: 2222622 - RNA, 19 nt, Artificial Sequence
  Description of Artificial Sequence: Synthetic oligonucleotide
uuggcaucagcagcccaag

SEQ ID NO: 2222623 - RNA, 19 nt, Artificial Sequence
  Description of Artificial Sequence: Synthetic oligonucleotide
gugcucaguguccaccacc

SEQ ID NO: 2222624 - RNA, 19 nt, Artificial Sequence
  Description of Artificial Sequence: Synthetic oligonucleotide
cagccugauacaugcugag

SEQ ID NO: 2222625 - RNA, 19 nt, Artificial Sequence
  Description of Artificial Sequence: Synthetic oligonucleotide
aaucgccuucccauuucag

SEQ ID NO: 2222626 - RNA, 19 nt, Artificial Sequence
  Description of Artificial Sequence: Synthetic oligonucleotide
uuaagaccucugaccacau

SEQ ID NO: 2222627 - RNA, 19 nt, Artificial Sequence
  Description of Artificial Sequence: Synthetic oligonucleotide
ucagccgugccgccagccc

SEQ ID NO: 2222628 - RNA, 19 nt, Artificial Sequence
  Description of Artificial Sequence: Synthetic oligonucleotide
acagcguuugccaggucag

SEQ ID NO: 2222629 - RNA, 19 nt, Artificial Sequence
  Description of Artificial Sequence: Synthetic oligonucleotide
uacagcugaucagccaugu

SEQ ID NO: 2222630 - RNA, 19 nt, Artificial Sequence
  Description of Artificial Sequence: Synthetic oligonucleotide
uaucagcccuuuucccacc

SEQ ID NO: 2222631 - RNA, 19 nt, Artificial Sequence
  Description of Artificial Sequence: Synthetic oligonucleotide
ugauaacccacaguaucuu

SEQ ID NO: 2222632 - RNA, 19 nt, Artificial Sequence
  Description of Artificial Sequence: Synthetic oligonucleotide
aguggcucccacucuggga

SEQ ID NO: 2222633 - RNA, 19 nt, Artificial Sequence
  Description of Artificial Sequence: Synthetic oligonucleotide
ugcugggacauuguuccac

SEQ ID NO: 2222634 - RNA, 19 nt, Artificial Sequence
  Description of Artificial Sequence: Synthetic oligonucleotide
auggccggaucaucaaaga

SEQ ID NO: 2222635 - RNA, 19 nt, Artificial Sequence
  Description of Artificial Sequence: Synthetic oligonucleotide
agcccaagcgacaugcuca

SEQ ID NO: 2222636 - RNA, 19 nt, Artificial Sequence
  Description of Artificial Sequence: Synthetic oligonucleotide
ccugauacaugcugaggag

SEQ ID NO: 2222637 - RNA, 19 nt, Artificial Sequence
  Description of Artificial Sequence: Synthetic oligonucleotide
ggguccuccucauaugccc

SEQ ID NO: 2222638 - RNA, 19 nt, Artificial Sequence
  Description of Artificial Sequence: Synthetic oligonucleotide
guaucuucuaccugccacu

SEQ ID NO: 2222639 - RNA, 19 nt, Artificial Sequence
  Description of Artificial Sequence: Synthetic oligonucleotide
ccucugaccacauccuugc

SEQ ID NO: 2222640 - RNA, 19 nt, Artificial Sequence
  Description of Artificial Sequence: Synthetic oligonucleotide
gcagcguccaccuggagga

SEQ ID NO: 2222641 - RNA, 19 nt, Artificial Sequence
  Description of Artificial Sequence: Synthetic oligonucleotide
cggaucaucaaagagucgc

SEQ ID NO: 2222642 - RNA, 19 nt, Artificial Sequence
  Description of Artificial Sequence: Synthetic oligonucleotide
cugacaacuccaaggagua

SEQ ID NO: 2222643 - RNA, 19 nt, Artificial Sequence
  Description of Artificial Sequence: Synthetic oligonucleotide
uguggggcuccgcagcauc

SEQ ID NO: 2222644 - RNA, 19 nt, Artificial Sequence
  Description of Artificial Sequence: Synthetic oligonucleotide
guggcucccacucugggaa

SEQ ID NO: 2222645 - RNA, 19 nt, Artificial Sequence
  Description of Artificial Sequence: Synthetic oligonucleotide
agccugauacaugcugagg

SEQ ID NO: 2222646 - RNA, 19 nt, Artificial Sequence
  Description of Artificial Sequence: Synthetic oligonucleotide
ucccacucaccuucaggca

SEQ ID NO: 2222647 - RNA, 19 nt, Artificial Sequence
  Description of Artificial Sequence: Synthetic oligonucleotide
agacaacaaucggaugaag

SEQ ID NO: 2222648 - RNA, 19 nt, Artificial Sequence
  Description of Artificial Sequence: Synthetic oligonucleotide
ggccauacugcuuagugua

SEQ ID NO: 2222649 - RNA, 19 nt, Artificial Sequence
  Description of Artificial Sequence: Synthetic oligonucleotide
uucccauuucagaccugcu

SEQ ID NO: 2222650 - RNA, 19 nt, Artificial Sequence
  Description of Artificial Sequence: Synthetic oligonucleotide
ugacaacuccaaggaguag

SEQ ID NO: 2222651 - RNA, 19 nt, Artificial Sequence
  Description of Artificial Sequence: Synthetic oligonucleotide
uaagaccucugaccacauc

SEQ ID NO: 2222652 - RNA, 19 nt, Artificial Sequence
  Description of Artificial Sequence: Synthetic oligonucleotide
cacaguuauggauguaucu

SEQ ID NO: 2222653 - RNA, 19 nt, Artificial Sequence
  Description of Artificial Sequence: Synthetic oligonucleotide
cagaccugcugggacauug

SEQ ID NO: 2222654 - RNA, 19 nt, Artificial Sequence
  Description of Artificial Sequence: Synthetic oligonucleotide
auaugccccuuacuuccca

SEQ ID NO: 2222655 - RNA, 19 nt, Artificial Sequence
  Description of Artificial Sequence: Synthetic oligonucleotide
agccagguugcugaguaga

SEQ ID NO: 2222656 - RNA, 19 nt, Artificial Sequence
  Description of Artificial Sequence: Synthetic oligonucleotide
ucagcccuuuucccacccc

SEQ ID NO: 2222657 - RNA, 19 nt, Artificial Sequence
  Description of Artificial Sequence: Synthetic oligonucleotide
uccugcaguggcugagcug

SEQ ID NO: 2222658 - RNA, 19 nt, Artificial Sequence
  Description of Artificial Sequence: Synthetic oligonucleotide
cugagccuuuuguugauaa

SEQ ID NO: 2222659 - RNA, 19 nt, Artificial Sequence
  Description of Artificial Sequence: Synthetic oligonucleotide
agcaaucgccuucccauuu

SEQ ID NO: 2222660 - RNA, 19 nt, Artificial Sequence
  Description of Artificial Sequence: Synthetic oligonucleotide
gccccuuacuucccaaggg

SEQ ID NO: 2222661 - RNA, 19 nt, Artificial Sequence
  Description of Artificial Sequence: Synthetic oligonucleotide
acauggccggaucaucaaa

SEQ ID NO: 2222662 - RNA, 19 nt, Artificial Sequence
  Description of Artificial Sequence: Synthetic oligonucleotide
ggaaguggccagcccacag

SEQ ID NO: 2222663 - RNA, 19 nt, Artificial Sequence
  Description of Artificial Sequence: Synthetic oligonucleotide
caugcucacauggauagua

SEQ ID NO: 2222664 - RNA, 19 nt, Artificial Sequence
  Description of Artificial Sequence: Synthetic oligonucleotide
ccccuuacuucccaagggg

SEQ ID NO: 2222665 - RNA, 19 nt, Artificial Sequence
  Description of Artificial Sequence: Synthetic oligonucleotide
caugaggcccaccagccaa

SEQ ID NO: 2222666 - RNA, 19 nt, Artificial Sequence
  Description of Artificial Sequence: Synthetic oligonucleotide
aaggcgccuguggggcucc

SEQ ID NO: 2222667 - RNA, 19 nt, Artificial Sequence
  Description of Artificial Sequence: Synthetic oligonucleotide
guaucuuuggccaguggcu

SEQ ID NO: 2222668 - RNA, 19 nt, Artificial Sequence
  Description of Artificial Sequence: Synthetic oligonucleotide
ccgagcagcguccaccugg

SEQ ID NO: 2222669 - RNA, 19 nt, Artificial Sequence
  Description of Artificial Sequence: Synthetic oligonucleotide
cagcuacuggagugcacag

SEQ ID NO: 2222670 - RNA, 19 nt, Artificial Sequence
  Description of Artificial Sequence: Synthetic oligonucleotide
acaaucggaugaagauguc

SEQ ID NO: 2222671 - RNA, 19 nt, Artificial Sequence
  Description of Artificial Sequence: Synthetic oligonucleotide
uucagaccugcugggacau

SEQ ID NO: 2222672 - RNA, 19 nt, Artificial Sequence
  Description of Artificial Sequence: Synthetic oligonucleotide
cuccgcuugcuucugggca

SEQ ID NO: 2222673 - RNA, 19 nt, Artificial Sequence
  Description of Artificial Sequence: Synthetic oligonucleotide
accaccgagcagcguccac

SEQ ID NO: 2222674 - RNA, 19 nt, Artificial Sequence
  Description of Artificial Sequence: Synthetic oligonucleotide
agcuucagugccguccaca

SEQ ID NO: 2222675 - RNA, 19 nt, Artificial Sequence
  Description of Artificial Sequence: Synthetic oligonucleotide
cagcccaagcgacaugcuc

SEQ ID NO: 2222676 - RNA, 19 nt, Artificial Sequence
  Description of Artificial Sequence: Synthetic oligonucleotide
cacaggacaccucggggca

SEQ ID NO: 2222677 - RNA, 19 nt, Artificial Sequence
  Description of Artificial Sequence: Synthetic oligonucleotide
gggaccugacaacuccaag

SEQ ID NO: 2222678 - RNA, 19 nt, Artificial Sequence
  Description of Artificial Sequence: Synthetic oligonucleotide
aucagccauguuacucagg

SEQ ID NO: 2222679 - RNA, 19 nt, Artificial Sequence
  Description of Artificial Sequence: Synthetic oligonucleotide
auguuacucaggacagaca

SEQ ID NO: 2222680 - RNA, 19 nt, Artificial Sequence
  Description of Artificial Sequence: Synthetic oligonucleotide
cagguugcugaguagaguu

SEQ ID NO: 2222681 - RNA, 19 nt, Artificial Sequence
  Description of Artificial Sequence: Synthetic oligonucleotide
acaccaccgacgagcuggc

SEQ ID NO: 2222682 - RNA, 19 nt, Artificial Sequence
  Description of Artificial Sequence: Synthetic oligonucleotide
agcgacaugcucacaugga

SEQ ID NO: 2222683 - RNA, 19 nt, Artificial Sequence
  Description of Artificial Sequence: Synthetic oligonucleotide
ccaaggaguagagagagaa

SEQ ID NO: 2222684 - RNA, 19 nt, Artificial Sequence
  Description of Artificial Sequence: Synthetic oligonucleotide
guacagcugaucagccaug

SEQ ID NO: 2222685 - RNA, 19 nt, Artificial Sequence
  Description of Artificial Sequence: Synthetic oligonucleotide
cagugcucaguguccacca

SEQ ID NO: 2222686 - RNA, 19 nt, Artificial Sequence
  Description of Artificial Sequence: Synthetic oligonucleotide
caaucgccuucccauuuca

SEQ ID NO: 2222687 - RNA, 19 nt, Artificial Sequence
  Description of Artificial Sequence: Synthetic oligonucleotide
ccaccgacgagcuggcagc

SEQ ID NO: 2222688 - RNA, 19 nt, Artificial Sequence
  Description of Artificial Sequence: Synthetic oligonucleotide
ccugacaacuccaaggagu

SEQ ID NO: 2222689 - RNA, 19 nt, Artificial Sequence
  Description of Artificial Sequence: Synthetic oligonucleotide
cucggggcagccagugcac

SEQ ID NO: 2222690 - RNA, 19 nt, Artificial Sequence
  Description of Artificial Sequence: Synthetic oligonucleotide
cagacaacaaucggaugaa

SEQ ID NO: 2222691 - RNA, 19 nt, Artificial Sequence
  Description of Artificial Sequence: Synthetic oligonucleotide
guagacaaacauggccgga

SEQ ID NO: 2222692 - RNA, 19 nt, Artificial Sequence
  Description of Artificial Sequence: Synthetic oligonucleotide
caguuauggauguaucuuu

SEQ ID NO: 2222693 - RNA, 19 nt, Artificial Sequence
  Description of Artificial Sequence: Synthetic oligonucleotide
gaguagaguuaagaccucu

SEQ ID NO: 2222694 - RNA, 19 nt, Artificial Sequence
  Description of Artificial Sequence: Synthetic oligonucleotide
agcuacuggagugcacagu

SEQ ID NO: 2222695 - RNA, 19 nt, Artificial Sequence
  Description of Artificial Sequence: Synthetic oligonucleotide
cccugaaacccuagcuggg

SEQ ID NO: 2222696 - RNA, 19 nt, Artificial Sequence
  Description of Artificial Sequence: Synthetic oligonucleotide
gucgcaagacaguccugca

SEQ ID NO: 2222697 - RNA, 19 nt, Artificial Sequence
  Description of Artificial Sequence: Synthetic oligonucleotide
acugcuuaguguagacaaa

SEQ ID NO: 2222698 - RNA, 19 nt, Artificial Sequence
  Description of Artificial Sequence: Synthetic oligonucleotide
gguugcugaguagaguuaa

SEQ ID NO: 2222699 - RNA, 19 nt, Artificial Sequence
  Description of Artificial Sequence: Synthetic oligonucleotide
cauuucagaccugcuggga

SEQ ID NO: 2222700 - RNA, 19 nt, Artificial Sequence
  Description of Artificial Sequence: Synthetic oligonucleotide
gccaucaaaugggagguuc

SEQ ID NO: 2222701 - RNA, 19 nt, Artificial Sequence
  Description of Artificial Sequence: Synthetic oligonucleotide
caagagcugucugccucag

SEQ ID NO: 2222702 - RNA, 19 nt, Artificial Sequence
  Description of Artificial Sequence: Synthetic oligonucleotide
gacagcuacuggagugcac

SEQ ID NO: 2222703 - RNA, 19 nt, Artificial Sequence
  Description of Artificial Sequence: Synthetic oligonucleotide
ggaucaucaaagagucgca

SEQ ID NO: 2222704 - RNA, 19 nt, Artificial Sequence
  Description of Artificial Sequence: Synthetic oligonucleotide
ucuuagcuucagugccguc

SEQ ID NO: 2222705 - RNA, 19 nt, Artificial Sequence
  Description of Artificial Sequence: Synthetic oligonucleotide
aucagcagcccaagcgaca

SEQ ID NO: 2222706 - RNA, 19 nt, Artificial Sequence
  Description of Artificial Sequence: Synthetic oligonucleotide
agcugggcugauaccacca

SEQ ID NO: 2222707 - RNA, 19 nt, Artificial Sequence
  Description of Artificial Sequence: Synthetic oligonucleotide
gcagugcucaguguccacc

SEQ ID NO: 2222708 - RNA, 19 nt, Artificial Sequence
  Description of Artificial Sequence: Synthetic oligonucleotide
augaggcccaccagccaag

SEQ ID NO: 2222709 - RNA, 19 nt, Artificial Sequence
  Description of Artificial Sequence: Synthetic oligonucleotide
cacucaccuucaggcaugc

SEQ ID NO: 2222710 - RNA, 19 nt, Artificial Sequence
  Description of Artificial Sequence: Synthetic oligonucleotide
cagugccguccacagggac

SEQ ID NO: 2222711 - RNA, 19 nt, Artificial Sequence
  Description of Artificial Sequence: Synthetic oligonucleotide
ggaaucugagccuuuuguu

SEQ ID NO: 2222712 - RNA, 19 nt, Artificial Sequence
  Description of Artificial Sequence: Synthetic oligonucleotide
cagcccuuuucccacccca

SEQ ID NO: 2222713 - RNA, 19 nt, Artificial Sequence
  Description of Artificial Sequence: Synthetic oligonucleotide
caggacaccucggggcagc

SEQ ID NO: 2222714 - RNA, 19 nt, Artificial Sequence
  Description of Artificial Sequence: Synthetic oligonucleotide
ccacucugggaaucugagc

SEQ ID NO: 2222715 - RNA, 19 nt, Artificial Sequence
  Description of Artificial Sequence: Synthetic oligonucleotide
gcuacuggagugcacaguu

SEQ ID NO: 2222716 - RNA, 19 nt, Artificial Sequence
  Description of Artificial Sequence: Synthetic oligonucleotide
cucucccacucaccuucag

SEQ ID NO: 2222717 - RNA, 19 nt, Artificial Sequence
  Description of Artificial Sequence: Synthetic oligonucleotide
ggacagacaacaaucggau

SEQ ID NO: 2222718 - RNA, 19 nt, Artificial Sequence
  Description of Artificial Sequence: Synthetic oligonucleotide
acaugcucacauggauagu

SEQ ID NO: 2222719 - RNA, 19 nt, Artificial Sequence
  Description of Artificial Sequence: Synthetic oligonucleotide
ccucaucaagagcugucug

SEQ ID NO: 2222720 - RNA, 19 nt, Artificial Sequence
  Description of Artificial Sequence: Synthetic oligonucleotide
gaaggcgccuguggggcuc

SEQ ID NO: 2222721 - RNA, 19 nt, Artificial Sequence
  Description of Artificial Sequence: Synthetic oligonucleotide
ggccggaucaucaaagagu

SEQ ID NO: 2222722 - RNA, 19 nt, Artificial Sequence
  Description of Artificial Sequence: Synthetic oligonucleotide
augguacccaugaggccca

SEQ ID NO: 2222723 - RNA, 19 nt, Artificial Sequence
  Description of Artificial Sequence: Synthetic oligonucleotide
gagucgcaagacaguccug

SEQ ID NO: 2222724 - RNA, 19 nt, Artificial Sequence
  Description of Artificial Sequence: Synthetic oligonucleotide
gcaaucgccuucccauuuc

SEQ ID NO: 2222725 - RNA, 19 nt, Artificial Sequence
  Description of Artificial Sequence: Synthetic oligonucleotide
cguuugccaggucagccag

SEQ ID NO: 2222726 - RNA, 19 nt, Artificial Sequence
  Description of Artificial Sequence: Synthetic oligonucleotide
cagcguuugccaggucagc

SEQ ID NO: 2222727 - RNA, 19 nt, Artificial Sequence
  Description of Artificial Sequence: Synthetic oligonucleotide
caguaucuucuaccugcca

SEQ ID NO: 2222728 - RNA, 19 nt, Artificial Sequence
  Description of Artificial Sequence: Synthetic oligonucleotide
gcaugccaucaaaugggag

SEQ ID NO: 2222729 - RNA, 19 nt, Artificial Sequence
  Description of Artificial Sequence: Synthetic oligonucleotide
agguucuagcagaguccuc

SEQ ID NO: 2222730 - RNA, 19 nt, Artificial Sequence
  Description of Artificial Sequence: Synthetic oligonucleotide
caccuucaggcaugccauc

SEQ ID NO: 2222731 - RNA, 19 nt, Artificial Sequence
  Description of Artificial Sequence: Synthetic oligonucleotide
caucaaaugggagguucua

SEQ ID NO: 2222732 - RNA, 19 nt, Artificial Sequence
  Description of Artificial Sequence: Synthetic oligonucleotide
ccacucaccuucaggcaug

SEQ ID NO: 2222733 - RNA, 19 nt, Artificial Sequence
  Description of Artificial Sequence: Synthetic oligonucleotide
gccuguggggcuccgcagc

SEQ ID NO: 2222734 - RNA, 19 nt, Artificial Sequence
  Description of Artificial Sequence: Synthetic oligonucleotide
gcacaguuauggauguauc

SEQ ID NO: 2222735 - RNA, 19 nt, Artificial Sequence
  Description of Artificial Sequence: Synthetic oligonucleotide
gcguuugccaggucagcca

SEQ ID NO: 2222736 - RNA, 19 nt, Artificial Sequence
  Description of Artificial Sequence: Synthetic oligonucleotide
cuacuggagugcacaguua

SEQ ID NO: 2222737 - RNA, 19 nt, Artificial Sequence
  Description of Artificial Sequence: Synthetic oligonucleotide
ccggaucaucaaagagucg

SEQ ID NO: 2222738 - RNA, 19 nt, Artificial Sequence
  Description of Artificial Sequence: Synthetic oligonucleotide
ccaccagcaaucgccuucc

SEQ ID NO: 2222739 - RNA, 19 nt, Artificial Sequence
  Description of Artificial Sequence: Synthetic oligonucleotide
ccagugcacagcguuugcc

SEQ ID NO: 2222740 - RNA, 19 nt, Artificial Sequence
  Description of Artificial Sequence: Synthetic oligonucleotide
ucggggcagccagugcaca

SEQ ID NO: 2222741 - RNA, 19 nt, Artificial Sequence
  Description of Artificial Sequence: Synthetic oligonucleotide
ccaccaccgagcagcgucc

SEQ ID NO: 2222742 - RNA, 19 nt, Artificial Sequence
  Description of Artificial Sequence: Synthetic oligonucleotide
cccuccgcuugcuucuggg

SEQ ID NO: 2222743 - RNA, 19 nt, Artificial Sequence
  Description of Artificial Sequence: Synthetic oligonucleotide
gcccaagcgacaugcucac

SEQ ID NO: 2222744 - RNA, 19 nt, Artificial Sequence
  Description of Artificial Sequence: Synthetic oligonucleotide
caaggaguagagagagaau

SEQ ID NO: 2222745 - RNA, 19 nt, Artificial Sequence
  Description of Artificial Sequence: Synthetic oligonucleotide
cauggauaguacagcugau

SEQ ID NO: 2222746 - RNA, 19 nt, Artificial Sequence
  Description of Artificial Sequence: Synthetic oligonucleotide
agguugcugaguagaguua

SEQ ID NO: 2222747 - RNA, 19 nt, Artificial Sequence
  Description of Artificial Sequence: Synthetic oligonucleotide
ggcugauaccaccagcaau

SEQ ID NO: 2222748 - RNA, 19 nt, Artificial Sequence
  Description of Artificial Sequence: Synthetic oligonucleotide
agaucuccuaucagcccuu

SEQ ID NO: 2222749 - RNA, 19 nt, Artificial Sequence
  Description of Artificial Sequence: Synthetic oligonucleotide
accgagcagcguccaccug

SEQ ID NO: 2222750 - RNA, 19 nt, Artificial Sequence
  Description of Artificial Sequence: Synthetic oligonucleotide
ggcaugccaucaaauggga

SEQ ID NO: 2222751 - RNA, 19 nt, Artificial Sequence
  Description of Artificial Sequence: Synthetic oligonucleotide
caucaagagcugucugccu

SEQ ID NO: 2222752 - RNA, 19 nt, Artificial Sequence
  Description of Artificial Sequence: Synthetic oligonucleotide
ccuccgcuugcuucugggc

SEQ ID NO: 2222753 - RNA, 19 nt, Artificial Sequence
  Description of Artificial Sequence: Synthetic oligonucleotide
ccuagcugggaccugagau

SEQ ID NO: 2222754 - RNA, 19 nt, Artificial Sequence
  Description of Artificial Sequence: Synthetic oligonucleotide
caccucggggcagccagug

SEQ ID NO: 2222755 - RNA, 19 nt, Artificial Sequence
  Description of Artificial Sequence: Synthetic oligonucleotide
gucuuagcuucagugccgu

SEQ ID NO: 2222756 - RNA, 19 nt, Artificial Sequence
  Description of Artificial Sequence: Synthetic oligonucleotide
gggguccuccucauaugcc

SEQ ID NO: 2222757 - RNA, 19 nt, Artificial Sequence
  Description of Artificial Sequence: Synthetic oligonucleotide
gccagugcacagcguuugc

SEQ ID NO: 2222758 - RNA, 19 nt, Artificial Sequence
  Description of Artificial Sequence: Synthetic oligonucleotide
caacuccaaggaguagaga

SEQ ID NO: 2222759 - RNA, 19 nt, Artificial Sequence
  Description of Artificial Sequence: Synthetic oligonucleotide
agaguccuccugggacuug

SEQ ID NO: 2222760 - RNA, 19 nt, Artificial Sequence
  Description of Artificial Sequence: Synthetic oligonucleotide
uggcucccacucugggaau

SEQ ID NO: 2222761 - RNA, 19 nt, Artificial Sequence
  Description of Artificial Sequence: Synthetic oligonucleotide
gggacuuggcaagccuggc

SEQ ID NO: 2222762 - RNA, 19 nt, Artificial Sequence
  Description of Artificial Sequence: Synthetic oligonucleotide
caccagcaaucgccuuccc

SEQ ID NO: 2222763 - RNA, 19 nt, Artificial Sequence
  Description of Artificial Sequence: Synthetic oligonucleotide
ccucggggcagccagugca

SEQ ID NO: 2222764 - RNA, 19 nt, Artificial Sequence
  Description of Artificial Sequence: Synthetic oligonucleotide
ugccacuccagggccucau

SEQ ID NO: 2222765 - RNA, 19 nt, Artificial Sequence
  Description of Artificial Sequence: Synthetic oligonucleotide
gaccucugaccacauccuu

SEQ ID NO: 2222766 - RNA, 19 nt, Artificial Sequence
  Description of Artificial Sequence: Synthetic oligonucleotide
gggaccugagaucuccuau

SEQ ID NO: 2222767 - RNA, 19 nt, Artificial Sequence
  Description of Artificial Sequence: Synthetic oligonucleotide
gcgacaugcucacauggau

SEQ ID NO: 2222768 - RNA, 19 nt, Artificial Sequence
  Description of Artificial Sequence: Synthetic oligonucleotide
ggauguaucuuuggccagu

SEQ ID NO: 2222769 - RNA, 19 nt, Artificial Sequence
  Description of Artificial Sequence: Synthetic oligonucleotide
gaccugcugggacauuguu

SEQ ID NO: 2222770 - RNA, 19 nt, Artificial Sequence
  Description of Artificial Sequence: Synthetic oligonucleotide
ccaagcgacaugcucacau

SEQ ID NO: 2222771 - RNA, 19 nt, Artificial Sequence
  Description of Artificial Sequence: Synthetic oligonucleotide
ggcagugcucaguguccac

SEQ ID NO: 2222772 - RNA, 19 nt, Artificial Sequence
  Description of Artificial Sequence: Synthetic oligonucleotide
caccgagcagcguccaccu

SEQ ID NO: 2222773 - RNA, 19 nt, Artificial Sequence
  Description of Artificial Sequence: Synthetic oligonucleotide
ggacagcuacuggagugca

SEQ ID NO: 2222774 - RNA, 19 nt, Artificial Sequence
  Description of Artificial Sequence: Synthetic oligonucleotide
ggcuccgcagcaucugucu

SEQ ID NO: 2222775 - RNA, 19 nt, Artificial Sequence
  Description of Artificial Sequence: Synthetic oligonucleotide
gggcugauaccaccagcaa

SEQ ID NO: 2222776 - RNA, 19 nt, Artificial Sequence
  Description of Artificial Sequence: Synthetic oligonucleotide
gguacccaugaggcccacc

SEQ ID NO: 2222777 - RNA, 19 nt, Artificial Sequence
  Description of Artificial Sequence: Synthetic oligonucleotide
cgcaagacaguccugcagu

SEQ ID NO: 2222778 - RNA, 19 nt, Artificial Sequence
  Description of Artificial Sequence: Synthetic oligonucleotide
gcgccuguggggcuccgca

SEQ ID NO: 2222779 - RNA, 19 nt, Artificial Sequence
  Description of Artificial Sequence: Synthetic oligonucleotide
ggacaccaccgacgagcug

SEQ ID NO: 2222780 - RNA, 19 nt, Artificial Sequence
  Description of Artificial Sequence: Synthetic oligonucleotide
ccugggguccuccucauau

SEQ ID NO: 2222781 - RNA, 19 nt, Artificial Sequence
  Description of Artificial Sequence: Synthetic oligonucleotide
cgacaugcucacauggaua

SEQ ID NO: 2222782 - RNA, 19 nt, Artificial Sequence
  Description of Artificial Sequence: Synthetic oligonucleotide
ggcaagccuggccuuggcu

SEQ ID NO: 2222783 - RNA, 19 nt, Artificial Sequence
  Description of Artificial Sequence: Synthetic oligonucleotide
ccccaggccauacugcuua

SEQ ID NO: 2222784 - RNA, 19 nt, Artificial Sequence
  Description of Artificial Sequence: Synthetic oligonucleotide
gggaggagaugguacccau

SEQ ID NO: 2222785 - RNA, 19 nt, Artificial Sequence
  Description of Artificial Sequence: Synthetic oligonucleotide
ucagaccugcugggacauu

SEQ ID NO: 2222786 - RNA, 19 nt, Artificial Sequence
  Description of Artificial Sequence: Synthetic oligonucleotide
acaccucggggcagccagu

SEQ ID NO: 2222787 - RNA, 19 nt, Artificial Sequence
  Description of Artificial Sequence: Synthetic oligonucleotide
ccagcccacaggacaccuc

SEQ ID NO: 2222788 - RNA, 19 nt, Artificial Sequence
  Description of Artificial Sequence: Synthetic oligonucleotide
accgacgagcuggcagcaa

SEQ ID NO: 2222789 - RNA, 19 nt, Artificial Sequence
  Description of Artificial Sequence: Synthetic oligonucleotide
cagcguccaccuggaggac

SEQ ID NO: 2222790 - RNA, 19 nt, Artificial Sequence
  Description of Artificial Sequence: Synthetic oligonucleotide
cuuuggccaguggcuccca

SEQ ID NO: 2222791 - RNA, 19 nt, Artificial Sequence
  Description of Artificial Sequence: Synthetic oligonucleotide
caccgacgagcuggcagca

SEQ ID NO: 2222792 - RNA, 19 nt, Artificial Sequence
  Description of Artificial Sequence: Synthetic oligonucleotide
gcucaguguccaccaccga

SEQ ID NO: 2222793 - RNA, 19 nt, Artificial Sequence
  Description of Artificial Sequence: Synthetic oligonucleotide
cagcaaucgccuucccauu

SEQ ID NO: 2222794 - RNA, 19 nt, Artificial Sequence
  Description of Artificial Sequence: Synthetic oligonucleotide
cacccaggggacagcuacu

SEQ ID NO: 2222795 - RNA, 19 nt, Artificial Sequence
  Description of Artificial Sequence: Synthetic oligonucleotide
ccauguuacucaggacaga

SEQ ID NO: 2222796 - RNA, 19 nt, Artificial Sequence
  Description of Artificial Sequence: Synthetic oligonucleotide
cccacucaccuucaggcau

SEQ ID NO: 2222797 - RNA, 19 nt, Artificial Sequence
  Description of Artificial Sequence: Synthetic oligonucleotide
gugcacaguuauggaugua

SEQ ID NO: 2222798 - RNA, 19 nt, Artificial Sequence
  Description of Artificial Sequence: Synthetic oligonucleotide
ccgcuugcuucugggcagc

SEQ ID NO: 2222799 - RNA, 19 nt, Artificial Sequence
  Description of Artificial Sequence: Synthetic oligonucleotide
ggggcuccgcagcaucugu

SEQ ID NO: 2222800 - RNA, 19 nt, Artificial Sequence
  Description of Artificial Sequence: Synthetic oligonucleotide
ccacagggaccugacaacu

SEQ ID NO: 2222801 - RNA, 19 nt, Artificial Sequence
  Description of Artificial Sequence: Synthetic oligonucleotide
caccaccgagcagcgucca

SEQ ID NO: 2222802 - RNA, 19 nt, Artificial Sequence
  Description of Artificial Sequence: Synthetic oligonucleotide
cauagcccuccgcuugcuu

SEQ ID NO: 2222803 - RNA, 19 nt, Artificial Sequence
  Description of Artificial Sequence: Synthetic oligonucleotide
gcguccaccuggaggaccu

SEQ ID NO: 2222804 - RNA, 19 nt, Artificial Sequence
  Description of Artificial Sequence: Synthetic oligonucleotide
cccuagcugggaccugaga

SEQ ID NO: 2222805 - RNA, 19 nt, Artificial Sequence
  Description of Artificial Sequence: Synthetic oligonucleotide
ggacaccucggggcagcca

SEQ ID NO: 2222806 - RNA, 19 nt, Artificial Sequence
  Description of Artificial Sequence: Synthetic oligonucleotide
gcucccacucugggaaucu

SEQ ID NO: 2222807 - RNA, 19 nt, Artificial Sequence
  Description of Artificial Sequence: Synthetic oligonucleotide
ccgacgagcuggcagcaau

SEQ ID NO: 2222808 - RNA, 19 nt, Artificial Sequence
  Description of Artificial Sequence: Synthetic oligonucleotide
ggcgccuguggggcuccgc

SEQ ID NO: 2222809 - RNA, 19 nt, Artificial Sequence
  Description of Artificial Sequence: Synthetic oligonucleotide
cgacgagcuggcagcaaua

SEQ ID NO: 2222810 - RNA, 19 nt, Artificial Sequence
  Description of Artificial Sequence: Synthetic oligonucleotide
gcuccgcagcaucugucuu

SEQ ID NO: 2222811 - RNA, 19 nt, Artificial Sequence
  Description of Artificial Sequence: Synthetic oligonucleotide
ccacauccuugccuccaua

SEQ ID NO: 2222812 - RNA, 19 nt, Artificial Sequence
  Description of Artificial Sequence: Synthetic oligonucleotide
caccaccgacgagcuggca

SEQ ID NO: 2222813 - RNA, 19 nt, Artificial Sequence
  Description of Artificial Sequence: Synthetic oligonucleotide
gcagcccaagcgacaugcu

SEQ ID NO: 2222814 - RNA, 19 nt, Artificial Sequence
  Description of Artificial Sequence: Synthetic oligonucleotide
cuguggggcuccgcagcau

SEQ ID NO: 2222815 - RNA, 19 nt, Artificial Sequence
  Description of Artificial Sequence: Synthetic oligonucleotide
guccaccaccgagcagcgu

SEQ ID NO: 2222816 - RNA, 19 nt, Artificial Sequence
  Description of Artificial Sequence: Synthetic oligonucleotide
cccaagcgacaugcucaca

SEQ ID NO: 2222817 - RNA, 19 nt, Artificial Sequence
  Description of Artificial Sequence: Synthetic oligonucleotide
ccgugccgccagcccuggc

SEQ ID NO: 2222818 - RNA, 19 nt, Artificial Sequence
  Description of Artificial Sequence: Synthetic oligonucleotide
ccucuguccccaggccaua

SEQ ID NO: 2222819 - RNA, 19 nt, Artificial Sequence
  Description of Artificial Sequence: Synthetic oligonucleotide
ccauagcccuccgcuugcu

SEQ ID NO: 2222820 - RNA, 19 nt, Artificial Sequence
  Description of Artificial Sequence: Synthetic oligonucleotide
cccugggguccuccucaua

SEQ ID NO: 2222821 - RNA, 19 nt, Artificial Sequence
  Description of Artificial Sequence: Synthetic oligonucleotide
aaaaguauaaaccugcacu

SEQ ID NO: 2222822 - RNA, 19 nt, Artificial Sequence
  Description of Artificial Sequence: Synthetic oligonucleotide
ucagauaguagaaauaugc

SEQ ID NO: 2222823 - RNA, 19 nt, Artificial Sequence
  Description of Artificial Sequence: Synthetic oligonucleotide
agauaguagaaauaugccc

SEQ ID NO: 2222824 - RNA, 19 nt, Artificial Sequence
  Description of Artificial Sequence: Synthetic oligonucleotide
ugauucuguaaucagauag

SEQ ID NO: 2222825 - RNA, 19 nt, Artificial Sequence
  Description of Artificial Sequence: Synthetic oligonucleotide
ucuguaaucagauaguaga

SEQ ID NO: 2222826 - RNA, 19 nt, Artificial Sequence
  Description of Artificial Sequence: Synthetic oligonucleotide
aaaguauaaaccugcacug

SEQ ID NO: 2222827 - RNA, 19 nt, Artificial Sequence
  Description of Artificial Sequence: Synthetic oligonucleotide
uacaaaaguauaaaccugc

SEQ ID NO: 2222828 - RNA, 19 nt, Artificial Sequence
  Description of Artificial Sequence: Synthetic oligonucleotide
augugauugaauuucauug

SEQ ID NO: 2222829 - RNA, 19 nt, Artificial Sequence
  Description of Artificial Sequence: Synthetic oligonucleotide
gacguuuccauuuuaacug

SEQ ID NO: 2222830 - RNA, 19 nt, Artificial Sequence
  Description of Artificial Sequence: Synthetic oligonucleotide
auugaauuucauugcaugg

SEQ ID NO: 2222831 - RNA, 19 nt, Artificial Sequence
  Description of Artificial Sequence: Synthetic oligonucleotide
gaucuuacgcuguugaucc

SEQ ID NO: 2222832 - RNA, 19 nt, Artificial Sequence
  Description of Artificial Sequence: Synthetic oligonucleotide
aauacaaauggcagaaggg

SEQ ID NO: 2222833 - RNA, 19 nt, Artificial Sequence
  Description of Artificial Sequence: Synthetic oligonucleotide
uguuguauccuccaacugc

SEQ ID NO: 2222834 - RNA, 19 nt, Artificial Sequence
  Description of Artificial Sequence: Synthetic oligonucleotide
auacaaauggcagaagggc

SEQ ID NO: 2222835 - RNA, 19 nt, Artificial Sequence
  Description of Artificial Sequence: Synthetic oligonucleotide
gauugaauuucauugcaug

SEQ ID NO: 2222836 - RNA, 19 nt, Artificial Sequence
  Description of Artificial Sequence: Synthetic oligonucleotide
caauacaaauggcagaagg

SEQ ID NO: 2222837 - RNA, 19 nt, Artificial Sequence
  Description of Artificial Sequence: Synthetic oligonucleotide
acauaccugaccuuuuccc

SEQ ID NO: 2222838 - RNA, 19 nt, Artificial Sequence
  Description of Artificial Sequence: Synthetic oligonucleotide
aagagggcacauauaaucc

SEQ ID NO: 2222839 - RNA, 19 nt, Artificial Sequence
  Description of Artificial Sequence: Synthetic oligonucleotide
ugugauugaauuucauugc

SEQ ID NO: 2222840 - RNA, 19 nt, Artificial Sequence
  Description of Artificial Sequence: Synthetic oligonucleotide
uauaauccuggguuguugg

SEQ ID NO: 2222841 - RNA, 19 nt, Artificial Sequence
  Description of Artificial Sequence: Synthetic oligonucleotide
uccauuuuaacuguaguca

SEQ ID NO: 2222842 - RNA, 19 nt, Artificial Sequence
  Description of Artificial Sequence: Synthetic oligonucleotide
uuucauugcauggugagcc

SEQ ID NO: 2222843 - RNA, 19 nt, Artificial Sequence
  Description of Artificial Sequence: Synthetic oligonucleotide
gaagagggcacauauaauc

SEQ ID NO: 2222844 - RNA, 19 nt, Artificial Sequence
  Description of Artificial Sequence: Synthetic oligonucleotide
cuguagucaagguacaagg

SEQ ID NO: 2222845 - RNA, 19 nt, Artificial Sequence
  Description of Artificial Sequence: Synthetic oligonucleotide
aguauaaaccugcacuguc

SEQ ID NO: 2222846 - RNA, 19 nt, Artificial Sequence
  Description of Artificial Sequence: Synthetic oligonucleotide
ugaauuucauugcauggug

SEQ ID NO: 2222847 - RNA, 19 nt, Artificial Sequence
  Description of Artificial Sequence: Synthetic oligonucleotide
aauacaguguuuccaguga

SEQ ID NO: 2222848 - RNA, 19 nt, Artificial Sequence
  Description of Artificial Sequence: Synthetic oligonucleotide
uccaguaggagagagaucu

SEQ ID NO: 2222849 - RNA, 19 nt, Artificial Sequence
  Description of Artificial Sequence: Synthetic oligonucleotide
cauggcuuccugaagaggg

SEQ ID NO: 2222850 - RNA, 19 nt, Artificial Sequence
  Description of Artificial Sequence: Synthetic oligonucleotide
agaagcaggaauguucugc

SEQ ID NO: 2222851 - RNA, 19 nt, Artificial Sequence
  Description of Artificial Sequence: Synthetic oligonucleotide
uaggagagagaucuuacgc

SEQ ID NO: 2222852 - RNA, 19 nt, Artificial Sequence
  Description of Artificial Sequence: Synthetic oligonucleotide
uaaaccugcacugucacug

SEQ ID NO: 2222853 - RNA, 19 nt, Artificial Sequence
  Description of Artificial Sequence: Synthetic oligonucleotide
aacacgggaauccugcuca

SEQ ID NO: 2222854 - RNA, 19 nt, Artificial Sequence
  Description of Artificial Sequence: Synthetic oligonucleotide
auaguagaaauaugccccg

SEQ ID NO: 2222855 - RNA, 19 nt, Artificial Sequence
  Description of Artificial Sequence: Synthetic oligonucleotide
ugagcucacagaauggggc

SEQ ID NO: 2222856 - RNA, 19 nt, Artificial Sequence
  Description of Artificial Sequence: Synthetic oligonucleotide
uagucaagguacaagguac

SEQ ID NO: 2222857 - RNA, 19 nt, Artificial Sequence
  Description of Artificial Sequence: Synthetic oligonucleotide
uuuccagugauucuguaau

SEQ ID NO: 2222858 - RNA, 19 nt, Artificial Sequence
  Description of Artificial Sequence: Synthetic oligonucleotide
ugacucauaguuguuauug

SEQ ID NO: 2222859 - RNA, 19 nt, Artificial Sequence
  Description of Artificial Sequence: Synthetic oligonucleotide
auuguuguauccuccaacu

SEQ ID NO: 2222860 - RNA, 19 nt, Artificial Sequence
  Description of Artificial Sequence: Synthetic oligonucleotide
ucuccggucaggcauaggc

SEQ ID NO: 2222861 - RNA, 19 nt, Artificial Sequence
  Description of Artificial Sequence: Synthetic oligonucleotide
aggaauguucugccgauac

SEQ ID NO: 2222862 - RNA, 19 nt, Artificial Sequence
  Description of Artificial Sequence: Synthetic oligonucleotide
auaggcuggaagcagcagg

SEQ ID NO: 2222863 - RNA, 19 nt, Artificial Sequence
  Description of Artificial Sequence: Synthetic oligonucleotide
agacguuuccauuuuaacu

SEQ ID NO: 2222864 - RNA, 19 nt, Artificial Sequence
  Description of Artificial Sequence: Synthetic oligonucleotide
aaauaugccccgcuguaga

SEQ ID NO: 2222865 - RNA, 19 nt, Artificial Sequence
  Description of Artificial Sequence: Synthetic oligonucleotide
uauuguuguauccuccaac

SEQ ID NO: 2222866 - RNA, 19 nt, Artificial Sequence
  Description of Artificial Sequence: Synthetic oligonucleotide
cagauaguagaaauaugcc

SEQ ID NO: 2222867 - RNA, 19 nt, Artificial Sequence
  Description of Artificial Sequence: Synthetic oligonucleotide
aaaccugcacugucacugc

SEQ ID NO: 2222868 - RNA, 19 nt, Artificial Sequence
  Description of Artificial Sequence: Synthetic oligonucleotide
acgggaauccugcucacgc

SEQ ID NO: 2222869 - RNA, 19 nt, Artificial Sequence
  Description of Artificial Sequence: Synthetic oligonucleotide
cuguguagcucccaguucg

SEQ ID NO: 2222870 - RNA, 19 nt, Artificial Sequence
  Description of Artificial Sequence: Synthetic oligonucleotide
gaauguucugccgauacug

SEQ ID NO: 2222871 - RNA, 19 nt, Artificial Sequence
  Description of Artificial Sequence: Synthetic oligonucleotide
guuguuggcaagcuggcag

SEQ ID NO: 2222872 - RNA, 19 nt, Artificial Sequence
  Description of Artificial Sequence: Synthetic oligonucleotide
gaagcaggaauguucugcc

SEQ ID NO: 2222873 - RNA, 19 nt, Artificial Sequence
  Description of Artificial Sequence: Synthetic oligonucleotide
uacaaauggcagaagggcu

SEQ ID NO: 2222874 - RNA, 19 nt, Artificial Sequence
  Description of Artificial Sequence: Synthetic oligonucleotide
uugagcucacagaaugggg

SEQ ID NO: 2222875 - RNA, 19 nt, Artificial Sequence
  Description of Artificial Sequence: Synthetic oligonucleotide
uauaaaccugcacugucac

SEQ ID NO: 2222876 - RNA, 19 nt, Artificial Sequence
  Description of Artificial Sequence: Synthetic oligonucleotide
agguugagcucacagaaug

SEQ ID NO: 2222877 - RNA, 19 nt, Artificial Sequence
  Description of Artificial Sequence: Synthetic oligonucleotide
aaucaggacgggauguuac

SEQ ID NO: 2222878 - RNA, 19 nt, Artificial Sequence
  Description of Artificial Sequence: Synthetic oligonucleotide
acaguuacggccccaguag

SEQ ID NO: 2222879 - RNA, 19 nt, Artificial Sequence
  Description of Artificial Sequence: Synthetic oligonucleotide
auaauccuggguuguuggc

SEQ ID NO: 2222880 - RNA, 19 nt, Artificial Sequence
  Description of Artificial Sequence: Synthetic oligonucleotide
gagugcgacaguuacggcc

SEQ ID NO: 2222881 - RNA, 19 nt, Artificial Sequence
  Description of Artificial Sequence: Synthetic oligonucleotide
aguuguuauuguucagcac

SEQ ID NO: 2222882 - RNA, 19 nt, Artificial Sequence
  Description of Artificial Sequence: Synthetic oligonucleotide
aauaugccccgcuguagag

SEQ ID NO: 2222883 - RNA, 19 nt, Artificial Sequence
  Description of Artificial Sequence: Synthetic oligonucleotide
uagaaugcuucugacauac

SEQ ID NO: 2222884 - RNA, 19 nt, Artificial Sequence
  Description of Artificial Sequence: Synthetic oligonucleotide
cugagugcgacaguuacgg

SEQ ID NO: 2222885 - RNA, 19 nt, Artificial Sequence
  Description of Artificial Sequence: Synthetic oligonucleotide
ucacagaugugauugaauu

SEQ ID NO: 2222886 - RNA, 19 nt, Artificial Sequence
  Description of Artificial Sequence: Synthetic oligonucleotide
auacugguaggucagcucu

SEQ ID NO: 2222887 - RNA, 19 nt, Artificial Sequence
  Description of Artificial Sequence: Synthetic oligonucleotide
accugagugcgacaguuac

SEQ ID NO: 2222888 - RNA, 19 nt, Artificial Sequence
  Description of Artificial Sequence: Synthetic oligonucleotide
caagguacaagguacaaaa

SEQ ID NO: 2222889 - RNA, 19 nt, Artificial Sequence
  Description of Artificial Sequence: Synthetic oligonucleotide
aggacgggauguuacaguc

SEQ ID NO: 2222890 - RNA, 19 nt, Artificial Sequence
  Description of Artificial Sequence: Synthetic oligonucleotide
agugcgacaguuacggccc

SEQ ID NO: 2222891 - RNA, 19 nt, Artificial Sequence
  Description of Artificial Sequence: Synthetic oligonucleotide
uagaaauaugccccgcugu

SEQ ID NO: 2222892 - RNA, 19 nt, Artificial Sequence
  Description of Artificial Sequence: Synthetic oligonucleotide
uaaucagauaguagaaaua

SEQ ID NO: 2222893 - RNA, 19 nt, Artificial Sequence
  Description of Artificial Sequence: Synthetic oligonucleotide
aguguuuccagugauucug

SEQ ID NO: 2222894 - RNA, 19 nt, Artificial Sequence
  Description of Artificial Sequence: Synthetic oligonucleotide
uguagucaagguacaaggu

SEQ ID NO: 2222895 - RNA, 19 nt, Artificial Sequence
  Description of Artificial Sequence: Synthetic oligonucleotide
uugaauuucauugcauggu

SEQ ID NO: 2222896 - RNA, 19 nt, Artificial Sequence
  Description of Artificial Sequence: Synthetic oligonucleotide
agagaucuuacgcuguuga

SEQ ID NO: 2222897 - RNA, 19 nt, Artificial Sequence
  Description of Artificial Sequence: Synthetic oligonucleotide
auuucauugcauggugagc

SEQ ID NO: 2222898 - RNA, 19 nt, Artificial Sequence
  Description of Artificial Sequence: Synthetic oligonucleotide
cagguaauucuucaggaug

SEQ ID NO: 2222899 - RNA, 19 nt, Artificial Sequence
  Description of Artificial Sequence: Synthetic oligonucleotide
uggugcuuccccacaaggg

SEQ ID NO: 2222900 - RNA, 19 nt, Artificial Sequence
  Description of Artificial Sequence: Synthetic oligonucleotide
cccaguagcaaucaggacg

SEQ ID NO: 2222901 - RNA, 19 nt, Artificial Sequence
  Description of Artificial Sequence: Synthetic oligonucleotide
gaccuuuuccccaugagac

SEQ ID NO: 2222902 - RNA, 19 nt, Artificial Sequence
  Description of Artificial Sequence: Synthetic oligonucleotide
cauaccugaccuuuucccc

SEQ ID NO: 2222903 - RNA, 19 nt, Artificial Sequence
  Description of Artificial Sequence: Synthetic oligonucleotide
uuauuguucagcacuccau

SEQ ID NO: 2222904 - RNA, 19 nt, Artificial Sequence
  Description of Artificial Sequence: Synthetic oligonucleotide
gaaccuugucuguucacag

SEQ ID NO: 2222905 - RNA, 19 nt, Artificial Sequence
  Description of Artificial Sequence: Synthetic oligonucleotide
cacagcaguaacacaauac

SEQ ID NO: 2222906 - RNA, 19 nt, Artificial Sequence
  Description of Artificial Sequence: Synthetic oligonucleotide
gcaguaacacaauacagug

SEQ ID NO: 2222907 - RNA, 19 nt, Artificial Sequence
  Description of Artificial Sequence: Synthetic oligonucleotide
uaugccccgcuguagagcc

SEQ ID NO: 2222908 - RNA, 19 nt, Artificial Sequence
  Description of Artificial Sequence: Synthetic oligonucleotide
uucgcuaucugggacuggg

SEQ ID NO: 2222909 - RNA, 19 nt, Artificial Sequence
  Description of Artificial Sequence: Synthetic oligonucleotide
uaggucagcucucggaagc

SEQ ID NO: 2222910 - RNA, 19 nt, Artificial Sequence
  Description of Artificial Sequence: Synthetic oligonucleotide
aggagagagaucuuacgcu

SEQ ID NO: 2222911 - RNA, 19 nt, Artificial Sequence
  Description of Artificial Sequence: Synthetic oligonucleotide
guugagcucacagaauggg

SEQ ID NO: 2222912 - RNA, 19 nt, Artificial Sequence
  Description of Artificial Sequence: Synthetic oligonucleotide
acauagaaugcuucugaca

SEQ ID NO: 2222913 - RNA, 19 nt, Artificial Sequence
  Description of Artificial Sequence: Synthetic oligonucleotide
cugcugaggggcaacacgg

SEQ ID NO: 2222914 - RNA, 19 nt, Artificial Sequence
  Description of Artificial Sequence: Synthetic oligonucleotide
caaaaguauaaaccugcac

SEQ ID NO: 2222915 - RNA, 19 nt, Artificial Sequence
  Description of Artificial Sequence: Synthetic oligonucleotide
aagcuguccaguaggagag

SEQ ID NO: 2222916 - RNA, 19 nt, Artificial Sequence
  Description of Artificial Sequence: Synthetic oligonucleotide
cacauauaauccuggguug

SEQ ID NO: 2222917 - RNA, 19 nt, Artificial Sequence
  Description of Artificial Sequence: Synthetic oligonucleotide
uuuuaacuguagucaaggu

SEQ ID NO: 2222918 - RNA, 19 nt, Artificial Sequence
  Description of Artificial Sequence: Synthetic oligonucleotide
ugauugaauuucauugcau

SEQ ID NO: 2222919 - RNA, 19 nt, Artificial Sequence
  Description of Artificial Sequence: Synthetic oligonucleotide
ucaccaagcacaagggaaa

SEQ ID NO: 2222920 - RNA, 19 nt, Artificial Sequence
  Description of Artificial Sequence: Synthetic oligonucleotide
uuuuccaugucagaccccu

SEQ ID NO: 2222921 - RNA, 19 nt, Artificial Sequence
  Description of Artificial Sequence: Synthetic oligonucleotide
aguaggagagagaucuuac

SEQ ID NO: 2222922 - RNA, 19 nt, Artificial Sequence
  Description of Artificial Sequence: Synthetic oligonucleotide
uguaaucagauaguagaaa

SEQ ID NO: 2222923 - RNA, 19 nt, Artificial Sequence
  Description of Artificial Sequence: Synthetic oligonucleotide
agcuacgcagaccacagca

SEQ ID NO: 2222924 - RNA, 19 nt, Artificial Sequence
  Description of Artificial Sequence: Synthetic oligonucleotide
auacaaaaguauaaaccug

SEQ ID NO: 2222925 - RNA, 19 nt, Artificial Sequence
  Description of Artificial Sequence: Synthetic oligonucleotide
gacgggauguuacagucac

SEQ ID NO: 2222926 - RNA, 19 nt, Artificial Sequence
  Description of Artificial Sequence: Synthetic oligonucleotide
uguccaguaggagagagau

SEQ ID NO: 2222927 - RNA, 19 nt, Artificial Sequence
  Description of Artificial Sequence: Synthetic oligonucleotide
ugagacguuuccauuuuaa

SEQ ID NO: 2222928 - RNA, 19 nt, Artificial Sequence
  Description of Artificial Sequence: Synthetic oligonucleotide
aguagaaauaugccccgcu

SEQ ID NO: 2222929 - RNA, 19 nt, Artificial Sequence
  Description of Artificial Sequence: Synthetic oligonucleotide
guagaaauaugccccgcug

SEQ ID NO: 2222930 - RNA, 19 nt, Artificial Sequence
  Description of Artificial Sequence: Synthetic oligonucleotide
uccagugauucuguaauca

SEQ ID NO: 2222931 - RNA, 19 nt, Artificial Sequence
  Description of Artificial Sequence: Synthetic oligonucleotide
agcaguaacacaauacagu

SEQ ID NO: 2222932 - RNA, 19 nt, Artificial Sequence
  Description of Artificial Sequence: Synthetic oligonucleotide
gauguuacagucacuggca

SEQ ID NO: 2222933 - RNA, 19 nt, Artificial Sequence
  Description of Artificial Sequence: Synthetic oligonucleotide
ucagcucucggaagcuacg

SEQ ID NO: 2222934 - RNA, 19 nt, Artificial Sequence
  Description of Artificial Sequence: Synthetic oligonucleotide
acuguagucaagguacaag

SEQ ID NO: 2222935 - RNA, 19 nt, Artificial Sequence
  Description of Artificial Sequence: Synthetic oligonucleotide
ucugacucauaguuguuau

SEQ ID NO: 2222936 - RNA, 19 nt, Artificial Sequence
  Description of Artificial Sequence: Synthetic oligonucleotide
gaagcuacgcagaccacag

SEQ ID NO: 2222937 - RNA, 19 nt, Artificial Sequence
  Description of Artificial Sequence: Synthetic oligonucleotide
cuuacauagaaugcuucug

SEQ ID NO: 2222938 - RNA, 19 nt, Artificial Sequence
  Description of Artificial Sequence: Synthetic oligonucleotide
aauccuggguuguuggcaa

SEQ ID NO: 2222939 - RNA, 19 nt, Artificial Sequence
  Description of Artificial Sequence: Synthetic oligonucleotide
gacauaccugaccuuuucc

SEQ ID NO: 2222940 - RNA, 19 nt, Artificial Sequence
  Description of Artificial Sequence: Synthetic oligonucleotide
gagacguuuccauuuuaac

SEQ ID NO: 2222941 - RNA, 19 nt, Artificial Sequence
  Description of Artificial Sequence: Synthetic oligonucleotide
guucugccgauacugguag

SEQ ID NO: 2222942 - RNA, 19 nt, Artificial Sequence
  Description of Artificial Sequence: Synthetic oligonucleotide
aagggaaaagcuguccagu

SEQ ID NO: 2222943 - RNA, 19 nt, Artificial Sequence
  Description of Artificial Sequence: Synthetic oligonucleotide
aagcuacgcagaccacagc

SEQ ID NO: 2222944 - RNA, 19 nt, Artificial Sequence
  Description of Artificial Sequence: Synthetic oligonucleotide
aaguauaaaccugcacugu

SEQ ID NO: 2222945 - RNA, 19 nt, Artificial Sequence
  Description of Artificial Sequence: Synthetic oligonucleotide
gcagccccaauacaaaugg

SEQ ID NO: 2222946 - RNA, 19 nt, Artificial Sequence
  Description of Artificial Sequence: Synthetic oligonucleotide
aaggagagacugcacugcu

SEQ ID NO: 2222947 - RNA, 19 nt, Artificial Sequence
  Description of Artificial Sequence: Synthetic oligonucleotide
guauccuccaacugcucag

SEQ ID NO: 2222948 - RNA, 19 nt, Artificial Sequence
  Description of Artificial Sequence: Synthetic oligonucleotide
agugauucuguaaucagau

SEQ ID NO: 2222949 - RNA, 19 nt, Artificial Sequence
  Description of Artificial Sequence: Synthetic oligonucleotide
gaaauaugccccgcuguag

SEQ ID NO: 2222950 - RNA, 19 nt, Artificial Sequence
  Description of Artificial Sequence: Synthetic oligonucleotide
uguucagcacuccauccaa

SEQ ID NO: 2222951 - RNA, 19 nt, Artificial Sequence
  Description of Artificial Sequence: Synthetic oligonucleotide
agcacaagggaaaagcugu

SEQ ID NO: 2222952 - RNA, 19 nt, Artificial Sequence
  Description of Artificial Sequence: Synthetic oligonucleotide
cugaagagggcacauauaa

SEQ ID NO: 2222953 - RNA, 19 nt, Artificial Sequence
  Description of Artificial Sequence: Synthetic oligonucleotide
uccggucaggcauaggcug

SEQ ID NO: 2222954 - RNA, 19 nt, Artificial Sequence
  Description of Artificial Sequence: Synthetic oligonucleotide
ccaguagcaaucaggacgg

SEQ ID NO: 2222955 - RNA, 19 nt, Artificial Sequence
  Description of Artificial Sequence: Synthetic oligonucleotide
ugucacugccucaccaagc

SEQ ID NO: 2222956 - RNA, 19 nt, Artificial Sequence
  Description of Artificial Sequence: Synthetic oligonucleotide
guaaucagauaguagaaau

SEQ ID NO: 2222957 - RNA, 19 nt, Artificial Sequence
  Description of Artificial Sequence: Synthetic oligonucleotide
gugauugaauuucauugca

SEQ ID NO: 2222958 - RNA, 19 nt, Artificial Sequence
  Description of Artificial Sequence: Synthetic oligonucleotide
uguugauggugcuucccca

SEQ ID NO: 2222959 - RNA, 19 nt, Artificial Sequence
  Description of Artificial Sequence: Synthetic oligonucleotide
guuauuguucagcacucca

SEQ ID NO: 2222960 - RNA, 19 nt, Artificial Sequence
  Description of Artificial Sequence: Synthetic oligonucleotide
cuuacgcuguugauccucc

SEQ ID NO: 2222961 - RNA, 19 nt, Artificial Sequence
  Description of Artificial Sequence: Synthetic oligonucleotide
agagggcacauauaauccu

SEQ ID NO: 2222962 - RNA, 19 nt, Artificial Sequence
  Description of Artificial Sequence: Synthetic oligonucleotide
gauacugguaggucagcuc

SEQ ID NO: 2222963 - RNA, 19 nt, Artificial Sequence
  Description of Artificial Sequence: Synthetic oligonucleotide
ugccgauacugguagguca

SEQ ID NO: 2222964 - RNA, 19 nt, Artificial Sequence
  Description of Artificial Sequence: Synthetic oligonucleotide
cucccaguucgcuaucugg

SEQ ID NO: 2222965 - RNA, 19 nt, Artificial Sequence
  Description of Artificial Sequence: Synthetic oligonucleotide
uguucugccgauacuggua

SEQ ID NO: 2222966 - RNA, 19 nt, Artificial Sequence
  Description of Artificial Sequence: Synthetic oligonucleotide
uguugauccuccugcgcug

SEQ ID NO: 2222967 - RNA, 19 nt, Artificial Sequence
  Description of Artificial Sequence: Synthetic oligonucleotide
ucugacauaccugaccuuu

SEQ ID NO: 2222968 - RNA, 19 nt, Artificial Sequence
  Description of Artificial Sequence: Synthetic oligonucleotide
guuacugggcauugccucc

SEQ ID NO: 2222969 - RNA, 19 nt, Artificial Sequence
  Description of Artificial Sequence: Synthetic oligonucleotide
uaacuguagucaagguaca

SEQ ID NO: 2222970 - RNA, 19 nt, Artificial Sequence
  Description of Artificial Sequence: Synthetic oligonucleotide
cagguuacugggcauugcc

SEQ ID NO: 2222971 - RNA, 19 nt, Artificial Sequence
  Description of Artificial Sequence: Synthetic oligonucleotide
uacgcuguugauccuccug

SEQ ID NO: 2222972 - RNA, 19 nt, Artificial Sequence
  Description of Artificial Sequence: Synthetic oligonucleotide
uaauccuggguuguuggca

SEQ ID NO: 2222973 - RNA, 19 nt, Artificial Sequence
  Description of Artificial Sequence: Synthetic oligonucleotide
agaaauaugccccgcugua

SEQ ID NO: 2222974 - RNA, 19 nt, Artificial Sequence
  Description of Artificial Sequence: Synthetic oligonucleotide
ucuugaaccuugucuguuc

SEQ ID NO: 2222975 - RNA, 19 nt, Artificial Sequence
  Description of Artificial Sequence: Synthetic oligonucleotide
auauaauccuggguuguug

SEQ ID NO: 2222976 - RNA, 19 nt, Artificial Sequence
  Description of Artificial Sequence: Synthetic oligonucleotide
uagcaaucaggacgggaug

SEQ ID NO: 2222977 - RNA, 19 nt, Artificial Sequence
  Description of Artificial Sequence: Synthetic oligonucleotide
ugacauaccugaccuuuuc

SEQ ID NO: 2222978 - RNA, 19 nt, Artificial Sequence
  Description of Artificial Sequence: Synthetic oligonucleotide
auaugccccgcuguagagc

SEQ ID NO: 2222979 - RNA, 19 nt, Artificial Sequence
  Description of Artificial Sequence: Synthetic oligonucleotide
agguaauucuucaggaugu

SEQ ID NO: 2222980 - RNA, 19 nt, Artificial Sequence
  Description of Artificial Sequence: Synthetic oligonucleotide
ugaagagggcacauauaau

SEQ ID NO: 2222981 - RNA, 19 nt, Artificial Sequence
  Description of Artificial Sequence: Synthetic oligonucleotide
acacaauacaguguuucca

SEQ ID NO: 2222982 - RNA, 19 nt, Artificial Sequence
  Description of Artificial Sequence: Synthetic oligonucleotide
acaauacaguguuuccagu

SEQ ID NO: 2222983 - RNA, 19 nt, Artificial Sequence
  Description of Artificial Sequence: Synthetic oligonucleotide
agccaguccgggugcagcc

SEQ ID NO: 2222984 - RNA, 19 nt, Artificial Sequence
  Description of Artificial Sequence: Synthetic oligonucleotide
uuguuggcaagcuggcaga

SEQ ID NO: 2222985 - RNA, 19 nt, Artificial Sequence
  Description of Artificial Sequence: Synthetic oligonucleotide
acucauaguuguuauuguu

SEQ ID NO: 2222986 - RNA, 19 nt, Artificial Sequence
  Description of Artificial Sequence: Synthetic oligonucleotide
cucaccaagcacaagggaa

SEQ ID NO: 2222987 - RNA, 19 nt, Artificial Sequence
  Description of Artificial Sequence: Synthetic oligonucleotide
ucaggacgggauguuacag

SEQ ID NO: 2222988 - RNA, 19 nt, Artificial Sequence
  Description of Artificial Sequence: Synthetic oligonucleotide
uggcaacucagaagcagga

SEQ ID NO: 2222989 - RNA, 19 nt, Artificial Sequence
  Description of Artificial Sequence: Synthetic oligonucleotide
uccuguugcucuguuaacu

SEQ ID NO: 2222990 - RNA, 19 nt, Artificial Sequence
  Description of Artificial Sequence: Synthetic oligonucleotide
guagucaagguacaaggua

SEQ ID NO: 2222991 - RNA, 19 nt, Artificial Sequence
  Description of Artificial Sequence: Synthetic oligonucleotide
ugcacugucacugccucac

SEQ ID NO: 2222992 - RNA, 19 nt, Artificial Sequence
  Description of Artificial Sequence: Synthetic oligonucleotide
gaauuucauugcaugguga

SEQ ID NO: 2222993 - RNA, 19 nt, Artificial Sequence
  Description of Artificial Sequence: Synthetic oligonucleotide
ucaagguacaagguacaaa

SEQ ID NO: 2222994 - RNA, 19 nt, Artificial Sequence
  Description of Artificial Sequence: Synthetic oligonucleotide
cagauguugauggugcuuc

SEQ ID NO: 2222995 - RNA, 19 nt, Artificial Sequence
  Description of Artificial Sequence: Synthetic oligonucleotide
cucacgcucagcucuccgg

SEQ ID NO: 2222996 - RNA, 19 nt, Artificial Sequence
  Description of Artificial Sequence: Synthetic oligonucleotide
uguguagcucccaguucgc

SEQ ID NO: 2222997 - RNA, 19 nt, Artificial Sequence
  Description of Artificial Sequence: Synthetic oligonucleotide
cugcacacugcugaggggc

SEQ ID NO: 2222998 - RNA, 19 nt, Artificial Sequence
  Description of Artificial Sequence: Synthetic oligonucleotide
gauguugauggugcuuccc

SEQ ID NO: 2222999 - RNA, 19 nt, Artificial Sequence
  Description of Artificial Sequence: Synthetic oligonucleotide
aggugcauauggcauggcu

SEQ ID NO: 2223000 - RNA, 19 nt, Artificial Sequence
  Description of Artificial Sequence: Synthetic oligonucleotide
acucucugccaacauauuu

SEQ ID NO: 2223001 - RNA, 19 nt, Artificial Sequence
  Description of Artificial Sequence: Synthetic oligonucleotide
ucacgcucagcucuccggu

SEQ ID NO: 2223002 - RNA, 19 nt, Artificial Sequence
  Description of Artificial Sequence: Synthetic oligonucleotide
ucugccgauacugguaggu

SEQ ID NO: 2223003 - RNA, 19 nt, Artificial Sequence
  Description of Artificial Sequence: Synthetic oligonucleotide
ugaggggcaacacgggaau

SEQ ID NO: 2223004 - RNA, 19 nt, Artificial Sequence
  Description of Artificial Sequence: Synthetic oligonucleotide
auacaguguuuccagugau

SEQ ID NO: 2223005 - RNA, 19 nt, Artificial Sequence
  Description of Artificial Sequence: Synthetic oligonucleotide
acugguaggucagcucucg

SEQ ID NO: 2223006 - RNA, 19 nt, Artificial Sequence
  Description of Artificial Sequence: Synthetic oligonucleotide
ucucggaagcuacgcagac

SEQ ID NO: 2223007 - RNA, 19 nt, Artificial Sequence
  Description of Artificial Sequence: Synthetic oligonucleotide
ugucagaccccuggcagcc

SEQ ID NO: 2223008 - RNA, 19 nt, Artificial Sequence
  Description of Artificial Sequence: Synthetic oligonucleotide
guauaaaccugcacuguca

SEQ ID NO: 2223009 - RNA, 19 nt, Artificial Sequence
  Description of Artificial Sequence: Synthetic oligonucleotide
ccaagcacaagggaaaagc

SEQ ID NO: 2223010 - RNA, 19 nt, Artificial Sequence
  Description of Artificial Sequence: Synthetic oligonucleotide
aucagauaguagaaauaug

SEQ ID NO: 2223011 - RNA, 19 nt, Artificial Sequence
  Description of Artificial Sequence: Synthetic oligonucleotide
acaaaaguauaaaccugca

SEQ ID NO: 2223012 - RNA, 19 nt, Artificial Sequence
  Description of Artificial Sequence: Synthetic oligonucleotide
guaggucagcucucggaag

SEQ ID NO: 2223013 - RNA, 19 nt, Artificial Sequence
  Description of Artificial Sequence: Synthetic oligonucleotide
guugauggugcuuccccac

SEQ ID NO: 2223014 - RNA, 19 nt, Artificial Sequence
  Description of Artificial Sequence: Synthetic oligonucleotide
cuguaaucagauaguagaa

SEQ ID NO: 2223015 - RNA, 19 nt, Artificial Sequence
  Description of Artificial Sequence: Synthetic oligonucleotide
gacaguuacggccccagua

SEQ ID NO: 2223016 - RNA, 19 nt, Artificial Sequence
  Description of Artificial Sequence: Synthetic oligonucleotide
ugcgcugauccuccuggcc

SEQ ID NO: 2223017 - RNA, 19 nt, Artificial Sequence
  Description of Artificial Sequence: Synthetic oligonucleotide
agacucucugccaacauau

SEQ ID NO: 2223018 - RNA, 19 nt, Artificial Sequence
  Description of Artificial Sequence: Synthetic oligonucleotide
cagugauucuguaaucaga

SEQ ID NO: 2223019 - RNA, 19 nt, Artificial Sequence
  Description of Artificial Sequence: Synthetic oligonucleotide
auucuguaaucagauagua

SEQ ID NO: 2223020 - RNA, 19 nt, Artificial Sequence
  Description of Artificial Sequence: Synthetic oligonucleotide
uucauugcauggugagccu

SEQ ID NO: 2223021 - RNA, 19 nt, Artificial Sequence
  Description of Artificial Sequence: Synthetic oligonucleotide
uguagcucccaguucgcua

SEQ ID NO: 2223022 - RNA, 19 nt, Artificial Sequence
  Description of Artificial Sequence: Synthetic oligonucleotide
aucaggacgggauguuaca

SEQ ID NO: 2223023 - RNA, 19 nt, Artificial Sequence
  Description of Artificial Sequence: Synthetic oligonucleotide
aggcacacugcacacugcu

SEQ ID NO: 2223024 - RNA, 19 nt, Artificial Sequence
  Description of Artificial Sequence: Synthetic oligonucleotide
gaaaagcuguccaguagga

SEQ ID NO: 2223025 - RNA, 19 nt, Artificial Sequence
  Description of Artificial Sequence: Synthetic oligonucleotide
gaauccugcucacgcucag

SEQ ID NO: 2223026 - RNA, 19 nt, Artificial Sequence
  Description of Artificial Sequence: Synthetic oligonucleotide
ucuguucacagaugugauu

SEQ ID NO: 2223027 - RNA, 19 nt, Artificial Sequence
  Description of Artificial Sequence: Synthetic oligonucleotide
ucuuacgcuguugauccuc

SEQ ID NO: 2223028 - RNA, 19 nt, Artificial Sequence
  Description of Artificial Sequence: Synthetic oligonucleotide
cacagaauggggccaagca

SEQ ID NO: 2223029 - RNA, 19 nt, Artificial Sequence
  Description of Artificial Sequence: Synthetic oligonucleotide
auauggcauggcuuccuga

SEQ ID NO: 2223030 - RNA, 19 nt, Artificial Sequence
  Description of Artificial Sequence: Synthetic oligonucleotide
uacgcagaccacagcagua

SEQ ID NO: 2223031 - RNA, 19 nt, Artificial Sequence
  Description of Artificial Sequence: Synthetic oligonucleotide
gcucucggaagcuacgcag

SEQ ID NO: 2223032 - RNA, 19 nt, Artificial Sequence
  Description of Artificial Sequence: Synthetic oligonucleotide
cuugaaccuugucuguuca

SEQ ID NO: 2223033 - RNA, 19 nt, Artificial Sequence
  Description of Artificial Sequence: Synthetic oligonucleotide
cauauggcauggcuuccug

SEQ ID NO: 2223034 - RNA, 19 nt, Artificial Sequence
  Description of Artificial Sequence: Synthetic oligonucleotide
uuccagugauucuguaauc

SEQ ID NO: 2223035 - RNA, 19 nt, Artificial Sequence
  Description of Artificial Sequence: Synthetic oligonucleotide
agggaaaagcuguccagua

SEQ ID NO: 2223036 - RNA, 19 nt, Artificial Sequence
  Description of Artificial Sequence: Synthetic oligonucleotide
uugaaccuugucuguucac

SEQ ID NO: 2223037 - RNA, 19 nt, Artificial Sequence
  Description of Artificial Sequence: Synthetic oligonucleotide
cagaugugauugaauuuca

SEQ ID NO: 2223038 - RNA, 19 nt, Artificial Sequence
  Description of Artificial Sequence: Synthetic oligonucleotide
uucugccgauacugguagg

SEQ ID NO: 2223039 - RNA, 19 nt, Artificial Sequence
  Description of Artificial Sequence: Synthetic oligonucleotide
agagagaucuuacgcuguu

SEQ ID NO: 2223040 - RNA, 19 nt, Artificial Sequence
  Description of Artificial Sequence: Synthetic oligonucleotide
gacucauaguuguuauugu

SEQ ID NO: 2223041 - RNA, 19 nt, Artificial Sequence
  Description of Artificial Sequence: Synthetic oligonucleotide
aacuguagucaagguacaa

SEQ ID NO: 2223042 - RNA, 19 nt, Artificial Sequence
  Description of Artificial Sequence: Synthetic oligonucleotide
gagagaucuuacgcuguug

SEQ ID NO: 2223043 - RNA, 19 nt, Artificial Sequence
  Description of Artificial Sequence: Synthetic oligonucleotide
ugcauauggcauggcuucc

SEQ ID NO: 2223044 - RNA, 19 nt, Artificial Sequence
  Description of Artificial Sequence: Synthetic oligonucleotide
ucaccugagugcgacaguu

SEQ ID NO: 2223045 - RNA, 19 nt, Artificial Sequence
  Description of Artificial Sequence: Synthetic oligonucleotide
aguucgcuaucugggacug

SEQ ID NO: 2223046 - RNA, 19 nt, Artificial Sequence
  Description of Artificial Sequence: Synthetic oligonucleotide
gguugagcucacagaaugg

SEQ ID NO: 2223047 - RNA, 19 nt, Artificial Sequence
  Description of Artificial Sequence: Synthetic oligonucleotide
ugcuucugacauaccugac

SEQ ID NO: 2223048 - RNA, 19 nt, Artificial Sequence
  Description of Artificial Sequence: Synthetic oligonucleotide
uuuccaugucagaccccug

SEQ ID NO: 2223049 - RNA, 19 nt, Artificial Sequence
  Description of Artificial Sequence: Synthetic oligonucleotide
gggcacauauaauccuggg

SEQ ID NO: 2223050 - RNA, 19 nt, Artificial Sequence
  Description of Artificial Sequence: Synthetic oligonucleotide
agcacuccauccaagcacu

SEQ ID NO: 2223051 - RNA, 19 nt, Artificial Sequence
  Description of Artificial Sequence: Synthetic oligonucleotide
ggcaacacgggaauccugc

SEQ ID NO: 2223052 - RNA, 19 nt, Artificial Sequence
  Description of Artificial Sequence: Synthetic oligonucleotide
cugggcaaggagagacugc

SEQ ID NO: 2223053 - RNA, 19 nt, Artificial Sequence
  Description of Artificial Sequence: Synthetic oligonucleotide
gcacauauaauccuggguu

SEQ ID NO: 2223054 - RNA, 19 nt, Artificial Sequence
  Description of Artificial Sequence: Synthetic oligonucleotide
uccgggugcagccccaaua

SEQ ID NO: 2223055 - RNA, 19 nt, Artificial Sequence
  Description of Artificial Sequence: Synthetic oligonucleotide
agucaagguacaagguaca

SEQ ID NO: 2223056 - RNA, 19 nt, Artificial Sequence
  Description of Artificial Sequence: Synthetic oligonucleotide
ugagugcgacaguuacggc

SEQ ID NO: 2223057 - RNA, 19 nt, Artificial Sequence
  Description of Artificial Sequence: Synthetic oligonucleotide
uauccuccaacugcucagu

SEQ ID NO: 2223058 - RNA, 19 nt, Artificial Sequence
  Description of Artificial Sequence: Synthetic oligonucleotide
uguuuccagugauucugua

SEQ ID NO: 2223059 - RNA, 19 nt, Artificial Sequence
  Description of Artificial Sequence: Synthetic oligonucleotide
ucgcuaucugggacugggc

SEQ ID NO: 2223060 - RNA, 19 nt, Artificial Sequence
  Description of Artificial Sequence: Synthetic oligonucleotide
gguaggucagcucucggaa

SEQ ID NO: 2223061 - RNA, 19 nt, Artificial Sequence
  Description of Artificial Sequence: Synthetic oligonucleotide
gccagguaauucuucagga

SEQ ID NO: 2223062 - RNA, 19 nt, Artificial Sequence
  Description of Artificial Sequence: Synthetic oligonucleotide
ucacugccucaccaagcac

SEQ ID NO: 2223063 - RNA, 19 nt, Artificial Sequence
  Description of Artificial Sequence: Synthetic oligonucleotide
acgcucagcucuccgguca

SEQ ID NO: 2223064 - RNA, 19 nt, Artificial Sequence
  Description of Artificial Sequence: Synthetic oligonucleotide
caacacgggaauccugcuc

SEQ ID NO: 2223065 - RNA, 19 nt, Artificial Sequence
  Description of Artificial Sequence: Synthetic oligonucleotide
gggcauugccuccuguugc

SEQ ID NO: 2223066 - RNA, 19 nt, Artificial Sequence
  Description of Artificial Sequence: Synthetic oligonucleotide
guagcaaucaggacgggau

SEQ ID NO: 2223067 - RNA, 19 nt, Artificial Sequence
  Description of Artificial Sequence: Synthetic oligonucleotide
uuacugggcauugccuccu

SEQ ID NO: 2223068 - RNA, 19 nt, Artificial Sequence
  Description of Artificial Sequence: Synthetic oligonucleotide
ggacugggcaaggagagac

SEQ ID NO: 2223069 - RNA, 19 nt, Artificial Sequence
  Description of Artificial Sequence: Synthetic oligonucleotide
uccccaugagacguuucca

SEQ ID NO: 2223070 - RNA, 19 nt, Artificial Sequence
  Description of Artificial Sequence: Synthetic oligonucleotide
aguuacggccccaguagca

SEQ ID NO: 2223071 - RNA, 19 nt, Artificial Sequence
  Description of Artificial Sequence: Synthetic oligonucleotide
ugccccgcuguagagccag

SEQ ID NO: 2223072 - RNA, 19 nt, Artificial Sequence
  Description of Artificial Sequence: Synthetic oligonucleotide
ugucugacucauaguuguu

SEQ ID NO: 2223073 - RNA, 19 nt, Artificial Sequence
  Description of Artificial Sequence: Synthetic oligonucleotide
aguaggccucccagguuac

SEQ ID NO: 2223074 - RNA, 19 nt, Artificial Sequence
  Description of Artificial Sequence: Synthetic oligonucleotide
cuggguuguuggcaagcug

SEQ ID NO: 2223075 - RNA, 19 nt, Artificial Sequence
  Description of Artificial Sequence: Synthetic oligonucleotide
ggccccaguagcaaucagg

SEQ ID NO: 2223076 - RNA, 19 nt, Artificial Sequence
  Description of Artificial Sequence: Synthetic oligonucleotide
uccuccugcgcugauccuc

SEQ ID NO: 2223077 - RNA, 19 nt, Artificial Sequence
  Description of Artificial Sequence: Synthetic oligonucleotide
ccugagugcgacaguuacg

SEQ ID NO: 2223078 - RNA, 19 nt, Artificial Sequence
  Description of Artificial Sequence: Synthetic oligonucleotide
cugaggggcaacacgggaa

SEQ ID NO: 2223079 - RNA, 19 nt, Artificial Sequence
  Description of Artificial Sequence: Synthetic oligonucleotide
agguuacugggcauugccu

SEQ ID NO: 2223080 - RNA, 19 nt, Artificial Sequence
  Description of Artificial Sequence: Synthetic oligonucleotide
uuacgcuguugauccuccu

SEQ ID NO: 2223081 - RNA, 19 nt, Artificial Sequence
  Description of Artificial Sequence: Synthetic oligonucleotide
agaugugauugaauuucau

SEQ ID NO: 2223082 - RNA, 19 nt, Artificial Sequence
  Description of Artificial Sequence: Synthetic oligonucleotide
augagacguuuccauuuua

SEQ ID NO: 2223083 - RNA, 19 nt, Artificial Sequence
  Description of Artificial Sequence: Synthetic oligonucleotide
ccagguugagcucacagaa

SEQ ID NO: 2223084 - RNA, 19 nt, Artificial Sequence
  Description of Artificial Sequence: Synthetic oligonucleotide
caggagacucucugccaac

SEQ ID NO: 2223085 - RNA, 19 nt, Artificial Sequence
  Description of Artificial Sequence: Synthetic oligonucleotide
guagcucccaguucgcuau

SEQ ID NO: 2223086 - RNA, 19 nt, Artificial Sequence
  Description of Artificial Sequence: Synthetic oligonucleotide
auccuggguuguuggcaag

SEQ ID NO: 2223087 - RNA, 19 nt, Artificial Sequence
  Description of Artificial Sequence: Synthetic oligonucleotide
caagcagccaaagcagcca

SEQ ID NO: 2223088 - RNA, 19 nt, Artificial Sequence
  Description of Artificial Sequence: Synthetic oligonucleotide
caguaggccucccagguua

SEQ ID NO: 2223089 - RNA, 19 nt, Artificial Sequence
  Description of Artificial Sequence: Synthetic oligonucleotide
uucugacauaccugaccuu

SEQ ID NO: 2223090 - RNA, 19 nt, Artificial Sequence
  Description of Artificial Sequence: Synthetic oligonucleotide
ucauugcauggugagccuu

SEQ ID NO: 2223091 - RNA, 19 nt, Artificial Sequence
  Description of Artificial Sequence: Synthetic oligonucleotide
cagcucucggaagcuacgc

SEQ ID NO: 2223092 - RNA, 19 nt, Artificial Sequence
  Description of Artificial Sequence: Synthetic oligonucleotide
ggcauaggcuggaagcagc

SEQ ID NO: 2223093 - RNA, 19 nt, Artificial Sequence
  Description of Artificial Sequence: Synthetic oligonucleotide
uggggccaagcagccaaag

SEQ ID NO: 2223094 - RNA, 19 nt, Artificial Sequence
  Description of Artificial Sequence: Synthetic oligonucleotide
gugauucuguaaucagaua

SEQ ID NO: 2223095 - RNA, 19 nt, Artificial Sequence
  Description of Artificial Sequence: Synthetic oligonucleotide
cacgggaauccugcucacg

SEQ ID NO: 2223096 - RNA, 19 nt, Artificial Sequence
  Description of Artificial Sequence: Synthetic oligonucleotide
aucuuacgcuguugauccu

SEQ ID NO: 2223097 - RNA, 19 nt, Artificial Sequence
  Description of Artificial Sequence: Synthetic oligonucleotide
gccgauacugguaggucag

SEQ ID NO: 2223098 - RNA, 19 nt, Artificial Sequence
  Description of Artificial Sequence: Synthetic oligonucleotide
ucaggaugucugacucaua

SEQ ID NO: 2223099 - RNA, 19 nt, Artificial Sequence
  Description of Artificial Sequence: Synthetic oligonucleotide
uccugcucacgcucagcuc

SEQ ID NO: 2223100 - RNA, 19 nt, Artificial Sequence
  Description of Artificial Sequence: Synthetic oligonucleotide
ugauccuccugcgcugauc

SEQ ID NO: 2223101 - RNA, 19 nt, Artificial Sequence
  Description of Artificial Sequence: Synthetic oligonucleotide
acgcagaccacagcaguaa

SEQ ID NO: 2223102 - RNA, 19 nt, Artificial Sequence
  Description of Artificial Sequence: Synthetic oligonucleotide
gcuacgcagaccacagcag

SEQ ID NO: 2223103 - RNA, 19 nt, Artificial Sequence
  Description of Artificial Sequence: Synthetic oligonucleotide
ggcacauauaauccugggu

SEQ ID NO: 2223104 - RNA, 19 nt, Artificial Sequence
  Description of Artificial Sequence: Synthetic oligonucleotide
cgggauguuacagucacug

SEQ ID NO: 2223105 - RNA, 19 nt, Artificial Sequence
  Description of Artificial Sequence: Synthetic oligonucleotide
gcauggugagccuucaccu

SEQ ID NO: 2223106 - RNA, 19 nt, Artificial Sequence
  Description of Artificial Sequence: Synthetic oligonucleotide
gagaucuuacgcuguugau

SEQ ID NO: 2223107 - RNA, 19 nt, Artificial Sequence
  Description of Artificial Sequence: Synthetic oligonucleotide
caacugcucaguucuugaa

SEQ ID NO: 2223108 - RNA, 19 nt, Artificial Sequence
  Description of Artificial Sequence: Synthetic oligonucleotide
gcaacucagaagcaggaau

SEQ ID NO: 2223109 - RNA, 19 nt, Artificial Sequence
  Description of Artificial Sequence: Synthetic oligonucleotide
ccaguucgcuaucugggac

SEQ ID NO: 2223110 - RNA, 19 nt, Artificial Sequence
  Description of Artificial Sequence: Synthetic oligonucleotide
gucaagguacaagguacaa

SEQ ID NO: 2223111 - RNA, 19 nt, Artificial Sequence
  Description of Artificial Sequence: Synthetic oligonucleotide
cuguccaguaggagagaga

SEQ ID NO: 2223112 - RNA, 19 nt, Artificial Sequence
  Description of Artificial Sequence: Synthetic oligonucleotide
cccaauacaaauggcagaa

SEQ ID NO: 2223113 - RNA, 19 nt, Artificial Sequence
  Description of Artificial Sequence: Synthetic oligonucleotide
cuacgcagaccacagcagu

SEQ ID NO: 2223114 - RNA, 19 nt, Artificial Sequence
  Description of Artificial Sequence: Synthetic oligonucleotide
guugauccuccugcgcuga

SEQ ID NO: 2223115 - RNA, 19 nt, Artificial Sequence
  Description of Artificial Sequence: Synthetic oligonucleotide
caguaggagagagaucuua

SEQ ID NO: 2223116 - RNA, 19 nt, Artificial Sequence
  Description of Artificial Sequence: Synthetic oligonucleotide
gccccaguagcaaucagga

SEQ ID NO: 2223117 - RNA, 19 nt, Artificial Sequence
  Description of Artificial Sequence: Synthetic oligonucleotide
cugccgauacugguagguc

SEQ ID NO: 2223118 - RNA, 19 nt, Artificial Sequence
  Description of Artificial Sequence: Synthetic oligonucleotide
cacacugcugaggggcaac

SEQ ID NO: 2223119 - RNA, 19 nt, Artificial Sequence
  Description of Artificial Sequence: Synthetic oligonucleotide
uccccacaagggccugugu

SEQ ID NO: 2223120 - RNA, 19 nt, Artificial Sequence
  Description of Artificial Sequence: Synthetic oligonucleotide
caguucgcuaucugggacu

SEQ ID NO: 2223121 - RNA, 19 nt, Artificial Sequence
  Description of Artificial Sequence: Synthetic oligonucleotide
ucccagguuacugggcauu

SEQ ID NO: 2223122 - RNA, 19 nt, Artificial Sequence
  Description of Artificial Sequence: Synthetic oligonucleotide
uugauccuccugcgcugau

SEQ ID NO: 2223123 - RNA, 19 nt, Artificial Sequence
  Description of Artificial Sequence: Synthetic oligonucleotide
ccgggugcagccccaauac

SEQ ID NO: 2223124 - RNA, 19 nt, Artificial Sequence
  Description of Artificial Sequence: Synthetic oligonucleotide
ccaauacaaauggcagaag

SEQ ID NO: 2223125 - RNA, 19 nt, Artificial Sequence
  Description of Artificial Sequence: Synthetic oligonucleotide
gcugaggggcaacacggga

SEQ ID NO: 2223126 - RNA, 19 nt, Artificial Sequence
  Description of Artificial Sequence: Synthetic oligonucleotide
ccuuacauagaaugcuucu

SEQ ID NO: 2223127 - RNA, 19 nt, Artificial Sequence
  Description of Artificial Sequence: Synthetic oligonucleotide
cugcucacgcucagcucuc

SEQ ID NO: 2223128 - RNA, 19 nt, Artificial Sequence
  Description of Artificial Sequence: Synthetic oligonucleotide
guucgcuaucugggacugg

SEQ ID NO: 2223129 - RNA, 19 nt, Artificial Sequence
  Description of Artificial Sequence: Synthetic oligonucleotide
ugcgacaguuacggcccca

SEQ ID NO: 2223130 - RNA, 19 nt, Artificial Sequence
  Description of Artificial Sequence: Synthetic oligonucleotide
caagcuggcagauguugau

SEQ ID NO: 2223131 - RNA, 19 nt, Artificial Sequence
  Description of Artificial Sequence: Synthetic oligonucleotide
accugaccuuuuccccaug

SEQ ID NO: 2223132 - RNA, 19 nt, Artificial Sequence
  Description of Artificial Sequence: Synthetic oligonucleotide
gggugcagccccaauacaa

SEQ ID NO: 2223133 - RNA, 19 nt, Artificial Sequence
  Description of Artificial Sequence: Synthetic oligonucleotide
ccccaauacaaauggcaga

SEQ ID NO: 2223134 - RNA, 19 nt, Artificial Sequence
  Description of Artificial Sequence: Synthetic oligonucleotide
ggaauccugcucacgcuca

SEQ ID NO: 2223135 - RNA, 19 nt, Artificial Sequence
  Description of Artificial Sequence: Synthetic oligonucleotide
caggacgggauguuacagu

SEQ ID NO: 2223136 - RNA, 19 nt, Artificial Sequence
  Description of Artificial Sequence: Synthetic oligonucleotide
acggccccaguagcaauca

SEQ ID NO: 2223137 - RNA, 19 nt, Artificial Sequence
  Description of Artificial Sequence: Synthetic oligonucleotide
ggaauguucugccgauacu

SEQ ID NO: 2223138 - RNA, 19 nt, Artificial Sequence
  Description of Artificial Sequence: Synthetic oligonucleotide
ccgcuguagagccaggaga

SEQ ID NO: 2223139 - RNA, 19 nt, Artificial Sequence
  Description of Artificial Sequence: Synthetic oligonucleotide
caugagacguuuccauuuu

SEQ ID NO: 2223140 - RNA, 19 nt, Artificial Sequence
  Description of Artificial Sequence: Synthetic oligonucleotide
caguagcaaucaggacggg

SEQ ID NO: 2223141 - RNA, 19 nt, Artificial Sequence
  Description of Artificial Sequence: Synthetic oligonucleotide
cccgcuguagagccaggag

SEQ ID NO: 2223142 - RNA, 19 nt, Artificial Sequence
  Description of Artificial Sequence: Synthetic oligonucleotide
gcucccaguucgcuaucug

SEQ ID NO: 2223143 - RNA, 19 nt, Artificial Sequence
  Description of Artificial Sequence: Synthetic oligonucleotide
caaucaggacgggauguua

SEQ ID NO: 2223144 - RNA, 19 nt, Artificial Sequence
  Description of Artificial Sequence: Synthetic oligonucleotide
gcgacaguuacggccccag

SEQ ID NO: 2223145 - RNA, 19 nt, Artificial Sequence
  Description of Artificial Sequence: Synthetic oligonucleotide
gugcgacaguuacggcccc

SEQ ID NO: 2223146 - RNA, 19 nt, Artificial Sequence
  Description of Artificial Sequence: Synthetic oligonucleotide
gaggggcaacacgggaauc

SEQ ID NO: 2223147 - RNA, 19 nt, Artificial Sequence
  Description of Artificial Sequence: Synthetic oligonucleotide
gccuucaccugagugcgac

SEQ ID NO: 2223148 - RNA, 19 nt, Artificial Sequence
  Description of Artificial Sequence: Synthetic oligonucleotide
ccaaagcagccaguccggg

SEQ ID NO: 2223149 - RNA, 19 nt, Artificial Sequence
  Description of Artificial Sequence: Synthetic oligonucleotide
ccuggcagccagguaauuc

SEQ ID NO: 2223150 - RNA, 19 nt, Artificial Sequence
  Description of Artificial Sequence: Synthetic oligonucleotide
gugcagccccaauacaaau

SEQ ID NO: 2223151 - RNA, 19 nt, Artificial Sequence
  Description of Artificial Sequence: Synthetic oligonucleotide
ggugcauauggcauggcuu

SEQ ID NO: 2223152 - RNA, 19 nt, Artificial Sequence
  Description of Artificial Sequence: Synthetic oligonucleotide
cagcucuccggucaggcau

SEQ ID NO: 2223153 - RNA, 19 nt, Artificial Sequence
  Description of Artificial Sequence: Synthetic oligonucleotide
ccaguccgggugcagcccc

SEQ ID NO: 2223154 - RNA, 19 nt, Artificial Sequence
  Description of Artificial Sequence: Synthetic oligonucleotide
gcauaggcuggaagcagca

SEQ ID NO: 2223155 - RNA, 19 nt, Artificial Sequence
  Description of Artificial Sequence: Synthetic oligonucleotide
caggugcauauggcauggc

SEQ ID NO: 2223156 - RNA, 19 nt, Artificial Sequence
  Description of Artificial Sequence: Synthetic oligonucleotide
guccaguaggagagagauc

SEQ ID NO: 2223157 - RNA, 19 nt, Artificial Sequence
  Description of Artificial Sequence: Synthetic oligonucleotide
ggcauugccuccuguugcu

SEQ ID NO: 2223158 - RNA, 19 nt, Artificial Sequence
  Description of Artificial Sequence: Synthetic oligonucleotide
guguuuccagugauucugu

SEQ ID NO: 2223159 - RNA, 19 nt, Artificial Sequence
  Description of Artificial Sequence: Synthetic oligonucleotide
cccaguucgcuaucuggga

SEQ ID NO: 2223160 - RNA, 19 nt, Artificial Sequence
  Description of Artificial Sequence: Synthetic oligonucleotide
ccucaccaagcacaaggga

SEQ ID NO: 2223161 - RNA, 19 nt, Artificial Sequence
  Description of Artificial Sequence: Synthetic oligonucleotide
acgggauguuacagucacu

SEQ ID NO: 2223162 - RNA, 19 nt, Artificial Sequence
  Description of Artificial Sequence: Synthetic oligonucleotide
cucuccggucaggcauagg

SEQ ID NO: 2223163 - RNA, 19 nt, Artificial Sequence
  Description of Artificial Sequence: Synthetic oligonucleotide
ccagguuacugggcauugc

SEQ ID NO: 2223164 - RNA, 19 nt, Artificial Sequence
  Description of Artificial Sequence: Synthetic oligonucleotide
ggacgggauguuacaguca

SEQ ID NO: 2223165 - RNA, 19 nt, Artificial Sequence
  Description of Artificial Sequence: Synthetic oligonucleotide
cugacauaccugaccuuuu

SEQ ID NO: 2223166 - RNA, 19 nt, Artificial Sequence
  Description of Artificial Sequence: Synthetic oligonucleotide
ccccaguagcaaucaggac

SEQ ID NO: 2223167 - RNA, 19 nt, Artificial Sequence
  Description of Artificial Sequence: Synthetic oligonucleotide
caccugagugcgacaguua

SEQ ID NO: 2223168 - RNA, 19 nt, Artificial Sequence
  Description of Artificial Sequence: Synthetic oligonucleotide
cugccucaccaagcacaag

SEQ ID NO: 2223169 - RNA, 19 nt, Artificial Sequence
  Description of Artificial Sequence: Synthetic oligonucleotide
cgcuaucugggacugggca

SEQ ID NO: 2223170 - RNA, 19 nt, Artificial Sequence
  Description of Artificial Sequence: Synthetic oligonucleotide
cugggcauugccuccuguu

SEQ ID NO: 2223171 - RNA, 19 nt, Artificial Sequence
  Description of Artificial Sequence: Synthetic oligonucleotide
ccugaagagggcacauaua

SEQ ID NO: 2223172 - RNA, 19 nt, Artificial Sequence
  Description of Artificial Sequence: Synthetic oligonucleotide
cccagguuacugggcauug

SEQ ID NO: 2223173 - RNA, 19 nt, Artificial Sequence
  Description of Artificial Sequence: Synthetic oligonucleotide
agcucuccggucaggcaua

SEQ ID NO: 2223174 - RNA, 19 nt, Artificial Sequence
  Description of Artificial Sequence: Synthetic oligonucleotide
ggcugcaggcacacugcac

SEQ ID NO: 2223175 - RNA, 19 nt, Artificial Sequence
  Description of Artificial Sequence: Synthetic oligonucleotide
cgcagaccacagcaguaac

SEQ ID NO: 2223176 - RNA, 19 nt, Artificial Sequence
  Description of Artificial Sequence: Synthetic oligonucleotide
ccgauacugguaggucagc

SEQ ID NO: 2223177 - RNA, 19 nt, Artificial Sequence
  Description of Artificial Sequence: Synthetic oligonucleotide
gcaacacgggaauccugcu

SEQ ID NO: 2223178 - RNA, 19 nt, Artificial Sequence
  Description of Artificial Sequence: Synthetic oligonucleotide
caggaauguucugccgaua

SEQ ID NO: 2223179 - RNA, 19 nt, Artificial Sequence
  Description of Artificial Sequence: Synthetic oligonucleotide
auggggccaagcagccaaa

SEQ ID NO: 2223180 - RNA, 19 nt, Artificial Sequence
  Description of Artificial Sequence: Synthetic oligonucleotide
gcucuccggucaggcauag

SEQ ID NO: 2223181 - RNA, 19 nt, Artificial Sequence
  Description of Artificial Sequence: Synthetic oligonucleotide
gccaguccgggugcagccc

SEQ ID NO: 2223182 - RNA, 19 nt, Artificial Sequence
  Description of Artificial Sequence: Synthetic oligonucleotide
cucccagguuacugggcau

SEQ ID NO: 2223183 - RNA, 19 nt, Artificial Sequence
  Description of Artificial Sequence: Synthetic oligonucleotide
ccccaugagacguuuccau

SEQ ID NO: 2223184 - RNA, 19 nt, Artificial Sequence
  Description of Artificial Sequence: Synthetic oligonucleotide
ggucagcucucggaagcua

SEQ ID NO: 2223185 - RNA, 19 nt, Artificial Sequence
  Description of Artificial Sequence: Synthetic oligonucleotide
cguuuccauuuuaacugua

SEQ ID NO: 2223186 - RNA, 19 nt, Artificial Sequence
  Description of Artificial Sequence: Synthetic oligonucleotide
gcagauguugauggugcuu

SEQ ID NO: 2223187 - RNA, 19 nt, Artificial Sequence
  Description of Artificial Sequence: Synthetic oligonucleotide
gcuguagagccaggagacu

SEQ ID NO: 2223188 - RNA, 19 nt, Artificial Sequence
  Description of Artificial Sequence: Synthetic oligonucleotide
guaggccucccagguuacu

SEQ ID NO: 2223189 - RNA, 19 nt, Artificial Sequence
  Description of Artificial Sequence: Synthetic oligonucleotide
augccccgcuguagagcca

SEQ ID NO: 2223190 - RNA, 19 nt, Artificial Sequence
  Description of Artificial Sequence: Synthetic oligonucleotide
cggaagcuacgcagaccac

SEQ ID NO: 2223191 - RNA, 19 nt, Artificial Sequence
  Description of Artificial Sequence: Synthetic oligonucleotide
cccaugagacguuuccauu

SEQ ID NO: 2223192 - RNA, 19 nt, Artificial Sequence
  Description of Artificial Sequence: Synthetic oligonucleotide
gcaaucaggacgggauguu

SEQ ID NO: 2223193 - RNA, 19 nt, Artificial Sequence
  Description of Artificial Sequence: Synthetic oligonucleotide
cgauacugguaggucagcu

SEQ ID NO: 2223194 - RNA, 19 nt, Artificial Sequence
  Description of Artificial Sequence: Synthetic oligonucleotide
cgggugcagccccaauaca

SEQ ID NO: 2223195 - RNA, 19 nt, Artificial Sequence
  Description of Artificial Sequence: Synthetic oligonucleotide
ccccgcuguagagccagga

SEQ ID NO: 2223196 - RNA, 19 nt, Artificial Sequence
  Description of Artificial Sequence: Synthetic oligonucleotide
guccgggugcagccccaau

SEQ ID NO: 2223197 - RNA, 19 nt, Artificial Sequence
  Description of Artificial Sequence: Synthetic oligonucleotide
ccccuggcagccagguaau

SEQ ID NO: 2223198 - RNA, 19 nt, Artificial Sequence
  Description of Artificial Sequence: Synthetic oligonucleotide
ccuggccaguguggccagu

SEQ ID NO: 2223199 - RNA, 19 nt, Artificial Sequence
  Description of Artificial Sequence: Synthetic oligonucleotide
aaaauaacuguccacaacc

SEQ ID NO: 2223200 - RNA, 19 nt, Artificial Sequence
  Description of Artificial Sequence: Synthetic oligonucleotide
aagauugcaaauaacaacc

SEQ ID NO: 2223201 - RNA, 19 nt, Artificial Sequence
  Description of Artificial Sequence: Synthetic oligonucleotide
ucuaagauugcaaauaaca

SEQ ID NO: 2223202 - RNA, 19 nt, Artificial Sequence
  Description of Artificial Sequence: Synthetic oligonucleotide
uguacaagaauaaaggaac

SEQ ID NO: 2223203 - RNA, 19 nt, Artificial Sequence
  Description of Artificial Sequence: Synthetic oligonucleotide
acuagaauaaaauucaggu

SEQ ID NO: 2223204 - RNA, 19 nt, Artificial Sequence
  Description of Artificial Sequence: Synthetic oligonucleotide
agaacugccaagcauaugg

SEQ ID NO: 2223205 - RNA, 19 nt, Artificial Sequence
  Description of Artificial Sequence: Synthetic oligonucleotide
aaaguaguccucuugucac

SEQ ID NO: 2223206 - RNA, 19 nt, Artificial Sequence
  Description of Artificial Sequence: Synthetic oligonucleotide
aaacauaguagaaugcugc

SEQ ID NO: 2223207 - RNA, 19 nt, Artificial Sequence
  Description of Artificial Sequence: Synthetic oligonucleotide
uuaugugucaaucaguugu

SEQ ID NO: 2223208 - RNA, 19 nt, Artificial Sequence
  Description of Artificial Sequence: Synthetic oligonucleotide
aaucauagggacaaaacgg

SEQ ID NO: 2223209 - RNA, 19 nt, Artificial Sequence
  Description of Artificial Sequence: Synthetic oligonucleotide
uuauuauucagauaaagua

SEQ ID NO: 2223210 - RNA, 19 nt, Artificial Sequence
  Description of Artificial Sequence: Synthetic oligonucleotide
uagacuagaauaaaauuca

SEQ ID NO: 2223211 - RNA, 19 nt, Artificial Sequence
  Description of Artificial Sequence: Synthetic oligonucleotide
aaucauacuauguugcaca

SEQ ID NO: 2223212 - RNA, 19 nt, Artificial Sequence
  Description of Artificial Sequence: Synthetic oligonucleotide
cauacuauguugcacauag

SEQ ID NO: 2223213 - RNA, 19 nt, Artificial Sequence
  Description of Artificial Sequence: Synthetic oligonucleotide
cuugcuagcaaauacaauc

SEQ ID NO: 2223214 - RNA, 19 nt, Artificial Sequence
  Description of Artificial Sequence: Synthetic oligonucleotide
guagugauuaagcucagcg

SEQ ID NO: 2223215 - RNA, 19 nt, Artificial Sequence
  Description of Artificial Sequence: Synthetic oligonucleotide
uuugugaagaaacuguagu

SEQ ID NO: 2223216 - RNA, 19 nt, Artificial Sequence
  Description of Artificial Sequence: Synthetic oligonucleotide
accuccauaauguaauggc

SEQ ID NO: 2223217 - RNA, 19 nt, Artificial Sequence
  Description of Artificial Sequence: Synthetic oligonucleotide
uaagauugcaaauaacaac

SEQ ID NO: 2223218 - RNA, 19 nt, Artificial Sequence
  Description of Artificial Sequence: Synthetic oligonucleotide
agugauuaagcucagcgug

SEQ ID NO: 2223219 - RNA, 19 nt, Artificial Sequence
  Description of Artificial Sequence: Synthetic oligonucleotide
aagcauauggggauaauac

SEQ ID NO: 2223220 - RNA, 19 nt, Artificial Sequence
  Description of Artificial Sequence: Synthetic oligonucleotide
aaaacaucuguaaguaugg

SEQ ID NO: 2223221 - RNA, 19 nt, Artificial Sequence
  Description of Artificial Sequence: Synthetic oligonucleotide
ucaggcuuuaccuaaaagu

SEQ ID NO: 2223222 - RNA, 19 nt, Artificial Sequence
  Description of Artificial Sequence: Synthetic oligonucleotide
uacuauguugcacauagac

SEQ ID NO: 2223223 - RNA, 19 nt, Artificial Sequence
  Description of Artificial Sequence: Synthetic oligonucleotide
uaaguaugguaucagaaaa

SEQ ID NO: 2223224 - RNA, 19 nt, Artificial Sequence
  Description of Artificial Sequence: Synthetic oligonucleotide
cauaguagaaugcugcugc

SEQ ID NO: 2223225 - RNA, 19 nt, Artificial Sequence
  Description of Artificial Sequence: Synthetic oligonucleotide
agucuugugaucaaccucc

SEQ ID NO: 2223226 - RNA, 19 nt, Artificial Sequence
  Description of Artificial Sequence: Synthetic oligonucleotide
aaaucugaaguuauuaaca

SEQ ID NO: 2223227 - RNA, 19 nt, Artificial Sequence
  Description of Artificial Sequence: Synthetic oligonucleotide
uagucugcugaucugauug

SEQ ID NO: 2223228 - RNA, 19 nt, Artificial Sequence
  Description of Artificial Sequence: Synthetic oligonucleotide
cagucuuguaaucauaggg

SEQ ID NO: 2223229 - RNA, 19 nt, Artificial Sequence
  Description of Artificial Sequence: Synthetic oligonucleotide
aauaacaacccacuaguuu

SEQ ID NO: 2223230 - RNA, 19 nt, Artificial Sequence
  Description of Artificial Sequence: Synthetic oligonucleotide
aguaaccgagcuuucaagg

SEQ ID NO: 2223231 - RNA, 19 nt, Artificial Sequence
  Description of Artificial Sequence: Synthetic oligonucleotide
aagucauuauuauucagau

SEQ ID NO: 2223232 - RNA, 19 nt, Artificial Sequence
  Description of Artificial Sequence: Synthetic oligonucleotide
ugugcaauggucccgaaaa

SEQ ID NO: 2223233 - RNA, 19 nt, Artificial Sequence
  Description of Artificial Sequence: Synthetic oligonucleotide
aauguaauggcagucuugu

SEQ ID NO: 2223234 - RNA, 19 nt, Artificial Sequence
  Description of Artificial Sequence: Synthetic oligonucleotide
cucuuguacaagaauaaag

SEQ ID NO: 2223235 - RNA, 19 nt, Artificial Sequence
  Description of Artificial Sequence: Synthetic oligonucleotide
uaaaagucauuauuauuca

SEQ ID NO: 2223236 - RNA, 19 nt, Artificial Sequence
  Description of Artificial Sequence: Synthetic oligonucleotide
cugagauuugugaagaaac

SEQ ID NO: 2223237 - RNA, 19 nt, Artificial Sequence
  Description of Artificial Sequence: Synthetic oligonucleotide
uugcacauagacuagaaua

SEQ ID NO: 2223238 - RNA, 19 nt, Artificial Sequence
  Description of Artificial Sequence: Synthetic oligonucleotide
uguagucuugugaucaacc

SEQ ID NO: 2223239 - RNA, 19 nt, Artificial Sequence
  Description of Artificial Sequence: Synthetic oligonucleotide
auaacaacccacuaguuuu

SEQ ID NO: 2223240 - RNA, 19 nt, Artificial Sequence
  Description of Artificial Sequence: Synthetic oligonucleotide
ugcacauagacuagaauaa

SEQ ID NO: 2223241 - RNA, 19 nt, Artificial Sequence
  Description of Artificial Sequence: Synthetic oligonucleotide
uauuaacaugauucugugg

SEQ ID NO: 2223242 - RNA, 19 nt, Artificial Sequence
  Description of Artificial Sequence: Synthetic oligonucleotide
ucaaccuccauaauguaau

SEQ ID NO: 2223243 - RNA, 19 nt, Artificial Sequence
  Description of Artificial Sequence: Synthetic oligonucleotide
uauucagauaaaguagucc

SEQ ID NO: 2223244 - RNA, 19 nt, Artificial Sequence
  Description of Artificial Sequence: Synthetic oligonucleotide
cuagcaaauacaaucccac

SEQ ID NO: 2223245 - RNA, 19 nt, Artificial Sequence
  Description of Artificial Sequence: Synthetic oligonucleotide
uuggcauuucagaacaagc

SEQ ID NO: 2223246 - RNA, 19 nt, Artificial Sequence
  Description of Artificial Sequence: Synthetic oligonucleotide
ugugguacuguuucucagg

SEQ ID NO: 2223247 - RNA, 19 nt, Artificial Sequence
  Description of Artificial Sequence: Synthetic oligonucleotide
aaguaaccgagcuuucaag

SEQ ID NO: 2223248 - RNA, 19 nt, Artificial Sequence
  Description of Artificial Sequence: Synthetic oligonucleotide
aacugccaagcauaugggg

SEQ ID NO: 2223249 - RNA, 19 nt, Artificial Sequence
  Description of Artificial Sequence: Synthetic oligonucleotide
aaaacauaguagaaugcug

SEQ ID NO: 2223250 - RNA, 19 nt, Artificial Sequence
  Description of Artificial Sequence: Synthetic oligonucleotide
ugugguuccuucccgaggc

SEQ ID NO: 2223251 - RNA, 19 nt, Artificial Sequence
  Description of Artificial Sequence: Synthetic oligonucleotide
agggacaaaacggugaccg

SEQ ID NO: 2223252 - RNA, 19 nt, Artificial Sequence
  Description of Artificial Sequence: Synthetic oligonucleotide
ugagauuugugaagaaacu

SEQ ID NO: 2223253 - RNA, 19 nt, Artificial Sequence
  Description of Artificial Sequence: Synthetic oligonucleotide
agaacaagccaccucaaga

SEQ ID NO: 2223254 - RNA, 19 nt, Artificial Sequence
  Description of Artificial Sequence: Synthetic oligonucleotide
uguuguaagucucauugau

SEQ ID NO: 2223255 - RNA, 19 nt, Artificial Sequence
  Description of Artificial Sequence: Synthetic oligonucleotide
acuguuuugggaucagcuc

SEQ ID NO: 2223256 - RNA, 19 nt, Artificial Sequence
  Description of Artificial Sequence: Synthetic oligonucleotide
acccacuaguuuuacuucc

SEQ ID NO: 2223257 - RNA, 19 nt, Artificial Sequence
  Description of Artificial Sequence: Synthetic oligonucleotide
auaaaguaguccucuuguc

SEQ ID NO: 2223258 - RNA, 19 nt, Artificial Sequence
  Description of Artificial Sequence: Synthetic oligonucleotide
cucgguucugaauagucgg

SEQ ID NO: 2223259 - RNA, 19 nt, Artificial Sequence
  Description of Artificial Sequence: Synthetic oligonucleotide
cuccauaauguaauggcag

SEQ ID NO: 2223260 - RNA, 19 nt, Artificial Sequence
  Description of Artificial Sequence: Synthetic oligonucleotide
uaaccgagcuuucaaggag

SEQ ID NO: 2223261 - RNA, 19 nt, Artificial Sequence
  Description of Artificial Sequence: Synthetic oligonucleotide
cucguagugauuaagcuca

SEQ ID NO: 2223262 - RNA, 19 nt, Artificial Sequence
  Description of Artificial Sequence: Synthetic oligonucleotide
agucucauugauuucaaaa

SEQ ID NO: 2223263 - RNA, 19 nt, Artificial Sequence
  Description of Artificial Sequence: Synthetic oligonucleotide
gugaucaaccuccauaaug

SEQ ID NO: 2223264 - RNA, 19 nt, Artificial Sequence
  Description of Artificial Sequence: Synthetic oligonucleotide
aguuguagucugcugaucu

SEQ ID NO: 2223265 - RNA, 19 nt, Artificial Sequence
  Description of Artificial Sequence: Synthetic oligonucleotide
uugugaucaaccuccauaa

SEQ ID NO: 2223266 - RNA, 19 nt, Artificial Sequence
  Description of Artificial Sequence: Synthetic oligonucleotide
auuggaagccuucacaaau

SEQ ID NO: 2223267 - RNA, 19 nt, Artificial Sequence
  Description of Artificial Sequence: Synthetic oligonucleotide
auuauucagauaaaguagu

SEQ ID NO: 2223268 - RNA, 19 nt, Artificial Sequence
  Description of Artificial Sequence: Synthetic oligonucleotide
ugauuggaagccuucacaa

SEQ ID NO: 2223269 - RNA, 19 nt, Artificial Sequence
  Description of Artificial Sequence: Synthetic oligonucleotide
ucaaguuucuaagauugca

SEQ ID NO: 2223270 - RNA, 19 nt, Artificial Sequence
  Description of Artificial Sequence: Synthetic oligonucleotide
uaauguaauggcagucuug

SEQ ID NO: 2223271 - RNA, 19 nt, Artificial Sequence
  Description of Artificial Sequence: Synthetic oligonucleotide
uauguugcacauagacuag

SEQ ID NO: 2223272 - RNA, 19 nt, Artificial Sequence
  Description of Artificial Sequence: Synthetic oligonucleotide
uuaagucucuguuccacca

SEQ ID NO: 2223273 - RNA, 19 nt, Artificial Sequence
  Description of Artificial Sequence: Synthetic oligonucleotide
ucagauaaaguaguccucu

SEQ ID NO: 2223274 - RNA, 19 nt, Artificial Sequence
  Description of Artificial Sequence: Synthetic oligonucleotide
uuuaagucucuguuccacc

SEQ ID NO: 2223275 - RNA, 19 nt, Artificial Sequence
  Description of Artificial Sequence: Synthetic oligonucleotide
gcaaauaacaacccacuag

SEQ ID NO: 2223276 - RNA, 19 nt, Artificial Sequence
  Description of Artificial Sequence: Synthetic oligonucleotide
gagauuugugaagaaacug

SEQ ID NO: 2223277 - RNA, 19 nt, Artificial Sequence
  Description of Artificial Sequence: Synthetic oligonucleotide
aaccuccauaauguaaugg

SEQ ID NO: 2223278 - RNA, 19 nt, Artificial Sequence
  Description of Artificial Sequence: Synthetic oligonucleotide
uugugaagaaacuguaguc

SEQ ID NO: 2223279 - RNA, 19 nt, Artificial Sequence
  Description of Artificial Sequence: Synthetic oligonucleotide
gugucaaucaguuguaguc

SEQ ID NO: 2223280 - RNA, 19 nt, Artificial Sequence
  Description of Artificial Sequence: Synthetic oligonucleotide
aauagucgggugccuuugg

SEQ ID NO: 2223281 - RNA, 19 nt, Artificial Sequence
  Description of Artificial Sequence: Synthetic oligonucleotide
uuuaccuaaaagucauuau

SEQ ID NO: 2223282 - RNA, 19 nt, Artificial Sequence
  Description of Artificial Sequence: Synthetic oligonucleotide
uuuggcauuucagaacaag

SEQ ID NO: 2223283 - RNA, 19 nt, Artificial Sequence
  Description of Artificial Sequence: Synthetic oligonucleotide
uucccgaggcucuucaggg

SEQ ID NO: 2223284 - RNA, 19 nt, Artificial Sequence
  Description of Artificial Sequence: Synthetic oligonucleotide
acaucuguaaguaugguau

SEQ ID NO: 2223285 - RNA, 19 nt, Artificial Sequence
  Description of Artificial Sequence: Synthetic oligonucleotide
cauuucagaacaagccacc

SEQ ID NO: 2223286 - RNA, 19 nt, Artificial Sequence
  Description of Artificial Sequence: Synthetic oligonucleotide
agauugcaaauaacaaccc

SEQ ID NO: 2223287 - RNA, 19 nt, Artificial Sequence
  Description of Artificial Sequence: Synthetic oligonucleotide
uuauucagauaaaguaguc

SEQ ID NO: 2223288 - RNA, 19 nt, Artificial Sequence
  Description of Artificial Sequence: Synthetic oligonucleotide
gcaaauacaaucccacucc

SEQ ID NO: 2223289 - RNA, 19 nt, Artificial Sequence
  Description of Artificial Sequence: Synthetic oligonucleotide
ucauagggacaaaacggug

SEQ ID NO: 2223290 - RNA, 19 nt, Artificial Sequence
  Description of Artificial Sequence: Synthetic oligonucleotide
ugcgcuugcuagcaaauac

SEQ ID NO: 2223291 - RNA, 19 nt, Artificial Sequence
  Description of Artificial Sequence: Synthetic oligonucleotide
cuaagauugcaaauaacaa

SEQ ID NO: 2223292 - RNA, 19 nt, Artificial Sequence
  Description of Artificial Sequence: Synthetic oligonucleotide
uuuaugugucaaucaguug

SEQ ID NO: 2223293 - RNA, 19 nt, Artificial Sequence
  Description of Artificial Sequence: Synthetic oligonucleotide
ugcuagcaaauacaauccc

SEQ ID NO: 2223294 - RNA, 19 nt, Artificial Sequence
  Description of Artificial Sequence: Synthetic oligonucleotide
uccauaauguaauggcagu

SEQ ID NO: 2223295 - RNA, 19 nt, Artificial Sequence
  Description of Artificial Sequence: Synthetic oligonucleotide
agauuugugaagaaacugu

SEQ ID NO: 2223296 - RNA, 19 nt, Artificial Sequence
  Description of Artificial Sequence: Synthetic oligonucleotide
auaguagaaugcugcugcg

SEQ ID NO: 2223297 - RNA, 19 nt, Artificial Sequence
  Description of Artificial Sequence: Synthetic oligonucleotide
ccuguuguaagucucauug

SEQ ID NO: 2223298 - RNA, 19 nt, Artificial Sequence
  Description of Artificial Sequence: Synthetic oligonucleotide
auagucgggugccuuuggc

SEQ ID NO: 2223299 - RNA, 19 nt, Artificial Sequence
  Description of Artificial Sequence: Synthetic oligonucleotide
ucgguucugaauagucggg

SEQ ID NO: 2223300 - RNA, 19 nt, Artificial Sequence
  Description of Artificial Sequence: Synthetic oligonucleotide
aucugaaguuauuaacaug

SEQ ID NO: 2223301 - RNA, 19 nt, Artificial Sequence
  Description of Artificial Sequence: Synthetic oligonucleotide
agcauauggggauaauaca

SEQ ID NO: 2223302 - RNA, 19 nt, Artificial Sequence
  Description of Artificial Sequence: Synthetic oligonucleotide
uguaaucauagggacaaaa

SEQ ID NO: 2223303 - RNA, 19 nt, Artificial Sequence
  Description of Artificial Sequence: Synthetic oligonucleotide
uucaaguuucuaagauugc

SEQ ID NO: 2223304 - RNA, 19 nt, Artificial Sequence
  Description of Artificial Sequence: Synthetic oligonucleotide
gucuuguaaucauagggac

SEQ ID NO: 2223305 - RNA, 19 nt, Artificial Sequence
  Description of Artificial Sequence: Synthetic oligonucleotide
guaaguaugguaucagaaa

SEQ ID NO: 2223306 - RNA, 19 nt, Artificial Sequence
  Description of Artificial Sequence: Synthetic oligonucleotide
ugugucaaucaguuguagu

SEQ ID NO: 2223307 - RNA, 19 nt, Artificial Sequence
  Description of Artificial Sequence: Synthetic oligonucleotide
uggggauaauacaguagcc

SEQ ID NO: 2223308 - RNA, 19 nt, Artificial Sequence
  Description of Artificial Sequence: Synthetic oligonucleotide
ugucaaucaguuguagucu

SEQ ID NO: 2223309 - RNA, 19 nt, Artificial Sequence
  Description of Artificial Sequence: Synthetic oligonucleotide
uucagauaaaguaguccuc

SEQ ID NO: 2223310 - RNA, 19 nt, Artificial Sequence
  Description of Artificial Sequence: Synthetic oligonucleotide
uuucucaggcuuuaccuaa

SEQ ID NO: 2223311 - RNA, 19 nt, Artificial Sequence
  Description of Artificial Sequence: Synthetic oligonucleotide
agucuuguaaucauaggga

SEQ ID NO: 2223312 - RNA, 19 nt, Artificial Sequence
  Description of Artificial Sequence: Synthetic oligonucleotide
caaauaacaacccacuagu

SEQ ID NO: 2223313 - RNA, 19 nt, Artificial Sequence
  Description of Artificial Sequence: Synthetic oligonucleotide
uguuccaaagccagccugu

SEQ ID NO: 2223314 - RNA, 19 nt, Artificial Sequence
  Description of Artificial Sequence: Synthetic oligonucleotide
ucacaaaugccugguggcg

SEQ ID NO: 2223315 - RNA, 19 nt, Artificial Sequence
  Description of Artificial Sequence: Synthetic oligonucleotide
aagucucuguuccaccaca

SEQ ID NO: 2223316 - RNA, 19 nt, Artificial Sequence
  Description of Artificial Sequence: Synthetic oligonucleotide
agucacucgguucugaaua

SEQ ID NO: 2223317 - RNA, 19 nt, Artificial Sequence
  Description of Artificial Sequence: Synthetic oligonucleotide
uccaauccaucccauccgc

SEQ ID NO: 2223318 - RNA, 19 nt, Artificial Sequence
  Description of Artificial Sequence: Synthetic oligonucleotide
accuaaaagucauuauuau

SEQ ID NO: 2223319 - RNA, 19 nt, Artificial Sequence
  Description of Artificial Sequence: Synthetic oligonucleotide
uuaagcucagcgugacugc

SEQ ID NO: 2223320 - RNA, 19 nt, Artificial Sequence
  Description of Artificial Sequence: Synthetic oligonucleotide
guaaucauagggacaaaac

SEQ ID NO: 2223321 - RNA, 19 nt, Artificial Sequence
  Description of Artificial Sequence: Synthetic oligonucleotide
agggcagggaaaguaaccg

SEQ ID NO: 2223322 - RNA, 19 nt, Artificial Sequence
  Description of Artificial Sequence: Synthetic oligonucleotide
ucauuauuauucagauaaa

SEQ ID NO: 2223323 - RNA, 19 nt, Artificial Sequence
  Description of Artificial Sequence: Synthetic oligonucleotide
uucugaauagucgggugcc

SEQ ID NO: 2223324 - RNA, 19 nt, Artificial Sequence
  Description of Artificial Sequence: Synthetic oligonucleotide
aacaacccacuaguuuuac

SEQ ID NO: 2223325 - RNA, 19 nt, Artificial Sequence
  Description of Artificial Sequence: Synthetic oligonucleotide
cauagggacaaaacgguga

SEQ ID NO: 2223326 - RNA, 19 nt, Artificial Sequence
  Description of Artificial Sequence: Synthetic oligonucleotide
aaucccacuccaauccauc

SEQ ID NO: 2223327 - RNA, 19 nt, Artificial Sequence
  Description of Artificial Sequence: Synthetic oligonucleotide
agucugcugaucugauugg

SEQ ID NO: 2223328 - RNA, 19 nt, Artificial Sequence
  Description of Artificial Sequence: Synthetic oligonucleotide
ugcaaauaacaacccacua

SEQ ID NO: 2223329 - RNA, 19 nt, Artificial Sequence
  Description of Artificial Sequence: Synthetic oligonucleotide
uagucuugugaucaaccuc

SEQ ID NO: 2223330 - RNA, 19 nt, Artificial Sequence
  Description of Artificial Sequence: Synthetic oligonucleotide
ccgaaaaucuuccuguucc

SEQ ID NO: 2223331 - RNA, 19 nt, Artificial Sequence
  Description of Artificial Sequence: Synthetic oligonucleotide
gcauauggggauaauacag

SEQ ID NO: 2223332 - RNA, 19 nt, Artificial Sequence
  Description of Artificial Sequence: Synthetic oligonucleotide
uguugcacauagacuagaa

SEQ ID NO: 2223333 - RNA, 19 nt, Artificial Sequence
  Description of Artificial Sequence: Synthetic oligonucleotide
cuagaauaaaauucaggua

SEQ ID NO: 2223334 - RNA, 19 nt, Artificial Sequence
  Description of Artificial Sequence: Synthetic oligonucleotide
uuucagaacaagccaccuc

SEQ ID NO: 2223335 - RNA, 19 nt, Artificial Sequence
  Description of Artificial Sequence: Synthetic oligonucleotide
uaagcucagcgugacugcg

SEQ ID NO: 2223336 - RNA, 19 nt, Artificial Sequence
  Description of Artificial Sequence: Synthetic oligonucleotide
auaauguaauggcagucuu

SEQ ID NO: 2223337 - RNA, 19 nt, Artificial Sequence
  Description of Artificial Sequence: Synthetic oligonucleotide
gauugcagagaacugccaa

SEQ ID NO: 2223338 - RNA, 19 nt, Artificial Sequence
  Description of Artificial Sequence: Synthetic oligonucleotide
auauggggauaauacagua

SEQ ID NO: 2223339 - RNA, 19 nt, Artificial Sequence
  Description of Artificial Sequence: Synthetic oligonucleotide
cuccaauccaucccauccg

SEQ ID NO: 2223340 - RNA, 19 nt, Artificial Sequence
  Description of Artificial Sequence: Synthetic oligonucleotide
cuuucaaggagugugucca

SEQ ID NO: 2223341 - RNA, 19 nt, Artificial Sequence
  Description of Artificial Sequence: Synthetic oligonucleotide
ugccuuuggcauuucagaa

SEQ ID NO: 2223342 - RNA, 19 nt, Artificial Sequence
  Description of Artificial Sequence: Synthetic oligonucleotide
acuauguugcacauagacu

SEQ ID NO: 2223343 - RNA, 19 nt, Artificial Sequence
  Description of Artificial Sequence: Synthetic oligonucleotide
uuaacaugauucuguggua

SEQ ID NO: 2223344 - RNA, 19 nt, Artificial Sequence
  Description of Artificial Sequence: Synthetic oligonucleotide
cuucccgaggcucuucagg

SEQ ID NO: 2223345 - RNA, 19 nt, Artificial Sequence
  Description of Artificial Sequence: Synthetic oligonucleotide
gugguacuguuucucaggc

SEQ ID NO: 2223346 - RNA, 19 nt, Artificial Sequence
  Description of Artificial Sequence: Synthetic oligonucleotide
auggucccgaaaaucuucc

SEQ ID NO: 2223347 - RNA, 19 nt, Artificial Sequence
  Description of Artificial Sequence: Synthetic oligonucleotide
uaguccucuugucacauuu

SEQ ID NO: 2223348 - RNA, 19 nt, Artificial Sequence
  Description of Artificial Sequence: Synthetic oligonucleotide
auaauacaguagcccacug

SEQ ID NO: 2223349 - RNA, 19 nt, Artificial Sequence
  Description of Artificial Sequence: Synthetic oligonucleotide
auaacuguccacaaccaaa

SEQ ID NO: 2223350 - RNA, 19 nt, Artificial Sequence
  Description of Artificial Sequence: Synthetic oligonucleotide
aaaugccugguggcgauug

SEQ ID NO: 2223351 - RNA, 19 nt, Artificial Sequence
  Description of Artificial Sequence: Synthetic oligonucleotide
uggcggaaguucaucauuc

SEQ ID NO: 2223352 - RNA, 19 nt, Artificial Sequence
  Description of Artificial Sequence: Synthetic oligonucleotide
uuguagucugcugaucuga

SEQ ID NO: 2223353 - RNA, 19 nt, Artificial Sequence
  Description of Artificial Sequence: Synthetic oligonucleotide
cagcaagcgugcaagaguc

SEQ ID NO: 2223354 - RNA, 19 nt, Artificial Sequence
  Description of Artificial Sequence: Synthetic oligonucleotide
uagcaaauacaaucccacu

SEQ ID NO: 2223355 - RNA, 19 nt, Artificial Sequence
  Description of Artificial Sequence: Synthetic oligonucleotide
aacggugaccggcuuuaug

SEQ ID NO: 2223356 - RNA, 19 nt, Artificial Sequence
  Description of Artificial Sequence: Synthetic oligonucleotide
acucgguucugaauagucg

SEQ ID NO: 2223357 - RNA, 19 nt, Artificial Sequence
  Description of Artificial Sequence: Synthetic oligonucleotide
uaagucucuguuccaccac

SEQ ID NO: 2223358 - RNA, 19 nt, Artificial Sequence
  Description of Artificial Sequence: Synthetic oligonucleotide
uguguuccaaagccagccu

SEQ ID NO: 2223359 - RNA, 19 nt, Artificial Sequence
  Description of Artificial Sequence: Synthetic oligonucleotide
guaaccgagcuuucaagga

SEQ ID NO: 2223360 - RNA, 19 nt, Artificial Sequence
  Description of Artificial Sequence: Synthetic oligonucleotide
gggauaauacaguagccca

SEQ ID NO: 2223361 - RNA, 19 nt, Artificial Sequence
  Description of Artificial Sequence: Synthetic oligonucleotide
gagcucguagugauuaagc

SEQ ID NO: 2223362 - RNA, 19 nt, Artificial Sequence
  Description of Artificial Sequence: Synthetic oligonucleotide
aaaacggugaccggcuuua

SEQ ID NO: 2223363 - RNA, 19 nt, Artificial Sequence
  Description of Artificial Sequence: Synthetic oligonucleotide
aaacccuccgggucgcgcu

SEQ ID NO: 2223364 - RNA, 19 nt, Artificial Sequence
  Description of Artificial Sequence: Synthetic oligonucleotide
ugaucugauuggaagccuu

SEQ ID NO: 2223365 - RNA, 19 nt, Artificial Sequence
  Description of Artificial Sequence: Synthetic oligonucleotide
gauuugugaagaaacugua

SEQ ID NO: 2223366 - RNA, 19 nt, Artificial Sequence
  Description of Artificial Sequence: Synthetic oligonucleotide
cucaggcuuuaccuaaaag

SEQ ID NO: 2223367 - RNA, 19 nt, Artificial Sequence
  Description of Artificial Sequence: Synthetic oligonucleotide
ucagcgugacugcggcugg

SEQ ID NO: 2223368 - RNA, 19 nt, Artificial Sequence
  Description of Artificial Sequence: Synthetic oligonucleotide
ugauuaagcucagcgugac

SEQ ID NO: 2223369 - RNA, 19 nt, Artificial Sequence
  Description of Artificial Sequence: Synthetic oligonucleotide
agcacgagcucguagugau

SEQ ID NO: 2223370 - RNA, 19 nt, Artificial Sequence
  Description of Artificial Sequence: Synthetic oligonucleotide
gaaaguaaccgagcuuuca

SEQ ID NO: 2223371 - RNA, 19 nt, Artificial Sequence
  Description of Artificial Sequence: Synthetic oligonucleotide
gaguguguccaugugguuc

SEQ ID NO: 2223372 - RNA, 19 nt, Artificial Sequence
  Description of Artificial Sequence: Synthetic oligonucleotide
ggggauaauacaguagccc

SEQ ID NO: 2223373 - RNA, 19 nt, Artificial Sequence
  Description of Artificial Sequence: Synthetic oligonucleotide
cuuuaugugucaaucaguu

SEQ ID NO: 2223374 - RNA, 19 nt, Artificial Sequence
  Description of Artificial Sequence: Synthetic oligonucleotide
cggaaguucaucauucucc

SEQ ID NO: 2223375 - RNA, 19 nt, Artificial Sequence
  Description of Artificial Sequence: Synthetic oligonucleotide
gucacucgguucugaauag

SEQ ID NO: 2223376 - RNA, 19 nt, Artificial Sequence
  Description of Artificial Sequence: Synthetic oligonucleotide
gacagggugagcgccgccg

SEQ ID NO: 2223377 - RNA, 19 nt, Artificial Sequence
  Description of Artificial Sequence: Synthetic oligonucleotide
uagucgggugccuuuggca

SEQ ID NO: 2223378 - RNA, 19 nt, Artificial Sequence
  Description of Artificial Sequence: Synthetic oligonucleotide
uguagucugcugaucugau

SEQ ID NO: 2223379 - RNA, 19 nt, Artificial Sequence
  Description of Artificial Sequence: Synthetic oligonucleotide
uaacaacccacuaguuuua

SEQ ID NO: 2223380 - RNA, 19 nt, Artificial Sequence
  Description of Artificial Sequence: Synthetic oligonucleotide
ucggacagggugagcgccg

SEQ ID NO: 2223381 - RNA, 19 nt, Artificial Sequence
  Description of Artificial Sequence: Synthetic oligonucleotide
gcgugcaagagucacucgg

SEQ ID NO: 2223382 - RNA, 19 nt, Artificial Sequence
  Description of Artificial Sequence: Synthetic oligonucleotide
uaguagaaugcugcugcgc

SEQ ID NO: 2223383 - RNA, 19 nt, Artificial Sequence
  Description of Artificial Sequence: Synthetic oligonucleotide
aucauacuauguugcacau

SEQ ID NO: 2223384 - RNA, 19 nt, Artificial Sequence
  Description of Artificial Sequence: Synthetic oligonucleotide
ucagggugcugcugaaugu

SEQ ID NO: 2223385 - RNA, 19 nt, Artificial Sequence
  Description of Artificial Sequence: Synthetic oligonucleotide
caugugguuccuucccgag

SEQ ID NO: 2223386 - RNA, 19 nt, Artificial Sequence
  Description of Artificial Sequence: Synthetic oligonucleotide
aaauaacaacccacuaguu

SEQ ID NO: 2223387 - RNA, 19 nt, Artificial Sequence
  Description of Artificial Sequence: Synthetic oligonucleotide
auuucagaacaagccaccu

SEQ ID NO: 2223388 - RNA, 19 nt, Artificial Sequence
  Description of Artificial Sequence: Synthetic oligonucleotide
cacucgguucugaauaguc

SEQ ID NO: 2223389 - RNA, 19 nt, Artificial Sequence
  Description of Artificial Sequence: Synthetic oligonucleotide
gaauagucgggugccuuug

SEQ ID NO: 2223390 - RNA, 19 nt, Artificial Sequence
  Description of Artificial Sequence: Synthetic oligonucleotide
cagagaacugccaagcaua

SEQ ID NO: 2223391 - RNA, 19 nt, Artificial Sequence
  Description of Artificial Sequence: Synthetic oligonucleotide
agucgggugccuuuggcau

SEQ ID NO: 2223392 - RNA, 19 nt, Artificial Sequence
  Description of Artificial Sequence: Synthetic oligonucleotide
gauuggaagccuucacaaa

SEQ ID NO: 2223393 - RNA, 19 nt, Artificial Sequence
  Description of Artificial Sequence: Synthetic oligonucleotide
uucaaggaguguguccaug

SEQ ID NO: 2223394 - RNA, 19 nt, Artificial Sequence
  Description of Artificial Sequence: Synthetic oligonucleotide
uucuccaugcucugugcaa

SEQ ID NO: 2223395 - RNA, 19 nt, Artificial Sequence
  Description of Artificial Sequence: Synthetic oligonucleotide
ggcagucuuguaaucauag

SEQ ID NO: 2223396 - RNA, 19 nt, Artificial Sequence
  Description of Artificial Sequence: Synthetic oligonucleotide
aaccgagcuuucaaggagu

SEQ ID NO: 2223397 - RNA, 19 nt, Artificial Sequence
  Description of Artificial Sequence: Synthetic oligonucleotide
agucauuauuauucagaua

SEQ ID NO: 2223398 - RNA, 19 nt, Artificial Sequence
  Description of Artificial Sequence: Synthetic oligonucleotide
agcuuucaaggaguguguc

SEQ ID NO: 2223399 - RNA, 19 nt, Artificial Sequence
  Description of Artificial Sequence: Synthetic oligonucleotide
caaccaaaagggcagggaa

SEQ ID NO: 2223400 - RNA, 19 nt, Artificial Sequence
  Description of Artificial Sequence: Synthetic oligonucleotide
gccaccucaagagaaaccc

SEQ ID NO: 2223401 - RNA, 19 nt, Artificial Sequence
  Description of Artificial Sequence: Synthetic oligonucleotide
ucguagugauuaagcucag

SEQ ID NO: 2223402 - RNA, 19 nt, Artificial Sequence
  Description of Artificial Sequence: Synthetic oligonucleotide
agccaccucaagagaaacc

SEQ ID NO: 2223403 - RNA, 19 nt, Artificial Sequence
  Description of Artificial Sequence: Synthetic oligonucleotide
cuccgggucgcgcugcucg

SEQ ID NO: 2223404 - RNA, 19 nt, Artificial Sequence
  Description of Artificial Sequence: Synthetic oligonucleotide
ugugaucaaccuccauaau

SEQ ID NO: 2223405 - RNA, 19 nt, Artificial Sequence
  Description of Artificial Sequence: Synthetic oligonucleotide
uggcgauugcagagaacug

SEQ ID NO: 2223406 - RNA, 19 nt, Artificial Sequence
  Description of Artificial Sequence: Synthetic oligonucleotide
cacaacuuccugagauuug

SEQ ID NO: 2223407 - RNA, 19 nt, Artificial Sequence
  Description of Artificial Sequence: Synthetic oligonucleotide
cucagcgugacugcggcug

SEQ ID NO: 2223408 - RNA, 19 nt, Artificial Sequence
  Description of Artificial Sequence: Synthetic oligonucleotide
aggcuuuaccuaaaaguca

SEQ ID NO: 2223409 - RNA, 19 nt, Artificial Sequence
  Description of Artificial Sequence: Synthetic oligonucleotide
ggacaaaacggugaccggc

SEQ ID NO: 2223410 - RNA, 19 nt, Artificial Sequence
  Description of Artificial Sequence: Synthetic oligonucleotide
acaaaugccugguggcgau

SEQ ID NO: 2223411 - RNA, 19 nt, Artificial Sequence
  Description of Artificial Sequence: Synthetic oligonucleotide
acaacccacuaguuuuacu

SEQ ID NO: 2223412 - RNA, 19 nt, Artificial Sequence
  Description of Artificial Sequence: Synthetic oligonucleotide
guccacaaccaaaagggca

SEQ ID NO: 2223413 - RNA, 19 nt, Artificial Sequence
  Description of Artificial Sequence: Synthetic oligonucleotide
ggcgauugcagagaacugc

SEQ ID NO: 2223414 - RNA, 19 nt, Artificial Sequence
  Description of Artificial Sequence: Synthetic oligonucleotide
ggucccgaaaaucuuccug

SEQ ID NO: 2223415 - RNA, 19 nt, Artificial Sequence
  Description of Artificial Sequence: Synthetic oligonucleotide
gcuuucaaggagugugucc

SEQ ID NO: 2223416 - RNA, 19 nt, Artificial Sequence
  Description of Artificial Sequence: Synthetic oligonucleotide
aagcucagcgugacugcgg

SEQ ID NO: 2223417 - RNA, 19 nt, Artificial Sequence
  Description of Artificial Sequence: Synthetic oligonucleotide
uccuucccgaggcucuuca

SEQ ID NO: 2223418 - RNA, 19 nt, Artificial Sequence
  Description of Artificial Sequence: Synthetic oligonucleotide
guagucuugugaucaaccu

SEQ ID NO: 2223419 - RNA, 19 nt, Artificial Sequence
  Description of Artificial Sequence: Synthetic oligonucleotide
cauauggggauaauacagu

SEQ ID NO: 2223420 - RNA, 19 nt, Artificial Sequence
  Description of Artificial Sequence: Synthetic oligonucleotide
guggcgauugcagagaacu

SEQ ID NO: 2223421 - RNA, 19 nt, Artificial Sequence
  Description of Artificial Sequence: Synthetic oligonucleotide
augugucaaucaguuguag

SEQ ID NO: 2223422 - RNA, 19 nt, Artificial Sequence
  Description of Artificial Sequence: Synthetic oligonucleotide
gcugaucugauuggaagcc

SEQ ID NO: 2223423 - RNA, 19 nt, Artificial Sequence
  Description of Artificial Sequence: Synthetic oligonucleotide
caaggaguguguccaugug

SEQ ID NO: 2223424 - RNA, 19 nt, Artificial Sequence
  Description of Artificial Sequence: Synthetic oligonucleotide
gcucguagugauuaagcuc

SEQ ID NO: 2223425 - RNA, 19 nt, Artificial Sequence
  Description of Artificial Sequence: Synthetic oligonucleotide
ugcggcuggucacgcgacg

SEQ ID NO: 2223426 - RNA, 19 nt, Artificial Sequence
  Description of Artificial Sequence: Synthetic oligonucleotide
ugcugcgcuugcuagcaaa

SEQ ID NO: 2223427 - RNA, 19 nt, Artificial Sequence
  Description of Artificial Sequence: Synthetic oligonucleotide
cauaauguaauggcagucu

SEQ ID NO: 2223428 - RNA, 19 nt, Artificial Sequence
  Description of Artificial Sequence: Synthetic oligonucleotide
agagucacucgguucugaa

SEQ ID NO: 2223429 - RNA, 19 nt, Artificial Sequence
  Description of Artificial Sequence: Synthetic oligonucleotide
agcgugcaagagucacucg

SEQ ID NO: 2223430 - RNA, 19 nt, Artificial Sequence
  Description of Artificial Sequence: Synthetic oligonucleotide
aucugauuggaagccuuca

SEQ ID NO: 2223431 - RNA, 19 nt, Artificial Sequence
  Description of Artificial Sequence: Synthetic oligonucleotide
gugacugcggcuggucacg

SEQ ID NO: 2223432 - RNA, 19 nt, Artificial Sequence
  Description of Artificial Sequence: Synthetic oligonucleotide
gugauuaagcucagcguga

SEQ ID NO: 2223433 - RNA, 19 nt, Artificial Sequence
  Description of Artificial Sequence: Synthetic oligonucleotide
ugguacuguuucucaggcu

SEQ ID NO: 2223434 - RNA, 19 nt, Artificial Sequence
  Description of Artificial Sequence: Synthetic oligonucleotide
agggaaaguaaccgagcuu

SEQ ID NO: 2223435 - RNA, 19 nt, Artificial Sequence
  Description of Artificial Sequence: Synthetic oligonucleotide
ccuuuggcauuucagaaca

SEQ ID NO: 2223436 - RNA, 19 nt, Artificial Sequence
  Description of Artificial Sequence: Synthetic oligonucleotide
ucugaauagucgggugccu

SEQ ID NO: 2223437 - RNA, 19 nt, Artificial Sequence
  Description of Artificial Sequence: Synthetic oligonucleotide
accacaacuuccugagauu

SEQ ID NO: 2223438 - RNA, 19 nt, Artificial Sequence
  Description of Artificial Sequence: Synthetic oligonucleotide
ugaccggcuuuauguguca

SEQ ID NO: 2223439 - RNA, 19 nt, Artificial Sequence
  Description of Artificial Sequence: Synthetic oligonucleotide
aguaguccucuugucacau

SEQ ID NO: 2223440 - RNA, 19 nt, Artificial Sequence
  Description of Artificial Sequence: Synthetic oligonucleotide
gaucaaccuccauaaugua

SEQ ID NO: 2223441 - RNA, 19 nt, Artificial Sequence
  Description of Artificial Sequence: Synthetic oligonucleotide
caacccacuaguuuuacuu

SEQ ID NO: 2223442 - RNA, 19 nt, Artificial Sequence
  Description of Artificial Sequence: Synthetic oligonucleotide
uuucaaggaguguguccau

SEQ ID NO: 2223443 - RNA, 19 nt, Artificial Sequence
  Description of Artificial Sequence: Synthetic oligonucleotide
auguugcacauagacuaga

SEQ ID NO: 2223444 - RNA, 19 nt, Artificial Sequence
  Description of Artificial Sequence: Synthetic oligonucleotide
cuggucacgcgacggcggg

SEQ ID NO: 2223445 - RNA, 19 nt, Artificial Sequence
  Description of Artificial Sequence: Synthetic oligonucleotide
cucggacagggugagcgcc

SEQ ID NO: 2223446 - RNA, 19 nt, Artificial Sequence
  Description of Artificial Sequence: Synthetic oligonucleotide
ccucaagagaaacccuccg

SEQ ID NO: 2223447 - RNA, 19 nt, Artificial Sequence
  Description of Artificial Sequence: Synthetic oligonucleotide
ccugguggcgauugcagag

SEQ ID NO: 2223448 - RNA, 19 nt, Artificial Sequence
  Description of Artificial Sequence: Synthetic oligonucleotide
gggacaaaacggugaccgg

SEQ ID NO: 2223449 - RNA, 19 nt, Artificial Sequence
  Description of Artificial Sequence: Synthetic oligonucleotide
gcaagagucacucgguucu

SEQ ID NO: 2223450 - RNA, 19 nt, Artificial Sequence
  Description of Artificial Sequence: Synthetic oligonucleotide
agccagccuguuguaaguc

SEQ ID NO: 2223451 - RNA, 19 nt, Artificial Sequence
  Description of Artificial Sequence: Synthetic oligonucleotide
gaaacccuccgggucgcgc

SEQ ID NO: 2223452 - RNA, 19 nt, Artificial Sequence
  Description of Artificial Sequence: Synthetic oligonucleotide
ucauacuauguugcacaua

SEQ ID NO: 2223453 - RNA, 19 nt, Artificial Sequence
  Description of Artificial Sequence: Synthetic oligonucleotide
uccaucccauccgcuggcg

SEQ ID NO: 2223454 - RNA, 19 nt, Artificial Sequence
  Description of Artificial Sequence: Synthetic oligonucleotide
gacaaaacggugaccggcu

SEQ ID NO: 2223455 - RNA, 19 nt, Artificial Sequence
  Description of Artificial Sequence: Synthetic oligonucleotide
ucccgaaaaucuuccuguu

SEQ ID NO: 2223456 - RNA, 19 nt, Artificial Sequence
  Description of Artificial Sequence: Synthetic oligonucleotide
uggucccgaaaaucuuccu

SEQ ID NO: 2223457 - RNA, 19 nt, Artificial Sequence
  Description of Artificial Sequence: Synthetic oligonucleotide
caagcauauggggauaaua

SEQ ID NO: 2223458 - RNA, 19 nt, Artificial Sequence
  Description of Artificial Sequence: Synthetic oligonucleotide
gcgauugcagagaacugcc

SEQ ID NO: 2223459 - RNA, 19 nt, Artificial Sequence
  Description of Artificial Sequence: Synthetic oligonucleotide
caucccauccgcuggcgga

SEQ ID NO: 2223460 - RNA, 19 nt, Artificial Sequence
  Description of Artificial Sequence: Synthetic oligonucleotide
ucacucgguucugaauagu

SEQ ID NO: 2223461 - RNA, 19 nt, Artificial Sequence
  Description of Artificial Sequence: Synthetic oligonucleotide
cacuccaauccaucccauc

SEQ ID NO: 2223462 - RNA, 19 nt, Artificial Sequence
  Description of Artificial Sequence: Synthetic oligonucleotide
cucuguuccaccacaacuu

SEQ ID NO: 2223463 - RNA, 19 nt, Artificial Sequence
  Description of Artificial Sequence: Synthetic oligonucleotide
gugaccggcuuuauguguc

SEQ ID NO: 2223464 - RNA, 19 nt, Artificial Sequence
  Description of Artificial Sequence: Synthetic oligonucleotide
ccuccauaauguaauggca

SEQ ID NO: 2223465 - RNA, 19 nt, Artificial Sequence
  Description of Artificial Sequence: Synthetic oligonucleotide
cccaucgcccucuggagcc

SEQ ID NO: 2223466 - RNA, 19 nt, Artificial Sequence
  Description of Artificial Sequence: Synthetic oligonucleotide
cgaaaaucuuccuguuccc

SEQ ID NO: 2223467 - RNA, 19 nt, Artificial Sequence
  Description of Artificial Sequence: Synthetic oligonucleotide
acaaaacggugaccggcuu

SEQ ID NO: 2223468 - RNA, 19 nt, Artificial Sequence
  Description of Artificial Sequence: Synthetic oligonucleotide
guuuugggaucagcucuug

SEQ ID NO: 2223469 - RNA, 19 nt, Artificial Sequence
  Description of Artificial Sequence: Synthetic oligonucleotide
accggcuuuaugugucaau

SEQ ID NO: 2223470 - RNA, 19 nt, Artificial Sequence
  Description of Artificial Sequence: Synthetic oligonucleotide
caccacaacuuccugagau

SEQ ID NO: 2223471 - RNA, 19 nt, Artificial Sequence
  Description of Artificial Sequence: Synthetic oligonucleotide
ucccgaggcucuucagggu

SEQ ID NO: 2223472 - RNA, 19 nt, Artificial Sequence
  Description of Artificial Sequence: Synthetic oligonucleotide
agcgugacugcggcugguc

SEQ ID NO: 2223473 - RNA, 19 nt, Artificial Sequence
  Description of Artificial Sequence: Synthetic oligonucleotide
cacaaaugccugguggcga

SEQ ID NO: 2223474 - RNA, 19 nt, Artificial Sequence
  Description of Artificial Sequence: Synthetic oligonucleotide
auguaauggcagucuugua

SEQ ID NO: 2223475 - RNA, 19 nt, Artificial Sequence
  Description of Artificial Sequence: Synthetic oligonucleotide
uccgcuggcggaaguucau

SEQ ID NO: 2223476 - RNA, 19 nt, Artificial Sequence
  Description of Artificial Sequence: Synthetic oligonucleotide
gcaauggucccgaaaaucu

SEQ ID NO: 2223477 - RNA, 19 nt, Artificial Sequence
  Description of Artificial Sequence: Synthetic oligonucleotide
gauuaagcucagcgugacu

SEQ ID NO: 2223478 - RNA, 19 nt, Artificial Sequence
  Description of Artificial Sequence: Synthetic oligonucleotide
gcaagcgugcaagagucac

SEQ ID NO: 2223479 - RNA, 19 nt, Artificial Sequence
  Description of Artificial Sequence: Synthetic oligonucleotide
accgagcuuucaaggagug

SEQ ID NO: 2223480 - RNA, 19 nt, Artificial Sequence
  Description of Artificial Sequence: Synthetic oligonucleotide
gcggaaguucaucauucuc

SEQ ID NO: 2223481 - RNA, 19 nt, Artificial Sequence
  Description of Artificial Sequence: Synthetic oligonucleotide
cacgagcucguagugauua

SEQ ID NO: 2223482 - RNA, 19 nt, Artificial Sequence
  Description of Artificial Sequence: Synthetic oligonucleotide
cagccuguuguaagucuca

SEQ ID NO: 2223483 - RNA, 19 nt, Artificial Sequence
  Description of Artificial Sequence: Synthetic oligonucleotide
caagagucacucgguucug

SEQ ID NO: 2223484 - RNA, 19 nt, Artificial Sequence
  Description of Artificial Sequence: Synthetic oligonucleotide
auacuauguugcacauaga

SEQ ID NO: 2223485 - RNA, 19 nt, Artificial Sequence
  Description of Artificial Sequence: Synthetic oligonucleotide
gagcacgagcucguaguga

SEQ ID NO: 2223486 - RNA, 19 nt, Artificial Sequence
  Description of Artificial Sequence: Synthetic oligonucleotide
cauccgcuggcggaaguuc

SEQ ID NO: 2223487 - RNA, 19 nt, Artificial Sequence
  Description of Artificial Sequence: Synthetic oligonucleotide
cugcugaauguguuccaaa

SEQ ID NO: 2223488 - RNA, 19 nt, Artificial Sequence
  Description of Artificial Sequence: Synthetic oligonucleotide
cucugugcaauggucccga

SEQ ID NO: 2223489 - RNA, 19 nt, Artificial Sequence
  Description of Artificial Sequence: Synthetic oligonucleotide
ggcuggucacgcgacggcg

SEQ ID NO: 2223490 - RNA, 19 nt, Artificial Sequence
  Description of Artificial Sequence: Synthetic oligonucleotide
ccggcuuuaugugucaauc

SEQ ID NO: 2223491 - RNA, 19 nt, Artificial Sequence
  Description of Artificial Sequence: Synthetic oligonucleotide
acgagcucguagugauuaa

SEQ ID NO: 2223492 - RNA, 19 nt, Artificial Sequence
  Description of Artificial Sequence: Synthetic oligonucleotide
ucgggugccuuuggcauuu

SEQ ID NO: 2223493 - RNA, 19 nt, Artificial Sequence
  Description of Artificial Sequence: Synthetic oligonucleotide
ucugugcaauggucccgaa

SEQ ID NO: 2223494 - RNA, 19 nt, Artificial Sequence
  Description of Artificial Sequence: Synthetic oligonucleotide
ugacugcggcuggucacgc

SEQ ID NO: 2223495 - RNA, 19 nt, Artificial Sequence
  Description of Artificial Sequence: Synthetic oligonucleotide
cugccaagcauauggggau

SEQ ID NO: 2223496 - RNA, 19 nt, Artificial Sequence
  Description of Artificial Sequence: Synthetic oligonucleotide
gagcuuucaaggagugugu

SEQ ID NO: 2223497 - RNA, 19 nt, Artificial Sequence
  Description of Artificial Sequence: Synthetic oligonucleotide
ucacgcgacggcgggcccc

SEQ ID NO: 2223498 - RNA, 19 nt, Artificial Sequence
  Description of Artificial Sequence: Synthetic oligonucleotide
ggcuuuaccuaaaagucau

SEQ ID NO: 2223499 - RNA, 19 nt, Artificial Sequence
  Description of Artificial Sequence: Synthetic oligonucleotide
gggagcacgagcucguagu

SEQ ID NO: 2223500 - RNA, 19 nt, Artificial Sequence
  Description of Artificial Sequence: Synthetic oligonucleotide
ugccaagcauauggggaua

SEQ ID NO: 2223501 - RNA, 19 nt, Artificial Sequence
  Description of Artificial Sequence: Synthetic oligonucleotide
agggugcugcugaaugugu

SEQ ID NO: 2223502 - RNA, 19 nt, Artificial Sequence
  Description of Artificial Sequence: Synthetic oligonucleotide
agaaacccuccgggucgcg

SEQ ID NO: 2223503 - RNA, 19 nt, Artificial Sequence
  Description of Artificial Sequence: Synthetic oligonucleotide
aaacggugaccggcuuuau

SEQ ID NO: 2223504 - RNA, 19 nt, Artificial Sequence
  Description of Artificial Sequence: Synthetic oligonucleotide
gggcagggaaaguaaccga

SEQ ID NO: 2223505 - RNA, 19 nt, Artificial Sequence
  Description of Artificial Sequence: Synthetic oligonucleotide
auccgcuggcggaaguuca

SEQ ID NO: 2223506 - RNA, 19 nt, Artificial Sequence
  Description of Artificial Sequence: Synthetic oligonucleotide
gcuggucacgcgacggcgg

SEQ ID NO: 2223507 - RNA, 19 nt, Artificial Sequence
  Description of Artificial Sequence: Synthetic oligonucleotide
cccgaaaaucuuccuguuc

SEQ ID NO: 2223508 - RNA, 19 nt, Artificial Sequence
  Description of Artificial Sequence: Synthetic oligonucleotide
ggucacgcgacggcgggcc

SEQ ID NO: 2223509 - RNA, 19 nt, Artificial Sequence
  Description of Artificial Sequence: Synthetic oligonucleotide
ccuucacaaaugccuggug

SEQ ID NO: 2223510 - RNA, 19 nt, Artificial Sequence
  Description of Artificial Sequence: Synthetic oligonucleotide
agccuguuguaagucucau

SEQ ID NO: 2223511 - RNA, 19 nt, Artificial Sequence
  Description of Artificial Sequence: Synthetic oligonucleotide
ggaaaguaaccgagcuuuc

SEQ ID NO: 2223512 - RNA, 19 nt, Artificial Sequence
  Description of Artificial Sequence: Synthetic oligonucleotide
gcagagaacugccaagcau

SEQ ID NO: 2223513 - RNA, 19 nt, Artificial Sequence
  Description of Artificial Sequence: Synthetic oligonucleotide
acccuccgggucgcgcugc

SEQ ID NO: 2223514 - RNA, 19 nt, Artificial Sequence
  Description of Artificial Sequence: Synthetic oligonucleotide
ggugaccggcuuuaugugu

SEQ ID NO: 2223515 - RNA, 19 nt, Artificial Sequence
  Description of Artificial Sequence: Synthetic oligonucleotide
ucccauccgcuggcggaag

SEQ ID NO: 2223516 - RNA, 19 nt, Artificial Sequence
  Description of Artificial Sequence: Synthetic oligonucleotide
gcgcugcucggacagggug

SEQ ID NO: 2223517 - RNA, 19 nt, Artificial Sequence
  Description of Artificial Sequence: Synthetic oligonucleotide
gcacauagacuagaauaaa

SEQ ID NO: 2223518 - RNA, 19 nt, Artificial Sequence
  Description of Artificial Sequence: Synthetic oligonucleotide
caagcgugcaagagucacu

SEQ ID NO: 2223519 - RNA, 19 nt, Artificial Sequence
  Description of Artificial Sequence: Synthetic oligonucleotide
aucccauccgcuggcggaa

SEQ ID NO: 2223520 - RNA, 19 nt, Artificial Sequence
  Description of Artificial Sequence: Synthetic oligonucleotide
agcaagcgugcaagaguca

SEQ ID NO: 2223521 - RNA, 19 nt, Artificial Sequence
  Description of Artificial Sequence: Synthetic oligonucleotide
caauggucccgaaaaucuu

SEQ ID NO: 2223522 - RNA, 19 nt, Artificial Sequence
  Description of Artificial Sequence: Synthetic oligonucleotide
gcucggacagggugagcgc

SEQ ID NO: 2223523 - RNA, 19 nt, Artificial Sequence
  Description of Artificial Sequence: Synthetic oligonucleotide
ccgaggcucuucagggugc

SEQ ID NO: 2223524 - RNA, 19 nt, Artificial Sequence
  Description of Artificial Sequence: Synthetic oligonucleotide
uggucacgcgacggcgggc

SEQ ID NO: 2223525 - RNA, 19 nt, Artificial Sequence
  Description of Artificial Sequence: Synthetic oligonucleotide
gcggcuggucacgcgacgg

SEQ ID NO: 2223526 - RNA, 19 nt, Artificial Sequence
  Description of Artificial Sequence: Synthetic oligonucleotide
caaucccacuccaauccau

SEQ ID NO: 2223527 - RNA, 19 nt, Artificial Sequence
  Description of Artificial Sequence: Synthetic oligonucleotide
uguguccaugugguuccuu

SEQ ID NO: 2223528 - RNA, 19 nt, Artificial Sequence
  Description of Artificial Sequence: Synthetic oligonucleotide
ccaucccauccgcuggcgg

SEQ ID NO: 2223529 - RNA, 19 nt, Artificial Sequence
  Description of Artificial Sequence: Synthetic oligonucleotide
cccacuaguuuuacuucca

SEQ ID NO: 2223530 - RNA, 19 nt, Artificial Sequence
  Description of Artificial Sequence: Synthetic oligonucleotide
caucgcccucuggagcccc

SEQ ID NO: 2223531 - RNA, 19 nt, Artificial Sequence
  Description of Artificial Sequence: Synthetic oligonucleotide
cagauaaaguaguccucuu

SEQ ID NO: 2223532 - RNA, 19 nt, Artificial Sequence
  Description of Artificial Sequence: Synthetic oligonucleotide
ccccaucgcccucuggagc

SEQ ID NO: 2223533 - RNA, 19 nt, Artificial Sequence
  Description of Artificial Sequence: Synthetic oligonucleotide
gugcaauggucccgaaaau

SEQ ID NO: 2223534 - RNA, 19 nt, Artificial Sequence
  Description of Artificial Sequence: Synthetic oligonucleotide
cgagcucguagugauuaag

SEQ ID NO: 2223535 - RNA, 19 nt, Artificial Sequence
  Description of Artificial Sequence: Synthetic oligonucleotide
ccaugugguuccuucccga

SEQ ID NO: 2223536 - RNA, 19 nt, Artificial Sequence
  Description of Artificial Sequence: Synthetic oligonucleotide
cugaucugauuggaagccu

SEQ ID NO: 2223537 - RNA, 19 nt, Artificial Sequence
  Description of Artificial Sequence: Synthetic oligonucleotide
gugcaagagucacucgguu

SEQ ID NO: 2223538 - RNA, 19 nt, Artificial Sequence
  Description of Artificial Sequence: Synthetic oligonucleotide
gucacgcgacggcgggccc

SEQ ID NO: 2223539 - RNA, 19 nt, Artificial Sequence
  Description of Artificial Sequence: Synthetic oligonucleotide
gcugcugaauguguuccaa

SEQ ID NO: 2223540 - RNA, 19 nt, Artificial Sequence
  Description of Artificial Sequence: Synthetic oligonucleotide
caaaacggugaccggcuuu

SEQ ID NO: 2223541 - RNA, 19 nt, Artificial Sequence
  Description of Artificial Sequence: Synthetic oligonucleotide
ccagcaagcgugcaagagu

SEQ ID NO: 2223542 - RNA, 19 nt, Artificial Sequence
  Description of Artificial Sequence: Synthetic oligonucleotide
ggcggaaguucaucauucu

SEQ ID NO: 2223543 - RNA, 19 nt, Artificial Sequence
  Description of Artificial Sequence: Synthetic oligonucleotide
gcgugacugcggcugguca

SEQ ID NO: 2223544 - RNA, 19 nt, Artificial Sequence
  Description of Artificial Sequence: Synthetic oligonucleotide
cggugaccggcuuuaugug

SEQ ID NO: 2223545 - RNA, 19 nt, Artificial Sequence
  Description of Artificial Sequence: Synthetic oligonucleotide
gguggcgauugcagagaac

SEQ ID NO: 2223546 - RNA, 19 nt, Artificial Sequence
  Description of Artificial Sequence: Synthetic oligonucleotide
gugagcgccgccggcggga

SEQ ID NO: 2223547 - RNA, 19 nt, Artificial Sequence
  Description of Artificial Sequence: Synthetic oligonucleotide
ccacuaguuuuacuuccaa

SEQ ID NO: 2223548 - RNA, 19 nt, Artificial Sequence
  Description of Artificial Sequence: Synthetic oligonucleotide
ggacagggugagcgccgcc

SEQ ID NO: 2223549 - RNA, 19 nt, Artificial Sequence
  Description of Artificial Sequence: Synthetic oligonucleotide
gccaagcauauggggauaa

SEQ ID NO: 2223550 - RNA, 19 nt, Artificial Sequence
  Description of Artificial Sequence: Synthetic oligonucleotide
cugaauagucgggugccuu

SEQ ID NO: 2223551 - RNA, 19 nt, Artificial Sequence
  Description of Artificial Sequence: Synthetic oligonucleotide
cugcgcuugcuagcaaaua

SEQ ID NO: 2223552 - RNA, 19 nt, Artificial Sequence
  Description of Artificial Sequence: Synthetic oligonucleotide
cgauugcagagaacugcca

SEQ ID NO: 2223553 - RNA, 19 nt, Artificial Sequence
  Description of Artificial Sequence: Synthetic oligonucleotide
cugcucggacagggugagc

SEQ ID NO: 2223554 - RNA, 19 nt, Artificial Sequence
  Description of Artificial Sequence: Synthetic oligonucleotide
cgcuggcggaaguucauca

SEQ ID NO: 2223555 - RNA, 19 nt, Artificial Sequence
  Description of Artificial Sequence: Synthetic oligonucleotide
guaguccucuugucacauu

SEQ ID NO: 2223556 - RNA, 19 nt, Artificial Sequence
  Description of Artificial Sequence: Synthetic oligonucleotide
gcuggcggaaguucaucau

SEQ ID NO: 2223557 - RNA, 19 nt, Artificial Sequence
  Description of Artificial Sequence: Synthetic oligonucleotide
gucgggugccuuuggcauu

SEQ ID NO: 2223558 - RNA, 19 nt, Artificial Sequence
  Description of Artificial Sequence: Synthetic oligonucleotide
gcuugcuagcaaauacaau

SEQ ID NO: 2223559 - RNA, 19 nt, Artificial Sequence
  Description of Artificial Sequence: Synthetic oligonucleotide
cgugcaagagucacucggu

SEQ ID NO: 2223560 - RNA, 19 nt, Artificial Sequence
  Description of Artificial Sequence: Synthetic oligonucleotide
ccaugcucugugcaauggu

SEQ ID NO: 2223561 - RNA, 19 nt, Artificial Sequence
  Description of Artificial Sequence: Synthetic oligonucleotide
ccaauccaucccauccgcu

SEQ ID NO: 2223562 - RNA, 19 nt, Artificial Sequence
  Description of Artificial Sequence: Synthetic oligonucleotide
cggcuggucacgcgacggc

SEQ ID NO: 2223563 - RNA, 19 nt, Artificial Sequence
  Description of Artificial Sequence: Synthetic oligonucleotide
ccaucgcccucuggagccc

SEQ ID NO: 2223564 - RNA, 19 nt, Artificial Sequence
  Description of Artificial Sequence: Synthetic oligonucleotide
cugcugcgcuugcuagcaa

SEQ ID NO: 2223565 - RNA, 19 nt, Artificial Sequence
  Description of Artificial Sequence: Synthetic oligonucleotide
gccuguuguaagucucauu

SEQ ID NO: 2223566 - RNA, 19 nt, Artificial Sequence
  Description of Artificial Sequence: Synthetic oligonucleotide
ccaccacaacuuccugaga

SEQ ID NO: 2223567 - RNA, 19 nt, Artificial Sequence
  Description of Artificial Sequence: Synthetic oligonucleotide
ccgcuggcggaaguucauc

SEQ ID NO: 2223568 - RNA, 19 nt, Artificial Sequence
  Description of Artificial Sequence: Synthetic oligonucleotide
gcucagcgugacugcggcu

SEQ ID NO: 2223569 - RNA, 19 nt, Artificial Sequence
  Description of Artificial Sequence: Synthetic oligonucleotide
cgguucugaauagucgggu

SEQ ID NO: 2223570 - RNA, 19 nt, Artificial Sequence
  Description of Artificial Sequence: Synthetic oligonucleotide
gccgccggcgggagcacga

SEQ ID NO: 2223571 - RNA, 19 nt, Artificial Sequence
  Description of Artificial Sequence: Synthetic oligonucleotide
ggcgggccccaucgcccuc

SEQ ID NO: 2223572 - RNA, 19 nt, Artificial Sequence
  Description of Artificial Sequence: Synthetic oligonucleotide
cagcgugacugcggcuggu

SEQ ID NO: 2223573 - RNA, 19 nt, Artificial Sequence
  Description of Artificial Sequence: Synthetic oligonucleotide
ccaagcauauggggauaau

SEQ ID NO: 2223574 - RNA, 19 nt, Artificial Sequence
  Description of Artificial Sequence: Synthetic oligonucleotide
ccgagcuuucaaggagugu

SEQ ID NO: 2223575 - RNA, 19 nt, Artificial Sequence
  Description of Artificial Sequence: Synthetic oligonucleotide
cccauccgcuggcggaagu

SEQ ID NO: 2223576 - RNA, 19 nt, Artificial Sequence
  Description of Artificial Sequence: Synthetic oligonucleotide
gcgggagcacgagcucgua

SEQ ID NO: 2223577 - RNA, 19 nt, Artificial Sequence
  Description of Artificial Sequence: Synthetic oligonucleotide
gcgggccccaucgcccucu

SEQ ID NO: 2223578 - RNA, 19 nt, Artificial Sequence
  Description of Artificial Sequence: Synthetic oligonucleotide
gcacgagcucguagugauu

SEQ ID NO: 2223579 - RNA, 19 nt, Artificial Sequence
  Description of Artificial Sequence: Synthetic oligonucleotide
ccauccgcuggcggaaguu

SEQ ID NO: 2223580 - RNA, 19 nt, Artificial Sequence
  Description of Artificial Sequence: Synthetic oligonucleotide
acgcgacggcgggccccau

SEQ ID NO: 2223581 - RNA, 19 nt, Artificial Sequence
  Description of Artificial Sequence: Synthetic oligonucleotide
aaugacugcaaacaaagac

SEQ ID NO: 2223582 - RNA, 19 nt, Artificial Sequence
  Description of Artificial Sequence: Synthetic oligonucleotide
aaguaccucaugcagaugg

SEQ ID NO: 2223583 - RNA, 19 nt, Artificial Sequence
  Description of Artificial Sequence: Synthetic oligonucleotide
uauuccuugacuagguccg

SEQ ID NO: 2223584 - RNA, 19 nt, Artificial Sequence
  Description of Artificial Sequence: Synthetic oligonucleotide
uguagaaggugucacggcg

SEQ ID NO: 2223585 - RNA, 19 nt, Artificial Sequence
  Description of Artificial Sequence: Synthetic oligonucleotide
ucgaaagacacccuucggg

SEQ ID NO: 2223586 - RNA, 19 nt, Artificial Sequence
  Description of Artificial Sequence: Synthetic oligonucleotide
acaguuuauauaucucggc

SEQ ID NO: 2223587 - RNA, 19 nt, Artificial Sequence
  Description of Artificial Sequence: Synthetic oligonucleotide
uuuugaaugacugcaaaca

SEQ ID NO: 2223588 - RNA, 19 nt, Artificial Sequence
  Description of Artificial Sequence: Synthetic oligonucleotide
uuuggagucugucggaggg

SEQ ID NO: 2223589 - RNA, 19 nt, Artificial Sequence
  Description of Artificial Sequence: Synthetic oligonucleotide
uuuugaagccgccucgugg

SEQ ID NO: 2223590 - RNA, 19 nt, Artificial Sequence
  Description of Artificial Sequence: Synthetic oligonucleotide
uacuguuucucaagcaugg

SEQ ID NO: 2223591 - RNA, 19 nt, Artificial Sequence
  Description of Artificial Sequence: Synthetic oligonucleotide
ucucgaaagacacccuucg

SEQ ID NO: 2223592 - RNA, 19 nt, Artificial Sequence
  Description of Artificial Sequence: Synthetic oligonucleotide
gaacauacaggcuccaccc

SEQ ID NO: 2223593 - RNA, 19 nt, Artificial Sequence
  Description of Artificial Sequence: Synthetic oligonucleotide
uauaucucggcauucuucu

SEQ ID NO: 2223594 - RNA, 19 nt, Artificial Sequence
  Description of Artificial Sequence: Synthetic oligonucleotide
ggaauugcuggcuagacag

SEQ ID NO: 2223595 - RNA, 19 nt, Artificial Sequence
  Description of Artificial Sequence: Synthetic oligonucleotide
uuugaaugacugcaaacaa

SEQ ID NO: 2223596 - RNA, 19 nt, Artificial Sequence
  Description of Artificial Sequence: Synthetic oligonucleotide
uguaggccggaacauacag

SEQ ID NO: 2223597 - RNA, 19 nt, Artificial Sequence
  Description of Artificial Sequence: Synthetic oligonucleotide
uguuggaaccucuugagau

SEQ ID NO: 2223598 - RNA, 19 nt, Artificial Sequence
  Description of Artificial Sequence: Synthetic oligonucleotide
ugacaguaggcagacaggg

SEQ ID NO: 2223599 - RNA, 19 nt, Artificial Sequence
  Description of Artificial Sequence: Synthetic oligonucleotide
uccaucucgaaagacaccc

SEQ ID NO: 2223600 - RNA, 19 nt, Artificial Sequence
  Description of Artificial Sequence: Synthetic oligonucleotide
cucauccuggacuacagcc

SEQ ID NO: 2223601 - RNA, 19 nt, Artificial Sequence
  Description of Artificial Sequence: Synthetic oligonucleotide
uaucucggcauucuucucc

SEQ ID NO: 2223602 - RNA, 19 nt, Artificial Sequence
  Description of Artificial Sequence: Synthetic oligonucleotide
agauggucacgguagcagc

SEQ ID NO: 2223603 - RNA, 19 nt, Artificial Sequence
  Description of Artificial Sequence: Synthetic oligonucleotide
cauaugggugcccagcugg

SEQ ID NO: 2223604 - RNA, 19 nt, Artificial Sequence
  Description of Artificial Sequence: Synthetic oligonucleotide
ugucggaggggcuuuaaag

SEQ ID NO: 2223605 - RNA, 19 nt, Artificial Sequence
  Description of Artificial Sequence: Synthetic oligonucleotide
cuuguagaaggugucacgg

SEQ ID NO: 2223606 - RNA, 19 nt, Artificial Sequence
  Description of Artificial Sequence: Synthetic oligonucleotide
aaagacacccuucgggccu

SEQ ID NO: 2223607 - RNA, 19 nt, Artificial Sequence
  Description of Artificial Sequence: Synthetic oligonucleotide
ugcuuuugaagccgccucg

SEQ ID NO: 2223608 - RNA, 19 nt, Artificial Sequence
  Description of Artificial Sequence: Synthetic oligonucleotide
aggaugcugcuccucagcc

SEQ ID NO: 2223609 - RNA, 19 nt, Artificial Sequence
  Description of Artificial Sequence: Synthetic oligonucleotide
ucccuuuucgccaccuugg

SEQ ID NO: 2223610 - RNA, 19 nt, Artificial Sequence
  Description of Artificial Sequence: Synthetic oligonucleotide
gucggaggggcuuuaaagg

SEQ ID NO: 2223611 - RNA, 19 nt, Artificial Sequence
  Description of Artificial Sequence: Synthetic oligonucleotide
agugcuucucaacugccuc

SEQ ID NO: 2223612 - RNA, 19 nt, Artificial Sequence
  Description of Artificial Sequence: Synthetic oligonucleotide
uugaaugacugcaaacaaa

SEQ ID NO: 2223613 - RNA, 19 nt, Artificial Sequence
  Description of Artificial Sequence: Synthetic oligonucleotide
aaggcuccaggaaggaugc

SEQ ID NO: 2223614 - RNA, 19 nt, Artificial Sequence
  Description of Artificial Sequence: Synthetic oligonucleotide
cuuuucgccaccuuggcca

SEQ ID NO: 2223615 - RNA, 19 nt, Artificial Sequence
  Description of Artificial Sequence: Synthetic oligonucleotide
uucaagugcuucucaacug

SEQ ID NO: 2223616 - RNA, 19 nt, Artificial Sequence
  Description of Artificial Sequence: Synthetic oligonucleotide
uaugauggguccuuucuuc

SEQ ID NO: 2223617 - RNA, 19 nt, Artificial Sequence
  Description of Artificial Sequence: Synthetic oligonucleotide
cucagaggcauaugggugc

SEQ ID NO: 2223618 - RNA, 19 nt, Artificial Sequence
  Description of Artificial Sequence: Synthetic oligonucleotide
agaaguaccucaugcagau

SEQ ID NO: 2223619 - RNA, 19 nt, Artificial Sequence
  Description of Artificial Sequence: Synthetic oligonucleotide
augacugcaaacaaagaca

SEQ ID NO: 2223620 - RNA, 19 nt, Artificial Sequence
  Description of Artificial Sequence: Synthetic oligonucleotide
auauaucucggcauucuuc

SEQ ID NO: 2223621 - RNA, 19 nt, Artificial Sequence
  Description of Artificial Sequence: Synthetic oligonucleotide
gcuggaauccuucaugcgg

SEQ ID NO: 2223622 - RNA, 19 nt, Artificial Sequence
  Description of Artificial Sequence: Synthetic oligonucleotide
gucugugguccuaugaugg

SEQ ID NO: 2223623 - RNA, 19 nt, Artificial Sequence
  Description of Artificial Sequence: Synthetic oligonucleotide
ucggaggggcuuuaaaggc

SEQ ID NO: 2223624 - RNA, 19 nt, Artificial Sequence
  Description of Artificial Sequence: Synthetic oligonucleotide
uuauugugcucucugcuuu

SEQ ID NO: 2223625 - RNA, 19 nt, Artificial Sequence
  Description of Artificial Sequence: Synthetic oligonucleotide
gaauccuucaugcgguuca

SEQ ID NO: 2223626 - RNA, 19 nt, Artificial Sequence
  Description of Artificial Sequence: Synthetic oligonucleotide
uuuauugugcucucugcuu

SEQ ID NO: 2223627 - RNA, 19 nt, Artificial Sequence
  Description of Artificial Sequence: Synthetic oligonucleotide
acuagguccgagcacagaa

SEQ ID NO: 2223628 - RNA, 19 nt, Artificial Sequence
  Description of Artificial Sequence: Synthetic oligonucleotide
gcuucuuaggcagugaugc

SEQ ID NO: 2223629 - RNA, 19 nt, Artificial Sequence
  Description of Artificial Sequence: Synthetic oligonucleotide
uuaaaggcgccuucugccu

SEQ ID NO: 2223630 - RNA, 19 nt, Artificial Sequence
  Description of Artificial Sequence: Synthetic oligonucleotide
gauggucacgguagcagcg

SEQ ID NO: 2223631 - RNA, 19 nt, Artificial Sequence
  Description of Artificial Sequence: Synthetic oligonucleotide
ucggcgcugcccaugacag

SEQ ID NO: 2223632 - RNA, 19 nt, Artificial Sequence
  Description of Artificial Sequence: Synthetic oligonucleotide
uucuuaggcagugaugccu

SEQ ID NO: 2223633 - RNA, 19 nt, Artificial Sequence
  Description of Artificial Sequence: Synthetic oligonucleotide
ggcacuuuggagucugucg

SEQ ID NO: 2223634 - RNA, 19 nt, Artificial Sequence
  Description of Artificial Sequence: Synthetic oligonucleotide
ugugguccuaugauggguc

SEQ ID NO: 2223635 - RNA, 19 nt, Artificial Sequence
  Description of Artificial Sequence: Synthetic oligonucleotide
cugguauuccuugacuagg

SEQ ID NO: 2223636 - RNA, 19 nt, Artificial Sequence
  Description of Artificial Sequence: Synthetic oligonucleotide
ggaacauacaggcuccacc

SEQ ID NO: 2223637 - RNA, 19 nt, Artificial Sequence
  Description of Artificial Sequence: Synthetic oligonucleotide
acauacaggcuccacccug

SEQ ID NO: 2223638 - RNA, 19 nt, Artificial Sequence
  Description of Artificial Sequence: Synthetic oligonucleotide
gcacuuuggagucugucgg

SEQ ID NO: 2223639 - RNA, 19 nt, Artificial Sequence
  Description of Artificial Sequence: Synthetic oligonucleotide
cucggcauucuucuccugg

SEQ ID NO: 2223640 - RNA, 19 nt, Artificial Sequence
  Description of Artificial Sequence: Synthetic oligonucleotide
aacauacaggcuccacccu

SEQ ID NO: 2223641 - RNA, 19 nt, Artificial Sequence
  Description of Artificial Sequence: Synthetic oligonucleotide
ucagacagccggaugcccu

SEQ ID NO: 2223642 - RNA, 19 nt, Artificial Sequence
  Description of Artificial Sequence: Synthetic oligonucleotide
ugcugguauuccuugacua

SEQ ID NO: 2223643 - RNA, 19 nt, Artificial Sequence
  Description of Artificial Sequence: Synthetic oligonucleotide
ugcgguucaccacacuuuc

SEQ ID NO: 2223644 - RNA, 19 nt, Artificial Sequence
  Description of Artificial Sequence: Synthetic oligonucleotide
cuuuggagucugucggagg

SEQ ID NO: 2223645 - RNA, 19 nt, Artificial Sequence
  Description of Artificial Sequence: Synthetic oligonucleotide
uuggucaguagcacauacu

SEQ ID NO: 2223646 - RNA, 19 nt, Artificial Sequence
  Description of Artificial Sequence: Synthetic oligonucleotide
acggcgguugagcucggcc

SEQ ID NO: 2223647 - RNA, 19 nt, Artificial Sequence
  Description of Artificial Sequence: Synthetic oligonucleotide
uaaaggcgccuucugccug

SEQ ID NO: 2223648 - RNA, 19 nt, Artificial Sequence
  Description of Artificial Sequence: Synthetic oligonucleotide
aauugcuggcuagacaguu

SEQ ID NO: 2223649 - RNA, 19 nt, Artificial Sequence
  Description of Artificial Sequence: Synthetic oligonucleotide
caagugcuucucaacugcc

SEQ ID NO: 2223650 - RNA, 19 nt, Artificial Sequence
  Description of Artificial Sequence: Synthetic oligonucleotide
guagcagcggaggaucugg

SEQ ID NO: 2223651 - RNA, 19 nt, Artificial Sequence
  Description of Artificial Sequence: Synthetic oligonucleotide
agcccuuucgggcagugcu

SEQ ID NO: 2223652 - RNA, 19 nt, Artificial Sequence
  Description of Artificial Sequence: Synthetic oligonucleotide
aggcauaugggugcccagc

SEQ ID NO: 2223653 - RNA, 19 nt, Artificial Sequence
  Description of Artificial Sequence: Synthetic oligonucleotide
auacuguuucucaagcaug

SEQ ID NO: 2223654 - RNA, 19 nt, Artificial Sequence
  Description of Artificial Sequence: Synthetic oligonucleotide
gcacagaaguaccucaugc

SEQ ID NO: 2223655 - RNA, 19 nt, Artificial Sequence
  Description of Artificial Sequence: Synthetic oligonucleotide
uugcuggcuagacaguuua

SEQ ID NO: 2223656 - RNA, 19 nt, Artificial Sequence
  Description of Artificial Sequence: Synthetic oligonucleotide
augcagauggucacgguag

SEQ ID NO: 2223657 - RNA, 19 nt, Artificial Sequence
  Description of Artificial Sequence: Synthetic oligonucleotide
ucuuaggcagugaugccuu

SEQ ID NO: 2223658 - RNA, 19 nt, Artificial Sequence
  Description of Artificial Sequence: Synthetic oligonucleotide
cuagguccgagcacagaag

SEQ ID NO: 2223659 - RNA, 19 nt, Artificial Sequence
  Description of Artificial Sequence: Synthetic oligonucleotide
ugcagauggucacgguagc

SEQ ID NO: 2223660 - RNA, 19 nt, Artificial Sequence
  Description of Artificial Sequence: Synthetic oligonucleotide
ucacggguggggcuggccc

SEQ ID NO: 2223661 - RNA, 19 nt, Artificial Sequence
  Description of Artificial Sequence: Synthetic oligonucleotide
gcagugaugccuucaagug

SEQ ID NO: 2223662 - RNA, 19 nt, Artificial Sequence
  Description of Artificial Sequence: Synthetic oligonucleotide
cucaugcagauggucacgg

SEQ ID NO: 2223663 - RNA, 19 nt, Artificial Sequence
  Description of Artificial Sequence: Synthetic oligonucleotide
guuggaaccucuugagauc

SEQ ID NO: 2223664 - RNA, 19 nt, Artificial Sequence
  Description of Artificial Sequence: Synthetic oligonucleotide
auaucucggcauucuucuc

SEQ ID NO: 2223665 - RNA, 19 nt, Artificial Sequence
  Description of Artificial Sequence: Synthetic oligonucleotide
guuucucaagcauggugac

SEQ ID NO: 2223666 - RNA, 19 nt, Artificial Sequence
  Description of Artificial Sequence: Synthetic oligonucleotide
uggcuagacaguuuauaua

SEQ ID NO: 2223667 - RNA, 19 nt, Artificial Sequence
  Description of Artificial Sequence: Synthetic oligonucleotide
cucgaaagacacccuucgg

SEQ ID NO: 2223668 - RNA, 19 nt, Artificial Sequence
  Description of Artificial Sequence: Synthetic oligonucleotide
uaggcagacagggcgugcg

SEQ ID NO: 2223669 - RNA, 19 nt, Artificial Sequence
  Description of Artificial Sequence: Synthetic oligonucleotide
augauggguccuuucuuca

SEQ ID NO: 2223670 - RNA, 19 nt, Artificial Sequence
  Description of Artificial Sequence: Synthetic oligonucleotide
aaccucuugagauccucuu

SEQ ID NO: 2223671 - RNA, 19 nt, Artificial Sequence
  Description of Artificial Sequence: Synthetic oligonucleotide
uuuucgccaccuuggccag

SEQ ID NO: 2223672 - RNA, 19 nt, Artificial Sequence
  Description of Artificial Sequence: Synthetic oligonucleotide
ucguggaauugcuggcuag

SEQ ID NO: 2223673 - RNA, 19 nt, Artificial Sequence
  Description of Artificial Sequence: Synthetic oligonucleotide
uccucagcccuuucgggca

SEQ ID NO: 2223674 - RNA, 19 nt, Artificial Sequence
  Description of Artificial Sequence: Synthetic oligonucleotide
cugaaggcuggcuggaauc

SEQ ID NO: 2223675 - RNA, 19 nt, Artificial Sequence
  Description of Artificial Sequence: Synthetic oligonucleotide
cuucuuaggcagugaugcc

SEQ ID NO: 2223676 - RNA, 19 nt, Artificial Sequence
  Description of Artificial Sequence: Synthetic oligonucleotide
ucaguagcacauacuguuu

SEQ ID NO: 2223677 - RNA, 19 nt, Artificial Sequence
  Description of Artificial Sequence: Synthetic oligonucleotide
cagauggucacgguagcag

SEQ ID NO: 2223678 - RNA, 19 nt, Artificial Sequence
  Description of Artificial Sequence: Synthetic oligonucleotide
cuuucucccuuuucgccac

SEQ ID NO: 2223679 - RNA, 19 nt, Artificial Sequence
  Description of Artificial Sequence: Synthetic oligonucleotide
cuugacuagguccgagcac

SEQ ID NO: 2223680 - RNA, 19 nt, Artificial Sequence
  Description of Artificial Sequence: Synthetic oligonucleotide
acacccuucgggccucggc

SEQ ID NO: 2223681 - RNA, 19 nt, Artificial Sequence
  Description of Artificial Sequence: Synthetic oligonucleotide
gucacgguagcagcggagg

SEQ ID NO: 2223682 - RNA, 19 nt, Artificial Sequence
  Description of Artificial Sequence: Synthetic oligonucleotide
acuuuggagucugucggag

SEQ ID NO: 2223683 - RNA, 19 nt, Artificial Sequence
  Description of Artificial Sequence: Synthetic oligonucleotide
aucucgaaagacacccuuc

SEQ ID NO: 2223684 - RNA, 19 nt, Artificial Sequence
  Description of Artificial Sequence: Synthetic oligonucleotide
augacaguaggcagacagg

SEQ ID NO: 2223685 - RNA, 19 nt, Artificial Sequence
  Description of Artificial Sequence: Synthetic oligonucleotide
uacaggcuccacccugcgg

SEQ ID NO: 2223686 - RNA, 19 nt, Artificial Sequence
  Description of Artificial Sequence: Synthetic oligonucleotide
cacccuucgggccucggcg

SEQ ID NO: 2223687 - RNA, 19 nt, Artificial Sequence
  Description of Artificial Sequence: Synthetic oligonucleotide
cauccuggacuacagccug

SEQ ID NO: 2223688 - RNA, 19 nt, Artificial Sequence
  Description of Artificial Sequence: Synthetic oligonucleotide
uccgagcacagaaguaccu

SEQ ID NO: 2223689 - RNA, 19 nt, Artificial Sequence
  Description of Artificial Sequence: Synthetic oligonucleotide
caguagcacauacuguuuc

SEQ ID NO: 2223690 - RNA, 19 nt, Artificial Sequence
  Description of Artificial Sequence: Synthetic oligonucleotide
cacagaaguaccucaugca

SEQ ID NO: 2223691 - RNA, 19 nt, Artificial Sequence
  Description of Artificial Sequence: Synthetic oligonucleotide
cagaaguaccucaugcaga

SEQ ID NO: 2223692 - RNA, 19 nt, Artificial Sequence
  Description of Artificial Sequence: Synthetic oligonucleotide
acgguagcagcggaggauc

SEQ ID NO: 2223693 - RNA, 19 nt, Artificial Sequence
  Description of Artificial Sequence: Synthetic oligonucleotide
uggguccuuucuucaaggc

SEQ ID NO: 2223694 - RNA, 19 nt, Artificial Sequence
  Description of Artificial Sequence: Synthetic oligonucleotide
gcugguauuccuugacuag

SEQ ID NO: 2223695 - RNA, 19 nt, Artificial Sequence
  Description of Artificial Sequence: Synthetic oligonucleotide
gucaguagcacauacuguu

SEQ ID NO: 2223696 - RNA, 19 nt, Artificial Sequence
  Description of Artificial Sequence: Synthetic oligonucleotide
cugaggguugcugaccacc

SEQ ID NO: 2223697 - RNA, 19 nt, Artificial Sequence
  Description of Artificial Sequence: Synthetic oligonucleotide
gcuuuauugugcucucugc

SEQ ID NO: 2223698 - RNA, 19 nt, Artificial Sequence
  Description of Artificial Sequence: Synthetic oligonucleotide
ugacuagguccgagcacag

SEQ ID NO: 2223699 - RNA, 19 nt, Artificial Sequence
  Description of Artificial Sequence: Synthetic oligonucleotide
acccuucgggccucggcgc

SEQ ID NO: 2223700 - RNA, 19 nt, Artificial Sequence
  Description of Artificial Sequence: Synthetic oligonucleotide
aucucggcauucuucuccu

SEQ ID NO: 2223701 - RNA, 19 nt, Artificial Sequence
  Description of Artificial Sequence: Synthetic oligonucleotide
gaugcgccccugcugcucc

SEQ ID NO: 2223702 - RNA, 19 nt, Artificial Sequence
  Description of Artificial Sequence: Synthetic oligonucleotide
uagcagcggaggaucuggg

SEQ ID NO: 2223703 - RNA, 19 nt, Artificial Sequence
  Description of Artificial Sequence: Synthetic oligonucleotide
cauucuucuccuggaugcg

SEQ ID NO: 2223704 - RNA, 19 nt, Artificial Sequence
  Description of Artificial Sequence: Synthetic oligonucleotide
ggcuuuauugugcucucug

SEQ ID NO: 2223705 - RNA, 19 nt, Artificial Sequence
  Description of Artificial Sequence: Synthetic oligonucleotide
gcacauacuguuucucaag

SEQ ID NO: 2223706 - RNA, 19 nt, Artificial Sequence
  Description of Artificial Sequence: Synthetic oligonucleotide
auacaggcuccacccugcg

SEQ ID NO: 2223707 - RNA, 19 nt, Artificial Sequence
  Description of Artificial Sequence: Synthetic oligonucleotide
ggcuagacaguuuauauau

SEQ ID NO: 2223708 - RNA, 19 nt, Artificial Sequence
  Description of Artificial Sequence: Synthetic oligonucleotide
guaggccggaacauacagg

SEQ ID NO: 2223709 - RNA, 19 nt, Artificial Sequence
  Description of Artificial Sequence: Synthetic oligonucleotide
cacacagugcugguauucc

SEQ ID NO: 2223710 - RNA, 19 nt, Artificial Sequence
  Description of Artificial Sequence: Synthetic oligonucleotide
auccaucucgaaagacacc

SEQ ID NO: 2223711 - RNA, 19 nt, Artificial Sequence
  Description of Artificial Sequence: Synthetic oligonucleotide
ugauggguccuuucuucaa

SEQ ID NO: 2223712 - RNA, 19 nt, Artificial Sequence
  Description of Artificial Sequence: Synthetic oligonucleotide
aagugcuucucaacugccu

SEQ ID NO: 2223713 - RNA, 19 nt, Artificial Sequence
  Description of Artificial Sequence: Synthetic oligonucleotide
ugccuucaagugcuucuca

SEQ ID NO: 2223714 - RNA, 19 nt, Artificial Sequence
  Description of Artificial Sequence: Synthetic oligonucleotide
gacaguaggcagacagggc

SEQ ID NO: 2223715 - RNA, 19 nt, Artificial Sequence
  Description of Artificial Sequence: Synthetic oligonucleotide
cugcuuuugaagccgccuc

SEQ ID NO: 2223716 - RNA, 19 nt, Artificial Sequence
  Description of Artificial Sequence: Synthetic oligonucleotide
cuuuauugugcucucugcu

SEQ ID NO: 2223717 - RNA, 19 nt, Artificial Sequence
  Description of Artificial Sequence: Synthetic oligonucleotide
auggucacgguagcagcgg

SEQ ID NO: 2223718 - RNA, 19 nt, Artificial Sequence
  Description of Artificial Sequence: Synthetic oligonucleotide
aaggugucacggcgguuga

SEQ ID NO: 2223719 - RNA, 19 nt, Artificial Sequence
  Description of Artificial Sequence: Synthetic oligonucleotide
ucacacagugcugguauuc

SEQ ID NO: 2223720 - RNA, 19 nt, Artificial Sequence
  Description of Artificial Sequence: Synthetic oligonucleotide
ugcggggcuuuauugugcu

SEQ ID NO: 2223721 - RNA, 19 nt, Artificial Sequence
  Description of Artificial Sequence: Synthetic oligonucleotide
cauacuguuucucaagcau

SEQ ID NO: 2223722 - RNA, 19 nt, Artificial Sequence
  Description of Artificial Sequence: Synthetic oligonucleotide
ggucugugguccuaugaug

SEQ ID NO: 2223723 - RNA, 19 nt, Artificial Sequence
  Description of Artificial Sequence: Synthetic oligonucleotide
cuuuugaagccgccucgug

SEQ ID NO: 2223724 - RNA, 19 nt, Artificial Sequence
  Description of Artificial Sequence: Synthetic oligonucleotide
agcucggccucucucuucu

SEQ ID NO: 2223725 - RNA, 19 nt, Artificial Sequence
  Description of Artificial Sequence: Synthetic oligonucleotide
aaccaggacgacgccgcuc

SEQ ID NO: 2223726 - RNA, 19 nt, Artificial Sequence
  Description of Artificial Sequence: Synthetic oligonucleotide
ucucaagcauggugacccc

SEQ ID NO: 2223727 - RNA, 19 nt, Artificial Sequence
  Description of Artificial Sequence: Synthetic oligonucleotide
aagacacccuucgggccuc

SEQ ID NO: 2223728 - RNA, 19 nt, Artificial Sequence
  Description of Artificial Sequence: Synthetic oligonucleotide
ucggccucucucuucucca

SEQ ID NO: 2223729 - RNA, 19 nt, Artificial Sequence
  Description of Artificial Sequence: Synthetic oligonucleotide
cugcggggcuuuauugugc

SEQ ID NO: 2223730 - RNA, 19 nt, Artificial Sequence
  Description of Artificial Sequence: Synthetic oligonucleotide
gguccgagcacagaaguac

SEQ ID NO: 2223731 - RNA, 19 nt, Artificial Sequence
  Description of Artificial Sequence: Synthetic oligonucleotide
agaggcauaugggugccca

SEQ ID NO: 2223732 - RNA, 19 nt, Artificial Sequence
  Description of Artificial Sequence: Synthetic oligonucleotide
uuccuugacuagguccgag

SEQ ID NO: 2223733 - RNA, 19 nt, Artificial Sequence
  Description of Artificial Sequence: Synthetic oligonucleotide
ggccggaacauacaggcuc

SEQ ID NO: 2223734 - RNA, 19 nt, Artificial Sequence
  Description of Artificial Sequence: Synthetic oligonucleotide
uccuaugauggguccuuuc

SEQ ID NO: 2223735 - RNA, 19 nt, Artificial Sequence
  Description of Artificial Sequence: Synthetic oligonucleotide
cugcuccucagcccuuucg

SEQ ID NO: 2223736 - RNA, 19 nt, Artificial Sequence
  Description of Artificial Sequence: Synthetic oligonucleotide
acccugcggggcuuuauug

SEQ ID NO: 2223737 - RNA, 19 nt, Artificial Sequence
  Description of Artificial Sequence: Synthetic oligonucleotide
gugguccuaugaugggucc

SEQ ID NO: 2223738 - RNA, 19 nt, Artificial Sequence
  Description of Artificial Sequence: Synthetic oligonucleotide
ccuguaggccggaacauac

SEQ ID NO: 2223739 - RNA, 19 nt, Artificial Sequence
  Description of Artificial Sequence: Synthetic oligonucleotide
cucugcuuuugaagccgcc

SEQ ID NO: 2223740 - RNA, 19 nt, Artificial Sequence
  Description of Artificial Sequence: Synthetic oligonucleotide
ucaugcagauggucacggu

SEQ ID NO: 2223741 - RNA, 19 nt, Artificial Sequence
  Description of Artificial Sequence: Synthetic oligonucleotide
caugcagauggucacggua

SEQ ID NO: 2223742 - RNA, 19 nt, Artificial Sequence
  Description of Artificial Sequence: Synthetic oligonucleotide
guagcacauacuguuucuc

SEQ ID NO: 2223743 - RNA, 19 nt, Artificial Sequence
  Description of Artificial Sequence: Synthetic oligonucleotide
ugcccugcagcacccggac

SEQ ID NO: 2223744 - RNA, 19 nt, Artificial Sequence
  Description of Artificial Sequence: Synthetic oligonucleotide
gcuuuaaaggcgccuucug

SEQ ID NO: 2223745 - RNA, 19 nt, Artificial Sequence
  Description of Artificial Sequence: Synthetic oligonucleotide
aguucccuggccagcagug

SEQ ID NO: 2223746 - RNA, 19 nt, Artificial Sequence
  Description of Artificial Sequence: Synthetic oligonucleotide
agggcgugcggccacgcga

SEQ ID NO: 2223747 - RNA, 19 nt, Artificial Sequence
  Description of Artificial Sequence: Synthetic oligonucleotide
cacucucugcccugggcac

SEQ ID NO: 2223748 - RNA, 19 nt, Artificial Sequence
  Description of Artificial Sequence: Synthetic oligonucleotide
ugggugcccagcugggaac

SEQ ID NO: 2223749 - RNA, 19 nt, Artificial Sequence
  Description of Artificial Sequence: Synthetic oligonucleotide
cuggaauccuucaugcggu

SEQ ID NO: 2223750 - RNA, 19 nt, Artificial Sequence
  Description of Artificial Sequence: Synthetic oligonucleotide
uucgccaccuuggccagcu

SEQ ID NO: 2223751 - RNA, 19 nt, Artificial Sequence
  Description of Artificial Sequence: Synthetic oligonucleotide
cuguuggaaccucuugaga

SEQ ID NO: 2223752 - RNA, 19 nt, Artificial Sequence
  Description of Artificial Sequence: Synthetic oligonucleotide
agacagccggaugcccugc

SEQ ID NO: 2223753 - RNA, 19 nt, Artificial Sequence
  Description of Artificial Sequence: Synthetic oligonucleotide
ggugucacggcgguugagc

SEQ ID NO: 2223754 - RNA, 19 nt, Artificial Sequence
  Description of Artificial Sequence: Synthetic oligonucleotide
uuuuggucaguagcacaua

SEQ ID NO: 2223755 - RNA, 19 nt, Artificial Sequence
  Description of Artificial Sequence: Synthetic oligonucleotide
agccgccucguggaauugc

SEQ ID NO: 2223756 - RNA, 19 nt, Artificial Sequence
  Description of Artificial Sequence: Synthetic oligonucleotide
caagcauggugaccccaug

SEQ ID NO: 2223757 - RNA, 19 nt, Artificial Sequence
  Description of Artificial Sequence: Synthetic oligonucleotide
guccgagcacagaaguacc

SEQ ID NO: 2223758 - RNA, 19 nt, Artificial Sequence
  Description of Artificial Sequence: Synthetic oligonucleotide
gcucagaggcauaugggug

SEQ ID NO: 2223759 - RNA, 19 nt, Artificial Sequence
  Description of Artificial Sequence: Synthetic oligonucleotide
guacaggggccauggucug

SEQ ID NO: 2223760 - RNA, 19 nt, Artificial Sequence
  Description of Artificial Sequence: Synthetic oligonucleotide
ggaggggcuuuaaaggcgc

SEQ ID NO: 2223761 - RNA, 19 nt, Artificial Sequence
  Description of Artificial Sequence: Synthetic oligonucleotide
uaugggugcccagcuggga

SEQ ID NO: 2223762 - RNA, 19 nt, Artificial Sequence
  Description of Artificial Sequence: Synthetic oligonucleotide
gaaguaccucaugcagaug

SEQ ID NO: 2223763 - RNA, 19 nt, Artificial Sequence
  Description of Artificial Sequence: Synthetic oligonucleotide
ggaggaucugggccuguag

SEQ ID NO: 2223764 - RNA, 19 nt, Artificial Sequence
  Description of Artificial Sequence: Synthetic oligonucleotide
agauccucuuucacugcug

SEQ ID NO: 2223765 - RNA, 19 nt, Artificial Sequence
  Description of Artificial Sequence: Synthetic oligonucleotide
uggaaccucuugagauccu

SEQ ID NO: 2223766 - RNA, 19 nt, Artificial Sequence
  Description of Artificial Sequence: Synthetic oligonucleotide
ggguacaggggccaugguc

SEQ ID NO: 2223767 - RNA, 19 nt, Artificial Sequence
  Description of Artificial Sequence: Synthetic oligonucleotide
uugaagccgccucguggaa

SEQ ID NO: 2223768 - RNA, 19 nt, Artificial Sequence
  Description of Artificial Sequence: Synthetic oligonucleotide
aguaccucaugcagauggu

SEQ ID NO: 2223769 - RNA, 19 nt, Artificial Sequence
  Description of Artificial Sequence: Synthetic oligonucleotide
gguacaggggccauggucu

SEQ ID NO: 2223770 - RNA, 19 nt, Artificial Sequence
  Description of Artificial Sequence: Synthetic oligonucleotide
gcaaccaggacgacgccgc

SEQ ID NO: 2223771 - RNA, 19 nt, Artificial Sequence
  Description of Artificial Sequence: Synthetic oligonucleotide
cuuaggcagugaugccuuc

SEQ ID NO: 2223772 - RNA, 19 nt, Artificial Sequence
  Description of Artificial Sequence: Synthetic oligonucleotide
ugguccuaugauggguccu

SEQ ID NO: 2223773 - RNA, 19 nt, Artificial Sequence
  Description of Artificial Sequence: Synthetic oligonucleotide
ugcuggcuagacaguuuau

SEQ ID NO: 2223774 - RNA, 19 nt, Artificial Sequence
  Description of Artificial Sequence: Synthetic oligonucleotide
ugcugaccaccaccacucu

SEQ ID NO: 2223775 - RNA, 19 nt, Artificial Sequence
  Description of Artificial Sequence: Synthetic oligonucleotide
cacuuuggagucugucgga

SEQ ID NO: 2223776 - RNA, 19 nt, Artificial Sequence
  Description of Artificial Sequence: Synthetic oligonucleotide
cagugcucacacagugcug

SEQ ID NO: 2223777 - RNA, 19 nt, Artificial Sequence
  Description of Artificial Sequence: Synthetic oligonucleotide
cucggcgcugcccaugaca

SEQ ID NO: 2223778 - RNA, 19 nt, Artificial Sequence
  Description of Artificial Sequence: Synthetic oligonucleotide
ucucggcauucuucuccug

SEQ ID NO: 2223779 - RNA, 19 nt, Artificial Sequence
  Description of Artificial Sequence: Synthetic oligonucleotide
gguucaccacacuuucaga

SEQ ID NO: 2223780 - RNA, 19 nt, Artificial Sequence
  Description of Artificial Sequence: Synthetic oligonucleotide
aucugggccuguaggccgg

SEQ ID NO: 2223781 - RNA, 19 nt, Artificial Sequence
  Description of Artificial Sequence: Synthetic oligonucleotide
gcagugcucacacagugcu

SEQ ID NO: 2223782 - RNA, 19 nt, Artificial Sequence
  Description of Artificial Sequence: Synthetic oligonucleotide
ugaagccgccucguggaau

SEQ ID NO: 2223783 - RNA, 19 nt, Artificial Sequence
  Description of Artificial Sequence: Synthetic oligonucleotide
gcuggcccgcuucuuaggc

SEQ ID NO: 2223784 - RNA, 19 nt, Artificial Sequence
  Description of Artificial Sequence: Synthetic oligonucleotide
ccuuuucgccaccuuggcc

SEQ ID NO: 2223785 - RNA, 19 nt, Artificial Sequence
  Description of Artificial Sequence: Synthetic oligonucleotide
agccggcuccacagcaacc

SEQ ID NO: 2223786 - RNA, 19 nt, Artificial Sequence
  Description of Artificial Sequence: Synthetic oligonucleotide
cuguaggccggaacauaca

SEQ ID NO: 2223787 - RNA, 19 nt, Artificial Sequence
  Description of Artificial Sequence: Synthetic oligonucleotide
gggccuguaggccggaaca

SEQ ID NO: 2223788 - RNA, 19 nt, Artificial Sequence
  Description of Artificial Sequence: Synthetic oligonucleotide
gacagggcgugcggccacg

SEQ ID NO: 2223789 - RNA, 19 nt, Artificial Sequence
  Description of Artificial Sequence: Synthetic oligonucleotide
acggguggggcuggcccgc

SEQ ID NO: 2223790 - RNA, 19 nt, Artificial Sequence
  Description of Artificial Sequence: Synthetic oligonucleotide
ccugcggggcuuuauugug

SEQ ID NO: 2223791 - RNA, 19 nt, Artificial Sequence
  Description of Artificial Sequence: Synthetic oligonucleotide
cggaggggcuuuaaaggcg

SEQ ID NO: 2223792 - RNA, 19 nt, Artificial Sequence
  Description of Artificial Sequence: Synthetic oligonucleotide
gggccauggucuguggucc

SEQ ID NO: 2223793 - RNA, 19 nt, Artificial Sequence
  Description of Artificial Sequence: Synthetic oligonucleotide
gaagccgccucguggaauu

SEQ ID NO: 2223794 - RNA, 19 nt, Artificial Sequence
  Description of Artificial Sequence: Synthetic oligonucleotide
ugcucacggguggggcugg

SEQ ID NO: 2223795 - RNA, 19 nt, Artificial Sequence
  Description of Artificial Sequence: Synthetic oligonucleotide
ggggccauggucugugguc

SEQ ID NO: 2223796 - RNA, 19 nt, Artificial Sequence
  Description of Artificial Sequence: Synthetic oligonucleotide
cacccggacccgcuccucc

SEQ ID NO: 2223797 - RNA, 19 nt, Artificial Sequence
  Description of Artificial Sequence: Synthetic oligonucleotide
ucagcccuuucgggcagug

SEQ ID NO: 2223798 - RNA, 19 nt, Artificial Sequence
  Description of Artificial Sequence: Synthetic oligonucleotide
gcauaugggugcccagcug

SEQ ID NO: 2223799 - RNA, 19 nt, Artificial Sequence
  Description of Artificial Sequence: Synthetic oligonucleotide
ucucccuuuucgccaccuu

SEQ ID NO: 2223800 - RNA, 19 nt, Artificial Sequence
  Description of Artificial Sequence: Synthetic oligonucleotide
acagggcgugcggccacgc

SEQ ID NO: 2223801 - RNA, 19 nt, Artificial Sequence
  Description of Artificial Sequence: Synthetic oligonucleotide
cuuucgggcagugcucaca

SEQ ID NO: 2223802 - RNA, 19 nt, Artificial Sequence
  Description of Artificial Sequence: Synthetic oligonucleotide
gcucauccuggacuacagc

SEQ ID NO: 2223803 - RNA, 19 nt, Artificial Sequence
  Description of Artificial Sequence: Synthetic oligonucleotide
auuccuugacuagguccga

SEQ ID NO: 2223804 - RNA, 19 nt, Artificial Sequence
  Description of Artificial Sequence: Synthetic oligonucleotide
ccuugacuagguccgagca

SEQ ID NO: 2223805 - RNA, 19 nt, Artificial Sequence
  Description of Artificial Sequence: Synthetic oligonucleotide
aggcuccacccugcggggc

SEQ ID NO: 2223806 - RNA, 19 nt, Artificial Sequence
  Description of Artificial Sequence: Synthetic oligonucleotide
augcgguucaccacacuuu

SEQ ID NO: 2223807 - RNA, 19 nt, Artificial Sequence
  Description of Artificial Sequence: Synthetic oligonucleotide
gccggaacauacaggcucc

SEQ ID NO: 2223808 - RNA, 19 nt, Artificial Sequence
  Description of Artificial Sequence: Synthetic oligonucleotide
ggcagugcucacacagugc

SEQ ID NO: 2223809 - RNA, 19 nt, Artificial Sequence
  Description of Artificial Sequence: Synthetic oligonucleotide
ucugucggaggggcuuuaa

SEQ ID NO: 2223810 - RNA, 19 nt, Artificial Sequence
  Description of Artificial Sequence: Synthetic oligonucleotide
ggcuggcccgcuucuuagg

SEQ ID NO: 2223811 - RNA, 19 nt, Artificial Sequence
  Description of Artificial Sequence: Synthetic oligonucleotide
cugcucacggguggggcug

SEQ ID NO: 2223812 - RNA, 19 nt, Artificial Sequence
  Description of Artificial Sequence: Synthetic oligonucleotide
gacagccggaugcccugca

SEQ ID NO: 2223813 - RNA, 19 nt, Artificial Sequence
  Description of Artificial Sequence: Synthetic oligonucleotide
gcuagacaguuuauauauc

SEQ ID NO: 2223814 - RNA, 19 nt, Artificial Sequence
  Description of Artificial Sequence: Synthetic oligonucleotide
gacuagguccgagcacaga

SEQ ID NO: 2223815 - RNA, 19 nt, Artificial Sequence
  Description of Artificial Sequence: Synthetic oligonucleotide
cuaugauggguccuuucuu

SEQ ID NO: 2223816 - RNA, 19 nt, Artificial Sequence
  Description of Artificial Sequence: Synthetic oligonucleotide
ucacggcgguugagcucgg

SEQ ID NO: 2223817 - RNA, 19 nt, Artificial Sequence
  Description of Artificial Sequence: Synthetic oligonucleotide
aagccgccucguggaauug

SEQ ID NO: 2223818 - RNA, 19 nt, Artificial Sequence
  Description of Artificial Sequence: Synthetic oligonucleotide
cucaagcauggugacccca

SEQ ID NO: 2223819 - RNA, 19 nt, Artificial Sequence
  Description of Artificial Sequence: Synthetic oligonucleotide
gaauugcuggcuagacagu

SEQ ID NO: 2223820 - RNA, 19 nt, Artificial Sequence
  Description of Artificial Sequence: Synthetic oligonucleotide
cucguggaauugcuggcua

SEQ ID NO: 2223821 - RNA, 19 nt, Artificial Sequence
  Description of Artificial Sequence: Synthetic oligonucleotide
caucucgaaagacacccuu

SEQ ID NO: 2223822 - RNA, 19 nt, Artificial Sequence
  Description of Artificial Sequence: Synthetic oligonucleotide
ggguccuuucuucaaggcu

SEQ ID NO: 2223823 - RNA, 19 nt, Artificial Sequence
  Description of Artificial Sequence: Synthetic oligonucleotide
cuggcccgcuucuuaggca

SEQ ID NO: 2223824 - RNA, 19 nt, Artificial Sequence
  Description of Artificial Sequence: Synthetic oligonucleotide
gcucacacagugcugguau

SEQ ID NO: 2223825 - RNA, 19 nt, Artificial Sequence
  Description of Artificial Sequence: Synthetic oligonucleotide
cccuuuucgccaccuuggc

SEQ ID NO: 2223826 - RNA, 19 nt, Artificial Sequence
  Description of Artificial Sequence: Synthetic oligonucleotide
cagggcgugcggccacgcg

SEQ ID NO: 2223827 - RNA, 19 nt, Artificial Sequence
  Description of Artificial Sequence: Synthetic oligonucleotide
ggcagacagggcgugcggc

SEQ ID NO: 2223828 - RNA, 19 nt, Artificial Sequence
  Description of Artificial Sequence: Synthetic oligonucleotide
aggguacaggggccauggu

SEQ ID NO: 2223829 - RNA, 19 nt, Artificial Sequence
  Description of Artificial Sequence: Synthetic oligonucleotide
ugcggccacgcgagccggc

SEQ ID NO: 2223830 - RNA, 19 nt, Artificial Sequence
  Description of Artificial Sequence: Synthetic oligonucleotide
agcggaggaucugggccug

SEQ ID NO: 2223831 - RNA, 19 nt, Artificial Sequence
  Description of Artificial Sequence: Synthetic oligonucleotide
ggaauccuucaugcgguuc

SEQ ID NO: 2223832 - RNA, 19 nt, Artificial Sequence
  Description of Artificial Sequence: Synthetic oligonucleotide
cucucggcgcugcccauga

SEQ ID NO: 2223833 - RNA, 19 nt, Artificial Sequence
  Description of Artificial Sequence: Synthetic oligonucleotide
gggcuuuaaaggcgccuuc

SEQ ID NO: 2223834 - RNA, 19 nt, Artificial Sequence
  Description of Artificial Sequence: Synthetic oligonucleotide
ggcauaugggugcccagcu

SEQ ID NO: 2223835 - RNA, 19 nt, Artificial Sequence
  Description of Artificial Sequence: Synthetic oligonucleotide
aggugucacggcgguugag

SEQ ID NO: 2223836 - RNA, 19 nt, Artificial Sequence
  Description of Artificial Sequence: Synthetic oligonucleotide
caguaggcagacagggcgu

SEQ ID NO: 2223837 - RNA, 19 nt, Artificial Sequence
  Description of Artificial Sequence: Synthetic oligonucleotide
cagaggcauaugggugccc

SEQ ID NO: 2223838 - RNA, 19 nt, Artificial Sequence
  Description of Artificial Sequence: Synthetic oligonucleotide
cucacggguggggcuggcc

SEQ ID NO: 2223839 - RNA, 19 nt, Artificial Sequence
  Description of Artificial Sequence: Synthetic oligonucleotide
gcugcccaugacaguaggc

SEQ ID NO: 2223840 - RNA, 19 nt, Artificial Sequence
  Description of Artificial Sequence: Synthetic oligonucleotide
cugucggaggggcuuuaaa

SEQ ID NO: 2223841 - RNA, 19 nt, Artificial Sequence
  Description of Artificial Sequence: Synthetic oligonucleotide
gcuggcuagacaguuuaua

SEQ ID NO: 2223842 - RNA, 19 nt, Artificial Sequence
  Description of Artificial Sequence: Synthetic oligonucleotide
ggcgcugcccaugacagua

SEQ ID NO: 2223843 - RNA, 19 nt, Artificial Sequence
  Description of Artificial Sequence: Synthetic oligonucleotide
cagcggaggaucugggccu

SEQ ID NO: 2223844 - RNA, 19 nt, Artificial Sequence
  Description of Artificial Sequence: Synthetic oligonucleotide
ugcaggguacaggggccau

SEQ ID NO: 2223845 - RNA, 19 nt, Artificial Sequence
  Description of Artificial Sequence: Synthetic oligonucleotide
cgcuucuuaggcagugaug

SEQ ID NO: 2223846 - RNA, 19 nt, Artificial Sequence
  Description of Artificial Sequence: Synthetic oligonucleotide
agucugucggaggggcuuu

SEQ ID NO: 2223847 - RNA, 19 nt, Artificial Sequence
  Description of Artificial Sequence: Synthetic oligonucleotide
gugcggccacgcgagccgg

SEQ ID NO: 2223848 - RNA, 19 nt, Artificial Sequence
  Description of Artificial Sequence: Synthetic oligonucleotide
cacgcgagccggcuccaca

SEQ ID NO: 2223849 - RNA, 19 nt, Artificial Sequence
  Description of Artificial Sequence: Synthetic oligonucleotide
agguccgagcacagaagua

SEQ ID NO: 2223850 - RNA, 19 nt, Artificial Sequence
  Description of Artificial Sequence: Synthetic oligonucleotide
aggccggaacauacaggcu

SEQ ID NO: 2223851 - RNA, 19 nt, Artificial Sequence
  Description of Artificial Sequence: Synthetic oligonucleotide
ggucaguagcacauacugu

SEQ ID NO: 2223852 - RNA, 19 nt, Artificial Sequence
  Description of Artificial Sequence: Synthetic oligonucleotide
cagacagggcgugcggcca

SEQ ID NO: 2223853 - RNA, 19 nt, Artificial Sequence
  Description of Artificial Sequence: Synthetic oligonucleotide
agacacccuucgggccucg

SEQ ID NO: 2223854 - RNA, 19 nt, Artificial Sequence
  Description of Artificial Sequence: Synthetic oligonucleotide
cagcccuuucgggcagugc

SEQ ID NO: 2223855 - RNA, 19 nt, Artificial Sequence
  Description of Artificial Sequence: Synthetic oligonucleotide
ggcuuuaaaggcgccuucu

SEQ ID NO: 2223856 - RNA, 19 nt, Artificial Sequence
  Description of Artificial Sequence: Synthetic oligonucleotide
ccaccaccacucucugccc

SEQ ID NO: 2223857 - RNA, 19 nt, Artificial Sequence
  Description of Artificial Sequence: Synthetic oligonucleotide
ccgagcacagaaguaccuc

SEQ ID NO: 2223858 - RNA, 19 nt, Artificial Sequence
  Description of Artificial Sequence: Synthetic oligonucleotide
agaaggugucacggcgguu

SEQ ID NO: 2223859 - RNA, 19 nt, Artificial Sequence
  Description of Artificial Sequence: Synthetic oligonucleotide
cucuuucacugcugagggu

SEQ ID NO: 2223860 - RNA, 19 nt, Artificial Sequence
  Description of Artificial Sequence: Synthetic oligonucleotide
gcgagccggcuccacagca

SEQ ID NO: 2223861 - RNA, 19 nt, Artificial Sequence
  Description of Artificial Sequence: Synthetic oligonucleotide
cuucugccugcugaaggcu

SEQ ID NO: 2223862 - RNA, 19 nt, Artificial Sequence
  Description of Artificial Sequence: Synthetic oligonucleotide
ggaugcccugcagcacccg

SEQ ID NO: 2223863 - RNA, 19 nt, Artificial Sequence
  Description of Artificial Sequence: Synthetic oligonucleotide
gcugaaggcuggcuggaau

SEQ ID NO: 2223864 - RNA, 19 nt, Artificial Sequence
  Description of Artificial Sequence: Synthetic oligonucleotide
caguucccuggccagcagu

SEQ ID NO: 2223865 - RNA, 19 nt, Artificial Sequence
  Description of Artificial Sequence: Synthetic oligonucleotide
cgcugcccaugacaguagg

SEQ ID NO: 2223866 - RNA, 19 nt, Artificial Sequence
  Description of Artificial Sequence: Synthetic oligonucleotide
ccucagcccuuucgggcag

SEQ ID NO: 2223867 - RNA, 19 nt, Artificial Sequence
  Description of Artificial Sequence: Synthetic oligonucleotide
augcgccccugcugcuccu

SEQ ID NO: 2223868 - RNA, 19 nt, Artificial Sequence
  Description of Artificial Sequence: Synthetic oligonucleotide
gcgugcggccacgcgagcc

SEQ ID NO: 2223869 - RNA, 19 nt, Artificial Sequence
  Description of Artificial Sequence: Synthetic oligonucleotide
gcuuuugaagccgccucgu

SEQ ID NO: 2223870 - RNA, 19 nt, Artificial Sequence
  Description of Artificial Sequence: Synthetic oligonucleotide
ucgccaccuuggccagcuc

SEQ ID NO: 2223871 - RNA, 19 nt, Artificial Sequence
  Description of Artificial Sequence: Synthetic oligonucleotide
cacgguagcagcggaggau

SEQ ID NO: 2223872 - RNA, 19 nt, Artificial Sequence
  Description of Artificial Sequence: Synthetic oligonucleotide
gcugcucacggguggggcu

SEQ ID NO: 2223873 - RNA, 19 nt, Artificial Sequence
  Description of Artificial Sequence: Synthetic oligonucleotide
ggaugcgccccugcugcuc

SEQ ID NO: 2223874 - RNA, 19 nt, Artificial Sequence
  Description of Artificial Sequence: Synthetic oligonucleotide
ggugcccagcugggaacug

SEQ ID NO: 2223875 - RNA, 19 nt, Artificial Sequence
  Description of Artificial Sequence: Synthetic oligonucleotide
cucggcgcucucggcgcug

SEQ ID NO: 2223876 - RNA, 19 nt, Artificial Sequence
  Description of Artificial Sequence: Synthetic oligonucleotide
gcucucggcgcugcccaug

SEQ ID NO: 2223877 - RNA, 19 nt, Artificial Sequence
  Description of Artificial Sequence: Synthetic oligonucleotide
cguggaauugcuggcuaga

SEQ ID NO: 2223878 - RNA, 19 nt, Artificial Sequence
  Description of Artificial Sequence: Synthetic oligonucleotide
gcgccuucugccugcugaa

SEQ ID NO: 2223879 - RNA, 19 nt, Artificial Sequence
  Description of Artificial Sequence: Synthetic oligonucleotide
gguccuaugauggguccuu

SEQ ID NO: 2223880 - RNA, 19 nt, Artificial Sequence
  Description of Artificial Sequence: Synthetic oligonucleotide
gcccuuucgggcagugcuc

SEQ ID NO: 2223881 - RNA, 19 nt, Artificial Sequence
  Description of Artificial Sequence: Synthetic oligonucleotide
uccacccugcggggcuuua

SEQ ID NO: 2223882 - RNA, 19 nt, Artificial Sequence
  Description of Artificial Sequence: Synthetic oligonucleotide
gcgguucaccacacuuuca

SEQ ID NO: 2223883 - RNA, 19 nt, Artificial Sequence
  Description of Artificial Sequence: Synthetic oligonucleotide
cggaacauacaggcuccac

SEQ ID NO: 2223884 - RNA, 19 nt, Artificial Sequence
  Description of Artificial Sequence: Synthetic oligonucleotide
ggcuccacccugcggggcu

SEQ ID NO: 2223885 - RNA, 19 nt, Artificial Sequence
  Description of Artificial Sequence: Synthetic oligonucleotide
gccuguaggccggaacaua

SEQ ID NO: 2223886 - RNA, 19 nt, Artificial Sequence
  Description of Artificial Sequence: Synthetic oligonucleotide
caaccaggacgacgccgcu

SEQ ID NO: 2223887 - RNA, 19 nt, Artificial Sequence
  Description of Artificial Sequence: Synthetic oligonucleotide
gcggggcuuuauugugcuc

SEQ ID NO: 2223888 - RNA, 19 nt, Artificial Sequence
  Description of Artificial Sequence: Synthetic oligonucleotide
gcgccccugcugcuccuug

SEQ ID NO: 2223889 - RNA, 19 nt, Artificial Sequence
  Description of Artificial Sequence: Synthetic oligonucleotide
ccaucucgaaagacacccu

SEQ ID NO: 2223890 - RNA, 19 nt, Artificial Sequence
  Description of Artificial Sequence: Synthetic oligonucleotide
cacccugcggggcuuuauu

SEQ ID NO: 2223891 - RNA, 19 nt, Artificial Sequence
  Description of Artificial Sequence: Synthetic oligonucleotide
cggggcuuuauugugcucu

SEQ ID NO: 2223892 - RNA, 19 nt, Artificial Sequence
  Description of Artificial Sequence: Synthetic oligonucleotide
gucugucggaggggcuuua

SEQ ID NO: 2223893 - RNA, 19 nt, Artificial Sequence
  Description of Artificial Sequence: Synthetic oligonucleotide
cuucgggccucggcgcucu

SEQ ID NO: 2223894 - RNA, 19 nt, Artificial Sequence
  Description of Artificial Sequence: Synthetic oligonucleotide
ccucguggaauugcuggcu

SEQ ID NO: 2223895 - RNA, 19 nt, Artificial Sequence
  Description of Artificial Sequence: Synthetic oligonucleotide
ccgcuucuuaggcagugau

SEQ ID NO: 2223896 - RNA, 19 nt, Artificial Sequence
  Description of Artificial Sequence: Synthetic oligonucleotide
ggccuguaggccggaacau

SEQ ID NO: 2223897 - RNA, 19 nt, Artificial Sequence
  Description of Artificial Sequence: Synthetic oligonucleotide
cggcgguugagcucggccu

SEQ ID NO: 2223898 - RNA, 19 nt, Artificial Sequence
  Description of Artificial Sequence: Synthetic oligonucleotide
cccgcuucuuaggcaguga

SEQ ID NO: 2223899 - RNA, 19 nt, Artificial Sequence
  Description of Artificial Sequence: Synthetic oligonucleotide
ccggaacauacaggcucca

SEQ ID NO: 2223900 - RNA, 19 nt, Artificial Sequence
  Description of Artificial Sequence: Synthetic oligonucleotide
gcucacggguggggcuggc

SEQ ID NO: 2223901 - RNA, 19 nt, Artificial Sequence
  Description of Artificial Sequence: Synthetic oligonucleotide
cgagccggcuccacagcaa

SEQ ID NO: 2223902 - RNA, 19 nt, Artificial Sequence
  Description of Artificial Sequence: Synthetic oligonucleotide
cugggccuguaggccggaa

SEQ ID NO: 2223903 - RNA, 19 nt, Artificial Sequence
  Description of Artificial Sequence: Synthetic oligonucleotide
cucagcccuuucgggcagu

SEQ ID NO: 2223904 - RNA, 19 nt, Artificial Sequence
  Description of Artificial Sequence: Synthetic oligonucleotide
gccacgcgagccggcucca

SEQ ID NO: 2223905 - RNA, 19 nt, Artificial Sequence
  Description of Artificial Sequence: Synthetic oligonucleotide
cgggcagugcucacacagu

SEQ ID NO: 2223906 - RNA, 19 nt, Artificial Sequence
  Description of Artificial Sequence: Synthetic oligonucleotide
gcggccacgcgagccggcu

SEQ ID NO: 2223907 - RNA, 19 nt, Artificial Sequence
  Description of Artificial Sequence: Synthetic oligonucleotide
cggaggaucugggccugua

SEQ ID NO: 2223908 - RNA, 19 nt, Artificial Sequence
  Description of Artificial Sequence: Synthetic oligonucleotide
gcggaggaucugggccugu

SEQ ID NO: 2223909 - RNA, 19 nt, Artificial Sequence
  Description of Artificial Sequence: Synthetic oligonucleotide
ccacccugcggggcuuuau

SEQ ID NO: 2223910 - RNA, 19 nt, Artificial Sequence
  Description of Artificial Sequence: Synthetic oligonucleotide
gaugagggaaaacagauag

SEQ ID NO: 2223911 - RNA, 19 nt, Artificial Sequence
  Description of Artificial Sequence: Synthetic oligonucleotide
aaaguauaaggcucgauug

SEQ ID NO: 2223912 - RNA, 19 nt, Artificial Sequence
  Description of Artificial Sequence: Synthetic oligonucleotide
gauaguaccugaaugaacg

SEQ ID NO: 2223913 - RNA, 19 nt, Artificial Sequence
  Description of Artificial Sequence: Synthetic oligonucleotide
aauaucagggcuugagucg

SEQ ID NO: 2223914 - RNA, 19 nt, Artificial Sequence
  Description of Artificial Sequence: Synthetic oligonucleotide
agcaucacggcucagauuc

SEQ ID NO: 2223915 - RNA, 19 nt, Artificial Sequence
  Description of Artificial Sequence: Synthetic oligonucleotide
agucgaauuagaaugaggc

SEQ ID NO: 2223916 - RNA, 19 nt, Artificial Sequence
  Description of Artificial Sequence: Synthetic oligonucleotide
aacagauaguaccugaaug

SEQ ID NO: 2223917 - RNA, 19 nt, Artificial Sequence
  Description of Artificial Sequence: Synthetic oligonucleotide
cuuguauuggaauaucagg

SEQ ID NO: 2223918 - RNA, 19 nt, Artificial Sequence
  Description of Artificial Sequence: Synthetic oligonucleotide
gacaacauccgauaggugc

SEQ ID NO: 2223919 - RNA, 19 nt, Artificial Sequence
  Description of Artificial Sequence: Synthetic oligonucleotide
agaugacuaacagugaugc

SEQ ID NO: 2223920 - RNA, 19 nt, Artificial Sequence
  Description of Artificial Sequence: Synthetic oligonucleotide
cuaacagugaugcagaauc

SEQ ID NO: 2223921 - RNA, 19 nt, Artificial Sequence
  Description of Artificial Sequence: Synthetic oligonucleotide
agggagucgaauuagaaug

SEQ ID NO: 2223922 - RNA, 19 nt, Artificial Sequence
  Description of Artificial Sequence: Synthetic oligonucleotide
gagucgaaacuucagagcc

SEQ ID NO: 2223923 - RNA, 19 nt, Artificial Sequence
  Description of Artificial Sequence: Synthetic oligonucleotide
agaauagacagaauggagg

SEQ ID NO: 2223924 - RNA, 19 nt, Artificial Sequence
  Description of Artificial Sequence: Synthetic oligonucleotide
ucgaauuagaaugaggcug

SEQ ID NO: 2223925 - RNA, 19 nt, Artificial Sequence
  Description of Artificial Sequence: Synthetic oligonucleotide
uaaggcucgauugagauga

SEQ ID NO: 2223926 - RNA, 19 nt, Artificial Sequence
  Description of Artificial Sequence: Synthetic oligonucleotide
aacauugucacaggcaaag

SEQ ID NO: 2223927 - RNA, 19 nt, Artificial Sequence
  Description of Artificial Sequence: Synthetic oligonucleotide
gaagggaacaggcauacug

SEQ ID NO: 2223928 - RNA, 19 nt, Artificial Sequence
  Description of Artificial Sequence: Synthetic oligonucleotide
gaucucguaagcaucacgg

SEQ ID NO: 2223929 - RNA, 19 nt, Artificial Sequence
  Description of Artificial Sequence: Synthetic oligonucleotide
agaauggaggagaugaggc

SEQ ID NO: 2223930 - RNA, 19 nt, Artificial Sequence
  Description of Artificial Sequence: Synthetic oligonucleotide
acagauaguaccugaauga

SEQ ID NO: 2223931 - RNA, 19 nt, Artificial Sequence
  Description of Artificial Sequence: Synthetic oligonucleotide
ggugagaauagacagaaug

SEQ ID NO: 2223932 - RNA, 19 nt, Artificial Sequence
  Description of Artificial Sequence: Synthetic oligonucleotide
uguuccaucaguaggcgga

SEQ ID NO: 2223933 - RNA, 19 nt, Artificial Sequence
  Description of Artificial Sequence: Synthetic oligonucleotide
gaauaucagggcuugaguc

SEQ ID NO: 2223934 - RNA, 19 nt, Artificial Sequence
  Description of Artificial Sequence: Synthetic oligonucleotide
aguuguggcaggcuugccc

SEQ ID NO: 2223935 - RNA, 19 nt, Artificial Sequence
  Description of Artificial Sequence: Synthetic oligonucleotide
gaauagacagaauggagga

SEQ ID NO: 2223936 - RNA, 19 nt, Artificial Sequence
  Description of Artificial Sequence: Synthetic oligonucleotide
agaaucucaggacaacauc

SEQ ID NO: 2223937 - RNA, 19 nt, Artificial Sequence
  Description of Artificial Sequence: Synthetic oligonucleotide
aaguauaaggcucgauuga

SEQ ID NO: 2223938 - RNA, 19 nt, Artificial Sequence
  Description of Artificial Sequence: Synthetic oligonucleotide
gugagaauagacagaaugg

SEQ ID NO: 2223939 - RNA, 19 nt, Artificial Sequence
  Description of Artificial Sequence: Synthetic oligonucleotide
gauucugucucacaauuca

SEQ ID NO: 2223940 - RNA, 19 nt, Artificial Sequence
  Description of Artificial Sequence: Synthetic oligonucleotide
gauugugacuucaaucagg

SEQ ID NO: 2223941 - RNA, 19 nt, Artificial Sequence
  Description of Artificial Sequence: Synthetic oligonucleotide
gacagaauggaggagauga

SEQ ID NO: 2223942 - RNA, 19 nt, Artificial Sequence
  Description of Artificial Sequence: Synthetic oligonucleotide
gaugcagaaucucaggaca

SEQ ID NO: 2223943 - RNA, 19 nt, Artificial Sequence
  Description of Artificial Sequence: Synthetic oligonucleotide
ucgauugagaugacuaaca

SEQ ID NO: 2223944 - RNA, 19 nt, Artificial Sequence
  Description of Artificial Sequence: Synthetic oligonucleotide
gaugaggccacagaggccc

SEQ ID NO: 2223945 - RNA, 19 nt, Artificial Sequence
  Description of Artificial Sequence: Synthetic oligonucleotide
ucugagcacauccaguaga

SEQ ID NO: 2223946 - RNA, 19 nt, Artificial Sequence
  Description of Artificial Sequence: Synthetic oligonucleotide
auaguaccugaaugaacgc

SEQ ID NO: 2223947 - RNA, 19 nt, Artificial Sequence
  Description of Artificial Sequence: Synthetic oligonucleotide
ucugucucacaauucaaga

SEQ ID NO: 2223948 - RNA, 19 nt, Artificial Sequence
  Description of Artificial Sequence: Synthetic oligonucleotide
uauaaggcucgauugagau

SEQ ID NO: 2223949 - RNA, 19 nt, Artificial Sequence
  Description of Artificial Sequence: Synthetic oligonucleotide
agugaugcagaaucucagg

SEQ ID NO: 2223950 - RNA, 19 nt, Artificial Sequence
  Description of Artificial Sequence: Synthetic oligonucleotide
ucuuuuggcugacucaaga

SEQ ID NO: 2223951 - RNA, 19 nt, Artificial Sequence
  Description of Artificial Sequence: Synthetic oligonucleotide
aagcugaggucucuuguuc

SEQ ID NO: 2223952 - RNA, 19 nt, Artificial Sequence
  Description of Artificial Sequence: Synthetic oligonucleotide
ucacaggcauuucugagca

SEQ ID NO: 2223953 - RNA, 19 nt, Artificial Sequence
  Description of Artificial Sequence: Synthetic oligonucleotide
ugagaugacuaacagugau

SEQ ID NO: 2223954 - RNA, 19 nt, Artificial Sequence
  Description of Artificial Sequence: Synthetic oligonucleotide
agcagcuuucuuccaaggc

SEQ ID NO: 2223955 - RNA, 19 nt, Artificial Sequence
  Description of Artificial Sequence: Synthetic oligonucleotide
gaaaacagauaguaccuga

SEQ ID NO: 2223956 - RNA, 19 nt, Artificial Sequence
  Description of Artificial Sequence: Synthetic oligonucleotide
ucucguaagcaucacggcu

SEQ ID NO: 2223957 - RNA, 19 nt, Artificial Sequence
  Description of Artificial Sequence: Synthetic oligonucleotide
gagaauagacagaauggag

SEQ ID NO: 2223958 - RNA, 19 nt, Artificial Sequence
  Description of Artificial Sequence: Synthetic oligonucleotide
acaaucuaagauucugucu

SEQ ID NO: 2223959 - RNA, 19 nt, Artificial Sequence
  Description of Artificial Sequence: Synthetic oligonucleotide
ugucgaaucuguuucugca

SEQ ID NO: 2223960 - RNA, 19 nt, Artificial Sequence
  Description of Artificial Sequence: Synthetic oligonucleotide
cacacggggagcuaguccg

SEQ ID NO: 2223961 - RNA, 19 nt, Artificial Sequence
  Description of Artificial Sequence: Synthetic oligonucleotide
aaucuaagauucugucuca

SEQ ID NO: 2223962 - RNA, 19 nt, Artificial Sequence
  Description of Artificial Sequence: Synthetic oligonucleotide
aggugcacagcucuuuugg

SEQ ID NO: 2223963 - RNA, 19 nt, Artificial Sequence
  Description of Artificial Sequence: Synthetic oligonucleotide
agcugaggucucuuguucc

SEQ ID NO: 2223964 - RNA, 19 nt, Artificial Sequence
  Description of Artificial Sequence: Synthetic oligonucleotide
gucucugcaaagcaugucc

SEQ ID NO: 2223965 - RNA, 19 nt, Artificial Sequence
  Description of Artificial Sequence: Synthetic oligonucleotide
aucucguaagcaucacggc

SEQ ID NO: 2223966 - RNA, 19 nt, Artificial Sequence
  Description of Artificial Sequence: Synthetic oligonucleotide
cacaggcaaaguauaaggc

SEQ ID NO: 2223967 - RNA, 19 nt, Artificial Sequence
  Description of Artificial Sequence: Synthetic oligonucleotide
uaagugucuggauugugac

SEQ ID NO: 2223968 - RNA, 19 nt, Artificial Sequence
  Description of Artificial Sequence: Synthetic oligonucleotide
aggcguagcagcuuucuuc

SEQ ID NO: 2223969 - RNA, 19 nt, Artificial Sequence
  Description of Artificial Sequence: Synthetic oligonucleotide
aauagacagaauggaggag

SEQ ID NO: 2223970 - RNA, 19 nt, Artificial Sequence
  Description of Artificial Sequence: Synthetic oligonucleotide
uuagaaugaggcuggcaca

SEQ ID NO: 2223971 - RNA, 19 nt, Artificial Sequence
  Description of Artificial Sequence: Synthetic oligonucleotide
cagauuagggugagaauag

SEQ ID NO: 2223972 - RNA, 19 nt, Artificial Sequence
  Description of Artificial Sequence: Synthetic oligonucleotide
aguauaaggcucgauugag

SEQ ID NO: 2223973 - RNA, 19 nt, Artificial Sequence
  Description of Artificial Sequence: Synthetic oligonucleotide
aaucagggagucgaauuag

SEQ ID NO: 2223974 - RNA, 19 nt, Artificial Sequence
  Description of Artificial Sequence: Synthetic oligonucleotide
cacauccaguagaagaggg

SEQ ID NO: 2223975 - RNA, 19 nt, Artificial Sequence
  Description of Artificial Sequence: Synthetic oligonucleotide
auacugggcagcccuacac

SEQ ID NO: 2223976 - RNA, 19 nt, Artificial Sequence
  Description of Artificial Sequence: Synthetic oligonucleotide
uuuuccugguccacacggg

SEQ ID NO: 2223977 - RNA, 19 nt, Artificial Sequence
  Description of Artificial Sequence: Synthetic oligonucleotide
uggaauaucagggcuugag

SEQ ID NO: 2223978 - RNA, 19 nt, Artificial Sequence
  Description of Artificial Sequence: Synthetic oligonucleotide
auccuaagugucuggauug

SEQ ID NO: 2223979 - RNA, 19 nt, Artificial Sequence
  Description of Artificial Sequence: Synthetic oligonucleotide
uccaucaguaggcggaucu

SEQ ID NO: 2223980 - RNA, 19 nt, Artificial Sequence
  Description of Artificial Sequence: Synthetic oligonucleotide
cuuuuggcugacucaagag

SEQ ID NO: 2223981 - RNA, 19 nt, Artificial Sequence
  Description of Artificial Sequence: Synthetic oligonucleotide
ugagucguagccagggaca

SEQ ID NO: 2223982 - RNA, 19 nt, Artificial Sequence
  Description of Artificial Sequence: Synthetic oligonucleotide
ucacggcucagauucauga

SEQ ID NO: 2223983 - RNA, 19 nt, Artificial Sequence
  Description of Artificial Sequence: Synthetic oligonucleotide
uugagucguagccagggac

SEQ ID NO: 2223984 - RNA, 19 nt, Artificial Sequence
  Description of Artificial Sequence: Synthetic oligonucleotide
ucacaauucaagacucccu

SEQ ID NO: 2223985 - RNA, 19 nt, Artificial Sequence
  Description of Artificial Sequence: Synthetic oligonucleotide
cuuuccagcccacagaaca

SEQ ID NO: 2223986 - RNA, 19 nt, Artificial Sequence
  Description of Artificial Sequence: Synthetic oligonucleotide
ugccgaguuacccaggcgu

SEQ ID NO: 2223987 - RNA, 19 nt, Artificial Sequence
  Description of Artificial Sequence: Synthetic oligonucleotide
acagauuagggugagaaua

SEQ ID NO: 2223988 - RNA, 19 nt, Artificial Sequence
  Description of Artificial Sequence: Synthetic oligonucleotide
ucugcaaagcauguccaag

SEQ ID NO: 2223989 - RNA, 19 nt, Artificial Sequence
  Description of Artificial Sequence: Synthetic oligonucleotide
uauuggaauaucagggcuu

SEQ ID NO: 2223990 - RNA, 19 nt, Artificial Sequence
  Description of Artificial Sequence: Synthetic oligonucleotide
ucuccugccauaagcugag

SEQ ID NO: 2223991 - RNA, 19 nt, Artificial Sequence
  Description of Artificial Sequence: Synthetic oligonucleotide
ugggacuccagaaaccuuc

SEQ ID NO: 2223992 - RNA, 19 nt, Artificial Sequence
  Description of Artificial Sequence: Synthetic oligonucleotide
agggaacaggcauacuggg

SEQ ID NO: 2223993 - RNA, 19 nt, Artificial Sequence
  Description of Artificial Sequence: Synthetic oligonucleotide
aucuguuucugcaauucgg

SEQ ID NO: 2223994 - RNA, 19 nt, Artificial Sequence
  Description of Artificial Sequence: Synthetic oligonucleotide
ucggagucgaaacuucaga

SEQ ID NO: 2223995 - RNA, 19 nt, Artificial Sequence
  Description of Artificial Sequence: Synthetic oligonucleotide
cugucucacaauucaagac

SEQ ID NO: 2223996 - RNA, 19 nt, Artificial Sequence
  Description of Artificial Sequence: Synthetic oligonucleotide
agauaguaccugaaugaac

SEQ ID NO: 2223997 - RNA, 19 nt, Artificial Sequence
  Description of Artificial Sequence: Synthetic oligonucleotide
guuguggcaggcuugcccc

SEQ ID NO: 2223998 - RNA, 19 nt, Artificial Sequence
  Description of Artificial Sequence: Synthetic oligonucleotide
aggacaacauccgauaggu

SEQ ID NO: 2223999 - RNA, 19 nt, Artificial Sequence
  Description of Artificial Sequence: Synthetic oligonucleotide
ucaaucagggagucgaauu

SEQ ID NO: 2224000 - RNA, 19 nt, Artificial Sequence
  Description of Artificial Sequence: Synthetic oligonucleotide
cucaagagcaucugccgag

SEQ ID NO: 2224001 - RNA, 19 nt, Artificial Sequence
  Description of Artificial Sequence: Synthetic oligonucleotide
ucgaaggacacgagccagg

SEQ ID NO: 2224002 - RNA, 19 nt, Artificial Sequence
  Description of Artificial Sequence: Synthetic oligonucleotide
cucacaauucaagacuccc

SEQ ID NO: 2224003 - RNA, 19 nt, Artificial Sequence
  Description of Artificial Sequence: Synthetic oligonucleotide
gagucgaauuagaaugagg

SEQ ID NO: 2224004 - RNA, 19 nt, Artificial Sequence
  Description of Artificial Sequence: Synthetic oligonucleotide
agugggaugaagaggucac

SEQ ID NO: 2224005 - RNA, 19 nt, Artificial Sequence
  Description of Artificial Sequence: Synthetic oligonucleotide
caguugucgaaucuguuuc

SEQ ID NO: 2224006 - RNA, 19 nt, Artificial Sequence
  Description of Artificial Sequence: Synthetic oligonucleotide
uacacagccgcucccgggc

SEQ ID NO: 2224007 - RNA, 19 nt, Artificial Sequence
  Description of Artificial Sequence: Synthetic oligonucleotide
ucucaggacaacauccgau

SEQ ID NO: 2224008 - RNA, 19 nt, Artificial Sequence
  Description of Artificial Sequence: Synthetic oligonucleotide
guuacccaggcguagcagc

SEQ ID NO: 2224009 - RNA, 19 nt, Artificial Sequence
  Description of Artificial Sequence: Synthetic oligonucleotide
aguaccugaaugaacgcug

SEQ ID NO: 2224010 - RNA, 19 nt, Artificial Sequence
  Description of Artificial Sequence: Synthetic oligonucleotide
acuucagagccaguugugg

SEQ ID NO: 2224011 - RNA, 19 nt, Artificial Sequence
  Description of Artificial Sequence: Synthetic oligonucleotide
ugcaaagcauguccaagaa

SEQ ID NO: 2224012 - RNA, 19 nt, Artificial Sequence
  Description of Artificial Sequence: Synthetic oligonucleotide
acgccagaggccuaguuug

SEQ ID NO: 2224013 - RNA, 19 nt, Artificial Sequence
  Description of Artificial Sequence: Synthetic oligonucleotide
ucugccgaguuacccaggc

SEQ ID NO: 2224014 - RNA, 19 nt, Artificial Sequence
  Description of Artificial Sequence: Synthetic oligonucleotide
cuaguccggacuuuccagc

SEQ ID NO: 2224015 - RNA, 19 nt, Artificial Sequence
  Description of Artificial Sequence: Synthetic oligonucleotide
uugagaugacuaacaguga

SEQ ID NO: 2224016 - RNA, 19 nt, Artificial Sequence
  Description of Artificial Sequence: Synthetic oligonucleotide
aagugucuggauugugacu

SEQ ID NO: 2224017 - RNA, 19 nt, Artificial Sequence
  Description of Artificial Sequence: Synthetic oligonucleotide
auugucacaggcaaaguau

SEQ ID NO: 2224018 - RNA, 19 nt, Artificial Sequence
  Description of Artificial Sequence: Synthetic oligonucleotide
uuguuccaucaguaggcgg

SEQ ID NO: 2224019 - RNA, 19 nt, Artificial Sequence
  Description of Artificial Sequence: Synthetic oligonucleotide
aauuagaaugaggcuggca

SEQ ID NO: 2224020 - RNA, 19 nt, Artificial Sequence
  Description of Artificial Sequence: Synthetic oligonucleotide
auuggaauaucagggcuug

SEQ ID NO: 2224021 - RNA, 19 nt, Artificial Sequence
  Description of Artificial Sequence: Synthetic oligonucleotide
ucgaaucuguuucugcaau

SEQ ID NO: 2224022 - RNA, 19 nt, Artificial Sequence
  Description of Artificial Sequence: Synthetic oligonucleotide
agcccuacacagccgcucc

SEQ ID NO: 2224023 - RNA, 19 nt, Artificial Sequence
  Description of Artificial Sequence: Synthetic oligonucleotide
aguaggcggaucucguaag

SEQ ID NO: 2224024 - RNA, 19 nt, Artificial Sequence
  Description of Artificial Sequence: Synthetic oligonucleotide
auccgauaggugcacagcu

SEQ ID NO: 2224025 - RNA, 19 nt, Artificial Sequence
  Description of Artificial Sequence: Synthetic oligonucleotide
cuuccugaccucaucuuug

SEQ ID NO: 2224026 - RNA, 19 nt, Artificial Sequence
  Description of Artificial Sequence: Synthetic oligonucleotide
cuaagugucuggauuguga

SEQ ID NO: 2224027 - RNA, 19 nt, Artificial Sequence
  Description of Artificial Sequence: Synthetic oligonucleotide
aacgcugugcccacuuuuc

SEQ ID NO: 2224028 - RNA, 19 nt, Artificial Sequence
  Description of Artificial Sequence: Synthetic oligonucleotide
acauccgauaggugcacag

SEQ ID NO: 2224029 - RNA, 19 nt, Artificial Sequence
  Description of Artificial Sequence: Synthetic oligonucleotide
aacgccagaggccuaguuu

SEQ ID NO: 2224030 - RNA, 19 nt, Artificial Sequence
  Description of Artificial Sequence: Synthetic oligonucleotide
gagaugacuaacagugaug

SEQ ID NO: 2224031 - RNA, 19 nt, Artificial Sequence
  Description of Artificial Sequence: Synthetic oligonucleotide
aguccggacuuuccagccc

SEQ ID NO: 2224032 - RNA, 19 nt, Artificial Sequence
  Description of Artificial Sequence: Synthetic oligonucleotide
aagcauguccaagaaggga

SEQ ID NO: 2224033 - RNA, 19 nt, Artificial Sequence
  Description of Artificial Sequence: Synthetic oligonucleotide
augaugagggaaaacagau

SEQ ID NO: 2224034 - RNA, 19 nt, Artificial Sequence
  Description of Artificial Sequence: Synthetic oligonucleotide
uccuuaucuuguauuggaa

SEQ ID NO: 2224035 - RNA, 19 nt, Artificial Sequence
  Description of Artificial Sequence: Synthetic oligonucleotide
ggaacaggcauacugggca

SEQ ID NO: 2224036 - RNA, 19 nt, Artificial Sequence
  Description of Artificial Sequence: Synthetic oligonucleotide
cacagaacauugucacagg

SEQ ID NO: 2224037 - RNA, 19 nt, Artificial Sequence
  Description of Artificial Sequence: Synthetic oligonucleotide
gacacgagccaggagcagg

SEQ ID NO: 2224038 - RNA, 19 nt, Artificial Sequence
  Description of Artificial Sequence: Synthetic oligonucleotide
gucgaaacuucagagccag

SEQ ID NO: 2224039 - RNA, 19 nt, Artificial Sequence
  Description of Artificial Sequence: Synthetic oligonucleotide
gccuaguuuguccaguggg

SEQ ID NO: 2224040 - RNA, 19 nt, Artificial Sequence
  Description of Artificial Sequence: Synthetic oligonucleotide
caucaguaggcggaucucg

SEQ ID NO: 2224041 - RNA, 19 nt, Artificial Sequence
  Description of Artificial Sequence: Synthetic oligonucleotide
uucgggacuggccccaugu

SEQ ID NO: 2224042 - RNA, 19 nt, Artificial Sequence
  Description of Artificial Sequence: Synthetic oligonucleotide
uccugccauaagcugaggu

SEQ ID NO: 2224043 - RNA, 19 nt, Artificial Sequence
  Description of Artificial Sequence: Synthetic oligonucleotide
ucagagccaguuguggcag

SEQ ID NO: 2224044 - RNA, 19 nt, Artificial Sequence
  Description of Artificial Sequence: Synthetic oligonucleotide
ugcccacuuuuccuggucc

SEQ ID NO: 2224045 - RNA, 19 nt, Artificial Sequence
  Description of Artificial Sequence: Synthetic oligonucleotide
ugaugagggaaaacagaua

SEQ ID NO: 2224046 - RNA, 19 nt, Artificial Sequence
  Description of Artificial Sequence: Synthetic oligonucleotide
acaggcauuucugagcaca

SEQ ID NO: 2224047 - RNA, 19 nt, Artificial Sequence
  Description of Artificial Sequence: Synthetic oligonucleotide
ggagucgaaacuucagagc

SEQ ID NO: 2224048 - RNA, 19 nt, Artificial Sequence
  Description of Artificial Sequence: Synthetic oligonucleotide
aggcaaaguauaaggcucg

SEQ ID NO: 2224049 - RNA, 19 nt, Artificial Sequence
  Description of Artificial Sequence: Synthetic oligonucleotide
caucugccgaguuacccag

SEQ ID NO: 2224050 - RNA, 19 nt, Artificial Sequence
  Description of Artificial Sequence: Synthetic oligonucleotide
cgaauuagaaugaggcugg

SEQ ID NO: 2224051 - RNA, 19 nt, Artificial Sequence
  Description of Artificial Sequence: Synthetic oligonucleotide
uuacccaggcguagcagcu

SEQ ID NO: 2224052 - RNA, 19 nt, Artificial Sequence
  Description of Artificial Sequence: Synthetic oligonucleotide
gaccucgaaggacacgagc

SEQ ID NO: 2224053 - RNA, 19 nt, Artificial Sequence
  Description of Artificial Sequence: Synthetic oligonucleotide
uaguaccugaaugaacgcu

SEQ ID NO: 2224054 - RNA, 19 nt, Artificial Sequence
  Description of Artificial Sequence: Synthetic oligonucleotide
agggugagaauagacagaa

SEQ ID NO: 2224055 - RNA, 19 nt, Artificial Sequence
  Description of Artificial Sequence: Synthetic oligonucleotide
uaguccggacuuuccagcc

SEQ ID NO: 2224056 - RNA, 19 nt, Artificial Sequence
  Description of Artificial Sequence: Synthetic oligonucleotide
aguugucgaaucuguuucu

SEQ ID NO: 2224057 - RNA, 19 nt, Artificial Sequence
  Description of Artificial Sequence: Synthetic oligonucleotide
uacugggcagcccuacaca

SEQ ID NO: 2224058 - RNA, 19 nt, Artificial Sequence
  Description of Artificial Sequence: Synthetic oligonucleotide
cucgauugagaugacuaac

SEQ ID NO: 2224059 - RNA, 19 nt, Artificial Sequence
  Description of Artificial Sequence: Synthetic oligonucleotide
caggacucggagucgaaac

SEQ ID NO: 2224060 - RNA, 19 nt, Artificial Sequence
  Description of Artificial Sequence: Synthetic oligonucleotide
gaugacccuccaguugucg

SEQ ID NO: 2224061 - RNA, 19 nt, Artificial Sequence
  Description of Artificial Sequence: Synthetic oligonucleotide
agcauguccaagaagggaa

SEQ ID NO: 2224062 - RNA, 19 nt, Artificial Sequence
  Description of Artificial Sequence: Synthetic oligonucleotide
agcucuuuuggcugacuca

SEQ ID NO: 2224063 - RNA, 19 nt, Artificial Sequence
  Description of Artificial Sequence: Synthetic oligonucleotide
gagggaaaacagauaguac

SEQ ID NO: 2224064 - RNA, 19 nt, Artificial Sequence
  Description of Artificial Sequence: Synthetic oligonucleotide
uucaagacucccuccuuau

SEQ ID NO: 2224065 - RNA, 19 nt, Artificial Sequence
  Description of Artificial Sequence: Synthetic oligonucleotide
ugcgcgcugaagcggaccc

SEQ ID NO: 2224066 - RNA, 19 nt, Artificial Sequence
  Description of Artificial Sequence: Synthetic oligonucleotide
guauuggaauaucagggcu

SEQ ID NO: 2224067 - RNA, 19 nt, Artificial Sequence
  Description of Artificial Sequence: Synthetic oligonucleotide
uuuccagcccacagaacau

SEQ ID NO: 2224068 - RNA, 19 nt, Artificial Sequence
  Description of Artificial Sequence: Synthetic oligonucleotide
ggcguagcagcuuucuucc

SEQ ID NO: 2224069 - RNA, 19 nt, Artificial Sequence
  Description of Artificial Sequence: Synthetic oligonucleotide
cagaacauugucacaggca

SEQ ID NO: 2224070 - RNA, 19 nt, Artificial Sequence
  Description of Artificial Sequence: Synthetic oligonucleotide
acagugaugcagaaucuca

SEQ ID NO: 2224071 - RNA, 19 nt, Artificial Sequence
  Description of Artificial Sequence: Synthetic oligonucleotide
cucggagucgaaacuucag

SEQ ID NO: 2224072 - RNA, 19 nt, Artificial Sequence
  Description of Artificial Sequence: Synthetic oligonucleotide
cugcaauucgggacuggcc

SEQ ID NO: 2224073 - RNA, 19 nt, Artificial Sequence
  Description of Artificial Sequence: Synthetic oligonucleotide
aucuuguauuggaauauca

SEQ ID NO: 2224074 - RNA, 19 nt, Artificial Sequence
  Description of Artificial Sequence: Synthetic oligonucleotide
ggaucucguaagcaucacg

SEQ ID NO: 2224075 - RNA, 19 nt, Artificial Sequence
  Description of Artificial Sequence: Synthetic oligonucleotide
ggauugugacuucaaucag

SEQ ID NO: 2224076 - RNA, 19 nt, Artificial Sequence
  Description of Artificial Sequence: Synthetic oligonucleotide
agcuaguccggacuuucca

SEQ ID NO: 2224077 - RNA, 19 nt, Artificial Sequence
  Description of Artificial Sequence: Synthetic oligonucleotide
auaucagggcuugagucgu

SEQ ID NO: 2224078 - RNA, 19 nt, Artificial Sequence
  Description of Artificial Sequence: Synthetic oligonucleotide
aggacucggagucgaaacu

SEQ ID NO: 2224079 - RNA, 19 nt, Artificial Sequence
  Description of Artificial Sequence: Synthetic oligonucleotide
auuucugagcacauccagu

SEQ ID NO: 2224080 - RNA, 19 nt, Artificial Sequence
  Description of Artificial Sequence: Synthetic oligonucleotide
uaggugcacagcucuuuug

SEQ ID NO: 2224081 - RNA, 19 nt, Artificial Sequence
  Description of Artificial Sequence: Synthetic oligonucleotide
cugcaaagcauguccaaga

SEQ ID NO: 2224082 - RNA, 19 nt, Artificial Sequence
  Description of Artificial Sequence: Synthetic oligonucleotide
accuucauucuccugccau

SEQ ID NO: 2224083 - RNA, 19 nt, Artificial Sequence
  Description of Artificial Sequence: Synthetic oligonucleotide
aucucaggacaacauccga

SEQ ID NO: 2224084 - RNA, 19 nt, Artificial Sequence
  Description of Artificial Sequence: Synthetic oligonucleotide
ucauccuaagugucuggau

SEQ ID NO: 2224085 - RNA, 19 nt, Artificial Sequence
  Description of Artificial Sequence: Synthetic oligonucleotide
uccgauaggugcacagcuc

SEQ ID NO: 2224086 - RNA, 19 nt, Artificial Sequence
  Description of Artificial Sequence: Synthetic oligonucleotide
gaaugaacgcugugcccac

SEQ ID NO: 2224087 - RNA, 19 nt, Artificial Sequence
  Description of Artificial Sequence: Synthetic oligonucleotide
cuacacagccgcucccggg

SEQ ID NO: 2224088 - RNA, 19 nt, Artificial Sequence
  Description of Artificial Sequence: Synthetic oligonucleotide
gucucacaauucaagacuc

SEQ ID NO: 2224089 - RNA, 19 nt, Artificial Sequence
  Description of Artificial Sequence: Synthetic oligonucleotide
caggcuugccccuggaguc

SEQ ID NO: 2224090 - RNA, 19 nt, Artificial Sequence
  Description of Artificial Sequence: Synthetic oligonucleotide
guaggcggaucucguaagc

SEQ ID NO: 2224091 - RNA, 19 nt, Artificial Sequence
  Description of Artificial Sequence: Synthetic oligonucleotide
gggacaaucuaagauucug

SEQ ID NO: 2224092 - RNA, 19 nt, Artificial Sequence
  Description of Artificial Sequence: Synthetic oligonucleotide
agaggccuaguuuguccag

SEQ ID NO: 2224093 - RNA, 19 nt, Artificial Sequence
  Description of Artificial Sequence: Synthetic oligonucleotide
gagucguagccagggacag

SEQ ID NO: 2224094 - RNA, 19 nt, Artificial Sequence
  Description of Artificial Sequence: Synthetic oligonucleotide
cauugucacaggcaaagua

SEQ ID NO: 2224095 - RNA, 19 nt, Artificial Sequence
  Description of Artificial Sequence: Synthetic oligonucleotide
guugucgaaucuguuucug

SEQ ID NO: 2224096 - RNA, 19 nt, Artificial Sequence
  Description of Artificial Sequence: Synthetic oligonucleotide
ugacccuccaguugucgaa

SEQ ID NO: 2224097 - RNA, 19 nt, Artificial Sequence
  Description of Artificial Sequence: Synthetic oligonucleotide
ugaggucucuuguuccauc

SEQ ID NO: 2224098 - RNA, 19 nt, Artificial Sequence
  Description of Artificial Sequence: Synthetic oligonucleotide
gcugaagcggacccaggcg

SEQ ID NO: 2224099 - RNA, 19 nt, Artificial Sequence
  Description of Artificial Sequence: Synthetic oligonucleotide
gaauuagaaugaggcuggc

SEQ ID NO: 2224100 - RNA, 19 nt, Artificial Sequence
  Description of Artificial Sequence: Synthetic oligonucleotide
gacuucaaucagggagucg

SEQ ID NO: 2224101 - RNA, 19 nt, Artificial Sequence
  Description of Artificial Sequence: Synthetic oligonucleotide
cucgaaggacacgagccag

SEQ ID NO: 2224102 - RNA, 19 nt, Artificial Sequence
  Description of Artificial Sequence: Synthetic oligonucleotide
cuuccaaggcucagaugac

SEQ ID NO: 2224103 - RNA, 19 nt, Artificial Sequence
  Description of Artificial Sequence: Synthetic oligonucleotide
ugcagaaucucaggacaac

SEQ ID NO: 2224104 - RNA, 19 nt, Artificial Sequence
  Description of Artificial Sequence: Synthetic oligonucleotide
augacccuccaguugucga

SEQ ID NO: 2224105 - RNA, 19 nt, Artificial Sequence
  Description of Artificial Sequence: Synthetic oligonucleotide
gcuaguccggacuuuccag

SEQ ID NO: 2224106 - RNA, 19 nt, Artificial Sequence
  Description of Artificial Sequence: Synthetic oligonucleotide
acagaauggaggagaugag

SEQ ID NO: 2224107 - RNA, 19 nt, Artificial Sequence
  Description of Artificial Sequence: Synthetic oligonucleotide
uucaaucagggagucgaau

SEQ ID NO: 2224108 - RNA, 19 nt, Artificial Sequence
  Description of Artificial Sequence: Synthetic oligonucleotide
uaggcggaucucguaagca

SEQ ID NO: 2224109 - RNA, 19 nt, Artificial Sequence
  Description of Artificial Sequence: Synthetic oligonucleotide
aggccuaguuuguccagug

SEQ ID NO: 2224110 - RNA, 19 nt, Artificial Sequence
  Description of Artificial Sequence: Synthetic oligonucleotide
acccaggcguccaugacag

SEQ ID NO: 2224111 - RNA, 19 nt, Artificial Sequence
  Description of Artificial Sequence: Synthetic oligonucleotide
cauccgauaggugcacagc

SEQ ID NO: 2224112 - RNA, 19 nt, Artificial Sequence
  Description of Artificial Sequence: Synthetic oligonucleotide
uccugaccucaucuuuggc

SEQ ID NO: 2224113 - RNA, 19 nt, Artificial Sequence
  Description of Artificial Sequence: Synthetic oligonucleotide
cagucuccaccccuccugg

SEQ ID NO: 2224114 - RNA, 19 nt, Artificial Sequence
  Description of Artificial Sequence: Synthetic oligonucleotide
cauucuccugccauaagcu

SEQ ID NO: 2224115 - RNA, 19 nt, Artificial Sequence
  Description of Artificial Sequence: Synthetic oligonucleotide
aguuacccaggcguagcag

SEQ ID NO: 2224116 - RNA, 19 nt, Artificial Sequence
  Description of Artificial Sequence: Synthetic oligonucleotide
auaggugcacagcucuuuu

SEQ ID NO: 2224117 - RNA, 19 nt, Artificial Sequence
  Description of Artificial Sequence: Synthetic oligonucleotide
gcccacagaacauugucac

SEQ ID NO: 2224118 - RNA, 19 nt, Artificial Sequence
  Description of Artificial Sequence: Synthetic oligonucleotide
ugccauaagcugaggucuc

SEQ ID NO: 2224119 - RNA, 19 nt, Artificial Sequence
  Description of Artificial Sequence: Synthetic oligonucleotide
uuucugcaauucgggacug

SEQ ID NO: 2224120 - RNA, 19 nt, Artificial Sequence
  Description of Artificial Sequence: Synthetic oligonucleotide
cucuuuuggcugacucaag

SEQ ID NO: 2224121 - RNA, 19 nt, Artificial Sequence
  Description of Artificial Sequence: Synthetic oligonucleotide
gucgaauuagaaugaggcu

SEQ ID NO: 2224122 - RNA, 19 nt, Artificial Sequence
  Description of Artificial Sequence: Synthetic oligonucleotide
acuaacagugaugcagaau

SEQ ID NO: 2224123 - RNA, 19 nt, Artificial Sequence
  Description of Artificial Sequence: Synthetic oligonucleotide
caaucagggagucgaauua

SEQ ID NO: 2224124 - RNA, 19 nt, Artificial Sequence
  Description of Artificial Sequence: Synthetic oligonucleotide
uugugacuucaaucaggga

SEQ ID NO: 2224125 - RNA, 19 nt, Artificial Sequence
  Description of Artificial Sequence: Synthetic oligonucleotide
aggcggaucucguaagcau

SEQ ID NO: 2224126 - RNA, 19 nt, Artificial Sequence
  Description of Artificial Sequence: Synthetic oligonucleotide
gaguuacccaggcguagca

SEQ ID NO: 2224127 - RNA, 19 nt, Artificial Sequence
  Description of Artificial Sequence: Synthetic oligonucleotide
cuguuucugcaauucggga

SEQ ID NO: 2224128 - RNA, 19 nt, Artificial Sequence
  Description of Artificial Sequence: Synthetic oligonucleotide
acggggagcuaguccggac

SEQ ID NO: 2224129 - RNA, 19 nt, Artificial Sequence
  Description of Artificial Sequence: Synthetic oligonucleotide
ucaguaggcggaucucgua

SEQ ID NO: 2224130 - RNA, 19 nt, Artificial Sequence
  Description of Artificial Sequence: Synthetic oligonucleotide
uucugcaauucgggacugg

SEQ ID NO: 2224131 - RNA, 19 nt, Artificial Sequence
  Description of Artificial Sequence: Synthetic oligonucleotide
guauaaggcucgauugaga

SEQ ID NO: 2224132 - RNA, 19 nt, Artificial Sequence
  Description of Artificial Sequence: Synthetic oligonucleotide
uccuaagugucuggauugu

SEQ ID NO: 2224133 - RNA, 19 nt, Artificial Sequence
  Description of Artificial Sequence: Synthetic oligonucleotide
cagcucuuuuggcugacuc

SEQ ID NO: 2224134 - RNA, 19 nt, Artificial Sequence
  Description of Artificial Sequence: Synthetic oligonucleotide
agucuccaccccuccuggg

SEQ ID NO: 2224135 - RNA, 19 nt, Artificial Sequence
  Description of Artificial Sequence: Synthetic oligonucleotide
gucgaaucuguuucugcaa

SEQ ID NO: 2224136 - RNA, 19 nt, Artificial Sequence
  Description of Artificial Sequence: Synthetic oligonucleotide
ggacagauuagggugagaa

SEQ ID NO: 2224137 - RNA, 19 nt, Artificial Sequence
  Description of Artificial Sequence: Synthetic oligonucleotide
ccugccauaagcugagguc

SEQ ID NO: 2224138 - RNA, 19 nt, Artificial Sequence
  Description of Artificial Sequence: Synthetic oligonucleotide
gggcuugagucguagccag

SEQ ID NO: 2224139 - RNA, 19 nt, Artificial Sequence
  Description of Artificial Sequence: Synthetic oligonucleotide
cagaugacccuccaguugu

SEQ ID NO: 2224140 - RNA, 19 nt, Artificial Sequence
  Description of Artificial Sequence: Synthetic oligonucleotide
aacauccgauaggugcaca

SEQ ID NO: 2224141 - RNA, 19 nt, Artificial Sequence
  Description of Artificial Sequence: Synthetic oligonucleotide
ugacuucaaucagggaguc

SEQ ID NO: 2224142 - RNA, 19 nt, Artificial Sequence
  Description of Artificial Sequence: Synthetic oligonucleotide
ggagucgaauuagaaugag

SEQ ID NO: 2224143 - RNA, 19 nt, Artificial Sequence
  Description of Artificial Sequence: Synthetic oligonucleotide
ugugcccacuuuuccuggu

SEQ ID NO: 2224144 - RNA, 19 nt, Artificial Sequence
  Description of Artificial Sequence: Synthetic oligonucleotide
aaugaacgcugugcccacu

SEQ ID NO: 2224145 - RNA, 19 nt, Artificial Sequence
  Description of Artificial Sequence: Synthetic oligonucleotide
cggagucgaaacuucagag

SEQ ID NO: 2224146 - RNA, 19 nt, Artificial Sequence
  Description of Artificial Sequence: Synthetic oligonucleotide
cccuccuuaucuuguauug

SEQ ID NO: 2224147 - RNA, 19 nt, Artificial Sequence
  Description of Artificial Sequence: Synthetic oligonucleotide
cacaacgccagaggccuag

SEQ ID NO: 2224148 - RNA, 19 nt, Artificial Sequence
  Description of Artificial Sequence: Synthetic oligonucleotide
augagggaaaacagauagu

SEQ ID NO: 2224149 - RNA, 19 nt, Artificial Sequence
  Description of Artificial Sequence: Synthetic oligonucleotide
gacucggagucgaaacuuc

SEQ ID NO: 2224150 - RNA, 19 nt, Artificial Sequence
  Description of Artificial Sequence: Synthetic oligonucleotide
cagauaguaccugaaugaa

SEQ ID NO: 2224151 - RNA, 19 nt, Artificial Sequence
  Description of Artificial Sequence: Synthetic oligonucleotide
ugucucugcaaagcauguc

SEQ ID NO: 2224152 - RNA, 19 nt, Artificial Sequence
  Description of Artificial Sequence: Synthetic oligonucleotide
ggcagcccuacacagccgc

SEQ ID NO: 2224153 - RNA, 19 nt, Artificial Sequence
  Description of Artificial Sequence: Synthetic oligonucleotide
agucgaaacuucagagcca

SEQ ID NO: 2224154 - RNA, 19 nt, Artificial Sequence
  Description of Artificial Sequence: Synthetic oligonucleotide
ccgggcuuggcucugcgcg

SEQ ID NO: 2224155 - RNA, 19 nt, Artificial Sequence
  Description of Artificial Sequence: Synthetic oligonucleotide
ggccuaguuuguccagugg

SEQ ID NO: 2224156 - RNA, 19 nt, Artificial Sequence
  Description of Artificial Sequence: Synthetic oligonucleotide
augaacgcugugcccacuu

SEQ ID NO: 2224157 - RNA, 19 nt, Artificial Sequence
  Description of Artificial Sequence: Synthetic oligonucleotide
guccggacuuuccagccca

SEQ ID NO: 2224158 - RNA, 19 nt, Artificial Sequence
  Description of Artificial Sequence: Synthetic oligonucleotide
agggacagauuagggugag

SEQ ID NO: 2224159 - RNA, 19 nt, Artificial Sequence
  Description of Artificial Sequence: Synthetic oligonucleotide
cugccgaguuacccaggcg

SEQ ID NO: 2224160 - RNA, 19 nt, Artificial Sequence
  Description of Artificial Sequence: Synthetic oligonucleotide
gucucuuguuccaucagua

SEQ ID NO: 2224161 - RNA, 19 nt, Artificial Sequence
  Description of Artificial Sequence: Synthetic oligonucleotide
aaggcucgauugagaugac

SEQ ID NO: 2224162 - RNA, 19 nt, Artificial Sequence
  Description of Artificial Sequence: Synthetic oligonucleotide
ugaacgcugugcccacuuu

SEQ ID NO: 2224163 - RNA, 19 nt, Artificial Sequence
  Description of Artificial Sequence: Synthetic oligonucleotide
gcguccaugacagcggcag

SEQ ID NO: 2224164 - RNA, 19 nt, Artificial Sequence
  Description of Artificial Sequence: Synthetic oligonucleotide
gacagauuagggugagaau

SEQ ID NO: 2224165 - RNA, 19 nt, Artificial Sequence
  Description of Artificial Sequence: Synthetic oligonucleotide
aggacacgagccaggagca

SEQ ID NO: 2224166 - RNA, 19 nt, Artificial Sequence
  Description of Artificial Sequence: Synthetic oligonucleotide
cagauucaugaugagggaa

SEQ ID NO: 2224167 - RNA, 19 nt, Artificial Sequence
  Description of Artificial Sequence: Synthetic oligonucleotide
ggaauaucagggcuugagu

SEQ ID NO: 2224168 - RNA, 19 nt, Artificial Sequence
  Description of Artificial Sequence: Synthetic oligonucleotide
caguaggcggaucucguaa

SEQ ID NO: 2224169 - RNA, 19 nt, Artificial Sequence
  Description of Artificial Sequence: Synthetic oligonucleotide
gagcuaguccggacuuucc

SEQ ID NO: 2224170 - RNA, 19 nt, Artificial Sequence
  Description of Artificial Sequence: Synthetic oligonucleotide
cuggagucccugguccucc

SEQ ID NO: 2224171 - RNA, 19 nt, Artificial Sequence
  Description of Artificial Sequence: Synthetic oligonucleotide
cugccauaagcugaggucu

SEQ ID NO: 2224172 - RNA, 19 nt, Artificial Sequence
  Description of Artificial Sequence: Synthetic oligonucleotide
cauccuaagugucuggauu

SEQ ID NO: 2224173 - RNA, 19 nt, Artificial Sequence
  Description of Artificial Sequence: Synthetic oligonucleotide
gcucagaugacccuccagu

SEQ ID NO: 2224174 - RNA, 19 nt, Artificial Sequence
  Description of Artificial Sequence: Synthetic oligonucleotide
gcaucugccgaguuaccca

SEQ ID NO: 2224175 - RNA, 19 nt, Artificial Sequence
  Description of Artificial Sequence: Synthetic oligonucleotide
cagugggaugaagagguca

SEQ ID NO: 2224176 - RNA, 19 nt, Artificial Sequence
  Description of Artificial Sequence: Synthetic oligonucleotide
gaacauugucacaggcaaa

SEQ ID NO: 2224177 - RNA, 19 nt, Artificial Sequence
  Description of Artificial Sequence: Synthetic oligonucleotide
caacauccgauaggugcac

SEQ ID NO: 2224178 - RNA, 19 nt, Artificial Sequence
  Description of Artificial Sequence: Synthetic oligonucleotide
cagaaucucaggacaacau

SEQ ID NO: 2224179 - RNA, 19 nt, Artificial Sequence
  Description of Artificial Sequence: Synthetic oligonucleotide
cuugagucguagccaggga

SEQ ID NO: 2224180 - RNA, 19 nt, Artificial Sequence
  Description of Artificial Sequence: Synthetic oligonucleotide
cauguccaagaagggaaca

SEQ ID NO: 2224181 - RNA, 19 nt, Artificial Sequence
  Description of Artificial Sequence: Synthetic oligonucleotide
cugaagcggacccaggcgu

SEQ ID NO: 2224182 - RNA, 19 nt, Artificial Sequence
  Description of Artificial Sequence: Synthetic oligonucleotide
ccuaguuuguccaguggga

SEQ ID NO: 2224183 - RNA, 19 nt, Artificial Sequence
  Description of Artificial Sequence: Synthetic oligonucleotide
ucgggacuggccccauguc

SEQ ID NO: 2224184 - RNA, 19 nt, Artificial Sequence
  Description of Artificial Sequence: Synthetic oligonucleotide
ggcucagauucaugaugag

SEQ ID NO: 2224185 - RNA, 19 nt, Artificial Sequence
  Description of Artificial Sequence: Synthetic oligonucleotide
agaugacccuccaguuguc

SEQ ID NO: 2224186 - RNA, 19 nt, Artificial Sequence
  Description of Artificial Sequence: Synthetic oligonucleotide
aucacggcucagauucaug

SEQ ID NO: 2224187 - RNA, 19 nt, Artificial Sequence
  Description of Artificial Sequence: Synthetic oligonucleotide
cagggagucgaauuagaau

SEQ ID NO: 2224188 - RNA, 19 nt, Artificial Sequence
  Description of Artificial Sequence: Synthetic oligonucleotide
gcucgauugagaugacuaa

SEQ ID NO: 2224189 - RNA, 19 nt, Artificial Sequence
  Description of Artificial Sequence: Synthetic oligonucleotide
gcucuuuuggcugacucaa

SEQ ID NO: 2224190 - RNA, 19 nt, Artificial Sequence
  Description of Artificial Sequence: Synthetic oligonucleotide
cauacugggcagcccuaca

SEQ ID NO: 2224191 - RNA, 19 nt, Artificial Sequence
  Description of Artificial Sequence: Synthetic oligonucleotide
gggagucgaauuagaauga

SEQ ID NO: 2224192 - RNA, 19 nt, Artificial Sequence
  Description of Artificial Sequence: Synthetic oligonucleotide
uggagucccugguccucca

SEQ ID NO: 2224193 - RNA, 19 nt, Artificial Sequence
  Description of Artificial Sequence: Synthetic oligonucleotide
ucugcgcgcugaagcggac

SEQ ID NO: 2224194 - RNA, 19 nt, Artificial Sequence
  Description of Artificial Sequence: Synthetic oligonucleotide
auucgggacuggccccaug

SEQ ID NO: 2224195 - RNA, 19 nt, Artificial Sequence
  Description of Artificial Sequence: Synthetic oligonucleotide
ggagcaggacucggagucg

SEQ ID NO: 2224196 - RNA, 19 nt, Artificial Sequence
  Description of Artificial Sequence: Synthetic oligonucleotide
gucguagccagggacagau

SEQ ID NO: 2224197 - RNA, 19 nt, Artificial Sequence
  Description of Artificial Sequence: Synthetic oligonucleotide
gagcaggacucggagucga

SEQ ID NO: 2224198 - RNA, 19 nt, Artificial Sequence
  Description of Artificial Sequence: Synthetic oligonucleotide
uccacacggggagcuaguc

SEQ ID NO: 2224199 - RNA, 19 nt, Artificial Sequence
  Description of Artificial Sequence: Synthetic oligonucleotide
gaacgcugugcccacuuuu

SEQ ID NO: 2224200 - RNA, 19 nt, Artificial Sequence
  Description of Artificial Sequence: Synthetic oligonucleotide
acacagccgcucccgggcu

SEQ ID NO: 2224201 - RNA, 19 nt, Artificial Sequence
  Description of Artificial Sequence: Synthetic oligonucleotide
ggccccaugucucugcaaa

SEQ ID NO: 2224202 - RNA, 19 nt, Artificial Sequence
  Description of Artificial Sequence: Synthetic oligonucleotide
uggaggagaugaggccaca

SEQ ID NO: 2224203 - RNA, 19 nt, Artificial Sequence
  Description of Artificial Sequence: Synthetic oligonucleotide
acacggggagcuaguccgg

SEQ ID NO: 2224204 - RNA, 19 nt, Artificial Sequence
  Description of Artificial Sequence: Synthetic oligonucleotide
cacaggcauuucugagcac

SEQ ID NO: 2224205 - RNA, 19 nt, Artificial Sequence
  Description of Artificial Sequence: Synthetic oligonucleotide
ggagcuaguccggacuuuc

SEQ ID NO: 2224206 - RNA, 19 nt, Artificial Sequence
  Description of Artificial Sequence: Synthetic oligonucleotide
aagcggacccaggcgucca

SEQ ID NO: 2224207 - RNA, 19 nt, Artificial Sequence
  Description of Artificial Sequence: Synthetic oligonucleotide
agaagggaacaggcauacu

SEQ ID NO: 2224208 - RNA, 19 nt, Artificial Sequence
  Description of Artificial Sequence: Synthetic oligonucleotide
caggcauacugggcagccc

SEQ ID NO: 2224209 - RNA, 19 nt, Artificial Sequence
  Description of Artificial Sequence: Synthetic oligonucleotide
aucugccgaguuacccagg

SEQ ID NO: 2224210 - RNA, 19 nt, Artificial Sequence
  Description of Artificial Sequence: Synthetic oligonucleotide
ccaugacagcggcagcccg

SEQ ID NO: 2224211 - RNA, 19 nt, Artificial Sequence
  Description of Artificial Sequence: Synthetic oligonucleotide
gugcccacuuuuccugguc

SEQ ID NO: 2224212 - RNA, 19 nt, Artificial Sequence
  Description of Artificial Sequence: Synthetic oligonucleotide
ggacaaucuaagauucugu

SEQ ID NO: 2224213 - RNA, 19 nt, Artificial Sequence
  Description of Artificial Sequence: Synthetic oligonucleotide
aggcucgauugagaugacu

SEQ ID NO: 2224214 - RNA, 19 nt, Artificial Sequence
  Description of Artificial Sequence: Synthetic oligonucleotide
ccacacggggagcuagucc

SEQ ID NO: 2224215 - RNA, 19 nt, Artificial Sequence
  Description of Artificial Sequence: Synthetic oligonucleotide
cggacuuuccagcccacag

SEQ ID NO: 2224216 - RNA, 19 nt, Artificial Sequence
  Description of Artificial Sequence: Synthetic oligonucleotide
gggacuggccccaugucuc

SEQ ID NO: 2224217 - RNA, 19 nt, Artificial Sequence
  Description of Artificial Sequence: Synthetic oligonucleotide
ggcggaucucguaagcauc

SEQ ID NO: 2224218 - RNA, 19 nt, Artificial Sequence
  Description of Artificial Sequence: Synthetic oligonucleotide
cucagaugacccuccaguu

SEQ ID NO: 2224219 - RNA, 19 nt, Artificial Sequence
  Description of Artificial Sequence: Synthetic oligonucleotide
gccccaugucucugcaaag

SEQ ID NO: 2224220 - RNA, 19 nt, Artificial Sequence
  Description of Artificial Sequence: Synthetic oligonucleotide
guaccugaaugaacgcugu

SEQ ID NO: 2224221 - RNA, 19 nt, Artificial Sequence
  Description of Artificial Sequence: Synthetic oligonucleotide
gacucccuccuuaucuugu

SEQ ID NO: 2224222 - RNA, 19 nt, Artificial Sequence
  Description of Artificial Sequence: Synthetic oligonucleotide
uuccaucaguaggcggauc

SEQ ID NO: 2224223 - RNA, 19 nt, Artificial Sequence
  Description of Artificial Sequence: Synthetic oligonucleotide
cagcccuacacagccgcuc

SEQ ID NO: 2224224 - RNA, 19 nt, Artificial Sequence
  Description of Artificial Sequence: Synthetic oligonucleotide
gcucugcgcgcugaagcgg

SEQ ID NO: 2224225 - RNA, 19 nt, Artificial Sequence
  Description of Artificial Sequence: Synthetic oligonucleotide
cccaugucucugcaaagca

SEQ ID NO: 2224226 - RNA, 19 nt, Artificial Sequence
  Description of Artificial Sequence: Synthetic oligonucleotide
cugcgcgcugaagcggacc

SEQ ID NO: 2224227 - RNA, 19 nt, Artificial Sequence
  Description of Artificial Sequence: Synthetic oligonucleotide
gcggaucucguaagcauca

SEQ ID NO: 2224228 - RNA, 19 nt, Artificial Sequence
  Description of Artificial Sequence: Synthetic oligonucleotide
gaggccuaguuuguccagu

SEQ ID NO: 2224229 - RNA, 19 nt, Artificial Sequence
  Description of Artificial Sequence: Synthetic oligonucleotide
ucguagccagggacagauu

SEQ ID NO: 2224230 - RNA, 19 nt, Artificial Sequence
  Description of Artificial Sequence: Synthetic oligonucleotide
ccuaagugucuggauugug

SEQ ID NO: 2224231 - RNA, 19 nt, Artificial Sequence
  Description of Artificial Sequence: Synthetic oligonucleotide
cccuacacagccgcucccg

SEQ ID NO: 2224232 - RNA, 19 nt, Artificial Sequence
  Description of Artificial Sequence: Synthetic oligonucleotide
gucuggauugugacuucaa

SEQ ID NO: 2224233 - RNA, 19 nt, Artificial Sequence
  Description of Artificial Sequence: Synthetic oligonucleotide
agucguagccagggacaga

SEQ ID NO: 2224234 - RNA, 19 nt, Artificial Sequence
  Description of Artificial Sequence: Synthetic oligonucleotide
gccacaacgccagaggccu

SEQ ID NO: 2224235 - RNA, 19 nt, Artificial Sequence
  Description of Artificial Sequence: Synthetic oligonucleotide
ggacaacauccgauaggug

SEQ ID NO: 2224236 - RNA, 19 nt, Artificial Sequence
  Description of Artificial Sequence: Synthetic oligonucleotide
ggcuugagucguagccagg

SEQ ID NO: 2224237 - RNA, 19 nt, Artificial Sequence
  Description of Artificial Sequence: Synthetic oligonucleotide
uggccccaugucucugcaa

SEQ ID NO: 2224238 - RNA, 19 nt, Artificial Sequence
  Description of Artificial Sequence: Synthetic oligonucleotide
caguuguggcaggcuugcc

SEQ ID NO: 2224239 - RNA, 19 nt, Artificial Sequence
  Description of Artificial Sequence: Synthetic oligonucleotide
ggcaaaguauaaggcucga

SEQ ID NO: 2224240 - RNA, 19 nt, Artificial Sequence
  Description of Artificial Sequence: Synthetic oligonucleotide
acaacgccagaggccuagu

SEQ ID NO: 2224241 - RNA, 19 nt, Artificial Sequence
  Description of Artificial Sequence: Synthetic oligonucleotide
gcauacugggcagcccuac

SEQ ID NO: 2224242 - RNA, 19 nt, Artificial Sequence
  Description of Artificial Sequence: Synthetic oligonucleotide
cguagccagggacagauua

SEQ ID NO: 2224243 - RNA, 19 nt, Artificial Sequence
  Description of Artificial Sequence: Synthetic oligonucleotide
cgaguuacccaggcguagc

SEQ ID NO: 2224244 - RNA, 19 nt, Artificial Sequence
  Description of Artificial Sequence: Synthetic oligonucleotide
gcccacuuuuccuggucca

SEQ ID NO: 2224245 - RNA, 19 nt, Artificial Sequence
  Description of Artificial Sequence: Synthetic oligonucleotide
ccgaguuacccaggcguag

SEQ ID NO: 2224246 - RNA, 19 nt, Artificial Sequence
  Description of Artificial Sequence: Synthetic oligonucleotide
cuuggcucugcgcgcugaa

SEQ ID NO: 2224247 - RNA, 19 nt, Artificial Sequence
  Description of Artificial Sequence: Synthetic oligonucleotide
agcggcagcccgggcccac

SEQ ID NO: 2224248 - RNA, 19 nt, Artificial Sequence
  Description of Artificial Sequence: Synthetic oligonucleotide
ccuucauucuccugccaua

SEQ ID NO: 2224249 - RNA, 19 nt, Artificial Sequence
  Description of Artificial Sequence: Synthetic oligonucleotide
cacgagccaggagcaggac

SEQ ID NO: 2224250 - RNA, 19 nt, Artificial Sequence
  Description of Artificial Sequence: Synthetic oligonucleotide
agcggacccaggcguccau

SEQ ID NO: 2224251 - RNA, 19 nt, Artificial Sequence
  Description of Artificial Sequence: Synthetic oligonucleotide
ccgauaggugcacagcucu

SEQ ID NO: 2224252 - RNA, 19 nt, Artificial Sequence
  Description of Artificial Sequence: Synthetic oligonucleotide
cacggcucagauucaugau

SEQ ID NO: 2224253 - RNA, 19 nt, Artificial Sequence
  Description of Artificial Sequence: Synthetic oligonucleotide
ccaguugucgaaucuguuu

SEQ ID NO: 2224254 - RNA, 19 nt, Artificial Sequence
  Description of Artificial Sequence: Synthetic oligonucleotide
gacccuccaguugucgaau

SEQ ID NO: 2224255 - RNA, 19 nt, Artificial Sequence
  Description of Artificial Sequence: Synthetic oligonucleotide
ugguccacacggggagcua

SEQ ID NO: 2224256 - RNA, 19 nt, Artificial Sequence
  Description of Artificial Sequence: Synthetic oligonucleotide
ccagugggaugaagagguc

SEQ ID NO: 2224257 - RNA, 19 nt, Artificial Sequence
  Description of Artificial Sequence: Synthetic oligonucleotide
cacggggagcuaguccgga

SEQ ID NO: 2224258 - RNA, 19 nt, Artificial Sequence
  Description of Artificial Sequence: Synthetic oligonucleotide
gcaggacucggagucgaaa

SEQ ID NO: 2224259 - RNA, 19 nt, Artificial Sequence
  Description of Artificial Sequence: Synthetic oligonucleotide
cugguccacacggggagcu

SEQ ID NO: 2224260 - RNA, 19 nt, Artificial Sequence
  Description of Artificial Sequence: Synthetic oligonucleotide
agcaggacucggagucgaa

SEQ ID NO: 2224261 - RNA, 19 nt, Artificial Sequence
  Description of Artificial Sequence: Synthetic oligonucleotide
ccugguccacacggggagc

SEQ ID NO: 2224262 - RNA, 19 nt, Artificial Sequence
  Description of Artificial Sequence: Synthetic oligonucleotide
cgcgcugaagcggacccag

SEQ ID NO: 2224263 - RNA, 19 nt, Artificial Sequence
  Description of Artificial Sequence: Synthetic oligonucleotide
caucacggcucagauucau

SEQ ID NO: 2224264 - RNA, 19 nt, Artificial Sequence
  Description of Artificial Sequence: Synthetic oligonucleotide
ggacucggagucgaaacuu

SEQ ID NO: 2224265 - RNA, 19 nt, Artificial Sequence
  Description of Artificial Sequence: Synthetic oligonucleotide
caccccuccugggacucca

SEQ ID NO: 2224266 - RNA, 19 nt, Artificial Sequence
  Description of Artificial Sequence: Synthetic oligonucleotide
cccgggcuuggcucugcgc

SEQ ID NO: 2224267 - RNA, 19 nt, Artificial Sequence
  Description of Artificial Sequence: Synthetic oligonucleotide
gcaaaguauaaggcucgau

SEQ ID NO: 2224268 - RNA, 19 nt, Artificial Sequence
  Description of Artificial Sequence: Synthetic oligonucleotide
ccgcucccgggcuuggcuc

SEQ ID NO: 2224269 - RNA, 19 nt, Artificial Sequence
  Description of Artificial Sequence: Synthetic oligonucleotide
ggggacaaucuaagauucu

SEQ ID NO: 2224270 - RNA, 19 nt, Artificial Sequence
  Description of Artificial Sequence: Synthetic oligonucleotide
cugaggucucuuguuccau

SEQ ID NO: 2224271 - RNA, 19 nt, Artificial Sequence
  Description of Artificial Sequence: Synthetic oligonucleotide
cagccgcucccgggcuugg

SEQ ID NO: 2224272 - RNA, 19 nt, Artificial Sequence
  Description of Artificial Sequence: Synthetic oligonucleotide
ggggagcuaguccggacuu

SEQ ID NO: 2224273 - RNA, 19 nt, Artificial Sequence
  Description of Artificial Sequence: Synthetic oligonucleotide
gggacagauuagggugaga

SEQ ID NO: 2224274 - RNA, 19 nt, Artificial Sequence
  Description of Artificial Sequence: Synthetic oligonucleotide
gccgaguuacccaggcgua

SEQ ID NO: 2224275 - RNA, 19 nt, Artificial Sequence
  Description of Artificial Sequence: Synthetic oligonucleotide
gcuuggcucugcgcgcuga

SEQ ID NO: 2224276 - RNA, 19 nt, Artificial Sequence
  Description of Artificial Sequence: Synthetic oligonucleotide
gcaucacggcucagauuca

SEQ ID NO: 2224277 - RNA, 19 nt, Artificial Sequence
  Description of Artificial Sequence: Synthetic oligonucleotide
gcggacccaggcguccaug

SEQ ID NO: 2224278 - RNA, 19 nt, Artificial Sequence
  Description of Artificial Sequence: Synthetic oligonucleotide
ggacuccagaaaccuucau

SEQ ID NO: 2224279 - RNA, 19 nt, Artificial Sequence
  Description of Artificial Sequence: Synthetic oligonucleotide
caacgccagaggccuaguu

SEQ ID NO: 2224280 - RNA, 19 nt, Artificial Sequence
  Description of Artificial Sequence: Synthetic oligonucleotide
caggcguagcagcuuucuu

SEQ ID NO: 2224281 - RNA, 19 nt, Artificial Sequence
  Description of Artificial Sequence: Synthetic oligonucleotide
ggcauacugggcagcccua

SEQ ID NO: 2224282 - RNA, 19 nt, Artificial Sequence
  Description of Artificial Sequence: Synthetic oligonucleotide
ggcguccaugacagcggca

SEQ ID NO: 2224283 - RNA, 19 nt, Artificial Sequence
  Description of Artificial Sequence: Synthetic oligonucleotide
gccgcucccgggcuuggcu

SEQ ID NO: 2224284 - RNA, 19 nt, Artificial Sequence
  Description of Artificial Sequence: Synthetic oligonucleotide
cguaagcaucacggcucag

SEQ ID NO: 2224285 - RNA, 19 nt, Artificial Sequence
  Description of Artificial Sequence: Synthetic oligonucleotide
cgcugugcccacuuuuccu

SEQ ID NO: 2224286 - RNA, 19 nt, Artificial Sequence
  Description of Artificial Sequence: Synthetic oligonucleotide
cgaaucuguuucugcaauu

SEQ ID NO: 2224287 - RNA, 19 nt, Artificial Sequence
  Description of Artificial Sequence: Synthetic oligonucleotide
ccaggcguagcagcuuucu

SEQ ID NO: 2224288 - RNA, 19 nt, Artificial Sequence
  Description of Artificial Sequence: Synthetic oligonucleotide
gggugagaauagacagaau

SEQ ID NO: 2224289 - RNA, 19 nt, Artificial Sequence
  Description of Artificial Sequence: Synthetic oligonucleotide
ccggacuuuccagcccaca

SEQ ID NO: 2224290 - RNA, 19 nt, Artificial Sequence
  Description of Artificial Sequence: Synthetic oligonucleotide
cggggagcuaguccggacu

SEQ ID NO: 2224291 - RNA, 19 nt, Artificial Sequence
  Description of Artificial Sequence: Synthetic oligonucleotide
gcgcgcugaagcggaccca

SEQ ID NO: 2224292 - RNA, 19 nt, Artificial Sequence
  Description of Artificial Sequence: Synthetic oligonucleotide
cacagccgcucccgggcuu

SEQ ID NO: 2224293 - RNA, 19 nt, Artificial Sequence
  Description of Artificial Sequence: Synthetic oligonucleotide
cccagucuccaccccuccu

SEQ ID NO: 2224294 - RNA, 19 nt, Artificial Sequence
  Description of Artificial Sequence: Synthetic oligonucleotide
gcagcccuacacagccgcu

SEQ ID NO: 2224295 - RNA, 19 nt, Artificial Sequence
  Description of Artificial Sequence: Synthetic oligonucleotide
cagcggcagcccgggccca

SEQ ID NO: 2224296 - RNA, 19 nt, Artificial Sequence
  Description of Artificial Sequence: Synthetic oligonucleotide
ccacaacgccagaggccua

SEQ ID NO: 2224297 - RNA, 19 nt, Artificial Sequence
  Description of Artificial Sequence: Synthetic oligonucleotide
acuaaaaucugccagaggg

SEQ ID NO: 2224298 - RNA, 19 nt, Artificial Sequence
  Description of Artificial Sequence: Synthetic oligonucleotide
aagguaauuucccaggugg

SEQ ID NO: 2224299 - RNA, 19 nt, Artificial Sequence
  Description of Artificial Sequence: Synthetic oligonucleotide
agacccaacaaguaaaacc

SEQ ID NO: 2224300 - RNA, 19 nt, Artificial Sequence
  Description of Artificial Sequence: Synthetic oligonucleotide
aauauguacagacuaaaau

SEQ ID NO: 2224301 - RNA, 19 nt, Artificial Sequence
  Description of Artificial Sequence: Synthetic oligonucleotide
uggauugccaccauguugg

SEQ ID NO: 2224302 - RNA, 19 nt, Artificial Sequence
  Description of Artificial Sequence: Synthetic oligonucleotide
uaaaaccuucuuuaaaugg

SEQ ID NO: 2224303 - RNA, 19 nt, Artificial Sequence
  Description of Artificial Sequence: Synthetic oligonucleotide
aguuucucaauuucacucc

SEQ ID NO: 2224304 - RNA, 19 nt, Artificial Sequence
  Description of Artificial Sequence: Synthetic oligonucleotide
aaaggauacuuuucucugg

SEQ ID NO: 2224305 - RNA, 19 nt, Artificial Sequence
  Description of Artificial Sequence: Synthetic oligonucleotide
aaggauacuuuucucuggg

SEQ ID NO: 2224306 - RNA, 19 nt, Artificial Sequence
  Description of Artificial Sequence: Synthetic oligonucleotide
agggaaguugccuugacgg

SEQ ID NO: 2224307 - RNA, 19 nt, Artificial Sequence
  Description of Artificial Sequence: Synthetic oligonucleotide
ucaacgaugcuguauaaca

SEQ ID NO: 2224308 - RNA, 19 nt, Artificial Sequence
  Description of Artificial Sequence: Synthetic oligonucleotide
uguacagacuaaaaucugc

SEQ ID NO: 2224309 - RNA, 19 nt, Artificial Sequence
  Description of Artificial Sequence: Synthetic oligonucleotide
auaacacugugucauacuc

SEQ ID NO: 2224310 - RNA, 19 nt, Artificial Sequence
  Description of Artificial Sequence: Synthetic oligonucleotide
ugcuguauaacacuguguc

SEQ ID NO: 2224311 - RNA, 19 nt, Artificial Sequence
  Description of Artificial Sequence: Synthetic oligonucleotide
uuuaaaugguccuuaucca

SEQ ID NO: 2224312 - RNA, 19 nt, Artificial Sequence
  Description of Artificial Sequence: Synthetic oligonucleotide
aaucccuaccaauuucuuc

SEQ ID NO: 2224313 - RNA, 19 nt, Artificial Sequence
  Description of Artificial Sequence: Synthetic oligonucleotide
gaaaauacucguuccacac

SEQ ID NO: 2224314 - RNA, 19 nt, Artificial Sequence
  Description of Artificial Sequence: Synthetic oligonucleotide
uuuugcagacccaacaagu

SEQ ID NO: 2224315 - RNA, 19 nt, Artificial Sequence
  Description of Artificial Sequence: Synthetic oligonucleotide
uccuauagaaucccuacca

SEQ ID NO: 2224316 - RNA, 19 nt, Artificial Sequence
  Description of Artificial Sequence: Synthetic oligonucleotide
ugaagugcccggaugaggc

SEQ ID NO: 2224317 - RNA, 19 nt, Artificial Sequence
  Description of Artificial Sequence: Synthetic oligonucleotide
auuuugacgcuucugccuc

SEQ ID NO: 2224318 - RNA, 19 nt, Artificial Sequence
  Description of Artificial Sequence: Synthetic oligonucleotide
ucauaggugaccucggaug

SEQ ID NO: 2224319 - RNA, 19 nt, Artificial Sequence
  Description of Artificial Sequence: Synthetic oligonucleotide
ugugucauacuccuccugc

SEQ ID NO: 2224320 - RNA, 19 nt, Artificial Sequence
  Description of Artificial Sequence: Synthetic oligonucleotide
uucaaucacagcauccgcc

SEQ ID NO: 2224321 - RNA, 19 nt, Artificial Sequence
  Description of Artificial Sequence: Synthetic oligonucleotide
cagggucugauuuugacgc

SEQ ID NO: 2224322 - RNA, 19 nt, Artificial Sequence
  Description of Artificial Sequence: Synthetic oligonucleotide
gaugcuguauaacacugug

SEQ ID NO: 2224323 - RNA, 19 nt, Artificial Sequence
  Description of Artificial Sequence: Synthetic oligonucleotide
aacgaugcuguauaacacu

SEQ ID NO: 2224324 - RNA, 19 nt, Artificial Sequence
  Description of Artificial Sequence: Synthetic oligonucleotide
gauaggcuaauucuuuggc

SEQ ID NO: 2224325 - RNA, 19 nt, Artificial Sequence
  Description of Artificial Sequence: Synthetic oligonucleotide
ucagggucugauuuugacg

SEQ ID NO: 2224326 - RNA, 19 nt, Artificial Sequence
  Description of Artificial Sequence: Synthetic oligonucleotide
uguacgaucuccucugggc

SEQ ID NO: 2224327 - RNA, 19 nt, Artificial Sequence
  Description of Artificial Sequence: Synthetic oligonucleotide
aguguguucagacaccuga

SEQ ID NO: 2224328 - RNA, 19 nt, Artificial Sequence
  Description of Artificial Sequence: Synthetic oligonucleotide
ucugccagagggaaguugc

SEQ ID NO: 2224329 - RNA, 19 nt, Artificial Sequence
  Description of Artificial Sequence: Synthetic oligonucleotide
uuccgcacggaguacagcg

SEQ ID NO: 2224330 - RNA, 19 nt, Artificial Sequence
  Description of Artificial Sequence: Synthetic oligonucleotide
uuuccuauagaaucccuac

SEQ ID NO: 2224331 - RNA, 19 nt, Artificial Sequence
  Description of Artificial Sequence: Synthetic oligonucleotide
ucugucacagcuuuucgga

SEQ ID NO: 2224332 - RNA, 19 nt, Artificial Sequence
  Description of Artificial Sequence: Synthetic oligonucleotide
uccagcuuaacugagugug

SEQ ID NO: 2224333 - RNA, 19 nt, Artificial Sequence
  Description of Artificial Sequence: Synthetic oligonucleotide
uccuuauccauuuucaguu

SEQ ID NO: 2224334 - RNA, 19 nt, Artificial Sequence
  Description of Artificial Sequence: Synthetic oligonucleotide
uguuauuccuacaguggcc

SEQ ID NO: 2224335 - RNA, 19 nt, Artificial Sequence
  Description of Artificial Sequence: Synthetic oligonucleotide
aaaucugccagagggaagu

SEQ ID NO: 2224336 - RNA, 19 nt, Artificial Sequence
  Description of Artificial Sequence: Synthetic oligonucleotide
aagucugucacagcuuuuc

SEQ ID NO: 2224337 - RNA, 19 nt, Artificial Sequence
  Description of Artificial Sequence: Synthetic oligonucleotide
gauccagcuuaacugagug

SEQ ID NO: 2224338 - RNA, 19 nt, Artificial Sequence
  Description of Artificial Sequence: Synthetic oligonucleotide
cuguuauuccuacaguggc
